United States Patent Application Publication US 2011/0214205 A1 - sequence listing, part 16

SEQ ID NO: 65032 - DNA, 179 bp, Setaria italica
  Peptide Sequence Number=SeqID_131006
gcggttgttgttggcgaagatcgcgtcgaggctgagcttcccgccgaacacggagtcggggaggtcgccgtcgaatttgttgaagcggaggtcgaggtacttgagcgacgtcagcaacaacctcctctccggcgcgttcccgtcgttcctcacgtcgctgccgtcgctcaagtacctcg

SEQ ID NO: 65033 - DNA, 221 bp, Setaria italica
  Peptide Sequence Number=SeqID_131007
cctatcccctgtgtgccttgcctatcctctgttgcgtgtctcagtacatgtaggtgcccgggcggtcgacgacgaaggtgtaggtgaagacgtcgccggggaggatggggcactgcgtcacgccctccgtgccgtcggcccagggggtgccgatctgccggatgccgtgccagtggatcgccacgttctccgtgagcagcgagttcttgacccggacgacg

SEQ ID NO: 65034 - DNA, 229 bp, Setaria italica
  Peptide Sequence Number=SeqID_131008
ggaaacagaggagggagacgagtgtgaggaagaggacacgacagaagaacgggatgaggagactgaggagagggcaaagcaggacaactttgctcgctacaacagctacaccttggtggagttggccgtgccactgattgaggcgggtgagctgtggaaggtgctggacaggcgcccggcagtgaagccaacgccgagacagctggaggcggcggaactgggtggcgca

SEQ ID NO: 65035 - DNA, 425 bp, Setaria italica
  Peptide Sequence Number=SeqID_131009
tcagtcgcactagtattacaggagttttggtctataatggatgagattgataaggtcctttgggttgttgatccaacaaagtcggcgtatgctatgtcccatcgccgtttagctttaggtgatgattgctatattttactacatgttgatccacgcaagcccagttccttaccagagtgtcgcttcttgggtgcagatgaaaacttgaccagctcataatgaattggagaaaaaatcgcagaagatgggataaaaagaagaaatttcatgaaaatttagcatgcgtcttggactttgcactgcctgcaccaccttcagtcaataacgtcaaagaggacgagaaagctgattgcgggatatgctacgccaagcatctgccagtcgatgacgagcttggggcacacagcgggtgcgcgaccaactac

SEQ ID NO: 65036 - DNA, 407 bp, Setaria italica
  Peptide Sequence Number=SeqID_131010
tgctatgtcccatcgccgtttagctttaggtgtcgcttcttgggtgcagatgaaaaacttgaccagctcataatgaattggagaaaaaatcgcagaagatgggataaaaagaagaaatttcatgaaaatttagcatagcgtcttggactttgcactgcctgcaccaccttcagtcaataacgtcaaagaggacgagaaagctgattgcgggatatgctacgccaagcatctgccagtcgatgacgagcttggggcacacagcgggtgcgcgaccaactacacgtgcgagaaccccagctgcagccgggcattccattcggtctgcctgagagattggctgcgctccatccaccacgaccagacagtccttcgatgtcctgttcgggaactgccctactgctagcgat

SEQ ID NO: 65037 - DNA, 351 bp, Setaria italica
  Peptide Sequence Number=SeqID_131011
gttacatatggaacagacagttaaagattttagaacatcaattggcaatatacgttacaaaaggaaagcacaagacaaacaaacaataaattagaaacattttgatgactatagtatataagttaaccatgcatatccatctatgttaagatcgtccatcattcagaaaacttatccatgattttttttatgaacagaattgtcataaattccggtaccataaagcaagtgtcagcacagaagtgtcacctgattttccgcatctcttcaaataaatcaactgagtatgctcgctcctcatcagcaaaatggactataccatctaaacgatgcttctttatatgaaaaatt

SEQ ID NO: 65038 - DNA, 403 bp, Setaria italica
  Peptide Sequence Number=SeqID_131012
aagaaagaatgagcacagaaaagaatgcagcgcagcgggggagaaagaatttttccttttgtcaggtaggcttctttgctttcaactgttgtaactagtatcacattattcgaaccagggtcttggcagagcagcttcgcatgatcctggacgctaccaagttcaggaaggcatcatcaccattccacactaggaggcgcaaacaaaaagggcagcagcaatgtggttaggttataggcacgacgacgtctaggtgcttcttcagcagccagccagtagggtagttgagctggggaggttccaagtcgaaattccagaccatgacccgactgtcagtttgttccgtcgtaggtcctttcctattttgtagttctttcgtttcctttcttaacgttagttcttt

SEQ ID NO: 65039 - DNA, 381 bp, Setaria italica
  Peptide Sequence Number=SeqID_131013
tacagagagaattgaagcatttgaagcaattctggtcaacatgtgttggcaaaccatgtagatcaaatgtcaattaatgatatcgagcagacagttaataaagagtcagctgcaccttacaccagacgtcaagtagaattcatcttggagaggatgcaagatgcaaaccggataatgatacgagatggcatagttcggatcatataaccaccaagattgtttaacagtgaacccgcagatcaagctgtgtcattgtgacctagttgtgtaaaacttatccagattgtctggatccaggcatccagctgatgctctgcaatctagtaaaccaagactaacttagttagaaagttaattttagttttactttaaattagttta

SEQ ID NO: 65040 - DNA, 226 bp, Setaria italica
  Peptide Sequence Number=SeqID_131014
taaagtaacaaatagtagaaactttatgattatagtgaaaaacaacctaccacaggttcaatagatacaccaacttcactcagctcaattataattcgatcactgaagcacatctcactgtactgaaactcaggccacaccttggctttatccatgacattaccgcctttatgtgacagctcatcattatatttccaatcagaatccatcatcagaccatttggcc

SEQ ID NO: 65041 - DNA, 354 bp, Setaria italica
  Peptide Sequence Number=SeqID_131015
atgaagcgtcaagctgctctctctgtgcccaaagcacatcgatctgttgcccatttttgaattccagaaagagaaaatgtttgttttccttcttcatttcctctgacttgagcaaagaaagtgggcttggcaccagctaaaagctaatcctgggtaagctcattgatgcgccagtgttaacagatggaacatctccattacctagagaagagtagagtgcataaagaaaaggaagcttcttctgcactgtactcttcagcttcctctgcactgtactcttctctaggtaatggagatgttccatctgttaacacttgagcaaagaaagtgggcttggcaccagctaaaagctat

SEQ ID NO: 65042 - DNA, 465 bp, Setaria italica
  Peptide Sequence Number=SeqID_131016
aagagatttgccacaacttttattagaagaaagaataaaacaaacaacaacagacaacaaaaacggcatcatgtttcttgttgtaaactgtttcttgcctgtaatgccaggacggatgctgtgggttgatgaagacctttgagaagttcaatccaagcaaggggtgtagattcccgacctacgcatattggtggatacgccaatcaattaaaaagtccatattcaagaactcaaggctaatccgattgccggtatgtatgattgcagatttctgttggtgcaaactttgtttgctgtgcggctgtatgaataattcgttgcaggagagtgtgtttgcgcttttgaggaaagttgggaaagcaaggctggagtgcataatggaaggggaacagcccacaaatgagaacgtggcaaggcgtgctggcatcacaattgagaagctggcgaggctgagagcaaagacca

SEQ ID NO: 65043 - DNA, 264 bp, Setaria italica
  Peptide Sequence Number=SeqID_131017
acaacttttattagaagaaagaataaaacaaacaaacaacagacaacaaaaaacggacatcatgtttcttgttgtaaactgtttcttgcctgtaatgccaggacggatgctgtgggttgatgaagacctttgagaagttcaatccaagcaaggggtgtagattcccgacctacgcatattggtggatacgccaatcaattaaaaagtccatattcaagaactcaaggctaatccgattgccggagagtgtgtttgcgcttttga

SEQ ID NO: 65044 - DNA, 247 bp, Setaria italica
  Peptide Sequence Number=SeqID_131018
ctactataatccgacaggttgtttcaacaatcatggcgatcatgggcatttagtttagatggttatttcttttctgtaatgatccttccttaaattctacgtatctacaggaaggtattggagctttgtggactggccttggtccaaatgttgcacgcaatgccataattaatgctgctgagttggccagctacgacgaattcaaacaggtacatgttgactctcttctgtcttgtgatgggcattg

SEQ ID NO: 65045 - DNA, 341 bp, Setaria italica
  Peptide Sequence Number=SeqID_131019
acttgtcccgcataacccctattgctggcgtcaacattacagaaacaatcttctaacctgctctagagttaggaacattatcacattccacgacccaatccgacaaaagtttgcgatgaaccccttgtagaaagcaccaggtccctgcagcaaagaacaatcagttgtgaaaatgctcgattggtgatcattttgctgcaaaacatctatatgatgcaacatattctaaattagcagatagaaaaaaaccactccacaacgacaatgcatctgcacatccaaaactagatcagcgagcttccacagtgggggtctcccctgcttgttattagttttctaaa

SEQ ID NO: 65046 - DNA, 250 bp, Setaria italica
  Peptide Sequence Number=SeqID_131020
agctttttccttaaatcatcattaaaccatgtatatatataatgctggccatgtatgtcatcatccacttgtcccgcataacccctattgctggcgtcaacattacagaaacaatcttctaacctgcactctggaagggaatcatccctggccttcaccgacagttcctctatggtggcctccgcgtcggcttgtatgagcctgtcaaagctttcttcggtcggggtactgctgtgggtgatgtcttaag

SEQ ID NO: 65047 - DNA, 262 bp, Setaria italica
  Peptide Sequence Number=SeqID_131021
gggggaattcgcgaggcgcgcgtgctaggaaaagtgggggttgcttagcaagggggcaggaggtagaggaaacggggcggcggaggagaccaggatcgtgcccaagaagtgctactacttcctcgtcttcgttctcggattcgtcgcgctcttctccttcttcgcgctcgtgctctggggggcaagcagatcccagaagccgcagatcgtcatgaagagcatcaagttcgagaacttcatcatccaggccggcaccgacgcg

SEQ ID NO: 65048 - DNA, 343 bp, Setaria italica
  Peptide Sequence Number=SeqID_131022
aacaaaggaacggaacgaagacaagacaagacagcgtaggacgaccggtagcccaatggtgctccggacgacgctgcactcgcgggcctacgtgctgggcgcgctggtgaagcccaagttcaccatggccgtggagtgcagggtggtcatgaaccccagcaagctcaacaagatcatctccctggagaaggcctgccactactcctaaaaaatttcttcttaattatcctatctttcttctgaatatatacacactactgtatttatattatctccattcatcatcatcatcagctgaaacagatcttcttcttcttcttcttcttctaatgtaatattattc

SEQ ID NO: 65049 - DNA, 229 bp, Setaria italica
  misc_feature (79)..(79): n is a, c, g, or t
  Peptide Sequence Number=SeqID_131023
ggtccgtgccgtcgcggctgcggatgcggaggatcatcgcggcggcggcgagttgctgctctcgcttagcttcggcgangggttttgctgggattcaagggcgcgccgccgggcaagggatggcaggagatcggggtcatcgaggaggaggggctcctggacgacgaggagcacaccaggatcgtgcccaagaagtgctactacttcctcgtcttcgttctcggattcg

SEQ ID NO: 65050 - DNA, 468 bp, Setaria italica
  Peptide Sequence Number=SeqID_131024
aagaaagacctactaccagatatcccataaatacaagcatacaagggatatgcatataaagacttctctggagccaatacaaatgggcagcggtacaatctttacatggagcagcagctttcttcgggtataatccactatcccagtccatcatggtggtgaatgacaatgctgaaatactcatgacctctttggcattgatgagcaaaggcgagaatacagcgaagtattccgcacgataagatagacgatgaatgcaaggtaaacaaccagcacaacacacaagcttgagcgaagcactgcaccccggacatcagtaatgtagaatgaaacgataagatatccattgataagcattagaaagaccgtaacaatccagctaatcacctgagagcacaaaaggtgttattctctgatggcatgaggctcctttacacaattagtaacaccgcccagcctaattgctat

SEQ ID NO: 65051 - DNA, 116 bp, Setaria italica
  Peptide Sequence Number=SeqID_131025
gtgtccttctttattaatatctgtgtcacaacgagtgcaagaattgactcaatgttgtagtagtacactgcttcttgaacacgggatttcttgtttgtgtcaatcttcctggactg

SEQ ID NO: 65052 - DNA, 291 bp, Setaria italica
  Peptide Sequence Number=SeqID_131026
ttcgttcttacttccttaagttaattgttctacttgtcgtcgtagtattgggttctaggttacggtcttccgtctattgttgtaacttgttgcttcagtgtaggagcaaggctctggagctctgaattgaacgccgcttggaatttcaggattgactctgacatgacaacattctcggatgctagtttcagctgctggtctctgtcctgcgatttgtttgtccttgatcttgacttcccagatttcgatgtattctcggagttagcaacttcgatggatggcattaagagc

SEQ ID NO: 65053 - DNA, 290 bp, Setaria italica
  Peptide Sequence Number=SeqID_131027
ttaagagctggatggaagtggcatactgaaggcataaagctttcagcttctcaactttcacaaggagctctggcgacaacagtaagcatcttttagacacttctggaggaagaaatcatggatctggatgacctcatctatgctcaagtttgtaaatagccttctgcattatctaacatttgaggttcttgaaccaaattggcatttgatgcatgatcgccttcaaactgcaaggagcatagatgaggtcatccagatccatgcagtttgatgcatgatcgccttcaaac

SEQ ID NO: 65054 - DNA, 250 bp, Setaria italica
  Peptide Sequence Number=SeqID_131028
ccctcatacacccacctttctagcatcctgaggtatgctgcacttgtatattctgtcatcttctccaataaagaccgaacagcactatcgccacccatcgcctttgcctggctttgaagtagattaagtgttgcagaaccactggtattgttggaagtagccttctccactagaactgacaaaagaaccataatccctgaacagaaagccttccaatgcggaaactggtgctccagttgagcaaccatcg

SEQ ID NO: 65055 - DNA, 271 bp, Setaria italica
  Peptide Sequence Number=SeqID_131029
cacaacatcccgataacatgtttataattctgcaaaagttcctaaaattcgagataatggatcaatatgtagcttttagcagaattataaacatgttatcgggatgttgtgtcgacactaaccattctcgcctttcttggtatgggtgtccacttcagctgttactgacgagctgccaccagtcttgccactgccctcttcaatctctttgcaaaaagcttagcgatctgcaagtgcgtttttgccatgatttctgttctcttgagcttcc

SEQ ID NO: 65056 - DNA, 450 bp, Setaria italica
  Peptide Sequence Number=SeqID_131030
aagaccagccagtaccagtagattttatgattgctgaagaaactacggtcttggtcataactggcccaaatacagggggtaaaacaatcagcttgaagacagttggcctggcatcattgatggctaagatagattttctcattgcagattattcctaatgtttcgtgatttcggtatgattgatgtagtcaccaactgcacattttcttgcagaggataccaaagatattaagtctatacattctagcttctgagccagtaaaaattccatggttcaatgctgtttatgccgacattggagatgagccaatctttaacccagtcactgtctacattttctgggcatctgaagcagattggtgccattcgcgcagagtcaacttcagagtccttggtccttctggatgaggtaggtgctgggacaaacccactcgaaggagcagctttggg

SEQ ID NO: 65057 - DNA, 249 bp, Setaria italica
  misc_feature (235)..(235): n is a, c, g, or t
  Peptide Sequence Number=SeqID_131031
cattttgtttgcaggtctatacattctagcttctgagccagtaaaaattccatggttcaatgctgtttatgccgacattggagatgagcaatctttaacccagtcactgtctacattttctgggcatctgaagcagattggtgtatgttttagcattacattttctaatttctagaccctaacttccttaaatgattgcattactgaatgtacgtatcatgacaaaaaaaggttntgctttatttctat

SEQ ID NO: 65058 - DNA, 295 bp, Setaria italica
  Peptide Sequence Number=SeqID_131032
cacgagagggatgttggaagtataaatcgtttgagctttcaagttaaccgaatggcttttcttcaagcgtgtggagttgaatatgctcaaactaaactgtacaaaggtaatttgtttcttccccttctatctgcttaccttgcaacttaggcggaatgtagaattctcctccaattgcagaaacttctgctaataaagcttcacattcagcacgaaggtcacgaagtgtagccttggtactatcaattctctcttgatttaaccatacggttaacaggttatcatatttatcctg

SEQ ID NO: 65059 - DNA, 267 bp, Setaria italica
  Peptide Sequence Number=SeqID_131033
tagcagcagccctacttgtggtcttcgatgatgaatagacagtactggtgattcggataagctcattaatcagaattttaaaggagggatcaattaacacactaacaaaagaactttaaacttagttgtcccaaaaagaacatacctgtttaaaaaatccatggactaaggcaacagtccaactggtattcttgagatgattccgaattgctcgtgtcagaaattcattccatacaaacattgtttcataaacacctgtccagtatt

SEQ ID NO: 65060 - DNA, 295 bp, Setaria italica
  Peptide Sequence Number=SeqID_131034
tcgagagggatgttggaagtataaatcgtttgagctttcaagttaaccgaatggcttttcttcaagcgtgtggagttgaatatgctcaaactaaactgtacaaaggaaacatttttgtaaagagcaatgttctttacaaaggaaacatttttgtaaagagcaatgttcttttagcggtaaggtgacgtgcagcgacccaccccacccaccccttcaagacgcctaggcgaataaggcacgcgacgaggcgctacaatagggtagcaaaaaaggtatgtatcagtgtatgtttgtg

SEQ ID NO: 65061 - DNA, 154 bp, Setaria italica
  misc_feature (6)..(6): n is a, c, g, or t
  Peptide Sequence Number=SeqID_131035
cctggngtgccttgcaggcactgtgccatagttcatactggagcatgggttaggttcacatatggagatatctggtgcagaatcagatggtaatattttgttggagaacagcctacctgtatctaaactgcaaataagtaggaagaaaaacaaa

SEQ ID NO: 65062 - DNA, 238 bp, Setaria italica
  Peptide Sequence Number=SeqID_131036
ttcattgactcaacatactgatgaagattttccaccttagaagcaacataaatgaagtagtcatatgggtaatgggaatgatccgtttctggaggcaaacagaagagaagcagctaaacaagaagcagctgccaaaagggtccatccaactttgcatttgcctgctcctgcacagcccacaacacaaattgctgcaccagcagcaagccaaccacagcaatcttttttccatctggcg

SEQ ID NO: 65063 - DNA, 196 bp, Setaria italica
  Peptide Sequence Number=SeqID_131037
tttaacagcatcttcgatgtaaccaggcaagggacccacattctcaccggtcaggccacatagatcatcaagagccattcttagggtaactaaggttccgccaaattcttcacaagcctcagcagcacaaaatacatttttcaaagcctcttgacacagtacatagggcaaagcaagtgctgctatcggttgacat

SEQ ID NO: 65064 - DNA, 206 bp, Setaria italica
  Peptide Sequence Number=SeqID_131038
aagaggctttgaaaaatgtattttgaccagccttatcatcagtagctttagatactgcctttctttgcttcttctacaagagaaactggaagttcattccaagtttctcttgaccagccttatcatcagtagctttagatactgctttctttgcttcttctacaagagaaactggaagttcattccaactagcggccaacaaatcc

SEQ ID NO: 65065 - DNA, 235 bp, Setaria italica
  Peptide Sequence Number=SeqID_131039
aggcctcgtcggggctggcgtaccggtagagttccctgatggtgccgccatgtgagaccacgataactcgctcacctttgtgtttctcaacaatgttatgcaagcatgacacacatcgttccgacagttgatcaagactctctccaccaccaggaatttgttggtttctcttgtgggacataaaagctttgtaagcctctggcctctctgtagctagtctattctttgtaaactt

SEQ ID NO: 65066 - DNA, 240 bp, Setaria italica
  Peptide Sequence Number=SeqID_131040
ttgttatttctgtatacaactttagctttgcgtgagaacatactgcgagttaatggaagtgatatccgtccttggtaaggaccactgaagccctagcatttaagcttatctgaagaaactatggatgttgtagcatgtggatactccatcactattgtgccatgctgatggctcttgtaagtctgacatgggagataaagggacaatcacaacctgattgtccacgtaaacagagaggcg

SEQ ID NO: 65067 - DNA, 227 bp, Setaria italica
  Peptide Sequence Number=SeqID_131041
tgacatcctgaacaaagtgatgctggcgtccttcgctatcaatgcccacaccaccattttgttgctcactatccaggctggtggccatcctctgctccggcagcaagaggttacaggagtgacggaggcatcacataacaggtattcaactaactatgccaggtcagatatatacggtgccattctgtccatcttgtttatggcactataatctgatgagatacaag

SEQ ID NO: 65068 - DNA, 225 bp, Setaria italica
  Peptide Sequence Number=SeqID_131042
ggatgacatcctgaacaaagtgatgctggcgtccttcgctatcaatgcccacaccaccatttgtttgctcactatccaggctggtggccatcctctgctccggcagcaagaggttacaggagtgacggaggcatcacataacagagtttttgatggacatggcacatctgaattgaatggtgggaggaacaacgtactagcaggaagcagagtgcccttattacc

SEQ ID NO: 65069 - DNA, 381 bp, Setaria italica
  Peptide Sequence Number=SeqID_131043
ttcttattctattattggtctattctaaattattgtactactttcgttagtatttacgttctacttcctacagtctcacttgccacagtctattcggtggttatttgaagccgcatggattttggcgctttcatacttcatagcttacttggagacactagccattgcaaatttcccgtattatgaattcattgatcgggatataatgtacaaagttggttcattgttctacgcaatatacttcatcgtcagcttcccgatgttttcaaggattgatgagaaagatgagaagtggaacctgtccagggtagctgttgactctctgggtgcagcgatgctcgttacgataatactcgacctgtggcgcatatttttgggccc

SEQ ID NO: 65070 - DNA, 467 bp, Setaria italica
  Peptide Sequence Number=SeqID_131044
ggcgacagaggaggggaggaggcgatgcacggccggccgcggcgcccggcgaagccggaggacgagaaggcggcgtcagcgaaagccgccaagctccgggacctccaggcccaggtcctgcagaaccaccactcccgcacgtacaccaaggaggcgattggtttgagcttcaagctgctcgagataaatccagaggcctacactgcatggaactaccgtaagcttgcgttccagcacaacatcaaggagctttctgacccagaggccatcaggtctgctgttgacgatgagctcagggtggtcgaggttgctctgaggcagaacccaaagtcctatggggcttggtatcaccggaagtggttgctaaaccaaaagctagccccaagtggaattaccaaagacgtagaaattacggacctacttaaaataaaactaattaaaaggtaagaatagaccaaggaaattta

SEQ ID NO: 65071 - DNA, 347 bp, Setaria italica
  Peptide Sequence Number=SeqID_131045
ttctatttgttaaattcttgtaaagtattattgttggttcctaactagtttagtaattaccctagtaattgttagcagttcgctagcaatattccgttgaagtgagcataccctcctcagatggcattgtgtctagaagtggctctaactacaattgtcctgtgcattttacatttactattgaattgataagcgacgatgcccagggtatagatctgtttgataagccagttgcctggaattgttcagaatcattagagtctcatggaaactgcaaagctatcccttttgatccgctaaagatcactagtgccttggttgaggattcaaatttggcattttgaaag

SEQ ID NO: 65072 - DNA, 247 bp, Setaria italica
  Peptide Sequence Number=SeqID_131046
aacagctgactatctgtattagtgccagacagatgcttgtaaaaaacattaacaaggtattccagtaatcctggacctctaccagctgatttgcttagggaacaaaggcacctgtccaaaaaagagggcaagagagagaaataaacaagaatatttcaggacaagtctggcaagatgatcagaacaaaactctgtgggttcatcgatcaatgctttaattgactgctgcagctaaaactgcatctag

SEQ ID NO: 65073 - DNA, 238 bp, Setaria italica
  Peptide Sequence Number=SeqID_131047
ttttttttacttttaaagttaaattaagaaactccaatacaattggataataccaccacatatgttggtgtctccagcaccagcagcaacaggaacttcacttccaccatttattgcagactgtacaggaggcttccccagtaactactacaagcagtaaagttggctttcggcatctcggagatactcatagaggttttgaagtccttgaatctttaaccatgatcaactgcagaag

SEQ ID NO: 65074 - DNA, 267 bp, Setaria italica
  Peptide Sequence Number=SeqID_131048
aattggattttgatttcacgtttgctgcgagtttatggttgctgactgtggtctcgaagaatataaatgacatttgtaggccatcacctaagcggctttcaaaaaatgaaggatacctgccacaattccaactgatcagaatgttttattccacggaaaaaacacaaaaacacgagaagttggaccagacatacttttctattcatattcattagtagatgatgagccaactttgagttccccctccaagtgggtccatttcaagtg

SEQ ID NO: 65075 - DNA, 352 bp, Setaria italica
  Peptide Sequence Number=SeqID_131049
acctagaacttagaacaaaaagtaacaggtgaaactaacagtggcaatttactatttctgatggcatcgtcgcacagagagcagaactgaagagcagtggctggaaaaaggaaaagaggtagtggaacctggatttttgcatgaggtcccacaggagctccccagtgctcatgttgaatgcagaaggataacatatcagatgcgcgcctcttgatctgtacagcatcgctagttctgggaaccgaatgtcatgacatatccctatgccaatccgtccgacatctgtgtcaactactgtaggttcctgtccacctgtgaatgtatcagactccttgagcctgatgtctcctgg

SEQ ID NO: 65076 - DNA, 456 bp, Setaria italica
  Peptide Sequence Number=SeqID_131050
caaccgcaagcgagcggcgcgcggcggacgaggccgccaaccaggcgagcagcatcgtgcacacgctcaacgtgttctcctccgtcgcccacatctccggcatggggctcaaggccgtcccggcgattgccgcgttctccaccctccgggcagtcaatctgtctggcaacttgattgttcaagtcgcccccggatcgttgcccaaaggcctgcactcgctcgatctgtcgaggaacaagatcgccaccatcgaggggctacgggagctgacgaagctgcgcgtgctcaacctcagctacaaccggatctcacggatcgggcatggcttgtcgggctgcacggcgatcagggagctgtacctggccgggaacaagatcagcgacgtggaggggctgcaccgcctgctgaagctggccgtcctggacgtgggcttcaaccggatcaccaccgccaagt

SEQ ID NO: 65077 - DNA, 441 bp, Setaria italica
  Peptide Sequence Number=SeqID_131051
acgacgcggcggacgaggccgccaaccaggcgagcagcatcgtgcacacgctcaacgtgttctcctccgtcgcccacatctccggcatggggctcaaggccgtcccggcgattgccgcgttctccaccctccgggcagtcaatctgtctggcaacttgattggtactgactcccaaaattctactcgcgttcatgatgtctttggactgtgacgaactgaagtcagtttcattttgttacatggctgatttagagttgttcttggttctcgcagttcaagtcgcccccggatcgttgcccaaaggcctgcactcgctcgatctgtcgaggaacaagatcgccaccatcgaggggctacgggagctgacgaagctgcgcgtgctcaacctcagctacaaccggatctcacggatcgggcatggcttgtcgggctgcacggcg

SEQ ID NO: 65078 - DNA, 275 bp, Setaria italica
  misc_feature (273)..(273): n is a, c, g, or t
  Peptide Sequence Number=SeqID_131052
tccaggtttagatgagctagcttgtgtagactctcagataagaaacaccaaaatcagagattttgcaggaagacagttgtagctctctcaaatttgtgagatctgacaaatatttcatatctgaatccgtgatgcaattacagtatctcatattcagtttttccagttttttcaagacctttacaaagtagaacaaacaaaagaacccaaaccaaataaagaaaaataaactttaaagggaaaacaaaataaacgaaactaaacaaaagtaanaa

SEQ ID NO: 65079 - DNA, 523 bp, Setaria italica
  misc_feature (411)..(523): n is a, c, g, or t
  Peptide Sequence Number=SeqID_131053
ctgaaaaatacagtggtttgtttcagaaactcgtgcaacgtaaagttgacgtgatacggctattatgtgtacccattaccatcatagatgtggtatgggaaaacaagtaatccagagtcacagcttcgtttgtgtgttttaattaggggtggtagcctagcaaatttaaggatcgggctcactaaaggccgggcaaaatactatatgattttgagctaaaaatagatagggctgagttagattgtgaagaatacacgagagccatgatccattaccacccttgtaatgcagcttgtgtggacattgagtgacaagtgtaacgtagagtttgtacacctagttccatatatatatgctgtaccggtatcatcaagatatcattggggcttgccatatatataggcataactnnnnnnnnnnnnnnnnnnnnnnnnnnnnnnnnnnnnnnnnnnnnnnnnnnnnnnnnnnnnnnnnnnnnnnnnnnnnnnnnnnnnnnnnnnnnnnnnnnnnnnnnnnnnnnnnn

SEQ ID NO: 65080 - DNA, 429 bp, Setaria italica
  Peptide Sequence Number=SeqID_131054
acaccaatttgctgtgaagatgtccctaagcttctgatctcctctgaatcctgttgctagaatcacaatatcactttttatgctttccttcttgtcttgcaggattattccatcattagagaagttgaatgccttggatttcttgagaataatgctgccatcgtcaaccctgtcatagaacccttctggcagcattgcaattgagcacgaggacatagcaaaggagaagctgtagtcaggattctgcagcttattgtctgaatgtgtcttcatttgaaaatatattcttacttaccaagggagatagtgcagtagccaacatataacgtagaaatccttcaccaggtttgtgaagtagcagctgtgagatgcgatttagatagaagtaactgaggtcaactcccatatgctagacttgtggaccagcca

SEQ ID NO: 65081 - DNA, 495 bp, Setaria italica
  Peptide Sequence Number=SeqID_131055
ctctcaagggttgggatactccaaatattctcagggaagtctcctatgaggcgattctcgtacaaaagagctttgacaatttccgtaaatgtgccaattctttaggaacagtgccctccagctggtttgcatccaactctagccactccagcaaatgacagttaccgatctcaggagggattggtccagacagggagttctgagaaagtaaagatgtgtgaggttgctcaataagccgagagaagtttgaattttgccagacaggctattattgacaagtccaagttgtgtcaagctcctgcaactccccagccatgatggaatttcaccctttatattattgaatgacaagaggaatatttccaacttgcagttctcgaaactgaaagtgatctctcctgtgaagctattggttgtggcatcaaatatcctgaggcctttgatcttgctcaaggtttctggaagactgccactcagtcgattatcaaatagata

SEQ ID NO: 65082 - DNA, 377 bp, Setaria italica
  Peptide Sequence Number=SeqID_131056
tggtttgcatccaactctagccactccagcaaatgacagttaccgatctcaggagggattggtccagacagggagttctgagaaagtaaaagatgtgtgaggttgctcaataagccgagagaagttttgaattttgccagacaggctattattgacaagtccaagttgtgtcaagctcctgcaactccccagccatgatggaatttcaccctttatattattgaatgacaagaggaatatttccaacttgcagttctcgaaactgaaagtgatctctcctgtgaagctattggttgtggcatcaaatatcctgaggtcctctatctatttgataatcgactgagtggcagtcttccagaaacctttgtagtctaagt

SEQ ID NO: 65083 - DNA, 231 bp, Setaria italica
  Peptide Sequence Number=SeqID_131057
ggatctcaaggggaacacagcctaccagagagctatcccatctgctctgaccatgaggagtgcattgcccgtcccgagaggatcaagatccagaaaggcttcgtggccaaggagtctgtgaaggggcacatggcgagttccatctcatcactcggcaatctttctgtacagaaggactaggagatgctgtaggaagtagtagcacttctgttcatattaagttaatttctt

SEQ ID NO: 65084 - DNA, 405 bp, Setaria italica
  Peptide Sequence Number=SeqID_131058
caattagtgaacttcatattcttcaaccaagcagatcaaggaacaaaaggagatcattcagctaggtgtcccattatttcaacctaccaccgaggaagctaattgttatgttccgttacctcgttttcttctacttgcttagtctgacaagaatatgcttctgtgcgtagcatattttcacatctgcagacaataaaacgctcttgttaatgatgtcacaactgtccttttttctccttgtccacaggtcacatagaaccaatccccctcgtcctgcaggctgtcattgaccaccttgttctttggcgtttaataccagaaagcaggaaaccaaacagtgtcatcatcaatttcttcgatgaggatgaacactctcagccctacttcaagcctcctcatctggac

SEQ ID NO: 65085 - DNA, 220 bp, Setaria italica
  Peptide Sequence Number=SeqID_131059
aaaccttaacaaataattacttacaaacaaagacaagaatacaaaggaaacaaaaagggagatcattcagctaggtgtcccattatttcaacctaccaccgaggaagctaattgtcacatagaaccaatccccctcgtcctgcaggctgtcattgaccaccttgttctttggcgtttaataccagaaagcaggaaaccaacagtgtcatcatacaatttc

SEQ ID NO: 65086 - DNA, 271 bp, Setaria italica
  Peptide Sequence Number=SeqID_131060
ggcaggtgttgcctgccatagctctgacttgtaccaattacagtgtcacatttgcaatgtttttactctctacgtcagccatgcttccgaaagtgattgtgaagggcattccaactgttgaaagagttgttattgacgaaagaaaaaaagaaggaaaactagaaaaatacaacttgttggttgaaggaacaaacctcctggccgttatgggtacccctggagttgatgctaggaatacaaaaagtaatcacatcatggaaatgaacgagca

SEQ ID NO: 65087 - DNA, 182 bp, Setaria italica
  Peptide Sequence Number=SeqID_131061
gccgcgttgccaacattaacagagcggattacctgaggtctcagaaacttgccatgaaaatattgacctatagttagaatccatccaagactgcaaaaatgtaatatcaggtttcgggatttaccatcacaaaatctctaagctcagtgaaacttgagtgctcgctataaggcacacaggga

SEQ ID NO: 65088 - DNA, 245 bp, Setaria italica
  Peptide Sequence Number=SeqID_131062
tgagcttgctgctttggtggatgcgcgcgcgtgcagtgcacccggaggcacatccagagccggatgcgggagcggttggaggccctgacggaggtgatccacgacgccaggctacgagggaacgacgacaagaggaaatcacaaggtatattgcattgcattgcatttctttcttgctgctgctgctgatgatgatcaggaagatgaggtaacttggaactgacttttttcccccgaaaattccg

SEQ ID NO: 65089 - DNA, 268 bp, Setaria italica
  Peptide Sequence Number=SeqID_131063
tatatatatatatatatatatatatatatatatatatatatatatatatatatatattataataagcattaagggaaaagaatactgatctcatgctaacaagagatctagcatattattaactcgatcgtttatgcagctggaatgtgctacagtgttagtaatcccagagtgcaggcgttattgaaagatcaaagtacattgatcatgtttttgtatataataatctactcatttacatacggatcattagtccttgtacccttct

SEQ ID NO: 65090 - DNA, 287 bp, Setaria italica
  Peptide Sequence Number=SeqID_131064
ggtcactactgctatccaagacttgatcgtttcgaggtttgaccttgccatcagtcctttcacagatacaggtagaggggttctcatgaaactcacccctccccggcctcagctctttgggctctcccataaaccctttctggaccatgtgtacttttgaggagaatgcatcccatgacatgttccctctgttcaaaaacaaaggatagagtccttttggctattttggttcggtatttgtttcttctttattgtccctaaaattattcttcctttcgtcccggtcc

SEQ ID NO: 65091 - DNA, 166 bp, Setaria italica
  Peptide Sequence Number=SeqID_131065
tctttacactcagagaagtttcaagcgtctttggtgtcaccttatgatctggagctatatcttcaggctttccaggtgctggtttcagcggcttccttacagatacgttaactgaaaggaccatcagccgtcactcctgctgtgccttctccattccgtctagaat

SEQ ID NO: 65092 - DNA, 154 bp, Setaria italica
  Peptide Sequence Number=SeqID_131066
agatgggaatattggatttaaagtgcagtgttcttcaaactataaattaacaagaaaacctctttctggtctttttggcgtctcgccttcaccttcttctcagtctcccattcagctatggtttcgatcatcttttcatactcctccctaactc

SEQ ID NO: 65093 - DNA, 320 bp, Setaria italica
  Peptide Sequence Number=SeqID_131067
taggaaataaacaatttacaagacaatggccaaccagctgagagtgcttcacagctgcaacctgtgatcttacctgatgatatgccagcttcacttgatcagctactggtaatgaatcagcagtggaactttctccccttccatgactcgctaacttattagctagtctgtctttagaaggccatggtgactgtttctaaagaatcacctctcctatgtgcacgatcattaattgaatcacccagctttccagctttgctaaattcagttaactgtgagtgtgccggtccaacaactgcaccctcgctaggcacatttgg

SEQ ID NO: 65094 - DNA, 245 bp, Setaria italica
  Peptide Sequence Number=SeqID_131068
caacctgtcattaagaagaatacagctttaatagagaaaattgagagtttgaacaacaaagccagaaatgttgatgcacgtaatgttccagaaccagcttcttccaaggaattcaagaaacagcaaaaagcactgatatttcatctactgctgtcattactggagcttgcacttctgaccgggtgacttctgtttctcatatctctcctgtggtgcagagactaccaaatgtgcctagcgagggt

SEQ ID NO: 65095 - DNA, 231 bp, Setaria italica
  Peptide Sequence Number=SeqID_131069
aagttagcgagtcatgaaggggagaaagttccactgctgattcattaccagtagctgatctgaggaataacattcagcatggccaaccagctgagagtgcttcacagctgcaacctgtgatcttacctgatgatatgccagcttcacttgattatgagtcccagcgtgacaaaaatagaaaggaagttaggactagacaaagaaaacgtaagaaaacaaaaaaaaagtaaa

SEQ ID NO: 65096 - DNA, 480 bp, Setaria italica
  misc_feature (8)..(8): n is a, c, g, or t
  misc_feature (15)..(15): n is a, c, g, or t
  misc_feature (24)..(24): n is a, c, g, or t
  misc_feature (34)..(34): n is a, c, g, or t
  misc_feature (62)..(62): n is a, c, g, or t
  misc_feature (144)..(144): n is a, c, g, or t
  misc_feature (417)..(417): n is a, c, g, or t
  Peptide Sequence Number=SeqID_131070
gcctagcngggtacnggaaaaggnactgtgtttnacgagagaaaatctagcgagaagccaanacgtttcgataagcactggggaaattgccagaaaaatgctgaggttccctgtggacacagcaacagctgttgcaccacatgntgatcccccagctcagaacaagaagggtgcccggcattttgagaataagtaaaaaggtggatgatgctccagttacttctaaacatccacctacagtgttttaatgagcagaatacaatgaaagtccctagtgagccaaagacacatactggtggtgtgatcatcagtagctctatagttcccactgaaggtactattgtaactgtgggaagtataactgtgggtggaatatcacttgcatctcttaaatctagtaattcgttgtttaaattntacttagttatttggttacttactttaattaattactaagtaaaagttagtaccgttaaccta

SEQ ID NO: 65097 - DNA, 120 bp, Setaria italica
  Peptide Sequence Number=SeqID_131071
caagacagccgcagtagtaaacctacagaaaggaatgatggcatcgatgagctagggttgaggtgaacagcttcaaaggacctgatagttcgtacctgtcaagacagccgcagtagtaaa

SEQ ID NO: 65098 - DNA, 334 bp, Setaria italica
  Peptide Sequence Number=SeqID_131072
taaaaaggttgtattgttgtttcgttgttttccctaaggtcgtattgtattcctactttcctagtattgtaaccttggaccatgagaagcctgccgcagcgctgtcgtcccttagcagccagaaccctggggttattaccattgctagtgcggtctttggatcgaagccaccgatctcggatgatgttttggccaaggcgttccaggtgggagaaggaaacttattgattggctccagaatcagttctgggagaataacaactactaatgatccttgatcattggccaagtcgttgcaccgtatagtatagtacctgtgccagagttgtgtgat

SEQ ID NO: 65099 - DNA, 395 bp, Setaria italica
  Peptide Sequence Number=SeqID_131073
tgattgtaggactagtttctgttggtttagggcttccatttaacatgtgcttgatatggtatctaaactctgttccctcaccatccagacttccagatgtcaccgccttgttgacctgcatatggatctaatgctcgtccattattgtcccaatcaactgtatgctgcaacaagatctgacaacccttccccccatcaattacacattcacctgtattgaaattgagcatcctgtgctgtaagaattaaaagcctaagctgtacaacatcgtgctgatgcttctacacttgcaggaatttataagattatgtttgtattttattccgcttctacagcctactctcttctggatatacaagactttctttcaatattcgcaatattttatccaata

SEQ ID NO: 65100 - DNA, 224 bp, Setaria italica
  Peptide Sequence Number=SeqID_131074
tccagacttccagatgtcaccgccttgttgacctgcatatggatctaatgctcgtccattattgtcccaatcaactgtatgctgcaacaagatctgacaacccttcccccatcaattacacattcaccttaactttccaacatatgaagtgcttcctgggtgcagatcatcatagtcataagagatgatatattctgtatgtgctccttgtctgaaccttcgag

SEQ ID NO: 65101 - DNA, 316 bp, Setaria italica
  Peptide Sequence Number=SeqID_131075
ttaaaaactcagattatggaagtttagtgatgttcaaatagagtcttcacccgtgaggtaaagggcataatgcccttccaccaggaggaacctgaaagaggaaaatggagatttttgctttgtaactgttagtgttattatgtaactgcaacattttagtagaggaaatgtatagttggtaaatggtggccaatcgattgcttgcttttgattaggcaggcattatttgtgccgagttgctgcacagtaagtagcaataatgtaaggtacagcaactccgaattatttgttggaaatgaaattagtagacaattct

SEQ ID NO: 65102 - DNA, 235 bp, Setaria italica
  Peptide Sequence Number=SeqID_131076
ttccatccctcggagggttcaagaggaaacattgctggctgtgaatccggaggttgcagtctgcagccaatgggagcaggccttcaagatctgttcatcccatgggttctgtccatctgctttcgcccttctatccgtataactttaccaatatcatcattgttccccttcttgtattttatgataagagacttgaatgttgctaaaagaacagaagatatcggcttctatgctg

SEQ ID NO: 65103 - DNA, 204 bp, Setaria italica
  Peptide Sequence Number=SeqID_131077
catgagtttgctgcagcaattctttgctactgtgtcattgactcattgcagaaattttacaaaaatttcctgctgtgaggctgcagctttaccaatatcatcgctgttccccttcttgtattttatgataagagacttgaatgttgctaaaagaacagaagatatcgggcttctatgctggtttcgtaggtgctttcattttat

SEQ ID NO: 65104 - DNA, 354 bp, Setaria italica
  Peptide Sequence Number=SeqID_131078
caagaatggcagctagtgctttgttgttgagcttattgtgataaatcttcagggagcgtagcccatgcagatttatcacaataagctcaacaacaaagcactagctgccattcttgacaactgccctcacctggagtcccttgatctacaatggcgcttcaacattttcgtggatggtgccatgcgagccaagtatgctggcatcaagaggtggtgcagcctgattttgaccaggtaatctcatgggctatgacccaggtgtgatggctacgagcgctgggccgagagccctccctcgtcggatcaggattaatcctggtggtgatgatttcaatataatcatggtgctgctta

SEQ ID NO: 65105 - DNA, 373 bp, Setaria italica
  misc_feature (49)..(49): n is a, c, g, or t
  Peptide Sequence Number=SeqID_131079
taactaaaaaagtaaactaacttagttagggacttaggtatgaacctanatcaaggatgatgaggaattttcccctggatcaaatggtaaaatgactacaatgggtgtttacgtgcgtgatctcctccttggtcagtactatttcgacagtcttcttccacgagtgcctctcccaattctgcggcaggtcactagccatcttgagaagctgaagcttccaacaaagcagtcaggaatgacaggggattccaatagacatgaatcacagttctgcatgtttgaattgataagataaatatgacaagtagactaattgatagaactcaacatttagaaaaatggagctcaagcaacaaaactgtctaagaaccat

SEQ ID NO: 65106 - DNA, 189 bp, Setaria italica
  Peptide Sequence Number=SeqID_131080
catgcacctagggttacatatattagtatcacctagaggtaggtcctgaaatctgcatcctggttggacttggacctactatactgggttcggaccagcacacaccatgtaatcccagaaacgttcacctgaacaagaagaagctggatcagttccagcatcagaacaagctccatcagttccagagca

SEQ ID NO: 65107 - DNA, 156 bp, Setaria italica
  Peptide Sequence Number=SeqID_131081
atcctgactgataagcaggctgtcttgcttgtccttggtaggaatcggcttcccgaactggtaataaaaccggcccggtattattaccagttcgggaagccgattcctaccaaggacaagcaagacatcctgactgataagcaggctgcgaatgat

SEQ ID NO: 65108 - DNA, 253 bp, Setaria italica
  Peptide Sequence Number=SeqID_131082
gatttggagctatttttacattgtcaagcatgagctgagtacaattctactacaaaatgtacacaattccttgatagttttttttgtcctgttgtaaaatccagacgctgatttgttcttagatttagctctagatacttctgattcgttctaacgaatgaatcggttgctaggattgccactgtaattgttgtgcttttgtagtagaattgtactcagctcatgcttgacaatgtaaatttagatttggagt

SEQ ID NO: 65109 - DNA, 413 bp, Setaria italica
  Peptide Sequence Number=SeqID_131083
tagtcttgttgtttggttggagctaagatcgcgaatgtagtgatacttcataatgccaaaattcaattactatgagacaaaaagagccggatggttcaggctgaaataaaagaatacagccagtgacacaacaccgtttgaagattgaacaaatgaactgggaattttttgttatatgaatgctcagaaatgtagctgaaatttgtggtcatggttcatgaagcctctgtgaatataacagtgcatgcccagaaaaaccatgtttactgccgttgctagctcagaagcacaaatgccaaagtggaacaaggtgaaagcacaaggcagggccaggcggccctaaaacacctgaacccgcgtacagccggctttggttaccatcatttcaggcggcagctgctggcctaccacat

SEQ ID NO: 65110 - DNA, 397 bp, Setaria italica
  Peptide Sequence Number=SeqID_131084
cgcaacttgtcatctgacaaagcagcatccttgagacgaggagcagcccaacctcctttccctatgaattccatcaccagtacatgaagcctcaggagcaacggttttgggcatcggatatcagctgctcgcactctgaaacaagggtaacaaagataaggatggattcaaatatcagaactaatgcattacctattcgcctgactagcgagggtgttgaaccttgaaagtaagttcattcttcggacaaaaaaaaaaagaaaagaagcttttttggcaaagttttacagaagaaagaaatataaggaatacaaaaagattaacagactgaacaatagattcaagacagcagctacagcttgccaagttgttaagagtaatatatgaataagacatg

SEQ ID NO: 65111 - DNA, 378 bp, Setaria italica
  Peptide Sequence Number=SeqID_131085
caactgatgtacttgatttcattgttaacttagctgtggagatgacaaattaatcttacctgaaccatgactgtcgggagtaatttcatcatcatttggaactgcacctccattttccacaatcttttgctgaacctgtgattaaaacacaatattgttaaacaatcagatgtccgtcaatcatgcagcaagaatccttatgggaacatcaaaggtaatggtaacaatgaaggattgaaaggtaatgtcttgtactcaaacatgcaagataccttctccaggtaagcatcaacatcttcatcagcaatgtttgatcaacaacaaaattaaataaatctattactggcatgacaggaacacctcgcttttaaaaaatca

SEQ ID NO: 65112 - DNA, 349 bp, Setaria italica
  Peptide Sequence Number=SeqID_131086
caatagctagtccattgaagacttgcagtacttaagataagctatagatgacacggacaaggtattgtagctattagtaattaactattgctggaggtttactacccacagaggtttactactaatagctatagatgacacggacaaggattgtagctattagtaattaactattgctggaggtttactacccacagaggtttactaccgcttgcactttgctttcgccattttcttcctcttctttttctcagccttcggtttcttggtcttgcgagcttccctcttctcttccttcactttcttcttgtttgccttccgagcagcttttctttcctcgggtcccaac

SEQ ID NO: 65113 - DNA, 291 bp, Setaria italica
  Peptide Sequence Number=SeqID_131087
caagtcggccctacaaaataaagaacgttgtattcaatcaaatcaccatggaccagtttgcacttttggtaaagagtccgcattattgtaattatctcaaagtaactttctcgcaacttgtcatctgacaaagcagcatccttgagacgaggagcagcccaacctcctttccctatgaattccatcaccagtacatgaagcctcaggagcaacggttttgggcatcggattattctagtcttgtcttcgttcttactttcgtttctttatttaagtttatttttccttttt

SEQ ID NO: 65114 - DNA, 268 bp, Setaria italica
  Peptide Sequence Number=SeqID_131088
attgctggaggtttactacccacagaggtttactactaatagctatagatgacacggacaaggattgtagctattagtaattaactattgctggaggtttactacccacagaggtttactaccgcttgcactttgctttcgccattttcttcctcttctttttctcagccttcggtttcttggtcttgcgagcttccctcttctcttccttcactttcttcttgtttgccttccgagcagcttttctttccttcgggttccctaacta

SEQ ID NO: 65115 - DNA, 266 bp, Setaria italica
  Peptide Sequence Number=SeqID_131089
cgaataatctccttgaacatatcggtctcgatccctgcaaatcaaacaatacagtttcttcacatgcatactttttcagaaaaaaaaaagaagcatgcaagtacttaaacaataaagagcataactacataatcagcatttctgcagaaagtttcaacaagtatccaaagttggaacagataaccattgaaatttgatcttacttaaaaacaaggacagaggttttgtagactttaattgctagctcctggccatctgtctttgtt

SEQ ID NO: 65116 - DNA, 429 bp, Setaria italica
  Peptide Sequence Number=SeqID_131090
aaaaaatagtttaggtttaatacccgtgaaattccttgtcggtgtcctgggatcatcgcaggcgatccgtgctattgcccactggcaaacacggttgtgatcgatggttctccctcgtcttgcatgatctctcatctcatctaaccgcttgtgtttgcgcgcatgcagggctgaaccggtgcggcaagagctgccggctgcggtggaccaactacctccggccggacatcaagcgcgggcccttcagccccgaggagcagaagtccatcgtccagctccacgccatcgtcggcaacaagtaagaccaccaccacaccgccgtgcccccttcccccttcgatctgccagatgaccagaccagcacgttccccctctgatcacgcatccactcctcacctcgcgctcgcacggccagcgcgtactgcgcta

SEQ ID NO: 65117 - DNA, 427 bp, Setaria italica
  misc_feature (401)..(401): n is a, c, g, or t
  Peptide Sequence Number=SeqID_131091
ttgtttgttcttaagtagtagtattgtcttacttgtttattgttacttactatttttgttgttattgttgttgtattacttattagttctaatttgttgtcctttgtctaaattctaactactattaaagttcttttctaaattcttgtaattaatttagtttcgcagccaaatttatggttacaaactatttcatagatttgcctggacctttaaaaagctacactcaaatacaaccattaaggcatactatctacactaatgcactaatccttgtcatttgagttcttcatctggtgttacttgctgcatcttgtcatttgactgagtaaattttgtatttcggaccacgatttgatgctcagataatgctgctgatgcaggatgcacacgggttttanaggtcactgctgctgctgctgctgct

SEQ ID NO: 65118 - DNA, 232 bp, Setaria italica
  misc_feature (215)..(215): n is a, c, g, or t
  Peptide Sequence Number=SeqID_131092
caggcttaacatcctcctgacgtgccttatggatgatactcaaaaagatttgtagaagctcagcgttgacaaggagatcttcgtgggtgaccttaagaagggcgaggtcaccaaaggtctgtaccaggggaagccggatgctaccatctccttcagtgacaacgatttccttgtaattgccagcggcaagacgaacccacagatttgcgttttanccggaggagctattaag

SEQ ID NO: 65119 - DNA, 342 bp, Setaria italica
  Peptide Sequence Number=SeqID_131093
agaatagaagactaactagaacaatgtaacttttagccaagtcttcccaagaaaatatgagttacatctataaagtttgagtggagcacgaaacaggactgctttggtcgacacatctgagctacttctggacattggctctcttgcttaaaatgccttctaaattgagatgattgatcttcgcagcaaggatgaaatcattatctgttaaacctctgacagagtgagtccaaacatcaatttttcacataaactcatttacatcgaggttcctgtttgcgaattacacactgatagtgaatgagtacttggactccaagcgtttgaggcaggtgctttcag

SEQ ID NO: 65120 - DNA, 299 bp, Setaria italica
  Peptide Sequence Number=SeqID_131094
ttggtctagtctactattggttggggtagtaactattactttctttagtaaagtaaaaggtctattgtttgtaatttctatttctagtaggtggaatctgctcacatataaattggagaaggtggtttcagccatgtcacgcttggactacgagaaggcaatgtaccttttgagatcttcagaccatgatctgtatgaaattcactcattggtgtatcaggcatcccaggagcttgaggctacactggtttgcttcaaagatccaccattcccttgggtctcagtttccatgtctggag

SEQ ID NO: 65121 - DNA, 412 bp, Setaria italica
  Peptide Sequence Number=SeqID_131095
accatggatttagatgttatcaagaagaagcgagaagagaaggtttagatgaggatgctgacacagtcggtgggaacaataccatgctccctcaggcaatgccgtcagatcagccatgttatgttccttgaggcaaccaacatgatattctctaccgcattggtcacaaagcagcacggtccgggtactgaatttcttttttgctgaaatcatggagcttgcacagtgcacaaccgccaaatccagtcgcaagtgatgtagcaacacgtatcgaccgtgtgaatatttctgccaaggggtcagctccttcaatcctcccagcagctattgcattgttgttatatgccaaacaactttccctctgttgtctattctcacaataatcggacaaacaaccaaagttacccttaca

SEQ ID NO: 65122 - DNA, 495 bp, Setaria italica
  Peptide Sequence Number=SeqID_131096
tagaccttagaactaataccctaacttagtaagacgaaccaaataggacaagctcagcaatttcactacccatgatgcggaaaagaccggcagaaactacagtgttgcgcacagttaacacagcacaatacattcctgtgtaatcttgatcccttgcactcctcccataaaccatggctggaatgaggtctcggccagttgctatctgaataatgggatcgaatgtttcatgaaaaatggcaactgctttggagagcactaatttgctgtcttctgaactcttatcctttaaaaactctccatctaacatcaaggtcagcatcctcatctaaacctttctcttctcgcttcttcttgataacatctaaatccatggtaggacaggttctcccccacggttaagtaagtcttgcagtttctggttaatcctcacacagtcggtggaacaataccatgctccctcaggcaatgccgtcagatcagccatgttatgtt

SEQ ID NO: 65123 - DNA, 240 bp, Setaria italica
  Peptide Sequence Number=SeqID_131097
gctggaaccatgaaagcacctccgtggaacctcaggcaatgccatcagatcagccatgttatgttccttgaggcaaccaacatgatattctggtacggtcctgagaagtacgggttgttgttgaggctcataatcctaggagcttgaagtgctgccttacagatggagtaccttcttggtggggaactgcaggggacatcgcgcgaaggtgcagtcgaggaagaggtagtcgatgcggca

SEQ ID NO: 65124 - DNA, 272 bp, Setaria italica
  Peptide Sequence Number=SeqID_131098
accctgctggtcatcagaaaatcatgaatcccctaggtgtcactgtacaagatatgcaaagcacaaacaattttctaaatacttgaaaaaaacatgaataatgcactacagcaatgtaaatttagtgtgtatgtatgtgcttcaagttctacaatatccaaatagtacgggtcctgagaagtataatatccaaatagtataagttctatcaagttcatgcagatcagagagcacaaactaactaactaatgttacttaacggtaacggtacc

SEQ ID NO: 65125 - DNA, 143 bp, Setaria italica
  Peptide Sequence Number=SeqID_131099
agcttaaaaattaagctgcaatgcaaacaaacttcagttctcaactaacagcaagataatgcaaataaggagcatggcattaggagttgtatagagaggagatgaaccaaagaaacaaatactacaaagacttagaacctacc

SEQ ID NO: 65126 - DNA, 324 bp, Setaria italica
  misc_feature (179)..(179): n is a, c, g, or t
  Peptide Sequence Number=SeqID_131100
attgaaccacatgctataaggagtggtagtgaaacaaggcgtccttgtcatggatggctaactgagtcagaagatgaggaagaacaaactagtgagcaacatgagttgcatcttccagaatccaggaggaggctcgatttgcaaaagaagtggcttgagtagatggatgtgaaaccccntcaacagaaaggctgataccaagctgtgatgctctgcaacttgggttaggtagcgtgaaaattaacttccattagtatttgtacatagcagtaagtatgatgtagagcaaacaacctaaaagtggtgctctttgggttgtttgct

SEQ ID NO: 65127 - DNA, 404 bp, Setaria italica
  Peptide Sequence Number=SeqID_131101
atggagatgtaccactggttatagcatgtaagatgcactaaggattgatgataccacgctttcggttgttcgtactagtacatagcagtttcagtactcaacttgttctcggtagagatttttcttgcacgttgatggcatgtttggtgttgctgctggttccttccgttgtgagcagtgaatgcagatgaatgcctgatgacaaggatgcaggagatatccctggattaccatttcaccgtggagcaagaagtcggctcctccacctacgccttcttcggcttcaatggtaagctccatcgggtccctctcttcctatgttttctcttgcgggggacgttctctgtgtttccttttctcgttcacatgattctgcatggtccctcaaccttttcattttctac

SEQ ID NO: 65128 - DNA, 248 bp, Setaria italica
  misc_feature (44)..(44): n is a, c, g, or t
  misc_feature (62)..(62): n is a, c, g, or t
  Peptide Sequence Number=SeqID_131102
tagatattagttgttgtgtttgatgaatgatgacatatagcagnggttaatattgcttatcnccttgtgagatcatcaaccaacttgtaatttctgactttgtttacatctgcatttcaactcctttcagtgttgccgggggactcttcatcattgctggtctttacctggttacttgggctcgttacaatgaagctcaaagagtcctgacagccagttatttgcgacctcttcttgtggaggaccca

SEQ ID NO: 65129 - DNA, 229 bp, Setaria italica
  Peptide Sequence Number=SeqID_131103
gtcgtcctcttcaagataccatgctttaagaagcatgttattaccatttaaagcatttgaattaagttccatcctcaggaagacttgcaggatactgaaagaaatcatatcctgaacataagctggaccttctgcattccctagttcggtctatttcttgtctacctaagtctattttgttagttaagttatttacctttttggttttcttttaggttttaatttttta

SEQ ID NO: 65130 - DNA, 368 bp, Setaria italica
  Peptide Sequence Number=SeqID_131104
tcagcatcagcttttacttgctcaatatcttgctgtactgtcttgctgctgacattatcctttgtgtatgctctataacgttcaattgttttctgcacactgtttgcatttgtctgattgcttgacgcgccactcctagtgatgctccttgtaacgcaagcgttgaaccttcttctctgagtcttggtcaagccttctggacacaaacgttctccaggaatcaacttatcttgttgcttgatatgctcttcctcggattcgtcaatgaccacaaatctgcaccttggaggataactcaacctatcatgcacagattgtacctcctcttcattctagtatttcctttctttaacttttgttttcctttt

SEQ ID NO: 65131 - DNA, 374 bp, Setaria italica
  Peptide Sequence Number=SeqID_131105
ggcgcatgtgccttgcgtctgcatccatggacgacacaacacaggtttgtaaacacaacgcgactgaaggtttttatcattgcttggcttgcatctccacaccagagatctagattattctcggcaggcttgcattggttgctttcgcatggctacgctgacctgactgccgcagccttgtttcggcggtgatccatgccaggcaatcctatgtacagctccgtctccacgtccattggtcgttcgttcgtttctgctccgggtgatcgtcttccacggtgatgactgcccgcgcaggaggagtaggctgcaggggcggctgattcttgcaataagatatcacaggagttcgaggtaagcagtgtaatcagagt

SEQ ID NO: 65132 - DNA, 415 bp, Setaria italica
  Peptide Sequence Number=SeqID_131106
acgctgacctgactgccgcagccttgtttcggcggtgatccatgccaggcaatcctatgtacagctccgtctccacgtccatggcgtcgtcgttctgctccgggtgatcgtcttccacggtgatgactgcccgcgcaggaggagtaggctgcagggcggctgattcttgcactgcagaaatgatcacaagcaacacatcatatgcatcgtgatggcacagaaatgtagcagcatattgaaaggaatccataatgatatgcacataagatatcacaggagttcgaggtaagcagtgtaatcagagtctgatgttgggtcattccgttcaaaccggcagcgtcttcatgtcagaaaatgtttcaccgccattaccttttcacgtaaatcttcattgttcttgcgcagtgtcagctcc

SEQ ID NO: 65133 - DNA, 382 bp, Setaria italica
  Peptide Sequence Number=SeqID_131107
cgcatgtgccttgcgtctgcatccatggacgacacaacacaggtttgtaaacacaacgcgactgaaggttttttatcattgcttggcttgcatctccacaccagagatctagattattctcggcaggcttgcattggttgctttcgcatggctacgctgacctgactgccgcagccttgtttcggcggtgatccatgccaggcaatcctatgtacagctccgtctccacgtccatggcgtcgtcgttctgctccgggtgatcgtcttccacggtgatgactgcccgcgcaggaggagtaggctgcaggggcggctgtatttctttgtctactttttctacgttaaattctttcttattttgttttcttttgttcgtttctta

SEQ ID NO: 65134 - DNA, 253 bp, Setaria italica
  Peptide Sequence Number=SeqID_131108
tattcctattgtcctaggtctaattccttattgttactagtcttccgttcttccacgttccatggcgtcgttcgttctgctccgggtgatcgtcttccacggtgatgactgcccgcgcaggaggagtaggctgcaggggcggctgattcttgcacttttcacgtaaatcttcattgttcttgcgcagtgtcagctccttctccttcagcttattgacctgctcttccaacagctgagtctttctccctgatgc

SEQ ID NO: 65135 - DNA, 320 bp, Setaria italica
  Peptide Sequence Number=SeqID_131109
ccttccttacactcaactcaccgaaatggagatatggtgacaacaatgatgttgtagttcccccaaccttcataccatgttttgaatattccaggagaccgtaagacacaaattcctgaagcgtattctctggcaccgggaccagcctcacaggtgcaagaggttgagatatgtcaagtggcaggttcatgcatttctcccagtacatgttaaaggttgtgaatgcctgcccattctcatcataaacttcccatggctcataaagtagatcaccattgaaactttggacagaaattccaagggctgaaagctcattcttg

SEQ ID NO: 65136 - DNA, 256 bp, Setaria italica
  Peptide Sequence Number=SeqID_131110
ttgcgtacaacaaaaggccagtgaacatctcttttgataaaatagttagtcctcggtatagatagacttctctggattatcaagacggctgagctcatggccatcaggcaaactcccagatatgtactgccaacccagaatatcactttctaggtccgcatccaaaagcacgtcccaaaagtacttcatcccccaaatccatggtatttgtagaaattttacagcaaaacttgagactatcactcttatcctatta

SEQ ID NO: 65137 - DNA, 328 bp, Setaria italica
  Peptide Sequence Number=SeqID_131111
ctgctttttgctgaggtagtcgctagatcttttccttgacacttgtgatttagctgtagagcctgtgtcttccatgtttgaggcattcgtcacttccataggttgaacttttcttcgtccatctatcaaaggatgccatctagtagtggccagaagtgcttggagatagtcctttttcaatacaacctttgggatgtcaaaactcctgatattattcatattgtcttccacaacctcgccatctagttcagcaagttttgcagctgtgtccaattgccacattgtggagatggcatcatctaagcactcccgcgccatatgaagttct

SEQ ID NO: 65138 - DNA, 449 bp, Setaria italica
  Peptide Sequence Number=SeqID_131112
atgttagagatgataattatgagttcattacagaaacagaatcagctccgcaaaactaatttaaatttcctaaaaggaatactcagccataataaatcctatactaaaaattaattcacatatcaggatcagatgcattttgcgcaatagatcaagctctcagtatgaatatccgtggctgttaaggtttagcatggacacaagcataggtcaatggatggaacagtatcaaaatatgagcatgtatgaaccataaggatcaaatgtactttacctttgacgagagccaactgtttccttccatttcaaaatagtcactttggtcatcataaactttagtccttgcagcagcgttcctgtcatagtcaacaagcctctttgcatatgcttcagctgcagcttctgcttctgaaagaggtagtccaacatcacttaaacctgcatatgta

SEQ ID NO: 65139 - DNA, 175 bp, Setaria italica
  Peptide Sequence Number=SeqID_131113
ggggggggcgagtttaacacaatacattcgttttgacaggaagttctaacactaggcaggaaaaccaaagttggtcgctctgaaactttctgcaccacaattgatgacttgagacaagctcatccaactggccgagaagcttaagcttgttgttgcttcttctcaagaactttct

SEQ ID NO: 65140 - DNA, 222 bp, Setaria italica
  Peptide Sequence Number=SeqID_131114
acagaaagtatctatcaaggcggcgtctggaaggttagggtagaattacctgatgcatatccttacaaatccccatccatcggcttcatcaacaagatttatcacccgaatgttgatgaaatgtgagtactttgatgttgaaccaccttcttcattgcaattgaagctcgtgggagtagcatttcctgacctgctcttgtttgcttttaaaaaatgcaggtc

SEQ ID NO: 65141 - DNA, 304 bp, Setaria italica
  Peptide Sequence Number=SeqID_131115
tcagggacaaacgagacaatgttcattgcagaaattgcaattaacaaaactagaaactaaaactaccggatgtcatgtaaataagtgtaccctgtatgttatcctatgctgtttcttcagtcaacctgttgaatttgcagtagctcttacattgtctcgtttgtctcgtaaaggtttcgtttcagggaataaactatggttgtagcttcctccattggctgttgatgtgggcatgacggatattgattgcttgcatgtttaaccaaccaacagttgttttactagaacaaaaaaaaacaaaaaa

SEQ ID NO: 65142 - DNA, 206 bp, Setaria italica
  Peptide Sequence Number=SeqID_131116
tagtaaatgtttttgaagtatttcttccacagcttctactctatccgaatccttctgatccattaaatggggaggctgcagcattgatgatgcgtgaccgtcctgcttatgaacagaaagtgaaaggtaatgtgattcagcaaaatccctgattgtttttggtacatagtctatagttctaagattatgtttgattgaaaaatcat

SEQ ID NO: 65143 - DNA, 206 bp, Setaria italica
  Peptide Sequence Number=SeqID_131117
aacctcaacgagaagatcaagctagaagaacttaagaagtccctcaacgccgtcttttcccagtttgggaagattcttgatgtgcttgctttcaagactttgaagcataaaggccaagcttgggttgtcttcgaagatgttgcatcagcaaccgaggctataaagaggatgctgtttggtacaattatctctggcatcatgaccct

SEQ ID NO: 65144 - DNA, 228 bp, Setaria italica
  Peptide Sequence Number=SeqID_131118
aatggataaacaaggtacaagttggatttgactctggtcattgttaacatggaattccccactaaaagtgatgctgaaaaagaaagaaggcgaacatatgaagcaaagaggagaaagctgagagcatcaatgcctgattcacgagtagtccgtgggcaagaggctgattacaatgcttctgaggatgttgaaaatgatgatgattcatatgtcaatgaagcatttttg

SEQ ID NO: 65145 - DNA, 405 bp, Setaria italica
  Peptide Sequence Number=SeqID_131119
acaatacaaaaactacggtacttagacaaaggtacaaagaagacaagaatagaaccttagagaaacaacatgaatgaaagtaccgactctgatgccactgttcagaaacctatgatgtggtccccatcacccaatgggaaaacccacactagttttcagcagagaccctctatggataattggatgccattgggaaggcgtgaaactgatttcaaggacaaccgttctgcattcaaggatgcccgtacatcctctcaatcatttggagatacccaggggttctttatgcaaacttttgatgacaatcagcaccgtctttctttcaacaatcagtttcaagatcaaggctcagctcatcgctttgcggacccatacttctttatgcctcagcaaccttctctgact

SEQ ID NO: 65146 - DNA, 360 bp, Setaria italica
  Peptide Sequence Number=SeqID_131120
cagaatacggtctatggtaacacaactcgttgtttgctgtttgcgtccttgtgcttgattcaacaatcagtttcaagatcaaggctcagctcatcgctttgcggacccatacttctttatgcctcagcaaccttctctgactgttgaatcaagcacaaggacgcaaacagcaaacaacgagttgcgattctggagcgatcagaatacggtctatggtaacacaactgatcagcagggtttcagatatggacagaatccatcaaattggttgaatcagccattccccctggttgaacagccacgagttgtcagacctcacgcatcggttgctgccttctcttgtcttctctaaatcaaatg

SEQ ID NO: 65147 - DNA, 271 bp, Setaria italica
  Peptide Sequence Number=SeqID_131121
ccccggtgacctcgtcttctacttcccgcagggacacatcgagcaggtaccttctccagctacaaccgcttcccctgcttccgctggacctggtttcctctgttcctggcgctgattttgtgctgcttggggtcttttcaggtggaggcgtccatgaaccaggtcgccggaaaccagatgcgactctacgatctgccctccaagctgctctgccgcgtgctcaacgtcgagctcaaggttcctcctcttcccgctgtccgccccccccccc

SEQ ID NO: 65148 - DNA, 402 bp, Setaria italica
  Peptide Sequence Number=SeqID_131122
taaaagtaaaaagtaaaagaaaaggaaaaagaactaagaaacgaatagacaatagaagaaggaacttgcattgtgccgggtcccagccaagtaacacctcaaatcttttgcttgtctgttgcagcccatcccatcccatcccatccgtctgggtttagtagggaagtgtagacctgtcaatttacttctccgcggtttgctcttggcagaaagttgaagggccgaggttcttattgttatttttattgctgatttgcctctctcacccttttggatgtaaatatttatctacccagtccagtagtagcaagcagtagcagtacctttgtattaaccagctattcgcggctttttaatccctgtaagctagctctgtagcgtgagataaatgacaaacactgg

SEQ ID NO: 65149 - DNA, 397 bp, Setaria italica
  misc_feature (29)..(29): n is a, c, g, or t
  misc_feature (35)..(35): n is a, c, g, or t
  Peptide Sequence Number=SeqID_131123
ttgctggcgacgccttcatttcccccctnagaggngaaaatggtgaacttcgagttggtgttaggcgggctatgaggcagctgtcgaacataccttcttcagtcatatctagccaaagcatgcacctcggagtccttgcaactgcttggcatgccatcaacactaaatccatgttcactgtgtactacaaacctcggacgagcccctcagagttcatcataccatatgatcagtatatggagtcattaaaaaacaattattctattgggatgagatttaggatgcggtttgaaggtgaagaggcaccagagcagaggtttactggtactatagttggttgtgaaaatcttgtaccctacttattggtccttgtatttctaagtttggtagtattact

SEQ ID NO: 65150 - DNA, 399 bp, Setaria italica
  Peptide Sequence Number=SeqID_131124
tgatatgatgcttgtgggagatgaccgtgggagtatgtccttatcttagtgctcgctcgataagtgtatgagctttcattccaatattgacacagtgcattattttattgagcagagagttctgcagcatagtgcgcaagatctacatttacacgaaggaggaggtccagaagatgaactcaaaatcatctgccccaagaaaggaggaacctccagctgctggtgaagtatgtgcagccacaaatgagtagggcttgtctgcctgcagcaagcattttagataactaggttgtgtgaaggaagctgacgatgcatgaagaggaacttgcattgtgccgggtcccagccaagtaacacctcaaatcttttgcttgtctgttgcagcccatccatccatcc

SEQ ID NO: 65151 - DNA, 245 bp, Setaria italica
  Peptide Sequence Number=SeqID_131125
acccgtgcaaactgaatgcttgcctgaggggtctgtaagcacagctggaacatcaactgagaatgagaaaagcattcagcaagctacacaaagttcaaaagatattcaaagcaagtcccagggtgcttcaacaaggagttgcacgaaggtaccgttgttttacctgttcatggacataacttgtctgtacttatgttatcctgtctgtgcaaatgaataggaatgtcctagcagttatggcacta

SEQ ID NO: 65152 - DNA, 238 bp, Setaria italica
  Peptide Sequence Number=SeqID_131126
tattgacacagtgcattattttattgagcagagagttctgcagcatagtgcgcaagatctacatttacacgaaggaggaggtccagaagatgaactcaaaatcatctgccccaagaaaggaggaacctccagctgctggtgaagtatgtgcagccacaaatgagtagggcttgtctgcctgcagcaagcattttagataactaggtaagtccaccaaattggtccttagtattttgtt

SEQ ID NO: 65153 - DNA, 347 bp, Setaria italica
  Peptide Sequence Number=SeqID_131127
aagctgacgatgcatgaagaggaacttgcattgtgccgggtcccagccaagtaacacctcaaatctttttgcttgtctgttgcagcccatcccatcccatcccatccgtctgggtttagtagggaagtgtagacctgtcaatttacttctccgcggtttgctcttggcagaaagttgaagggccgaggttcttattgttatttttattgctgatttgcctctctcacccttttggatgtaaataatttaatctaacccaagtaccaagtaagtaagacaaagacaagtaagacaagtaaacctttaagtaaattaaaaccaaagaactaaattaacgaacggaacaa

SEQ ID NO: 65154 - DNA, 237 bp, Setaria italica
  Peptide Sequence Number=SeqID_131128
ctaacaagaactggcagattgtttataccgacaatgagggtgatatgatgcttgtgggagatgacccgtgggaagagttctgcagcatagtgcgcaagatctacatttacacgaaggaggaggtccagaagatgaactcaaaatcatctgccccaagaaaggaggaacctccagctgctggtgaagtatgtgcagccacaacctagttatctaaaatgcttgctgcaggcaagaaca

SEQ ID NO: 65155 - DNA, 287 bp, Setaria italica
  Peptide Sequence Number=SeqID_131129
tttttatttgtagtctagtagtagttcttgtctagtcattagttgcgcaagatctacatttacacgaaggaggaggtccagaagatgaactcaaaatcatctcgcccccaagaaaggaggaacctccagctgctggtgaagtatgtgcagccacaaatgagtagggcttgtctgcctgcagcaagcatttttagataactaggtaagtccaccaaattggtccttagtattttagataactaggtaagtccaaccaaaattggtccttagtattttgttctgtataa

SEQ ID NO: 65156 - DNA, 346 bp, Setaria italica
  misc_feature (295)..(295): n is a, c, g, or t
  misc_feature (306)..(306): n is a, c, g, or t
  misc_feature (318)..(318): n is a, c, g, or t
  misc_feature (328)..(328): n is a, c, g, or t
  misc_feature (338)..(338): n is a, c, g, or t
  Peptide Sequence Number=SeqID_131130
tttaactaaccgaacggtttaagaactacttaggacaagaaaagttgaagggccgaggttcttattgttattttattgctgatttgcctctctcacccttttggatgtaaatatttatctacccagtccagtagtagcaagcagtagcagtacctttgtattaaccagctattcgcggctttttaatccctgtaagctagctctgtagcgtgagataaatgacaaacactggtatatgtatgtctgatcttctcgctgaatgtattatagtaagagaaagttaaaaaaaaaaaanaaaaaaaaaanaaaaaaaaaaanaaaaaaaaanaaaaaaaaanaaaaaaaa

SEQ ID NO: 65157 - DNA, 189 bp, Setaria italica
  Peptide Sequence Number=SeqID_131131
attgctgatttgcctctctcacccttttggatgtaaatatttatctacccagtccagtagtagcaagcagtagcagtacctttgtattaaccagctattcgcggcttttaatccctgtaagctagctctgtagcgtgagataaatgacaaacactggtatatgtatgtctgatcttctcgctgaatgta

SEQ ID NO: 65158 - DNA, 234 bp, Setaria italica
  Peptide Sequence Number=SeqID_131132
tgggtttagtagggaagtgtagacctgtcaatttacttctccgcggtttgctcttggcagaaagttgaagggccgaggttcttattgttattttattgctgatttgcctctctcacccttttggatgtaaatatttatctacccagtccagtagtagcaagcagtagcagtacctttgtattaaccagctattcgcggctttttaatccctgtaagctagctctgtagcgtgag

SEQ ID NO: 65159 - DNA, 320 bp, Setaria italica
  Peptide Sequence Number=SeqID_131133
gcaacttgaaaatgcaaggatgcttcggaaaggaaaatcagatttgcatcaaatcattccccagcttatttatttgagaagattgggagcatcgtcagaaaaatgggtttccaagtacataagagcaatggcaaggtaagtgatctcctaatgtgtctatggacttctggttctatgtgttcagaatcagcacgttgagaatcatattatcatgtcctgcagctaaaagtgatccaagattgcaagggatcagcaaattccagagggaaagaatcattattaatttctgcggaggtatttatattacataacagattcat

SEQ ID NO: 65160 - DNA, 239 bp, Setaria italica
  Peptide Sequence Number=SeqID_131134
cattttctctaacatcaaatcaatctcaatctatttttgtcctgtggctaaaatgatggctctttttccagaaagatggtttgttgcataccacatgtggcagccctaactacatagcccctgaggtacgacctaagcactatttgtttagggtttagggacgcatggttccatcattactatctacttcagttttgattggtgcacatggaagagggaacgctgacagtggtactttt

SEQ ID NO: 65161 - DNA, 428 bp, Setaria italica
  Peptide Sequence Number=SeqID_131135
accatggtctataatccaactttataatctaggttgattataatcccaaacaaatagggcttgatgaggacatgacacacttagatataactattcgggctaaaggtaaggtgagctcattcctatatattctttttataattagtaaccatggagaggactgtgaagcacttgaaaagaggcatggaggtggagaggacccatggacgtccagtccaagctggaggtccaagttcgagcccacctcggagtccaggaggagcacacacaaaaaaaacgacgcctgaatcgcatacggagtccgttttggacgttctttatatggatggaaagataatttcatagagtttctaatggcatcagtcctacatcaaaattctatttgagtcaacagaaattgttgaaatgagtggacgtccagtaattct

SEQ ID NO: 65162 - DNA, 311 bp, Setaria italica
  Peptide Sequence Number=SeqID_131136
ttgtattctaccttattcgattttattttttgttcttttttaatttaatagaagccaatgatttccaagcaggcgcagcacaatgtctgggagaaatttaccgtttatttgggcgcaagattacagcagggctgatcgagacatcaagcattgtagccaaacttatgaagtatcatgaggacttcgtgagacaagatgctcttctcttgcttgaaaatgcattggaaggctctggtggtggtggtggtgctgcagcttaccaggatgtcttttcgtatcatcatgcgaggaggtgtaagtgatagatcgtt

SEQ ID NO: 65163 - DNA, 307 bp, Setaria italica
  Peptide Sequence Number=SeqID_131137
cgcacaccagttccctgctagcatcccaattctcaagcatttgcaacaatcactcacgtagtacagaagtcagaaaaaacgagcatcctcatcgcaagaatcaaccatcatgtacatttccaatggtgttgattttgcagaatgacgcggatgataaggtgagggagccgtaactcttagttgagctcagagccctagatcctgggaaccacgaatagcatctgtataatcacaactgaatctcaaccaataccaagaatacaagacggaccaaaatactagactaagtaaccaaaatacaaacaaa

SEQ ID NO: 65164 - DNA, 261 bp, Setaria italica
  Peptide Sequence Number=SeqID_131138
tctaaaagaatgaggactgaactaagccagcagttgatgagttccaaccatactgatgtgacattggaataattgcaacactcaagttaaccttgtccatgttgcagatgacgaaggcgagggaggtggcgccaatgagcttgtaccgctcggccaacccctcccacggcggccacctcagctccaaggcgccggccgcttccccctccagctccttctctcccctcgctccatgatcctccccgaccgcccccggaatcg

SEQ ID NO: 65165 - DNA, 492 bp, Setaria italica
  Peptide Sequence Number=SeqID_131139
gttgaggtggtgaattatctggacgattctaatagttgcttataatttgatttagataatactcccggtcacccttctggggaagaaaattattgctcattctactaaagatgagccctctgcattccaagccatgattacttttccttcataaaatctctcattacagtatgccacaaatgagagcacaaatcacatcatggaaagatacagtaacatacttgatgacataggtatataggcacattttaagtcctgaattggtggacccattattgtttgttttaatgaccaactggttaaactagagagctgatcacaatataagtttatgaactacaaacttactatactctcgtatctaaaggaacaaatagagtggcaaagatacatgaaccttcatgtgcagctaggtttagcaccataaaaaaaacaacttttcaaccagttaagagaggacattgatttcctgaaatactgcctatcatcaaa

SEQ ID NO: 65166 - DNA, 324 bp, Setaria italica
  misc_feature (58)..(58): n is a, c, g, or t
  Peptide Sequence Number=SeqID_131140
attcagagaattctatcgtctatgaggtacaggcgctaagaggtaagctctcgaaggnttaaagcccatctagcagctgcatcctaaaccctattttgttgatactaaaacataactggttgaggtggtgaattatctggacgattctaatagttgcttataattttgatttagataatactcccggtcacccttctggggaagaaaaattattgctcattctactaaagatgagaccctactagacaattaaccaaagaaccaaataagaaaatttaaaactttttaaacctttaaactaaaaattaaaaaaattaaactaaa

SEQ ID NO: 65167 - DNA, 384 bp, Setaria italica
  Peptide Sequence Number=SeqID_131141
aaactcttttctgatagtgtgttaagatactttgttctaaccactagctggcatgctgaagaatgtcccacgccaataattctttgaagttgaaaaatactgtgttgtagcatctgtctggattaacacgtatttctttatctccattgcagaaagttgcgactgtggccccatgtatgtggaacggaacaaaaagaccgtgctacctttttgctagaaagttttacccagaaactctgaacaacctattgaagctattctccagttacacatcagcttgagttctacatgattttttgtctttggcctaggagattcacctaggatttctttccttttttctctctctgtttcatgtaaattgtgaaattgataacttagcgg

SEQ ID NO: 65168 - DNA, 421 bp, Setaria italica
  Peptide Sequence Number=SeqID_131142
taggatagatgattgctgcaatgcaagaagcttatgagacttcaagttcaaagcacttttgtatgaaggtcacaatatgcccacataggccagggattaccatagaattccctaaggcttgcccgcctttcatatgttgacactgagctatctccatcagcatataccttgcatataagaatgtgaaagagtcctaagtaactgggaagagcataacagcacccacaatccagccactggatgaggtacaggaagaatggagccagggagctgaacgacagcctcatctgcacgcatgctccaccatagttcctctgaatggcatcggccatggcgttggcgtggtggatgtcggtctccagggccttgagggggcctctccagcgggagctgccgcccagctcgcccgcttcgtcgccat

SEQ ID NO: 65169 - DNA, 319 bp, Setaria italica
  Peptide Sequence Number=SeqID_131143
cggcttcgtcttctccgtcacgtccgtccgcatctgaacatctggatctcgcctcccccgatccagaccaagagaaaggaaaaaaatcaaggctactgctagtacgtatatccctgcaccgtgtccgccattgctggatctgagatctgcgcatctgtccgcgactagtatgcccgtgccatcgtaaggtagtcttgtaagtaaggtaaggtagtacccgatcgacgccagatctttggtagtcctattgggttgttagtaaagtctaaaaaagtatttccttccttttgtttgttcttggtttggtttgttatttgtt

SEQ ID NO: 65170 - DNA, 185 bp, Setaria italica
  Peptide Sequence Number=SeqID_131144
ccatgggtgtagaaagcaaaaagattcctcctttgttgctggtggtgatgagagattagtgtggtggtgtttttgtcccgaggtgaaggacacagactattttcttgctgttcttgtcctagagccatgcttagctagccgagtaataacagcaagaaaatagtctgtgtccttcacctcgggac

SEQ ID NO: 65171 - DNA, 156 bp, Setaria italica
  Peptide Sequence Number=SeqID_131145
tataatcatctctacagtcaggtcaactgtaaagcataacgagtttgacaacttgctgacggtatggagtgattactcctatatcagcttcactaacagtaccaccctttgtaaggtttctgatgatacttactactttactgacttcaattctat

SEQ ID NO: 65172 - DNA, 251 bp, Setaria italica
  Peptide Sequence Number=SeqID_131146
ggagtattttacttgacctgcagtttgtagtgaaaactcgaaaactattcttaactaggggacaatctggtgctgatacatctccaggtgctatcattcaaactcgcaacacggtccgttggatttagtttaaacggactagattataaggaaacttaaaagggcacacatttgaacatttttaaaatagccaccttacaaagagataatattggtgtgttgggattctttgcagatgaattatctctttg

SEQ ID NO: 65173 - DNA, 238 bp, Setaria italica
  Peptide Sequence Number=SeqID_131147
ctgaatacgtgttacaggtgccagcaattggagatatttgtgttcttgttttatcacttggtcattgtatttggctgtttttcgcagatgtgcatgtgggtgtggcgctgcagtttgagagcggctactttgtcgagacgcttgttgaaggtgacaagcttggtgtcacgccgcacaccatcagggtgtcccctgttgagggtggggagctccttgcggtagactcagcacatagcaa

SEQ ID NO: 65174 - DNA, 454 bp, Setaria italica
  Peptide Sequence Number=SeqID_131148
tttccattggaggtggtaaccagatgtctgctttgggtcgacgctgcttgaacgtggtgacttccatggctgcagaggcctcccagtctgttgaacagatgccagaaatcctggaggtgcatccgctttgcgcattacagtgagtactctggcgagaaacgatgtcccactaaaagatacagctttctcaataccattccctgtcagcaaaagtaacatatgcagcccttaagcacagtgccgcacttcatgaaatgcattgacaatgcttcctttgttgctgcaaaatgtacatttgtcacgaaaatagttctggagtcagcatcgtcttccgaattagcatggggccctaatgatagggctgcttgctttccattgtttatctgtgcctgcttgttacgaagcttgaggacatcttgttccattttgcttgtagtcttttagtctttctact

SEQ ID NO: 65175 - DNA, 332 bp, Setaria italica
  misc_feature (172)..(172): n is a, c, g, or t
  Peptide Sequence Number=SeqID_131149
aaggggtaacgaaacgaactagtacttagaaacggtaggtagaacttccatggctgcagaggcctcccagtctgttgaacagatgccagaaatcctggaggtgcatccgctttgcgcattacagtgagtactctggcgagaaacgatgtcccactaaaagatacagctttcncaatacattccctgtcagcaaaagtaacatatgcagcccctttagggtggccagtaatggcatctgtcaaaatgttaaccttaagcacagtgccgcacttcatgaaatgcattgacaatgcttcctttgttgctgcaaaatgtacatttgtcacgaaaat

SEQ ID NO: 65176 - DNA, 332 bp, Setaria italica
  Peptide Sequence Number=SeqID_131150
gcctaactagagctagtagtagacagttttaattagtatagtttcagtcattacaaatctgcaattattttgcagaggaaaaggcaaaattggatatcgtgccagttttcattacagttgatcctgaaagagatactgttgagcaggttcgggactatgttaaaggtgtgtctgtgcacgtccctcaattcttaatgcttatcatcacttaaaattgttgccctttgaactttgtttagttcattttattcattcgattgcccattattgatgattttttgtgtttttcagagttccatccagatctgattaggtacttaacgggttactta

SEQ ID NO: 65177 - DNA, 229 bp, Setaria italica
  Peptide Sequence Number=SeqID_131151
ggcggcggcggcgccggcgacgggcggggatggagggagtgatgggcaatctgggaaatctgagcaaggggacgccggaaaaatccgtccgcggagggggcattccttgtagtagactgtcagggcattcctcatttgacacgaatggctttcttgcagccggtgtcgtggctcagttttctactgctgctcgtgactggaggagggataatcgtgtactacgaccaag

SEQ ID NO: 65178 - DNA, 159 bp, Setaria italica
  Peptide Sequence Number=SeqID_131152
aatgcaaggtggtagcacctatgtccactgtaaggccggaaggggacgaagcaccactatgtccactgtaaggccggaaggggacgaagcaccactatagttttgtgctttttgataaagtacaggaatatgactcatgatccaaagctgtttcaggag

SEQ ID NO: 65179 - DNA, 361 bp, Setaria italica
  Peptide Sequence Number=SeqID_131153
taaacttaaagaaaactttaaagaactaacttaaaggaaaatagtagtaggaagaccggactacaatgagaaaattggagttgttgatgctcaatggattgttcatcaagcagttccttcacttgggaaccagggcaagtcagataatggaagagcaccatgggaaggggtaagagcacgctgcagaaaagaatggggaatatttcaaacaaggttggctgatgcggagaaggcatattacttggaacgtggcatcacgcccccgaattcaacagcagtttagatgaatacatgccatggcaaggttctgtttgcgggatcctggtccatgcctactgccgtattcatcgaagcagctgca

SEQ ID NO: 65180 - DNA, 231 bp, Setaria italica
  misc_feature (226)..(226): n is a, c, g, or t
  Peptide Sequence Number=SeqID_131154
tttggcatttccttccctacagttaatataacaaagcattatatcctatattgaagatagaaactctggcattacaacccaaacattattgaaccatgcatggacgtctgcagctagtcacaagaacaattcggtttctaacccagatgaaattccgaagatttatgttccaacaaaccctaaaggtgctgaaaggctcccaccaggcattgttgcgtctgaaacngacct

SEQ ID NO: 65181 - DNA, 152 bp, Setaria italica
  Peptide Sequence Number=SeqID_131155
gtaaaaacccagtcaagcttctcaagcaaagcatcatcctgcatgctactccaagtgaattgcctgccctcaaaaggtatatcaattaaatccagatgttgaatgagatcattgaaaagcaacatgtcactgagacaacctccaaggcgttg

SEQ ID NO: 65182 - DNA, 160 bp, Setaria italica
  Peptide Sequence Number=SeqID_131156
ccggtgcattccttctgcaatccttacgaaagctggggaaaccagtattacaccatctcctcggacaaaaaggaaggggatagtgtaatactggtttccccacccttgcggacggtgtgaaagttggggccggtgcattcctttcccaaccagctttcgt

SEQ ID NO: 65183 - DNA, 219 bp, Setaria italica
  misc_feature (140)..(140): n is a, c, g, or t
  Peptide Sequence Number=SeqID_131157
ccatggatgggcattataccagcagtggatgaaattgtcctcttgatgcaggtgggcatatatgagaggaataggtcgaagaagaggcagaagacgaaaaagaacgggaaaggtaaggattggctcttgaagaaaaaggngcagatgagaagaagaggacacgatgtgcccgcggacacgaagtacacagggcggaagcggaaaacctcttctaacttt

SEQ ID NO: 65184 - DNA, 339 bp, Setaria italica
  Peptide Sequence Number=SeqID_131158
accccatgctggcctcgggacctcgcgtcctacttggctactttgggttggatgagattgacctcatcttcccattaggctgccagaaggcggtatcctctttctccttagccagcagctcctcaaacgatatctcaggggcctccatcctccatagcgctgagctccatgatcattttgtatggcaatgacttctgaagcctttcttggatgtaattgtagatggcggcatcttctttaggttatcgcgttccgcttccaatactaacaataacctagttacaaaagaaggacgaattacgttaattagtaaagtaaccttagttaagtttaccgtaa

SEQ ID NO: 65185 - DNA, 316 bp, Setaria italica
  misc_feature (316)..(316): n is a, c, g, or t
  Peptide Sequence Number=SeqID_131159
atcttgttcgtgccttaactagcttgtgttgtgatggtgttggaatatgggagatccagtctgccagagagacaatcattcccatacagactcgctaaagcctcaagaatacgatcaagcttactgtcatgagattttaagagcacaaccaaagtattttcaatctcaaccgggtcaaaggatttgccatcagtgccatcaaaaaccatcaaagaatatgcaagtgctccaagaatgtcggcaaggggaacaggcgaccggggtgcttggcagagctcaccaaggtaaagcaacagagaagttgttccaccacaan

SEQ ID NO: 65186 - DNA, 225 bp, Setaria italica
  misc_feature (61)..(61): n is a, c, g, or t
  Peptide Sequence Number=SeqID_131160
ttgttcttacgttaaacttaagtaattgtttcttgaacatcagcaggagccatggtaatcngcccaacaagcaccttcttagaattagagagatccagtctgccagagagacaatcattcccatacagactcgctaaagcctcaagaatacgatcaagcttactgtcatgagattttaagagcacaaccaaagtattttcaatctcaaccgggtcaaaggatttg

SEQ ID NO: 65187 - DNA, 316 bp, Setaria italica
  Peptide Sequence Number=SeqID_131161
taattagtaacccaagtaagaattacaagacaataaaaacaaatacgggacttgctcttccttgctcccttcgtcaatagaccaccaaccaagaagccttgaaccatgatgaagaaaagcaaaacaatctcgaacttttgatgaggctgtaaggtaattaggactaactggtccattacgcaatagtagaacaaccttctccgccaatcttgctagagagaaaaaggacaccagcaccttgcagaataaatagtggcgagaaaaccgcaaatattgggatgtagcgagcactaggtggtgtgccctccaaccgcat

SEQ ID NO: 65188 - DNA, 257 bp, Setaria italica
  misc_feature (26)..(26): n is a, c, g, or t
  Peptide Sequence Number=SeqID_131162
ctttgtctctttgttccttacaaccnggttttcgttgaacctgtgggttattgtgttgattgttggcgttgtcccatgtatcatggttaactgattttgttagtgctcaagtgccattatggttccttttgccccctctttttaatgtgcttttacctgattcagggtttgggattctgtaagtgttgctttattcacaatatcaatatgaatagactactttacttagacttacaactactacttagtactaagta

SEQ ID NO: 65189 - DNA, 284 bp, Setaria italica
  Peptide Sequence Number=SeqID_131163
ccctcctttgtagtaaaacccccgaccgcacttgtcctccccctctttgagcaaaacctccacgcttccacccgggaagtgaattagatgagccagctgtacctcgaccaaacccattcccaccaggcctgaaaagaaatgtgtcccagaaaaaaagaaaaggaagaaagttagaattcctacaacatgcctggtgaatccaaccagcaaaggcctcctttcggccacacgctgccaaagaagagccatacccatacatcattacaacttctctctgtcctctt

SEQ ID NO: 65190 - DNA, 253 bp, Setaria italica
  Peptide Sequence Number=SeqID_131164
gaatggtagttgtcaagctccttgtccaattggtcggctgatttctcaacatttcccttgcgcacatagccacgtccacggcccctgccaaagctactacgcccacgcccgcgaacttgtcttccccctcttttgagtaaaacccccgcgcacttgtcctccccctctttgagcaaaacctccacgcttccaccccggattagtgttgttcctggtgcaaggggaagaggacagagagaagtttgtaatgatg

SEQ ID NO: 65191 - DNA, 331 bp, Setaria italica
  Peptide Sequence Number=SeqID_131165
tacgtcaaacaagcaagggctttctcccgctgctcatagaagtcgaaatcctccaagattgtcgtctcagcctcatggttcttgaagatggttaacatctggaggccctgttccagcttcacctcctgtgtgtccctgctatttgtcacaggtttattatcattattctcaagaatgatgtgccgcagaaggttatttgggacatctttaattatgtgccacttcacagggaactggccactccacttgtcctgctgccagtaatcaacacttctgtcgaaatcgacagaagtgttgattactggcagcaggttatttgggacatctttaa

SEQ ID NO: 65192 - DNA, 182 bp, Setaria italica
  Peptide Sequence Number=SeqID_131166
ccattcctcagaagccaggttgctgttgacgtctgttctcctgcagggctttctcccgctgctcatagaagtcgaaatcctccaagattgtcgtctcagcctcatggttcttgaagatggttaacatctggaggcccttgagccttggtatccgctggcttctgaggaatggtgatgccagg

SEQ ID NO: 65193 - DNA, 409 bp, Setaria italica
  Peptide Sequence Number=SeqID_131167
ggagagatgtgaagacttccagaactcgtgcctctgagtctagtcaaaagcgtaagcgcggctcttccatatcatgtattcgctgctctattctggtaccaacaattaagaagctttttcggtgacttgctacgccaaaaactgaaccgcaagattctgtttaaaagatgcgccattctcgtgttgtagtatgcaatgtcctaattcttggtagtccgcatgagttgcgtcctgctgtaaatatggacaaacaatatatttgacggaatttaggtgagcattttatgagtcgtagatgctcataaaggaccgtcacacatacacttgggtactagaagcagatatagtagaacatgtgggttgcgtttcaccacctgaagtttggtagaatatctgcataggaaattag

SEQ ID NO: 65194 - DNA, 404 bp, Setaria italica
  Peptide Sequence Number=SeqID_131168
ggcggcggcgtcggcttggcgccgccgcagccgggagaggccccttctttggcggcggcgggaggcgcatgggcaagggcacgggacgggtcgtggggaacctcgccttcgccgccgtcttgacgtacctcgccgtgaccggccagctccgctcctcacaatactgctgcctattctggctctgggtgcatttttcttctttgcaggacaagacatactccagggcgatgtaagtctccccataaatttggcattcagtgattccttaattctaatgatcgacctctatctacctgtggaaaaagtttctgtataaccctccccacttttaaaacattgtttcttaaagttccttagggaaaggttatcaggttgaatggcaagtagcatttacttatttgttt

SEQ ID NO: 65195 - DNA, 364 bp, Setaria italica
  Peptide Sequence Number=SeqID_131169
tattgcactcagcctttctctgttcagggcaacaaatttgttagagaatctgctagattttcatctggaaggggtgctactgctacaaatggacaggtgttcaatgagttattcaaccgcggaatgagaggtcccaaatgattctttttcccttcttttttttcttgaatttgagccatccaaagtgaccaatggctgcctatgcttaataaacacaaaccatattgaatttcttctaactcaattgtcaatgagctttttgcaagcaatctggccacctaatcatcaataaccacacttcgtgcttctgtatgtagggacggccccttctggaacaattgtggacatcgaggctgaagtcaag

SEQ ID NO: 65196 - DNA, 235 bp, Setaria italica
  Peptide Sequence Number=SeqID_131170
cgacttgacagatgttgtccatgattatgtgaatgctactgacgcttctatagtgctcttctgtgcttattgacatggaataatatgtgaattttaaattcatctggagtatgaatcgcattttggtcttgatcgcttgacatttgattgttactattgctgttctatcaggctattttcaagcctccaaaagctatacgtggaggaataccaatctgctttcctcagttttcca

SEQ ID NO: 65197 - DNA, 188 bp, Setaria italica
  Peptide Sequence Number=SeqID_131171
atggatatgaattggatatgtacccgaatataaaacaacaaggattgtcaacatgtttcatccattctattcaaatctttgttgttttatattcgggtacatatccgaatcgatggatatgaattggtttccttttttctttattttacaagccatgggtatgaacattgacttgtcctttatgttac

SEQ ID NO: 65198 - DNA, 258 bp, Setaria italica
  misc_feature (32)..(32): n is a, c, g, or t
  Peptide Sequence Number=SeqID_131172
cctagacaacctacaagatcgagcccgtttcnctgaacaaggagatgcgattgtttttgaatccgaagtgcgttaacaaagcattttatacaccctttatccacttgaattcgcattgttaatcaagaggcatatgcaactttttacagctggacaggatatatctgggcacgccatcaaaaaattgccattattgatcacgagaagaaaagaacatttgttgtgaggaaaggaggccttcctgatgctggtcgtaat

SEQ ID NO: 65199 - DNA, 245 bp, Setaria italica
  Peptide Sequence Number=SeqID_131173
tattactttgtaattttgtttgcattagaaggcaagcatggtcataatcacatgtatattatattgcagttttgaataccgtctgagggttgcacttagtcctggtggtgatttgatgctaacttcacgtataagaaacactaatgcagatggaaagtcattctctttcacctttgcataccacacttacttcaagatttctgatatcagtgaggtgcgagtagaaggtctggaaactctggatt

SEQ ID NO: 65200 - DNA, 288 bp, Setaria italica
  Peptide Sequence Number=SeqID_131174
atagagatcaaatgtcccctgagaaaattcagcgaaaaggaaagcataaggaataaaaaaaagtacaccaaattcataacaatatttacagagaaaatagcacaaactttgatcacctgtggaatctataggctgtactttactggcacgtccattgtccaactcgaaagtagtggcaccgttcttgctttcaggttgaaattttgctttcacttttatgtgtactttttgatttccattacttatcactttttatttttctgcccttctttcggggctttgtaggta

SEQ ID NO: 65201 - DNA, 283 bp, Setaria italica
  Peptide Sequence Number=SeqID_131175
gagaagcaggtaatgatgaattgtcacatggcgtaaaactgtgacgccattaatccatttccatgtgacaagtttaaagttgtgtggctgctcaaatgctccataccatgattcgcgatacagctgaccaagctccaatcgaagacggtagttaccctgtgaatgatacattttttgttgcgagaggaactggcgcatctgtggaatctataggctgtaactttaactaggacaacgtaccaattagtaccaaactacgaaaagtaagtaggacaaccgtaca

SEQ ID NO: 65202 - DNA, 244 bp, Setaria italica
  Peptide Sequence Number=SeqID_131176
tcaacacccattgaatcatttgtatttaccttccctgaactacattgctctgtatgaactgcatattggctagccttgactggcttcttgcaagtactacagcagaccttcaataaaagagtttttgatccagtggatcagccattgtcaaaaaagggaaagcatacaggtagattcatcaaagttaccaggtccaaaggatcagccataggttttgatccaaatatatgcatatcattttcat

SEQ ID NO: 65203 - DNA, 367 bp, Setaria italica
  Peptide Sequence Number=SeqID_131177
agcactggaaaatgcaaaattgccaacatgcaagccaacaattgcacaacagtgcgagtggatatcttgatggcttcatagcctgagagattgttccaaactctgtgtaagtgcagtggccatggctgacaatagatgggtagacgacttagccatactagccagctgcttctcgagtatactttactctatggaaacttggaaagctcaggaccatggtgtctgttcttgctgggaggcagtccatccaggttcataagcttctagaaacccaagctttgctttgtttgggaggtcatgtggatggacaaacggaaccccttgtggccacccaatttcagttctgatattctcacaagggctatcc

SEQ ID NO: 65204 - DNA, 216 bp, Setaria italica
  Peptide Sequence Number=SeqID_131178
acaagattgaggggagatctgaagatttctacattttccctggctggcaacaaagccaatggaacataactacgaaccatttggtagcaaaataaactaacttgcaaatggttcgtagttattttccctggctggcaacaaagccaatggaacataactacgaaccatttggtagcaaaataaactaacttgcaaatctacatggcagtatgaggc

SEQ ID NO: 65205 - DNA, 390 bp, Setaria italica
  Peptide Sequence Number=SeqID_131179
cggcacgtcgcgctccgccacgaacacgctgatctcctcccaggggatggcgtccgcgaacggcagcacgatgtcgtcggcgatgatcaccgggatgcagccgaacaccaccgcctccaccagccgggggctccatggcgcccaacccagcgggcacaggcagaagatggcgcgctgcatgtcctcgtagtacgtcgacgggtgctccgtcgagatgtcgaacagcgggttgtccttgaagttctcccacaccgacgcgcgcgcgcccctggcgtagtagccgccctcggggtcgttgcccatgtcgtagaagaggccgcggaagttagtacgtaagtattggtagtcgtcggtcgttgtccggggtttgttattttaggtttgttcgtt

SEQ ID NO: 65206 - DNA, 230 bp, Setaria italica
  Peptide Sequence Number=SeqID_131180
cgggttgtccttgaagttctcccacaccgacgcgcgcgcgcccctgcatcatcaggtaaggccatggtcaatcacgttatctacaagcagcttaactatttgcatcaatgttggaacggcaagaaattaagcatgaaaaaacgtggattacctggcgtagtagccgccctcggggtcgttgcccatgtcgtagaagaggccgcggaagtagacgaagatggagcgcggcg

SEQ ID NO: 65207 - DNA, 306 bp, Setaria italica
  Peptide Sequence Number=SeqID_131181
cgtgtccccgacgagcacgctcgtctcgccgccgaggtcgccgccctcggagtccccgccaatgtcgccggacgccgccggcgcgctccgccgcggctcttggccgggggtcggctcgcccgtcaacgacgtcctcgcctcgctgcgccagctccgcctcggcggcggaggctcgccgaggtcggcgccgtccggcggctcgttcttggccggctacccgttcgggtccccaagtccccggccgccctgtacagcctcccgtccaccccgacccgaccgtccacggtgacggtcaacccaaccccc

SEQ ID NO: 65208 - DNA, 387 bp, Setaria italica
  misc_feature (354)..(354): n is a, c, g, or t
  Peptide Sequence Number=SeqID_131182
tcagaaatattgtggatgttcgggatgttgctgatgctctttttatggcatacgaaaaaccagaggcatctggacgatacatctgcaattcacctccgataaaagtttctgatatgataaacatattgaagaatttatacccaacttaccgttatcccaaaaactttgaggaagtggaagagagctcagtatacagttttgagaaacttcagaagctaggatggaccttcaggcctgtagaggaaaccctccgtgacagcgtcgaatcctacaaagcatttggctttctgaactgagcatccaactcgctctgaattgagcttccaactggattggacgtgttggcctaacggnttgaataaaggatcacgagggaacaagaggttc

SEQ ID NO: 65209 - DNA, 269 bp, Setaria italica
  Peptide Sequence Number=SeqID_131183
ggtgataacgaggctcagctcttcgaggcattgagcattcatgaggaactgcagaaggtcctggccaagtacgaagaactcaaggaacctgttcatgttgaacaagagtggttgtcaggtcatcctgtaaaacctctttttgagaagaagatagcactgtggaaagaagctcaacactattacgagccacctcaaaggcctcatttatttgcacagcgggaacagtgcgagctggaacaaaactctcatctggaatttcttgataccct

SEQ ID NO: 65210 - DNA, 348 bp, Setaria italica
  misc_feature (342)..(342): n is a, c, g, or t
  Peptide Sequence Number=SeqID_131184
tccgaactcaagtagtagaagtaagttaaccaactgctacctgctgctccgcaactcaggggtgagaagagagcggcgtggcttgtcgcggcgctcttcctactggtattcctctacggattctggcgcatggggattcacttccccatgccttcacctgagaaaggcttttttacaatgccacagctggtcagtaggattggtgttataggagtgtctgtcatggctggtcagtaggattggtgttataggagtgtctgtcatggctgttctttctggttttggtgccgtcaatctgccatacagttatctgtcgctgttcatcagggaattgatgaaacngacatc

SEQ ID NO: 65211 - DNA, 190 bp, Setaria italica
  misc_feature (35)..(35): n is a, c, g, or t
  Peptide Sequence Number=SeqID_131185
tgtgggaggaccaatgctcctggaaaggatgttgntaccttgctgaactgcaatacaggaaacctagcttgcagcagtagaaattcgagtggggcttatcatctgttcacacttcctgcctcttacactggagtattttgtgtcaatatgtagattgtctgtagttgtacctaaattagtcttagttctt

SEQ ID NO: 65212 - DNA, 471 bp, Setaria italica
  Peptide Sequence Number=SeqID_131186
ttacatacaacattttataaatcatatctgaaaaaggtaacaactcagggaaaataatgaaaaatacagcccacagcagccctaggcagccaacaacatatggacaatgagttagatgtatgttacacataaacaacgcggctcggtgcgcataaacaagtccaaagatgaaagcttctatgtggctagggacctcctagcataccccggaggtcattgccccgcatatagcatcatgctctacctataattttttgctctaaacagcctatcgccgtgatttataacccttactgcttcaggcagaaaatcccctcgtgtcagaacatcttcaccatgcaggtcaaaatcagacggcggattaaaaaatccactgctctatatccaaacttactcaggttttccctagtttaccttaccaaaataggaccgacaaccggtagttaccaaatagacctttagttaatacaa

SEQ ID NO: 65213 - DNA, 457 bp, Setaria italica
  Peptide Sequence Number=SeqID_131187
acctttttcagatatgatttataaaatgtaacaactcagggaaaataatgaaaaatacagcccacagcagccctaggcagccaacaacatatggacaatgagttagatgtatgttgttggcagccctaggcagccaacaacatatggacaatgagttagatgtatgttacacataaacaacgcggctcggtgcgcataaacaagtccaaagatgaaagcttctatgtggctagggacctcctagcataccccggaggtcattgccccgcatatagcatcatgctctacctataatttttgctctaaacagcctatcgccgtgatttataacccttactgcttcaggcagaaaatcccctcgtgtcagaacatcttcaccatgcaggtcaaaatcagacggcggattaaaaaatccactgctctatatccaaactttacttctaggttttcccttgtt

SEQ ID NO: 65214 - DNA, 199 bp, Setaria italica
  Peptide Sequence Number=SeqID_131188
aacaaatcctgaacaagtgaacataatctcccaatacacgatagacaactcccaaccatttcgagtcctcaaactgacgcagtaagatccacgcttaatcgcatgttttcgattaaccagatccagctacaaatcagcctcatactcgctgacgagcgactggcggtcccagaaggcgaaggtggccgcgacgaagacg

SEQ ID NO: 65215 - DNA, 380 bp, Setaria italica
  Peptide Sequence Number=SeqID_131189
ccccgttaagcgccataggtacataagtgattcaacagtctctggtctcaggtatgttccatgatgtgcccacactcatatcctgtccagaatggaaaaatagttctctccagccaacttcgtgggagtggtttggtagaaattatagcaggtcctagcaagctcttttgcaaggttcataatttcctcagatttttctggactttcataaccagaggctcctaaatgccagcataccaggagcaaagcaagcgagttcatccatcttgtcagataatgagccaccattcttttcacaaatgtagtagtaattagatggtagtaagttttcttaggttaaaacttaactaagaaccttaccaattagaatgtctcccaca

SEQ ID NO: 65216 - DNA, 222 bp, Setaria italica
  Peptide Sequence Number=SeqID_131190
atgttttattccccgttaagcgccataggtacataagtgattcaacagtctctggtctcaggatgttccatgatgtgcccacactcatatcctgtccagaatggaaaaaatagttctctccagccaacttcgtgggagtggtttggtagaaattatagcaggtcctagcaagctatgacatgaatgggaaggaaaaagaaagtcggataagtgagtagaaag

SEQ ID NO: 65217 - DNA, 270 bp, Setaria italica
  Peptide Sequence Number=SeqID_131191
agtgattcaacagtctctggtctcaggatgttccatgatgtgcccacactcatatcctacagtcagtatgaaaataccatttagaattgatggtttggtacaagattattttatagaaagagaaaaataaggctcgccataaacctgtccagaatggaaaaaatagttctctccagccaacttcgtgggagtggtttggtagaaattatagcaggtcctagcaagctcttttgcaaggttcataatttcctcagatttttctggactttc

SEQ ID NO: 65218 - DNA, 235 bp, Setaria italica
  Peptide Sequence Number=SeqID_131192
ctcctcttcttcctcagcgttgctagtcgagcccgcgtctcccgtcgatcggcaagttcccaaggcgattggggcccgccgccgcctcatcagcatgcggatgacacgagtcttgcggagcctgcccccgggagggcgatgagaattccgtcggttggccttggcacatggcaaatagagcatgaagctgtctgcagcgccatctatgctgctgtcaaggctgggtatcggctaa

SEQ ID NO: 65219 - DNA, 367 bp, Setaria italica
  Peptide Sequence Number=SeqID_131193
aagtgtaatagtaatatgaagacttgtttgtttgaaagtatccttccccaataagaatagatggaaaaggcaattttctgcagatttggtttatgtttgtaatcttgtaatttttaaagttgattttcaaaccagtggatcttaattggagatcctctgtcattcccttaacatgcaactaacctccttcgagaacaaaccaccaactgcagataatccaagtatgacatcaggcttcacctttttaacctgcacaacagacaaggtaccaaacaaaatattctgcatcattctaatgttattcattcatgagctgaagtccatttcgttaagtcaaatttgaatttttataacatacatacatgat

SEQ ID NO: 65220 - DNA, 409 bp, Setaria italica
  misc_feature (11)..(11): n is a, c, g, or t
  Peptide Sequence Number=SeqID_131194
ataactagcanacctacacttctgaagtaacatacagagtgcagcctaagtaaattgtacatgatcatgaacatatgcgaaatagcaaacagagctctctagtctgtcttgtatattattgttggatagacgggactccacatgttcgtcttgacatattcaacggtttcttcctcactgagtcgtgcaagctcacgtgcatccatgtcacggtatccctcagctagatcctctgctaccgcctccctcacaactgctgccgctacctccttagtgatgtcacgtattctggagattggaggataaattatcccttggagaacctcctcttcttccatgtatgaagccaaaacgttctgctagacaagacctagacaagacaattaccaatacaagaagaataaaccca

SEQ ID NO: 65221 - DNA, 223 bp, Setaria italica
  Peptide Sequence Number=SeqID_131195
ccagcaccagcaacaacaatcctttgctttgggaaatctatcattggccttccttgtgcccgtacagctcctaaaaggccagctattgcaacaccagcagttccctgaacatcatcattgaacatgcgataagtctttctgaaacggctgcagaaatatgtgagagatggaccgtctgatacatatccattagcaaaatggcgcatcctcaacagattgcatg

SEQ ID NO: 65222 - DNA, 170 bp, Setaria italica
  Peptide Sequence Number=SeqID_131196
atgcatagcttagaagagatttaatggttgcaacaagagaaataataactcacccaagtagtcttcaatgtctgccttcaaaatacgcccatcaggacctgtacctttcacacttgacagtgggacattgttatcttcagcgagtttccgggcaagagggctggcaaata

SEQ ID NO: 65223 - DNA, 219 bp, Setaria italica
  Peptide Sequence Number=SeqID_131197
ttcagttcacctcgcaacctggattagaatgaaataaagaaactcaaagtcaggagtaagaaaagacatcagtgccgttccaccaatggaaatagtgctttaaattacaattattaggttagaaacatacttgacaagtttgtcaacacgtgcatcaactgtcaagtagtaatgtggaatggtttgtttagatgctaggaggcggtttgcagtaacctt

SEQ ID NO: 65224 - DNA, 422 bp, Setaria italica
  Peptide Sequence Number=SeqID_131198
aacaactaccaattagactaattaaataataataatgtgtcagattagtagagaggcaccactgcctttccagaggttacaatcagtctcatgccatgctaactggatgaccagtgctaatccgattgactggctcattatttgtctatagtatgaactgcaacactggatgactagaattaaaaaaagtataacattagatgcaatgtgatacatgcactagaattagaaaaggctcttcctagtgatttactatttttctgtttctctaatacttgcgcagaagactataagcaagggatctgtggctccacgtttcattgccgagagttctcatctaaaagcgaaaaaagagtcaaagtcaagtggaactgactctggtgaggagaatatgtcgaagaaggacttggctttacaccagg

SEQ ID NO: 65225 - DNA, 382 bp, Setaria italica
  Peptide Sequence Number=SeqID_131199
ggtggtaaatcaagtgagtgaagcaatcatgttgcagtacaccacttaattgtgaaggatggctaagatactgggtctgaccaatacacaatcacatataaggagcgttaccttgttggctagcatgtaaagaccgacatcagcattatacaaggtagaaaggcgttgtgtctttggttcaggagttaaaggtgagtctggctcaaagacacgggagttggcaaaatcagaataatatgaatttagaaaaccttgatcccctccagtgtaagaaggcaaactacccacttggttgatcatatcgttgaaaagagtttcagagggttcaacaaccatcacaccagaattcattctttcagaatgcttcaagttcccacagaac

SEQ ID NO: 65226 - DNA, 276 bp, Setaria italica
  Peptide Sequence Number=SeqID_131200
caaaatgctcaggcacgatttcgaaaacaggaacccttctccacatgtattattatatttggatatttttataaaaccatttattgtcaatcaatttgttttccagaacagtagataaataaaaatggagtaatggactactatggccttctcagaaaggaattatgtgaaaaaaaaaggaacatgcagaatgggaaaagatgtgcacagacctccagtgtaagaaggcaaactacccacttggttgatcatatcgttgaaaagagtttcagaggg

SEQ ID NO: 65227 - DNA, 464 bp, Setaria italica
  Peptide Sequence Number=SeqID_131201
gtcacacgaaaccgggaagagggccctggaactgttaggcaaggagccggacgtgagcatgataatcactgattactggatgccggagatgacgggatacgaactcctcaagaaggtcaaggaatcgtccaagctgaagcagatcccggtggtgatcatgtcgtccgagaacgtgcagactaggatcagcagatgccttgaggaaggagcagaggatttcctggtgaagcccgtccgcgcgtcggacgtctcgcgcgtcttcagccgcgtgctccgctgagtgaacggtggcgtttctcgtgggggcatggcgcgcgccggcctgagtgacgaacaggcaggcaggcggcgttggtgcgtgcaatcgtgggacgatctcgatgtaacggtgtggttttctagacgctgtcgtgctttgtggtaggatggtaggaagagtaggtcacggtctgcgttttactagg

SEQ ID NO: 65228 - DNA, 406 bp, Setaria italica
  Peptide Sequence Number=SeqID_131202
gcgagtccccactgtaacgactctttgctcacgtttttcaccatggcctcagccgacttgctaccactgttcgtcccattgagttctgggaacgagcgtttcctcgagccggtggcgccagacaccgatcctccctcgccttcgatggccatgaagtacgactccctcgcgactgcttggaccgcgccgatcccggcggccttgacgaagctctcggcgatgcggttgaggagcgggtggccgaggtccagcatccagctcttcccctccaggccgccgcgaacctcgtccgcgaacgcccgcgcctgcgtctccatgctgccgctcatcttcctgagttcctcctctctgccgctctccctcttggcttgctgcgctgctgaagtgcacaggtgaatgcagatgg

SEQ ID NO: 65229 - DNA, 253 bp, Setaria italica
  Peptide Sequence Number=SeqID_131203
aatagcaccttgggcaactgctggaagcatttcatccactgataataaagatgttgcattttccgtcatgtttagccgctttagtccagccagtgccaacaacgtagcatggacatctcctcccttgagtttctttaaccgtgtctgaacatttcctctgaagttaactacagtatacgagacaacaagaagtggaccgtactcttttcattgcaagctatcaaagaagccagggccagcctttgccttcagc

SEQ ID NO: 65230 - DNA, 360 bp, Setaria italica
  Peptide Sequence Number=SeqID_131204
gcgcgcgcgtcatctccgcctctgcgctccgcgacgctcctacttagccaggctcggctgcaggagacgacgacgacgaggagggcctagctagtctccggccgggatggcgtccatgaagctcggctcccaagcctgacgccttcaagaggcaaggccaggcatggttctgcacaacaggacttcctagtgatgttactgttgaggttggggatatgtcctttcaccttcacaagttccctttgctttcaaagagtgccttccttgcacgatcgatagaagagaattcagaccaagaagaatgtgtcataaaactaaatgacattcctgggggtgccaagtcatttgagctagtcgcaa

SEQ ID NO: 65231 - DNA, 182 bp, Setaria italica
  Peptide Sequence Number=SeqID_131205
ctccggccgggatggcgtccatgaagctcggctccaagcctgacgccttcaagaggcaaggccaggcatggagcatattcgacctttggtttcgtggggcaagtctgaatgtcaaagtcatcaatcttcttccagctgattgccccaattattttgatgtgcctgtgcttagaggggtcaca

SEQ ID NO: 65232 - DNA, 393 bp, Setaria italica
  Peptide Sequence Number=SeqID_131206
gcaacctccggcgaggctgggggctgggccactgcagtccgggagaaccaggttctgaaggtgggcatggacaacatgcgaatgcggctggccgagctggagaaggagtgctcaagcatgcggcaggagattgagaagctgggtgggcgcagcagcaagggtggtggtggtgggtgggcctcccgagtcgtgccgcggcggctcggcctgaaggtgaggtcgcagatgtgcagcgcccaggagggctccgtcagcgagcagcagaggagcatgagtgccaagctcgacaagctacaggccaaggtgacgaagcagaagaagcagcttggtccgtcggtattgtccttgtaagttgttaagtttctttggttagtttactttccttagttcttt

SEQ ID NO: 65233 - DNA, 300 bp, Setaria italica
  Peptide Sequence Number=SeqID_131207
ttggtaaccactaaccaattcactacttcattttcaaatttgagctagcacagtccatttttttctggttcttccagtgggagtagttctgatgaagctgtgcgacagccttgtgcaggcttattgcacttttatgttcctgaaaaatgactagtaagaagggatcttactttggatcttgctgaattgtaccctcatgtttattctctccttatcttggactgcagattcaaagaagtttgcagctaagaattgaggaaccaagggaagtgccttcagatgatgctttgagtctagtct

SEQ ID NO: 65234 - DNA, 392 bp, Setaria italica
  Peptide Sequence Number=SeqID_131208
tggagtcgaccaatattacaacaagagcacaagatttgaggatatgaggagatatgatgatgaaagagcgccttacaggcggccacaaatgaagaagccttcgtcaagtagctctggaatggaatctagagatgatgatcttgatgctgacttctcacaacgcaagtctgggcaaagtagttcaaggcagcatgcttctaggccagaagcctcgcctttggactttgtcattcgtccacaatccaaaattgatcctgagcagatacgggctcgtgctaagcaggctgtccaagaccagcgccggctgaaggtcttcctcgcatcatcaaaactttttagttttgtctgcctgttatcagctggtttaggttctgccatgcttgttaacttgt

SEQ ID NO: 65235 - DNA, 212 bp, Setaria italica
  Peptide Sequence Number=SeqID_131209
agatgggttcagaaacttcgttgtggaggcatatactatgagcgtgcatgaatatagcatttttcaagcagagaatttcctttatactgtataaatgttttgtcatgcttataagttaactggatccgatcaggcgtgtatgttgagcgtgcatgaatatagcatttttcaagcagagaatttcctttatactgtataaatgttttgtcatg

SEQ ID NO: 65236 - DNA, 332 bp, Setaria italica
  Peptide Sequence Number=SeqID_131210
tgttgaaagatgttgaagcttgttacatccatcaacgtgaaggagaaagaatgtgattttttcaggctttatgtgtatctagtattgatggacaacctacttttctccagtggcgcattcagagataagactatgatcgttgatacctggcgtaattatctgcgcaactgttccacacagatcgcatgcacaaactgggattctatgctccaaaggtccgaaacaaggcttcgtatcttctgacaaaggtagacaagtaatttaaagaaaatactaggtaggacgtttactagactacggtagaattagaaggggacaacaataatactaaa

SEQ ID NO: 65237 - DNA, 250 bp, Setaria italica
  Peptide Sequence Number=SeqID_131211
atgcaattcactccatcttggaattgccacccctcagaatggtgaaaattctgaaatattcaggtcattcgttaagtactgtccagtagctttcatattcaaattataaacttacggttattcaattaccagatagctcttgtgttggtccacctcataacatcattgcatggttaagagttgtatctgcttgctgcaaaatcaggtacaatctttttaacacggtggatattgttattaagtatttctg

SEQ ID NO: 65238 - DNA, 346 bp, Setaria italica
  Peptide Sequence Number=SeqID_131212
tagtgactagtgagtagttgtaggtattgtgtggagcctggccttctctcctgtgccactgctagtagctaccagtccacaccaagatctatctgctggaatcgatatctgaataacttatatagcctctcatcccgatcaagcgcaggtgatcttcatttctcatggatgttactccgaaaaacttgcattgcttatttcaattctttcatgcagctgctgactacttagtttgcactgcacactgaccaatagtttttgctgctctctccttctcatcatatctactctctcagtgtttctctaaactatttgtaagttctcctaacaagatcgacaagccttt

SEQ ID NO: 65239 - DNA, 218 bp, Setaria italica
  Peptide Sequence Number=SeqID_131213
ttgggaaaacatctcttgtgctgcggtatgtgaataatatcttctcagacaagcaggaagcaacagttcaagcctcttattgacaaagcgccttgttgttgaaggacacagctgggcaagagaagtttcatgcgctaggtcctatatactatcgtgatgcagatgctgctctattagtgtatgacatcacagatagtgatacttttgttcgtgtcacg

SEQ ID NO: 65240 - DNA, 224 bp, Setaria italica
  Peptide Sequence Number=SeqID_131214
ttgttaaggtttgtttgttcctttattttacgttcttcttcttattattgggacacagctgggcaagagaagtttcatgcgctaggtcctatatactatcgtgatgcagatgctgctctattagtgtatgacatcacagatagtgatacttttgttcgtgtcacgaaatgggtgaaagagctcaagcaaatggcaagtaaagatattgttatggccattgcagc

SEQ ID NO: 65241 - DNA, 256 bp, Setaria italica
  Peptide Sequence Number=SeqID_131215
gaacttaaggaaaacgaaccttaccaatagtacgaatagatgatgttggtgatcaagcagcagacgaagatgatccttggaagccggtgcttgtcaggcctccacagctctccctggataacccgccaccttcccttgagcgtcgccaatgcagtctgcaccaccttcgtggccgccatgtgccgcttgttgaattccaccttggctgcaggaagaccctgtccttggtatggggtcatcagccaggaaagtaagg

SEQ ID NO: 65242 - DNA, 403 bp, Setaria italica
  Peptide Sequence Number=SeqID_131216
cctatgcataacgtagttgctgacgctttgttatgatgcctggatgatgattgattgcatagcctgtgtttctagccataccttgataattgattatcttgtttccttgtgttgacgcaaaatcctgacggtggtggaccctgcatcaccacatgaggacctgggagatctgcttaactccagtgcaaaattcaaatcggcgcgcgtggtgtgcgcgggcgtgccagtcagtttgaccattcaactgacaaggtggagataattctctcgaagttcgatggagtcggtcgatcgggccgatatgatccttgatgtgataaccatcagctagagagccgataggagacagagcaccgtcgagttcttgctccatcatagccagagccacaagccgatgggatct

SEQ ID NO: 65243 - DNA, 231 bp, Setaria italica
  Peptide Sequence Number=SeqID_131217
gctgtggtcatcagcccaccattgcatcccgaatcacatgaatcaggctctgatggatcacactcgagcagccactcgatggtctggccgtcggacttgtggccgagctcgcgtgtgagctggaagacgcgggcggcgcagatgatgggcatgcggatgcggcggccccggccatcgaccttgctgtggcggtccttggagggggccttgcggacggcgagggcgttgccg

SEQ ID NO: 65244 - DNA, 308 bp, Setaria italica
  Peptide Sequence Number=SeqID_131218
tttagttacttaattagttacttacctaattaacttaaaattaagcaaagaaaaaggatcagattatgaggggaaatcatatgttttcaagcaagagattatatgtatgattctaaaggaaaaggtttagaactcacaaatccgtatcccttggatctaccggtgttcttgtcagtgatgacgacggcttcaaggatatcgccgaactgctcgaagtaggcccgcatgccctccttgtgcgtctcccaggcaaggccccccagaacaccttggtgaaggtcgtgtccccgaactgccccgcgccacca

SEQ ID NO: 65245 - DNA, 343 bp, Setaria italica
  Peptide Sequence Number=SeqID_131219
gactcagtgacgtatgtgtctccgactcagtgacgtatgttaattaggagcactctcatcttagttagtacatgaagaggtgtgtataatatgactatagcacaaatgattgaccattgcttcagtaaacctttcgtgtgcatctccacaaacttctgtggacctacacacggctcatgaaaaatgccatcttgagggatgacaggattagtcgagtaacgctgcacatgaaaaaccagcagcgactctcagacttgattcgccctgcactcttccataagagtccaaggaacaatacattagcaaaatcgatctacctacgaagtaataatgtatgtgaatt

SEQ ID NO: 65246 - DNA, 294 bp, Setaria italica
  Peptide Sequence Number=SeqID_131220
cggatgcccacgaagaaggggaacgtcggcgggatgttggtgcggaacaccgtgctccggttcgccgccgcgcgccgccggaagaactcgtcctggctctggaaccagaagtagtccaggcggtcacggagcgcgccgatcaccggcgggccgtagctgcccggtatcggccgcggcgggggcgtcgcagccgaggcgctcgccgccggcgataaggtcggcagcatggctaacgacgacgtactaagactaattttaataactaaccggtaagtaagtaaggtaaagtaagaa

SEQ ID NO: 65247 - DNA, 444 bp, Setaria italica
  Peptide Sequence Number=SeqID_131221
cggacgacgatgacgatgatggcgaaggggagggggatgggcgacggggacggggacggcgacggcgacgaagatgaagacgatgaggaggacgaggacgaccccgggagcggcgaggttgccaacgggggtgtctctcactcgcgcggtggcgtggcgtcgcatccggtggaggtgaatggggtgatcgatgtagacgaggaagagagcgatgctgacgaggtcgtcccgaacgggggagtcgagcaccaccatggggcgaacgggtttcgggtcgcggtggcaggagaagccccagaagaggaggatgaggacgtggaggatgatgatgaagatgatgatgaaggcgaggaggctgagccacagagcagtgggagggttgccatgatgacaggggaggatggaggagaagagatagatggacatgagcatggagaaggggca

SEQ ID NO: 65248 - DNA, 459 bp, Setaria italica
  Peptide Sequence Number=SeqID_131222
aacctggaagactgaatatcaattgtgtagcatgcctagaaataccatgagataagatcatactgaacctatgtgatacaataggttttttgatgaaaaatgaagttgactagttatttacgacgcacgagttcctattatatttgccgactctaaaaaaatgtttatttactgaatgaattttccaagaattttcttagaaaacatttcaatccctgagtcacaaaagggcaaaaagtggtctagggctcaagacaagatcagctatgttaattcaaatatttgcgtaatacaaacagtgaaacaggaacagtaacatgtccaggaaggtaaatgaactgaccttctacttcttcatcaggctcttccacatacgcccctttgctttcccttggatgcttcctgaaattaactttcttcttatcatcttccttatcatcacgtgcatcatcctcatca

SEQ ID NO: 65249 - DNA, 429 bp, Setaria italica
  Peptide Sequence Number=SeqID_131223
catttgattggcatctcggaagtcagggtgtgcatttccattgccaagcatgttcattctgggatcccagccaggcaaattgtccctggcatttcttcgccatgattcctcaaatgtagcaagctcatcttcatttaagttgtgtaaaagtttgaagggtgttaacatgtccatcagacttcaggtttcttgttaatgagtgacccttactcccaatgccacgtgaaatcctgtgagtggctttaccagtagttgtgtcagcctccttactttcttccaatgtaatctaatgcattaacaaataattaccccttataacttttgtaacccttacgtagttactactagtattgaaggaaacggcattcatgagaaacacttactccatccacaccagtcctcctagttgtttgaagattgttattaact

SEQ ID NO: 65250 - DNA, 293 bp, Setaria italica
  Peptide Sequence Number=SeqID_131224
taccccggtaaaataaacttacaatagaaagaataccaaaatagaccaacaaaaatttacgaaacaaaagttacaaaattgtctggctcctttcagatcggtcgttcttcctggcatttcgagcatgcacatgtgaatccgtaatctgcaagctgcgcctgcctctcctcatatgaaagatcttcatcgatgtaggagatggtaatctcttcacccttgctaataggcttgagagcaagtatcactgcatgaccatccttgtcctcatctcttttaaatgctctagcatttgg

SEQ ID NO: 65251 - DNA, 251 bp, Setaria italica
  Peptide Sequence Number=SeqID_131225
catttcaacctcaagaataaaggttccacagacaggacgatggtcggaaaatttagactcccctcggaagtaggataactgagaaataccatctccatgccatagtattctatcacacctgaacacgtggaacagtaagtagccataacttgtatagtgttcttcatggaacagttgattgaacaggtaacagattggactggtagttgggatgaaaaacaatatgaaatgacacatgtagcctattgtag

SEQ ID NO: 65252 - DNA, 202 bp, Setaria italica
  Peptide Sequence Number=SeqID_131226
cctatcccctgtgtgccttgcctatctcctgttgcgtgtctcagtatctctggttgcagaaaattcccctgaggaacagacacctagacgtccttgtgaaggttccgcggtgtcgtgttcatgggtcatacaaaaaactagctttaattggtgattttaggttccagcccctttgttgtgcttacttgtcggtaacagctct

SEQ ID NO: 65253 - DNA, 265 bp, Setaria italica
  Peptide Sequence Number=SeqID_131227
agtaggttccatttgtctcccggtgggtggccttatggaccgaagggtaacaagcttatatagatatagatattatttagataagagaattcgattacagccgcaaccaaacataggattcgttaccttcaataatcagattaagttacatttgagccaaccaaacaccaccttagatcatgattgtacttgtcccaaaagcccagcaaataattacccaagagaaaccaagcagaagaatagtgtaatacgggcttgtcatccc

SEQ ID NO: 65254 - DNA, 340 bp, Setaria italica
  misc_feature (332)..(332): n is a, c, g, or t
  misc_feature (336)..(336): n is a, c, g, or t
  Peptide Sequence Number=SeqID_131228
cttgcttccatattcttgatgaataatgggaagtacattattcacaaggtgaatgacagtgagcttgggattttgcttggtgatgagtggatgaagcagatgatgagcagggtgcgccggtggagtatggaataccagctggggcttgggcaaaggtcatgtcagtgctgcagactggaggttctggcgttggcagtatcactgcaaaggccatgcttcagaaaatgcagatgtttaacagctacttggaggagatttgttgcggttgtctagttcggtatttgggttgtattcgttcttagttattttgtttagttttcttttagtttttntttnttta

SEQ ID NO: 65255 - DNA, 248 bp, Setaria italica
  Peptide Sequence Number=SeqID_131229
aagagcccttcaagtgcctgataaatcaaggattaatactaggagaagtaggtgacactaatttctgtcagaatttccacatgtatgtcagtgctttttattactcctaataaatgctgtcacaggttgagtatactgcatatagagacaatgaaggaagattggtttctgcagactcagactcaagtttgattgactgctaccaagaaaaagtacctgcagataaggttacaaaagttggagatcta

SEQ ID NO: 65256 - DNA, 273 bp, Setaria italica
  Peptide Sequence Number=SeqID_131230
gggtaattggagatacccaaccaagatcacaacctatccgtgttgaggggctatctgatctcttactggttagtcatgctgatttcttttttcttttgaatttctgtttcattctaaattagtctgatatcagtgtagatgtagagtttctcaagccattaccaaacaagcaagttaaggctgccttggtgtctaactgaaatgattttttttccaatcttagttcttttaccccagctaaaattgacctgcaaggagtaaagcttcattcag

SEQ ID NO: 65257 - DNA, 269 bp, Setaria italica
  Peptide Sequence Number=SeqID_131231
tcccggccgcagaagcacgcgcttgccctgcccctgtccccattcccttcgctcccgccgacaccgagcaattccgacgcggtgctctgccgacatggcgccgccgccccgcgccaccacggtcctcgcctggtgcgcccgctctcccgacgcgcgcaagcgcgcgctctctctctcgcctctcgggggactccgtttctcgcgatgcggccaccgttgatttctctctttcctcggtttgtgcttgcaggggttccggggaggacggg

SEQ ID NO: 65258 - DNA, 233 bp, Setaria italica
  Peptide Sequence Number=SeqID_131232
caggatcgtccaggcggcgattggcgggtgggcattgcctcgcggtggacgacaagggccgcgcgtacgcctggggtaagtgaacccacttcctggcgctgcccgtgaccgatttctggttggtttgatgcaatgtgcgtcgatggtgcaggggggaacgagtacgggcagtgtggcgaggagcctgagaggaaggaggacgggacgagggcgctcaggagggacatccccga

SEQ ID NO: 65259 - DNA, 179 bp, Setaria italica
  Peptide Sequence Number=SeqID_131233
cagtgatcgaagaataagcataaagctatgcaacattagggatcgtaagatttactgtacgctgtcaagaaaaaaaaagaggatttactgtatgagctgagtctggtaacgaagaacaacattcgggaagggaacacagattagttcatcgaatatattgccgaaatgaaaacctctca

SEQ ID NO: 65260 - DNA, 174 bp, Setaria italica
  Peptide Sequence Number=SeqID_131234
ggtgcccctaaaggttgagcttctagctggagaggatattgttcagggctcattccatgtttgcaggtatcatgtggaggaacccattcagttgcactaactcgagatggccgaatgttttcttatgggaggggtgatcatggccgtctgggctacggcaggaaaagttaaaca

SEQ ID NO: 65261 - DNA, 207 bp, Setaria italica
  Peptide Sequence Number=SeqID_131235
ttccgtgaggcgtcgtggcggaacatgtacctgtggacgtccgtgccgtcgctctgctactccgtcctgctctacttcctcgcccaggagtcgccgcggtggctgctggtgcgcgggcgtaagcaggacgccatggacacgctgcagcagatcgcgacgctcaacgctgagacacgcaacggataggcaaggcacacaggggatagg

SEQ ID NO: 65262 - DNA, 121 bp, Setaria italica
  Peptide Sequence Number=SeqID_131236
ggccgtgggcgctccggaggctggcggcgatcatgacgaccagtttcggcgtcggcatggtctactacggcatgccgctcaacgacggcagctcggccatcgcgttgtacgtgacgctcag

SEQ ID NO: 65263 - DNA, 223 bp, Setaria italica
  Peptide Sequence Number=SeqID_131237
acttaacaagtagaatacttagacaaccggaacaatagaagttttttccaattgtaaatgagcacagaggaaccaacaaattccggcaaaatagaagatctacgagaccaaatcttcttgccattcatgttttctctgttcttctttattctagccaggaaagcgtcaacgaatgctcccttccatagagcccttgagctgaaagcacgcgccgctgctccaa

SEQ ID NO: 65264 - DNA, 335 bp, Setaria italica
  Peptide Sequence Number=SeqID_131238
gtggtgaggccccagtaggcgccgttgaggcggatgtgctccatcaccagcgactcaaacgaatccttcttcttctccacggtgacgatgtagcggacgtgctggtcccacggccgagctcgccttccgccatggtccagcgtggtgaggccccagtaggcgccgttgaggcggatgtgctccatcaccagcgactcaaacgaatccttcttcttctccacggtgacgatgtagcggacgtgctggtccacggcgagctccgccttcccgccatggccgtgtcgctcggctcgtgctcctgcttcttcttcccctgaacgagagaggttctgaac

SEQ ID NO: 65265 - DNA, 476 bp, Setaria italica
  Peptide Sequence Number=SeqID_131239
gcacagcagttgatgccggtgcggaaggaaaccactggaggttcgatgaaatgaccgaaagaaaagggcaaccacactaaactcataatatttacatatccaaaaggggttttggaatttacacagccatcaaacatcctcgagccttcttgaaacattttgctccagatttgccctcatgctcttcattttgggccccatgtctcgagcaatatggatggatccagatgtcgatgatgggtttaccagactgatcacattccgcttgctcgggcatgcccatggataccgggacttgggtgattgccagcaacaaggatgtccttgatacggtttaacggtccaactgcatcattgattttctggaatgaaaacaagagtgtgctttcattagcactcagcagcctgatgcaattgagaaaaacatgtagacacattctgctttcattagcactcagcagcctccttgttgcaag

SEQ ID NO: 65266 - DNA, 401 bp, Setaria italica
  Peptide Sequence Number=SeqID_131240
cactggagttcgatgaaatgaccgaagaaaagggcaaccacactaaactcataatatttacatatccaaaaggggtttttggaatttacacagccatcaaacatcctcgagccttcttgaaacatttttgctccagattttgccctcatgctcttcatttttgggccccatgtctcgagcaatatggatggatccagatgtcgatgatgggtttaccagactgatcacattccgcttgctcgggcatgcccatggataccgggacttgggtgattgccagcaacaaggatgtccttgatacggtttaacggtccaactgcatcattgattttctggaatgaaaacaagagtgtgctttcattagcactcagcagcctgatgcaattgagaaaacattgtta

SEQ ID NO: 65267 - DNA, 425 bp, Setaria italica
  Peptide Sequence Number=SeqID_131241
gttaaaaatatgaggttgagttcaataaggctgcacagtctttaacagatgcaattattcccgctgctcagaaaagggtggctttaagtcgattgattaaagacaacattgcactaattgcggttttagaagccaaatttggtaaccatggagctgaaaatcctggtaaaaggcagctcctttgtgtggtacgtgaactggtcttcttcttttggtgtgtatgaagaactaaatctatggcagagtagtcataggcataatatcatcctcatgtagaaaatggatgttttaccattttctctaggttttgaggcctgctttgttacagactttctaatgcgtttctctgtttttttccatcatatgtcttccttgactctttttggctttatataattttgttagatcgattccattgattgtgg

SEQ ID NO: 65268 - DNA, 391 bp, Setaria italica
  misc_feature (8)..(8): n is a, c, g, or t
  Peptide Sequence Number=SeqID_131242
catcccgngtcgatcccagcacaacccccactccacgtcgcttgatccctgtgaatgctgctgatgcaatggggcattttgatttagataaccgaaccacttcgtttgggacatttactgtgctgtcctacaatattctcgctgatacatacgcaacaagtgatacatacagctattgtccaacttgggcactttcatgggcttacagaagacaaaatttactgcgtgaaattattggttaccatgctgatattatctgtcttcaggagagcttgataaacatggatatcaagcactttataaaaaaaggacaacggaggtgtacgcaggaagtcctcaagcaattgatggttgtgctacttttttccgaagggacagattttctacaata

SEQ ID NO: 65269 - DNA, 250 bp, Setaria italica
  Peptide Sequence Number=SeqID_131243
aaatgaccgaaagaaaagggcaaccacactaaactcataatatttacatatccaaaaggggttttggaatttacacagccatcaaacatcctcgagccttcttgaaacattttgctccagatttgccctcatgctcttcatttggggccccatgtctcgagcaatatggatggatccagatgtcgatgatgggtttaccagactgatcacattccgcttgctcgggcatgcccatggataccgggacttg

SEQ ID NO: 65270 - DNA, 373 bp, Setaria italica
  Peptide Sequence Number=SeqID_131244
cttctctcttgtaccatttcgttcctgttacttgtcatttaggtaccagtgcacttatttgaacattatttattctgagtgtatgctatcgagattttataacattatagtaatggagaaggatgatgatctgttcatatcattttttcacgtgttttgaaagttcatctctgtccatcatacgttggcatttattttagaccagagatgataataacatgtttttatgccctgtggatctcacttgtttcttgaattgtttggttatgctaagcaggcgaatacacatataaatatccatcatgacctgaaagatgtgaagctatggcagatacacaccctactgaaaaggattggagaaaatagctgtcag

SEQ ID NO: 65271 - DNA, 267 bp, Setaria italica
  Peptide Sequence Number=SeqID_131245
tcatcggatcatatcgcactcctagcagaattccggtgcaagccgagagttagacgataattttaggtactgcctgctgctgatccattattgcctttgatcttgttttgccttattttttttctttgggttaaaaaaatcctatcttgtaaataataggatggtacataccctatattcttgcaagtggtatgctggttgtggagctcagttgaatgcatgagctgctacaaattgttttaaagtaaaaaaaaaaaaaaaaaaaaa

SEQ ID NO: 65272 - DNA, 236 bp, Setaria italica
  Peptide Sequence Number=SeqID_131246
cagagggcaaaacccaaaaccctaacaatcatttccaggccccgccccgccgtctccagaacgttccagaaccttcgaggaaccttccacaggagcaggcgcgagcgcgggtgtttggatcgggggaggcaattttgctccagatttgccctcatgctcttcattttgggccccatgtctcgagcaatatggatggatccagatgtcgatgatgggtttaccagactgatcacatt

SEQ ID NO: 65273 - DNA, 223 bp, Setaria italica
  Peptide Sequence Number=SeqID_131247
taaattaattctacttttgaagaattttttgtcaccagagcttgataaacatggatatcaagcactttataaaaaaggacaacggaggtgtacgcaggaagtcctcaagcaattgatggttgtgctacttttttccgaagggacagattttctcatgtcaaaaaatatgaggttgagttctgagacacgcaacagaggataggcaaggcacacaggggatagg

SEQ ID NO: 65274 - DNA, 463 bp, Setaria italica
  Peptide Sequence Number=SeqID_131248
ttagtttaagttaatttaattttagttaccctttagttacgttaaggttaggtacttgggtactttcttgtcttagtgttcctgcgagatcgaccacctcttacagggcttctgctcacacttcttctaggtattctcacagggctcctgctcaggcttctacgtatattccttcggggacttctcatcgggcttctcctggcaggcctatgtgggctccttgaaaacctaacagggctccggctaacacttcgcaatggagatcttgaagaggtccgggtaatgcttcttctcttctccacaggtgggcttgggctgacacttttacgtatatgagtcctctccgggctcctgcttggagttcttcgttgcatggacctagctgagctcctgctaatgcttcttctttgagctttaacaggactcctgcttatgcgggagtcgggcttctgcttgcctctct

SEQ ID NO: 65275 - DNA, 235 bp, Setaria italica
  Peptide Sequence Number=SeqID_131249
ccactatatcacagatgtttgtttggatgacaatgctgtgtcaagtgatccgcttctggcttttcttttggatgaggtggtcatcaaggactggtgcaagagggctgtaaatgcgctcatttctgagattggcatgatttgtatccaacagtgtttgattgttctagattcagttacatactttttttaaaaaaaatggtgtttcgctcttcatgtgtgcatggccatgcatatt

SEQ ID NO: 65276 - DNA, 318 bp, Setaria italica
  Peptide Sequence Number=SeqID_131250
gtggaatggaggacctggccaggacggcctcagaagggcggcggcggcccgccggggccggggtggccgaggaacggcgcgcagcagtcctggagcaggcagcagcagcagagaacgtagaagctgcacagcaatcaacagcacaagaggctcacgtcaagagccgtcacagtgaaaatttcctggctaacaccgcacagaaggaaactaaaaggaaccgtgctgtgtatgtactaggagacgaactcattaggcaactgaattcgacaactttgtttgcagatgcaaggatgagaaagccattagttggttcaactc

SEQ ID NO: 65277 - DNA, 387 bp, Setaria italica
  Peptide Sequence Number=SeqID_131251
tcaggtgtatatgatctccgcttcttatcgccatcatgttctttaggctgctttgatgtccttctgtgctcttccttagcccgtgctggggaagcagagtaatcatcacgccttctgggggctggagagtatgaccgggatctagcacggccacggggggcgcggagagcgtgaacgtgagtatgaacgagaacgagaccgtccacggcgagaaggtcgacgcccttcatgatcagaataccctcttggccccattcgtctgcgcatgtcctcaggccttttccgtgtatccgcagcaagaacaacagtgatctacaacgacccaagaaaaacaatactaggacggttacaatagtaggtaattaagaacgaaccttaaacaaagaa

SEQ ID NO: 65278 - DNA, 261 bp, Setaria italica
  Peptide Sequence Number=SeqID_131252
atcttcccatggaagacacggttaaaccctcttgtcttgatgaaattaattttgtcgacaaattgaaccttgtcttgataagagaacttcattcgcacaatactctatctcaccaagcaaatgaacgattaggactgttcagggcttgtatttacttcaaccaaatacaatcccagtgtgatagtctcttggcaggtacacgtccctcacaggaccgaacctttcaaagggaactcggagctcctcaggcctgcatctcag

SEQ ID NO: 65279 - DNA, 180 bp, Setaria italica
  Peptide Sequence Number=SeqID_131253
gtgtatccgcagcaagaacaacagtgatctcacgcccagaaaacatctggcggttcatgtggtattgcgcctcagaagcatcataagcatcctaaagaacatgatggcgataagaagcggagatcatatacacctgaggataggaatgatcgtcgtggtgcagacaatggtcatgatgag

SEQ ID NO: 65280 - DNA, 408 bp, Setaria italica
  Peptide Sequence Number=SeqID_131254
ttcgttctaggtattaccttgttggtcttatacgtggctgttgtgcctaaattccatcttggtgataactgaagggttgccaaattagagcaggagagggagaacctaaaaatgatgttcaggttatatggtagtcaccccagccattaggaggaaggaaatactatgtaccctgagtaatattttgcatttttccctcaatttcgtgcgtattatcagtgaaaacattggttgtagccgctgttgtccaactgggcatttcgtgtaaaccagagggcaaaatgaattctaggccatcaacgtcttcgttcagatttgcatgggcaaggagcacttttgcttaggatgggagttgaatgtattttttctatatttatgaacgatagtgcaacatggatcctaattttc

SEQ ID NO: 65281 - DNA, 236 bp, Setaria italica
  Peptide Sequence Number=SeqID_131255
tttggaacgcatgatgtagttgccctgaagccaaataaggcagatgctggatctgcttctcttgggcaaggtgtagtctatcgcttaaaggattcttccatcactgttgcttttgatgatattcctgaagatggtttaaacagccctctacgtcttgagaagcttgcaaatgaggtactaccattcgttttttgtttctctatgatttatgttaatcacagcatattcagctcaga

SEQ ID NO: 65282 - DNA, 324 bp, Setaria italica
  Peptide Sequence Number=SeqID_131256
ttttttttttaaagttaagaaataaggaaaggaaattagtaggtagaattaatagaaataggtagtaaagaccaacaagccatctgctggccagaaggcgccttttctacaacggtggcaccagaaaggaacgctgtacagctactctgaatttttttggtacaaactaatgttatctgaggaactcctcgagctaacgaagttgctgagttcatggactaacttggtaacatgctcatgcttcaagctgtctgcatttcggttcagtagattgagccacgacatggcagacgtgttctgtatcttgccctcctggtggaacct

SEQ ID NO: 65283 - DNA, 318 bp, Setaria italica
  Peptide Sequence Number=SeqID_131257
aaataacaaagaattatctccagcataaaaagtcttccagggaatccaacaccaggccataaggatgtgatgctttctgctggagataatcttgtattggatggcaagaaggatggagaccttctgggtgttagaaggacgtgcctgatgttgatggagtcacttggacagctgcaaactgatgatataactcgtttctctttggaggggcacatgcttacaactgatatcaaagagagagcgaaaaagattgcatttgagtggaagtccaagctggatagtcttgacattgatgctagtaatgggaactgtcttgaa

SEQ ID NO: 65284 - DNA, 308 bp, Setaria italica
  misc_feature (307)..(307): n is a, c, g, or t
  Peptide Sequence Number=SeqID_131258
aagtttatatcggacaacaggaagaacttggcaatcatccgtgaggaaattcccagttgcactgcagaaagcatcacatccttatggcctggtgttggattccctggaagacttttatgctggagataatcttgtattggatggcaagaaggatggagaccttctgggtgttagaaggacgtgcctgatgttgatggagtcacttggacagctgcaaactgatgatataactcgtttctactttaggaaggggacaacaatagacttaacaaactagaataatacaaaaactaactacaacaactana

SEQ ID NO: 65285 - DNA, 296 bp, Setaria italica
  Peptide Sequence Number=SeqID_131259
aatggacaaggctctggataatcttggtgtcaagtggcctaaactggcttctgaagagagtgtgcgcctgcaagttgactgtgctgcagtgaagcctcgttctgagttagtctcgctctgtgaggaaatgaatgtgaaggggcttcataagtttatatcggacaacaggaagaacttggcaatcatccgtgaggaaattcccagtgcactgcagaaagcatcacatcctttattggtccttggttgtttggtatttcccttggtaagtacttttttatttgttctttggttagtta

SEQ ID NO: 65286 - DNA, 375 bp, Setaria italica
  Peptide Sequence Number=SeqID_131260
tctattgtaaggttctaaggtcttgtattcgttgtattgtaattctattctacctttacgtcttgtcttattgtcttgcagctcaagatgttgcacagcgttgcaaggagcttggaatcactgcgctgcacattaagcttcgtgccactggaggcaacaagaccaaaactcctggacctggtgctcagtctgctctcagggctcttgctcgttctggcatgaaaatcgggcgcattgaggattttaccccggtgccccactgacagcactcgcagaaagggtggtaggaggggaaggaggctgtaggcgtcttctcccggctatttgccatctcttggcgcaggccatcaagaaactggtcctctgtgggtagaa

SEQ ID NO: 65287 - DNA, 295 bp, Setaria italica
  Peptide Sequence Number=SeqID_131261
acaatgaaggtcaaggctgatcgtgatgaatcatcaccttacgctgctatgcttgcagctacaaagaatagttgcacagcgttgcaaggagcttggaatcactgcgctgcacattaagcttcgtgccactggaggcaacaagaccaaaactcctggacctggtgctcagtctgctctcagggctcttgctcgttctggcatgaaaatcgggcgcattgaggattttaccccggtgcccactgacagcactcgcagaaagggtggtaggaggggaaggaggctggtaggcgtcttc

SEQ ID NO: 65288 - DNA, 237 bp, Setaria italica
  Peptide Sequence Number=SeqID_131262
cctatcccctgtgtgccttgcctatccccgttgcgtgtctcaggctcagtctgctctcagggctcttgctcgttctggcatgaaaatcgggcgcattgaggatgttaccccggtgcccactgacagcactcgcagaaagggtggtaggaggggaaggaggctgtaggcgtcttctcccggctatttgccatctcttggcgcaggccatcaagaaactggtcctctgtgggtagaact

SEQ ID NO: 65289 - DNA, 208 bp, Setaria italica
  Peptide Sequence Number=SeqID_131263
tctggttcggatcactggtggcatgaaggtcaaggctgatcgttgattgtaattcatcaccttacgctgctatgcttgcagctcaagatgttgcacagcgttgcaaggagcttggaatcactgcgctgcacattaagcttcgtgccactggaggcaacaagaccaaactcctggacctggtgctcagtctgctctcagggctcttgct

SEQ ID NO: 65290 - DNA, 217 bp, Setaria italica
  Peptide Sequence Number=SeqID_131264
aaggttctaaggtcttgtattcgttgtatttgtaattctattcaccttacgcttgctatgcttgcagctcaagatgttgcacagcgttgcaaggagcttggaatcactgcgctgcacattaagcttcgtgccactggaggcaacaagaccaaaactcctggacctggtgctcagtctgctctcagggctcttgctcgttcttaggacaatagaaaaa

SEQ ID NO: 65291 - DNA, 212 bp, Setaria italica
  Peptide Sequence Number=SeqID_131265
gcatgaaggtcaaggctgatcgtgatgaatcatcacccttacgctgctatgcttgcagctcaagaatgttgcacagcgttgcaaggagcttggaatcactgcgctgcacattaagcttcgtgccactggaggcaacaagaccaaaactcctggacctggtgctcagtctgctctcagggctcttgctcgttctggcatgaaaatcgggcgca

SEQ ID NO: 65292 - DNA, 185 bp, Setaria italica
  Peptide Sequence Number=SeqID_131266
ggcgtaggcagcggcggcgtgctcgtgatctcccgcaccaggcgcgctcggctccggtcacccgtcgttccacgcaaccatgtcgaagaggaagaccagggagcccaaggaggagaatgtcacccttggccccactgtccgctgagacacgcaacaggggaaaggcaaggcacacaggggatagg

SEQ ID NO: 65293 - DNA, 437 bp, Setaria italica
  Peptide Sequence Number=SeqID_131267
accaagggtctatagatcagtaaacctaatcatggctattctatattgaagactataccacaataaattatacaggtaggtatactgtgcaagagtacaaaatacaaaatgaaagaaattgcaaaagactgtcactaaaatgcatggaaagaaattcagttgaaagaacacagacaacgcaaggatcagtaaaagaaccttggactgaagtttagatttcaaatcaatagtctcctgctgtgtgtaattagtctcctgctcagggggtatatcagcttttattgagagctgttgctcaaggcgaagaactttttcttgtaactcattgatttccacattctgcaattagcaaaacgtttggataaaaacttttgccaacttgaagattttaaagtgaaaatagagagagagagagagagagagagagagagagagag

SEQ ID NO: 65294 - DNA, 268 bp, Setaria italica
  Peptide Sequence Number=SeqID_131268
tgtctgcttgctgcttcaaaggttaacgggcttcgctatttgttcaactattaatttctttccagaagtaacacatagtgcaccactaatcactgctttgatactgatgaaaaggtaaaaacgaaaaaaatgataaagaggggaatacttggtcctttgtcccttcagggtcatctatcgattgttcgattgatcttttcagcgaactggtaccaaatgcaacctccccagcaagcatcttaatttgctcaataagtagatccatttg

SEQ ID NO: 65295 - DNA, 274 bp, Setaria italica
  Peptide Sequence Number=SeqID_131269
ttctttcttatttctttcctttgttaattttttagttcctttctagtacgtaactaagtaagtcggtttctaaactccggtacttctatgttcttctgtggtcaacttcacagtatcatctgaaatttgtttctcaactagagcaaaattcttgtcaactttgttttcctttgtgccattagttatatcagctaggttgactgatcgatcatcaacattcaaatcggatatgcctaaagcccctctcttcaacttagcaacgaggacccacatg

SEQ ID NO: 65296 - DNA, 261 bp, Setaria italica
  Peptide Sequence Number=SeqID_131270
caaacgggtcaacttagaatcacgatagggtatatgtgtagccctcccttcgctgagcttgccaatgacctttgaatagaaaaatgttcaagtcaacagaacttaagaccgaaaatattttgacagaaggtatagttatacaatggtcaaattcttaagaagctgagttgaagtcaaagttgctgatagtataccagcaatcctgagttgtcacatatgattggcaatgagaacttacggttccaagagttaaaagactct

SEQ ID NO: 65297 - DNA, 283 bp, Setaria italica
  Peptide Sequence Number=SeqID_131271
atagcacctttcacaacagggcgagctgcaacatcatagacagcttcggtggttgtcgaaggcccaaaaaactctatcgtaagcataagccgtcgccgggttgtactcgcaccgcacaagccgatccccatccgggcaccaccactccctccccgccctctcactcccgatctctcctccaccaccagcgcctcctccgccccacccctctcctcgcctcgcgcggcgaccggcggcggatcgtcggcggcccagccatgttcagtgtgacgaagaaggccac

SEQ ID NO: 65298 - DNA, 256 bp, Setaria italica
  Peptide Sequence Number=SeqID_131272
aaatcattcggaatttatgaccattttcatggtctgtgaggtgggatttacagatgcatcgagagggtggatgcagtgtatatcccatcttttccactactcctgtctttagtatttttttctttggcttattctgtttatgagtttttaaacttatttatctgatatttgagcagaactattgaagttggtgctgatagattcaaggttcctgatattctatttaatccatctctatcccagactattcctgggg

SEQ ID NO: 65299 - DNA, 231 bp, Setaria italica
  Peptide Sequence Number=SeqID_131273
ttgttctttattttgttctttagtttgttacttatttcttaaggttagtttctttgtttttgtctagtagtttcctagtattacttgtcttttgatgaagtggcgtatgcaaatgttcctactacttcatatgagcttcctgatggacaaactattgaagttggtgctgatagattcaaggttcctgatattctatttaatccatctctatcccagactattcctggggtt

SEQ ID NO: 65300 - DNA, 127 bp, Setaria italica
  Peptide Sequence Number=SeqID_131274
gctcgtgttaaggttatggcaagtggaaattcagtggagaggcgattcagtgtttggattggagggagcattcttgcatctcttagggtacgttaccaagacaaaatagtaggttactaccaaaaga

SEQ ID NO: 65301 - DNA, 280 bp, Setaria italica
  Peptide Sequence Number=SeqID_131275
tatgctgggttaattctagaattttgatatctgctttggtcccagctttttcctactaggcaaatattgcttttagatctgaattaggtttattttgcatagcgcgcatggagttctatacaattttttggttgtttcttcacttgtatttaccattccaaaggcaactttcgaagcatttgttggaatacgtgacgacacagcaacttctcaagttaaactctttggtgaccaactccaggatttggaaagaaaccttccgatggacaatattttcaaa

SEQ ID NO: 65302 - DNA, 344 bp, Setaria italica
  Peptide Sequence Number=SeqID_131276
cccttgagaaagcagctgaacttcttgagaaagcatcagtgtgctctgattctccaagcctcaagaatttgctgagaaccaaggcaaatgctttccttcaaatgattactatgaatctgatatagcttggatggagttggttagtatcgtaatcttttttccatttctctgttcatatccatataataatgcaccactggtcttgattcttctgcttcatggcaaattgtgttggttgttactctgtctcctatcttctataactgcaatcatggtctggaattgtcggcagtagatattactgccaaagtttgagtaaaatgaagctaatagaagaccccgga

SEQ ID NO: 65303 - DNA, 544 bp, Setaria italica
  Peptide Sequence Number=SeqID_131277
cctagtccctgtcaacagcttcatgatgctctaacaagcactgctggtgcaggatgtgaaaggtccacaaaccatttgctttcaatttgcccaatgatgaacggattgtaaatgaacgaggaactgccatggttatgcttaaaaacgtttcagaagccaagttcaagcatatcttaaagcctatagctgatgcctgcatcagagaggagcagaaagaatatgttgatttcgagccttattatacacatattgtttgccacgagtgctgccatggaattggacctcattctatcacccttcgaagtggtaaaaagtcaacagtacgattggtatgtactaaaacaacaatttgaaaatcactggttttagttcaacaccaatagaaatgttccacttccctcaaaatcctgtgaacaagaacaatttacaaaaatttaatacttagtaatagaaagacaacaataaaaaaattagaactaaagttaacaagaagaataggaaaattttaggttaaaacaaaaatagtactaaaaatagaaccaaa

SEQ ID NO: 65304 - DNA, 259 bp, Setaria italica
  Peptide Sequence Number=SeqID_131278
tacttagctacaacatttggtttctctctaagttcttcgcatatattacctctatatttggcattcttgtcttgtatgcaggactccaacttagatgtcacaattggcccatatgaaacatatgaagatgccctatttagttataaggcaactttcgaagcatttgtggaatacgtgacgacacagcaacttctcaagttaaactctttggtgaccaactccaggtaatctcactaagtttcctttaaaggaaatattg

SEQ ID NO: 65305 - DNA, 288 bp, Setaria italica
  misc_feature (211)..(211): n is a, c, g, or t
  Peptide Sequence Number=SeqID_131279
tgctgctggaggaccgctgcttctcgtcctctcaggcgcccccggtacgccgtcagtcctcaatcttcatcgctcaccagtcaccagttcaccaccatagggggcccttcagggcacctcatccatcgccaccttcctcctctgcattgctaagtaaggttataagatggatgctctcttcagattgtgaagtgtccaggttcttctccgntgatcatttccatgaccacaacgccaaagctataaatatcagctttttctgtgatttgggaggtcaaccactcggga

SEQ ID NO: 65306 - DNA, 465 bp, Setaria italica
  misc_feature (385)..(465): n is a, c, g, or t
  Peptide Sequence Number=SeqID_131280
tacctaagttactaacctaagttttctaacctaattctattagggggcccttcagggcacctcatccatcgccaccttcctcctctgcattgctaagttcagaccaccttccactaggtcatgaagtgaaattggaatcaaagctcttgcccagcacgtactccctacatggaagctgcagctatccagagtccaggcagctggaaccagctcaggctcacacgcattgactggccaaccatgccgtcaactatgggccaacaagtcacattcatcgtatgaatatgctgtaaagtgaagaagttatgggaggctatcagcagttgagtactgcaggtttttcagacattgtggtctaaagggtgttttggattaacagggtagnnnnnnnnnnnnnnnnnnnnnnnnnnnnnnnnnnnnnnnnnnnnnnnnnnnnnnnnnnnnnnnnnnnnnnnnnnnnnnnnn

SEQ ID NO: 65307 - DNA, 309 bp, Setaria italica
  misc_feature (281)..(281): n is a, c, g, or t
  Peptide Sequence Number=SeqID_131281
ttggttagggttatttgttctttggtcttgtcccttcttgtcttgcttgctgcctcctggacgcctgcttctgagagaggaccgacggcggattcaagatgacagcaagtgggacaacctcatggaaggaccggaacccaactgggcagtagcgttcttgtgcttcgttatcgtctcttttcgttatgaactccctgcaatgagactgctagtagtactctgtcggtgttgattggatgatggttatggctggtgtgtattccgtgggttgccgtgtttcnggtggaattcaacctgaggtgctagttt

SEQ ID NO: 65308 - DNA, 350 bp, Setaria italica
  Peptide Sequence Number=SeqID_131282
tgtctttcttcagaaactctcatcccaaaaccttgaagaagctcaacaacattgttatgctcagcagcagtacatggctttggtgcattactaagttgagcagagcgttttggcggctcgataccattcgcctcacaccattgagttatgaggctgcgaaggacataatttggagtcagggatttattcggaagcttctgctgtgtcttcggacaggtgtcatgtccagcctccagccacctctctatgcaccctcgctcataagtctgcccagtggcgacaataactgggtctttcattaaatccagtgatattggacaacggaatcatcaggatagcaggacatgctg

SEQ ID NO: 65309 - DNA, 301 bp, Setaria italica
  Peptide Sequence Number=SeqID_131283
ggccaaaaaacgagccactaactacagggaagaagttgctggtcagtcacctcatcaatcaggaatatgtgatgatgatgtgggaagcagtgatcgctctgcttgcatatctgcctgcgcttgagcttcaacaagagccagagcctgtgcttgtgcctgcgcatgaacctgcgccatggcctctgcttgggcttgggcttgactctgctgctttaggaaccgattcattcgttcgagcagctggattgactttacctactttacctactagtactagtagaccaactttacttagtactaa

SEQ ID NO: 65310 - DNA, 397 bp, Setaria italica
  Peptide Sequence Number=SeqID_131284
gttcatggtcacccggtgctcgacgctcgggtacttgtcattagacattatctgcaagaggtcgccgacgttgatgacgagcgctccgggcacgggcttgaccatgaacacgcacaaggaacccagggtttcaatcgccgtcttcttcagtcctgggaagagaggggactcgaatttgtacggaccattgccagggctggtttcttcggagaacccacccaagtcaagaatttcaccatggagaagttctacgggaccttcttctcacgggaccttgcgagcaaagctctaattgatcacttcaagatgtaatgtagccgaaaaattcagacctgtgtagtgtagatgggtacgtggttgctggtaaggaattgttctgcttcatagtagcagtcat

SEQ ID NO: 65311 - DNA, 415 bp, Setaria italica
  Peptide Sequence Number=SeqID_131285
ccacaccaagccgcacttctgaaccgcgccgcctttggccaggctgtgggaaatgcaggagaggagaggcaatggttccagctaggccccgaggaggtgttctcctttgccatgccctcaggtgcatcgcagtcgatacggagaacaagaagcagatgggtgaagggggacctgtgggatctcttgaactccatctcagagccattcccggagatgtacaaggcgtatgagcaccttagattcaagaattgggttgtgaggtcaggaaagcagtacggtgcagattttgtagcttaccgtcatcatccggcacttgtacactcggagtttgcagtaactgtagtgccagaagcccgaagtttggagagtagattagaccacacctgcaaggggccacatctggtgccaaatgctt

SEQ ID NO: 65312 - DNA, 321 bp, Setaria italica
  Peptide Sequence Number=SeqID_131286
ttaatttagttttacttaaacgttaacgttaagttaaacccttaaaacttaccttagtacttcggtcatgtgaggaccaagagaggtggtgttgatgttgcagcctctatcttgagacataagtgaggtgaatgttcatggtttgccttggtctgtcgagtgtcgacgatggtttgttcgatgacgtgttcctagttcctgctcagtgttagacgtttgtgccgaggctttagctagtaccgtgtgtcgtttgcttgtagcttttcccctgcttacaatccatcttatgatatgaattagcaggagctagaatttgccgac

SEQ ID NO: 65313 - DNA, 381 bp, Setaria italica
  Peptide Sequence Number=SeqID_131287
aagcatatatcgttcgactgttcaagcaaccagcgaaaaactctgcaacagccaggggtaggaggctaagagctggctgtggattctcaaatctgaaacagttctcatccaagagcatagtcaatccgtaaggggtaagtcatatagtagtacacgtactgaaacttccactgacttgcagtagaaatgcaggacaccacgtttctttgagcaggcatacaaaaaagtgcactgaacacaaatgactttggcgttctgaacaacccaccatgtgtaaaaaaaatgaaaacgaagaaataaatctaagaaattgacatttgatccatcatcattacacagtagcaccactacaggctgctgatgaactgaacatgagattgt

SEQ ID NO: 65314 - DNA, 362 bp, Setaria italica
  misc_feature (347)..(347): n is a, c, g, or t
  Peptide Sequence Number=SeqID_131288
actaccaagtaaaagtagtttaggacgaatactaggaacgaatactagaagaaaacactttaactggagtgctacctggccaaaggaagttgagcagctagcaaggaatttcctttttgacccatacaaggtcactattggttctgaagaattgaaggctaatcacgccatcgtgcagcatgtggagatattatctgagagtcagaagtataacaagctggttaatctattggaggatataatggacggcagccgaattttaatatttatggacacaaaagaagggatgcgatcagattactagacagcttcgaatggatggttggcctgctttgctatccatggtnacaagagccaagcag

SEQ ID NO: 65315 - DNA, 300 bp, Setaria italica
  Peptide Sequence Number=SeqID_131289
tcaggcagcactcatttgcatgtagcagtcagtacacttttctgctatgggaccttcatatttgcatatttatatatttcaaggttgaccttagtgtctccgcgtccatttttcagaatatgtgttgcaagaaatcacgaaagctggctttgtggaacctactcctatccaatctcaaggttggccaatggcacttaggggtcgtgaccttattggcattgcagagacaggatcagggaaaactcttgcttaccttttacctgccattgttcatgtgaattgcttctagtccttatttct

SEQ ID NO: 65316 - DNA, 265 bp, Setaria italica
  Peptide Sequence Number=SeqID_131290
aaaacaaagcaatcttatcattttgttaagttttttttctactaagatgagggttcgaatttttgttcatgccttctctacttcatcttttgaatggcatctcaaacttgctgcaggttgatgcgggtaaaagaccagttactggactccggttgtttcttgaaggaaggaagagcaacaaattagctatacatctccagcatctctgctctcttccccagattattcagcttgaagacgacccttacaatcaccaaactacaag

SEQ ID NO: 65317 - DNA, 177 bp, Setaria italica
  Peptide Sequence Number=SeqID_131291
aatggagttcctggaagtgacgtgattggtataaaagacattgagataacatcgggctctgcttgaacagagttcctggaagtggatttttgaaccatgcaattaatctgtatcttcgacataaacccccaatcgaggaattgcatcagtttttggagttccagcttccaaggcagt

SEQ ID NO: 65318 - DNA, 151 bp, Setaria italica
  Peptide Sequence Number=SeqID_131292
taaagaacggaacgaacggactacgacccgaacccgtaggactacaatacgagctcgaccaatggggaggttcaggatatcgttcttcccggcggcgttaccgtcgccggcgtcaccaagtcgattaagtgtgacaaggggggagcggatg

SEQ ID NO: 65319 - DNA, 407 bp, Setaria italica
  Peptide Sequence Number=SeqID_131293
caaagaagtgaagtgtgaacccagtgttccttttccacgtttccaagtctgtttgcctgcttctgttaagtggaaaggatgaaatgagatctcaaagtaaatggggagcatccagaagaaacagatacctgctgtctaaatagaaatagaatgccattctgtggaaagggaaaaaaaagaagcttgtgctgttgctttagtacttggcttcatgatcgcctcaatagaaatgttttatacgtatgcaggttgctatgttaggacattgaagattttcaatatgataagatcaaagcatcagcatcttcaagtaaggcaattgtatctttgggtcgtcccacgagtcatgagtattgcttggaagatactcatggaatctctgtggacactcatgtgcatcgtattct

SEQ ID NO: 65320 - DNA, 242 bp, Setaria italica
  Peptide Sequence Number=SeqID_131294
aaaaggacctcatgccttgctccttcagttgtgtttccttatcagtctaatctttcatagccttccaatctgttgctagcgccaccatcttttccttttactctacttattatgcagcttcattgcttggttgcacattgaatatccttactaatgggagcactactagcagatttctcttctctggacaaccatatcaaacatgagggaatcgccttcaacacaaggggaaccatctacat

SEQ ID NO: 65321 - DNA, 203 bp, Setaria italica
  Peptide Sequence Number=SeqID_131295
acatttctgacaagatgaggcttctacgagtgctcgacttagaaggcatagatgattatcagaaatattatatacaatcccatcagcttgatcatatttggaagcttcttcacctaaaatacctttctctacgaggatgttttcgtatttatctactgccagattcattgggcaacctgagacagctccaagtgctagacgtc

SEQ ID NO: 65322 - DNA, 504 bp, Setaria italica
  Peptide Sequence Number=SeqID_131296
agaaacaaaacaatgtgaaattctctagtttttttcatgcacggcatctattgctgcagctgtgaaaaccacatcaaccatggtgccgcatttaggattgttgaattctcactcgaaaatgtcaatagtcgaggttcctagtcctaaagactcggaaattgttgaatctcttctccttgatctgttagatccagaaaataaagcgtatgccctttccatgttacccaaggtaattttatttctcctctgtatcttctattttttttcccctcttctatttacttggcataatatatcaaaagtgatcggcattgagttgtttcaagctcagattgcttatgatggcatgatatggtcataaactgtcttttaccaattcggtgtgttttctctaatatttctttataacttgtgatgtaatactatttctttcttctttttattaagttagtaagtgatcaactcattcgagaatattagtgcttggccacttgttgattctcg

SEQ ID NO: 65323 - DNA, 323 bp, Setaria italica
  Peptide Sequence Number=SeqID_131297
ttgggttagtattgttttccggtattttgggtccactaagaataataggacaactcttttggcacaatggttgtgctgctgcaggaaatcatgtcagtctatcctacacttttcaccccctacattatccgcaagtgtatcaaacagagcctgcaatgttctcgcactccttcagtctgttgcatcacaccctgagacaagggacccctttttaaaagctgaaattactgagtacttatacccactcttgaacactactatcgacaccagattcttttgagtacctgcgcctcaccactcttggtgtgtttggtgctcttgtt

SEQ ID NO: 65324 - DNA, 167 bp, Setaria italica
  Peptide Sequence Number=SeqID_131298
tcgtctgttttggcgagcgcaagtcacgcggtacggaggggtcgagtgacgtcatcgatatgacggctctctgggagtgggaggcgccatgttagctgtgaaaaccacatcaaccatggtgccgcatttaggattgttgaattctcactcgaaaatgtcaatagtcg

SEQ ID NO: 65325 - DNA, 133 bp, Setaria italica
  Peptide Sequence Number=SeqID_131299
cagtgttttagcaaacatggtgattgcattaactgaacagccctccaccaggttgctgaagcatgttacctgctacaaatctcgcatctagcccaaataacctccccgtccatcgacccaggtagcacctgca

SEQ ID NO: 65326 - DNA, 275 bp, Setaria italica
  Peptide Sequence Number=SeqID_131300
tttaccgttaggttagttcccttatttggttcttattttatttcttatttgttgttattgatgtcacagaccaagaaagctttaacaatgtaaagcagtggctgaatgaaattgatcgctatgcaagcgacaatgtaaacaaactccttgttgggaacaagtgtgacttgacggcgaacaaagttgtgtcatatgaagcaggcaaggctcttgctgatgagatgggcatcccgttcatggagaccagtgcgaagatgctactaatgtggagcagg

SEQ ID NO: 65327 - DNA, 289 bp, Setaria italica
  Peptide Sequence Number=SeqID_131301
ccctcagtaaaacactgatgtcactcattagacgaataattgattaaaataacaatgcagctagtgacatgcacatattcctgctgaaatggtatgagaagtttccagagtacaaatcaagagatcttttccttactggagagagttatgcaggtaccagtacttattttactcattatgtattgtgcgaatggttcttgacaaataacatggcctgcaggcattacataccgcaactgaccaatgtacttatcagtcataacaaggaatcaaagggtttcaaattcaa

SEQ ID NO: 65328 - DNA, 479 bp, Setaria italica
  misc_feature (434)..(434): n is a, c, g, or t
  Peptide Sequence Number=SeqID_131302
tcgtcacccctgctccacaacatcgaagaagggtgccttgaaggtgtttgtgataatgtcaagccaaggacgtgagcgtgcttttccaacttggagcattccaacaaagcgagcgaaagagagttgcaactcagatttcgaagtcaaattgtttcgattgttcattcctggcagtgctaatagttcggtacatgggaatggtgaagtctgatgtgaagtataggtcatacttttgtctattaggctagtgcaaacaatttgttgtgtaccttctgttattttagcttgtacatctgtaaaattgtgcacaatgtttggtgtaatgggctgtgacaagtgatttggcccaaaaacaagctttgtatgtattatgaaattggattggaattctattggctattgaatgggcttgaaaccaaaaaaaaaaaaaaaanaaaaaaaaaaaactaaagagaactagccaaggacacacagggagt

SEQ ID NO: 65329 - DNA, 363 bp, Setaria italica
  Peptide Sequence Number=SeqID_131303
aagacaagttaggtacgaaggcagcgtcgtcgccggcgttgaggtagcccttgaggagatcaccaagcggcacctcaagcccaacgtcgggacctacaacctccggatggccctgctctgcgcaagagggaggagctttgaagcccaagagctgctggacgccatgggggcaaagggcgtcccgcccaaccgcgccatcttcaacacggtcatcaagggcctctgcaacgagggggaatgggtgctgccatggcgctcttcagagagatgcgagaggtgcccaggcagaatggcagaggggtctcccccaactttgagacctacattatgctgcttgaggccctcgtcaacaagagtgtgttt

SEQ ID NO: 65330 - DNA, 204 bp, Setaria italica
  Peptide Sequence Number=SeqID_131304
tgtagtgaaatagtacaatgaatggctgtggggccagggggaggattatctattgagagaaatcttttttgtcaatcacgagtaaaagaaagcacaaggcaagataaatattgcagagcagatccggtgtgtcaaactgtgcatacctgattagccagaccatgaagtggcccagctaaaccattcagagctgctgcgaaagaa

SEQ ID NO: 65331 - DNA, 277 bp, Setaria italica
  Peptide Sequence Number=SeqID_131305
ttttaaagtttcctttaggttaacttaacctttttcctttactttctttttagtttgtttctttccttagtactattagttctttgtagttgatctgtggtaacatcactcccagtttcctcaattacagatttgatccatagaagcacttcctgattagccagaccatgaagtggcccagctaaaccattcagagctgctgcgaaagaaagatagggatctgacagggcacttccaaccagatgaccagtatgtgcactgacattccccaccttca

SEQ ID NO: 65332 - DNA, 180 bp, Setaria italica
  Peptide Sequence Number=SeqID_131306
gaatgttgatgcacacagtggagttttgctgaaccactttggattatctgaagcacggtattacacaacttggataccaattggaaaagtggatcctcaggcagatgcttcaaggcaaactccctttggacatgaataccgtgggtctgtcttacgcagaactccatgaccaaagccagg

SEQ ID NO: 65333 - DNA, 474 bp, Setaria italica
  Peptide Sequence Number=SeqID_131307
ttttcttataacacttgagttaccttttgttgttacatgtcctttctattcaagtacgtcctctttactttatccagtccattatggttttggggttttaatcctgtgtgcttatagatgtgttttttattgccttttctgtagttctgttctattttgattcttcaacacttgttttccaagtatttccttggtatacttcttaattgtctcaaaactaattatatgagtattaggcagcatgggttgctggacagtatgctcacatcaagttctcagatcagaacaactttcgcaaagctatgcattgtgttatagctggtatgcgtgatgctgaacttcctgtccgagttgattcagtctttgccctccgctctttcgttgaagcatgcacagatcttgatgagatccgaccaatacttcctcaacttcttgatgagttttttaagcttatgagtgaagttgagaatgaag

SEQ ID NO: 65334 - DNA, 339 bp, Setaria italica
  Peptide Sequence Number=SeqID_131308
gatgaggaaagactgctaatggactcaaggatggtgcttatggcacgtaagcaaccaacagcagccaaagcaccatccttgagtccattagcagtcttcctcatctttatatgcaaatagaacccactctgttacctatattgcgcaagatgttgacttcagatggccaagatgtctatgaagaagttctggaaatagtctcctatatgacgttttactcaccgtcaatttcgttggacatgtggagcttgtggccattgataatggaagctcttaatgactgggccattgatttctttgagaatattcttgtcccattagacaactacgtttcccggg

SEQ ID NO: 65335 - DNA, 368 bp, Setaria italica
  Peptide Sequence Number=SeqID_131309
tacatgcaaagatcctaactatcaacatagcttatggaaagcattatcatctattatgacagatcaaaacatggaagattctgatattgttcctgcacctaagctcattgaagtgtttttccaaaactgcaaaggtcaagttgatcattgggttgagccgtacctcaggcttacaattgatcggttgcgtcgaacagagaagccatatctgaaaagtctccttctacaagtggtaagaaacacaactcttgcctttctccatttgttctaagctggctaatacctagtcagttatcatgcctgattgctaagctgctggcactttctccttatttctttcttttaagttttgtagtattttcagttat

SEQ ID NO: 65336 - DNA, 275 bp, Setaria italica
  Peptide Sequence Number=SeqID_131310
gcgagaagcatccccccacccccccaccccccaaaacggggaaaccagcagcagcagcgcggaggttcatccgcctcgcctcgcaagcagcggctgatccacgagcaagggggttaagctccctcgaatctccagtcatgaagttgcgctcggattcctcgggcgggggcgacgaccactggaccacggccgccgccgccgccgccacggggggtggcggctcaggcgagccgagtaagaagcagcggacggaggagccgccctccagctccagg

SEQ ID NO: 65337 - DNA, 270 bp, Setaria italica
  misc_feature (37)..(37): n is a, c, g, or t
  Peptide Sequence Number=SeqID_131311
cgtgcatgatccagtctgtcttggtgcccttggaggnttacccccatagaacacaagggccttcttcactccgatgttctcgctcgtcggagtcgacaggatggccttgtcggtgccggtggccttccagtagcccgatccggcggcacggttggggcgggcgccattcgggtacttgcgatccctcgggctgaagaaagtaaccaactacgttactactaccaaaacaaaagaatttaggaacaaggaaaagaaataacccaaacggaa

SEQ ID NO: 65338 - DNA, 304 bp, Setaria italica
  Peptide Sequence Number=SeqID_131312
aatatgctattagtggccataaggttaaagatggatgtggacaatgcgaattatgggataagtccttgtacaagggcattggttactgcatttttaactccagatattttacatataatgcatcaaattttcggtacaattaggaattggggaatcaagagttcaatactcaaaaggagaattggcgtaccaaagatacatccaacggaccacatatcaacaccagttgagtaatgcgttgctccaagcaaaacttcaggggctctataccaaagtgtaacaaaacaaaaataaaaactaaaaa

SEQ ID NO: 65339 - DNA, 224 bp, Setaria italica
  Peptide Sequence Number=SeqID_131313
ctaaataggtgtccattgaccacttgcaagttgcaacatcttggatatttctgttgcaagctcatctttgggtgaaatcaggccaagctgcatactcaccaatatgttacaaatccaactgcaaatggttcagcgcggtgctgctgtatcagccactaacaatgagaatgcggagcacagaaagaatggctgaagctgtaaataggcagagatgaggacgggat

SEQ ID NO: 65340 - DNA, 486 bp, Setaria italica
  Peptide Sequence Number=SeqID_131314
ctgaaagatgcacttgacgagcttgagagaacctgcctcagttcaactacagccctccctttcaggttgagaggtagactgctagaagagtatttcgaccaaaaccaagtatcaaccatttcctcttgctatgaggaagctttgagaagagatcctacatgtagctactcaatggagaggctaatcaaaatgcatagaaaaggtgtgggctaaaaatttttttcttcttccagattgttctgctatttgatcatagtgctactcgagtatctgaaattctgaattgttcttcatatatctgtagtaaacacttcgctggtatgattgggtatatgctaccatgtttggacaatatatcatatccatagggtttttttttcacttgcattgacgctttcttgctatctgtaataaagtcatgtttggacaaccaccggtccaacttttttttttgtgtatcaaaacataaagaactagatagactgg

SEQ ID NO: 65341 - DNA, 427 bp, Setaria italica
  Peptide Sequence Number=SeqID_131315
ggctatcgccttctctgattctcccccacttctctccccccaactctcccctccctcttccccgccccagatcgtatctggctatctgcacctgttcctctgcgatttgggctcgtcttgtctcctggtgcctcaaaagctcgcgcctttacaaggttgaaaggccacaaatcagaggggaattcggagcgcaaccagggggcaaaaggtcgcgaggtttcttcgtccaaagctgagcgcttttgctgatctcctttgcagaaatcgcttgctttgtgtgggaaagtcggatctttgcagcagattcgggtttgaaatctgtgtgagagtcgacgaacaggatttggatagggctcactctgaagattctttgtattctaccttacttaagttaaatttttcctttagttttattttgttttgtttt

SEQ ID NO: 65342 - DNA, 423 bp, Setaria italica
  Peptide Sequence Number=SeqID_131316
gctaagaggaatcgccgtacaacctatactgagtacatcattctatggatcctaaaaatatatcacgttcaagtaatggctatgttggaaaaatgaggtcaaattttctggcaccaaattcgtcgtgtacgacactcagccgccatacaatgctgggagccttgtttcgtgtggacgcagcagccgtagaatctcctctaggagggtttcccccaaggtacccactgctagctatcctattgcccaggtgaactatgagctaaatgtgcttggcacaagggggcccaggcgtatgaattgcaccatgcattccatcccagcctcagcaatggaacctgaaggcatggtaccttgccaacccaagcaagctacttacctaccctagacctacgtacttacctaacgaaagaaatacctttacga

SEQ ID NO: 65343 - DNA, 224 bp, Setaria italica
  Peptide Sequence Number=SeqID_131317
catgagcagctgcaatgttggtgcctcaacttccgtggtcgggtgaccgtggcttctgtgaagaacttccagttgatagctgcgccacagctagatgctgtgccctctgaatcatcgcagcaggctcagtcctttcgtagtttctattctttctagcatctgatcatgataaagtgatcctgcagtttggtaaggttgccaaggacatgttcacaatggactaa

SEQ ID NO: 65344 - DNA, 470 bp, Setaria italica
  Peptide Sequence Number=SeqID_131318
atctcaggtatcacaatgtgtggcagaagcagaacaagaccacccttaacccaaccaggaaggagctccgctgcttaaaaagaaaggatctggtcgaggcattggcgaaaaacctacctgtaggaacaatccgctttggctgccacatttcaaaaaattttgaagactccgactgccactgtaccgttcttagtacagtggacggaagtaccatcaaggccagggtgctgattggttgtgatggggcgaactcgatggcagcccaatacttgggactaggcagtccatcgcatcttcctcgcttggtccaccttggattcacaagctacctgcacgggcatccatttggaacccgtttcctgcgcttcgcagctcaggatttcgccgtcggacgcatgcctgtcaatgagaatcttgtccatttcttcgtgactagatcaagcccttccacacctgttccatgcttcacc

SEQ ID NO: 65345 - DNA, 212 bp, Setaria italica
  Peptide Sequence Number=SeqID_131319
ctaagatctgtggaggtaagtaaagtaaccccaatacgtacctagacaactgtagcacatgtaaagaacaaggggactacacctccacagatcttagacgtaactcctctgattttcccagaatgtaaccaggtcaagcatcacagcatgttggcaatctatttcagcgtcaggtcatgcattgcaccgagctagcaatgtacctcagcgtg

SEQ ID NO: 65346 - DNA, 289 bp, Setaria italica
  Peptide Sequence Number=SeqID_131320
ctgtgaaccttgccgacctctccaaaggtcaccgatcgaagggttctatctggctggcgattacacaaagcagaaatacttggcttccatggaaggtgcagtattatctgggaagctttgcgcccagtctatagtgcaggattatagcaggctctccctcaggagtcagaaaagcctacaatctgaagaagttccggttcgtctattctttagtttgttagtttgtaggtcttccctactttggggtttgttcctttattttctttttatttttctttttaccttttta

SEQ ID NO: 65347 - DNA, 335 bp, Setaria italica
  misc_feature (174)..(174): n is a, c, g, or t
  Peptide Sequence Number=SeqID_131321
tggagcttttatggtaaaaaatgtagacagtaatgaacttacaatttctgttgcatcaacacgagtaccaataatcttcagccgcacctcactctccttctgaatttttacctgaaaagacaaacaagaaactcacaacgagcacaggaaaatgacaacaaatagctttgaacngaaaattcatcttacagcaatagctcaatactcacacctactctttattaaaataaaaatatcttcataattcattaatgcaagtatgaattgatgtaccatcaaagaaaattacaagaaattttattcgaagacagcacttacaacacttgatactcaag

SEQ ID NO: 65348 - DNA, 304 bp, Setaria italica
  Peptide Sequence Number=SeqID_131322
ccttcacaatcaacgatcagcatggaactcgtgtgttcatgagcacgtccctttgcaaggaggtttcagggcagcctgtttgccgctgcaccgacgctccttgcaaagggacgtgctcatgaacacacgagttccatgtcaggccttcacaatcaacgatcagcatggtctccgtttctgctctcgctcacatcgcctcgttacacgagagttcattgggttaactggcaatgctattttgtggaaacttcgttgcataactaccactttactgtcagtaccgtggagtgtttgtatctgacag

SEQ ID NO: 65349 - DNA, 162 bp, Setaria italica
  Peptide Sequence Number=SeqID_131323
gtgctcatgaacacacgagttccatgtcaggccttcacaatcaacgatcagcatggtctccgtttctgctctcgctcacatcgcctcgttacacgagagttcattgggttaactggcagtaaagtggtagttatgcaacgaagtttccacaaaatagcattg

SEQ ID NO: 65350 - DNA, 338 bp, Setaria italica
  Peptide Sequence Number=SeqID_131324
ttttagtttaaattttagtttaagtttaacttaacgttttgttcttctaactattcttggtagtctgtactgttgcaaagcggtcaggcttgaagacatgattggaggggcttgcttccattgtcaccaggcatcatattattaaacatggactcctatttggcagcttctaggtgaagaaacttcagcaacagcagagacacaggatatccagagagctaacttgtctcttcagggatgtgcatgccaaagccacgtttcattttttcaattgtgggagcaagctttccaagaccacgtaacttcatgccagtcgtatcgtcaaccacagttcctga

SEQ ID NO: 65351 - DNA, 303 bp, Setaria italica
  misc_feature (292)..(292): n is a, c, g, or t
  Peptide Sequence Number=SeqID_131325
tgtaacctagttaaaaaggtattgtaattcccctatttctttacctaattggtaagtacttgtctattcttcatctacctcggcctcagatgaaacacgagaacttgagtttgtgcactcattaactaatgagttattcttggctggcgtatcgccatttatattatctgagtgcagcagtttaccagagtcacccttgatgttctcttgttcatatctcttagttatgctctcaacttcaagagtattgctgtcatccttttgttgctatttttcatatctcttactaatnctttgaactct

SEQ ID NO: 65352 - DNA, 345 bp, Setaria italica
  Peptide Sequence Number=SeqID_131326
agcggagatcgaccaagaaggaccactctaggagccggagacgccgtcatcgatcatcagatgatgactctgactccgagggcaaggtcaggtcgagacacaggaagcgtctgagatctagtgacgaagacgcaccatcagattccaataaccataagcatcacaagagccgctccttggaggagtcatctgatgaaagagctgcggatgaatcagagaagatgagaaatggcaaaaggtctcacaagaacagccaccaccatcactgtcaccatcggcaccaccatcatgaacgcagtagttagtttcttgtctagtaaccttaacgttacgttaccttagtta

SEQ ID NO: 65353 - DNA, 262 bp, Setaria italica
  Peptide Sequence Number=SeqID_131327
tagtaccctttaccgttttaggttaccttaccttacctaacgttacctaaaattgtttccgtcttggtagtagggtaattcaaaaaagtcgtccttgacataaacaggcttgacagccaactctggggttttctgtttcctcaacctccaggtcttcatcaaacacatcacctccgatctcaccatccttatccctagactgggatttcttaccaagatgaccccagacttcatctttgttgaacttctcattcatggcctg

SEQ ID NO: 65354 - DNA, 348 bp, Setaria italica
  Peptide Sequence Number=SeqID_131328
cgaagtgaacaaacactgtaataagagaccagttcttatgggatattggcaaccttgatagtgaccctgaggaatttgcaaggacgctatgtgatgatttgaacattacagatcctgaagttggggtatgccttaaatactgaatttctgattattcaatgtaatgaactgttaattgaactgaaacattttttataatgacggtttcccatcttagatggcccccacttacacatttgcaatcccccctaattgttatacagatgggattactgtatgagaagacttgcattcaactatgttgcaatatcaattaaaatgctactactattattgtcaaatctttgt

SEQ ID NO: 65355 - DNA, 235 bp, Setaria italica
  Peptide Sequence Number=SeqID_131329
aacctcggtgccgatacgcgtcgacatcgaggtggacggccagcgctacagggacgccttcacctggaacccgcgcgaccccgactcagagatcatcagcttcgcaaagcggacggccaaggacctcaagctgcctgcctgacattattagtcctaggatgtgttcattgttgtttgcatgccttcagcaatatgtatgtatagtgtcagagtgtttattccctagaaaaaaaaa

SEQ ID NO: 65356 - DNA, 372 bp, Setaria italica
  Peptide Sequence Number=SeqID_131330
ttcggaaaaggaaggaatggtatctgtatgagcccgttgtcgacgttgtagctaatgaggaagatggaaaagaggagcctaataattctagtaggccgaagaagcgagcagaagaagagaaagttgcaagtcttcaatccctttgattcagacgtaggactacaatcctgaagagaattgttgagcaagctgctcattgtccctaagctcgaagggttttcagccaaaatttgtttgccgtggggatgctgcctgcctgacattattagtcctaggatgtgttcattgttgtttgcatgccttcagcaataatgtaatagtaataagtagtacaagaagtagtttaattaccctagaatagaccggttagta

SEQ ID NO: 65357 - DNA, 281 bp, Setaria italica
  Peptide Sequence Number=SeqID_131331
ttttttttttttgttattaactagtaaactaaaaattactagtcctatttgtttctaagagttttctaatgaaaatgtcaccacttggcatagcagttcaaggcagtagaatagtaataagtaataacctaagaatggtacattagccacagcagttgcaagggatacaaagcaagaaagggatttcaagttccccccgcaactccaaacaaagaaggtagccagccaccataaactacacctattgtgcctcctctgtatctcggctcttcttttcttct

SEQ ID NO: 65358 - DNA, 112 bp, Setaria italica
  Peptide Sequence Number=SeqID_131332
ttagacaaacaaaaacaaagtttggtgctaggaaggtcaggggagcaagttcacccatcacttcataagttgtgatccaccttgcgaagtgatgggtgaacttgcagcactg

SEQ ID NO: 65359 - DNA, 225 bp, Setaria italica
  Peptide Sequence Number=SeqID_131333
acagatggatcttctcacaagcagcagctgagcctgagcatgcaagaagcagacgcctagagctacagaagaaggcgtgcttcctgaagaggtcgcaagcggcagactgaagaatggtcgcacaagggctgaaaacaagttagccgctaagaggatatatagaagcaggcagagtaaggtccaggtagatgtagagatcgagagagagagagaaacaaagtatac

SEQ ID NO: 65360 - DNA, 162 bp, Setaria italica
  Peptide Sequence Number=SeqID_131334
cggcagagatcgtggtgccccttccacatttcttatgctttcaagagtccgaagagtctttggtggggacgccccgttccgttcccccgtttggggcccggtccgggtttaaccgtttggggcccgggacccctaacggttttcccccttcccccggacccc

SEQ ID NO: 65361 - DNA, 367 bp, Setaria italica
  misc_feature (11)..(11): n is a, c, g, or t
  misc_feature (45)..(45): n is a, c, g, or t
  misc_feature (108)..(108): n is a, c, g, or t
  Peptide Sequence Number=SeqID_131335
cttcatggctntcccatctcacaatattgtttgacttgttgcacngttacatttccttatttccaagagagatggcttcatcgaaaagcaaatataagctcaaatgcngttttgcagatgccctcctcattgagggaaggggagtattcaggcacgagcttggagagcagcctcaaagtgtccaaatcttcaagaatattgctctgcttatttgtgatgagcagaagatataaaccttcaataggttggtaaacgtaacgcacgttttcagtttcaacataagtgtgttgtttcccagttccaaccagtttcgggaatgcagaccaagtaaataccttacaaattacttaatagacgaagaacaata

SEQ ID NO: 65362 - DNA, 374 bp, Setaria italica
  Peptide Sequence Number=SeqID_131336
ttaattgatacatccatctcttttaacaacattgagcttctccaatcacttggtggaagagcagacgatcttgaaggaactgcacttggttgtacatcctccaaaatgacttgtccttcagctttcaatgattcgaggaattgatttgtcttctgtgtcttgcccaatttaataccaagacttttaccggtgcagtagcagctgtagatggacgacctgtcgaaacaacgctcgcagttagaatcaaatataggtcatatgctagccctgtattgtctctagcattttggctagaaatgtagtcctgtttccctaatactgagtcagaaagatctgaatagacttaactacaggatggtaccaacacgctatat

SEQ ID NO: 65363 - DNA, 319 bp, Setaria italica
  Peptide Sequence Number=SeqID_131337
aggcggatactcatcaatatctggtccacgtgtgattgaaaaactttcagtgacatgagcatcagtggttctggatttggtggactgagcactgacatggactcagtccaccaaatccagaaccactgatactcatcaataacttgtctgtacatcctccaaaatgacttctccttcagctttcaatgactcaaggatctgatttgtcttctgtgtcttgcctaatttcataccaagacctttgccaggtgcagtagcagttgtagatggacgaccgcctttgggtttgctagcaaatgagtcctattgttctagttgt

SEQ ID NO: 65364 - DNA, 260 bp, Setaria italica
  Peptide Sequence Number=SeqID_131338
cgggggatggtaattgggtcaccttctcccaaatcttgaacattaacatttctgcaatttgatgatttcgacaatagtaaatcagtttattagcactaactaagaaaccaattagcgtaccatcttcaatggctttgttgatcaccggaattatcaagaccaagcccacaaactatgcacccgccactttttgatgaatgtctagattatatcatcttcattctcttggaagaaaatatcccgctcaatgaatgtgacta

SEQ ID NO: 65365 - DNA, 414 bp, Setaria italica
  misc_feature (143)..(143): n is a, c, g, or t
  Peptide Sequence Number=SeqID_131339
ccaacagagatggggaaaaatgatgatgggtcagctggggaacacaaattccatggaaccactgcggtttgactgatcgataaggagaatagaccattccaacacagagttcctagaatcaaatttccactctccatctatcngtttaacacttggagcctcccgaagtgctggcagaggtatagatatgacaacattgtgcagatcaaacatctcagaagcttcatattcaatattgacataggtttcatttccagatactgacggccagcagttgactgacagaggtaaagatgactcatccatccccttggtatttcttcctattttctacctagtaggtagtttcgttctgaccactcgggaagggcctattgggatcttttgctcccaaaatttgctgactgttaaaca

SEQ ID NO: 65366 - DNA, 266 bp, Setaria italica
  misc_feature (56)..(56): n is a, c, g, or t
  Peptide Sequence Number=SeqID_131340
gaggtgctcttagaggattccagcaaccttcaaaatcactgaaagtacttgatgcngaaaacccaacagagatggggaaaaatgatgatgggtcagctgggggaacaacaaattccatggaaccactgcggtttgactgatcgataaggagaatagaccattccaacacagagttcctagaatcaaatttccactctccatctgtcagtcaactgctggccgtcagtatctggaaatgaaacctatgtcaatattgaatatgaagc

SEQ ID NO: 65367 - DNA, 413 bp, Setaria italica
  Peptide Sequence Number=SeqID_131341
tagtacaagactaggggggaaacaaacaaaattaccaataggaaccactgcggtttgactgatcgataaggagaatagaccattccaacacagagttccccatctctgttgggttttctgcatcaagtactttcagtgatttgaaggttgctggaatccttcctttaaaggaaggcaaccctccgaagttttcacagcgggctcgtttgctcactgctaactatcaagtagtttaaatgctcttatcaaggttgagttgtttcacttgaatgcttcaatggcacttgcttgtcatataatgtgttttttttgtcatgaacttctgcgggccgaggcgttgaaaatcatttttgtattttagtgctctctttctgtcccttttcatgtgtggcatgttgcacaaattgatgctg

SEQ ID NO: 65368 - DNA, 268 bp, Setaria italica
  Peptide Sequence Number=SeqID_131342
ccttctcccaaatcttgaacattaacatttctgcaatttgatgatttgacaatagtaaatcagtttattagcactaactaagaaaccaattagcgtaccatcttcaatggctttgttgatcaccggaattatcaagaccaagcccacaaactatgcacctcggcaggcgtcagcgaagaggatggcggcctcgacggtggtggcggcgaaggagtttcccgcggcgcaggcggggaggagcgcgccgaggcgggcggcgtcgacgggg

SEQ ID NO: 65369 - DNA, 204 bp, Setaria italica
  Peptide Sequence Number=SeqID_131343
actcagtgtgagtagtcagtgtgagtagtcagtgatttgaaggttactggaatccatcctctgaaggaaggcaacgctccgaagttttcacagcgggcttgtttgctcactgctaactatcaagtagtttaacactcgaccatgataagagcattaaactacttgatagttagcagtgagcaaacaagcccgctgtgaaaactt

SEQ ID NO: 65370 - DNA, 257 bp, Setaria italica
  Peptide Sequence Number=SeqID_131344
gacaatagtaaatcagtttattagcactaactaagaaaccaattagcgtaccatcttcaatggctttgttgatcaccggaattatcaagaccaagcccacaaactatgcacctcggcaggcgtcagcgaagaggatggcggcctcgacggtggcgccgccgctggccgcgtccccgccggcacccaccgacgcctgctgcgtcgccttcctccgcgccgtctacccgtcgggagggagcggagcgggttgcggagca

SEQ ID NO: 65371 - DNA, 205 bp, Setaria italica
  Peptide Sequence Number=SeqID_131345
aatttcacaaagaacagctccacatatatcgacattgtgaatgtgttgtccatgttttcccgaatatagaatcacaaacgcagcatcactcaaaaattgctccaacagcattcagacagatagccggagaagaattagagacatacagctaaattcctgtgctcaacaattagaacaatacaaataggaacaaagaatacaaaca

SEQ ID NO: 65372 - DNA, 258 bp, Setaria italica
  Peptide Sequence Number=SeqID_131346
ctttcaatgattcgaggaattgattgtcttctgtgtcttgcccaatttcataccaagaccttaccgggttggcagtagcagctgtagatggatgacctttgggcttgctagcaaatgagtccatgtcagcgctcagtccacctaatccagaaccgctaccaaatcgagaaccactgatgctcatatcattgaaagcttttcaatcacacgtggacctagtattatttgtattgtagttatccgcctttgtcaagttta

SEQ ID NO: 65373 - DNA, 332 bp, Setaria italica
  Peptide Sequence Number=SeqID_131347
atccaactaacaaagtggtcatcgaagtctaagtaggcagaattgttgacagccactgaaccggtgcaacttggataggatggatgactctcctcagtgtgccagcaggcaaggcggatacagagcttgcaaacagtgtgatttactcaagccacaagcaaagacatgattcaagtgcccacaagacacaatcatcaaagactcaagcctcatgcttgaccaggagcaacatcaggacttcaaacaacaaccctggccaggggacagtcacggtgctgtcagcatgagcacttgagcagctcctccctgtctcactgtctggtgtgggaaca

SEQ ID NO: 65374 - DNA, 209 bp, Setaria italica
  Peptide Sequence Number=SeqID_131348
taagtaacttaactaaaattaagtaactaaatttaaggttaagaattagaagtacaacaaacaaaaggaatttagagtgggtagggggttacttagaaacaaggctgcatgcatgatgcatgttagtcgaacactatgtttcagcaaccatactgcatggaaaggttatgccaagagttaatacaccagtaatgtgccactatactctt

SEQ ID NO: 65375 - DNA, 241 bp, Setaria italica
  Peptide Sequence Number=SeqID_131349
gggtaggtagggtgtgaggagatgcgagaggaggagcagggaagtgtctagaagcggatagggtgatgttagaagctgcacggcaattgctgggccaattcacgacttgtaacatccatctcagttattttccgtgcagcttctaacatcaccatatctgatttatgtctgagggatgattccagaaaatcaaaaaatagacggtcaccattttgtgtgttcgtgcttgactcacgcataa

SEQ ID NO: 65376 - DNA, 325 bp, Setaria italica
  Peptide Sequence Number=SeqID_131350
caacagtgtagcaaactaccatatgagaagttatttgtacagcaaaaaaggaacctattacatcgtatgctatctgataatattcacgatattcacgaagcgatgaggagtctgtaggcatcgaaatgttaccactatttctagcacaaacggctataagtgaaggctatctactgttctacattgtttcggcagaagatgtgggtctagtgcttcatccactggcgacaatctcgtgaatcttgtcactgacttcagggtcatctgatctgacagccagcttcatcgccactcagtgggcccaacgaagtggcgatgaagctgg

SEQ ID NO: 65377 - DNA, 195 bp, Setaria italica
  Peptide Sequence Number=SeqID_131351
tttactaagccttcagtttgagttaacatttacagcttgacaaaaaatacttgaaactgcttacattttctagcagttgttcttctatagtgtttgtacaattgtactgcaatacaacatagctatcataaatgtgcttaaccacattaacagcatattcagttttctgccctccgtcagcctccgacgggttca

SEQ ID NO: 65378 - DNA, 411 bp, Setaria italica
  Peptide Sequence Number=SeqID_131352
gctacaagaggaaaaatattcaccagtacaaaacaaatccatgcaggattcaagtaaaaagaagaaacagaagtccaatgttttagatggagtataatttatttaagaatccattccctccatcccacgtccatgagtttgcaaacttccaactcacattctgtcatcaattaaccagtcaatgcagcattgagtgcactgtggacatcgactccgatctgagcctcagccttctccaagtcagttgaggctgacccaagcttggcagtgaattcagagagacccttctggaccaaggctgggtcgatctgatccacagggacagcctcaacggctacaatgtcagctatggagtttgcatggaacgaaatagacaaaacccaactagactacaacaaaagtaacttagga

SEQ ID NO: 65379 - DNA, 217 bp, Setaria italica
  Peptide Sequence Number=SeqID_131353
agttgtagctggtacaatcaccatgtcaacctccttgttggcgatctcggacttgtaggggaggacgaagttgacggtgagcttggtggggatggtggccggcgtgggcccgcggcggccgccgaggactccacgttcgtggaggcgtggaagaaggtcgctcccaacatcgagcccccctcgacgcccatgtccctgatgcagccgcgcccgccca

SEQ ID NO: 65380 - DNA, 217 bp, Setaria italica
  misc_feature (17)..(17): n is a, c, g, or t
  misc_feature (32)..(32): n is a, c, g, or t
  misc_feature (43)..(43): n is a, c, g, or t
  misc_feature (58)..(58): n is a, c, g, or t
  Peptide Sequence Number=SeqID_131354
gaacgaacgcgaggcgnggagagagagagagnggaaaaagaanaggggtagagagagngaaaaatgctgcgccacgccgcccgccgtctcgtctcccgcgccgccgaggactccacgttcgtggaggcgtggaagaaggtcgctcccaacatcgagcccccctcgacgcccatgtccctgatgcagccgcgcccgcccacgccggccaccatcccca

SEQ ID NO: 65381 - DNA, 424 bp, Setaria italica
  Peptide Sequence Number=SeqID_131355
aggtcaacaagcagctagatcagatgggttacaacattggaacacgattggtcgatgagttcttagccaagtcaaatgtatcaaggtgtgttgacttcaaggagactgctgatgttatcgcaaagcttggattcaagatgttcttgggtgtgactgcaactgtaaccaactgggatgctgagggtacaagctgtagctttgtattggaggacaatcctcttgttgattttgttgagctccctgacacttgccaaggccttcagtattgcaatgtgttaagtggagtaatcaggggagcattggaaatggttagttcttctgttattgccatctcatttaggttttatcccttttactcatcttgatcttccaagatgtttgttctgggatgtgttcagcaaacttttaatactttaaccaccaa

SEQ ID NO: 65382 - DNA, 434 bp, Setaria italica
  Peptide Sequence Number=SeqID_131356
cgaggaggtcaacaagcagctagatcagatgggttacaacattggaacacgattggtcgatgagttcttagccaagtcaaatgtatcaaggtgtgttgacttcaaggagactgctgatgttatcgcaaagcttggattcaagatgttcttgggtgtgactgcaactgtaaccaactgggatgctgagggtacaagctgtagctttgtattggaggacaatcctcttgttgattttgttgagctccctgacacttgccaaggccttcagtattgcaatgtgttaagtggagtaatcaggggagcattggaaatggtgtctatgaagacagaggtgacatgggtccgtgacatgctccgtgggatgacgcctacgagatgcgggtaaagcttatcaagcaagtcatcgtccttgtaggggtattcctcagggactt

SEQ ID NO: 65383 - DNA, 128 bp, Setaria italica
  Peptide Sequence Number=SeqID_131357
ccatgccccgaggcatggaagatatgtagcatttctacaatacacatgagtaaaccgttgattgcatttgcacttgccgtgtgtattgtagaaatgctacatatcttcaaagccccgaggcatggaag

SEQ ID NO: 65384 - DNA, 239 bp, Setaria italica
  Peptide Sequence Number=SeqID_131358
ccagctgctggccggcggcgccgagtcatacggcgtcagcgtcgactacaagcgcgccctcgcgctccctggcatctgccgcctcaccgcgccgcgctgcccctcgccgtcgcggccgccgccgggatgctctaggccaccaccggagcttgtgatttcttcttcattcttaccacacatatggtttgtgcattactatgtaatacgcacgtacggtacaaacaattgtttccacgcac

SEQ ID NO: 65385 - DNA, 279 bp, Setaria italica
  Peptide Sequence Number=SeqID_131359
caatatctctgagctctcagatgaggactttgtagaggatgaatgcaatgatcttatttctttagttaagaaaggactcctggagagggctaccattgctgagtttgaggagaaggtggcaacggtacatagagacatagtaaatcattggattgaaagagaacttgtgatactggaaagatatattgacagagcacatatgaaagggtggcacgtagaaatggaggaattactgatgcctgctactcgtccaagcatgaatgcatttggagaattttt

SEQ ID NO: 65386 - DNA, 379 bp, Setaria italica
  Peptide Sequence Number=SeqID_131360
tgaagaatctgcgaaggtgtcggaccgtgatcagaagcgtaacagagatgctgagcagcgcgatgatcctccgaatgctgagtcgaagtcagtgattgatgccaagaatgacccgtccaccaggcgtgagagatctcctaggggaaccaaacggttttcagagtcgagagaggcttggcggcctcggcctttctttcagtgggagtacttttatgacgcatgcattcaaatgaactgtttataacaatgctagactacctgcacttgtatgtacagcacaatgagcgtggaagtgctgggcaaggtggtcggcgctatgaccgtcaggctagtggctacggaagacagagggatcaaaaggaacatgatagagataaac

SEQ ID NO: 65387 - DNA, 395 bp, Setaria italica
  Peptide Sequence Number=SeqID_131361
caaacagagcatgcaaccgcacacagtagtacttcgccatgaaaatcttggcattgtcctcgtgatttttcagcacatagtccacaaccaatttgcccacaggcagagtaagtccacaaaggacagtgcaagctgatggaagagctttgcttatggcaaatgcagccaaaagaatgtaaagcatggcaatagcaaccgccactattcgtgatcctgcttcagtgccaactcttacctgtttgcaaattcacatacaaagaaccttgttatagtcaaataagtaacataggcgagtaaaaattgccaaagcaatttagaacttgatcttagatagaacaaataccagggagacatctttccaacagcaagatctcatcaatctatagaatataagg

SEQ ID NO: 65388 - DNA, 239 bp, Setaria italica
  Peptide Sequence Number=SeqID_131362
tacgagatatattacctgataaacataaccacagaagattgcacacatcaccaagaaaatgaatctagcatcccggcttctgcaaaggcccaaaatagccccacaaagccgagtaaaagagaaacatttgcagcattttgtgtcacagctcgactgcataagcagattttacaccataacatcatgcttcacttctaaaaccaaccatgcaggccatctaatttatagtgttatttgat

SEQ ID NO: 65389 - DNA, 430 bp, Setaria italica
  Peptide Sequence Number=SeqID_131363
attgacagggtgaaaaaaggggcttgcggaatccagttgtgccggaatttgctttctctacctgagaaaacatggcaaagactgagatctactggcatatttcatgatgcaatccctcaaccatatgccaggatagggcatcctatgcatgttaaggtgaagatgttggtgagaaatggcgcagttatggcttttctttaagtcttcaactgacggctaattctcttgattttcatcctttttgggataagctatctaccatcaacttggatagaagcatcctacgtgactaacttgctgctgtttaccttgagtcattgttgcataatatagatactgcctgaaaaagttaaattaaatgttcttacataaacttgggtctatggcagtgacactactctatgtcaggttgctcaaagacgctttgagg

SEQ ID NO: 65390 - DNA, 236 bp, Setaria italica
  Peptide Sequence Number=SeqID_131364
cctatcccctgtgtgccttgcctatcccctgttgcgtgtctcggggggcaggtagattcttctcagagccaagaaaaggattagtgaagttggagttcggttctttatgcagtcttgcagattcagttcgttgtggacttgtggtagtcagtaccaaaggttgatgtgacagaaggcatgttcaaaaagctgttcttggaagcttggggttcgctgcattttttctcaagcgaatt

SEQ ID NO: 65391 - DNA, 243 bp, Setaria italica
  Peptide Sequence Number=SeqID_131365
cttgctggtcgaggactacaacgaaacgatccctgctggctgttcatcaccgacgatcatggcatggcgtctcgtcgacactacgctgctgctctagcatgcatcatccttctttcagatatatgcatgcaccaccgtccactgcaaactatggcagcttattattaagtagttccctaagactaagaataccaacaataataaacgaagaactacgaagaactaaagaacaaagaacgtaaa

SEQ ID NO: 65392 - DNA, 243 bp, Setaria italica
  Peptide Sequence Number=SeqID_131366
cggggggctacaacggcagcaccgtcgcggtgatgggccgcgacgacatcgcggcggacgtgagggagctcgccgtcgtcggcggcacggggaggttcaggatggccacggggtacgtgctgtggaagaccaacagcatgaacgggcccgacgccaccgtcgagctcgacgtgttacgttctacctacgggtcggtcggtcgttccttaccttatttcgttacttccttcgtacgttcccctt

SEQ ID NO: 65393 - DNA, 250 bp, Setaria italica
  Peptide Sequence Number=SeqID_131367
aaagtagaacccaacaagcttgtacactggccttccttccttgtcaaccccatgataaccatggggatagtattgcaggcggtgagctcgtttcgggaggttttgtttgctaggggcttgttgccagtcaagcatgatgactaccatatgatgcttagatttttaaaagcaaggaagttcgaccttgagaaggcagcacagatgtgggcagacatgctgcactggagaaaggagttcgggacagacacaa

SEQ ID NO: 65394 - DNA, 346 bp, Setaria italica
  Peptide Sequence Number=SeqID_131368
acagctgcatgaagagcaagcgcaggaggtgggacgccgtgaaagacgggctcgcaaacctcaacattagccagtgcacagccctgacgcccccagcggtgcaggcggtctgcgactccttcccagcactccacacctgcccggagaggcactccctcatcatcagcggctgcctcagcctcacttcggtccactgcgcctgcgccctgcaccctcaccgcgcagggcgagccctgatgcttaaccatgcagggcgagccctgatgcttaaccatgcgtactgatcatgttgtggctttgcgcgcatggttctcatgaacaaccggtgtttgcctggtggtggttc

SEQ ID NO: 65395 - DNA, 316 bp, Setaria italica
  Peptide Sequence Number=SeqID_131369
cctgcgccctgcaccctcaccgcgcagggcgtagccctgatgcttaaccatgcgtactgatcatgttgtggctttgcgcgcatggttctcatgaacaaccggtgtttgcctggtggtggttccgtgctccccgcctagaggaagttttctctgtacataaactctggaacttggtgtaataagagactgctatggtaggactgtgtgagataatcttggagtggggattatggagagttgcgtgtactccaatgccacccaggactaattgtacttagtaaattgttttgttggtttatttctttaaaaaaaaaaa

SEQ ID NO: 65396 - DNA, 362 bp, Setaria italica
  misc_feature (193)..(193): n is a, c, g, or t
  Peptide Sequence Number=SeqID_131370
atgtactgaatgcagtatctttgccggttcttgcaagttctctccaggttgcaatgagcaggaggcttggtattgaagaaccccagctaatgaagatagtcagagcagcaatccatacacacactgaatggtttaagcttcagatgtgcaaggaccgttttgagcattttttgaagattgattctctgaaagnggttgatccaccagtgggaagttgcagtatgcccaaggaccatactgatgaatgtggcaatggatcatctcaaatcacaacatgttcaagtggcaaggtgccagatgaaggtagtagccctcaggtctcatcagaagttgcctgcgatgaaaatgctatactgaaggtt

SEQ ID NO: 65397 - DNA, 288 bp, Setaria italica
  Peptide Sequence Number=SeqID_131371
ctaacaatcagaatggagattgtagcaccagtgatatcacccgtgatgattcttggtccaggaggttacgtagggttagaagtagtacatctgggcagcgaagacgaaagagatggagaggacgggtagatgatctagattatgcttgtgaagctttattggatgtaaataagcatgctgcttatttcctcgacaactttggaagccattccttttcgtgtgaggtcctgcatctccaggacaacttcatatttctgatcttccatgttttagtatcagatgtattag

SEQ ID NO: 65398 - DNA, 124 bp, Setaria italica
  Peptide Sequence Number=SeqID_131372
aaccaccttcaactatgcccctgtatatgcaatactcgtgacacttctggataaacttgtacacgagtattgcatatacaggggcatagttgaaggtggttcccatgttcttcctggaactgct

SEQ ID NO: 65399 - DNA, 432 bp, Setaria italica
  Peptide Sequence Number=SeqID_131373
cctatcccctgtgtgccttggcagttcagggcaagatatcgcacaacattcttatcctgacaccaattgaacccttccattacaagttgatgggctcttgaaataagacttagtccgtttgtatggttgaattgctgtgcgatatcttgcccaaatgtgtatccagcacctcttggtgaaattccccatccacatcgatcatccggatcagaccacaacagatcacacataggcccttcatgtgggacctacaaccattttagggaacagagcaaactattaatcaagttaaacaaaatttgtgtaaaacaacaaactcattatatacaagtgctatgatgtttataccctaaagcccaattgaggggtcaatagtagattatttaagaacaaactgtgtcaagaaattggatagctaaaattatggtaggc

SEQ ID NO: 65400 - DNA, 311 bp, Setaria italica
  Peptide Sequence Number=SeqID_131374
tatgtgtgatctgttgtggtctgatccggatgatcgatgtggatggggaatttcaccaagaggtgctggatacacatttgggcaagatatcgcacagcaattcaaccatacaaacggactaagtcttattcaagagcccatcaacttgtaatggaagggtcgaattggaggaagttctgatccatgttctctccaatttcgaggatcgcagccatgttaccgcatcggtagcagttaatttggcgcgtcttgtaactaccgttctactaactatttctttattccttgtactaccttaatttgttaactta

SEQ ID NO: 65401 - DNA, 256 bp, Setaria italica
  Peptide Sequence Number=SeqID_131375
atccacctgactggaatgagattgtttaagtccaaatgatctgttcttgtaccagttcgtttgcatttccatgatgtcaatgtgctgaacgaggtaagggaaagaatcagggaacaagggagggtgtggtgggctctggaggcaaacaagggtgcaaattggtacctccaaccaaagatatcttcgaatgaggggatgattagtgtcacgtcacttaagctatcagtgctcacaaatactattacactaaggaggt

SEQ ID NO: 65402 - DNA, 419 bp, Setaria italica
  Peptide Sequence Number=SeqID_131376
cttgaagcttatgaagttgttttgatactggatgatcgagagaatttcgggtctcgttcaagaaaagttgacttcaaaaaagttgctgataacatttcttcacagtttaatatatcggtagaggttaaacgtttgcctgtaggtgatggcatttggattgctcgtcataggaaacttcttacagagtatgttctggatttcattgttgaaaggaaaaaatgttgcagacctagctagttcaattagagacaacagatacaaagatcagaaatcacggctgcagaattgtgggctaaggaagctcatatatcttgttgaaggtgatccaaacacttcgaacggatctgtggcaagcattaaaacagcctgcttcaccactgagattttttgaaggattttgattgtttcttgtcggacct

SEQ ID NO: 65403 - DNA, 301 bp, Setaria italica
  Peptide Sequence Number=SeqID_131377
catttatactatgataatgtgcaacggtggaatctgtcatgtaccaggtagctggttaatgattaagaaagtcaacatattatcattcacatgtgaacatggcaagatgttaacctggcatattatgcaagcatcattctccaaagaaagctcagaaaactgatcagacacgccagctgctcctggaacatagaaagttgacctcaagttctcttggatgtaactttctgtcaaaccagtattgacatcgcctatctgctcttccaacgctacaagctcctcataagtcatgttatccaca

SEQ ID NO: 65404 - DNA, 362 bp, Setaria italica
  Peptide Sequence Number=SeqID_131378
ctgatcagttttctgagctttctttggagaatgatgcttgcataatatgccaggttaacatcttgccatgttcacatgtgaatgataatatgttaacctggcatattatgcaagcatcattctccaaagaaagctcagaaaactgatcagacacgccagctgctcctggaacatagaaagttgacctcaagttctcttggatgtaactttctgtcaaaccagtattgacatcgcctatctgctcttccaacgctacaagctcctcataagtcatgttatccacatccagacgcatgtctctatgttcatcaataacatgtcctgcttcatgtatccttgatcgatccatcactgtagcattc

SEQ ID NO: 65405 - DNA, 243 bp, Setaria italica
  Peptide Sequence Number=SeqID_131379
atattttccagcatccagcatgtcattagtagatacatgcaactatgcaagtaatttaggggtaaaatttggaatatgaggctacctgatatggcagaattcttaaaaccccattgttaacttggtttgcaagaggtggatgcattggatgcccaaaagtgtgctcagaattgaatgggagagccagcattcttggatctaatggaaggcctgcggcagaaggatttaaaccatgcaccacta

SEQ ID NO: 65406 - DNA, 345 bp, Setaria italica
  Peptide Sequence Number=SeqID_131380
tattgtcttctacctaaaattgtaaaaattgtctacgtaggtttctagtaaaagtcgtattttgtcttttgtcttttaagattcttgtgcagatttcattttgaagtggcatatatggctcgaagcggtggcggtggcgagggaatatatatagggtataagatagttacgtttgttcttgtgtttatatacaaattaattaatataagtggatatgttagtgattttgttggaaaatcattcgtcgtcgagtgtaactgtagaaagtgttgagttcttcattgcaagaggtgtcaaatattgtgacgaattgtcctctggcttaattaatttatgaattctttt

SEQ ID NO: 65407 - DNA, 420 bp, Setaria italica
  misc_feature (410)..(410): n is a, c, g, or t
  Peptide Sequence Number=SeqID_131381
ttaaattttaggttagtacgtaaagtaaaaccttggaaattaagtacttggttggtactttggggtcgcggtaagcttacgtcaaagccaaatgaaagtctctatgagcagaagcctgaggaaccagctcctgtcctgccatcggttactgagagtactacaactaggagcaaatcctatacttcacgatttgaatatgtagaaaatgcacctgcttctaggactgggagcagttcaggagataaccagatgagtggacatgttgcacccccaaagtcttcgaacttctttgctgaatttgggatggacagtggatataacaaaaaatcttccagttcatccaaagtgcaggttgaggaaagtagtgaagcaagagagaaattctcgaatgcgaaatcaatttcatcctntcagtttttc

SEQ ID NO: 65408 - DNA, 329 bp, Setaria italica
  Peptide Sequence Number=SeqID_131382
ttcaggtttttgggtgttgccatcttcctggtaactgcggttctttccccctctgggaaaaccacgaccaccacctcttgctttacctcgaccaccacgacctctaaaacgacctcttgacatgcgctgatcttcatagcgatcatcttgcaagttcatctcctcaaatctgtcatgcacccaagcttgatcatctttagcatcccataacttcctcccaccaaaacaattacgacctagacgaccggaccgacggttactacctacctagaaaaccggtacaatacaatagacaatagtaagaaaggacaaccaagaaagttagggta

SEQ ID NO: 65409 - DNA, 228 bp, Setaria italica
  Peptide Sequence Number=SeqID_131383
gggtggccaatacataattccgatatttggtcaggaaaggtggcaccaacacgacagatacgtattgcgtgccatctgaaaagaatgagcactgccactgcatgagtaattatcgcttggtgattactctgaacaaacatgagtaattatcgcttggtgattactctgaacaaacatcaggaataattgtggcaaaactgattactaaaggtacgggttatttactta

SEQ ID NO: 65410 - DNA, 209 bp, Setaria italica
  Peptide Sequence Number=SeqID_131384
aacctagactacaagcatcaacctgttagtccgatggttcaacggctgaggtgggatcctcgctgcagattgattcggcacttggcctgacttcgggtgcaagactggagcgtgactctgcatttgcgtagaaatccacttcatcatttcaccaaatgcagaggtgggatcctcgctgcagattgattcggcacttggcctgacttcgg

SEQ ID NO: 65411 - DNA, 231 bp, Setaria italica
  Peptide Sequence Number=SeqID_131385
cgcccacatcttcagaagcagccaacaaatatgatatttccatatgcatcacaaccgagcaacacctaaaatttcatgatgccatcagtcgcattgttgtcgaaactgaaatcacaattagtagtgatcttgggaggaaaatgcttactacagttcaagtaacgaatgacacccctgctctgctgtgaagtgaccccatcagataactccagcatgaacaggcataagacc

SEQ ID NO: 65412 - DNA, 390 bp, Setaria italica
  Peptide Sequence Number=SeqID_131386
gaaggctagagactgggtcgcagaatcattagacttcgacaaggattatgaagcaagtgtgtttgaaacaacaataaggtgatatgtttgaaataacaaggattacgaagcacgtgtgtttccataattctttgtcttaggatcttagtgcgcacatgtatttatttttgggtaactaacttgtgttattaacttgtcgaagcttgtaatattgttgatttatattcagagttgttggaggtctcctcagtgcatatgatttgtcagctgataaaatatttctggagaaggcaagagacatcactgatcgactgttacctgcctgggatacatcatccggtatcccatacaatagaatcaacctagctcaaggcaaagccagtaatccag

SEQ ID NO: 65413 - DNA, 216 bp, Setaria italica
  Peptide Sequence Number=SeqID_131387
tcgtttttattataaaccttgttgaaatatttgagtctttaggtgaatactggtacaaaagatgacatgatgcagagcttcttcctggcggagacactcaagtatctgtacctgctgttctccccgccatcgttaatctccttcgatgagtgggtcttcaacactgaagcccacccactgaaaatagtcacaaggcatgacaatgaaggcggctcg

SEQ ID NO: 65414 - DNA, 229 bp, Setaria italica
  Peptide Sequence Number=SeqID_131388
cggtggtcggcatcttgacgaggcatgacttcatgccagagcatatcctgggactgcacccagtcctgctcgggagccggtggaagaggctccggtggcagaagggcgccgtggccaagtacttccgttcccttctggtgtggatcgcaaacagcagctgaaggaaatatattattgctgatatagccttcttggtaacaatgcgatgacgtaccgagagcaagcaagc

SEQ ID NO: 65415 - DNA, 396 bp, Setaria italica
  misc_feature (75)..(75): n is a, c, g, or t
  Peptide Sequence Number=SeqID_131389
caacattatctattgcatgaggacagagaatatagagtctgtcatgtgcaatggtcagtggattatgaaggatcntaagatcatgagtctcaatgaggaggaggtaatgctgtcatgtaaggggaccatggaccatataaatggattcacgacaaccaagtctgcctttttcccgacctccagcgaacctatttcattatcccacagaactgcttttgcgccattaatagtagccatctccaatacagtctcagcaggaagagcagttgggttagtagttccactgatgtatgcctcacgacctttgttgattagggatgctaggtacatctcatccacaatgctcattctgttattgcttggtgctccatctgtaccaagggagacacaaacacc

SEQ ID NO: 65416 - DNA, 379 bp, Setaria italica
  Peptide Sequence Number=SeqID_131390
acctaccggttaatggtgcctcgtgtgattcctggaatggtttgcagggaagttctggtaatggaatttgtcaaagggaccccaataatgaatcttggcaatgaaatggctaaaaggggcgtagatcctggtagtaagattgcagcaatggcaaagcagtaagccccttcatcttaaaagagaagattttgtcagatcttacccttgcatatggtcaaatgatcttgaaggatggctttttccatgcagatcccacaccccaggaaacatccttatctgtaaggacacagaggtggctttacttgattatggacaagtgaaagaatgccagacgatttacgacttgcttatgcaaatcttgtagttgcaatggctgatg

SEQ ID NO: 65417 - DNA, 244 bp, Setaria italica
  Peptide Sequence Number=SeqID_131391
tctgtcaaggttagtatatgcattcatgtgttctgtaaacagccgtttgaaatttcaggtttgctaggatgtgtcatgatgttaggaattgatcaggttcaacatccaggagctgaacatctgatgaaggttgatatccggaacatgcaagcaatggccttgtttttgcagaagtatgacatcaactttgatctattctctgccaccaaagagatggaaaagctagggtttttgttccccaacc

SEQ ID NO: 65418 - DNA, 269 bp, Setaria italica
  misc_feature (226)..(226): n is a, c, g, or t
  Peptide Sequence Number=SeqID_131392
aacgtcgtgaaaaaattagggaaggtttggtggactgttggagttcgttttttctcatttttccctaataccaagattagcagcctcttggagttgctattaaagtggagcaacatcagtttgctcttaaagtggagcaacatcagttctaggaggtacatacttcatgccggagttctgtgcaaaaacaacctggtgtttctctttccacctggggaaaaaaccngtaccaagcagttgaaataagtggtctcgcatctcatcatttg

SEQ ID NO: 65419 - DNA, 461 bp, Setaria italica
  Peptide Sequence Number=SeqID_131393
ggagctaggtaggaagtaggaagctggtttttctggagtggagtgctcccaaacaccccctatattggatattctagtagaagcggttttctgtaatttattatcaacaaaatgactaataagttgccacagaactaaagtctccacaatttcttaagaaacaaaggaattcctactttatggaatttctattcaagtataaaagaggggaggagaacacgtgacaattctttttccttccataaattatgtatctacgttctttgccaaaacaaaggaaagggataaatgatcaaaaatctagatatctcgttttattctctgattcttttcgcatcttttatgtctactgaaaggtcatcgaaacatttcttccatagaaaattaaaaaatacttttttcagcagattgcattcatggaaatacaaaaaaaacattatcatccaagagtaaagagatag

SEQ ID NO: 65420 - DNA, 400 bp, Setaria italica
  Peptide Sequence Number=SeqID_131394
taaaaaaactaatagtctgtttggaacgacagcagaactgtagataagagaaacttgggtaacattcctattatattggatattctagtagaagcggttttctgtaatttattatcaacaaaatgactaataagtttccacagaactaaagtctccacaatttcttaagaaacaaaggaattcctactttatggaatttctattcaagtataaaagaggggaggagaacacgtgacaattctttttccttccataaattatgtatctacgttctttgccaaaaacaaaggaaagggataaatgatcaaaaatctagatatttcattttattctctgattcttttttgcatcttttatgtctactgaaaggtcatcgaaactatttcttccatagaaaatt

SEQ ID NO: 65421 - DNA, 209 bp, Setaria italica
  Peptide Sequence Number=SeqID_131395
ttcgcttttggagattactagatgagaccatcggtgcactggctacctacctggcggaggcgatgtacttgtggatggccgcggcggcggcggaggtgacctcggtcaccgggaagtcgaggtaggtggtggccaccgacctctcggcgtcgttaacgaagatggcccccaccgccccggcgctctgcagctcgtccctgagacaggga

SEQ ID NO: 65422 - DNA, 383 bp, Setaria italica
  Peptide Sequence Number=SeqID_131396
cttgctccaatttgatcctttttttagagcagttcttgtgatgacatcagcaccttgttcaaaagatggtattctgttttgcaaacctaaaaatattttagaccttgtttaacatcttttccaccaatgcttatcccagcttcaacaataaatggatgaccttcaaaaacctgagggctgcttgcatgtgttgcaaccatatcagggtgtagctcttttatgatacccaggcgtaaattatattcacattgccgctgggatcatcaaacttagcctgccgaaataattgatgtattcgaactaattgctgtggcgtaaggctcttaactgtcatttcggactaaaatcaggtcccatctccccaattaaacgttcagcatgcg

SEQ ID NO: 65423 - DNA, 248 bp, Setaria italica
  Peptide Sequence Number=SeqID_131397
gataggggaaagccagttctagccccaggagttaacattgtgaacatgaatcccaataatgatagtatatatcaaccaatatcagcattaaacaaagtattacagaatgtgtggttccgtaacagaatcttgacctccatctcaagtatacacaaaactccgacgacgaagtagaaattacctgttcaagttctttttcctgtcctgacgctcacgagcctgaagtttcttcacaatcttagacttca

SEQ ID NO: 65424 - DNA, 120 bp, Setaria italica
  Peptide Sequence Number=SeqID_131398
tggatttcaaaaatgccattggaaaaggcctcctttttatgtatttcccttcctgcaacatcttccaaattatggggcaacttatcttgagtatcgacagattcatgtatacttttatct

SEQ ID NO: 65425 - DNA, 351 bp, Setaria italica
  misc_feature (6)..(6): n is a, c, g, or t
  Peptide Sequence Number=SeqID_131399
cttcanctttttggagtttgttgcgagtcagcacatgaggatccacccagcagcagctcccaccggcggcagaatgacctccgccggctgccgcacgtgtacagcaaggtgctggagctgccgctcccggcggacaccgacgttgaggtgttcgaaggccccgacgccttccactttgtcgccgccggcgcgcgtggcaccggcatggtgcaggtccgcaccgtgaggatccaccctggggttaccaaggtagtggtgcgggcaggaggcaccggaggtggtgatgagcctggcgccgacgacattggtagtcttcgtactaggttggtcggttcccggtcttgtcccgta

SEQ ID NO: 65426 - DNA, 388 bp, Setaria italica
  Peptide Sequence Number=SeqID_131400
ttcctaccccttcgtattcttcctttttctttacgtttccgtttacgtttcgttaagttcgtagggtctgatcaccccacacttgttgagcctcccattcaactcaaccacaatcttccccgcacgatggtcatcaacatactcaaactcaccaatgtagccatggcgttgcatgacgatgaggaacttgatgatcacttttgaagagggccggatcatgacttgcctcttcccacgcttctctgcgttgtacatactcttcaaagcatcattaaggacgctgactctcaccatctttgcctagccttgggtctcgccgccgccttccgggctgagagatggggatcggtcgatgcgcgcgccgccggagaggaggagctagaaccct

SEQ ID NO: 65427 - DNA, 234 bp, Setaria italica
  Peptide Sequence Number=SeqID_131401
ggtgtgatctcaccgggtggcgctagaaaactcccgaaccaaaccgtctctccctgtctcccgagtcgcgcctcagctacgacagcacgcgcgcatagggaacccatggatcgatcacggcgaggggggagagggatcggtcgctcaccttgggtctcgccgccgccttccgggctgagagatgggatcggtcgatgcgcgcgccgccggagaggaggagctagaaccctagag

SEQ ID NO: 65428 - DNA, 233 bp, Setaria italica
  Peptide Sequence Number=SeqID_131402
gatggtcatcaacatactcaaactcaccaatgtagccatggcgttgcatgacgatgaggaacttgatgatcacttttgaagagggccggatcatgacttgcctcttcccacgcttctctgcgttgtacatactcttcaaagcatcattaaggacgctgactccccaccccagcccgattagctgacagccaaaggaaagaaatcgcgatgctcctcccctgcccgcctccgcc

SEQ ID NO: 65429 - DNA, 259 bp, Setaria italica
  Peptide Sequence Number=SeqID_131403
ttccaatgcatttgggtgtgtctgttctagagaattattgatagtcccatgtttactggagatcacatccttgggctcttctaatacactttcagtaagcttctagaacatctaaagttggtccaaatgtctgcaagttatctatgttggaaaatcccgacaaaacatcgtacttcttccactcaactttaactaactccttaagatcggcaacatgtttatacaagcctgacttcatggtaacattctgggctttaat

SEQ ID NO: 65430 - DNA, 350 bp, Setaria italica
  Peptide Sequence Number=SeqID_131404
aactaaccttaagaacgttaacccgaataacaaatacctagaataacaatcaagggaaaaacaaggttctcttagatctgaatctattagagacacttcacacaaagcccatttttcttggaagcaaagcaaaaagaaggctggaaagagctgtttggaatgatacgtcttttctggctgtaagtaaactcacctttttctgttgtgaaatcgttgatgaaggtaatatatatgatactcctagggtgcagcaacctattatagggccactgacttctgttggctagtaattttgcatcgtgtcctgatccccacgtggactttgtggtgtcatgttcagtatagtaaag

SEQ ID NO: 65431 - DNA, 298 bp, Setaria italica
  Peptide Sequence Number=SeqID_131405
acgtgatggactactctcttttagtcggcattgatgaagaaaggaaagagcttgtgatggggatcattgactatcttcggcaatacacttggggataaacaactagagacttgggtgaaggcgtcagctttcctgggtggctccaaagatggtctgccaacaatcatatccccagatcagtacaagaagaggttcaggaaggccatgtcaaagtacttcttgactctccctgaccaattggttcaccgttgtattgtccttctagttatttgttcttattttcttaggttcgttattc

SEQ ID NO: 65432 - DNA, 222 bp, Setaria italica
  Peptide Sequence Number=SeqID_131406
agcagaatcaaatgattttattctaattggcgctataaccttctggtatggtagatggtgagggacggttgctactgtctcaaaatgattcagatgttgtcgttccaatttatgatgatgagccatctagcatgatagcccatgccatgactgttccagaatatcacagcttcttgttgccactgatggatgagaataatgaatctagcgtattgaattatg

SEQ ID NO: 65433 - DNA, 238 bp, Setaria italica
  Peptide Sequence Number=SeqID_131407
ctagaacatctaaagttggtccaaatgtctgcaagttatctatgttggaaaatcccgacaaaggctattgagaaaactggcagggctcggtctccaacgttcatgagcaacttgtcactttctggtgtggtagatggtgagggacggttgctactgtctcaaaatgattcagatgttgtcgttccaatttatgatgatgagccatctagcatgatagcccatgccatgactgttccag

SEQ ID NO: 65434 - DNA, 322 bp, Setaria italica
  Peptide Sequence Number=SeqID_131408
tagtacctaaataccgtctaaactttttaattgtaacgtctaagtcggttgtagttcttgtgggacagctggtttcatatttcaagataccacttaatcaagtcgttgtgatgtatgatgatctagatttaccatttgcaaaattgcgcttgctgccaaagggtgggcatggagggcataatgggatgagaagcatcatcaaccatttgaaacaaagtcgtgattttccacgcctaagaattggcattggacgaccaccggggaagatggatcctgccaattttgtctccggccttttaccaagagagagcaagaagagctc

SEQ ID NO: 65435 - DNA, 432 bp, Setaria italica
  Peptide Sequence Number=SeqID_131409
ttaattgaagtcacttgtgatcattggagcgattactggagcggttttgggtacagtagggacacttgttccatggcttttccccagtctctttaccaatgacagaatggttgtccaacaggtctgatacatcacttaaaaaaatttgattttattcatgcttggccactagtgtttagtgcttgaattttctttgtaacccactaattatgcattatattgccaacagatgcacataatactggctccatatttcagtgcattgctggtgactccttcagtacactcccttgaaggaacattattggccggaagggatctgagatatttaagtcaatcaatgagtgtatgcttttgcattggaacccttctattgatggttctccgcaacaatttggtagtttgccaggatgctggtggatactcgtcttg

SEQ ID NO: 65436 - DNA, 349 bp, Setaria italica
  Peptide Sequence Number=SeqID_131410
aagattcagattaagtggtcaggcatcaccataaacaccaagtaatgagatagcaagacctgtagctccattccttttaagttcaggaacaaaaaggtcccttatgactcctgaagcatctgaagaactgagacccatacagtatagcagagcagcagggacggatcaccgtggagtcacgcgctgcagctgcgtcgtcgcgaacccccggcgccgcggcattcgcaccgccgcccagcgtcaggtaccccaaggtggacggcttcgtcgggaagcagtaggagaaggccccgccgtacgcgcccgccgcctgccccaccagcgacaccggcaggcggccgaggccgag

SEQ ID NO: 65437 - DNA, 265 bp, Setaria italica
  Peptide Sequence Number=SeqID_131411
tgataccactaatgctgagtacagaaaaagattatgcctacaatttatatgaaagataaatggaaaatagttttgtgttcaaaatcaaatggatgggaacaaaaatataatcaagaagcttacggcatcaccataacaccaagtaatgagatagcaagacctgtagctccatttccttttaagttcaggaacaaaaggtcccttatgactcctgaagcatctggttcagaataccagagttcaactaagaataaaaataggataa

SEQ ID NO: 65438 - DNA, 493 bp, Setaria italica
  Peptide Sequence Number=SeqID_131412
caactcttgttccatttccagggcaccctttgtgagtggaggccacataaccaatgtttccaacatacattgatgccgggtcatcagttgctagcgtctgaagttgattccctgttggtattgttccgcttagattgttatacgagaggttgaagctggtcaaggaagttagagctgatatgcttgaagggatctctccagatagctcattatgtgataagtcgagggactccaatgccttgaggtcaccaatgttattgggaattctcccgcttaaatgattccaagaacattcaagcttttcaaagcaacgagagcactaatgccttgaggaatctgtccagtcaaattgttacatgataaatcaataataaccatgtactccattattcctttagataattcaagctgttgccctttggttagaactgacgtggtctctgtaaacaaaatcctagtactataaaatttgatgccaattgcagattcttct

SEQ ID NO: 65439 - DNA, 458 bp, Setaria italica
  Peptide Sequence Number=SeqID_131413
ttgctagcgtctgaagttgattccctgttggtattcttccacttagattgttatacgagaggttgaagctggtcaaggaagttagagctgatatgtttgaagggatctctccagatagctcattatgtgataagtcgagggactccaatgccttgaggtcaccgatgttattgggaattctcccgcttaaatgattccatgaaacattcaagcttttcaaagcaaccagagcactaatgccttgaggaatttgtccagtcaaattgttacatgataaatcaatatttaccatgtactggattcctttagagaattcaagctgttgccctttggttagaactgacgtggtctctgtaaagaaaatcatagcactataagtatcgtaggagcccatcatataattatcatatgtttggcccattccaaatccttctacttcaccaagggaatgactgtat

SEQ ID NO: 65440 - DNA, 428 bp, Setaria italica
  misc_feature (397)..(397): n is a, c, g, or t
  Peptide Sequence Number=SeqID_131414
tgttatttttaaattatttttattcttgtaattactagtacttgttagtcttctattatttgcgcatatatacagagattcaaatactcctaacaaatcaataattctttatcctgtaattctgaacactcgtattcagataaaagattgccagcacatatcttttacagaagaccaagaaagacacagccacaccaagatatagaagcgcacgattttatcaaatgtctcatgagctctgctgactctgttgctgatgctgctgctgcaagctgacaagcttgtggtaggcgccgttcctgttctcgatcagctgctggtgccccccctgctcgatgatcttgccgtcctgcagcaccgagatgacgtcggcgttcttgatcgtcgacagccggtncgccaccatcacggtggtccggttcttcatc

SEQ ID NO: 65441 - DNA, 329 bp, Setaria italica
  Peptide Sequence Number=SeqID_131415
ttttttttttttattccttgttaatttcttgtaactacttcgttatttcagataaaagattgccagcacatatcttttacagaagaccaagaaagacacagccacaccaagatatagaagcgcacgattttattcaaatgtctcatgagctctgctgactctgttgctgctgctgctgctgcaagctgacaagcttgtggtaggcgccgttcctgttctcgatcagctgctggtgccccccctgctcgatgatcttgccgtcctgcagcaccgagatgacgtcggcgttcttgatcgtcgacaggccggtgcgccaccatccacggtgg

SEQ ID NO: 65442 - DNA, 377 bp, Setaria italica
  misc_feature (359)..(359): n is a, c, g, or t
  Peptide Sequence Number=SeqID_131416
ttttttttaaaaatttttttttttagttaattttagttaaactttaatttaagttacttttttaatttaacgttaattgtagttgtattggttattttaaatattttatctgaatacagactgtagctcatattgcgcatatatacagagattcaaatactcctaacaaatcaataattctttatcctgtaattctgaacactcgtattcagataaaagattgccagcacatatcttttacagaagaccaagaaagacacagccacaccaagatatagaagcgcacgattttattcaaatgtctcatgagctctgctgactctgttgctgctgctgctgctgcaagctgacaagcttgnggtaggccgccgttcctg

SEQ ID NO: 65443 - DNA, 319 bp, Setaria italica
  Peptide Sequence Number=SeqID_131417
cgccagcttcgccgcctcgatgacctcggcttccgtggccccgtccttgccgtacaagatgttctcgtagatcgtcgtcgcgaacagcgccggctcttgctggaccagcccgatgtgcttcctcagagacttcagcttcagcttcttgatgtccttcccgtcgatcaagattcttccggcgatcgggtcgtagaaccggaggatgagcgacagcacggtgctcttgccggagccgctcatcccgacgagcgccattgtcttctttgtccggtcctttctattctaggttaggttcttaaggttcccttttgttaactta

SEQ ID NO: 65444 - DNA, 279 bp, Setaria italica
  Peptide Sequence Number=SeqID_131418
ttttttttttgtcatccggatgatgttattggattaatgcagtcctaacatcagcttacacaggcatagttccttcgacgaggaatcgaaacaatcccgagagaaccgtgagtccgtgactatacaatgacacaagtcactaggcatggcacatgaacctacaacaacttgaatcgaatagtggatgctctgaatctctgctggatgaactctgccgctgcctgtcccttttattatcctgcgatgtaaagagagacgttctccatgtattgaacaacc

SEQ ID NO: 65445 - DNA, 263 bp, Setaria italica
  Peptide Sequence Number=SeqID_131419
tcgcaggataataaaaagggacaggcagcggcagagttcatccagcgatgtaaagagagacgttctccatgtattgaacaaccttgtgatgagtgcctctggttcaatttgttgtaggttcatgtgccatgcctagtgacttgtgtcattgtatagtcacggactcacggttctctcgggattgtttcgattcctcgtcgaaggaactatgcctgtgtaagctgatgttaggactgcattaatccaataacatcatccggatg

SEQ ID NO: 65446 - DNA, 318 bp, Setaria italica
  Peptide Sequence Number=SeqID_131420
ggcgaaattgcgagcacaggtttcaccaagctggattctgattcatcagcagaaaagaatggcttcactcgacgccactctcttccttccagtacaaacagtagggcggtcaaagctgaatggaagcgctgaagaggcgaccaatcttcaacttgaatcgaatagtggatgctctgaatctctgctggatgaactctgccgctgcctgtccctttttattatcctgcgatgtaaagagagacgttctccatgtattgaacaaccttgtgattgtagttgtccttcttggtttctaattttgtttgtttaaaaaaaaaa

SEQ ID NO: 65447 - DNA, 376 bp, Setaria italica
  Peptide Sequence Number=SeqID_131421
cgcgctgctcagggacaacgtgccctgctcccagcgcgtcgctgagctgagcgctgcacgcgtcgtctccggttaatacaaatcatgtatttgtcgcggctaattaagaggttgctgctagcttgatggtgatgcttgtttaggagtttggaggcatggctgatcggttgtgcagtggatatagcaacggagcacagcaacagcagctcctggtgagatacagaacaacggaacagagcaacagaagagatacaagtgcaattaagaagggtagcatgggtagtgatggaccaaataccaggatcttcttcatatggtgatgatgaggtcggagcttgtggagcatctggcgatggtgatattatgatgcgcttcc

SEQ ID NO: 65448 - DNA, 233 bp, Setaria italica
  Peptide Sequence Number=SeqID_131422
tgctcccagcgcggcgcctcctactacaactgccagcccggcgccgaggccaacccctactcccgcggctgcaacgccatcacccagtgcaggggctgagctagctcagcgctgcacgcgcgcgtcgtctccagttaatataaatcatgtatttgtcgcggctaattaatccgttgcggctgctagctagaacacagaacagaagagagacacatatccactgcacaaccaat

SEQ ID NO: 65449 - DNA, 389 bp, Setaria italica
  Peptide Sequence Number=SeqID_131423
taaaagtaaaagaaaataaagaaaataaagaaaaggtaaacggaaagaacttaagtaaggaaagaacaatactaggacgaataggtagaataattaatagaatagcgcttccttccatgctatcaagtagtcgagagcatgagacgagggatggaaccccaggatgctgcaagggatgctatatcaagaattgcccgcaaatacccggatttcgttggtgctgtttttgcggtcaacaggaaaggagtccatgctggggcatgccacggatggacattccagtactccgtaatgaattccagcatgcatgatgtggaggtaattacagtatatccttagcaatggcagttcatggaagacaaaaggttttgcttcatcagcaagtaggg

SEQ ID NO: 65450 - DNA, 331 bp, Setaria italica
  Peptide Sequence Number=SeqID_131424
tggtcttgttgattgacaagatgggtcacatagctgtcgggacatcaaccaatggtgctacatttaaaattccaggaagagcaacggagcacagcaacagcagctcctggtgagatacagaacaacggaacagagcaacagaagagatacaagtgcaattaagaagggtagcatgggtaggtgatggaccaataccaggatcttcttcatatggtgatgatgaggtcggagcttgtggagcatctggcgatggtgatattatgatgcgcttccttccatgctatcaagtagtcgagagcatgagacgagggatggaaccccaggatgctgc

SEQ ID NO: 65451 - DNA, 268 bp, Setaria italica
  Peptide Sequence Number=SeqID_131425
ccggaggagcagggagccggaagaagcaccgtgcctccaagggcaagctactgaggctagccagatgggggaaaggggggaaagagggggagatgtttaaaggacttgatgaggagggaattatgaagcactttcaagccatcaaaagtaggagaatgaatttaccttctcgatgcagctatagggcttaagtgtgcaggattcagtattcaaggctcagttttcccccaagataactgggtttcatctgatccgatcgccccaagta

SEQ ID NO: 65452 - DNA, 273 bp, Setaria italica
  Peptide Sequence Number=SeqID_131426
ggaagaagcaccgtgcctccaagggcaagctactgaggctagccagatggggaaaggggggaaagaggggagatgtttaaaggacttgatgaggagggaattatgaagcactttcaagccatcaaaagtaggagaatgaatttaccttctcgatgcagctatagggcttaagtggtatgctcaattacccccaaaaaattgtgcaggattcagtattcaaggctcagttttcccccaagataactgggttttcatctgatccgatgccccaag

SEQ ID NO: 65453 - DNA, 453 bp, Setaria italica
  misc_feature (18)..(18): n is a, c, g, or t
  misc_feature (243)..(243): n is a, c, g, or t
  Peptide Sequence Number=SeqID_131427
tttgaggaattggaagancggtattggcatgaattcaacagttttcagtttcagttgaaatctcaccaggaagaaagagatgcagtttttgccaagatagaagtttctcaggttcatctggaactgttgaaacgtactaatgttctcaatgatgcattctatatttcacatgatggagtaattggaacaataacaatttccgcctcggacgtctctctaatgtggaggttgagtgggatgagntaaatgctgcttggggtcaagctgcactgttgttgcataccatggctcagtatttcactccgaaatttcaataccggatcaagattcaccctatgggaagctatccaagagtcacagatatccacaacaatacatatgaactagtttaggtacctagtaagaaaatttaagttaactaaggaaagaacaaacccgaaatttaagaaacaa

SEQ ID NO: 65454 - DNA, 424 bp, Setaria italica
  Peptide Sequence Number=SeqID_131428
tttgtttccgttttgttttgtttaacctttagtttacctttacgtttcttattttgtctaaccttcctactaaaggttgatatctcgggtgttaacgtggagaagtttgatgacgcgtactttgccagggacaagaagcagaaggcaaagaagaccgagggtgaacttttcgagacagagaaggaggcgaccaaggacctgccgcagttcaagaaggacgaccagaagaccgtggacgctgagctgatcaaagctattgaggctgttccggatctgaaaacctccttggtgcacggttctctctcagggatggcgacaagccccatgagatggttttctagattagttggtgctaggtgcgaagctcaatagtcactttgcctggtctacctgagtgtgctcctgaatttgtatctgactggtg

SEQ ID NO: 65455 - DNA, 372 bp, Setaria italica
  misc_feature (7)..(7): n is a, c, g, or t
  misc_feature (9)..(9): n is a, c, g, or t
  misc_feature (15)..(15): n is a, c, g, or t
  Peptide Sequence Number=SeqID_131429
acactananaacaanaacctaacgtacaattagacaaacctaccaacaaaaggttagaataatactacgggtgttaacgtggagaagtttgatgacgcgtactttgccagggacaagaagcagaaggcaaagaagaccgagggtgaacttttcgagacagagaaggaggcgaccaaggacctgccgcagttcaagaaggacgaccagaagaccgtggacgctgagctgatcaaagctattgaggctgttccggatctgaaaacctccttggtgcacggttctctctcagggatggcgacaagcccccatgagatggttttctagattagttggtgctaggtgcgaagctcaatagtcactttgcctggtcta

SEQ ID NO: 65456 - DNA, 244 bp, Setaria italica
  misc_feature (219)..(219): n is a, c, g, or t
  Peptide Sequence Number=SeqID_131430
ggtgcggcttctaggtcacgtcagacgcttcattttcccttcacagcttcagagttatgctgcaggatcattcctagatactgggttagtgccagtgtggagttgaggcctttggctttcttccaacagcaggcaaattgctggcattcagcttcctctcgaagcaagatggtcggcgcagaggaggtggcggcggcggaggctccttgttgactttcnggaattttctaggccacggtcatct

SEQ ID NO: 65457 - DNA, 342 bp, Setaria italica
  Peptide Sequence Number=SeqID_131431
gagcacatcgagaagttgctgattcttgctgcttccatccataggaagcttatagatgctccacgactggcgcaagcaatttttgctgattacttcaactactatcttccgaaaaatgggaagtactttggaaagcatttgctatgaaaaggagttcaccactaaggaaaaagtggggatgcatgagagagatgctgtgtcaaacctttttcctcccccctactgcaaatcaatcatggaggaaagttttgagcatgggaaatcttttgaaatggaccaacgaaaccaaatagacaaaagaagaaaatacaataattactacaagttactaaaggtaagtaa

SEQ ID NO: 65458 - DNA, 337 bp, Setaria italica
  misc_feature (297)..(337): n is a, c, g, or t
  Peptide Sequence Number=SeqID_131432
tctaccttgtagatctgcaacaacaagttttaggacaagacaaaatacaaaaggaatacaaaatcctcatccacgaaaataatactgggatatgtatgactgacgtctgtggctgtagatctgtatcttagtgccgtgagctgagtgaattctttgatttggctttctgtagagaactggagctacataagctccattttagccgagggcattgtttggagtggagtacttggaggtcgcatcgatcgtcttgtgtagtgtgatgtgacgtggagcatgatttacgctgcattaacnnnnnnnnnnnnnnnnnnnnnnnnnnnnnnnnnnnnnnnnn

SEQ ID NO: 65459 - DNA, 347 bp, Setaria italica
  misc_feature (71)..(71): n is a, c, g, or t
  Peptide Sequence Number=SeqID_131433
ttcatgctcgacggcaaccatgtctgcaggcccattcatagcatgctatgttgaccatctgtagtcaccancttttggctcaagactcctggtgaagcctgaggtccatggaggcagctgaagaagaagctggacctggagtttcagaaccgcagcctgcctggtgaagaagctggtgaagccagcctgtgacaaataaatgcagagtgctcaccacacccattggtttcaggaccgcagctgtccgtgcagttggagactccgttggagtcgtagatccattgacgctgaccgtttaactgtgtagattcgggtggcaaaagctgagctaatcctaattgaaaaaa

SEQ ID NO: 65460 - DNA, 317 bp, Setaria italica
  Peptide Sequence Number=SeqID_131434
tactccgactcagtctatactatgcctgtagacggattggaggatcagtgtaagaagtctgagacgttggtctgctctaaccagactgcaccacgacgtgggtaggtttcacagcttcgaggtcctcactggtgacgacgtgccctgcagtcaaggacagttccagactcgaggaaacaggatagtgctatccacctactagggctccggctgttaggtggggtttggacggatcgctaccgttcaggctccatccatgcggttacaattgtacaccctctacagagtgtataaagctatagctatagtcgtgtcca

SEQ ID NO: 65461 - DNA, 292 bp, Setaria italica
  Peptide Sequence Number=SeqID_131435
ctgtaaacgcataattcatgggataaactagggtccgatcacaaacgagggaagaacagtcacaaggtcaatgccattctccttggcgaactcccatgctgctttctctgcaaataccttcgccaggccataccatagctgcatcttttcacagagtggcacagagctccatattgtttcatccagtgagatatttggttgagcatcatccctgatcctcactgctagtattgtacgtaagtattgtttaagttaacttaaccctttcttttcttagttaaatttgggtttt

SEQ ID NO: 65462 - DNA, 320 bp, Setaria italica
  Peptide Sequence Number=SeqID_131436
agtctgtagaccaccaaaattgcctagttacagatttgtgtggggcaccatgtagccgtcgtatcagccctggcagtggaaaagccagcttctacctgaaactgatgccttcagaatgtatcgatacggtaatgctactttctcttcgaaatttttgggttcttgcacatgcggatgcttgcaggggtaacctccactagctcatcttcttggataaactctatgcagtcatccaaactgtagcttaaaggttcatcaagaaccactgcaaaatagggaacacagagcattaagtgtagtttgatcaaaagctaatagtc

SEQ ID NO: 65463 - DNA, 291 bp, Setaria italica
  Peptide Sequence Number=SeqID_131437
cctacaaagttcacattgtcttaatacaaccagaactcactaaattcgtaatagtaacaaatgttagttcttacatgttctctatcaatattgtgagatgcagtgtgcctcttccactaacaaggaatgtatcagcagtctccccatcttctactttcatagccaaatcctttcaagctcacgatataacctgtcacggagatttcggctagtaacatatttcccctcctttccaacaaaaggtgatgtattgatggagaaagacattctgacttgtttggtctttccttt

SEQ ID NO: 65464 - DNA, 245 bp, Setaria italica
  Peptide Sequence Number=SeqID_131438
atgtattgatggagaaagacattctgactgttggctcctccactttgatagtgggcaatggtgttcctgtaactttatcagcaatagtttccccaatcatgatatcattcattccacatacagcacaaatgtcaccggcaccaacagattcaactggaacacggctgaagttctgataaacaaaaagctacagtttggatgcttgcaggggtaacctccactagctcatcttcttaggaataaac

SEQ ID NO: 65465 - DNA, 247 bp, Setaria italica
  Peptide Sequence Number=SeqID_131439
agttgcttgagtactcttccctgcggagggagccggggaggcggcgacttccttgacctcctgctcgagcgaggcggaggccctgagggagcggggcctccgtcgtcggagcgagcgggggacccgcagcaggcagggagaggacccgaggtgggcggagctggccggcggcggcgcggcgcggcgggcggaggggacaacattgctgaagtccaatgaggcctctggtaggaatcttgttatttca

SEQ ID NO: 65466 - DNA, 254 bp, Setaria italica
  Peptide Sequence Number=SeqID_131440
gtcttcttagtaatttggacatgcagttgttgtagttgtaaacaagattgacagaccagctgctcgtcctgagtttgtggtgaattcaacatttgaactatttattgagttaaatgcaactgatgaacaaaccttgtctgtggcataggcccctctacagaatcaaccactagaagaactccttcaaccatgttgagaacacgctcaacctccccgccgaaatctgaatgtccaggagtatcaattatattgta

SEQ ID NO: 65467 - DNA, 250 bp, Setaria italica
  Peptide Sequence Number=SeqID_131441
atgcatcttagaatagcctcaaaaaggggtcctaggtcatcagccaaattttctggatctaacccagcctttcctttaattccacttgcatagactgtttggaaatcacactgttcatcagttgcatttaactcaataaatagttcaaatgttgaattcaccacaaactcaggacgagcagctggtctgtcaatcttgtttacaactacaacaactgcatgtaccaaaattactaagaagactttactta

SEQ ID NO: 65468 - DNA, 224 bp, Setaria italica
  Peptide Sequence Number=SeqID_131442
tcctagtcctaggttggttgttcatggtcgacgacacccccatccgcgtctacgagaacacgtcctcccgccacgtccacggccaccaccgccacgccgccgttcccggggccgcagccgatggcggtgtacagctcgatctggaacgcggacgactgggcgacgcagggcgggcgcgtgcgaccagtccgtcttcacgcgcccgccctgcgtcgcccagtcgt

SEQ ID NO: 65469 - DNA, 174 bp, Setaria italica
  Peptide Sequence Number=SeqID_131443
actagacgtacgaaacaaaccgaaaccgaacttaaccccgtaccaagaccgacccgaagtagacgaccggaacgctgatcggaggctgatctgatggatcatatcatcttcttcgctgggatgtcgatcgattatcatcgatggggtcatggaactgctggtttcctttcacct

SEQ ID NO: 65470 - DNA, 171 bp, Setaria italica
  Peptide Sequence Number=SeqID_131444
cgcgaggccgcgttcttcatcggccacgggatagtccaggccacacgcgggcccctccggatccttcgagtccaacagcttctcacatacatcactggctgctgatgtgcacgaacaagtgcagtatcatgcacgtgctggcagtgggctcagttgctaagatgctagcag

SEQ ID NO: 65471 - DNA, 276 bp, Setaria italica
  Peptide Sequence Number=SeqID_131445
cggtggcgccgggcgaagcgccacccgtcggaggcctcgacggcggcgaggtccctgtcggccacgcgcgcgcatgccgcacgcagccgcggcgcgtcgcaaagccccgccagcttgagcatgtccacggcgcggtccggcgtaagccgcgccgacacgaccgcctccgccgcgcgcttcagccacccaacccggtatgcgtgcgccagcgccagacaagactagacggacccgtagacgaccgaccaaccaacctaacctaacctaaccgaaccc

SEQ ID NO: 65472 - DNA, 216 bp, Setaria italica
  Peptide Sequence Number=SeqID_131446
cggtgcggatcaagcgggccaagggcgccgtcaagttcaaggcttgagcgttcaggagatttaagtagcaagccagaatatgccttgtgcggtttcagagatgtttcagagatgtgtcttccgccagtattgctttagtataatgcatagatggcttaaaccatgtttgaacgaattatgaagtttgagtttagaaaatgtaatgttggaagtggc

SEQ ID NO: 65473 - DNA, 309 bp, Setaria italica
  misc_feature (227)..(227): n is a, c, g, or t
  Peptide Sequence Number=SeqID_131447
tagtaagtccgttctttcggtacttgtcttgtctaaaaccgttgtctaggtcttgcagattgcccattcgtcctgcatctgcgattacctgggctccccagacgccagggagaatttaagcctggagaaagtcttctatgtcaccaagcagtgcggcgtcaccatccctgcaggctgcggatcaaagaggttctgagacaaggaactggctgaacctgaatgaaggngattggctaacacacacaaggcagctaggaaaatggctcaaagtataataaagttggtcaactgttagtttgatgatgttgg

SEQ ID NO: 65474 - DNA, 274 bp, Setaria italica
  Peptide Sequence Number=SeqID_131448
tctttaaacggggattggaacactgggggccgatgtgataacacaaatcctttggccaaaggtagtggcattcacttgaaccattccgaagacaccgatgctgagggtgcggtgaggggaaccaggatcaacctgctggatgtcactgccctctcgcgtctgagggacgagggccatatatcacggtatagcatcaaggccacgctgggctgcaaggatctcattccacgtatcgggtacaccaggaaggcaccagtgcaaacaatcctgaacg

SEQ ID NO: 65475 - DNA, 439 bp, Setaria italica
  Peptide Sequence Number=SeqID_131449
tccttaaaaagaaaagaagaccatcctatccacaaccacagcaaggaagccgcccctcaaagattgccaaccgtgggataggatggtcttcttttcttttaggtttcttgtgcccattgatttggtactttgcagccaccctttactgctgcaagtactacaataaggatcctcgagagcgcccaggtcttgctgcctcggctgttgcggcactcatcttcacagtcctggcaattatcacccttgccgtgacgctgataatatgcgcatacaagtaacatccagatcatggaaaacagggcagttggacccgtcattggtagctaaggcattcagaaggaacttgtagtttcagtgatagcatgtcttttcagccatccttcatgtatcactttagcaagttcttgatcgaacctagctaccgtcacatgtggttcct

SEQ ID NO: 65476 - DNA, 399 bp, Setaria italica
  Peptide Sequence Number=SeqID_131450
agaactaaataacaaaatttaagttagaaagtaattacaacggcaagggaggaatctgttggtcagttattggtattaaggcctctggcactttccttgccgaatatctgtagaacaaatgggagaagggttgtgttggcaagtatacactactcagagatgaagaaaacccacggttggcaatctttgagaggcggcttccttgctgtggttgtgggataggatggtcttcttttcttttaggtttcttgtgcccattgatttggtactttgcagccaccctttactgctgcagtactacaataaggatcctcgagagcgcccaggtcttgctgcctcggctgttgcggcactcatcttcacagtcctggcaattatcacccttgccgtgacgctgat

SEQ ID NO: 65477 - DNA, 233 bp, Setaria italica
  Peptide Sequence Number=SeqID_131451
ccagctcctcacgctcacagaatacagcacctattgcggagaaggggaaactgaggtcctgggttggtccaaatgggcagtactaccgtgagctgccttgccctagctgcaggggtagaggttacactccatgcaagcagtgcggagtagacagatcaagcttggactgccctatgtgctatggcaagggcattaggatgtgtctacaatgtggcggagattgtgtgatatgg

SEQ ID NO: 65478 - DNA, 176 bp, Setaria italica
  Peptide Sequence Number=SeqID_131452
gtttcaattggattttgggttcataaaagcaggaaaactttgtggaaactgatatgaatgatgcagaatattctattgaaatccaatgctatcattgtaacatgcggttggctggaacaggcacagcaggtctggagtacctctatgcaacaaactgttatgttcattaaaaaaaa

SEQ ID NO: 65479 - DNA, 317 bp, Setaria italica
  Peptide Sequence Number=SeqID_131453
tagtaccccttagtaagtacttagtaacctaagtaattcttaccaagcaaagctgcaagaatgttttcaggaacacaagacaagtgtgcaacttgtggcaaaaccgcgtatcctcttgagaaggtaacagtcgaagaaaaggcctaccacaagtcgtgcttcaaatgctcccatgggggctgtgccattacaccatccaactacgcagccttggaggggaccctctactgcaagcaccatttctctcaacttttcaaggagaagggaagctacaatcatctgatcaagtgtgcatcggtgaagcgtgcggaagcaca

SEQ ID NO: 65480 - DNA, 271 bp, Setaria italica
  Peptide Sequence Number=SeqID_131454
tccgcgacatccagtggctggtgatgaggacggacaactacatcgtgccggggctgttcctcgcgaacgcgttccggggggagctcgacctgatgtttccggagccggacgccgtgttccaccacctcggtttcaggaacacaagacaagtgtgcaacttgtggcaaaaccgcgtatcctcttgagaaggtaacagtcgaagaaaaggcctaccacaagtcgtgcttcaaatgctcccatgggggctgtgccattacaccatccaactacg

SEQ ID NO: 65481 - DNA, 226 bp, Setaria italica
  Peptide Sequence Number=SeqID_131455
tttttaagatggaacaaaagatgctgacagtgctattcattttcaccgagcaaaagtcagaaactttagcacaagatccatatttcagcaggctttcagttcatcctgggtctactatatgcatgtagaatatctaacaggttgacaggttcatcttgtgcttcctgagcttcagctgctcgaagaagagcacctgcacgatgatgcggagcgggaggcgctcgtt

SEQ ID NO: 65482 - DNA, 193 bp, Setaria italica
  Peptide Sequence Number=SeqID_131456
atgatgatgtctcatgcttaagccttccgttatacaaaaactcatctcagccatggaatacaggggctgctatttctgggccttgctccagtgctaataccattccacaagaggctccctccaggactctgcatggggcctccatactgggctactggccaaccaaatagatcaggatcactgcatgatctag

SEQ ID NO: 65483 - DNA, 365 bp, Setaria italica
  Peptide Sequence Number=SeqID_131457
tgtacgttattctaggtctagggttactactatttattggttattcgacttcgccgactctatcacccgcaccactatgaccaacacggtaacaccaaactacacaacctgagatagcccgttcaagaaatccattatctcagaggacctgatgaaggatgattcttcacagtatggtgcaacgactcctttcttcagcctgaggagcaccgttctgctgatacctgcttgggtctgaagggttgtaggtgaactggctcgtgtccagaccgtacttctctcgcatcctttggctccatgcatcgtttctgcttgcacgttgatcaagtgttgggacaggaacaccagtggcaggaacattttgt

SEQ ID NO: 65484 - DNA, 270 bp, Setaria italica
  Peptide Sequence Number=SeqID_131458
ggagtggcagggcgctcactcttcaagcttcttttgggtggcttttgggccatgcctgatgaatgcggaacgtctctccgcagcagttcgggttcacccttcagctggcctgatgaatgcggccggtacacaaccttcttcttgtgcaactttggggcagggaaatcatcaccgcttggtcttgcatcctgtcaggcaaagccttggagtttccattcctagttgtgcgcgatgatggtgcccgctccgcttgtgagacttgccttgtgg

SEQ ID NO: 65485 - DNA, 279 bp, Setaria italica
  Peptide Sequence Number=SeqID_131459
gcctggagctgtggaagcagagggaggaggccatggagatgagcggcctggaggcggagcagagggaggaggccgatgaacatctgggtgatggagctgatggcgtacatgctcagcatgctcacgccgatggggagcccgatgccccacaggagcttcgtctccgcccacaccatgcgcgccgcgtcgccggcggaacgcaccggcggcgtgtcgtcggctacctgcatggtgccgggccgcgtgtcgtcggctacctgcggctggtgctcgtgctgg

SEQ ID NO: 65486 - DNA, 259 bp, Setaria italica
  Peptide Sequence Number=SeqID_131460
tgatgaaattcttcagttacatacttacatacaggacttacccaccagagagtgctcatgtttattgaaaatgagccttggcaaagtgtaatgggatgggacaacaagctggtaaagaaaacaactaggtgtcttcattccaggagaggcttgtatgtaagtatgtaactgatgaaattcttcagacttggatgtgtcagcaaattgctatatatgccaatggctcaaagcaagagttgacatgtaaattttgatttac

SEQ ID NO: 65487 - DNA, 256 bp, Setaria italica
  Peptide Sequence Number=SeqID_131461
cacgaggaggcgccggcagcgacgccggcgctcgctccggcctcgccggcgcagcccgtcgccaccaactggaagatctccagccccggtaaagctccaaccttgtcaattagttgctggttgctgatttgtattcttgatttctgttaaaagcagatctgttcaagatcgtagaaatttagcaagaaccattttttagttcatctgaatccttaagaaatcagttcagaactcctagattgcaaaaataatgatg

SEQ ID NO: 65488 - DNA, 183 bp, Setaria italica
  misc_feature (24)..(24): n is a, c, g, or t
  Peptide Sequence Number=SeqID_131462
ctgattacaccagtttctgattcngttttatattttgtttctcattttaggtataagaaaatggaatcttgtataacacctcccagagaggcagcacaattaaagaagtttccagagagactatctgccatccctcccagaattctggaaggccatgccccaggtgttacagaagaaggctat

SEQ ID NO: 65489 - DNA, 405 bp, Setaria italica
  Peptide Sequence Number=SeqID_131463
gagaaactatggttacagtggtttgtgggccttgagaggtgggggcagccgaaggaactccaggagaagaggtaacatttcctctgctggagaacttgagtatcgatgattgcccgaggttgactgatctacctgaagcacccaagctaagtaaattatccataactaatggaggaataaattgtcaacaacaaatatccctagaggcagcattcatcccttcattgtcccgtctgaatctggcagtgtcacccgatgacacagaaacaacattgctgcatgtcaagaataaattgaatggtacactcgccctaccagctatgtggttatggcggtgcgacctttttttctcctcccgctcaagcgcactggcgctatggacatgttttgcacagctagtagatt

SEQ ID NO: 65490 - DNA, 244 bp, Setaria italica
  Peptide Sequence Number=SeqID_131464
taaagtgtaaaagtttgactgcattaccaaaagcagcaccagtgattacagaattgtctggcagagttgacactaagtgccgctctgcatttccagcattgaggaaaatgaagctatgtgacttgactgtgtttgaaagatgggaggcaggcgaaggaatttcaggcgaagaggtaacctttcctcagctcgaggagctgtcaatcaggtcttgtggcagcctgagtgcactaaccaaaagggc

SEQ ID NO: 65491 - DNA, 310 bp, Setaria italica
  Peptide Sequence Number=SeqID_131465
ttgttaaaattttacgtttgtttatttgttattggtccttcttactaagtatttctattgtagttccttggtaaggagagaacaaagtctggtatcaattgcttcaagtacaagctgctgcgtgaacctggtcagcgtgatggagctgcaatatggaaggtgactcagaaaatggataactaatcctactaccagaggcaatgttctactagctgatctgtcatctaaggctgaaatgttgccggtttgtacttgtcaatgaggtagaccacgagaaaggacctggacatttcacctatactaaccaggt

SEQ ID NO: 65492 - DNA, 281 bp, Setaria italica
  Peptide Sequence Number=SeqID_131466
attctgatgtgctaaagaagaaagcaactactttcatgtgctatgctgctgtcagtttccaagtgtcctaattttcattagcgtacctagcaaatctaatcgtgtggatgacagagtttactggtggcttctattaccttaccttgacctgtattgagccgagtctcgtcttctcccttcctgggtaatacctgtgcttcttacagatgaagtgtttggctctgccaaggggcgggttcgtcaccaaccccttggctctgcatagtatagactgagtcgga

SEQ ID NO: 65493 - DNA, 337 bp, Setaria italica
  Peptide Sequence Number=SeqID_131467
aggccccaactcggacagtggttatatagctcccaaccaaaccaacactcacacaaagtaataacaaagactgtatcagtaaacagcaaaaatctaatcttacatcctgcttcaatctcccccactactggttttgctcctcggttgtgtgctcgtggtggttacccgacgtatcatcactctccacatgttgtgtcgagttcacctgtttgataggcttcatgttgagtttcttcttctgctgtttctgtactacctgccgaggcatcacctccaggatgaagctcccgccaattaccaataagtaacaaactaaaccaaacaaactaagaaagaa

SEQ ID NO: 65494 - DNA, 405 bp, Setaria italica
  Peptide Sequence Number=SeqID_131468
gctgcagcgccacacaattagtgcccaagcaagcggaccctctgcaaatgagaagcaaaccatgaataacttttcatcctttggatagaagagaatcattacaacgagaaaagtgttggcatagtagcagaagtccaggagatagtaatgccactttttgtagcggtagtagatccaacgaagcggaacgaatatgacatagaacaggcagtacacataaggaacatcctgtggtctggcacccaggaggtagcaaaatcccccaaatccaagaacacccagcaagtgtgtgacctgcacatttaacacatgcagcaccatgtgagaacattccctacacccaataatcattgcagtaaagtacgaacaataaatgcacaaagtctgttgcagccacagtatctg

SEQ ID NO: 65495 - DNA, 250 bp, Setaria italica
  Peptide Sequence Number=SeqID_131469
cccttaataacctctgtcgacgcagcacattaactatgagaaaatacataagttgccacaaggtgtaagcagctagaggaacaaaaaacagccatgtccagagatatgatttgtcttccacatatggccatgtaactctggctgctcttccttctggatgcatggcagcaaatgtttgcgggttcctacctaccggtattagttgttaacttagttaacttaatttcccttaggtttaaagttatttgtt

SEQ ID NO: 65496 - DNA, 169 bp, Setaria italica
  Peptide Sequence Number=SeqID_131470
tcaaggccatcgttgccactgtgaacagcgcctggagcagtatgtacgatgacctgccggttcctatcgcccaacagtccactcagcctggagcagtatgtacatgacctgccggttcctatcgcccaacagtccactcagcctccaccagatgttgttgcttctgtgc

SEQ ID NO: 65497 - DNA, 166 bp, Setaria italica
  misc_feature (16)..(16): n is a, c, g, or t
  Peptide Sequence Number=SeqID_131471
atggagtcgatgtgcnggcccatgacttgcgcagcttgctcaccacgtccaccgggtccaccgtgccgatcaccgtcatcttgcgcgccgccatgtccaccgagataggacgtaacgaaataagaaaccgaaaacgaaagaacaaacggaaagaaacggaaacaaa

SEQ ID NO: 65498 - DNA, 146 bp, Setaria italica
  misc_feature (1)..(1): n is a, c, g, or t
  Peptide Sequence Number=SeqID_131472
naccccagttgcacagctcagaggggtgttctgtatagtaggctctttcccagtcagatctctatgatctggagctgttgtattttatttcttgacaggtatagaatacaacagctccagattctattagtagtattcttgtactt

SEQ ID NO: 65499 - DNA, 428 bp, Setaria italica
  misc_feature (414)..(414): n is a, c, g, or t
  Peptide Sequence Number=SeqID_131473
cgggcatatagctattccctcatctccaggagttcatcttgcttgcctgaactctgaatatccggtcgctcaaatttactctgcagatcacattggagggcgagccctaccacaagacctgcttcaaatgcgctcgcggcggctgcctcctgacgaccgccacgtacgcctcccacaacgggatcctctactgccagatccacttctggcaggtgttcaaggagaccggcagctacagcaacctgctcaagcctgcgcccgcgaagaacgccgctggcgagcccgaggccgcaaaggcagaggcagccaaggaagaagcgtcaccggagcaggtccccgaagccccagaggaccaggagcactgaagtgaagcacccacacgcgatccgcgcaggcatacactatgattttggngtggatggatcacc

SEQ ID NO: 65500 - DNA, 382 bp, Setaria italica
  Peptide Sequence Number=SeqID_131474
ttcattcattccatgcatatagagaattcaccatgatgaagagtggacacaggatatataaaaaagacataaaaaaatggtggcatggtgacttccagaaaagaagccaagttattatgctatgaactgaaataacatatgacttcaaggccgtaggggtcggatgtaagaagatatagcataccattaatgttccatactcgaatggaaccatctttggatgcagtgataatttgctcagaatttggggcaaagcacaagctagtaacagcgctcttgtgacccatgagttgcatgactttattaacctctttcactgaactgtcctttgagtaaactatctcccacaccttgacatcagcagtaaaagctgcagcggctt

SEQ ID NO: 65501 - DNA, 349 bp, Setaria italica
  Peptide Sequence Number=SeqID_131475
ccaaagtttcacttcttgtccacaccagcactccccaaataaacgcaggcacgccaccattgagaattgttcgcggagcccaagcaatgccagttatatcaccttcatgagctttctcagctgtatccaaaactgcaccagtttccacacacaaccattgcaacgtcgatccgcttgttacagccaaaattttaccatcaggagagatgctcatgtggtcatattggcaaactgaaccttaagagtgctatcaattccactgcatgactcaaaaggttttttggatcctcatcaaggtgataccttacattaatgttccatactcgaatggaaccatctttggatgcag

SEQ ID NO: 65502 - DNA, 227 bp, Setaria italica
  Peptide Sequence Number=SeqID_131476
tacatatagagagatgagcccagaagagcctgtgctgccacaacaacagatgaagagccctctgagaaagcaacaccagtaggatgtgctccagcaggcaagtttatcctcagaatcctgcaagcatgcccataaatttgtgacactgaatacttacgataaaaggaaattgcttctgtagaatatagtaatatcttacttgaagctcttgcttgaggtatcatcga

SEQ ID NO: 65503 - DNA, 203 bp, Setaria italica
  Peptide Sequence Number=SeqID_131477
gagcgagagcaggatctccattttgacatcttccagctagtaatgggttctggcaatgatatcaagccacttgataaattaatactgttcccaaaccaacctggggagtgcttgggttcaccatgatctctatatgtaaacctacaatttactaaaacaaagaaactaaagaaacttaaaagaaaacaaaataaccaaataaa

SEQ ID NO: 65504 - DNA, 361 bp, Setaria italica
  Peptide Sequence Number=SeqID_131478
cattacacatacattaaatgatgaaatcaatagcatgtgacgtgagaactgtcacctatctattctgagcatgatggtcctgtgaaaacatcatcttgaggcaattgatgaccttttgaggttgtggcagatgcattaaggaagtcaaagagcactggatggacatcaacatatatgtcgaggtggaaaagaatcttgcattcaatagctgaccaggtatcacaggttagttcttgttttgctataccataccgacacattacccgatggacaactggttgtgcgctaaggcgtaaatcatggaaaagagcatatctagtctggacaattttcatatttctatttatgtagtgtggccagg

SEQ ID NO: 65505 - DNA, 239 bp, Setaria italica
  Peptide Sequence Number=SeqID_131479
aatcggacgcattgacatggtggagaaccgccttgtaggcatgaagtctcgtggtgtctacgagacccctggtggcaccatcatggcagctgcggtgcgcgagctggaggccctgaccttggacagggagaccatgtccttccactgcatggtctccctgtccaaggtcagggcgaccatgcagtggaaggacatggtcgccctcaagtatgctgagcgggtcaaaccagcggcctgcg

SEQ ID NO: 65506 - DNA, 227 bp, Setaria italica
  Peptide Sequence Number=SeqID_131480
agctgcggtgcgcgagctggaggccctgaccttggacagggagaccatgcagtggaaggacatggtcgccctcaagtatgctgaggttccgaaggtgcattttctggagcaaaagaagatatgtacatgatgtctgttgctccagaaaatgcaccttcggaacctgagtatctggagattggcatcattgcaggtgttcctgtttccatcaacggacggacctgtcg

SEQ ID NO: 65507 - DNA, 362 bp, Setaria italica
  misc_feature (242)..(242): n is a, c, g, or t
  Peptide Sequence Number=SeqID_131481
aagaaaggaacaatacgccgcaagagatacaggtttgatgaacctgctagccaggtcgttcaaattgatcctcagctgccagcactttttgtggaagcagagagacttgttgggattgatggtccaagggagcaggtcatcgagttgatgaaagaagatgactatggaaagcaactcaaagttgtatccattgtggggtttggaggtcttggcaaaggacaactcttgcaaaccaagtttancagaaaatcaaagggagttgtattgatccatcagatgatgagcgacaactcatagacaagcttagagcattcttacaagataagaggtacttcaatcattgttgatgatatttggagcac

SEQ ID NO: 65508 - DNA, 442 bp, Setaria italica
  Peptide Sequence Number=SeqID_131482
gtaatattttgttctgagagttctgataaaaacaaaatagtcaattggatgccatcatacagccattcataagtattgcttgccatacactgaaaattctggggacaaataattatgttgctgcaggtatataatagcaaacattctttgtccggagagctacagtaccaggacaatttgggtggaaatataggaaggaaagttacagcgatatatataaactcaagtgaaggttttctcgatgtggtgaatgcttgcccacacgaaggcgaaggtttgcggcctattttgccaagcaggaggaaaaaaattttggtggtgctcgcactttcatcaacatccaaggattcctccatagtggtcttcttcagagctgtaggcaatcaggtatcgtgaagtaagttaagaaacgtaaagtaacgggtaaaggtaaaagttaaaa

SEQ ID NO: 65509 - DNA, 386 bp, Setaria italica
  Peptide Sequence Number=SeqID_131483
gtaactgggaagaggtctttctcaactgggttgacgtctctgaaaggaggaagaaagaatacagggcttcgcctaacagtgactggcgtccttggaactttgtcaataagcagagagggtttgctgcaagatcatcgcttttcaagcgaggtggtccattagcttgtgaattggcacgtcatcctgttgtccttaagatcaatgactgggtattttgtcatggtggccttcttcctcatcatgttgaatacgggattgagcgtatgaacagagaagtgtcaatgtggatgaaatgttcaggtgaagacagcgatgatgagacaggcatccctttcatagctactagaggttatgacagtgtggtatggagccgactgtactcgcat

SEQ ID NO: 65510 - DNA, 473 bp, Setaria italica
  misc_feature (20)..(20): n is a, c, g, or t
  Peptide Sequence Number=SeqID_131484
aggtgtgcttagctcctttnttaaaagttttgttcctcctatataattctgaattcttgtacacatcactgaagttgacaccagttatttgtcttgcattgtacttgtcacttccagcatccatgttgaagggttgtagccatcttttatattgctgacaccttcgatagcctcaaaatactttattagctcgcatgaatgctgtcctaatggacctacatagatctcttcacctccacgtttcataaggaagagctcatcaaaggattcaaagatatcaatgcttggttggtgaatggtacaaacgaccgttcttcctgtgtccaccgtattccttattgccctcatgacaatggctgctgctcgtagcaatacaaagtaccaagaatagtacggttacaataccaatagaaaaatagaataagaaagggttaagacaaactaagactacgaactagactattgttagccta

SEQ ID NO: 65511 - DNA, 262 bp, Setaria italica
  Peptide Sequence Number=SeqID_131485
ttagttcttagttaagttaagttacctttgttattcgttgtttgtattcaggggctgatttgcatcatcgtcgctgtcatcatcttcgccatggccgtggtggtcagaggcactgatagactcctcatcactagagttgtgcccatcatctttaaagagtttcttcccgcgtacatctggtatatttggtgcctctggtacgtctctgacctttctcgggcggcctcgtcgcttcacaggtttttcttcctccccgtgcaaa

SEQ ID NO: 65512 - DNA, 322 bp, Setaria italica
  Peptide Sequence Number=SeqID_131486
agagtatcacccttgtttatatgctacaccatacatgatggtccatatcatttatttaaagtgtggttctccttttcctcccaggttgtctttattccaaattacaatgtatcagtggctgaagtgcttattcctggtagcgaattgtcacaacatattagtactgctggtatggaagcaagtggaacaagtaacatgaaattctctctgaacggttgtgttattattggcacccttgatggagctaatgttgaaataagagaggaggtaggagaagataatttcttccttttcggtgccaaagctgatgaagttgctgggc

SEQ ID NO: 65513 - DNA, 264 bp, Setaria italica
  Peptide Sequence Number=SeqID_131487
ccggagaagtgcggcgcggccgagaaggtgaagccggcggccagccccgcggcggagaagcccgccgacatcgccggaaacatctcctaccacgcgcagtacagcccccacttctcgccgctcgcgttcgggcccgaggaggccttctacgccaccgccgagagcgtccgcgaccacctcatcgagagatggaacgacacctacgtgcatttccacaagacggatccgaagcagacgtactacctgtccatggaataccttcag

SEQ ID NO: 65514 - DNA, 411 bp, Setaria italica
  Peptide Sequence Number=SeqID_131488
tcggggttttctaggtaaggttgtacggtccgtttcttgtaacccttgtaaaaggtagttcccttgttctattccggtgtcctgtcagtagcaaccataaagaagacggaagaggaggtggagaggctgacgcggctcaaggccggccggatgaaggagctcgtgctcaagaggcggctggagctggagaacatctgcaggaacatgcacgtggagcccgatgcaagcaccgtgccggagaaatccattgcgttgatcgattccggcctcgtgaacccttccgagctcatggccaacatcgacgaacagatcgcgagagccagggaagagctgcagtccaggaaagacatcatggacaggataaacaagtggctgttgcttgcgaggaggagcaatggctcggaggagtac

SEQ ID NO: 65515 - DNA, 229 bp, Setaria italica
  Peptide Sequence Number=SeqID_131489
cgggacggggacgtgcgcgccggaggggtgggagggcagacggcgagcgtggagatttgggtggggagggtgggatggtggacggggatggaggcgagtgtgggggcggtcggcgcgcggatattgaggtagagcgagaggaagaagccgttcctgtacgacggggctcgcttggtggccgtcctggaggagcacaagcaagccaggctgaggcaggaggaggagagga

SEQ ID NO: 65516 - DNA, 195 bp, Setaria italica
  Peptide Sequence Number=SeqID_131490
ttaactaaattaacctaaaccaaataaataacaagtactaccaacttacaaaccaacgtacttacagtatactccacctcttcatcaccatcctcatattgctcttcatattgctccaaatctttctcatcatagtctacagcagcctcctcttcatattctggttcgtcctcgaactccagtcgttcgcctttg

SEQ ID NO: 65517 - DNA, 175 bp, Setaria italica
  Peptide Sequence Number=SeqID_131491
caaattgacatgaaaattgaaataagtgaatgaccaaaagtgcctaacagataatagagccttcaagactatacctccatagcccatgccatgacggctgctgccataggctgaatcatgaccagaaattgatcggctgccactatatcccacatgtgatcgtccaggcctctca

SEQ ID NO: 65518 - DNA, 350 bp, Setaria italica
  misc_feature (20)..(20): n is a, c, g, or t
  Peptide Sequence Number=SeqID_131492
ttagcatgccagcaagacanagaaaacaataagcatcaacttctctgataataacatcactacaaatatgagaaccaactggacaaaaagcaatggaattgtgctcaggcactcaaatggtcagattggttgccaatggcgcaggctaacaattctggaacagataatgatatatttggcagcttgttctgacttcagagcatcttaatgttgagtgcataattaaatagttaagactaagcaatgttctctttgtgtttgctcgaacaattgaggagaaacattcaagttctgaactgaagggtcttgaatatttctcctcaatgttctctttgtgtttgctcgaaaca

SEQ ID NO: 65519 - DNA, 424 bp, Setaria italica
  Peptide Sequence Number=SeqID_131493
taagtaagaactaagtaaacgaaattagactactaggaacaagtacaatagacaatagggcaatggcactaacaaccatgttgggaagagaacgcacttatagctagatggaacatacgacctggtatcagtacaaaggttttgttctttcaaaacagaaaatggttcatatatatgaacaaggaattgtgcagtacgtccatgtataccatcagttacagtcagaaatacaggcatacagccgatggacgtttaatttactgaaagaggagagagctcaattttggagtgtgctctgattgttgaagggagattcagcatatagggacatagctttcccccttaagataacaataaaccatgttgatatgtagtgctgccatttatgtgaattacaatgtgtagtgtacaacatcacacgtat

SEQ ID NO: 65520 - DNA, 403 bp, Setaria italica
  Peptide Sequence Number=SeqID_131494
ctactataaatcaatcgatatgttaaatgccatctttttacagcatcattaattttatttatttttttgtctatacaggattaaagaatccttttaccttgatgagccatgttaccccagtgatggcaatagtaacagcaattatttctattgcaatggatccatggcatgacttcagagcaagtcacttcttcgatagttctgctcacataataaggagcagcttattgctgcttctaggtggtgctctggccttttttcatggttttgacagaatatgttctcgtttctgtgactagtgctgtaacagtgaccgttgctggaattgtgaaggaagctgtcactattctggtcgctgtgctattctttaatgatccattttacctggttaaagggactttgg

SEQ ID NO: 65521 - DNA, 476 bp, Setaria italica
  Peptide Sequence Number=SeqID_131495
agcttacacatgatctgaaagttgtctcatcttctttgactgtggcctaactttgtacctcacagttgctaaggagacagaatttaatctttggggatttatatttattatgcttgctgctgttatgtctggattccgctggtccatgacccagattcttctccaggtttgttatcatataacgctttcagaattttcttattttgtcctgctttatttaatattgctggttagacaggatacctggtccaattagtttcgtatatatgtattgtactttcgtttcatgcctgccacgactgaacttttgcccttttctcttatatgtctgccaaaatcgctgaagaaagaggaatacggattaaagaatccttttaccttgatgagccatgttaccccagtgatggcaatagtaacagcaattatttctattgcaatggatccatggcatgacttcagagcaagtcacttcttcg

SEQ ID NO: 65522 - DNA, 246 bp, Setaria italica
  Peptide Sequence Number=SeqID_131496
ttctaagttcatccgagaaaaattgtatcgatgccgatttctgacatgactggtgcaagctagccctaattgtatgtttcttccccttcagtctgtagacaaaaccttaacatgcacactcgcatctgacaggtgcacatctttcagcatttctgattgcttcccaaacgtgtattacccaaggacattcaaaggcctcgccgaggtcttggtcctattcgagatatgttggtggatcctgaatca

SEQ ID NO: 65523 - DNA, 402 bp, Setaria italica
  Peptide Sequence Number=SeqID_131497
acttcagtccaacctacattggatgcggtcttatttgtccacacattgttaactgctctacacttcttggtgccatcatatcgtggggtttcctttggccatatatatcaacaaaagctggggactggtatccagctaacctaggaagcaatgacttcaaaggactttatggatacaaggtttttatatctgtatctgtgatacttggggatggtctctataatctcatcaagatcatttatgctactatcaaggaaataatgaatgcacgggcgaagcaaggaagacttccacttggccgggttcaaggaatagaatagaatagaaaggttactaaaattaatacaagactagaaagaaaaagttttactagaaattagtaagtaactaatttactaatta

SEQ ID NO: 65524 - DNA, 350 bp, Setaria italica
  Peptide Sequence Number=SeqID_131498
tagtaatttaggtaccttacttttaatttttttgtctttctattgggtttggttctagtaaattggttggggttgattgctggcttagctgcctgcggtgttatgatgtccatcgtttccacagcagctgatctcatgcaggacttcaagactgggtaccttacactctcttcacctaggtccatgtttgtgtcacagttgatcgggaccgctcttggctgtgtcattgctccactcacgtttttggctttactggtcggctttttgatattggcaaccctgatggtcccttcaaagctccatatgctgtgatcttccgtgagatgtcgattcttggcgtcgaagggttc

SEQ ID NO: 65525 - DNA, 282 bp, Setaria italica
  Peptide Sequence Number=SeqID_131499
agcatttaagaatacgttttattttgacttcagtccaacctacattggatgcggtcttatttgtccacacattgttaactgctctacacttcttggtgccatcatatcgtggggtttcctttggccatatatatcaacaaaagctggggactggtatccagctaacctaggaagcaatgacttcaaaggactttatggatacaaggtttttatatctgtatctgtgatcttgatgagattatagagaccatccccaagtatcacagatacagatattaaaaa

SEQ ID NO: 65526 - DNA, 245 bp, Setaria italica
  misc_feature (14)..(14): n is a, c, g, or t
  Peptide Sequence Number=SeqID_131500
gaatgagacattcntaaaggacagtgtccctccctggttggcaggatctggttatgttggccttgcagcaatatcaactgcaactgtcccaatgatcttcccacagatcaagtggtaccttgtcctctcagacaataacgttagttagactacccctaactacgactttactagacaaactacgtaataggacaactaggtactaaacaagaactaggaaaccttagacaatacaaacaaataaa

SEQ ID NO: 65527 - DNA, 246 bp, Setaria italica
  Peptide Sequence Number=SeqID_131501
cttcaaaagatttgatcttggcgtgtgtggtgtggttgtgatctgacgcggcgctgctctgtttgctctggtgcgtgcaggaggggcctgtccaagttcttcgacggcaagtcgcagtcgttcgcgtcgctggcggcggtggccggcctggaggacctgcccaagccgccggcgaagcgcctcaaggcgtcgcggagctgcggcgtcggcctcaaggacgcgcaccgcggcagcctcgccgcgccc

SEQ ID NO: 65528 - DNA, 156 bp, Setaria italica
  Peptide Sequence Number=SeqID_131502
cgcgttacaccattctaatttctagcgtccgtccgttcgagtgatctgcgttgtttgctcgccccgcctgatcttcctgggaatggaggcctacgtcctgttcgcgcgcggcaagcaggcgatcaggacgtaggcctccattcccaggaagatcag

SEQ ID NO: 65529 - DNA, 371 bp, Setaria italica
  misc_feature (200)..(200): n is a, c, g, or t
  Peptide Sequence Number=SeqID_131503
ttacggacaagtacggtacgaagacaaagactaagactactacgaatcaatatctcagtgcttaaccggagatgaagcaatgaagagcaagaagacgtccggaaggccacgcacgaatgtgcatttccttgttactactactctttgctgctgctgcttcattctcctcttctttttattctgggtgcatgtaaaagggntttttgatcatttgttcctcggtacgtagtcagtaattggttcgtcctgtagatgcatccgcggatgctcgagttgcattgtaatggttgtagtgtagcagtcgcagtcgtagtcaaattaactccagctagctgtgctgtgcctatctctgatgttttgaaagggccagg

SEQ ID NO: 65530 - DNA, 134 bp, Setaria italica
  Peptide Sequence Number=SeqID_131504
cacgaacagctgtcttggctttctcgagaagaagtgctcgggtgtcaagttggaaaatctccctcaagacattagatctgcagtaagtggaagaaaagctaatgtcttgagggagattttcttccacttactgc

SEQ ID NO: 65531 - DNA, 490 bp, Setaria italica
  Peptide Sequence Number=SeqID_131505
atgaagctatgctcacagactggatgaggaattttggaagttggcatcccagctctactagaggatgggatcaatgtccttatatatgctgggagtatgaccttatatgcaattggctcgggaactcgaggtgggttcactcgatggaatggtctggtcagaaagactttgtatcctctagtgagtcatcatttgtagtagatggtgctgaagctggagtttttgaagagccacggaccactcagcttcctcaaggttcacgatgctggccacatggttccaatggaccagcctaaagcttccctggaaatgctgaggagatttaccgaaggaaaactgaaggaatcggttcccgaatcaatggtttttaaggctgtgatgtgattgaccttaacagaattacttgctaggtagtatgaggtgtcatcccaaaggaagtagtagtacgactagaacaacttacttagtttacaatttaattttaatacca

SEQ ID NO: 65532 - DNA, 333 bp, Setaria italica
  Peptide Sequence Number=SeqID_131506
tcagagtacagattagtgaaataaaagaaacagaagaacgaaaggaaaaaataagcagcctaccatgtggtgggacaccatgctgtaaaaataaatgaaaaagaagcatcccaaagattgaagccctacagatgataccctctgcctaattgcaacgtcctatcactggaagcgtgcaaattgaatcattattgaaaattatgcggcctttgcttttctagattcaagatgtttaataaagcgcaaatgattgttacatggagtctcctgctttatctcttggaacccctttatgggctacttccaccacctagcctggttgattgttgcatt

SEQ ID NO: 65533 - DNA, 489 bp, Setaria italica
  Peptide Sequence Number=SeqID_131507
tggtgacaaagcggtcaaagaggcccttggagttggtgacattgaattcgtctcttgcagtagtacagtttatgaagctatgctcacagactggatgaggaatttggaagttggcatcccagctctactagaggatgggatcaatgtccttatatatgctggggagtatgaccttatatgcaattggctcgggaactcgaggtgggttcactcgatggaatggtctggtcagaaagactttgtatcctctagtgagtcatcatttgtagtagatggtgctgaagctggagttttgaagagccacggaccactcagcttcctcaaggttgtgatctaatcacactctttcactttgccttgttgcttagtacttggtaccttccccaaaaggagatacttcatgttggcaaattaagactggttctgctaggaatgtaggtgtacttacaaaatgtgccaagataaccttgtaaaatctagtcataactg

SEQ ID NO: 65534 - DNA, 146 bp, Setaria italica
  Peptide Sequence Number=SeqID_131508
ttgcagtagtacagtttatgaagctatgctcacagactggatgaggaatttggaagttggcatcccagctctactagaggatgggatcaatgtccttgcatataaggtcatactccccagcatatataaggacattgatcccatcc

SEQ ID NO: 65535 - DNA, 504 bp, Setaria italica
  Peptide Sequence Number=SeqID_131509
gtatctctagtgagtcatcatttgtagtagatggtgctgaagctggagttttgaagagccacggaccactcagcttcctcaaggttcacgatgctggccacatggttccaatggaccagcctaaagcttccctggaaatgctgaggagatttaccgaaggaaaactgaaggaatcggttcccgaatcaatggtttttaaggctgtgatgtgattgaccttaacagaattacttgctaggtagtatgaggtgtcatcccaaggagtgtgtcgctgacacttcttgtttcatttattttatccaccacggtgtctactgaatttacccctgataataactttggcgtgcaatgtaactacagtcccagtcatgtactctgttgatggaaaaaatcaaatacacgaaggggacaaatgttcaaagccttgtctgttgatcttgtaaaagcaatttcaatgtaataacaacgactttagaataccggaaaagaaaaaataagtaaaaa

SEQ ID NO: 65536 - DNA, 229 bp, Setaria italica
  Peptide Sequence Number=SeqID_131510
cagcaagttatatgcaacttactgttcgtacccttatttcctagaagtacggcacacttcaacgcgaagcatttgccaatgattaatgaaggtcgtcgccatgaatttaccggtggaagagattgacaaatgtgtcactcggggaggttgttcgagccaagctgaagcagttctcgtccatgaataagttcaagaagaaggcacttggagtaagttgcatataacttgc

SEQ ID NO: 65537 - DNA, 210 bp, Setaria italica
  Peptide Sequence Number=SeqID_131511
ggataaacggtcatcctgaaatctgtgcttgatggcgaaaggtgagtagtccacttttccaggattcccaagaatcatatcactgaccatttcagcagtgcctagtgcctaaaggaaaattagcagaaggaaattaactcttctatcttcttacaagggaaacaacaataaaaaggtagaaagcagaacgccaacacccctgttgacatg

SEQ ID NO: 65538 - DNA, 357 bp, Setaria italica
  Peptide Sequence Number=SeqID_131512
ctagaggaacattcttcattgcaggaaagaactctcctgcacgttccatatacacttaacaacggacttatcaacctcccgcgaaaaacctttgaactcccggctgcttcctgtaacatacagctgcaatatgttcaaccattttctgtatgtcccttaaaatggaattcttgtttctagaaccaaattgccctttgtatctaaggttgcagtcattgatatagataaagcaccgtgctcatcttcactggattctgaagccatatgtgtgctacttgacttagcaacctgatggtcaacataatacctaacctaccaattaagggacaatagaatttaagacttaaacctttagta

SEQ ID NO: 65539 - DNA, 243 bp, Setaria italica
  Peptide Sequence Number=SeqID_131513
cctatctgcaaaagcatatggcaaatattcttactctcttggcagattctgttgagggtgagggtgacgattctctgaaacaataaccttaatcatcggactggacaataaagaaatggcatgtgaagctctgttatcactcgttcaagatgtaggcctccaagtagaatatgagacatgatgttgtgagttttcattagaaaaaaccaacacacaggtattgacaatggagacttttgagca

SEQ ID NO: 65540 - DNA, 247 bp, Setaria italica
  Peptide Sequence Number=SeqID_131514
acatgccaattacaaaagaattaggttaataacgacttacaaggcaatatccgccagctctactgtttgcaaggtgaataagcacgggattcatctgtaaatgcgcatgtgcaagattgtccttcaaccattccattccgcgcatccaagagatccaggctgactggttgtggctgtgccgaagcagatggttgttcagcctgtagtgtttgtggagggaagtatgtaaaaaatgtactgtgtttta

SEQ ID NO: 65541 - DNA, 228 bp, Setaria italica
  Peptide Sequence Number=SeqID_131515
aactgtcccggatcccacttttgttgcttgtatatgaaggacgccgtgtaagtttattgtccccccaattacaacaccagatacttctttaggtacgggtgctgattcaccagttatcatactttcattcacatgacttgttccccaaacgacaacaccatcagccgggacctttgacccaggaagcactttcaagacatcaccaggttggaccaacagtgcatcaat

SEQ ID NO: 65542 - DNA, 177 bp, Setaria italica
  Peptide Sequence Number=SeqID_131516
tgagaggacagtatttacatcaaactgccgcaaaccatccattttcttaagaatatcatgcaatacttctacatccctctctgtgtgcaagccaatcagtcccagcaaaatcttatcttgctcgcttactctgcaagaatgctgcttcaaaaccggcatcctcgatggcctgaacaa

SEQ ID NO: 65543 - DNA, 431 bp, Setaria italica
  Peptide Sequence Number=SeqID_131517
ttaaatttttgttccttaacttatttatttacttgttgttattagtaaagttagtcttccggttattaaggacagtgttagctgattagttggtgcatctccccgcacccctggttcagtcaatgttactgtatagctgtaatgttactccaactgtatatataactgtaaagctgaatgtagtgaggtttgcatgggaaatggccatgcgtcatacctgcaatgcttttaggtcattgctcaaaagttctgtacgaattatacaagtaatggcttagatttgcgggatcgaaggtcccgtggcatcgatttatccggaagccggcagaggagaaatctggaagaagcagctacgcaacaggcaacgcaggtttcgtcgatgcgtggcttgcagagccattggacgggccgaagtccttggctgacagcct

SEQ ID NO: 65544 - DNA, 276 bp, Setaria italica
  Peptide Sequence Number=SeqID_131518
ccaagaggcctgctgaatggaatggcttcggatatgttattggagcattcaggcgtttatgcttggcaagtgtgtatactactcttttctggactatccaaacgggtatggtttcttccctgcgttgtaaggtttgtatcttaagtacagttttacttcatatttggacgggaaattgacctttcattttactgccctaaaaatttctaactctttcccctgttaccatgaatgcaggcagggttgaatgaaatgacctaattggttgtatatgct

SEQ ID NO: 65545 - DNA, 241 bp, Setaria italica
  misc_feature (3)..(3): n is a, c, g, or t
  misc_feature (10)..(10): n is a, c, g, or t
  Peptide Sequence Number=SeqID_131519
ttnttatttnttcttttagtttctttacttttagttagggttttcgttcttaacttagttcttaactttagttcttatttgttccgttggttggtaagtaaattggttttctagtattcgttggtcttaccaagaaggaaaattagactagttagaacctacggttaactaacaatgccattctgatatctggacttgtgtttctctaattcatcggtcactaccctcagtaccaggtttc

SEQ ID NO: 65546 - DNA, 263 bp, Setaria italica
  Peptide Sequence Number=SeqID_131520
tttacaacataacaaatatgtttatgctttcttgttgttttgatttatcaccatggtatcctcctgttctaggtatgatcctcgaaagcgtataacggctgcacaagctctggagcacgagtactttcggatggacccactacctggaagaaacgcgcttttaccatcccagccaggagagaaaattgtgcaatatcctgttcgtccagtcgatactacaacagattttgaaggaacaacaagccttcaaccaactcagccgc

SEQ ID NO: 65547 - DNA, 243 bp, Setaria italica
  Peptide Sequence Number=SeqID_131521
tattcggatggtgttcgtttggtcggtcagattgtttcagttcaaacagagatggacggggagcttacgaatgcggtgaagttctggcagatgccgccgaaggagtggcagagccagatgtcgttgcggaagtcgtacatgtccagcatcaggcccctcacgccgttctgcgcacacaaagtttcgcgtctgaccaagatgcagaacatctaatctaacaatagattggctcgatgtacgtag

SEQ ID NO: 65548 - DNA, 255 bp, Setaria italica
  Peptide Sequence Number=SeqID_131522
cgactttggatcaaatgagttgattgcattgccaaccgtttccataacttttgactggatctcatccttgaagctgttcactgctcctggtgcaggcagcgggtggtacgagacaacctccctgcgtgctgacatggtaatcaatgtctagcacataactcccagtcaatccgagtccgggcggctctccgccctgcctggtgccggcggagggcagggacggacggcgggaaggaaaaagcctggcttgtcggc

SEQ ID NO: 65549 - DNA, 286 bp, Setaria italica
  Peptide Sequence Number=SeqID_131523
cagatcatatattcatatgtaagttgtcacgtcttcaagctggcactttgtttgtaggatcagcccaaagatccttgcttaaatggacccttgagattgtttcatgcttgcagggtacaagtgggtattcgctggtggttttcttgctttgaaattcggatcaatttatttagatgtgttttaggttgatccaatgacgcaaattaaagaaaacttgcatcactgcatgttatattgccattttgagagggggcattttttcgtgaccatacctattttataaagc

SEQ ID NO: 65550 - DNA, 265 bp, Setaria italica
  Peptide Sequence Number=SeqID_131524
ttaagggaactttaagttagttagaatagaccaaatagttaacttacaatacttgatgatgggctcactgtccccaggtttaaaatcgcatgctgtcacactctatgaggctggaaaactaggtgattcttgtattgcagaactttgtagtgatctggctagtttagagggaaagaaatttgaaggtgtcctagaggagtttgcaaatcatgcatttagtctagcggtacttcttggagtgtttacagtctggtggtgtttcttc

SEQ ID NO: 65551 - DNA, 264 bp, Setaria italica
  Peptide Sequence Number=SeqID_131525
gtctcaccatcttgaagtttcaagtgctcgaagaagacatgtacatgatgcacatacccttcttcgagttttgtgtcataagaaggataaaattgcctctacgttcttgagaattcaataccaccttccaaggtcgtcagattatgatgaccttcctgtgaaggacgtgtcatctaaagtacctatgttttcaagaacaatagacttaaagaagaaggtaacctacaattacaaaattaaggtaacaaagaaagaaacaaagaa

SEQ ID NO: 65552 - DNA, 187 bp, Setaria italica
  Peptide Sequence Number=SeqID_131526
taaagagctttattttttggaaagataagagctaaatttttgccccaggcaaaaataaatgaagcaccgcgaggggtttttgtttcgaggagaagttgactgttccacctgcagcctgcaggtaccaagctggtggcctatttctgagacacgcaacaggagataggcaaggcacacaggggatagg

SEQ ID NO: 65553 - DNA, 249 bp, Setaria italica
  Peptide Sequence Number=SeqID_131527
ttgcaagtcgctagaacgtatgtgttcatgcaaactagttgctcaaatgcttggagaggtctggctcgatgcagtttactgatactaggaatgcgttcgtgcagagcgatgaacatcttgaaccagcccatcaaccccggcggccacccggtgttcccggcggccaaggagagcggccacctcgcgccgtcgtcggtgcgcttcgacggcgcgccggcgcagccgagcacggcggccgcggggtgctcc

SEQ ID NO: 65554 - DNA, 295 bp, Setaria italica
  misc_feature (7)..(7): n is a, c, g, or t
  misc_feature (10)..(10): n is a, c, g, or t
  Peptide Sequence Number=SeqID_131528
aatcatnatnaatgtagcgccgctcgttggcttccctggcgcgctcaagcatcttgtcaaggtcctccttgactttgtcatcaaactttaccagctggttcacaaacaccgcaccgagacccatccccaacacatgctcccaggggtctagaacagtttagaaatgacaaccacatgagaatgaatcatcatacctacaaggacgggcgcatgtaggggagcttgcggagggcgttggagtacatctgggtgctcagccccaggagggcgccgatgatcgtcgcgtcgccggccg

SEQ ID NO: 65555 - DNA, 477 bp, Setaria italica
  Peptide Sequence Number=SeqID_131529
tatcatgcaggctatgcagcaccagggggtcgacctatttatggtccacctcctccaaatacaaatagagctccacaaggaattcttccttgccctcctgtctctacacaccgtggttctgtaataccaccaccacctattcaaacctcctttgttcgacctgtatatcatggtccagggagtccttgggagaacatacccccaatccaccacccttcagtcatgtttctcctcgcatgatgcctggaagtaacttccgtgccaatccaactcttcctttcataccctcttctgttactcctattgtgcagcttcctggtggttcagcgcagcattctgagaaaatgcctccgccaaccaacctactaaccaaaatagtaagactacccccaacaaatttaacaacctaccaacctaccaattaacctaatttaacccaaagaaccaaaccttaacaaagtaagaaccaacaaccca

SEQ ID NO: 65556 - DNA, 398 bp, Setaria italica
  Peptide Sequence Number=SeqID_131530
atttctcgcaggataaatttacaataaccggaagaatatgtactgcacaatcttggggctccaacaacttcccaagagcagcacaaccctcaactgccaatagtcgaactgaatcttggcagcacaaccctcaactgccaatagtcgaactgaatcttggtcatcttgtgtaagatcatcaaatattgacatgatttctgtcttcaaatgattttgttcaactgttgcagaaaactttccaagattggatgcagcagctcttctcaccataggcatgtcgtcttggcataactgaccataaatagtccttaattctgccttcagtgattcagatgcgctaggataggcgatatgaaaaaggccacatgatgacactctagctgtgaaccactcgcccg

SEQ ID NO: 65557 - DNA, 367 bp, Setaria italica
  Peptide Sequence Number=SeqID_131531
tgacaattccttaacacatggaagaatatgttggatggcaagctgtggacttaatatgcgacagaacttagtaacttttccagcagctgctatccgcacttcagcctcattgtcacgaaggagacgaacatatgcaggcaccaaatcagctcttgtaggctcagggccaacagcctcacagagctcatacaattgattggcgaccatataacgaacacgccaggattatcctatcaaaggaacaaagcaactataagcattacgcatgtagcactatatatcagtggtgatgcattgaactgcaacaagtaacaatactaaagaggcaattctgataaattatacaaccactggaggatcacaaatg

SEQ ID NO: 65558 - DNA, 223 bp, Setaria italica
  Peptide Sequence Number=SeqID_131532
ataatcagcaaacttgatcaagttaaccaggttatgttgagtcgaacatcaggaaattcatccttcaataaagaaagaaaaatacggaagaagttgttcgatggtagcatcctttcccaatacaggagccattcccataatgactgaagccaaagctgaacgaacatgctgggaatggctcctgtaataggaagaagttgttcgatggtagcatcctttccca

SEQ ID NO: 65559 - DNA, 494 bp, Setaria italica
  Peptide Sequence Number=SeqID_131533
ttttaaaccacattaggcacatcaagccactaatcagaaagcaaattacaatctaccttgtaaacacacaataataacgacgtgttgtctagctcaattacaacattaataacacaacgaacaagggatcaagaccgtccatttaccagcatggcagtgttgatctgttactgaggctagaaggaacttttcaatctaaaggccaaattacagatactccaaaattggaataaaaaaaatcaagctctatatcagactagttagctcgacaccatcatctgatcgcacgcctgcagggcctggtttgcgtagtatcttacatccacatcagggtcctcgctgagctcaacaaggcatggtttcacggtagattgatcaaggatcggtataagtgactgcagtacttttgcaacattgaacttgatgttaggaaccctgtccttgaggaattaatgatgactggaagcagcttttgacaagtgatttctgcaccc

SEQ ID NO: 65560 - DNA, 406 bp, Setaria italica
  Peptide Sequence Number=SeqID_131534
tgaacaagtgatttctgcacccatgacaggggccaacaatgagatagcttgcagaattgtcatgcgatacagatagtgcggattgttgatcttctccagcacctgaggaattatatgctgcattgcccactctggaccgaactcctctgcaaggcgcttcaagttgttagcggcagcatctctgattgagaagaccttatcttccaaccattgcatgcagagtgcccccagcttgtcatcaaaaaacccgcacctaactgacttgctaacaatgggatgtactcaattattgcaagccgaactctccagtgcctatcctctgcaagttctacaatggccggtagcagtgattgagagagtaagtcaattccaataacctggttaacttgatcaagtttgctgatta

SEQ ID NO: 65561 - DNA, 457 bp, Setaria italica
  Peptide Sequence Number=SeqID_131535
tgttccttttgtaggtaatttaattgtattgtacttggaagtcagtctttttgtactaagttgtattttcttgcacccatgacaggggccaacaatgagatagcttgcagaattgtcatgcgatacagatagtgcggattgttgatcttctccagcacctgaggaattatatgctgcattgcccactctggaccgaactcctctgcaaggcgcttcaagttgttagcggcagcatctctgattgagaagaccttatcttccaaccattgcatgcagagtgcccccagcttgtcatcaaaaaaacccgcacctaactgacttgctaacaatgggatgtactcaattattgcaagccgaactctccagtgcctatcctctgcaagttctacaatggccgtagcagtgattgagagagtaagtcaattccaataacctggttaacttgatcaagtttgct

SEQ ID NO: 65562 - DNA, 403 bp, Setaria italica
  misc_feature (3)..(3): n is a, c, g, or t
  misc_feature (9)..(9): n is a, c, g, or t
  misc_feature (17)..(17): n is a, c, g, or t
  misc_feature (44)..(44): n is a, c, g, or t
  misc_feature (54)..(54): n is a, c, g, or t
  Peptide Sequence Number=SeqID_131536
ttntttttntttttttnttttttttttttttttttttttttttntttttttttntttttttttttttttaaaacctcaccaaacaccctctaagagataatctggaaagtgcaagtctcaacgaaaccacattaggcacatcaagccactaatcagaaagcaaattacaatctaccttgtaaacacacaataataacgacgtgttgtctagctcaattacaacattaataacacaacgaacaagggatcaagaccgtccatttaccagcatggcagtgttgatctgttactgaggctagaaggaactttcaatctaaaggccaaattacagatactccaaaattggaataaaaaatcaagctcttattatcagacttagttagtcttcgtactacctattcta

SEQ ID NO: 65563 - DNA, 452 bp, Setaria italica
  Peptide Sequence Number=SeqID_131537
ttttaaaccacattaggcacatcaagccactaatcagaaagcaaattacaatctaccttgtaaacacacaataataacgacgtgttgtctagctcaattacaacattaataacacaacgaacaagggatcaagaccgtccatttaccagcatggcagtgttgatctgttactgaggctagaaggaacttttcaatctaaaggccaaattacagatactccaaaattggaataaaaaaaatcaagctctatatcagactagttagctcgacaccatcatctgatcgcacgcctgcagggcctggtttgcgtagtatcttacatccacatcagggtcctcgctgagctcaacaaggcatggtttcacggtagattgatcaaggatcggtataagtgactgcagtacttttgcaacattgaacttgatgttaggaaccctgtcctttgaggaatt

SEQ ID NO: 65564 - DNA, 363 bp, Setaria italica
  Peptide Sequence Number=SeqID_131538
tttttttttttttttaagtttgcaagtctcaacgaaaccacattaggcacatcaagccactaatcagaaagcaaattacaatctaccttgtaaacacacaataataacgacgtgttgtctagctcaattacaacattaataacacaacgaacaagggatcaagaccgtccatttaccagcatggcagtgttgatctgttactgaggctagaaggaacttttcaatctaaaggccaaattacagatactccaaaattggaataaaaaaatcaagctctatatcagactagttagctcgacaccatcatctgatcgcacgcctgcagggcctggtttgcgtagtatcttacatccacatcagggt

SEQ ID NO: 65565 - DNA, 392 bp, Setaria italica
  Peptide Sequence Number=SeqID_131539
ttttttttttttttttggtaaagtgcaagtctcaacgaaaccacattaggcacatcaagccactaatcagaaagcaaattacaatctaccttgtaaacacacaataataacgacgtgttgtctagctcaattacaacattaataacacaacgaacaagggatcaagaccgtccatttaccagcatggcagtgttgatctgttactgaggctagaaggaacttttcaatctaaaggccaaattacagatactccaaaattggaataaaaaaaaatcaagctctatatcagactagttagctcgacaccatcatctgatcgcacgcctgcagggcctggtttgcgtagtatcttacatccactatcagggtcctcgctgagctcaacaaggcat

SEQ ID NO: 65566 - DNA, 416 bp, Setaria italica
  Peptide Sequence Number=SeqID_131540
ttactgaggctagaaggaacttttcaatctaaaggccaaattacagatactccaaaattggaataaaaaaatcaagctctatatcagactagttagctcgacaccatcatctgatcgcacgcctgcagggcctggtttgcgtagtatcttacatccacatcagggtcctcgctgagctcaacaaggcatggtttcacggtagattgatcaaggatcggtataagtgactgcagtacttttgcaacattgaacttgatgttaggaaccctgtcctttgaggaattaatgatgactggaagcagcttttgacaagtgatttctgcacccatgacaggggccaacaatgagatagcttgcagaattgtcatgcgatacagatagtgcggattgttgatcttctccagcacctgaggaat

SEQ ID NO: 65567 - DNA, 420 bp, Setaria italica
  Peptide Sequence Number=SeqID_131541
agctttgacaagtgatttctgcacccatgacaggggccaacaatgagatagcttgcagaattgtcatgcgatacagatagtgcggattgttgatcttctccagcacctgaggaattatatgctgaacaattgcccactctggaccgaactcctctgcaaggcgcttcaagttgttagcggcagcatctctgattgagaagaccttatcttccaaccattgcatgcagagtgcccccagcttgtcatcaaaaaacccgcacctaactgacttgctaacaatgggatgtactcaattattgcaagccgaactctccagtgcctatcctctgcaagttctacaatggccgtagcagtgattgagagagtaagtcaaattccaataacctggttaacttgatcaagtttgctgattatgttgag

SEQ ID NO: 65568 - DNA, 410 bp, Setaria italica
  Peptide Sequence Number=SeqID_131542
aaggaaattaaatgaatgaactggaagcagcttttgacaagtgatttctgcacccatgacaggggccaacaatgagatagcttgcagaattgtcatgcgatacagatagtgcggattgttgatcttctccagcacctgaggaattatatgctgcattgcccactctggaccgaactcctctgcaaggcgcttcaagttgttagcggcagcatctctgattgagaagaccttatcttccaaccattgcatgcagagtgcccccagcttgtcatcaaaaaacccgcacctaactgacttgctaacaatgggatgtactcaattattgcaagccgaactctccagtgcctatcctctgcaagttctacaatggccggtagcagtgattgagagagtaagtcaattccaatacc

SEQ ID NO: 65569 - DNA, 346 bp, Setaria italica
  Peptide Sequence Number=SeqID_131543
ttctcaacgaaaccacattaggcacatcaagccactaatcagaaagcaaattacaatctaccttgtaaacacacaataataacgacgtgttgtctagctcaattacaacattaataacacaacgaacaagggatcaagaccgtccatttaccagcatggcagtgttgatctgttactgaggctagaaggaacttttcaatctaaaggccaaattacagatactccaaaattggaataaaaaaaatcaagctctatatcagactagttagctcgacaccatcatctgatcgcacgcctgcagggcctggtttgcgtagtatcttacatccacatctagggttcctct

SEQ ID NO: 65570 - DNA, 444 bp, Setaria italica
  Peptide Sequence Number=SeqID_131544
acaataataacgacgtgttgtctagctcaattacaacattaataacacaacgaacaagggatcaagaccgtccatttaccagcatggcagtgttgatctgttactgaaggctagaaggaacttttcaatctaaaggccaaattacagatactccaaaattggaataaaaaaaatcaagctctatatcagactagttagctcgacaccatcatctgatcgcacgcctgcagggcctggtttgcgtagtatcttacatccacatcagggtcctcgctgagctcaacaaggcatggtttcacggtagattgatcaaggatcggtataagtgactgcagtacttttgcaacattgaacttgatgttaggaaccctgtcctttgaggaattaatgatgactggaagcagcttttgacaagtgatttctgcacccatgacaggggccaac

SEQ ID NO: 65571 - DNA, 408 bp, Setaria italica
  Peptide Sequence Number=SeqID_131545
atggtttcacggtagattgatcaaggatcggtataagtgactgcagtacttttgcaacattgaacttgatgttaggaaccctgtcctttgaggaattaatgatgactggaagcagcttttgacaagtgatttctgcacccatgacaggggccaacaatgagatagcttgcagaattgtcatgcgatacagatagtgcggattgttgatcttctccagcacctgaggaattatatgctgcattgcccactctggaccgaactcctctgcaaggcgcttcaagttgttagcggcagcatctctgattgagaagaccttatcttccaaccattgcatgcagagtgcccccagcttgtcatcaaaaaacccgcacctaactgacttgctaacaatggatgtactcaattatt

SEQ ID NO: 65572 - DNA, 402 bp, Setaria italica
  Peptide Sequence Number=SeqID_131546
caaggcatggtttcgacggtagattgatcaaggatcggtataagtgactgcagtacttttgcaacattgaacttgatgttaggaaccctgtcctttgaggaattaatgatgactggaagcagcttttgacaagtgatttctgcacccatgacaggggccaacaatgagatagcttgcagaattgtcatgcgatacagatagtgcggattgttgatcttctccagcacctgaggaattatatgctgcattgcccactctggaccgaactcctctgcaaggcgcttcaagttgttagcggcagcatctctgattgagaagaccttatctttcccaaacccattgcatgcagagtgcccccagcttgtcatcaaaaaacccgcacctaactgacttgctaacaat

SEQ ID NO: 65573 - DNA, 246 bp, Setaria italica
  Peptide Sequence Number=SeqID_131547
gcacccatgacaggggccaacaatgagatagcttgcagaattgtcatgcgatacagatagtgcggattgttgatcttctccagcacctgaggaattatatgctgcattgcccactctggaccgaactcctctgcaaggcgcttcaagttgttagcggcagcatctctgattgagaagacctttattctttcctaacctatttgtcttattgttcttagttaagtttgttccccttaagttacttaa

SEQ ID NO: 65574 - DNA, 266 bp, Setaria italica
  Peptide Sequence Number=SeqID_131548
ggaccgaactcctctgcaaggcgcttcaagttgttagcggcagcatctctgattgagaagaccttatcttccaaccattgcatgcagagtgcccccagcttgtcatcaaaaaacccgacacctaactgacttgctaacaatgggatgtactcaattattgcaagccgaactctccagtgcctatcctctgcaagttctacaatggccggtagcagtgattgagagagtaagtcaattccaataacctggtttaactttgtattcta

SEQ ID NO: 65575 - DNA, 336 bp, Setaria italica
  Peptide Sequence Number=SeqID_131549
atcttctccagcacctgaggaattatatgctgcattgcccacctctggaccgaactcctctgcaaggcgcttcaagttgttagcggcagcatctctgattgagaagaccttatcttccaaccattgcatgcagagtgcccccagcttgtcatcaaaaaacccgacacctaactgacttgctaacaatgggatgtactcaattattgcaagccgaactctccagtgcctatcctctgcaagttctacaatggccggtagcagtgattgagagagtaagtcaattccaattaaccttggtttaactttgtattctaagttttgtcttgtattttattt

SEQ ID NO: 65576 - DNA, 344 bp, Setaria italica
  Peptide Sequence Number=SeqID_131550
actccctgtgtgtccgttggctagtctcttttttttagtttttttttttgttttttttttttttttttaaaccacattaggcacatcaagccactaatcagaaagcaaattacaatctaccttgtaaacacacaataataacgacgtgttgtctagctcaattacaacattaataacacaacgaacaagggatcaagaccgtccatttaccagcatggcagtgttgatctgttactgaggctagaaggaacttttcaatctaaaggccaaattacagatactccaaaattggaataaaaaaatcaagctctatatcagatgatggtgtcgagctaactagtctg

SEQ ID NO: 65577 - DNA, 400 bp, Setaria italica
  Peptide Sequence Number=SeqID_131551
gctctatatcagactagtttagctcgacaccatcatctgatcgcacgcctgcagggcctggttttgcgtagtatcttacatccacatcagggtcctgctgagctcaacaaggcatggtttcacggtagattgatcaaggatcggtataagtgactgcagtacttttgcaacattgaacttgatgttaggaaccctgtcctttgaggaattaatgatgactggaagcagcttttgacaagtgatttctgcacccatgacaggggccaacaatgagatagcttgcagaattgtcatgcgatacagatagtgcggattgttgatcttctccagcacctgaggaattatatgctgcattgcccactctggaccgaactcctctgcaaggcgcttcaaagttaga

SEQ ID NO: 65578 - DNA, 429 bp, Setaria italica
  Peptide Sequence Number=SeqID_131552
aaaaaatcaagctctatatcagactagttagctcgacaccatcatctgatcgcacgcctgcagggcctggtttgcgtagtatcttacatccacatcagggtcctcgctgagctcaacaaggcatggtttcacggtagattgatcaaggatcggtataagtgactgcagtacttttgcaacattgaacttgatgttaggaaccctgtcctttgaggaattaatgatgactggaagcagcttttgacaagtgatttctgcacccatgacaggggccaacaatgagatagcttgcagaatgtcatgcgatacagatagtgcggattgttgatcttctccagcacctgaggaattatatgctgcattgcccactctggaccgaactcctctgcaaggcgcttcaagttgttagcggcagcatctctgattgag

SEQ ID NO: 65579 - DNA, 380 bp, Setaria italica
  Peptide Sequence Number=SeqID_131553
cctggtttgacgtagtatcttacatccacatcagggtcctcgactgagctcaacaaggcatggtttcacggtcttctccacaacctgcagagtaagcattgatgatattccccaataacaggaacttcaaatgtagaactttaaatgtaggatcatgcaaaaactgtaggaactcacagattgatcaaggatcggtataagtgactgcagtacttttgcaacattgaacttgatgttaggaaccctgtcctttgaggaattaatgatgactggaagcagcttttgacaagtgatttctgcacccatgacaggggccaacaatgagatagcttgcagaattgtcatgcgatacagatagtgcggattgtttgatcttctcc

SEQ ID NO: 65580 - DNA, 272 bp, Setaria italica
  Peptide Sequence Number=SeqID_131554
tttttttttttttaatttcagaaagcaaattacaatctaccttgtaaacacacaataataacgacgtgttgtctagctcaattacaacattaataacacaacgaacaagggatcaagaccgtccatttaccagcatggcagtgttgatctgttactgaggctagaaggaacttttcaatctaaaggccaaattacagatactccaaaattggaataaaaaatcaagctctatatcagactagttagctcgacaccatcatctgatcgcacgc

SEQ ID NO: 65581 - DNA, 314 bp, Setaria italica
  misc_feature (29)..(29): n is a, c, g, or t
  Peptide Sequence Number=SeqID_131555
gttctctttttttagtttttttttttttnttttttttttttttttttacctttgtaaacacacaataataacgacgtgttgtctagctcaattacaacattaataacacaacgaacaagggatcaagaccgtccatttaccagcatggcagtgttgatctgttactgaggctagaaggaacttttcaatctaaaggccaaattacagatactccaaaattggaataaaaaaatcaagctctatatcagactagttagctcgacaccatcatctgatcgcacgcctgcagggcctggtttgcgtagtatcttaca

SEQ ID NO: 65582 - DNA, 259 bp, Setaria italica
  Peptide Sequence Number=SeqID_131556
ttacaatctaccttgtaaacacacaataataacgacgtgttgtctagctcaattacaacattaataacacaacgaacaagggatcaagaccgtccatttaccagcatggcagtgttgatctgttactgaggctagaaggaacttttcaatctaaaggccaaattacagatactccaaaattggaataaaaaaaatcaagctctatatcagactagttagctcgacaccatcatctgatcgcacgcctgcagggccttgg

SEQ ID NO: 65583 - DNA, 268 bp, Setaria italica
  Peptide Sequence Number=SeqID_131557
tttttttcaacgaaaccacattaggcacatcaagccactaatcagaaagcaaattacaatctaccttgtaaacacacaataataacgacgtgttgtctagctcaattacaacattaataacacaacgaacaagggatcaagaccgtccatttaccagcatggcagtgttgatctgttactgaggctagaaggaacttttcaatctaaaggccaaattacagatactccaaaattggaaataaaaaaaatcaagctcaaatatttgatg

SEQ ID NO: 65584 - DNA, 410 bp, Setaria italica
  Peptide Sequence Number=SeqID_131558
ggaacttttcaatctaaaggccaaattacagatactccaaaattggaataaaaaaaatcaagctctatatcagactagttagctcgacaccatcatctgatcgcacgcctgcagggcctggtttgcgtagtatcttacatccacatcagggtcctcgctgagctcaacaaggcatggtttcacggtagattgatcaaggatcggtataagtgactgcagtacttttgcaacattgaacttgatgttaggaaccctgtcctttgaggaattaatgatgactggaagcagctttgacaagtgatttctgcacccatgacaggggccaacaatgagatagcttgcagaattgtcatgcgatacagatagtgcggattgttgatcttctccagcacctgagaattatatgctgc

SEQ ID NO: 65585 - DNA, 262 bp, Setaria italica
  Peptide Sequence Number=SeqID_131559
aatttttcagaaagcaaattacaatctaccttgtaaacacacaataataacgacgtgttgtctagctcaattacaacattaataacacaacgaacaagggatcaagaccgtccatttaccagcatggcagtgttgatctgttactgaggctagaaggaacttttcaatctaaaggccaaattacagatactccaaaattggaataaaaaaatcaagctctatatcagactagttagctcgacaccatcatctgatcgcacgc

SEQ ID NO: 65586 - DNA, 335 bp, Setaria italica
  Peptide Sequence Number=SeqID_131560
tagttagtactagctcaattacaacattaataacacaacgaacaagggatcaagaccgtccatttaccagcatggcagtgttgatctgttactgaggctagaaggaacttttcaatctaaaggccaaattacagatactccaaaattggaataaaaaaaatcaagctctatatcagactagttagctcgacaccatcatctgatcgcacgcctgcagggcctggtttgcgtagtatcttacatccacatcagggtcctcgctgagctcaacaaggcatggtttcacggtagatttgatcaaggatcggtataagtgactgcagtacttttgcaac

SEQ ID NO: 65587 - DNA, 318 bp, Setaria italica
  Peptide Sequence Number=SeqID_131561
tattcttgggttccttctacttgtagtcttctaactaaggtctattggtttcactgtcttctccacaacagattgatcaaggatgggtatgagcgactgcaggactttggcaacattgaatttcatgtttggcaccctatcctttgaggatgcgatgacaacagggagcaactgttggcatgtgatgtcagcacccatgactggagcaagcaaagaaatagcttgcaaagtggtcattcggtacagataatgtgggttgttatcttctccaaaacctgaggaattatatactgcattgcccactcaggactgaattcc

SEQ ID NO: 65588 - DNA, 226 bp, Setaria italica
  Peptide Sequence Number=SeqID_131562
cgaacaagggatcaagaccgtccatttaccagcatggcagtgttgatctgttactgaggctagaaggaacttttcaatctaaaggccaaattacagatactccaaaattggaataaaaaaatcaagctctatatcagactagttagctcgacaccatcatctgatcgcacgcctgcagggcctggtttgcgtagtatcttacatccacatcagggtcctcgctgag

SEQ ID NO: 65589 - DNA, 247 bp, Setaria italica
  Peptide Sequence Number=SeqID_131563
caacgaacaagggatcaagaccgtccatttaccagcatggcagtgttgatctgttactgaggctagaaggaacttttcaatctaaaggccaaattacagatactccaaaattggaataaaaaaatcaagctctatatcagactagttagctcgacaccatcatctgatcgcacgcctgcagggcctggtttgcgtagtatcttacatccacatcagggtcctcgctgagctcaacaaggcatggttt

SEQ ID NO: 65590 - DNA, 202 bp, Setaria italica
  Peptide Sequence Number=SeqID_131564
ccattttaccagcatggcagtgttgatctgttactgaggctagaaggaacttttcaatctaaaggccaaattacagatactccaaaattggaataaaaaaatcaagctctatatcagactagttagctcgacaccatcatctgatcgcacgcctgcagggcctggtttgcgtagtatcttacatccacatcaggtcctcgct

SEQ ID NO: 65591 - DNA, 235 bp, Setaria italica
  Peptide Sequence Number=SeqID_131565
cggattgttgatcttctccagcacctgaggaattatatgctgcattgcccactctggaccgaactcctctgcaaggcgcttcaagttgttagcggcagcatctctgattgagaagaccttatcttccaaccattgcatgcagagtgcccccagcttgtcatcaaaaaacccgacacctaactgacttgctaacaatgggatgtactcaattattgcaagccgaactctccagtcg

SEQ ID NO: 65592 - DNA, 317 bp, Setaria italica
  Peptide Sequence Number=SeqID_131566
tggtttgcgtagtatcttacatccacatcagggtcctcgctgagctcaacaaggcatggtttcacggtagattgatcaaggatcggtataagtgactgcagtacttttgcaacattgaacttgatgttaggaaccctgtcctttgaggaattaatgatgactggaagcagcttttgacaagtgatttctgcacccatgacaggggccaacaatgagatagcttgcagaattgtcatgcgatacagatagtgcggattgttgatcttctccagcacctgaggaattatatgctgcattgcccacttcttggtaccgta

SEQ ID NO: 65593 - DNA, 243 bp, Setaria italica
  Peptide Sequence Number=SeqID_131567
aaattacagatactccaaaattggataaaaaaaatacaagctctatatcagactagttagctcgacaccatcatctgatcgcacgcctgcagggcctggtttgcgtagtatcttacatccacatcagggtcctcgctgagctcaacaaggcatggtttcacggtagattgatcaaggatcggtataagtgactgcagtacttttgcaacattgaacttgatgttaggaaccctgtcctttgag

SEQ ID NO: 65594 - DNA, 226 bp, Setaria italica
  Peptide Sequence Number=SeqID_131568
gacaggggccaacaatgagatagcttgcagaattgtcatgcgatacagatagtgcggattgttgatcttctccagcacctgaggaattatatgctgcattgcccactctggaccgaactcctctgcaaggcgcttcaaggttgttagcggcagcatctctgattgagaagaccttatcttccaaccattgcatgcagagtgccccagcttgtcatcaaaaaacccg

SEQ ID NO: 65595 - DNA, 196 bp, Setaria italica
  Peptide Sequence Number=SeqID_131569
attgcccactctggaccgaactcctctgcaaggcgcttcaagttgttagcggcagcatctctgattgagaagaccttatcttccaaccattgcatgcagagtgcccccagcttgtcatcaaaaaacccgacacctaactgacttgctaacaatgggatgtactcaattattgcaagccgaactctccagtgcctat

SEQ ID NO: 65596 - DNA, 223 bp, Setaria italica
  Peptide Sequence Number=SeqID_131570
ggggccgaacaatgagatagcttgcagaattgtcatgcgatacagatagtgcggattgttgatcttctccagcacctgaggaattatatgctgcattgcccactctggaccgaactcctctgcaaggcgcttcaagttgttagcggcagcatctctgattgagaagaccttatcttccaaccattgcatgcagagtgcccccagcttgtcatcaaaaaacccg

SEQ ID NO: 65597 - DNA, 212 bp, Setaria italica
  Peptide Sequence Number=SeqID_131571
tctgcacccatgacaggggccaacaatgagatagcttgcagaattgtcatgcgatacagatagtgcggattgttgatcttctccagcacctgaggaattatatgctgcattgcccactctggaccgaactcctctgcaaggcgcttcaagttgttagcggcagcatctctgattgagaagaccttatcttccaaccattgcatgcagagtcg

SEQ ID NO: 65598 - DNA, 197 bp, Setaria italica
  Peptide Sequence Number=SeqID_131572
ggggtccgaacaatgagatagcttgcagaattgtcatgcgatacagatagtgcggattgttgatcttctccagcacctgaggaattatatgctgcattgcccactctggaccgaactcctctgcaaggcgcttcaagttgttagcggcagcatctctgattgagaagaccttatcttccaaccattgcatgcagagt

SEQ ID NO: 65599 - DNA, 216 bp, Setaria italica
  Peptide Sequence Number=SeqID_131573
aattaatgatgactggaagcagctttgacaagtgatttctgcacccatgacaggggccaacaatgagatagcttgcagaattgtcatgcgatacagatagtgcggattgttgatcttctccagcacctgaggaattatatgctgcattgcccactctggaccgaactcctctgcaaggcgcttcaagttgttagcggcagcatctctgattgagaa

SEQ ID NO: 65600 - DNA, 202 bp, Setaria italica
  Peptide Sequence Number=SeqID_131574
tttccctttatttgtttacttaggggttcctaactaattgagatagcttgcagaattgtcatgcgatacagatagtgcggattgttgatcttctccagcacctgaggaattatatgctgcattgcccactctggaccgaactcctctgcaaggcgcttcaagttgttagcggcagcatctctgattgagaagaccttatctt

SEQ ID NO: 65601 - DNA, 238 bp, Setaria italica
  Peptide Sequence Number=SeqID_131575
tttggtttgcgtagtatcttacatccacaatcagggtcctcgctgagctcaacaaggcatggtttcacggtagattgatcaaggatcggtataagtgactgcagtacttttgcaacattgaacttgatgttaggaaccctgtcctttgaggaattaatgatgactggaagcagcttttgacaagtgatttctgcacccatgacaggggccaacaatgagatagcttgcagaattgtca

SEQ ID NO: 65602 - DNA, 237 bp, Setaria italica
  Peptide Sequence Number=SeqID_131576
gcacgcctgcagggcctggtttgcgtagtatcttacatccacatcagggtcctcgctgagctcaacaaggcatggtttcacggtagattgatcaaggatcggtataagtgactgcagtacttttgcaacattgaacttgatgttaggaaccctgtcctttgaggaattaatgattgactggaagcagcttttgacaagtgatttctgcacccatgacaggggccaacaatgagatag

SEQ ID NO: 65603 - DNA, 184 bp, Setaria italica
  Peptide Sequence Number=SeqID_131577
aaaatcaagctctatatcagactagttagctcgacaccatcatctgatcgcacgcctgcagggcctggtttgcgtagtatcttacatccacatcagggtcctcgctgagctcaacaaggcatggtttcacggtagattgatcaaggatcggtataagtgactgcagtacttttgcaacattgaa

SEQ ID NO: 65604 - DNA, 222 bp, Setaria italica
  Peptide Sequence Number=SeqID_131578
atcaagctctatatcagactagttagctcgacaccatcatctgatcgcacgcctgcagggcctggtttgcgtagtatcttacatccacatcagggtcctcgctgagctcaacaaggcatggtttcacggtagattgatcaaggatcggtataagtgactgcagtacttttgcaacattgaacttgatgttaggaaccctgtcctttgaggaattaatgatga

SEQ ID NO: 65605 - DNA, 204 bp, Setaria italica
  Peptide Sequence Number=SeqID_131579
cagatgatggtgtcgagctaactagtctgatcgcacgcctgcagggcctggtttgcgtagtatcttacatccacatcagggtcctcgctgagctcaacaaggcatggtttcacggtagattgatcaaggatcggtataagtgaaaccatgccttgttgagctcagctcgacaccatcatctgatcgcacgcctgcagggcctgg

SEQ ID NO: 65606 - DNA, 225 bp, Setaria italica
  Peptide Sequence Number=SeqID_131580
ggtagattgatcaaggatcggtataagtgactgcagtacttttgcaacattgaacttgatgttaggaaccctgtcctttgaggaattaatgatgactggaagcagcttttgacaagtgatttctgcacccatgacaggggccaacaatgagatagcttgcagaattgtcatgcgatacagatagtgcggattgttgatcttctccagcacctgaggaattatatg

SEQ ID NO: 65607 - DNA, 193 bp, Setaria italica
  Peptide Sequence Number=SeqID_131581
atcaagctctatatcagactagttagctcgacaccatcatctgatcgcacgcctgcagggcctggtttgcgtagtatcttacatccacatcagggtcctcgctgagctcaacaaggcattggtttcacggtagattgatcaaggatcggtataagtgactgcagttacttttgcaacattgaacttgatgtta

SEQ ID NO: 65608 - DNA, 158 bp, Setaria italica
  Peptide Sequence Number=SeqID_131582
tagtatcttacatccacatcagggtcctcgctgagctcaacaaggcatggttttcacggtagattgatcaaggatcggtataagtgactgcagtacttttgcaacattgaacttgatgttaggaaccctgtcctttgaggaattaatgatgactggaa

SEQ ID NO: 65609 - DNA, 141 bp, Setaria italica
  Peptide Sequence Number=SeqID_131583
ttgaggaattaatgatgactggaagcagcttttgacaagtgatttctgcacccatgacaggggccaacaatgagatagcttgcagaattgtcatgcgatacagatagtgcggattgttgatcttctccagcacctgaggaa

SEQ ID NO: 65610 - DNA, 132 bp, Setaria italica
  Peptide Sequence Number=SeqID_131584
ggggccaacaatgagatagcttgcagaattgtcatgcgatacagatagtgcggattgttgatcttctccagcacctgaggaattatatgctgcattgcccactctggaccgaactcctctgcaaggcgcttc

SEQ ID NO: 65611 - DNA, 135 bp, Setaria italica
  Peptide Sequence Number=SeqID_131585
gttacaggggccaacaatgagatagcttgcagaattgtcatgcgatacagatagtgcggattgttgatcttctccagcacctgaggaattatatgctgcattgcccactctggaccgaactcctctgcaaggcgc

SEQ ID NO: 65612 - DNA, 129 bp, Setaria italica
  Peptide Sequence Number=SeqID_131586
catgacaggggccaacaatgagatagcttgcagaattgtcatgcgatacagatagtgcggattgttgatcttctccagcacctgaggaattatatgctgcattcgcccactctggaccgaactcctctg

SEQ ID NO: 65613 - DNA, 247 bp, Setaria italica
  Peptide Sequence Number=SeqID_131587
ttttaaccatgtcccaattcatccagtccaggatctgcagaagaactgagtctggaagacaaagaagattcatatattatagctgaggaagttccaacaaataatgagcatgttgttttccctggcattcagaatggggagccagacagttgtgggaatcttaaggatatcttcaatatacaggagtttagtggacatcataccaaagaaactggaacccatccatatcccagtgttctcgatgtgt

SEQ ID NO: 65614 - DNA, 199 bp, Setaria italica
  Peptide Sequence Number=SeqID_131588
tttcactgcaatctgatgtctacaatatgctcatgggagggttagtgcatccgctttcttctgttacattagttctgctgtcagaggacagatcagcacaaacaaatgtgtctagtggtattgtttgtgctgatctgtcctctgacagcagaactaatgtaacagaagaaagctgctcatgggagggttagtgcatccg

SEQ ID NO: 65615 - DNA, 426 bp, Setaria italica
  Peptide Sequence Number=SeqID_131589
ttttatcccttacccttgctaaaacttttttttgctttcttaattctttttattatctgttcattatttgcatcaagttcgatatatattctctccctttagttgtcttcaaaacaagacaccttcggattatgacactcatgttttccccatcttatcagtatgagttaaggaaaaaagaagaaagagaagctgctgaagctttgaagcgtgaggaggagctacgtgaagcaaaaagacagcaacagaggctaaactttctgctttcacaaacagagctttatagtcatttcatgcaaaacaagactggtgcctcagcaccgcctgatgaggaagatgtccctgatgaagatgaggaagaagatcctgaggaggctcaattaaagcgagaggccttgagagcagctcagcatgctgtctctcaaa

SEQ ID NO: 65616 - DNA, 248 bp, Setaria italica
  Peptide Sequence Number=SeqID_131590
attcgggctgctatgcccatagcgggcaagatcttctggtacaggaagctggctagggatatgctgatatttggaaaagagtagacaaagagcagtatgagttaaggaaaaagaagaaagagaagctgctgaagctttgaagcgtgaggaggagctacgtgaagcaaaaagacagcaacagaggcttaaactttctgctttcaacaaacagagtctttatagtctatttcatgacaaaacaagactgg

SEQ ID NO: 65617 - DNA, 239 bp, Setaria italica
  Peptide Sequence Number=SeqID_131591
ccgtcatggacaatgttcgctataaggtcatacttcgaacgtatcttatgattctctttaggcttgggtaatggaatgtaatccttcaattccaagttcttcacaggaaaatttactagagtagggtttttctcaacgaagaagttattttggtaaaccgtcgcatgtgaaaggaatacaagaataactttaggtaagtactaagtagaactacggtaacctacaataccgaagacaaa

SEQ ID NO: 65618 - DNA, 258 bp, Setaria italica
  Peptide Sequence Number=SeqID_131592
agagacgagtcctcgtctttcatcccggtggttcgccagggccagctcctcggagacgtaggagagcccctgcatcagcctcaccacctccgccgcgtcgtcgaggtagtattttggccttgctgggcttgcggccgacggtgcacgcgaacacctccgccttggacgccagtgagtccccgcaggcggccgttggtcgtattgtagtcttggtaactatttgtttcctttcgttttcggttactttttgttttcgtt

SEQ ID NO: 65619 - DNA, 184 bp, Setaria italica
  Peptide Sequence Number=SeqID_131593
tcctgcatcgacgccagcatgcgccgcgccaccaggcccttgctcacgccctgcggtttcacttcgacagagtgaggtgtggtcctcactgagacgggctcgttcgtcgtagtctacgtctttctttcgtttaggtttttggttttttcgtttttttacgttttttagtttttttctttttttt

SEQ ID NO: 65620 - DNA, 387 bp, Setaria italica
  Peptide Sequence Number=SeqID_131594
tatttcttattgatgcatttatttatttgcttcaataatttgtctatcttatggtatgtttgctggtttgtttgatgatgtcaaatacatctggcttatgacttcaacagaagaacccaaggtatccagacttcaagcataagcacactggagaagcactgtgggttgatgggaggaacaaccccaactgggttatatctcacctggcagttctggactcaagaatgggttctctgcaagacaatgagagaaaaccagtctcctatatgtacgctgacgacttcatgacactggatggcagccgatactctccatggaggaggaagcctcgcacactccattctacagttcggctaactgttatgtcgaaagcgtgttatcggggta

SEQ ID NO: 65621 - DNA, 261 bp, Setaria italica
  Peptide Sequence Number=SeqID_131595
tttataatgcagatatataatactaccttttacatcctctcagagtaaaaagtgacggaatgttttggtaatacatgctttgtagtaattactgttaaaatttattgtttaatgcgggtgattatactacagggtgactctacagttttgggatgatctcgcccttgtggcctctgagcatgtgaagaagggtgaccggatatttgtttctggacggcttgtgtcagatactgttgatgaggggcctgagaagcggcattg

SEQ ID NO: 65622 - DNA, 261 bp, Setaria italica
  Peptide Sequence Number=SeqID_131596
aatttggaatcaccacgaagctagccctgcagctgttacttctagccaatgcacgaactcatcccggcactcgcgggatggcggttcggggcgccgaggttgaggtcgtaagcggcgatgagttgcctcaagtccatgtagaacattctcccgccgtggaacacgacgctgacgaccccggcggtgggttgctcgaacagggagctccaggcggcgtccccaggccgccagaagaacgacttggtgccgttattggctgag

SEQ ID NO: 65623 - DNA, 207 bp, Setaria italica
  Peptide Sequence Number=SeqID_131597
gcttatttccttgcctaattcatcactggtgctcattttcttggctacttcatcactggtgctcatgtccttgacaacttcatcagatgctacttcgcaggcaacaacggagcagtccaataaagggtcttcattttggcaatcatcattctcggcatacagctgagacacgcaacgaggggaaagcaaggcacacgaggggatagg

SEQ ID NO: 65624 - DNA, 417 bp, Setaria italica
  Peptide Sequence Number=SeqID_131598
gtagaaagagctggctaatttaataacctttgaactattcagtatctgaaagtaggatgacagttcataccaccacaatcacaaaaggcactaaagagaagctgctccctagctttgagacaatttgcactgagaattccttccgctacaacaaagcatagcactagcaccagtactccaattgccggactgtaggataagctggccgaaattgcacaaatcatgcagacctgtcaaatggtcaactaggatgaaaaggacaaggactaaaaatgctctctgcaattatgatgaccaaattcaatgcataggagtgactatttctagaatgcacttgatgctgggaacatgcttaacaagaatgacaagataaagaattatgtaagcatctataccagacaatctaatcaggcattg

SEQ ID NO: 65625 - DNA, 432 bp, Setaria italica
  Peptide Sequence Number=SeqID_131599
agaagccatggacgtggcgagaaggttggcaagggaagaaggattgctcgttggcatatcttcaggggcaaatgcagctgcctgtttaaaggcattctctttactgtgcaaattctgcagtcatccatacctgcttgtggcatggtcatctgatctgtggactacattgcaggttgcggcaagagaggagaacaagggcaagatgatcgtgacgatgttttccagcggcggggagaggtacctggaactcggaactctttgcacaggcgaaagaggaatgtgtcaacatcaacatggccttctgaatgttcaggttgaggcaatgtcagcatatggctgagcccgaagtgcaatgcggtcctaaagtctacttcgcaagatttcgcgttaattgtagtctgactcagtgggttataagatgtaaggagtacc

SEQ ID NO: 65626 - DNA, 297 bp, Setaria italica
  misc_feature (198)..(198): n is a, c, g, or t
  Peptide Sequence Number=SeqID_131600
tcttttcttgttcttcttattccgtcttcttagtctattggtattttgcttacaagaagacagaagtagggatattttccatgctttacaggaattgtatggccagcatttggacaggttatgccagaagtactgtagatctcactctgtcaaggaagacgatagtgccggagtggctaatttagaggaagcaaaagngatcagtagatttgaaatcctaagattccaggagaagattcatggaagctatactacttttgttgagagccttgttgagcaatttgcagctgtctcata

SEQ ID NO: 65627 - DNA, 238 bp, Setaria italica
  Peptide Sequence Number=SeqID_131601
taggcatattgttgtcccaagcccagatgtgcggggtcgccaagagattctggagctctatttgcaagacaagccagtggccaatgatgtagatatcaatgcaattgcccgtagtacacccggctttaatggggctgttggagtttgccaaagatcgtattatcatgggaactgagaggaaatcaatgttcatatctgatgaatcgagaaagcttactgcctaccatgaaagtggaca

SEQ ID NO: 65628 - DNA, 396 bp, Setaria italica
  Peptide Sequence Number=SeqID_131602
gggtatgaacatgaaagtagaacaacaagttcccttgcttttggttgagcgacaagctctaaatgaagccatggaagcagagaaaaatcggacaccaccttcctgaaaccagaggtctctgcctatctgaagagcagattgtcagaactatattaagaagaccaataattggaccaggcaacagaatcatagatatgatcacaggaccatacaaactagttcgacgatgtgaagtgactgcaattcttatactgctgctaactggctcaattctggctcatgaaatgatgcatgcttacctccgacttaaaggataccgaaccctgagtccagaggttgaagaaggcatctgtcaggttctagctcacctgtggcttgagtcggaaatcacatcag

SEQ ID NO: 65629 - DNA, 353 bp, Setaria italica
  Peptide Sequence Number=SeqID_131603
ggcttgaggagtacctccgatcatatcaagctgacggggtcttttccgtagtgaaggctgggttttccctcaagttcgaacatgggtataggattttgagaactcttggttcatgttacgcatagcaaagggtatatatcgtctacagtacacgaagtatatacgagaagataaataaggatttagtttataccgtccattgcagaaaaaagaagtattgattttccttcacaattatataattgcacagttcacgcatgaagttaagtggtctttagcttgaaccaagaccaatagtaagaactagactaatacaacttaaataagaacaaaaagaaaaagtaacgaaacaa

SEQ ID NO: 65630 - DNA, 307 bp, Setaria italica
  Peptide Sequence Number=SeqID_131604
aattggtaattagacgtgccttgaccacatatacaagttcaggggctaaatatggaattctcaagttcagggaccaaaaataacataactctttttgggacagtgtttcctgtaatattaaatttcttatttagtaattacggaaagaatagcatatagcagttcttgattggcaaatgagcatatgaaaatgagtactgttgatcagaaccatgaattttaatgctttgtcttattattatgaaccagataccagtcctactctagatgaagatgaacagcttgcacgggctctgcaagaaagtat

SEQ ID NO: 65631 - DNA, 229 bp, Setaria italica
  Peptide Sequence Number=SeqID_131605
cactatccttatcagagcaagatcaaaggaagggaaaggccattgatacggagcaccacttagatgaagatgaacaacttgcacgggctctgcaagaaaataccagtcctactctagatgaagatgaacagcttgcacgggctctgcaagaaagtatgaatgatgaacatcctcctcgtcagcatattccaattgaagatgttcactcagaaagtgctccagcaagtag

SEQ ID NO: 65632 - DNA, 437 bp, Setaria italica
  misc_feature (1)..(48): n is a, c, g, or t
  Peptide Sequence Number=SeqID_131606
nnnnnnnnnnnnnnnnnnnnnnnnnnnnnnnnnnnnnnnnnnnnnnnnctacaaacataagcaagttccattaaagaactggtcacacaattgatcaacgtcgcggcagatataaaatctttacagatttacatcattgtacatcactgttctacgcacaacaaatgatgtatgcaataaaaagaaatgacacgttgagctggcaagcttcccttcacaacatgcatgcacgcgagaaactatttacagggcttacggagaagggaaggaaagggaaacctacagattccagtcgctgagggcaatgtccttgcacaaaagggccacaaaaagaggcaatgaaatttgcaggctttatttaggtttattgtttattaatttctaagtctttgtcctttggttgtagtaagtaagtttactattagtcgtaaattgta

SEQ ID NO: 65633 - DNA, 480 bp, Setaria italica
  Peptide Sequence Number=SeqID_131607
cctagctgtctgcatgctctgcattgtcctaaaccacaatttgttttccctgcagaaccataactacgcagttgacccagattcacttccagaaggagcgaaagtaactcacatcaatctcaacgataatagctgtgctggccttcagtaccccaagatgaagctgatgtctctccagtaccatcccgagtcgtcaccagggccgcatgactccgacacaggtacatttcttttagtactagcctcttctgtgtacaacatgttgtggagttcactgctatcttagtttgattgagctgactttattatccaccttttgtgctttacagcttttggtgaatttatagagctcatgaagagcaacagattgtgaggagtggagagtacatgagaaggtcaataattatattggtgctcccttgcaccaagctcaaaagaatttgttgtacctgtagtgtccgtctttcagatgttcttgtg

SEQ ID NO: 65634 - DNA, 224 bp, Setaria italica
  Peptide Sequence Number=SeqID_131608
catggtacaaagtgcagagcatcttattctcaagtcctttcgacccccaaaaaatattcaagcacagaaccataactacgcagttgacccagattcacttccagaaggagcgaaagtaactcacatcaatctcaacgataatagctgtgctggccttcagtaccccaagatgaagctgatgtctctccagtaccatcccgagtcgtcaccagggccgcatgact

SEQ ID NO: 65635 - DNA, 248 bp, Setaria italica
  misc_feature (220)..(220): n is a, c, g, or t
  Peptide Sequence Number=SeqID_131609
ttaggttacccttaagttaaagtttaggttaaaattttgtttggtagtttgtatttgattagtggtgtcacatgtgatgctccatatgaatggtcagacaaaacagattcagaatgggagttcaagaaggatcagtcgagtgaaacttttcatgtggttgcttatgattttggaatcaagcataatattatgagacgcttgacatcatatggatgcaagntaactgttgttccagcgaattggcctgc

SEQ ID NO: 65636 - DNA, 269 bp, Setaria italica
  Peptide Sequence Number=SeqID_131610
tccgagtacatttttggtaccagtaacagcaggatctagcatttcccgctctggatcggtcaggttcccggatggaaccggggtcgcgacgtggaaaaccccttggcaccgcgcgatcgcggccgccatggcgccgccgtcgaggagatcggccctgaaaagcctgaggccttggggatcagaggcgcccggcagccgcttcaggtgcgccgtcttctcgtcactgaggtcgcggacggtggcgtgcacggcgtagccgcgggagagga

SEQ ID NO: 65637 - DNA, 254 bp, Setaria italica
  Peptide Sequence Number=SeqID_131611
aaacggtacaagtagagagagaaagagagcagcaccgtgcaccacctcgacccagcccatccaccagagcaagcaaacggctcctcctctcgccgcaagcgcacgcgcaccgtcggcagcgcggcccgcggcactcggcctccccgccggcctccttgttgcgcgcgcctgggggctgctcggccggatcgccctcccctacccggccgctctgattatacagcgagattataaaatgggtgcatcaagaccac

SEQ ID NO: 65638 - DNA, 331 bp, Setaria italica
  Peptide Sequence Number=SeqID_131612
aagcaaagcaatcagtgacccttcaactggacagcatcaggaagctattagaagggtcactgattgcttgctgtacatccgaaagagatttagatcatcagattcttctgactttgcaacatgatctccagtgaacagcacctttagcggtttgtaatacaagcagacagagccttgggtatggcctggtgtatggataagttcgaaatctgttccaatgttccatggtccatttccatcaagtttccactcaacattcgcagtaccctcctctacatctcctgaatgcatgatcctttcactattttagccgttgagcccacttcctaat

SEQ ID NO: 65639 - DNA, 422 bp, Setaria italica
  Peptide Sequence Number=SeqID_131613
ttacacattgaactatatgatgtgctaaatgctttagtttgggctagaaatgtcctagtggtttctaagtgttggcaacttgtgatggtttgagataccaaagatgctttgtttgttctgtttgtgtacattaatttgttatcatatgcaattatccatctgaacaaatcacatttcatcatatttttgtcttacctcctgtagtggtgccttccgaatatattttgattatatgggttgattttgagaaaattctttcacggagttagaatgctggcgccgatgtatgatgccatttcttaaacatctattttgaaggagcattctgcattagcattttattcacttttgttgtttcatctatttacaacttacattcatttgctatcttgtctagtatgttgagtgtgcctgtttgatat

SEQ ID NO: 65640 - DNA, 382 bp, Setaria italica
  Peptide Sequence Number=SeqID_131614
tttactactattttgtaacttattattgtattgttgtcttaaattgtcttttagttttgggtcttagtaaattgttccttagttggtttcttaagttgtttggtcaacttgtgatggtttgagataccaaagatgctttgtttgttctgtttgtgtacattaatttgttatcatatgcaattatccatctgaacaaatcacatttcatcatatttttgtcttacctcctgtagtggtgccttccgaatatattttgattatatggggttgattttgagaaaaattctttcacggagtagaatgctggcgccgatgtatgatgccatttcttaaacatctattttgaaggagcattctgcattagcattttattcactttttg

SEQ ID NO: 65641 - DNA, 196 bp, Setaria italica
  Peptide Sequence Number=SeqID_131615
cagtatgtctgtctttggggcttgcattgtggctccgccaagagacagccttcggtttgcaccacccatggagttcctaggcaccttctttgtactttgaggcttggatggacttggttttgatccgtagagtgcttcctgctcagctttgatttgatcctggattttcttctgatccctttgcctcttcttctct

SEQ ID NO: 65642 - DNA, 357 bp, Setaria italica
  Peptide Sequence Number=SeqID_131616
tagaaactaccgaaggctaggaagtccctttgtcgcatgctcctctaatatcagtgcactctccctcaggaatttcactccacagtggtcaccagatctcctagtggggccgaacaagagatttaattggaacattgcacctccgagcaaattgaactccgtatcggcaattccgatcccagcctgcacaaggtctccaccatgcacataggatcgcagctgcaaatgactatcctccaacaatttatagttataccgtatacatccaaacttctccattggttagatttacctgcaaatccatatttggtctatctgtaagcatgatctgtctacggatctattagtaattgactg

SEQ ID NO: 65643 - DNA, 474 bp, Setaria italica
  Peptide Sequence Number=SeqID_131617
tttgttttagttttcttttagtttatttgttccctattaatgaagtgaaagagcttgacagtcctggctctgagaaagagcctggtgacgataattgtctgaaagagctcaacaatcacatcaatctgaacgatcttgacagctgtagaactgacaaagagcttaagaatcatagttatctgaacgaactagatggacagtacaattggaaagggctcaatgaccataacagtcaaggggagcttgatggtattgcaagtagcaagtttgctgctgaagaaacaagagattccttgaccggaccagtttcaggtgtaacgaccaacgcctctttgccagatattctaaatgttgttgaagtgttcagctagaaaatcacctgaatcttttgggattctattattctccagctcttccaagttgttatgattatcaagcttcaggctattaaaaccatcgagttccatatgacat

SEQ ID NO: 65644 - DNA, 336 bp, Setaria italica
  Peptide Sequence Number=SeqID_131618
atatcttttgctaatcaagtctagtggttaattattttattgtcccatttgctaatcacgcctagcacttttagattaatctttttctcttgcttgcttagtggagtgattagctagtagtgatcttggttaatcgagttttgagcaaacttgttagaatcattttatgtcttgtttccactgtgatttgtgtgtctcttatcgttcctagggtgagctagtcacgagttgacttgcgtcatcttgatgattgaacgccaccgtgtgctttggggttgcgtttgggacataggccttgtttcgttgagaattttataggctcccattcaccccccc

SEQ ID NO: 65645 - DNA, 416 bp, Setaria italica
  misc_feature (1)..(1): n is a, c, g, or t
  Peptide Sequence Number=SeqID_131619
nacttatctgttttattccataatctatatgacgtggtgtcaacaaaattattgagtttaggtacgcaagtgcatgaaaattacaaacatacatgatgcaagacaatctgctgttcgatgcagtcacccgcacaccattcaattcttggaaacaagtattgggaaatcatcttcacttcggtgaactccttgccacgttgatgtaggtcccacagttgtaggattatctgatagtaaagtctgctgctgacactggatgtgaattttgacccccaatgaagtggtgagtcaattgaatcccttccagctgtcgatgaccttgagcttcctccagaaaaagagcagtcattgatgttgctctccggctgttgttgcccccatgtgaaaatgcccctagaatccatgccaagatccca

SEQ ID NO: 65646 - DNA, 416 bp, Setaria italica
  Peptide Sequence Number=SeqID_131620
acttatctgttttattccataatctatatgacgtggtgtcaaacaaaattattgagtttaggtacgcaagtgcatgaaaattacaaacatacatgatgcaagacaatctgctgttcgatgcagtcacccgcacaccattcaattcttggaaacaagtattgggaaatcatcttcacttcggtgaactccttgccacgttgatgtaggtcccacagttgtaggattatctgatagtaaagtctgctgctgacactggatgtgaattttgacccccaatgaagtggtgagtcaattgaatcccttccagctgtcgatgaccttgagcttcctccagaaaaagagcagtcattgatgttgctctccggctgttgttgcccccatgtgaaaatgcccctagaatccatgccaagatccca

SEQ ID NO: 65647 - DNA, 249 bp, Setaria italica
  Peptide Sequence Number=SeqID_131621
acaccctcctcacctccggcccttcctcctcctgttcagcttctcccgatgctagggggcgccgccagccgtgtggccctccgccgtcggtgaggcggtgccaatggcgtgaggaggtgatgacacgaaacgttcacatgaatcaccgacagcttgtgcaagcctgcataggcataaacggatctcaaatgtgtttccagcaagccaggctaaggccttctttttgcactagcggagcctggcttagga

SEQ ID NO: 65648 - DNA, 125 bp, Setaria italica
  Peptide Sequence Number=SeqID_131622
aggcgtcttccaggtggaagagaaatatctccattctcaggattagcagcaggacctgatgtgcaataaacaaatttagttttgaagccacataatgccaaatattttagcctatgtaacaagat

SEQ ID NO: 65649 - DNA, 395 bp, Setaria italica
  Peptide Sequence Number=SeqID_131623
aggacggactaaccggaacaacgtaaacaatacgaaccgacgaccgaccgacgactagacccaagacaaagtgcggcgtctccctgccctacaagatcagcaccagcgtcaactgcaacacgattaactgaggcgtcctgtgcgcgccccgggtgaggaatgcatgccggagaataataaaatgccgctagtgtttaagctagaatggactagatcgagatggtatgcgtctctagtcgttgctggtgtttaggaatcgtctgaagttcctcatggtgtgtcgtggatgtcccggcgagcagagtagtcatggacctatgtgttcttccgtgtattgtggctatgcatttcctcgtgaaagtcctatcattgcagtatcatggcctgtgcttttg

SEQ ID NO: 65650 - DNA, 170 bp, Setaria italica
  Peptide Sequence Number=SeqID_131624
tctactaccacttcaggctttagctcgctgctctccgccatcttgtacgtgtgaccgagggacaaggagagaggctccgaggcacggctgcgggggcatcgcgccgcccatctgcacgaacggcaggcacggcatcagggtgttgtacaccgtggtgcacgacatggccg

SEQ ID NO: 65651 - DNA, 397 bp, Setaria italica
  Peptide Sequence Number=SeqID_131625
cacccgaccgccgcaccatcgtgcggctgcctcaagacgtcgccaacagcgccgccggcggctccggcacgtacatcgaccgcgccgccgcgctgcccagcaagtgcggcgtctccctgccctacaagatcagcaccagcgtcaactgcaacacgtaagcacgcgtccacgctcctcgctcgatctatgtacttctctcgtgctacgttctggtgtaccttgctgcgagatcatcaaatcatgctgtgttccgggtttctgacatgctgtaacaatttcttttccttcttctttgcgcaggattaactgaggcgtcctgtgcgcgccccgggtgaggaatgcatgccggagaataataaaatgccgctagtgtttaagctagaatggaactagaata

SEQ ID NO: 65652 - DNA, 208 bp, Setaria italica
  Peptide Sequence Number=SeqID_131626
ctatgcatttcctcgtgaaagtacctatcattgcagtatcatggccacaatacacggaagaacacataggtccatgactactctagtcgttgctggtgttaggaatcgtctgaagttcctcatggtgtgtcgtggatcggtcccggcgagcagagtagtcatggacctatgtgttcttcatgtattttatagtcacacgatgacaaag

SEQ ID NO: 65653 - DNA, 235 bp, Setaria italica
  Peptide Sequence Number=SeqID_131627
cctcggttgatgattctatcgacatactccttcctagccgggagatggtcatgggggcggattgtatggcgtccaaacaggctctccaacaaagagacgcattgccttgatgtagttgtccgtatccaatgtaaagcggtatgaatgtgcactagcatatcggcatgtttgctatcgagtctgcttgttgtgctacaccttacaagtgttgccgaataagatgtgctaccgcaat

SEQ ID NO: 65654 - DNA, 279 bp, Setaria italica
  Peptide Sequence Number=SeqID_131628
taaaaagtaaaactaaagtaaagtaaccaaaatagtagaaagacggtgataacatccctgcaggaagaacaatcatgcctcctttcttcactgctacgcgaatccacttatcattttcatccctcacatcaaagtatccactcccttcaaggcaatagcgtatctcttcatcagtatgcaggtgctcttcaaagaaattctttatcttagcctcataatttggcagcttctctgggcatacatcacaaatgtccattagtaagtagtacgtccttcgtt

SEQ ID NO: 65655 - DNA, 249 bp, Setaria italica
  Peptide Sequence Number=SeqID_131629
tagctacatgcagaaacatcatgtttaatcaatttagacaacaccagattaagaagacaaaaagccgtagtgggaacagggaaacgaagtcaaagataccttgatgtagttgtccgtatccaatgtaaagcggtgatacattcctgcaggcagaacaatcatgcctcctttcttcactgctatgcggatccactgatcattttggtccctcacgtcaaagtagccgctaccctcaagacaatagcgtat

SEQ ID NO: 65656 - DNA, 140 bp, Setaria italica
  Peptide Sequence Number=SeqID_131630
gttgtacggtgtccaaacaggctcaccaacaaagagccgcattgccttgatgtagttgtctgtgtccaatgtgaagcggtgatacatcccactcccttcaaggcaatagcgtatctcttcatcagtatgcaggtgctctt

SEQ ID NO: 65657 - DNA, 121 bp, Setaria italica
  Peptide Sequence Number=SeqID_131631
gtgccattcagtagtttgagcagattgcggtagcacatcttattcggcaacacttgtaaggtgtagcacaacaagcagattgcggtagcacatcttattcggcaacacttgtaaggtgtag

SEQ ID NO: 65658 - DNA, 220 bp, Setaria italica
  Peptide Sequence Number=SeqID_131632
tgctaccgcaatctgctcataccacaatcatgctcgtgtgccattcagtagtttgcacaaaacctgccgatatgctagtgcacattcaacgagcttcaacagcttggtttccacctcggttgatgattctatcgacatactccttccacgtaagagtaacccctggctaggaaggagtatgtcgatagaatcatcaaccgaggtggaaaccaagctgttg

SEQ ID NO: 65659 - DNA, 236 bp, Setaria italica
  misc_feature (194)..(194): n is a, c, g, or t
  Peptide Sequence Number=SeqID_131633
ttggctttcactgtgtgagggcatgagtccgtgatccagaagtaagcaaactgatcgcctggcccagcagaattagacgtcatgaaacgttcatatgattgcttagggaacacagcatgagtcacataagcgctaacttttgcagcaccatgtgaagccagagctttctgaaaaacatgacataattggggganagaaaaatcagtggcaggtaaaacaagcagaatatgaaattt

SEQ ID NO: 65660 - DNA, 178 bp, Setaria italica
  Peptide Sequence Number=SeqID_131634
cctgatcttgtaaagagcctccgactctgatacgcaatgggctaaaggcttgaatagctttagccaacaaagggttagtcaggtcctgggaaaattcacaaaaagaacaaaattactccattgctgatacaccaaatgccgcattacaaaaaaggcacaatcttggaacttaccaaat

SEQ ID NO: 65661 - DNA, 269 bp, Setaria italica
  Peptide Sequence Number=SeqID_131635
tcctccccccgccggcgctcccaagcagcgggaggagaaggagcagagggggagaaggatccgatgccgttcgtgtatccgaccccgtcgaggtcggcgaggtcacgctcgagcagctcagggcgtacgacggcaaggaccccgccaagcagatcctcatcgccatccggggccaggtctacgacgtctcgcgcgggagggaccatactccttgtttgccgggagggatgcaacccgggccctggcattgatgtcatttgaccctaatg

SEQ ID NO: 65662 - DNA, 250 bp, Setaria italica
  Peptide Sequence Number=SeqID_131636
cccgaaaaaagaatcagaagcatataactgtacctcctttagttggttaagagacctagcagtgtgcattgacaaactatcatgaaaatgtcaccatgagagaacatataccaaataagtggataagattagtatttatgcctacctgcagtgattcttccaaggcagtttctagatccctgtctcctgatatggtttctaagaagttcattatagcaggtgcaatatcctcggctctagactccctcct

SEQ ID NO: 65663 - DNA, 364 bp, Setaria italica
  Peptide Sequence Number=SeqID_131637
acatcgatatagcttcatctggtacttgaagctgcaggtatttagcttgcgcggaagtgagagatccacgcgccttttcagtacgtccgttataatatgctaccactccttccaaaagctccagccttacataactattacacataggagacaaaaatgtatgttaggagtcaactgcaatgattcaaaaggacagttatttgagtaaaatcctgagctgttttttaaatgtaatttctatatcaccctccatatattggtccgttttcccttttagaaaagaagatgatgggaccttccattcatccacagttccacagaaatttttccctaaatgtttcaacaaatttttccgtaaatgttt

SEQ ID NO: 65664 - DNA, 264 bp, Setaria italica
  Peptide Sequence Number=SeqID_131638
tctattttcccttcttggtctaggtttccctattttgtctattctattttcccttcttggttgggtttccatctccagcatgtggaggagcatttccatccacagcatgtggtggagcactagcaaaaagcctgagaattgttgataagagcagtcctggcagcagctgccctcgagcttgacgatcctgcaccaatcccacgagatgcccggctcctctttgcctgaattttcttgcaggatgcagttttgttcaggatttgt

SEQ ID NO: 65665 - DNA, 299 bp, Setaria italica
  Peptide Sequence Number=SeqID_131639
agaagggtacaaacccgaaacaacacgaagcccaactagtaacagacagccctcttcttcgcagacgcccctggagtcctgaacccagaaaggcacgaccaccaccgccggccgggaagcaagctcaaaccctaaccgccggccgggaagcaagctcaaaccctaaccgccggcgacgccagcacgatgtcccgctacgaccgcgcgatcaccgtcttctcccccgacggccacctctttcaggtcgagtacgccctcgaggccgtccgcaagggcaacgccgccgtcggcgtccgcgg

SEQ ID NO: 65666 - DNA, 475 bp, Setaria italica
  Peptide Sequence Number=SeqID_131640
ctctgttggaatgctaagaccaatagaaactaaacttaattttaggactactagttagaatacctagttaatcctcccccaatgctatgtgctgctggttgctttgtctatttaagaacatataaattcttaaatttgccaagtctggttatatctgttttcatgtttaatatttatctccaccacggcagagcctcacacacaagagacttgactacccactatgtttgcaatctttgaacatggaagtttcattacaaaagttggttgttgtgggcagtagccagtaggtgagtaggagcctcactgttgcactgctggagcctaggtactgcataatctgctaggcttgtttgtatttttggttgtatttttcctttgcttgtggtgcgcatattctaaattattcagggtgtggactttgggttgtactccctctgtttttaaatatacgtaggttttagaaatggagtag

SEQ ID NO: 65667 - DNA, 280 bp, Setaria italica
  Peptide Sequence Number=SeqID_131641
gtggatgtctgtgtctactaccattggctctcgaacggaaagtttgcataataactaacatgggtgcagatcaaatgaaaactatcattaaaaaggaagttctaattacagttcagggctcaggacaagctattgtacctcagtcatggatattttgagatttttattaataccttttggttgcttattttgatgcttgcatttttccagacattttactaagtgaataaatttcgggatttgcaacctatgttattttttcttactgtttcctttttta

SEQ ID NO: 65668 - DNA, 328 bp, Setaria italica
  Peptide Sequence Number=SeqID_131642
ggttcgaatcttattaaagctgatcagaactttgacgcagtcagtgttggctagcagcttatggcaatattggcaaagggggttttgtgcttcctttcctttacctttatctgttcagagagttcttccatcagatgcaccattcttacaggctggtgatggttcgatttcagattttcatcggaacagacagctatcaaagtttcgaatgctggatagctggaaggtgggtagagtgcacttgttattctactaatttattactaaaattaaaaactaaaaaactaaaaaaattaaaaaaaacgtaaaaaaaaacggtaaaaaaaaa

SEQ ID NO: 65669 - DNA, 337 bp, Setaria italica
  misc_feature (314)..(314): n is a, c, g, or t
  Peptide Sequence Number=SeqID_131643
ttagtttcgtttctttagtttatttaacttagttaaaccttagttatttcttatttagtagtctgttgaactatgctgcttataagatggctgaagatattagcgagtgtgtaaaaaatggggatccgtcttaccttatgttatcgcaattcctcgctgttaaccacattggctgtctagcagctgttgaaggattcaaatcttctgctgatatgctggtgaagtatatgaaggagtacccaatgtgtcctcagattctccttatctcagcacggctagatagaaagcatggtgcatgccctggtctgaaaggnttgatgaactgatcttgaattgg

SEQ ID NO: 65670 - DNA, 411 bp, Setaria italica
  Peptide Sequence Number=SeqID_131644
gagacccacggcagctgatggcgcaacaaaatgagaaaacttagttatactgttcaaagtagaataagttacaacaacagggtatttcacttcgtctgctgtgatgcttaccgacaattccaaacataacacagtaaatggcagcaaatattgtgaagggaatggaggcaaaaagtgctccaaatttacctgcacacatgatgtgttcagaattctgaaaaactaactaatgcagcctaatgttactggctcgagagaaatgttacctagcatggagaagaagatcatgaaacctgcagaaatttgtatcactcttctgctaccgactcttgttgatccaaggagtccgacattcttctaactagtaaactagttagtaacctagtttcctagttgtcctaattaggtcct

SEQ ID NO: 65671 - DNA, 498 bp, Setaria italica
  Peptide Sequence Number=SeqID_131645
cgcttgcccatcagttgagaccttggctttgcagtatcttgacttcagcgcgcggtttgcctcatgatggggggaagaatctgttgaggttgaaaggcagcgtgtagaactcttcgttcctactgtcgcctcggaacgtcctgaatcgtgcccaccatggcattcctctgtcccttgccgcgtctctgacgtcgagtgtgttgtcaaggagtaccgccacgaagagggctacggttggcggtgatgagaagatggtgttgatgtagtcattgaaccatccagcctttgtgtgcgctgggccctgtcgagaactcgtggaataccgagagaagtactctggtatagataaaccaaggaagagtgaaacaccaatgatgaagaggttgcgcattgagttcatgttggtgaactgcaataaaaggaagaagaccccaacggacaagacgaacaaattaccaaaacaataaacaacaagtaaaataggacaagacaaaatta

SEQ ID NO: 65672 - DNA, 246 bp, Setaria italica
  Peptide Sequence Number=SeqID_131646
ctggtgggggtgtcgcactagccaaccgggcagcagctttgaatgctcctgttgtctgcaaccctcaaatattttccaccaaatcagataaatacagaaataagcctaatattgacagcaccgcaaattactataaggtatgatatagaaaacactttacaaaattgctatgcatggttttagtgtgtcatgataatacctcgattaaagagaccaccacagcagccatcataccgaaagcatggt

SEQ ID NO: 65673 - DNA, 292 bp, Setaria italica
  Peptide Sequence Number=SeqID_131647
ctgtttgccagagatgttgtggaactcaaggaggcaataagaattaaggaggctgaaggagatgcctatatttctgatattgaggttacttatttttcttttcttatcagtactttttttgggatatatgtgaaagcctatgatatttgcatacagactatcggtcaagcatatgaagacatgcaaacacaaaatcaacatcttcttgaacagcttgcagatagagaggactttaacataaagctggtatcggatagtgtgaagatgaaacaagcttgtagttccctttctc

SEQ ID NO: 65674 - DNA, 268 bp, Setaria italica
  Peptide Sequence Number=SeqID_131648
taacaaactcacaactaattgagatcaagtccctcaaagcattggttgaggagttggagaaggaaaagcaggagttgcaatttattgcagatatgtacacaaaagaatgttctgagtcaaggtaaagttggctattatttttaatatcgattttagattttgaaaatatatgctacgtttagaatgatttgcaattgttatggtcagttgtcctcataattgtattccttttttctagttatttgatgggatttccggctattggagt

SEQ ID NO: 65675 - DNA, 170 bp, Setaria italica
  Peptide Sequence Number=SeqID_131649
cggaaatgtcctggctgtggaaccccaaggttcctctggatgcatggtgagcagaataggtgattaccaaatgtttcacctattctgctcaccatgcatccagaggaaccttgagattcgccaccggaaatgtcctggctgtggaacccattttgtccaaatggggttcc

SEQ ID NO: 65676 - DNA, 165 bp, Setaria italica
  misc_feature (161)..(161): n is a, c, g, or t
  Peptide Sequence Number=SeqID_131650
tagaatcgtttcgacagttattaaacaaaccattaccatttatgagacgaaaattgaagaactggaaaatcaaattaagatattcatgtctgaaaagaatgatcttgagaccaaggttgaggaagctttgcaagattcaggcaagaaagacttcaagaatnaggg

SEQ ID NO: 65677 - DNA, 472 bp, Setaria italica
  Peptide Sequence Number=SeqID_131651
tagggcccttgtcttcatccataccctcaacataaagatcatagagatcacatattctatcctccaatgcagaatccattacagacttccctttttattagctcttctttcatcattagcaacctgaaaatcatcagccgaaccatcctgttgttcattgacctttgactttgcagccacacgtgctttgatcatttcattgatctccatttttatacgctgaaaccgatcagccttctccagtttagcagatagacctgattctaccatttctttcatgtttctctgttaaaaatagcattacttagagatggaagcagacatgcacaaggttaaataattggtgtggatatgtagtttgagtgaatggcccagaaactagaaagtgatggtctaattgacaattagatattctgggtagctcacagatttcttttgacaccacatcaggcatcaaaacattgtatcgtct

SEQ ID NO: 65678 - DNA, 515 bp, Setaria italica
  Peptide Sequence Number=SeqID_131652
aaaaaagtaaaaacaaaaagaaaaacgaaaactaaagaacaacaaaggtagtccaactatgcccatgaggcgatccatcaactcatgttcttggatctttccttgatttgccgataaccttgcaaccttggcaagcttttgcttcacttcttgaggcaaccgtcttttaactgctgcatggccatttggatctacctcattaatatcgattgttggtggtctatattcagcaacaatcttctggagatcccgaatagctcgctcaagcctggtgcctttgggtttagtacctgaaccctccctaccaacaattgggttcaccgtttgtgtagaatagacagcagtacccatagccacaacaggatattcacttgttccacatttccctttgcgatagattctatttgatgaatcatgattttccctgcttgcctttctttgttggaaatcaagttgcactgaagtgcctttatccctgtaagctgaaccataatcgtaggtctcgcttggttttg

SEQ ID NO: 65679 - DNA, 127 bp, Setaria italica
  Peptide Sequence Number=SeqID_131653
atctccatttttatacgctgaaaccgatcagccttctccagtttagcagatagacctgattctaccatttctttcatgtttctagatttcttttgacaccacatcaggcatacaaaacattgtatcg

SEQ ID NO: 65680 - DNA, 417 bp, Setaria italica
  Peptide Sequence Number=SeqID_131654
accatggtttctttcaattttcatcaatatgcttccatgggaaagtggtcaggttttatacagtgtcttggttctttcattattgatatgtgctatcacaaatatttttgctgatagttaactgctgtaagattggctaatccccttttggcttactaacatttaaatctcactaccaggatatggaaaatcttcttgtttttttgttggttgcatattctgtgtaccatgtatgtgttaatgatatctaagtgcagactttacctctcttgtagtacttcgcgtttgggatgttatcctttttgaaggaaatcgtacaatgttgttcaggacgactcttgctttgctggatttatatggtataagataaccctcttttggtgttagctctgtttattaacgcctggataatgttaa

SEQ ID NO: 65681 - DNA, 243 bp, Setaria italica
  Peptide Sequence Number=SeqID_131655
agagaaatcaagtgtatagaaacactagacttctcttttcattacaggatttgccacgaacatttccaggacaccctgcattagatgaggatgggaggaatgctttgaggcggttattaaccgcatatgccaggcataatccatcagttgggtactgtcagggctctagtaggggttattgatgattactttgatggttactacactgaagaaatgattgaatctcaggttgaccagctcgtt

SEQ ID NO: 65682 - DNA, 230 bp, Setaria italica
  Peptide Sequence Number=SeqID_131656
caggggtgaggagttggaaactgctttaatggagatggttgagcatgacaacagacgaatgttgagtgctaaggttgagaaattggaggcagaggtatctgaactgcgaaaagcctttgcaggcaagcaagagcaagagcaagcaatgcttcaggtgttgtcttactgcatacattctgtgtccataatctatgtgttctttagcatgatattacatggccctccgactt

SEQ ID NO: 65683 - DNA, 429 bp, Setaria italica
  misc_feature (52)..(52): n is a, c, g, or t
  Peptide Sequence Number=SeqID_131657
acctaattgctctagaaagattgtacggagttaagttgcattgattcactanatttgaattgcttttagcaggcaaggcagaattccactgaaacaactggaagctaaactcgtagaatattggaggaagtcgtagctcccaacaagatctggagtgttcattaatggttggattgcctgattgctataacaatgtgttgaaaagagcagtgatgttttctccatgggaaaatccagctggtattttccaagttttgcaggaagtgtaccttgtatcatattgagctcagttgtcagataaagtttttttggtaggtctggaaaactgttgtaagtcatcggtgtaaattttcttctattagtttcattaagattgtcaatagttagtgttccaagtaggagaaagaaaaggtattgtctaactttcct

SEQ ID NO: 65684 - DNA, 504 bp, Setaria italica
  Peptide Sequence Number=SeqID_131658
gaggagttggaaactgctttaatggagatggttgagcatgacaacagacgaatgttgagtgctaaggttgagaaattggaggcagaggtatctgaactgcgaaaagcctttgcaggcaagcaagagcaagagcaagcaatgcttcagatcttattaagaatggagcaagaacagaaagtgacagaagatgcccgcatagctgctgaacgagatgctgctgaaaaaaaacacgcagctcacttgctccaggagaagtatgaagaagcaatggcagcactttcacaaatggagaagagagctgtaatggcagaaacaatgctggaggctacaaagcagtatcaggctgggcagtttaaagccaatcaatctttcacttcaagttcaccacgtgcagaccatgttcctggcaagaacgaaataacaaaagaaaagaaaaccaaaaaataaaacaaaaataaaaagaaaaataaaaagaaaaacaaaaacctaaaaaacaaaaggaaa

SEQ ID NO: 65685 - DNA, 226 bp, Setaria italica
  Peptide Sequence Number=SeqID_131659
tcctggaaatgttcgtggcaaatccttctctatctgtcctttccacttctcaggttgtgcaacttttcttggtgcacttatctgttcattgagcactggatccacaaatcttgagacctaccttagtactagttctatgctagagaatgatttggatcagggtgttgatcttcaagatcaggtgtcatggttaaaggttgaactatgcaagctgcttgaggagaaa

SEQ ID NO: 65686 - DNA, 391 bp, Setaria italica
  misc_feature (60)..(60): n is a, c, g, or t
  Peptide Sequence Number=SeqID_131660
ctaccaccaagccatggacctgctcccttatctttctatcaggaacattgtgttggtccncaaaaacatgtgtggatttcagctattctcagacacatcaatcaacgcaccattgtcgattgtacatcagaaatcatgataaatcattttgaacccttgcagcctacaatcacaggagagattgaaacacctgtagctgtagctagtgttgaatttattgatccaagagagcctgttctggtaagtctgtttcataacactggatattgtacatgacatctgtagtgtctgcgattatatttagtctttctattagcatgtctaacaggttattccaatactgagagctggtcttgcactagctgaacaagcttcatcagttctgccagcc

SEQ ID NO: 65687 - DNA, 342 bp, Setaria italica
  Peptide Sequence Number=SeqID_131661
ttaaagtaaggttaacaaactaactaaggaacaaaaaacaagaataatacttagttacttaaaatttctcctcagacctgtctgaccaatccttggcagagtcagctgaagtggagactactgctatttcaactccacttgacagagttcccttatacagtgtgcattcagacgaagagccaatcacattgatgaagtcctcacaagctgtctgaagctctgcccttccaagagaagggacacctgccacgaaggctttccggagtggtccactgagtccagtagaccatggcatgacagtggtatccttcttccgacgatagagagcagatacgtagtggc

SEQ ID NO: 65688 - DNA, 260 bp, Setaria italica
  Peptide Sequence Number=SeqID_131662
tcttctacaggctgttcagatgcacaatactttgaggaactgtatcaatactttatgacagaaaaggttacattaactatgtactccctccgtcccaaaaaacaagtcattctagagttatcttaagtcaaactttcttaactttgaccaaatttatagagaagaatatcaatgtttatggcatcaaataggtatattataaaaatatatcttatgataaatctaatgtcacttatttcatactccttctgtcccagaat

SEQ ID NO: 65689 - DNA, 236 bp, Setaria italica
  Peptide Sequence Number=SeqID_131663
atatgagcaaccatggggcggatctcgtctcaggtatgtggatgatgggagacctttttggcagcacatagtaacttcttctacaggctgttcagatgcacaatactttgaggaactgtatcaatactttatgacagaaaggcttggaagctttgtgatcctgatgctgaaaatgtatttaaagctttaaggaaagctggtgttaaactgccgtagtctccaattttgatacccgc

SEQ ID NO: 65690 - DNA, 410 bp, Setaria italica
  misc_feature (339)..(339): n is a, c, g, or t
  Peptide Sequence Number=SeqID_131664
cctgttttcaacttgttccacaacaattttgtcaatctgttttcccttttatattgcagaccgacgaagcatgtaatgtgtttgagcatatatcaactcttggtgttaagccaaatgcaacaacgtactccctacttgtcgacgcccatcttgcaaataaagatccaaaagctgctcttgccataattgataagatggttgatgctggattcacaccttcaaaggataccctcaagaaggttcgaaggcgctgctctcgtgaatcagactttgacagtgacgagaaggtgcaatccctggctaagcagttcaactaccgaatgggtggtgaaaaccggngagagatgctttataacatagaatacaatcctgtgtactgaagcagcagctcgtgctcagtttgctggcag

SEQ ID NO: 65691 - DNA, 321 bp, Setaria italica
  Peptide Sequence Number=SeqID_131665
tcggtcttggggttaggtattcttactagtttctaaaattacttctattgtagtcctactaactaggttggttccctaattgtgcaacaatggggttgggtcttcagttcaaaatactcaggaggcatcttttatggaggttgatgtggcttcttccaccaatggtgaggtgaagatgtctctgaaatgcaacttggatccttcaaaaattcagcattagtatggaggaggttttcaaaatggtggaggagaagtgccttcactcatacaaggtgctacctccagatttttctattggcaagctgatgagtgaggtatgcc

SEQ ID NO: 65692 - DNA, 263 bp, Setaria italica
  Peptide Sequence Number=SeqID_131666
atgttacttgaacaacattgttgctactgtcacaaatcacagaattccatgtgcaagggttaactggtgtattgtcaccaagaattggagaactccaatatttgagtgtcctgtcactagctggtaacaggattaccggtagcatacctgaggagtttggtaacctttctagtttgacaagcttagatttagaagacaaccttttagctggagaaataccagcttctcttggcaacctttctaagctacagctgttgatattg

SEQ ID NO: 65693 - DNA, 275 bp, Setaria italica
  Peptide Sequence Number=SeqID_131667
tagctcaaaagttggcttgatacttggaacagttggtggagtaataggccttcttattgtgggagttctgtttctaatctgtaatgcaaggaggagaagccatctgcgggaagtttttgtggatgtagcaggttccatgcccttgtagttgatgttttttttgtcttctacagtagtcagtagtcttactaatgtcttggactcttggtgcaagcgttatctcttcaaaattataaattttattgccaccagaaactagcaagtaaacgtacccc

SEQ ID NO: 65694 - DNA, 252 bp, Setaria italica
  Peptide Sequence Number=SeqID_131668
agttgtgactattacctgtagatgtgtgtcctacatgttcaagcttggtgcaatttatttcctaatccttctctcagactactatgaaactatgtagcatatgatcttgcaggtcactagctggtaacaggattaccggtagcatacctgaggagtttggtaacctttctagtttgacaagcttagatttagaagacaaccttttagctggagaaataccagcttctcttggcaacctttctaaagctacag

SEQ ID NO: 65695 - DNA, 230 bp, Setaria italica
  Peptide Sequence Number=SeqID_131669
ttcaagtttgcattggaactttatgaattgacctaagctatataacaattcatgatctgcaggcgaggatgatcgacgaattgcgtttggccagctgaaaagatttgcatggagagaactgcagattgcaactgataatttcaatgaaagaaatgttcttggacagggaggtttcgggtaaaagtctacaagggtgttcttccagacgccacaaagattgctgtaaaacg

SEQ ID NO: 65696 - DNA, 427 bp, Setaria italica
  Peptide Sequence Number=SeqID_131670
gaaactttagtataccgtataaagttaatggaaaggaaccgaagagatattggaactatcgttcagcagctgaagtatcttggatgtctgttggaaaggatcaacttgaatatgcatctgaagctctgaagatgttcagatttcttgtagaacagttgtcaaaggttaaccctagctccatgaatcgtgatcagcggctagccttttggattaacttatacaatgctttgataatgcatgtaagtatgacttgttaattaagatgctggttttgcagacaaggattatatttctgttttataatttgaactcgtttcaattcattgcatctgttcctcattttctttcattagtatcatgttctcactcaattgcttactctgacatttctttattggaatccatcaggcgtatttagcatatggag

SEQ ID NO: 65697 - DNA, 253 bp, Setaria italica
  Peptide Sequence Number=SeqID_131671
ggtaagtttcttggtctacttgtcgtagtaagtccgtattggttgttgtcgtcgtccggagtagtcgccgtcatatcgcgtgcgctcaggcccttgttgccgaacgccgtgatgagggtggcgaggtcggaggccggcgacgggaggtcgctgttcgccaggctctggctcgccgtcgtcgagtcgcgccggccgagcggcaccgcccaggttggccctcgagcaggaaggtgctgtctcgggcggcgagggc

SEQ ID NO: 65698 - DNA, 306 bp, Setaria italica
  Peptide Sequence Number=SeqID_131672
taggttcgagtcaaatagcaatgattcgaagcactcttttttccatttaccaaggtcaaccccccatcacgacactgcaagcaactcggtcatcggtgggttataggtcctttcccctgccctcatcccacgccaagaggagctcgcatagttcaaattctggagtgacacaagctacatcagtttactagtttcgactacctcctactcccagcatgtgattagtattgttcaaacttgatcaactgtgccacaacgaacgagccttaattgacacaggcggagctactctttcaatccatgtca

SEQ ID NO: 65699 - DNA, 150 bp, Setaria italica
  Peptide Sequence Number=SeqID_131673
gcatttcagattcggcaaataaaagcactgtacctgtatcatgcatgccctacatggtaccaattcgtgacatcaacattttgccatgccaactggttagtttgacttgatatttcagattcatttattttccctttcacagcttggtag

SEQ ID NO: 65700 - DNA, 293 bp, Setaria italica
  Peptide Sequence Number=SeqID_131674
cttactaatgtgtgttggtcattttagcaaatatttatcgatatactatattagatcttctctgtagatcaattatctgaaaacttggtttagcttaacattattattacacttgtgatgtagacaatctttgacaatattctgaatcgcaaaataccttggccacatgtcccagaagagatgagtgtggaggcacgagatttaattgccaagtaagaaatatgtgaaacttttttagcactcaattgcttgtggtataggatttcatgttatagctcgtgttcaaatgtctg

SEQ ID NO: 65701 - DNA, 390 bp, Setaria italica
  Peptide Sequence Number=SeqID_131675
acctctttgctataaaggttcttaggaaggcagatatgattcgtaaaaatgctgtcgagagtatattggctgaacgtgatatcttgattacagtcagaaatccttttgtggtacgctttttctattcatttacctcgagagagaatttgtatctggtcatggagtacctaaatggaggagacctttactcattactgaggaatttaggatgcctggatgaagatgttgctcgcgtatatcttgcagaagttgttctagctttggaatatttgcactccatgcagatagttcatagggatctaaaacctgacaattttgtttgtattagtcgtctattgtatggacatattaagttgactagtatttttgggtttgttcctaaggtttggt

SEQ ID NO: 65702 - DNA, 150 bp, Setaria italica
  Peptide Sequence Number=SeqID_131676
cctacctctcgcggagctgaagtaacagttttgtctgttaccttgttttcatgacaattgccatgccatcgtcaagtagaaatactaataccttagaaccaaaaatttaaggaacaaattaagaaagaaaactaaaaggaaagaaacaaa

SEQ ID NO: 65703 - DNA, 389 bp, Setaria italica
  Peptide Sequence Number=SeqID_131677
atagtttcccaccttccttatctgttccaaaatactgtactatattttcatgctccaaacgactcaagagagttatctcctatctacattgagtcgaagtttgttacccatctatatcatctgcgataccatttcgatttcagtgacaaaaagacagttggaacatttaacagcaggagccccaaaaggatacatcaacaatgtatcgcactgtccacaatacaccttaccaacttgatgttcttccaatacaaggtttattgtccaacaaccaaaacactgaacatgaacaacacccctgggatatgcaagaagctgacgacaacgtccacataccatttgacccatttcatataaacatacggatccaaaaggccgccggtgcctgc

SEQ ID NO: 65704 - DNA, 440 bp, Setaria italica
  Peptide Sequence Number=SeqID_131678
acgcaagaatacttgtttgaatcatgaaggcaaaacaaaggaacaacagatgaatgcaaatcgggagagagaaagaaagatgaaattaagaaaattaagaaatactaaaggtagacaaaataattaccataaaaggtagataaataagttgagcgagacctcaaaaacttaagcaagcatataagtagtgatctcaccattacagtggcatgcaccttattttttcatcaaaatatattaggacaaaaagcacatgtagcaggcaaactatgtgacaagtggtagttcacttgctccgatttcagtgacaaaagacatttggaacatttaacagcaggagccccaaaggatacatcaacaatgtatcacacggtccacaatacaacttaccaacttgatgtgctggcaaggaagggaaaaaaaggtacaacaatatttag

SEQ ID NO: 65705 - DNA, 397 bp, Setaria italica
  Peptide Sequence Number=SeqID_131679
tatccacagtgccatttgtggttacactgccaaagacttgcaagttcccatgggccatggcggcatctgaagcttctggcattacagggagcatccaggctacatgactgaacatggttaagcctgactagctctggtgagctacttcttgtgggtgaggtgacacactctgttccgttgatatccgaggacgaacattgcgctctccgatttcagtgacaaaaagacagttggaacatttaacagcaggagccccaaaaggatacatcaacaatgtatcacactccccacaatacaccttaccaacttgatgttcttccaattacaaggttttatttgttcctaactaacctaaaactacttgtaactattgttaacttagtcttacccttttgtt

SEQ ID NO: 65706 - DNA, 387 bp, Setaria italica
  Peptide Sequence Number=SeqID_131680
catttcgcttgtatgtatatagagcaaaccatttcaaaatctgccttgtgtatgctgagttttgtgaatcttgtagatggtatttttgatataaagctgccaacgatccttgagtaacaagttcaagaaaaatatatagtttcccaccttccttatctgttccaaaatactgtactatattttcatgctccaaacgactcaagagagttatctcctatctacattgagtcgaagtttgttacccatctatatcatctgcgataccatctgcatgtaaaattaaaatcgcttaagtacattcattgcggtcatcttctttccagtaccctgccaaaaaaatctggatctagcagtatccatttgttgataacccccttcataaaagct

SEQ ID NO: 65707 - DNA, 226 bp, Setaria italica
  Peptide Sequence Number=SeqID_131681
tctcctcccttcctctcgcgaaatccgcacctcccagccgccgcctcccatccaccgctgccgcccctgtggtccgtgccgacgttgcctcgcgaatcccaagccgcctcttctcgccctgcgcgccgacgccatcacacccttcgtctggcacgcgaccccgcctactgcgcgccgcccgcgccgtctccttcacgcagcaggtcgcgccgcccctgcctggccc

SEQ ID NO: 65708 - DNA, 303 bp, Setaria italica
  Peptide Sequence Number=SeqID_131682
aaatactgtatgtatgttcctttcatgttgtttttgcaccatgtttctgatagatatgtatgctactgcatcgtaaatttcttacccatgtcaacactaatttgcttcagtttttttctctggctatattgcttcatggtttcatgacaaagctatttttttttaccatttccaggtgccagtgtatttgcaaacagtgaccaaaaagttgtgctttgctctgccgtggagtcatggcagcaaagatacgtgtcgtgatgaagtcttttacgagccaaagcaacaaagtctcagggtcttttt

SEQ ID NO: 65709 - DNA, 465 bp, Setaria italica
  Peptide Sequence Number=SeqID_131683
agtcgttccagtcgaagaagacgcgcacggacttggccgtcttgctcgcctccagcgccttggggctggcgcacacgatgccccagccccgtcggcatcgacagcgccttctgcgaccccgtcagcgccacgtccacgccccactcgtccatgcggaagtccagcgcgcagatggacgacacgccgtccaccagaatcagcgccgggtgccggtacgtgtcgaggagcttgcggacggtggcgaggtcgttggtgacgccggtggcggtctcgttgtggacgatggcgatggccttgatggtgtgggccgtgtcctggcggagcttggcctcgaggacgtcgaggtcggcgccccggccccaagtcgctctaccaaccaacgtaccaacgttagaaagacccaaggacgactagactagactaggtacgaataccaataagacaaggactagaaactaggaccga

SEQ ID NO: 65710 - DNA, 365 bp, Setaria italica
  Peptide Sequence Number=SeqID_131684
gggagcttgcggacggtggcgaggtcgttggtgacgccggtggcggtctcgttgtggacgatggcgatggccttgatggtgtggggccgtgtcctggcggagcttggcctcgaggacgtcgaggtcggcgcccggccccagtcgctctccaccacgtccacgttgaagcccaggcgctgctgctggtcgatccatagcaggctgaactggccgatcaggaacgacacgatgcggtcacccggtgacagcgtgttcgtcagcgcactctcccacgcgcccgtcccggtggtcgggatgatgaagggggtgccggtggtggtcttgaagatcttttttacgtcctcgaggaggatcttggtgaggac

SEQ ID NO: 65711 - DNA, 271 bp, Setaria italica
  Peptide Sequence Number=SeqID_131685
ggcgggttcatggcgcggatgacggggtccggggatgttcaccgggcccgggacgaacaggtgggtccgcccagggccgtacacgtagtccgccatctttgtttgctgcagtggtgtgactgtgtgagtaggcaagagaccagtcaaacacacagcagtcgaggtcggcccagccccgtcggcatatacctgccagggcatctagcgtgagctttctaatgggcctaggtagagccccacagcgttttttttccacgaataggcccattag

SEQ ID NO: 65712 - DNA, 393 bp, Setaria italica
  Peptide Sequence Number=SeqID_131686
gtgtcaaagtatatgcatgtagtggtactctcattgtattattttcatgtttctatttaccaatatttgtttctgaatgttaggcgtctgatattggtgatgcggtagaaacagaaacaattttgattaagcagaaaggatgcagcactacaacaaagaaagattgctatgagaattgcttcacgaaggtctagtagtgcgagctgtgatgagattgcaacccttagctgaagcaaaggctgctaataatgccattacatctgtatctcgaagagtaaaaagtgctaaatcagaactgagatctcttcaagcaacagccaacagaatgatcttgtcacaggaagagatggaggaggtggtgctaaagagatgttggctgggcccactactgga

SEQ ID NO: 65713 - DNA, 450 bp, Setaria italica
  misc_feature (444)..(444): n is a, c, g, or t
  Peptide Sequence Number=SeqID_131687
attagcaggtttgttatttactaaaatatactatttattatcaatgcctgtctcatattttaaaacatattttcaacttggctcacagaaaggatgcagcactacaacaaagaaaggtatgtttccatagaaagcttctcctgctcaaagttttgaggaacactagagagacatgtttgcttttgttctaattaccttttgattattaccgcgtgcactctcaagctctttgtgatcaatttttgcttactagtctgtttgagcttgatgcctttttcgctcttagattgctatgagaattgcttcacgaaggtctagtagtgcgagctgtgatgagattgcaacccttagtctgaagcaaaggtggattggatctttccttgaatctggttatctgttgctgaatgaattttccggatcatgttttgcaatcataaacttttnttacgc

SEQ ID NO: 65714 - DNA, 375 bp, Setaria italica
  Peptide Sequence Number=SeqID_131688
tttgtagtctattctttcccttacgtagtttcgtcgtctaggtaggttggtacgtctacttcattgaacctgaaactcgagggatcggttggctaatttgtcggctcagcgtgactctgtgtgtaataccgcatcataaccaagttacctagaaaaatccgtgtgtacagcagtacgagaagaataaattgcatgataaaccgacatctcctagcttgttgtaatactgaatcagaatgttggcggtgcccacggcagcgaagatagcagttatgcctgcttctcttctgtctgcccatttttgctgctgtaaacgagctcttgttggctggcctatacaagaaatggaaatttttcgtgttcgcgtaatgaaac

SEQ ID NO: 65715 - DNA, 268 bp, Setaria italica
  Peptide Sequence Number=SeqID_131689
cagggaaatcaagaaattgctaccgtgcagagatgcccttggatactaatccggctgcgtgaattcttacccttatggattatatccaagggcatctctgcagggaaatcaagaaattgctaccgtggcctggtccagatgaacgctggtgcagagaatgcttataattcttcacagtgtgattcattgctgattggtgataatgctgctgcaaatacctatcccaccattcaggttggttgcactagtggaagtgcttgcctcatgc

SEQ ID NO: 65716 - DNA, 233 bp, Setaria italica
  Peptide Sequence Number=SeqID_131690
gatccccaagctgtgatgggcagcccaacagttccatatggagcggaataagaaacacttccagagctgaaagctccatgacacgctgcactaatagggtgatatgccccattggtaggactttgtaaaggcataacaacataagatgcagtattactaaaagatgggatattggtttgtgacaaaactataccaaattgtcacaggtagattcattttggattatctttcat

SEQ ID NO: 65717 - DNA, 381 bp, Setaria italica
  Peptide Sequence Number=SeqID_131691
tgttgtagtaagttcttaagggttctttcttacggttaggttaggttaagttttgtctagtagtactattacttttaattctagtcttctattgtagtaaggtaagtttaattacgttccttgtggagcacaacagcaatggaaaagtaaaaacatttctagttcatgacatggttcttgaatacatcgtttccaagtcaagtgaagagaactttattactgtggttggcggccattggatgatgccaccacccagcaacaaagtacgtcgactctctatgcaaagcagtggttccaagcatgaaaatatgacaaaaaacataaacttgtctcaagtgcggtcagtgacttggtttttggaagcctgaagcaattgccttt

SEQ ID NO: 65718 - DNA, 407 bp, Setaria italica
  Peptide Sequence Number=SeqID_131692
ttaaaggtaaactaaaattaacgtaaactaaacaaattaagaaaaacctaccgggaaggtagacaacctacaagaagttaaatggcgtagcagcagaaataaaattattaggaaggtatgaaggaacacaagagacagaagccgctgaaatcaccaacttcttggtcgaaaatttgaagaactacactactgataagctgaaggtaatcgtggactataccatcaatgcttgaaattgcaaaataatttggttgttgtttgctaaataaatagggacggcaggtatatccatcccatggcactgtgtatttttatttcattgtcaatttattagtgtttcgttctgtcatgtatggctggagctgctacagcaggtacaccgttccagtgtttgttggggttgtaat

SEQ ID NO: 65719 - DNA, 206 bp, Setaria italica
  Peptide Sequence Number=SeqID_131693
acggcaccgacatcggacccagcaagtacgaccccaacaccaccgtcgccgcgctcaaggagttcgtcctcgcccggtggccgcagggtgaggagaccctctctctttctctcttctccctctctgcgcggcgtgcgcgcttgcgtcgcgtatatatacagctctgctctgctttcgtttgtaattgtccttccttgttttcgggt

SEQ ID NO: 65720 - DNA, 323 bp, Setaria italica
  Peptide Sequence Number=SeqID_131694
ttagccgcttgtgagacacctctcaacttgcacacacggacacgggcgcagcaattttatttgagcgtgctcgacatgtttccacgcgctgacgattgctttcctttcccttttcctccgtggatgcagagtgatgtccagtagtgcgccaccgttcaccagatgaaggtgaagaccgccgcaagggcaaagaagaagaagaagaagaataaaagatcgtctctgatggatggtcatctagagattctagattgagctgctgctatcgggcgcagggctcttgttgacatcaaccgttttccttctcctctttttttttattc

SEQ ID NO: 65721 - DNA, 440 bp, Setaria italica
  Peptide Sequence Number=SeqID_131695
ttttggttttcttttatttttagtttttctttactttagttatttgttattggtctacaggtgttgatgtagtggtaaatctatctatgcagaaatagtaaatcttttgaaatttgttgggcacttgaactatttagttgttctgtagatcaacgaactgtagacaataaactgaatttcagtccttatatgttggaaaaaagtagctcataactgttttctgatttctgaacacacaggcttataattgttttgcgtaacttaacatcctatattatcactgcaacaatgaaaggagcatagttctggagtgccacttgatttataaactggtacctgcagaagtgcagatccctgggaagtttccggggattttttggtcccttgaacactatttagtttagccactatcaaacacagttcctaattgttgaatagtc

SEQ ID NO: 65722 - DNA, 375 bp, Setaria italica
  Peptide Sequence Number=SeqID_131696
agacaaatttaaccaatagtctgcttgaagttactatgtctacctgtccttcacgtctctgatgccactcccactctacatgataaatggttcgcatcagtttattgtctttcaggtcgacaggggaatcaactgggaagaaaaactgcctggtgcatctgaagagtcttctcaaggttccgactccattctgctctgctctttctggcatagtcacagatgtatggcacaggtgttgatgtagtggtaaatctatctatgcagaaatagtaaatcttttgaaatttgttgggcacttgaactatttagttgttctgtagatcaacgaactgtgcataactgaatttcagtccttatatgttggaaaaagtagct

SEQ ID NO: 65723 - DNA, 275 bp, Setaria italica
  Peptide Sequence Number=SeqID_131697
cgacatggaattcttcctggtaaagggaaaagaaagggcacatgctaattagtttatcgcaagatagttacccaatcaaaactatgcattgaggactaccttgtgaattagattatctttgacaactgtattacttattttcctgaagaggtcatgtagtgcctcaacttcacttactgtaactgcaacaataggtgaagcttaataaacttgttcaaaaaacaacaaatacatgaataccagagttagttaatgttacagtgttttttctagtt

SEQ ID NO: 65724 - DNA, 362 bp, Setaria italica
  Peptide Sequence Number=SeqID_131698
taatatccaattctgattcgtccagcagagcacacaccatctcctttaactcattccgttcataaagcctgtctgccttaagtcatacaacttaaatgcaacctatcaacaaaaagattttgcttcttcttgttcctaaagagagcgacatggaattcttccttgtgaattagattatctttgacaactgtattacttattttcctgaagaggtcatgtagtgcctcaacttcacttactgtaactgcaacaataggtgaagcttaataaacttgttcaaaaaacaacaaatacatgaataccagagttagttaatgttacagtgtttttcttagtcttgtttgacccaaaaacttattggt

SEQ ID NO: 65725 - DNA, 355 bp, Setaria italica
  Peptide Sequence Number=SeqID_131699
tctcgaccagcatcacttgtaatatccaattctgattgtccagcagagcacacaccatctcctttaactcatcgttcataaagcctgtctgccttaagtcatacacttaaatgcaacctatcaacaaaaagaattttgcttcttcttgttcctaaagagagcgacatggaattcttccttgtgaattagattatctttgacaactgtattacttattttcctgaagaggtcatgtagtgcctcaacttcacttactgtaaaagatgtttcagcagcaagggctacagcttcccgtctatccagtgaatccggcgactgaccagcatgcttttgtttggttattgtctaaccccta

SEQ ID NO: 65726 - DNA, 257 bp, Setaria italica
  Peptide Sequence Number=SeqID_131700
tgaagtacaggagggaggcccgggagagagagaaacagaggagggtatgtgtagtggaaggtggtgcaggaatggcgggagcaagggggccgtgccgctgggctcgtggtggctgcacctgctggtgctcttcgccgtgcgtgggctcatctaccagttctggttcacctacggcaacatgctcttcttcacccgccgccgccgcgtcgtcgccgatggcgtcgacttccgccagatcgacgccgagtgggactggg

SEQ ID NO: 65727 - DNA, 267 bp, Setaria italica
  Peptide Sequence Number=SeqID_131701
cccttatgactggtaaaagcaaaatctcatattcatttcttttccattttttaagaaaaatccttcatctcaataatctgcctttgaacaccttccttcactggttcatcctcagtttcaatattcttttcagtacggtgaagaaattcggatacctccacatgcaaggattccattttgccaaatatctcaattgccaggacagagctagagtcttttgtagaattcgctcctcagtacttcaagtatttgttgggctaccagaag

SEQ ID NO: 65728 - DNA, 262 bp, Setaria italica
  Peptide Sequence Number=SeqID_131702
ccgacgaaaagcttgctcttcttggtgctctcctctgtcattgtctcatagctcctgcctcccaagttgactggatcgcaaacgctaaacctgcgatccagtcttggctgtgggaacatgtagtccccatccattcttaaactacggctgaggttgtggaacgaccgccggtggaagaaaggaaaattctcctgccttctcgcagacccctcaaaatcagcatctaattctacaactggatccaggaccggtgaaggggtat

SEQ ID NO: 65729 - DNA, 394 bp, Setaria italica
  Peptide Sequence Number=SeqID_131703
gctaataagtcaactcagtaaaactttatttctctgtagctctgagaatgcggcaagagctcttccacctcaattctagaactgaaatagcccatgtttctcctcctctggtgtacaatgtcaacctctgccaagaaaatactgtacaccggcctatggtcggagaaacgagattctccacgaacataagacagctgattgaggccgttaccataccagagaatccgatcacacctgttcattcattagcaagttataaaaagaataagaccttcagaaaaaaaaacgcagcaaaacatttaagtgttgtctacgtaatattagctaaagaaactaccatgctggtgttctcctcttttcttggggtgcatgccctctccagcataccgatctg

SEQ ID NO: 65730 - DNA, 266 bp, Setaria italica
  Peptide Sequence Number=SeqID_131704
aaagcaacaattgcagcaagattcagatcatacagccccaaagcagcaccaaaaacagcttcagtgtccgttaaccaaagcaagtgcttcagagactcttcagcagaagggtaaagctttctcttggcatcatcaaggccacgaagttccagttctcgaattacttttattctgttcagtgcttcctccaataatggaaggttcaactaacgggactaaaagtaggtacaaataacaacaaaagttactacttagaatagaagaca

SEQ ID NO: 65731 - DNA, 400 bp, Setaria italica
  misc_feature (366)..(366): n is a, c, g, or t
  Peptide Sequence Number=SeqID_131705
cttatggtgtcatcaacaagaataacaaggtctcttgttgatgacaccataagtgaccaccaccgcaaggggctggaatctgcggggtggaaggtcagaataatacagaggatccggaatcctaaggctgaacgtgatgcctacaatgaatggaactacagcaaattccggctttggcagcttacagattatgacaaggttatattcattgatgccgatctcctcatcctgaggaatattgatttcctgtttgccatgccagaaatcactgcaacaggcaacaatgcaacactcttcaactctggagtgatggtcattgagccctgaactgcacgttctctttgctgatggagcacatcaatgagntaacatcatacaatggtggtgaccaggggtacct

SEQ ID NO: 65732 - DNA, 283 bp, Setaria italica
  misc_feature (275)..(275): n is a, c, g, or t
  Peptide Sequence Number=SeqID_131706
tttggcgctaacccgccaatcctctatgtccttcactactttggggcggaagccatggttgtgcttccgggactacgactgcaactggaatgttgaaattctgcgggagtttgcgagtgatgttgcgcatgctcgctggtggaaggtgcacaacaagatgccgaagaagcttcagagctattgccttctgaggtcaaggctgaaggaccggaattaggaagtagggaagacggacggacaaggactagaagaaaaagaacaaaacttacaactanaattagga

SEQ ID NO: 65733 - DNA, 398 bp, Setaria italica
  Peptide Sequence Number=SeqID_131707
agacaattgaaggaggtggtgttggtttagtggagaggatgaaggctccacaggagtttgctgagaggactactccaaatgggagatgcactgtgcgagttcaggtcttgaggcttcccaatgctctaactaaggtccttgaggaaagtgaacaattgcttggtcaaataattgaggggagaactccataagttgaacctgattgatcatatggcgcggtcaactcacagaagtacattgcctcaacaatccttggtttgttttgaagaacagctgctcggcatgcttctttaaccgcagtgattacttgaccactggaaatgttgtattgatcaaagtgattagcagcatcagagccgtctgcaaataggtaaggctcaacaataaacgccagaccc

SEQ ID NO: 65734 - DNA, 256 bp, Setaria italica
  Peptide Sequence Number=SeqID_131708
atattaggcagtactcagaaagtgtttcggtattttaaaccagtttcattatctttctaaaatcatgcctaactcgatagaataggttttgatgctatttggatcttatttgaatctcctttgcagtttatttgcaaatagatcctcagtatttattttaattacgtatctaggactcggaagatcccgaagacccaagctacatcaagaggaggaggttcagtgaaggacactctaggtcgcttcagcatgctct

SEQ ID NO: 65735 - DNA, 234 bp, Setaria italica
  Peptide Sequence Number=SeqID_131709
cccaatggtgtagctcgtattctgtcatatcgtttttttgtcaatcgccagcggaaggattgcgatagcccatggcagcaaggggagacccgtacatgagcacattgaggcaggcgcatatcattccaatcaccatggttctcaagtctaattcactgatggcgaatgtggtggccgcgaacacgactccaaatccaccaatgtccaacgctgctgccagctttgcggccttaa

SEQ ID NO: 65736 - DNA, 265 bp, Setaria italica
  Peptide Sequence Number=SeqID_131710
cgggactttggggctcctgtctggagggtgtcctggtccttgactgggaacatactgtccatagctgctggcgagaacaacattaccctctggaaggaagggtcagacgggcaatgggaggaggtgatgaaggttgaaccctaggcagcgtgacactttcaactctattgcagatccatgtttcgacagagacgtagtttgtccttttgttgtttttacttattaaactacttattattcacttattttagtactttcttctatt

SEQ ID NO: 65737 - DNA, 383 bp, Setaria italica
  Peptide Sequence Number=SeqID_131711
cataaatttgtaatatgagtttttatgatattgaataagctatgaaagagtgaactgtgaagacaataaattcaaactcaacatacccaaaagttcccataacacgagttgaaatatgctcatttccctcacccaaagctgtcctcgctaggccaaaatctgacacctttggggtgaagtcatgctccaataagatgttacttgacttgaagtcgcggtgtatgacacgtggacttgaatcttcatgcaaatacgcaagtgcacgtgctgcaccaagtgcaattttgagtctagcgtcccaatcaagccgagaagcccccttatctgatcctgcttagaaacataaataatcttccatttcagaagtccaatgaaagctcgct

SEQ ID NO: 65738 - DNA, 157 bp, Setaria italica
  Peptide Sequence Number=SeqID_131712
aacgggttgctatcaaggttcttaagaataccttcatagacacgcccaaaaccaccctcaccaataattctggactcatcaaatacctgtgtagctcacttccttcattgcataccaacttcagagcttgaaccacttcccccatgaatgggcgctg

SEQ ID NO: 65739 - DNA, 363 bp, Setaria italica
  Peptide Sequence Number=SeqID_131713
cgtcagccttcaccgtttcgagcgtcacggctccctatctttcaagttactgggccttgccctcagctgccacttccatcccaggtgactccatgccctcagatgacttcgcagggctgtatggagccttgttcacaatcctgtcacgacgtttctcaaggaagcgttgaagagagtgcctcctggcaattgggagatcagcctgaagcttgcacattgagctagggtcagccacaacctgaggctgcccattttgctacagaagtgctctgcagtgacagagaccgtgtgagcgcgggagaaactgctgctggggcaacagttggcttgctagtcttactaggtctattctattaggtaggt

SEQ ID NO: 65740 - DNA, 437 bp, Setaria italica
  Peptide Sequence Number=SeqID_131714
gttttttttttttttttaggttaggtataacatagatggtatttcattactagatgatcattgtgacatacatagtcagacagacgaccggcatgatgtacaacgactgaacgacacatcatatcatagcagttcggtatgcgggtaaacgaattgacggccgaataaaccaacctagcacatgacaacagaacagcgataatagaggttccggtccaattattagtacggtcctgagcttcaacatacgacaacgacacatccctgccctttccacaacgtcagccttcaccgtttcgagcgtcacggctccctatctttcaagttactgggccttgccctcagctgccacttccatcccaggtgactccatgccctcagatgacttcacaggattgtgaacaaggaagcgttgaagagagtgcctcctggcaatt

SEQ ID NO: 65741 - DNA, 336 bp, Setaria italica
  Peptide Sequence Number=SeqID_131715
ttcagcaagaaacgctgtgtgtgttattgcagtgttgaacatggttcggttcagagtttcggagaatgtatttatcctgcagactgaacttccggcactccttcatggagataatccaggccccatgcggcacctatcatgatctgcagcctcaatctccacgaaaggggaggatgagatcggttgaacagatggtcatccaagctcttgttgggcatgaactcgtagaccagcagcctgtgcttgcctgcttctgaatccactgcgcagtagccgatctagcttttacgtagtatttcgggtttgttctttactttaagttaaactttaacttta

SEQ ID NO: 65742 - DNA, 266 bp, Setaria italica
  Peptide Sequence Number=SeqID_131716
atcatccggaagttgcggctgtccggcgggaactgggcacccactccagcaacttctgctccgccaccggcttgttccggtccagcgaccgccgccccgtcaggatctcgtacagcaccacgccgaagctccacacgtcgctcttcgccgtcaggtgccccgaatcgatgtactccggcgccgcgtacccgtgcgtcccgacgacctgtgacaccaaaccacaagcaccagagctgtcaaaactgaacaaactttatcgcggcaac

SEQ ID NO: 65743 - DNA, 256 bp, Setaria italica
  Peptide Sequence Number=SeqID_131717
cctcttgccctgccggctgccggcctccgcctcctcgtcgttcgcggcggcctcgtcatcggcccgcgccggcgccggcgcggcctccgccgcttcggccccgccgccgaccgtgtacacgaagggccccataggcacgtcgtcgtcgagcgcgagcagcggctccagcgcgcccacgacgtcgcgcatggagggccgcgccttgggcacgctctgcaggcactggtgcgccaccttggccgccttctcggccgcg

SEQ ID NO: 65744 - DNA, 217 bp, Setaria italica
  Peptide Sequence Number=SeqID_131718
ttgctagctaggacgcttttccatttcaaaaaccatggaagataggctatttttttggaagtgaattgaaagcacgcaagcaattgtgcaggtttgaagaatacctgaacttctacgccttcatgaaggtaagccaatccttctgcagcacccaggataacctgaagccttccgttccacgacagaggaggattagctcgcctgaacaaatggtctt

SEQ ID NO: 65745 - DNA, 223 bp, Setaria italica
  Peptide Sequence Number=SeqID_131719
tcgagtagtacaatgtcaattagtctctgatgacatgtggttgctgtgcgttttgaatcgtggttgtcaggtggtgctgaactggctggtgtgccagggcaacgtggtgccgattcccggggcgaagaaacgcggagcaggcgcgggagttcgcgggcgcgctggggtggagcctgacggggaggaggtggaggagctccgctccatggcgcgaccaggtcaa

SEQ ID NO: 65746 - DNA, 372 bp, Setaria italica
  Peptide Sequence Number=SeqID_131720
tttcttccatgtttagttgatgagtcagagaagataaggcatttggctgacacctttttgggaacatcttaaaagctaaagcaccactccttgcgtataatagtttttattgaagctatatatgtcctaaatgattgcacttggtacacggtgcatatagcgagtctcagggaagttcagatagacgacctgcccttttcgcaattcggtaaaccaagttaaactctcctggcatgaatgatgtttcatcccgagctgaattttgtcatgctcatttgttgcagtggtactgacgaaaggtcgaggtcaaaacgaatgcacatttatgcctctttgcttaaacaaatggcaccagagcaccttttagccaca

SEQ ID NO: 65747 - DNA, 298 bp, Setaria italica
  Peptide Sequence Number=SeqID_131721
taattagtttttatttgaagctatatatgtcctaaatgattgcactggacacggtgcatatagcgagtctcagggaagttcagatagacgacctgcccttttcgcaattcgtggtactgacgaaaggtcgaggtcaaaacgaatgcacatttatgcctctttgcttaaacaaatggcaccagagcaccttttagccacatcagccaaattatgtgcttagatcttggcagctgtttgtgatggcttgctcagtgttgatgatgctggtggaagggcgtgtacgttcaggatgctctgc

SEQ ID NO: 65748 - DNA, 243 bp, Setaria italica
  Peptide Sequence Number=SeqID_131722
gcggcagcggggcggcggcggcggcggcggcagggagtggaggcggaggtggaagaggaccggggaggagaaggtcatcctgatggccatgtgcggccacggccacttcgacctcgctgcgtacgagaagtacctgaggggcgacatggtcgacctgtcgcactcggccgacaagctggaggcgtccctcgccgccgtgcccaaagtctgatgatgctgaagagatagctgcaatgattgata

SEQ ID NO: 65749 - DNA, 230 bp, Setaria italica
  Peptide Sequence Number=SeqID_131723
ttaacgttacctttacgttacttttcggtcgtactaccgtccgggctctacgccgctgatgaagatgcacacgctcggccacggcttcgtccccgaacccgaataccaacgacaaggtgggcttcgctaccatggaatggcacctctgatctcgcacgtgtacgagctgggcttcatggacgccgtcgccatacagcagactgaatgcttccaagcggcattgcaattcg

SEQ ID NO: 65750 - DNA, 272 bp, Setaria italica
  misc_feature (7)..(7): n is a, c, g, or t
  Peptide Sequence Number=SeqID_131724
acgccancgggagctgcagcagcgttcgcgccacttattggtcaggaccgaaactttctacggatcccagccaagaacacaaacggaagcgacgtgattcttgaggttaccttgtgcaagttgaaggtcgcctccccgacctggatggtaatatcgctcggatattcttgtgaaaggacccagtcgctggtcctcttcatcgccggcgtatcgaaccggctctccatccttcaaccctttcgcaaaagtcaccgagctaccgtacgttcacc

SEQ ID NO: 65751 - DNA, 257 bp, Setaria italica
  Peptide Sequence Number=SeqID_131725
gaactaacggaacggaacgaacaaaccgaacaagacaatacgacgaacgttgtcctcggtgatctccaaattctcgccgtagcagaactttgtgacgagctcgaacgccctggagccgcccggcatgcccgtgaggtcgatgtgggtggtgaacttggagccgttgatccccgacacctgcttccgtatgtagccgcaccgagacgccagcgggagcttgtgcaagttgaaggtcgcctccccgactggatggtaat

SEQ ID NO: 65752 - DNA, 306 bp, Setaria italica
  Peptide Sequence Number=SeqID_131726
catatacagaatccccatactgatagtgtggctagcaaatgcatagggaagcaagaatccattgtcatcattactaaccaagacatatacagaatccccactactgatagtgtggctgcaaatgcatagggaagcaagaatccattgtcatcattactaaccaagacatttgtgatttcttgacttccaataagggatactgattcaaagaatgtcatcacccagaaggtatcaaacagcaaatcttgcttctggtcttgcttctcatgctccaccacaagccaagtctcaaaacagaaagaagaa

SEQ ID NO: 65753 - DNA, 344 bp, Setaria italica
  Peptide Sequence Number=SeqID_131727
tcatcacccagaaggtatcaaacagcaaatcttgcttctggtcttgctgaaaaggcaggataaagcagttgttaattcctacaacataaagaacacagtaatagcacatattgttttaaaaacacaaaccttctcatgctccaccacaagccaagtctcaaaacagaaagagaacaatgaagatgcaagtgttagaatgaaattgttgatccatgcacaaccaagtgcactgaaactcttcaaggcacccactgcaagctgaagtacccagtaaaatatgcaagcccttcgtggtcctctataaacgttagcgaaaaaattgttatagctaatatttgaagaat

SEQ ID NO: 65754 - DNA, 349 bp, Setaria italica
  misc_feature (187)..(187): n is a, c, g, or t
  Peptide Sequence Number=SeqID_131728
aacgaatgccaagaaccactggaccgagtggcgccaatacgggacgcaccttgcctcgtagccaatgcaacgaagagcagccttggcgtactcctcaggtgatggtatgaatgggcaatcacccttgacaggggacatcttagtagcgacatacagagggatctggatcggaccaccacaaaagggngagcgtatcacaaaaagatgatataccacaaagttagcatatacgagaagtgaaatatacaatctcaacatatgtttctctaccaggcgtaaaaaggattatgacgtattttgtgaatactacaaatacaagtttagtagtacttttgcttatattttagaa

SEQ ID NO: 65755 - DNA, 258 bp, Setaria italica
  Peptide Sequence Number=SeqID_131729
ccgggaacgagtcgtccagctccgggaacgggtcgttgtcgacgatctccgactccggcgtgcgcgtctcgccccacgagtgcgagtgggactgcgagtgcgagtgggaggtggtcatgtccatcgcctcctccttggtggtggtggcggcggcgagggcggaccccttcccctattcttgtcttatttcttttctttccctttacttttcgtttttctttttctttttgtttttattttactttaggtttcggtttc

SEQ ID NO: 65756 - DNA, 222 bp, Setaria italica
  Peptide Sequence Number=SeqID_131730
ggaccccttccccatctgcatcttctcccactcgttcttcttgttatacaggcggcacagcacccagtcatccaactgcagagaaatggatcaggatagaattaagttactctgttctgttcaacccaaatcgatgatctttaatctctagaagaaagtaagaaagaaaacattcggaggaagaattctagtcggtctttacccttgtagttcgttattccc

SEQ ID NO: 65757 - DNA, 303 bp, Setaria italica
  Peptide Sequence Number=SeqID_131731
aaaggtttaacgaataccaagaaggaaccccaagaaataaaacagctgatggaaacctttttgatggatatacttcgttctagataggaagttcattttgttaagcttatgcaagtgatccatttgctttagctgcccgcccaccagaacggagcctcttttttttccttttgggtaatcattttgcttggctgatatggactcgatcatcattccaatgggaagtgatacagaagtaaccctacagatgcatcatttgaattctgaatatgtactagtgcttggaagtcgtggatgcttaga

SEQ ID NO: 65758 - DNA, 445 bp, Setaria italica
  Peptide Sequence Number=SeqID_131732
ctggcgttgaggaccttgaatattcggaaactgtcgtagatacagaaagaaaaggacgatggaatactaacattacacatttggtactttaagccataaaccactgtcaagcattacaaaaattgaactaatttgaagaaatgctgtatcagaatagaaacatcgtttatttcaaatattttcagagctttctaatctgacacttgtcaatatttacacttatctttaaatggatccatgacagtggatttaattggtggagtaatctgcatttctcgttggcacaattaaaaaataggcacacttctttattttttagtttgcacagaattctcgaagaaaatgcattctagtcagagacaactgaagaactagtggtatacgcacctcaactacatcaatgaagtcttgcttgctgctaaaagagcctatccactttgtatga

SEQ ID NO: 65759 - DNA, 154 bp, Setaria italica
  Peptide Sequence Number=SeqID_131733
actcttgatgattcttcacaaacttcatctgtccatggatggatccatatccttcggcagacatcgatcatagtcatccatgatgcagaagaaaaacaatacatgagctaggtagctggttgtagtaatagaactaaaaagtaaaaagaacgaa

SEQ ID NO: 65760 - DNA, 319 bp, Setaria italica
  Peptide Sequence Number=SeqID_131734
atgtccctgagcttgtcccgggagagacatttgaagaggccgcagagaaggaagcagagccagaagagaagaaagaatcgaattttattgcacatctgatccgttgctgtgaagggtcgttggttcagtgttgccatctaccatgcgagaggcgagctcttccgtgaactctgacgtgcctcattcgtttccatgagttttcagttttacaaggatttggtcgaatcccagtcaaattgagttttgcgaacgtgaaacacacacttgttgcaaaactcaatttgactgggattcgaccaaatccttgtaaaactgaaac

SEQ ID NO: 65761 - DNA, 439 bp, Setaria italica
  misc_feature (23)..(23): n is a, c, g, or t
  Peptide Sequence Number=SeqID_131735
agcatgtatcaagcaaaggttcntacatcattcttctacactttgtaacaacgatcagttcgaacaatacaatcgctgccacttggtgtcatattggcgcattacaaattatagcgtgcaagtagaatcacaatgaaaacggactcacacgcaggcaccttgggaggtgccgcttattcctagtaaaccgcggtactaattacttcgcttttattaagacaggagctgcttagagtggcgcagccacgcatttgtttgttcaccagggaacaatcttccagcgctggttgtcaccctcgcaccactcccacagcacaagagtggttccatcgcgcacaccaccgtggtccttatctccgtgcagagcatcaaagttcaagtagataaggaccacggtggtgtgcgcgatggaaccactcttgtgctgcttagagtggcg

SEQ ID NO: 65762 - DNA, 325 bp, Setaria italica
  Peptide Sequence Number=SeqID_131736
cagaaaccgcggtactaattacttcgcttttattaagacaggagctgcttagagtggcgcagccacgcatttgtttgttcctgcaatcaagaaaccatgattacttcataggcccatcttcgagcagagcacaatgctacattgctagtttgctactactgatttgaaagtcaaggtagtccgaatacagtattttgctgcatatataccttctacaagacaagcttctacaacatttcagatattatacagcgtattgattttggtgttatgtgtcttcatcttttttagtttggtgtgttggtgcgtgtgtgaacagaaataa

SEQ ID NO: 65763 - DNA, 334 bp, Setaria italica
  misc_feature (279)..(279): n is a, c, g, or t
  Peptide Sequence Number=SeqID_131737
tgcaccccgtgggtcccctcatgaatacccgcacggcggccgtgaggacgcggtggtcggcggctacgacatccccgccggcacacgggtagtgatcaacgcgtgggccgtggggcgtgacccggcgtcatggcccgacgagcccgacgagttccggccggagcggttcctcgccgggggcggcgccgagggcgtggacgtgcgcggggcgcacttccagctcgtgccgttcgggtctgggcggcggatgtgcccggcgtacaacctggcgatgaaggngatggcggcgacggtggcgaacctggtgcacgggttctcgtggcggctgcccgac

SEQ ID NO: 65764 - DNA, 259 bp, Setaria italica
  Peptide Sequence Number=SeqID_131738
atgttgctccagcagagaagcatcctggcagtttactagaagggttctctggggttcaagtcagcacacttgctgttaatgagggtttattggtagctggtggttttcaaggggaactgatttgcatggtaaggcaccaattaagacttggttgtatatttgcctcggttgtatttgttgatgaattctctttcccacttactaggatgtagtttttaactgttcattttccttgcattttttcctatatacactagca

SEQ ID NO: 65765 - DNA, 239 bp, Setaria italica
  Peptide Sequence Number=SeqID_131739
cgtaagctttcatcatgcatccgagccattaaatccctccatgcacaaaatttccaaacaagatccttgacttcactagaccttttggagtcaagcccatgagtttgcaaatttcgtgtgagaatagatgctgcactggaagctccaggaggacattcaatttcttttgcatatagttgcatgctgaccatatttgagcgatgactagcctcgaagaaaaaattgattttatcactagg

SEQ ID NO: 65766 - DNA, 259 bp, Setaria italica
  Peptide Sequence Number=SeqID_131740
aagacagcggatcttgaattcgtagatggcatattggaggaaggggacctgctttacattccaccgaaatggttggcattacgtgagatctctttctattagcttttctgttaggttttggtggcgaacgtcaggaagttcataacgctattgttttgatggtccatgatatttctatcatcggatctgtagatagcttaaataaaaacttacaattagaagacgaaataatttacaatagaatacaaaaaaaaaaaaa

SEQ ID NO: 65767 - DNA, 253 bp, Setaria italica
  Peptide Sequence Number=SeqID_131741
cctcatcatgggcggggggctcctccgcgcggagctcgaggacgccatcgccagggtcgtcgccgaccgcagcggcggcgaggcggaggcggtgaccggtgggaatgtggagaggtggaaggaagggatcgcgggggaccgagaccctgccgatgtactcaaacttctaccagtgaaggccctatctttggctgcattgatcattggcccgcaaggacaaagtggaaggacataaactacctagagaggatag

SEQ ID NO: 65768 - DNA, 277 bp, Setaria italica
  Peptide Sequence Number=SeqID_131742
aaactatccacaagatataaacccacagaacataaataaattctgcatagcattagaattaagactaatatataaacaactaacaagacaaatgcacattggagtgtgcatctttcagcgtcatgaccttttgcatcgcagaccaatatattccagacaaaggagagggatgcataccttcggccagctaaaaccttggccatgtttccattattatttgtaacgaagacatcactttcatcacaaacgatgaagtcaattgcagccagccgtgacg

SEQ ID NO: 65769 - DNA, 377 bp, Setaria italica
  Peptide Sequence Number=SeqID_131743
tctccacgtggcagttaccttgcagctcgtctttcatctctaccgcaccaaggcatctatttcttggtgtatgcaaaatgcatccctgtcctgttaattccaccatgttaatatatctgttccccagtgcatcaatcgcaggctcaactagcagaatcctcctgttgtctactgcatgtgtggtgtcaagctttcagttcatgttgtaactgatacattcccaggttttcttaagcagatgcacgctgatggaaattcatggaaatcatcctgttttggtctgatatcatccggttctcccaataaagaacccctactaggaactttactagtaaccttactagacgaaaaacgtaatacccaagacccaatactag

SEQ ID NO: 65770 - DNA, 234 bp, Setaria italica
  Peptide Sequence Number=SeqID_131744
aggcaacagagcaccagggcaagcaagagcaccagagaaaccggcagttggatcaggtgaccatgagaccgacagcagtgcgaatggtgcctcggcgatcctctctgtacgggaaatcatcgacctcaagcatgtgaatgacatgcccaatccttggcctcttactagcatcaggatctacacatcgcaatgccactagcaaagccttcttcactgacctagtaagttaggtct

SEQ ID NO: 65771 - DNA, 252 bp, Setaria italica
  Peptide Sequence Number=SeqID_131745
aagatttataacgcacttaaacaagctcataaaacagcactggctatatggaggcacagccatgactaacctctcctggtggcctgttataatccactggtaccctaccagatattatttccataatgagaattccaaaactatatatatcgcttgtttcattcaacattaccagtccccgcgtactctggagcaacatacccgaaagttcccactaactcgtgtagtaacataactccgttctgaaccaag

SEQ ID NO: 65772 - DNA, 287 bp, Setaria italica
  Peptide Sequence Number=SeqID_131746
gctagatcctctgacaaaaacggtggtgcaggaggttgggatacatctgctgctaactggaataaatcatctgtcgttgctgaagcacaggagggaggttggggcaaaggaaaaggagcttcagatcaagctggtttgggtgattgggataaaccgaaatcttttggcggcggtggttcatcaagctggaacgagggagaggaagagacaatggttggagaaacggtgatagaagcaattccgggattggaagggaaaatgatggtgctgatggacaaaaaatgggg

SEQ ID NO: 65773 - DNA, 277 bp, Setaria italica
  Peptide Sequence Number=SeqID_131747
gccaccctgcaagcctctccccagttgtcactcttttcacactccttattgactgatggggagaggcttgcagggtggcagacatgggaactggaggtgacgcagacccatggggaaacaaggttaaagcagtagatatggaaggaacagatagctgggacaaggctacaatgcctccagacaataagttggagggtgtcagtcaaggatgggggcaacctttgggcaattcaatgaaggccaaggaaaagataatttttctaaagctgagggcaac

SEQ ID NO: 65774 - DNA, 424 bp, Setaria italica
  Peptide Sequence Number=SeqID_131748
cgatcgtgtcagtgggttcgaatgtcgatcgacattgaacgcgctccttgatcctgtcgatcgtgtcagtgggttcaatgagcgcgttgaagagaaagaaggcattcctcccgtgcagcaaaggtattttgcatagcatgcagattttggttttgaatgacaactgctaccatttttttcttccaaatgcatcttatatattcttgaaacctagttatcctttcctgatatgatgctaatgaagcaattttcatcgcccctgcaggctcatatatgctggtaagcagcttgctgatgacaagactgcaaaggactacaacatcgaaggtggctccgtccttcatcttgtccttgctctgaggggtggttactagtaaagttcagaactagtcagatgaaccatttaaggttccgtcttgtcgta

SEQ ID NO: 65775 - DNA, 282 bp, Setaria italica
  misc_feature (156)..(156): n is a, c, g, or t
  Peptide Sequence Number=SeqID_131749
tagttcatcaatgatgccctaggacagattacctaactaatcccaacctccctcccacctaatccaatgactaataaatcctctcctccccagagagatggcagggaggttgggattagttaggtaatctgtcctagttcatcaatgatgcccttnttttttattttggttttgatggaattgttttgccgtcgtccgtccatgcaaccaagaaattccaaggccatggagaatctgtacaaaagagtgagtaggctacagtcagagagcagcagcagcagc

SEQ ID NO: 65776 - DNA, 296 bp, Setaria italica
  misc_feature (260)..(260): n is a, c, g, or t
  Peptide Sequence Number=SeqID_131750
taagtaaaataaaagttaacaaggttaacaaggttacctacaatagtaaatttagggaagacaaactagaaatccggagagaggagcagggacaagggcaaatcaaaaaaagaagagggccctcttggattaatcaagatttcctgatctgtccctgccatctctctgggggaggagaggatttattagtcattggattaggtgggagggaggttgggattagttaggtaatctgtcctagttcatcaatgatgcccttnttttttattttggttttgatggaattgttttgccgt

SEQ ID NO: 65777 - DNA, 147 bp, Setaria italica
  Peptide Sequence Number=SeqID_131751
agaaagcttcttgcaccatggaggaagaggaggggggttcgtcagggttacttggttttgactgcctcgaccgcagccgcggcggccgtggccatggcatcaccgccatggcctagatgtgcatacaacaccaagtaaccctgagaa

SEQ ID NO: 65778 - DNA, 402 bp, Setaria italica
  Peptide Sequence Number=SeqID_131752
gtttgaactgtattattttccactctagaggtcttcatggttcagagacacaggcttctctctgatgaactgtggtgaatgattctatactgtcggagactgcaaagctatttcagcagcctcctcaagaccatggtgttaaaccatcaccaccccactagattaagttgttcttgaggtggctgcacaatggacatgtactagcaggatacctagcattggccatcagcattctgatcatcggaatggaaggcagatattgtcatgccaatatcaagactggtttgatactctcggtatgaggtagtggcacatgatggtttggtacaaatatctcgatgattccacttatggttcagccctaattgatccgacttttttgaatttagcttcaaaagcata

SEQ ID NO: 65779 - DNA, 379 bp, Setaria italica
  Peptide Sequence Number=SeqID_131753
aaaagattatcgattttatttcccactgcatgatgtatggttaattggttattgatcttattactgccacaagatttttttatttgggtccttgtactgccaattctactgttatatgtttatgcttttcaatatgaatatgcattacttggactggacttttcatttctcaaggttatttcatattttgcactaactgaactgggaaacatgaataccaatggcacaaatacctaataagcatattaggaaacatgtttatttgtcatccatctttttaatactatatttttgggactgatattctctacagtggagttgttaataatcattggggggactgcgaaagatctgtgctgcatatctatcatgaacttat

SEQ ID NO: 65780 - DNA, 182 bp, Setaria italica
  Peptide Sequence Number=SeqID_131754
ttaaaggaaactaaacaaaaagaaccaaataaaaaaaggtaaccaatagaaggacgaacgggacaaacaaaatcgattaatttaaagggctacatggttggaaatgctctcactgatgacttccatgaccactatggaatatttcaattcatgtggactactggcttgatctctgatcaaac

SEQ ID NO: 65781 - DNA, 176 bp, Setaria italica
  Peptide Sequence Number=SeqID_131755
tttttttttttttacttgtgaaactgatgcaaatttattcttaggctcgcagtaacatcaacagttcaacacgctgtttcagttccgtggcaacaaaaactattccacagtttttcccccagtttatttgtcgggctgtgctggtgcttggtaccaattatcccctaagaaaactg

SEQ ID NO: 65782 - DNA, 344 bp, Setaria italica
  Peptide Sequence Number=SeqID_131756
gaaggtgaaacaggaaatgctatgtcaattctctcccatgcactgatatacaatatacatcgagttttgacatctaccgattccagttatcagacaaaatagcttggagaagtgaccacctcaagagagctttctaatgaattacaaggccaggactcaaccttggagcacaagaagttcgacgaagacaatcagatcactacctaaaagatgtatgatcgtgggaaagctccgtcgaagggaagaaaatggcgacatttgcattggctatcaaaaccgacaacaatctagggaactacttagaagaatagactttaacaagaatacaagaatactaaacccga

SEQ ID NO: 65783 - DNA, 432 bp, Setaria italica
  Peptide Sequence Number=SeqID_131757
actagtaatactagtacaaaaactaacaactacaaatcaacatctggcaacggcaccttccagtaattccagttattgtagtcttcctgctcaaccagagttgttggtggaaacatgtcgttgacaagtgtatgtaaggaggtataagactttacatcaacagaactgttgacggccacttctccctttgggttgatgataaaaatcttgcctttaggaattcccatcttcttgtaactgagctcgtcagtgtctctgttgccaaatccagcataaaatggattgtaatcagaaggaaaaagcgccttaatgtcctccagacatgcaatcttgaattcatgtggagctctccgtataactgagacaagcaaaggaatattagaatcatgctaaaaaacaataacactagcactagccattagcaaccagttt

SEQ ID NO: 65784 - DNA, 401 bp, Setaria italica
  misc_feature (132)..(132): n is a, c, g, or t
  Peptide Sequence Number=SeqID_131758
tgaaattacaacaggcccattgggcagtgccttcccatcctgtttcagattgaagaggaagttcttcgtgagataagcttgaacaattgctctagcactaaggaataatagttgataaccattttcctttancgcagaaaagagtcgagcaacaccggagtgactccaatctcgaccaaccaaaggcatgacctgacccagcacatcagacctcgttatggtgccatctgctgcttcccaagaactctggtgcagaagctaaaggtcaccaagttttggccctccttcagatttaaagatgctacctgttcactagtggggatcaaagtccttacaaattgcttccttggtgactggcttttgttgtttctccagagcttgctcatccattggactcaaaa

SEQ ID NO: 65785 - DNA, 282 bp, Setaria italica
  Peptide Sequence Number=SeqID_131759
acctacctcaactgaacaaagatgctgtagaaaggcttcctcagcagattctcgacccattcctggccgtaacatgttcccacaaagagaaatctcaacccctgcaacacatcaaagcagaacattgacacattacctttaggaaataagaataaaatgcaacctgacatgtgcttacccaagcccttcggtgattcagaatgctcttctttatcctgttcctcttcttctgagtgttctggaatgcttcccagtttgtctttatcactggtagccatggat

SEQ ID NO: 65786 - DNA, 245 bp, Setaria italica
  Peptide Sequence Number=SeqID_131760
atgataaaaagcactcatcatagcactgttgctgagtttttggatctcaagactctggggggaaaaactgcacgcaatctggcaagagcatcaaactaaaaaattggaactgcctaaaagaaaaatacctccagacatgcaatcttgaattcatgtggagctctccgtataactgagacaagcaaaggaatattagaatcatgctaaaaacaataacactagcactagccattagcaaccagttt

SEQ ID NO: 65787 - DNA, 305 bp, Setaria italica
  Peptide Sequence Number=SeqID_131761
gctgcacgcctgtggccttgggaaatcatttactatcgcaggcgtaagaaaggtccaatatctacagagaattatgctaagcgagttgagcagaacaaagaatttggtattgtggatcagtatgtcagaagcagcactggttggtgggagtgcccttagcaggttggtggaagaagcagcaatgtcagaagctgtttagttgtttccaaggctttacatgaatatgcccttagcactctagaggacattttgaggatgacaaggttcattttggtggtcaacagacatcaaggaacagcctcatg

SEQ ID NO: 65788 - DNA, 226 bp, Setaria italica
  Peptide Sequence Number=SeqID_131762
gagacacttccagcactgttgtatctaccgaagaatgggaagcatgtcaagatcaatgggaatcttgttattaagtccattgttgcaagtgagaaagcttcttcgcgaatgtctggctatgatgggaagagtcctcgaaaccaaggaaaggaagaaactagcttggcaattcctggctatgtggctccattgggagccaaagccatcagtttatttttcattcctg

SEQ ID NO: 65789 - DNA, 282 bp, Setaria italica
  Peptide Sequence Number=SeqID_131763
cactaaaccactgtcggtcagttaattccatcatcctccctatacatgtttccatctgtgggagccaaagccatcagtttattgaagcaatgtctggtcccttgctgagctcaggaatgtgcactgaagttttccagtttgatgtatctccatcctctgcacatgcaaatggcatcgttcctgtctactccaatgccatgtcaaactcgtcacagaattttacagaaaatcttccttctcgtcctcacacagtgaagaacagaaggatttcatactccgagg

SEQ ID NO: 65790 - DNA, 192 bp, Setaria italica
  Peptide Sequence Number=SeqID_131764
gcattctagctacatcccgaggaccataacaagtagggagctagagctgagtggatgaggaggttcttctgatgtgggagttgcccttgctgctgcttgtctggatcagtgcagccatctccactttcagctgcattatgttattcaacagaccatcctttgctgtcttgtctttgttcttggtattctagt

SEQ ID NO: 65791 - DNA, 267 bp, Setaria italica
  Peptide Sequence Number=SeqID_131765
ggcgtgttatttcatccaaaatagttgaccacactgggtgacaatcttggaaggtatttgtatacccaaaactttatcaacacgtcgaaagcaactggaaccaaacaaacaaaaaatagtgactgcagcttcatctgcttcaagcccgtagtgctcaagaataacctctaccaatgtatgccaacctgactctgaatggtaccctagaaggatgtctgatattagaataataagaaaggccttcccactgtctgaaatgttatttag

SEQ ID NO: 65792 - DNA, 392 bp, Setaria italica
  Peptide Sequence Number=SeqID_131766
ttcacactatattcatcttcgcctatttgcatatgactaatatcaatcctattaaacctttataacctggttagcatcagcattagagttgttactttcatcagtctgtgtctcaagcaaatgaaaaacaggcctgaggtaattatcaagctgtatcaagagataataggcatttgcggactgaggaaaccccatgaccacaaaatctgaaccatgtaacactgactttggaatctttagagtaacctgggactgagagaaaaccttaagacccagaaaccttccagttgcagcaaataagtggaggatgctcttggtccttaaactcacaaaaacctcaattgctgttgaactccctttgtttagggcttcttcagattctaacaagtaga

SEQ ID NO: 65793 - DNA, 307 bp, Setaria italica
  Peptide Sequence Number=SeqID_131767
ctaagagatgaacatcgaccgtttccttttgcttccacctaacttgttgcaagtccaagatatgttatcgctattcatttttttagttctctccgttcatgaatgtatgatgtcaatgcttcgaccaattctgaaatgcctgttctgtttgtgcagtgacctcggtgcctcaaccagatgatgcctggtgccgtgatgatccgttcatttgccacaagcccacaggaatatgctccagcgcaagcattccttggtgtggctgtccagtgcccgcagatggaattcgtttgcttcatatgagccaatt

SEQ ID NO: 65794 - DNA, 241 bp, Setaria italica
  Peptide Sequence Number=SeqID_131768
tacatggtctcaaatctaagcacattttgtagaaaactgcatcgttgaacttagtaaactggtgtaaagaacataaatgaagagcatttagttggtcttgctaagtttgtgtttcagctttcgacttgttgcagatctatgtcgttgattctttggacagagaaaggattggagatgcaagacaagaatttcagactattatcaaggaccctttgatggcaaacagcataatcttagtata

SEQ ID NO: 65795 - DNA, 248 bp, Setaria italica
  Peptide Sequence Number=SeqID_131769
cttacatcacattagagatataagaatgttaaaggacaaaacaaaacgtctagaacataaaacttcagatacatggtataagagaaaaataaggttcactacattcatattagggaaatcataaagaaggatatcaaatatgaatgtagtgaaccttatttttctcagatacatggtataagagaaaaataaggttcactacattcatattagggaaatcataaagaaggatatcaaatatttccagc

SEQ ID NO: 65796 - DNA, 409 bp, Setaria italica
  Peptide Sequence Number=SeqID_131770
gactgtaacacagaagcttattcactgcgacacattctttgtcattcagttgcttattcttaaaatactgtaatgcagaagctgaagacatataccagcagcttcagttgaatgtgatccaggggctacccttatgtccaccttgtaacgaggagggagacttcgtatgagttttacgcggatgcaaaggccaataacagttgccatgctgcagtgctccactgttggggtgaaagtaaccctgacatgattactttcatcattgagttcaattgagtcttcagttaccacattaagctgttccaatgagtatgggtgctctggatcctttatatctctaatgtgatgtaagaatgttaaggacaaaacaaaacgtctagaacataaaacttcagatacatggtataag

SEQ ID NO: 65797 - DNA, 268 bp, Setaria italica
  Peptide Sequence Number=SeqID_131771
gttaaggacaaacaaaacgtactagaacataaaacttacagatacatggtataagagaaaaataaaggttacactacattcatattagggaaatcataaagaaggatatcaaatatttccagctggtctataggctctactgcattttcatctgtggtctctggtgcttgtcgtacacgcctctctttcttctcatgaattacagggttagcattttattctaaccccctattaacctattttccttcgtaagtctactaattgtcta

SEQ ID NO: 65798 - DNA, 172 bp, Setaria italica
  Peptide Sequence Number=SeqID_131772
tacagggttagcatttatcaaccccataaccatttccacgaagcacaatgcactaactttagataagtaagacaaatccagcagatggcggcggtgcgcttggcgtggttcggtcgccggtttggtctcctttgcggctcagctcgcgtcggggaagacaactgggtgtttt

SEQ ID NO: 65799 - DNA, 254 bp, Setaria italica
  Peptide Sequence Number=SeqID_131773
ccagtctctgccccccgcagctccatggccggcggctgcgccctctcggggggctgcccaacagacttcgccgccttcgccattgcctccgcggttcttgctttgctcattttccgtgctctctttcccttcatctatcggaagggcaaaagaactggtgtttggcttgtaatagttcaaattattggaagcactgatctgttgctctcactggtggtgcgctattttgactcttttgatgcctttggtatggt

SEQ ID NO: 65800 - DNA, 242 bp, Setaria italica
  Peptide Sequence Number=SeqID_131774
atttaaggcagcttagatttgtgtgacatcaataaatggcccatgcgtcacagtgggccaagtgaagaagaagatgaaaacatatttgtgatgtagtggttttgtttgtgctatgtgccggctcgtgttactgttaaatgtaatgtgtgtttggcgtttcaataatatctccatggtacacattaaatccgaatttatatgaataaattattttggaacaaaaaaaaaaaaaaaaaaaaaaa

SEQ ID NO: 65801 - DNA, 371 bp, Setaria italica
  Peptide Sequence Number=SeqID_131775
gggcactgattttcccagcgcctgcaaacgctgcctcagcatccatgcgcctcttgaagatcaccgacttcccagctgttgcttcaggaaatgaaccttcgcatggtgcatcaaagaaatgaaccctaagctgtagaagctgttgcataaccaatgaggtcaacaagatgagggagttagaggtaaaggtatactaagtggtagctagcttgttgcagaattaagcattcataggaacagcgatcgcatctatgttttccagtgttgtgaagtgtcatatactcttgcgtcattgtacgctgcggaccagatcagacagttaccaataggtgttgtaaaaacatgttttaaagctgttctttttacttgtt

SEQ ID NO: 65802 - DNA, 244 bp, Setaria italica
  Peptide Sequence Number=SeqID_131776
ccaaaggtgtgagcatcagtattagttgatctggttaacgtaatacaatagcaaggaactacattgtgctaatggatgatctgatcacgttaagacagacaatgttgaaagaagaaaacttacgcaaaagcagcatatccagcaccaacattggcagaaggcaaaagtgccgcagaaactgttgctgataaatggtcgtgtccactaggaatagcaaggttcttaacatccccatcaaccttat

SEQ ID NO: 65803 - DNA, 323 bp, Setaria italica
  Peptide Sequence Number=SeqID_131777
tagaccgaattacaacatgatattactgatcttattttggtccatgagcatcgtggtaaacctgatgggttgatcgtctctcatctaccacatggtccaactgcatactttggattactcaatgtggtgactcggcatgacattaaggacaggaaggcaatgggtaaaatgtcagaagcttacccccatttagtactggacaacttctcaaccaaggtatatacattgtttcatgttaacagttattattttgcctttatcatggtgagctcttcactatgtgtgcttgaaaagttaaaccagcatttcagaacaaggtaagc

SEQ ID NO: 65804 - DNA, 385 bp, Setaria italica
  misc_feature (283)..(283): n is a, c, g, or t
  Peptide Sequence Number=SeqID_131778
aaaagacgaaataaattaacttttagactaaataagaagaatgactaacatttctttcaggcatcatgtctacgagaaaccaggtggtcccaaatcgatcgacctgaaggaggttggcccccgatttgagctgcggctgtaccaggtgacaaacacatctccatccagtcattaccaaggctttcatcggcataataattttttgctggtgctaacatgtttctcttgtctgacagatcaaactaggtactgtggaacaagacgaagcgcagagcgagtttgngctgcggccttacatcaacactgccaagaagcaaaaagcgcttggctcgtgaattgaattgagcgtggtttagttgataacctgcaccgcacctcagtacag

SEQ ID NO: 65805 - DNA, 287 bp, Setaria italica
  Peptide Sequence Number=SeqID_131779
aggacagattaaagatgtgttacctaggaattaataatgttctgcttaagattctaggtcgtagcaggttgcccaaacattttttattacatttttttcttagagtgtcgtttgtaatttttgtttctaccttctctctccagggtctcttttcgaaagtatggacagtgtaagatcgggtctaagtatcaagctaatgcaggagggacggatgcgtggtcaagcctttgtgacatttcctacggttgaacttgctcaacgagctctgaatctagctcatggatacg

SEQ ID NO: 65806 - DNA, 231 bp, Setaria italica
  Peptide Sequence Number=SeqID_131780
aataatgcgcatgcgaagcctcaggaccagctagagcatggtgtgtcccctgcaccaagtatttgttccgaaaatcagaagaatcctacatcgactgctgaaccaattgctcccaagcttggtgtggactatccatttccaccacatcttgagtatgatatcagttcactgcttcattacgtcacattatcttttgatgttgacgtgaagatgcctagcctatttcttaga

SEQ ID NO: 65807 - DNA, 273 bp, Setaria italica
  misc_feature (207)..(207): n is a, c, g, or t
  Peptide Sequence Number=SeqID_131781
atggggaaaaggtcggcgcaatagtctgaatgtacaggtgcttgagattgaggaatttggtgggcagcattggtgtatccacctgacaaagctgctgcagcacagaaggtatcttcaggataattatttcgtcgcaattagtgaggtccaaatgctccaaagcaagggagttggaaaagaaggcactccaattcatcccccatcagntaaaattgagcatgggagcttgtacttttcatatagcctaagtgtcagctcttcaatccctggtgt

SEQ ID NO: 65808 - DNA, 438 bp, Setaria italica
  Peptide Sequence Number=SeqID_131782
aacggaacaacggtaagaaccggaaccaagaaagaatacgttaggacgaagaagacctaggaagaaagactacaaggaaaggtactcgacgtctacgaggcgcatctgtccaggacgaagagcaagtacctcgccgggaacttcttcagcttcgcggacctcaaccacttcccgttcaccttccacatcatgacggcgacgccgcacgcgtcgctcttcgactcgtacccgcacatcaaggcgtggtgggcgagagttatggcgaggccgtcgctgaagaagatcagcacccatatggagatcaagccatgacatgatcgctcaagccgacgacatgggacatgatttggatatgtagtaatgtagcgtgctcgcttcgttcatatcctttccaataatgttgtggctgcattattgcaggactgtgtgctgtgcgta

SEQ ID NO: 65809 - DNA, 215 bp, Setaria italica
  Peptide Sequence Number=SeqID_131783
tacatgctccatcgtccttttttcatggattaatttcatcgatcgtcatcaatcttttgactcgtatcagtagaaactgatcgatgtgctcggtacatgcatgcctgatgtttacttgcagccgttcggccaaatcccagcgtttcaggatggggacatcatgctcttcgagtcccgagctatctcaaagtatgtactccgcaaatacgccaagt

SEQ ID NO: 65810 - DNA, 208 bp, Setaria italica
  Peptide Sequence Number=SeqID_131784
ttttttgtttttttgttttttaggtttttgtttttgtttttgtttcttagttgtcattgtgccagcttccttgtatcattacattgctgtagctgcggctaacgtcctgctgcagatctttggcaaaggggtttgtcgttgtactacctcgataggtttgaagaaggtgcagagcagttcaggctaggcgttgcagctaatccgaacg

SEQ ID NO: 65811 - DNA, 433 bp, Setaria italica
  Peptide Sequence Number=SeqID_131785
tcttggtttgtatctttgctgcaactctccctttacagcaaggaataagttatgcatatcgcctcatcacaaaattgcttctcctcaggtacaactgtcacagctggtgtcgaaagatgcgggtcattgccaccacatttttagaattgatttttacacaaggccacttctcgaccatatgctttctagccgttgagctgtgcatcagtagatgttcttttcgatttgtgttttgacttcttctctttcttcttatgctcatcatgcgagcttcgatcccaacaatgtttcagcttgcggtcaacatacctcatatcctttaacagtaggtattttaagctggtcaaccaagtaatggattgcattgattgattgaacaaactgttcgactgtacaatcagaatgttgccttgagaagatagtttccaagtat

SEQ ID NO: 65812 - DNA, 399 bp, Setaria italica
  Peptide Sequence Number=SeqID_131786
tttaagaaattagaatttttaacaacaaaggaccaacttactcgaccaatatgctttctagccgttgctgcagataaaggtgttcagaagcaagaactgaatggaacatggtcaaacattgtgagttggcggtacaaggtgcttacagctgtgcatcagtagatgttcttttcgatttgtgttttgacttcttctctttcttcttatgctcatcatgcgagcttcgatcccaacaatgtttaagcttgcggtcaacatacctcatatccttaacagtaggtattttaagctggtcaaccaagtaatggattgcattgattgattgaacaaactgttcgactgtacaatcagaatgttgccttgagaagatagtttccaagttatctgcagacaatcagt

SEQ ID NO: 65813 - DNA, 360 bp, Setaria italica
  misc_feature (9)..(9): n is a, c, g, or t
  misc_feature (23)..(23): n is a, c, g, or t
  misc_feature (115)..(115): n is a, c, g, or t
  Peptide Sequence Number=SeqID_131787
ggtttgtanctttgctgcaactnccctttacagcaaggaataagttatgcatatcgcctcatcacaaaaattgcttctcctcaggtacaactgtcacagctggtgtcgaaagatncgggtcattgcctgagttcaatttggaccatttggaaacccaccacatttttagaattgatttttacacaaggccacttctcgaccatatgctttctagccgttgagctgtgcatcagtagatgttcttttcgatttgtgttttgacttcttctctttcttcttatgcctatagagatcatgcgagcttcgatcccaacaatagtttacaagacttaagaacggtaacaaaacaaataaacctaa

SEQ ID NO: 65814 - DNA, 448 bp, Setaria italica
  Peptide Sequence Number=SeqID_131788
ttgtttagggagcttttagcagctcttggcctttatctttccttgctaaggttactgaccgtttgtcattaactatatagagggacatgtactgaggatcagtaaacttatgtacacctgctagttcctttgtagtttcatcataattctcaatttacaatattttatttaaatttacatgtaatattgtaattctctgcatctcaattttcttcctttttttttcagattgcctctgaaggactaaagcacagagtctttgaggtctccttggctgatctccagagcgatgaggatcaggcgtacaggaagattagacttcgtgcagaagatgtgcaaggaaagaacgtgctcacaaacttttgggaatgatctctggttcgctgcacacatttgctttccctatgttctatatcatgtctctaaactgtttgtcattcttgttagg

SEQ ID NO: 65815 - DNA, 393 bp, Setaria italica
  Peptide Sequence Number=SeqID_131789
tactaaaggtaaggttacgtaagtaaaggtacttaactaattactaaagtctaattctttccccccttcctagtaacgttcttttatccggaaggtgaagatcctgaaagcgccaaagttcgacctgggaaagctcatggaagtacatggcgactataaggaagatgttggtaccaaggtggagaggcctgccgaagctgatgaagccatgggaggacaggaggttgctgctgcagagtgataatgctgttgggttactttgctgtcgtttatgtttagggatatatgtattagcactttcttaagttggtgagatgaacttcccagtcaatgtttgataccttcttggcgccacacttttgtcgagacctgttccgtggctgcatgatttcg

SEQ ID NO: 65816 - DNA, 415 bp, Setaria italica
  misc_feature (415)..(415): n is a, c, g, or t
  Peptide Sequence Number=SeqID_131790
aaaagacaacaagaagtactttagaaggtctccttggctgatctccagagcgatgaggatcaggcgtacaggaagattagacttcgtgcagaagatgtgcaaggaaagaacgtgctcacaaacttttggggcatggattttaccactgacaagctgaggtcactggtgaagaagtggcagaccctcattgaggctcatgttgatgtcaagacaacggacaactacatgctcaggcttttctgcattggtttcaccaaaagacgccccaatcaagtaaagcgcacttgctatgcgcaggcgagccagatccgtcagatccggcgtaagatggtggagatcatgacaaaccaagcctcaacatgtgacctgaaagagcttgtagccttctcgacctccttgccaatgacttcagggn

SEQ ID NO: 65817 - DNA, 253 bp, Setaria italica
  Peptide Sequence Number=SeqID_131791
acctgacggatctggcgatatctcatgttttaaagaggcttgaaactctttatgttagctagcctgttgtctcttatattgacaccatttctttgtgaagatccggcgtaagatggtggagatcatgacaaaccaagcctcaacatgtgacctgaaagagcttgtatccaagttcatccctgaagtcattggcaaggaggtcgagaaggctacatcaagcatccttccccctccagaacgtctttataccggg

SEQ ID NO: 65818 - DNA, 234 bp, Setaria italica
  Peptide Sequence Number=SeqID_131792
gagcatgtagttgtccgttgtcttgacatcaacatgctcaggcttttctgcattggtttcaccaaaagacgccccaatcaagtaaagcgcacttgctatgcgcaggcgagccagatccgtcagatccggcgtaagatggtggagatcatgacaaaccaagcctcaacatgtgacctgaaagagcttgtatccaagttcatccctgaagtcattggcaaggaggtcgagaaggct

SEQ ID NO: 65819 - DNA, 185 bp, Setaria italica
  Peptide Sequence Number=SeqID_131793
tagggatatatgtattagcactttcttaagttggtgagatgaacttcccagtcaatgtttgatacctgcttggcgccacacttttgtcgagacctgttccgtggctgcatgatttcgtatgaaaacttgaagaatatctgctgggttttccgctagtataattcaagttttcatacgaaatcatg

SEQ ID NO: 65820 - DNA, 135 bp, Setaria italica
  Peptide Sequence Number=SeqID_131794
gcgactataaggaagatgttggtaccaaggtggagaggcctgccgaagctgatgaagccaatagggaaggaacaaggaaggttagactagactagacaagaagtagaataaatagactagttagggttaacttta

SEQ ID NO: 65821 - DNA, 241 bp, Setaria italica
  Peptide Sequence Number=SeqID_131795
ttggctttggaaaaatgaatattacagcaagcaatgatcttaatgaagaaactatagatgctctaaacaagcaggtaatctacctagtacccattcaaaaaataaaatggttggtgatgtcgtagtatgtacatttttctcttgtaatgggcttggaaattttgtatattgttacatttgcaagtttgtgctaatgacacatgtgatccgatggtctgatatcattaactaaacaatatag

SEQ ID NO: 65822 - DNA, 469 bp, Setaria italica
  Peptide Sequence Number=SeqID_131796
atgctgcctaaacaacaaaatccacaataagttgggaacaaaaacatcaccttgtatggatgaagaagacccatgcagatttgcaccctgcggcgctgtccatctgaaactttatgcatgcgccattgcagatcaatgtctagcagatcaaccagcttctctcgcctaacaggatcaaccccgtcaactccaaaaatcatgtgctcagctgagaaatcgccttgtagtggaacatcgccagctgaaccaatagtctggctccaagagccccccaagtacgaaagttcaccattgcacaccagctgtgtatcatgaaaagctgaaccattgagaacacgaaccacatcccttcctccaaccatatgctttcccgcaagaatcttcaagagtgtagtcttgcctgatccatttgcaccgacgaggagacagcgggagccaggggcgatgcggaggttgaatcgcgcgaaga

SEQ ID NO: 65823 - DNA, 374 bp, Setaria italica
  Peptide Sequence Number=SeqID_131797
cctaatttgcttaatagtgctacgagaaagttaggttactcccaggaactgtccgaagcacattatggcgcagaaagtaacggccacacaagagtaacattcatatagaaattcaacggtaatatggaaaatacagcccgggcataaactttctcgtagcactattaagcaaattaggttactcccaggaactgtccgaagcacattatggcgcagaaagtaacggccacacaagagtaacatttatactagagataattcagctcttctgggcgctggcgccctccagttctttcctcagctgcagcgagaaatcatcgttaacatcatcgtcatcccagtcgtcctcccactgttggacggcttcattgcct

SEQ ID NO: 65824 - DNA, 356 bp, Setaria italica
  Peptide Sequence Number=SeqID_131798
gccaaggaaggcagacctgtccatacgtgtccataaaatttattgtgccatcattcataatagaaattcaacggtaatatggaaaatacagcccgggcataaactttctcgtagcactattaagcaaattaggttactcccaggaactgtccgaagcacattatggcgcagaaagtaacggccacacaagagtaacattttatactagagataattcagctcttctgggcgctggcgccctccagttctttcctcagctgcagcgagaaatcatcgttaacatcatcgtcatcccagtcgtcctcccactgttggacggcttcattgccttcttccttgtcgtcccattcttggta

SEQ ID NO: 65825 - DNA, 232 bp, Setaria italica
  misc_feature (175)..(175): n is a, c, g, or t
  Peptide Sequence Number=SeqID_131799
cggaggcactctgaatggcaagtcctgggagctgcaggagaaaaatagcgcagggagtgacgagatccccggcttcgtgttcctggcccacgtcgtcgatgtgatgtcgtccatgcactccagaatgtcgagcaggtaccgcgcctcgctgccgtaccgcaccaggccctttccncgtgctgatgtggcccgtcgcgttcgtgttcatgctcatgatgtgggctggtccaag

SEQ ID NO: 65826 - DNA, 484 bp, Setaria italica
  misc_feature (1)..(1): n is a, c, g, or t
  Peptide Sequence Number=SeqID_131800
naccttgctcagctccataaccactgtagccatcaatgttgacaaggcatgtgctctctgtgtttacaaatagactaatcgataaataatataattgtaaaagaggtactccctccgttccaaattgtaagtcgttttggcatttctaaatttgagtttttgctatgcacctaaatacacaccatgtctagaaaagccaaaaacgacttgcaatttgggatggagagagtattaagcaaaagaaacatgtagatgaattttcttagaaaactactacaaatatgtacaagtggaaccaaatgagaaccaaaataaataaataaatgaaacataaaagtgaaagcaccgctaaggaacactgctttttttttggtaaattgaagaatgaagatatacaattgaaagcatagttagtagaatatttttcacaacaataaggcacctctgccatggcattcgttatgacatctggaatgggctccgt

SEQ ID NO: 65827 - DNA, 432 bp, Setaria italica
  Peptide Sequence Number=SeqID_131801
ttccgttaatttgttcttactttgtacccttctactaaagtcctttcgtcctaccgggttccaaatccactgccaggggtagtcacgatgttcgccttctcaaggatctctgcgaacacatcccacgaattgcgaccagggaagtgcacccacacataaggagcgttcttggcaccatacacgttgaatccaagcgatgtaaatgtgtcgacaattatttcagtgttctccttgtagaagccaacaacatcatgcatagccttcagaccctctggagagaggcaagctaatccaccagcttgagcaatgtttgatgcgccattgaagcaagtgcagactatgcgattgaaatctttagcaactggatgtccatctgagaaagaagctccttggggacaacagtccaacctagacggacaccagtgaacccag

SEQ ID NO: 65828 - DNA, 321 bp, Setaria italica
  Peptide Sequence Number=SeqID_131802
taattaccatggtaaataatatcatagtgtataatgtttttaataaaatatacaaattgttatcgaaattgcaccttatagaccatgttattaatgtcctaaattgcttaggtcctaaattgggctattattgccattaaacttttttttgaagtaaaattggcattaaactcaaagtggcaagtgattaacaggtcaccagcttcaagtgcggcgggatggccctcggcttcacgtgggcgcacctcatcggcgacatccccctcgccgccgcctgcttcagcacgtgggcccagctcttcagcggcaagaaccccccgg

SEQ ID NO: 65829 - DNA, 270 bp, Setaria italica
  Peptide Sequence Number=SeqID_131803
tggagatggtgacataaatgttccaggctttgcatctctagagtgttaattgtttctctgtttcaaacttccttttcttacggaacatttgaattttgcagtggagtgattggatttttgctatgtgccaaagaaggtccaccggtcaacttcctgactcctataaatccaattgaaaaactggaaggggctacagaagctggaagggagatcagtattttataattcagaggtcagttttgttttatcagttacacagaatttcttgtg

SEQ ID NO: 65830 - DNA, 375 bp, Setaria italica
  Peptide Sequence Number=SeqID_131804
gcaatggcacaacacgatcatcatgatccgctgtcaacaacatggttgctggatactcgcaatggtcaccagagctttgttccaatggctcattaaatattctccccttcataatgtgcggagaccttgggaacaaagctctccgcacattatgaaggggagaatatttaatgagccattggaactcttcttccttatctgaacaaccatagtctgtagtccatgcatgaccaattgtgaacttgtggaaacggagcatgtccatgacaccaacatgagcaagagcacacccaaagagatcaggccgttgattaatggaagcagcaaccagacgactatgtattgaaggcggaagcaatggtggtcttctggttg

SEQ ID NO: 65831 - DNA, 260 bp, Setaria italica
  Peptide Sequence Number=SeqID_131805
ttttattgtttttgtctgttggcttggatgatcatctgcccaatagttgcagagtttggtcgaggggattgtctagtgcatggggtgatttttgctcaccatctccacattaattaagctcaataaaaaattattcggtccattgggcacctatgacggttgcgaccctgtcaataagttatattattgcaaaatttcttctcttcctcgaggaattgagggcttcagagagagtcaggaaatgcttccgtttgtcaagt

SEQ ID NO: 65832 - DNA, 131 bp, Setaria italica
  Peptide Sequence Number=SeqID_131806
attctccccttcataatgtgcggagagctttgttcccaaggtctccgcacattatgaaggggagaatatttaatgagccattggaactcttcttccttatctggactacagactatggttgttcagataag

SEQ ID NO: 65833 - DNA, 267 bp, Setaria italica
  Peptide Sequence Number=SeqID_131807
ttcaatacatagtcgtctggaactggtgtaaccactagaaatgaggaattcagcacaagcagcaaagtcatcaaaacaattttgtttcattgcaagtgctccagctttgtgccactcctccccatattctccgccgccccgaatgtttgaagtgcagtcgttgttttgcgctcttttagtgccaccccggtggtaaatttttggtccgattttaagatgagcctggtgtaaagcgacgccaaaggaaattaaccgatcgctcatctt

SEQ ID NO: 65834 - DNA, 249 bp, Setaria italica
  Peptide Sequence Number=SeqID_131808
ctccgcaaaatataccatgagagtccacggctcatttgtgttctatacacttctcccacatgtggtccttgcagaaccttaaaaccaattttgagcaaggttagttcctgaaagttgaaattcaactttggacaccatctcattctaaataaataaaaatgggtacccttgaagaaacaaattatttgtcaacttcataaatataaatctagacatgtcttgtgatttatatttatgaagttgacaaat

SEQ ID NO: 65835 - DNA, 233 bp, Setaria italica
  Peptide Sequence Number=SeqID_131809
ctcattgatgatcttgacatttgcaccattggactgaaggacctgaggatgaaactcagcatcattcctcaggagccaacccttttcagaggaagtgtaaggagcaacgtagatcctctaggtctgcacaccgatgaggatatctgggaggctttagacaagtgccagttaaagaaaacaatcagtgcacttcctggactccttgaatcaccagtgagtgatgacggcgaaaa

SEQ ID NO: 65836 - DNA, 249 bp, Setaria italica
  Peptide Sequence Number=SeqID_131810
ataccaaggtaaagaacaacatcatattcctcaatgttgtccggattttctagttccgtgttcatgtcctcccgcactttcagagctcgagctggcatattcacccctaactgcacacggaacctgaaagcagattaagggtaagcatgaatcgggagcagaattcatcctgcttataggactaataactatgtaggactaataactatgtataactcgtatgcatataagtaagaatatacagttcat

SEQ ID NO: 65837 - DNA, 244 bp, Setaria italica
  Peptide Sequence Number=SeqID_131811
gcatgctgtaatcaataatagactgggattccaggaacatacaatcaagtgatatttgcctgaaaatggtcagcagaagcatttaacagttaccacttacaagttatcatcaaatctaacaattataaaccatttattcatcaatattcaacatttattatcaatgaatgcatggtaaactaagttctcaagtaccaactgcttccagagcaaataatacagccagaattgtgaagcttaacca

SEQ ID NO: 65838 - DNA, 239 bp, Setaria italica
  misc_feature (236)..(236): n is a, c, g, or t
  Peptide Sequence Number=SeqID_131812
ttccaggctatgtaatatcagcagctcatccaaacattaagaacaaataaaacatacgctaataaatattcttgaagacaataccttcagctcagcttttctcaatgttttaatgacaaagcgttcatcctgtgaaagatagaaaatactgccacttttcccgggtgaagaaagctcttttagactgtcatcaccgcataaggacatcatgtaatctgcagcatcaatatgaaacnttt

SEQ ID NO: 65839 - DNA, 438 bp, Setaria italica
  Peptide Sequence Number=SeqID_131813
taaggttaaaagtaactaactattctattatttccttcaatgttgtccggattttctattccgtgttcatgtcctcccgcactttcagagctcgagctggcatattcacccctaactgcacacggaacctactctgatttaacactcatatagcatgcgtgttatagcaatccactgaaacatctcagtttcaagctggatcatcagatgatttgctaaacttttacggagtaagaacaggtaccttccagtcccaggcaaaacaagatcgacttcttcatagcctgcttccgatgcccgaaccatgcttcctcttatgtgtgaaccacctactgtagtacctggctcatgagcaacgagcagaaatccttccacgtaacttttctcctcatattgcaacagatcagtatctagaaattccactttcaaggtctgttc

SEQ ID NO: 65840 - DNA, 363 bp, Setaria italica
  Peptide Sequence Number=SeqID_131814
cgagcatgctagtattcctgtagtatgtctataataccaaggtaaagaacaacatcatattcctcaatgttcgtccggattttctacgtttccgtgttcatgtccgtcccgcacttttcgacacgttgtattcctgtagtatgtctataataccaaggtaaagaacaacatcatattcctcaatgttgtccggattttctagttccgtgttcatgtcctcccgcactttcagagctcgagctggcatattcacccctaactgcacacggaaccttccagtcccaggcaaaacaagatcgacttcttcatagcctgcttccgatgcccgaaccatgcttcctcttatgtgtgaaccacctactg

SEQ ID NO: 65841 - DNA, 276 bp, Setaria italica
  Peptide Sequence Number=SeqID_131815
ggcagcagtcggaatggcggttggttttgaatcctcagccttctcatgctccttgttttagcatcttattgttgatcaagttgtggagtgcaatgacactccggatcagagaagacaggtaaatgaccaacatcatgtcatttgttttcactgcaaaggctttaatcagctcatttacgttcagatttggaagcaaattaaatacatcctgcaaagtgaataacaaaaatactacaatagaattacaagtagggaagacttacccttacaaattaa

SEQ ID NO: 65842 - DNA, 167 bp, Setaria italica
  Peptide Sequence Number=SeqID_131816
atgagctctagattatacaatgtaattggtttcaattgccgttgaccttatcgtacatgaaacaaacatcaaaatgtccattgaaggtcaagacaattggttcaagcgcaaccatgctaacatgtcacacgtttcatccctttcctcggccatttagcatggttgcg

SEQ ID NO: 65843 - DNA, 246 bp, Setaria italica
  Peptide Sequence Number=SeqID_131817
tttgtttcatgtacgataaggtcaacggcaattggttcaagcgcaaccatgctaacatgtcacacgtttcatccctttcctcggccatttagctcccggcagcagtcggaatggcggttggttttgaatcctcagccttctcatgctccttgtttagcatcttattgttgatcaagttgtggagtgcaatgacactccggatcagagaagacaggtaaatgaccaacatcatgtcatttgttttca

SEQ ID NO: 65844 - DNA, 228 bp, Setaria italica
  Peptide Sequence Number=SeqID_131818
tgggcagctgcaggctgtgaaccacaacgatcacaaagaagggtccttgtgtgacgccgggacagcgcattagctgaatgaacactacgatcacatgataaacacaaggatgctgcatctgatctgcagtagatcattgacctttgtttcccacagaaatcacaaagagcagccattgtcctggacagtatttgggaaattccacaagctggtcagtcccactaccaa

SEQ ID NO: 65845 - DNA, 276 bp, Setaria italica
  Peptide Sequence Number=SeqID_131819
tggattcaactttggctgaaggtatgtagagcagtttttagtatgttggctggtgtgtgttgcatatcgtaatgtggatgaattttctgatgtgatgttgtacatgcagatgcccatttggaatgtcgactgtgccattgtaccttgtctggggctagtcagaggtacagttggggtagtcgtgtcgtccaagtcatggtatggtcccattggtctggtatcagggagtcgtcaaagtcagtcccagtcagcagggtcggtcctcgggctgcaata

SEQ ID NO: 65846 - DNA, 363 bp, Setaria italica
  Peptide Sequence Number=SeqID_131820
tattctagtctactaggtagttagttgtccttcgtattttatttgtagtttccttcacacgtgaggaccatccccaactccagtttgaggctgcgtgggcgctgaccaacattgcatcaggcacatcagagaacaccaaggtggttgttgagagtggtgctgtgcccatctttgtcaagctcctcaactcccacagcgaggatgtccgtgagcaggctgtatgggctctagggatgttgctggtgactccccaaagtgccgcgatctcgtgcttggccacggtggactattccctttgctgcagcagcttaatgagcatgctaaactctcgatgctcaggaatgccacatggactctatccaa

SEQ ID NO: 65847 - DNA, 178 bp, Setaria italica
  Peptide Sequence Number=SeqID_131821
acatccgcaaggccaagcgcgaggagagcctccagaagaggcgccacgtcgggttcgccgcctccgccactggcgccgtgccgccgatgggccactcatccgcgctccagcagaaggttcgcccccctatcccgctcgatcttccccgatctgatccgcccgcccgttcgttagggtt

SEQ ID NO: 65848 - DNA, 207 bp, Setaria italica
  Peptide Sequence Number=SeqID_131822
aaagaagagaactactaaagcagcaactcagtccatagcactattgtcctttctttgaaccatagctaaaacagtgaaccttcaaccaagacaaaaggaaaaggtgatacaccaagttctgaaaaatcagcaaggtgcgttgttcgtaggtagttggttactttaatttcttaaccttttgtttaagtttccctttttctttatttt

SEQ ID NO: 65849 - DNA, 243 bp, Setaria italica
  Peptide Sequence Number=SeqID_131823
tcttcgcctccctcgccacgcccgaccaggcatccgccatcatggacctcatcgaggagcgctgggaggagctcgtcggcgagatgcccgtcaagatatgcttcccggccatcgagccacgagtggcagattgtgacgggctgcgaccccaagaacaccagatggagctaccacaacggcggatcctggccaggtcagccactgtcttccttaattcggtgctctcgatcggaaggttgcttt

SEQ ID NO: 65850 - DNA, 242 bp, Setaria italica
  Peptide Sequence Number=SeqID_131824
attctcaaatgatgatagtaacctgccgctgctattgttcaactcgagctcttccaattttggaagcctgtcaactccagaaatagactctgtgctggtgaaagacaaaaccatcttctcaagctcacaagctgcttcatcctcaaaggtgatatttgtcaagtccgaaccctcaacaaaaaggcacttgagacttatgaatctgtcctttttgaaggtgagcttgccctcggtgcagtcaa

SEQ ID NO: 65851 - DNA, 446 bp, Setaria italica
  Peptide Sequence Number=SeqID_131825
gtgctttgtctgctcccatctcgcatctggtcataaatcaggggatcaaacagaaaaggaatgctgatgtatatgaaattttacaaagaacaaggttttcttccttgtgtgctgctggtcggccacaaaagattccttcacatgagtatgtataggccactttggccccatgatgttgtgttccttgaaaattagttactcctaagtcgaattttctggtttggcgatcttaactatcgcattgacctgctggatgctgaagtacgacatctggtggctatgaagaggtgggatgatctcttgaagtctgatcagctaacaaaggagctaataagtgggagtacttttgttggttggaaggaaggtttgattaactttccaccaacttacaagtatgaaagaaattcaagcagatatgttggtgagattcataatgaagttggtag

SEQ ID NO: 65852 - DNA, 222 bp, Setaria italica
  Peptide Sequence Number=SeqID_131826
ttctagcatgattttgttagatgaatgttttgattttgaggggttaatcagatttcagaatttcattttggagcagtcgaattttctggtttggcgatcttaactatcgcattgacctgctggatgctgaagtacgacatctggtggctatgaagaggtgggatgatctcttgaagtctgatcagctaaacaaaggagctaataagtgggagtacttttgtt

SEQ ID NO: 65853 - DNA, 455 bp, Setaria italica
  Peptide Sequence Number=SeqID_131827
ggaaaaaactattcttttcaacttcatgatattatgcgtcaaatatgcatatcaaaggcgagggaagaaaaccttgttcttacactggaggagggatgcagtttgtgcagcacaaatggtacaatacgtcaccttgccataagcagcaactgggaaagagataaggatgcgtttgagacaatgctggacttgtcacacctgcggtcattgactgtgtttggaaactggggatcatttttcatttccagtaaaatgagattccttcgagtcttagatttggaggacacttttcggaatatctgatcatgaccttgatcaaatttgcaagctctttcacctgaagtacctttctctgcgaggatgtgagaatattcaccatctacctgattctatagggaatttgaggaacctacaaacattggatgtcagtggcacacgtatatctgaattgccgg

SEQ ID NO: 65854 - DNA, 376 bp, Setaria italica
  Peptide Sequence Number=SeqID_131828
tggtaaaaacttatttctttttctaactttctattgtattatttattgtcgttctaaattattgtctattattcaaaggcgagggaagaaaaccttgttcttacactggaggagggatgcagtttgtgcagcacaaatggtacaatacgtcaccttgccataagcagcaactgggaaagagataaggatgcgtttgagacaatgctggacttgtcacacctgcggtcattgactgtgtttggaaactggggatcatttttcatttccagtaaaatgagattccttcgagtcttagatttggaggacacttttcggaatatctgatcatgaccttgatcaaatttgcaagctctttcacctgaagtaccttttctcc

SEQ ID NO: 65855 - DNA, 248 bp, Setaria italica
  Peptide Sequence Number=SeqID_131829
ttttttttttttgtcaggtaaatatatcgtggtaaaataaataatagcagtaaatttctcaagataggtaataatcttttcaaataaaattacatatagaggtgtgcacaatgatgactagtacttggtgacaccacaattaaagggaaattaaaatggaacgcaaatgcccggatctacggccgggacttgaattacttgagacattcatgctgcagtaatacgcatggaccaattatggcttgcat

SEQ ID NO: 65856 - DNA, 132 bp, Setaria italica
  Peptide Sequence Number=SeqID_131830
gttgatacagacgggatcacaaattgcagagacccgcactttgcacgtcgggaagatatccacaggaagctggatatggtattgtagtattcgtattgtacggttcttattttgttcttacttacttattta

SEQ ID NO: 65857 - DNA, 243 bp, Setaria italica
  Peptide Sequence Number=SeqID_131831
gcgccgtggaggccgccatggctgcagggaagggaggatcggattgctgggggaggtgtcgagcgaggcttctgtcgctggcgtccatatccttagctattccttcttagcctgaagttcagcattcttgagctttcttttggtttcagctccaagcatgtttgcgctccattccatatactttgccaacccctataagaaagctgacaataactgctcatgagtaaaaattcagaaatattg

SEQ ID NO: 65858 - DNA, 461 bp, Setaria italica
  misc_feature (370)..(370): n is a, c, g, or t
  Peptide Sequence Number=SeqID_131832
gggtaggataatgtggcactcatgcagttcctagtgctcctcaagtcctcatctcataaccgtcatagaaacccgtacacattttctatttcaaaattgaaatatgataataaagttttcatgttgaaatcaatcttatatttccgcgtggcccttgttgtaggtcaaggtgaaactagatgaacttcaggggcccaaaaggtgaatagctttaaagattccatcactaataactgttgatggctaggttccatcactagtttgtgcgtcggaatgatttgtggaaagaagagcttgtcatctttaattttatggaattgcgtctaaattcttgtatcgtgcacacattttacatttaatatgtaaaacntgcagcgcaatattggaaaaaaaaccctctagaagtcttgtgatgcattgagctaggtcttttttactgttccttgtatccttgcaaatga

SEQ ID NO: 65859 - DNA, 485 bp, Setaria italica
  Peptide Sequence Number=SeqID_131833
agggtaaggaataaatagtaggacaactacaatgcagttcctagtgaactaacctaacaaagtacctacaatactacaataaaccgtcaataagaaaacccgtacacattttctatttcaaaattgaaatatgataataaagttttcatgttgaaatcaatcttatatttccgcgtggcccttgttgtaggtcaaggtgaaactagatgaacttcaggggcccaaaaggtgaatagctttaaagattccatcactaataactgttgatggctaggttccatcactagtttgtgcgtcggaatgatttgtggaaagaagagcttgtcatctttatttatggaattgcgtctaaattcttgtatcgtgcacacatttacattaatatgtaaacatgcagcgcaatattggaaaaaaaaccctctgaagtcttgtgatgcattgagctaggtcttttttactgttccttgtatccttgcaaatgattt

SEQ ID NO: 65860 - DNA, 458 bp, Setaria italica
  misc_feature (444)..(444): n is a, c, g, or t
  Peptide Sequence Number=SeqID_131834
ttactacctttacccgaatttaccagacatgtccccaaagaaagtttcatcttctcataatgtttatgtgtctcctttgcggcaaaccaagatggatctgctgctttcaccaagttccaggagtttttatgcatgcattggtgaaggcacccatgcttatcagagcccatcgaaagatttggctgctataaatagccgcctaaactagtatgatagcttaaaatgacactttctatgtacaacaagattttatgtttacaacactaattggcatcacctcattttgtgttaattctgcagtaatgggcggagaataaacactcgaataaacttcgacatggttagcgactcagtggtagctggtagtctgggccagccaaatggtggttctacctccttggatcctgcagctgcatttagctcccatcaaagaagagaaaaccngatacttgatcaaa

SEQ ID NO: 65861 - DNA, 417 bp, Setaria italica
  Peptide Sequence Number=SeqID_131835
acttcactctatgctgcagttccttctccagtaacacattcttctctgcgccacttgtcagatggatctgctgctttcaccaagttccaggagtttttatgcatgcattggtgaaggcacccatgcttatcagagcccatcgaaagatttggctgctataaatagccgcctaaactagtatgatagcttaaaatgacactttctatgtacaacaagattttatgtttacaacactaattggcatcacctcattttgtgttaattctgcagtaatgggcggagaataaacactcgaataaacttcgacatggttagcgactcagtggtagctggtagtctgggccagccaaatggtggttctacctccttggatcctgcagctgcatttagctccccatcaaagaagagaaaaccaga

SEQ ID NO: 65862 - DNA, 390 bp, Setaria italica
  Peptide Sequence Number=SeqID_131836
atactcaacaattacaagagagagccacaatgcaaaccagaagtttttttgagtatctatgttgggagtaggaatcgcaatggggtactaggatcacgccatgttgatatcattaccttttacaacgaggtgtttgttccagcagccaagcctttcctggtgtcattcatcggttctggtactcgtccagaagacaagaagaatgctaatagccaaatttttggatcacccaagccttctcctttcccgaatttaccagacatgtccccaaagaaagtttcatcttctcataatgtttatgtgtctcctttgcggcaaaccaagatggatctgctgactttacaaccaaagttaccaaggaagttttaatagacaatagacaattaggta

SEQ ID NO: 65863 - DNA, 199 bp, Setaria italica
  Peptide Sequence Number=SeqID_131837
ccggcgcctcggcctgcacctgccattcgacgacggccacgagagggcgccgctcctgctgccgcccaccaagaccatggacgctgccgacgagaagggcgagaggcccgacctctccgaggatacggcccaccagattagcgttggtacgcgacggacgacataaccaccgtttccttctttcttgttacccctgcat

SEQ ID NO: 65864 - DNA, 244 bp, Setaria italica
  misc_feature (204)..(204): n is a, c, g, or t
  Peptide Sequence Number=SeqID_131838
cggtggcgggcgcgggcggcggtggcgtccccgtgccgtcccccagcttcgcgcgcgcggcttgagtgtggggctgtgggcgtggccttctgggtgtattagcaataatgattagagaaatcaggatcagtgttgtgttgtttgtaatggttagaaatttagtcgtaaatgtaactcctggacatggggggcagaatgggaagngtaataagagtctcccgttaggttaaaaaaaaaaaaaaaa

SEQ ID NO: 65865 - DNA, 400 bp, Setaria italica
  Peptide Sequence Number=SeqID_131839
aatgagttgaggactgcagtgaatgctcatgcatgtggaagacacctgcagaaaggtgcttcccgtggctcggcggttttcgtccatctgaacttttaaagctcctagcgaatcacctcgagcccctaactgagcagcaattgctgggattgaccaacctccagcaatcttacccaagacaaggacaagaaggaatagacgttgtcccagggcatggaggcattgcagcaatcattggcagagactttggctggatctcttggtccatcaggttcttcaggcaatgtggcaaactacatgggtcagatggccatggccatgggcaaacttgggacacttgagaattttcttcgccaggctgacaatctgcgacagcagacattgcatcaaatgcaacgga

SEQ ID NO: 65866 - DNA, 186 bp, Setaria italica
  Peptide Sequence Number=SeqID_131840
ccatgaattatttgttaattgcatttgtgatttttcatatcatagacgttgcgacggcttgcccagaatcgtgaggcagcaagaaaaagtcggctgaggaaaaaggcatatgtgcaacagctagagagcagtaagctgaaacttgctcaattggagcaggagctccagaaagctcgccagcaggga

SEQ ID NO: 65867 - DNA, 234 bp, Setaria italica
  Peptide Sequence Number=SeqID_131841
tttgcatgtatgtttaccgagtgcttggaaaatggtacctttatgctgttattttgactctgctaaatattacttgcagggaatattcatttccagctctggcgaccaaacccatgccatgagtggaaatggagcgttgacttttgacattgaatatactagatggctagaggagcaaaataagcagataaatgagttgaggactgcagtgaatgctcatgcaagtgatagtga

SEQ ID NO: 65868 - DNA, 243 bp, Setaria italica
  Peptide Sequence Number=SeqID_131842
tggcaatgggtcagatagcctaccagactggcctgtggatgagttcttcaataactcagaatatagtcccaacttcagctttgtggagcatggttcttctgagagtgacaatgctaagctggggagtgctgggggatctccacaatgccgtctagctgaaggctttgttgctgaggaactattaaggaccaaggtagacctaggaattaggtacaaacgaatagaaataataatagaagaacc

SEQ ID NO: 65869 - DNA, 271 bp, Setaria italica
  Peptide Sequence Number=SeqID_131843
aactttctgggcaggttcctggctgcttctcacttactgaatttgagctctctgacctcagggaacgtacacccgcaaagttactgaagtggttccttgcgtacatgccatagggactgctctgcgaagcctcacctttataccccggcggcgtggcggcgggggcggcgacgggagccatgtagctcgcgggaggctccatccacgacacgccgccccagtccccgcccgcggcgtagacggacggggcggtgggcagatcacggccggg

SEQ ID NO: 65870 - DNA, 427 bp, Setaria italica
  Peptide Sequence Number=SeqID_131844
cgatgccttggtatccctaatactaagaatttcaatgaaatcacatccatcgaggaggcgagaggactctgggagaaaatacaagcacgtcaagggctgaacaagtggcggccagacctggaagaagagtatgaagatcaagaaggcaacatctacaacaagaagacctacactgacctgcagcggcaaggcttgatctaaaattctagttcaaggggctcctgctactgaaatgttcaggctgtttggaacaatatttaccaggatagttgctgtcttcaggtgtattggccgttggtttggcatacactgacattgtagatcgtacaatatcggaatgcccccctcctcttgagcagttctctggaattgttattccggttattcgttgttctattgtaatttaaaattacctatttacgttcta

SEQ ID NO: 65871 - DNA, 272 bp, Setaria italica
  Peptide Sequence Number=SeqID_131845
cggggttgggggtgagggggaaggtggtggtggtggcgacgagggcggcgacgagaaagagaaagaagagagagaaacggaaatggaaaagaaaaaaacaagagaggcaaaaggaagttgaagacagaatgctcgagaaaatcacaaagaagttccaggcagagaaagctgagaaacaaagcaaacaaattaaactttgttcaaaggtgcctccaagcagcaaaagaagtttctttggaggtggtggacctagcagtctatccaattccaac

SEQ ID NO: 65872 - DNA, 389 bp, Setaria italica
  Peptide Sequence Number=SeqID_131846
tgtctattctttctttcgttggggtattgggcagcaacgactacctcaacaactacttcatgcccaattactacgacaccgcgcggcggtacagcccgcgggactacgccgcgctcctcctccagggctacgccgcccagatcaccgagctctacggcctcggcgcccgcaagttcgtcgtcgccggcgtcggccagataggctgcatcccctacgagctcgccaggatgaacaacgacaaccagcccgacaccccctcctccgttggtagcgaagacatcgccaccgccaccgccgccgctcgccggagaagagcaacagggagaggagagggggacgcgactccaggagcctccgcgacctcccgcccgatccccgcaccagccctt

SEQ ID NO: 65873 - DNA, 151 bp, Setaria italica
  Peptide Sequence Number=SeqID_131847
ggacttcgcggaggtgtgcttcaaggagttcggcgaccgcgtcaaggactggacgacattcaacgagccgtagccgcgctgcgcgtacgtccacggctcgttgaatgtcgtccagtccttgacgacattcaacgagccgtggacgtacgcg

SEQ ID NO: 65874 - DNA, 205 bp, Setaria italica
  misc_feature (138)..(205): n is a, c, g, or t
  Peptide Sequence Number=SeqID_131848
tacgacggtacttagacggaatagggaccgggtgtgtttgcttgagtgattgctgctgtgtgtgcctgtagtctatggggtcgctgttgctgtcgtggagtgtgctggcaggaaatgggaataagagcaattccaagnnnnnnnnnnnnnnnnnnnnnnnnnnnnnnnnnnnnnnnnnnnnnnnnnnnnnnnnnnnnnnnnnnnn

SEQ ID NO: 65875 - DNA, 421 bp, Setaria italica
  misc_feature (60)..(60): n is a, c, g, or t
  Peptide Sequence Number=SeqID_131849
ctggacattcatggactgcttcgagtggggcgacggctacctggatcgcttcggcctcancttcatcgaccgcctcaatggcctcaagcgctaccgcaagcagtcaagctactggatagagaacttcctgaagcggtattagatggaacgaagatcgccgcgcccactggtacgaggtccatccacatcgtcgatcgatccccctgttctttcagcaactacagctggtgccgccgcgtcgttgttgccagtggcacttaatctgttcgcggtcttgcggatgggccgggtgtgtttgcttgcagagagtgattgctgctgtgtgtgcctgtagtctatggggtcgctgttgctgtcgtggagtgtgctaggacaaggaaaatagggaaataaagaagaacaaaattaccaaagaaaaaaa

SEQ ID NO: 65876 - DNA, 293 bp, Setaria italica
  misc_feature (228)..(293): n is a, c, g, or t
  Peptide Sequence Number=SeqID_131850
agtgtgagtagtgaacttgtagatattgcttgttctagtacggatcaagcatagatgcagtgaacagcgctccatctatgcttgatccgtactagaacttgtagatattgcttgttggcttgaggggagctcacgtaaccacgcctgatctttcttttggtcctatcttcttttgttgatttgttcgttattagagattgaatgggcttgataattaactattaagtnnnnnnnnnnnnnnnnnnnnnnnnnnnnnnnnnnnnnnnnnnnnnnnnnnnnnnnnnnnnnnnnnn

SEQ ID NO: 65877 - DNA, 417 bp, Setaria italica
  misc_feature (316)..(316): n is a, c, g, or t
  Peptide Sequence Number=SeqID_131851
ttactttacctaccaacaagtaatctttactgagtgtggaatccgtacccaaaagcctatacttgagcatcatacaaaaagtgtaagaattattggaggatgtgtcacagtattactaagatgatcatacatgagccacagacctgggagacaaaggaatacgggggtaggttgagctcaacactatccgatattttattgcttgatttcgatatgcgataaaaccaaccatttagtagtcactgtgcaatcatttgcttgagcagttgtcttcacacgattagttctacatgtactcgtaggtatataagccttnaacatgtattagaagagtcagagtgcaagtgctcaaaatattgatgaactagatagtcaggacaatcaagacagaaaagtagtaactaaaaaaattatagt

SEQ ID NO: 65878 - DNA, 240 bp, Setaria italica
  Peptide Sequence Number=SeqID_131852
gtgctacagcttatggaatcctgatctttctgggctcattatttggggatcttgttgaatccctgatcaaacgtgatgctggcgtgaaggactctggatcactcattcctggtcatggtaagctctgttaatcccctgttacctcctgttcattgcatggactgctttgaaatgatcctgctttgagagaatataatcataggaaggggaaatgctagttttccgggtggtattcattga

SEQ ID NO: 65879 - DNA, 210 bp, Setaria italica
  Peptide Sequence Number=SeqID_131853
ccatatttagtagcaaacatcatttgaacttgcatcagttcaggaagatctgcacaccttggagcagcaaaacagatactggatattgcttctttgagatcgataggacactccctgaagcagatagaaacaacaaagaacacagatcagtcacagtcatctgtaaatctacagaactttgcaatacatttttttagacggtaatgctac

SEQ ID NO: 65880 - DNA, 467 bp, Setaria italica
  Peptide Sequence Number=SeqID_131854
taaaaaattttaaaaagtaaaacgaaactaaagaaataagttaagtaagaacaataacaaataactttagaataccgtcatctcagtttcttggggaaagcttatgaggccttccttgtgcttcatgagatgattgagaaagacattactccaaatgacatcactgacagccttgtggttgattgtctctgtagagaagggaagttcttggttgcacttagttatttaaaccgatctctagaagatggtctctctagatctgcagtatctagtattgtgcgaggtctcattgctggcgggaagcttcatgaattgcatacactaatcagatggattcttgggcaaggtttcatattagatgtatatatgtaccaggaattaataattgctttttgtaagaaggatactgtcgaggtactgaaatgtacaaagtgagtcacacattggaaagatgctgagactgacat

SEQ ID NO: 65881 - DNA, 238 bp, Setaria italica
  Peptide Sequence Number=SeqID_131855
ctgcggctgatgatctccttgggaaaagtctgaatgccattaaaggtgcacaggacaagataaggcatgcagcaagtgaaaggaggcagtcattacagttgcaactcttagaggacatagctaatcaacttcaacaaatcagtggactagactacaaaccaaaaacaatatttacacagccaatcgtgttttcgcgacacaatattcctctcctagcttttctttaggtaagtactta

SEQ ID NO: 65882 - DNA, 353 bp, Setaria italica
  Peptide Sequence Number=SeqID_131856
taattctttgtttcatctggggaaagaacaggaggctgttaggcaagctatttaaaggagatcagcttgtgaggagaggaatattgtgtcgcgaaaacacgattggctgtgtaaatattgtttttggtttgtagtctagtccactgatttgttgattcatcaagttttgcttgttgttttaagtaaatgtggataattattttgtacatgtatataaacaaacaggggatccattttgctgtttgtaaccctgtgatatatgtgtgctgcgaactgtataatcctggctatatgagttgtgttgggggaactatgggctggtataacatgacagaaatgaaaaggtttaaacc

SEQ ID NO: 65883 - DNA, 293 bp, Setaria italica
  Peptide Sequence Number=SeqID_131857
tgtcttcctaggtactattggttgtcgtcgggtcttctagggtccgtagtttcccctaagtcttctaagtcttcgtcgttacatctccgtctacgagagcttcctcaacctcatcaccgacccggcaaagttcgggctggagaacgtggaggaggggtgctgcgcgacgggcaagttcgagatggggttcatgtgcaacgacgacgcgccgctcacttgcgacgacgccgacaagttcctcttctgggacgcgttccaccccacggagaaggtgaaccgcctcatggcaaacc

SEQ ID NO: 65884 - DNA, 246 bp, Setaria italica
  Peptide Sequence Number=SeqID_131858
tgtcttcctaggtactattggtgcgcgggctcagggccgagttccccaagctcaagctcgcgtacatctccgtctacgagagcttcctcaacctcatcaccgacccggcaaagttcgggctggagaacgtggaggaggggtgctgcgcgacgggcaagttcgagatggggttcatgtgcaacgacgacgcgccgctcacttgcgacgacgccgacaagttcctcttctgggacgcgttccacccca

SEQ ID NO: 65885 - DNA, 299 bp, Setaria italica
  Peptide Sequence Number=SeqID_131859
acacacgcacttaaagagttggaacttatcaaggaaaacaacatgaatgaaattaaaagatttaacaaggaaagacgccatgatttggtggagatgctgaagggttttgtatcagatcaggtagaagttctcgacttcattacatggtttatttttgggtggttgtttgcagttgacactaaacttttaatttaattctaaaaaaatcaaaagattaagttaattggttcaagcagcagtatctttgtaactccaaattttttaacagttcttacctgttattttaccaaaaaggaaag

SEQ ID NO: 65886 - DNA, 225 bp, Setaria italica
  Peptide Sequence Number=SeqID_131860
ctcagtcgcactagttcgatggcggctggttcccagctctgccgcgtctcggaggagatcccactggcgtgggcggctgcctgccgcttccgcgcccaccgcggccatgaccgccgccgccatctagcgccaccactccttcttaccactcgccaccgcagggatcacccaccactccgtcctacccctcgccgccgtcgagcgccaccacccctcctaccacca

SEQ ID NO: 65887 - DNA, 442 bp, Setaria italica
  Peptide Sequence Number=SeqID_131861
ctgaaatctaaaaggcagacagctgcataatgttttggcaaagagaaaataaactagtatggtgtgaagttgtcacctttgttgagtgcctggatttgccactgttatcaacaccagacttattctccctttgcttccggtcaaccattgcttcatacacggatggatgatcattgatcatgttaaataagcgcttcctgtcgttgccgttgaggcgggcggcgaagaagtaggcgacggagacgagccaggcgtcggagtggacggcgacgagcgacagccagtcgcggcgcttcatgccgtccctggcgaagttgatccccagcgcgggctccggcatctccggcggcacctcctccgccggcagcgacacctcccagctcccgttcgggagcccgttactaggtctactaggtttcttcctttcttcttgtcttaactt

SEQ ID NO: 65888 - DNA, 254 bp, Setaria italica
  Peptide Sequence Number=SeqID_131862
ctttttgttctgacattttgcagtcataaggttggaggtttatagtgtccatgacttcttcagtggggagaaacccatagtctttgaggatagatgaaacatgttccaagacctccattcgggacacctgcatgacatacaaactgttgcataaggtagaggaaaataaacagaaaaggcaatacgttgctaacctattgtgcatacaatgtagcgatcatataaacatggtaccaaagagatgatggaaagta

SEQ ID NO: 65889 - DNA, 278 bp, Setaria italica
  Peptide Sequence Number=SeqID_131863
aactaacctaaaccaaagtaactaagaaaaaataactaactaactacaagaatacgaataaagaagaaagggaagaaataacaaactgttggggagtgcttgcgtcgggaatatagaatggtttgccatgtcatgcgtggtgacttcagccgtgacttctttgagggatgcagggctatactggtagataaagatcgaaacccaaagtggatgcctccaaggttggaacaagtgcatgatgaggcggttgaacaatatttctccagaatcgatgaccc

SEQ ID NO: 65890 - DNA, 342 bp, Setaria italica
  Peptide Sequence Number=SeqID_131864
tcgttctaagttcttaagttaagtttacctttcttatttgttattggggtcctattgttgttgtaccttctatggtctgatccagaggatgctgtagatggttggggattgagtcctcgaggtgcaggattcctctttggtggaaatgtagtttcatcatttaaccactcaaacaatatagattatatttgccgtgcgcatcagcttgtcatggaagggtataaatggatgttcaacaacaagattgtaactgtatggtctgctcctaattactgctacaggtgtggcaatgttgctgcaatcctagagctggatgagaaccttaataaacagttccgtgta

SEQ ID NO: 65891 - DNA, 360 bp, Setaria italica
  Peptide Sequence Number=SeqID_131865
gaaatgtaatttgaaggtcattggcactgatgtggaacgttgtctatcgatgtgcgttgaggagaggttacgaggatttataagcgatataataaggttctctaaacagagggttgatgttgaaaagtcaaggcatcgtttttatccgttatcctcagatgttcgcagtcatattatgagggtgaaccgagaagctaaagaacaatgggagaaaaagcaagctgaagatgctgagagaataaggaaacaaaatgatgttagttctgcatgatgttctagttttcaatctccgatggcataattcatgattcaaaattatctaaacttcttgaaataaggatttatttcatcttttactgg

SEQ ID NO: 65892 - DNA, 350 bp, Setaria italica
  Peptide Sequence Number=SeqID_131866
caaggagcaggtaggcattagggtaactaactattatcttaagtatcatgcatgctaaatagtattttaacatcagggattggggatttgatacatgtatatctttactttcgtgctgcccttgcgagggtaggatatctggaatagtagactctcctaacgcagtgacaactcttgccatccctacagcaatatttgactaggtctgctgacaactgctcagcccaacgcaattcctacttgtttaaacttcagtgttaatattcaattctaaggcaggatataaaccaaaacgcttgagcgggagaccacttccaggaccaaattgagaaggcttccagatcttctga

SEQ ID NO: 65893 - DNA, 262 bp, Setaria italica
  Peptide Sequence Number=SeqID_131867
gtgagaggagaggcggcttgccgtgcggttctgaatgccattgagtacctttccagatttgggtactccaaggagcaggtatatctcttactatcttgctgtccatgtgagggtaggatatctggaatagtagactctcctaatgcagtggcaactcttgccatccctacagcaatatttgaccaggtttgccttcaacagaccaacaccaatttcctttgctccttaaaattattagattagttaaaatatttttttatag

SEQ ID NO: 65894 - DNA, 249 bp, Setaria italica
  Peptide Sequence Number=SeqID_131868
attagctagcagatctaaagtacatctttccacctgtttggtagaagtgccatgtttgtaatgaatacaattacaatgtcatgcagatccaagagggaactgctgaatggcacaaaattgcaaatggagcagctagaaccattcctggaagggagaatggtgggaactgtgacataaagaatctaagcagaggttcaaaagtttatctaccgatatttgttgaaggagcaaaccttagtactggtgata

SEQ ID NO: 65895 - DNA, 243 bp, Setaria italica
  Peptide Sequence Number=SeqID_131869
acaccagaggccccttgctaatttaccgacccctgagaactgcttacttggaaaggcaataggaaccaccctctatctctactaatagtgttgcttcaagatttgtgtctttcaatctgcaaagggttgaatcgcatctgtatgatttttttttgacctatggcaccagtaatgcagttctatatgcagatattgtctagcagatctgaattatatcttgctatctgtttctttgaagtgcca

SEQ ID NO: 65896 - DNA, 406 bp, Setaria italica
  Peptide Sequence Number=SeqID_131870
gtggcgcgtcgccgacctggtcgccgccgcggtggggctctacgtcagggacggccgccgcccgctgctgccgtccggcgacccgtcggcgttcgggctccactactcccagttcagcctgcaaggcttggacccggacgagaaagtcgtggagctggggagcaggagcttcttcctctaccccagggctgcggcggcagccgcggcttcctcgtttagttatccatcaactgaagccagcaagccatggccacccctgcggagaggccaaacatgctaccaccatgtcttggcttcatgcacttctggccgctgttgtagcgtagtcttggatcggcagacagcacctgtaaactgtaatctacctacatagattcatagattcatagattgtatagttgtgctt

SEQ ID NO: 65897 - DNA, 435 bp, Setaria italica
  Peptide Sequence Number=SeqID_131871
agctgcggcggcagccgcggccttggggtagaggaagaagctcctgctccccagctccacgactttctcgtccgggtcccaagccttgcaggactgaactgggagtagtggagctggggagcaggagcttcttcctctaccccagggctgcggcggcagccgcggcttcctcgtttagttatccatcaactgaagccagcaagaccatggccaccctgcggagaggccaaacatgctaccaccatgtcttggcttcatgcacttctggccgctgttgtagcgtagtcttggatcggcagacagcacctgtaaactgtaaataaaactacctacatagattcatagattcgatagattgtatagttgtgcttggtcagctcatgggcgtgcatatcactatcttcagtggttgcttggacgcaaatgttagtcagg

SEQ ID NO: 65898 - DNA, 423 bp, Setaria italica
  Peptide Sequence Number=SeqID_131872
aaaaagaacaaagaactaagaacggaaggttacaataggaagacaataggttgccaccttggttagctgcacaatatgctcaatacctggaagtggtctcaggtcactggaatcaacgtgggaaacctgccatgcaaaattttttgcagaaggcatcagaaaaatcagcacaggcgaagaaatgggctgaacctcatattgagactgctaagacgaaatggattccttttgctaaggaaaattggttgtcctcaagaaaaacgcagaaccttatgtacaaaagatctcaacaagatccgtggagctgtatgagtcatcccgggttgctgtgacacctcatgttgtcaaagttaagaacttgctgatccttactaccaggaagccaagaagttttccaagccttacatagatcaagttgctgag

SEQ ID NO: 65899 - DNA, 404 bp, Setaria italica
  misc_feature (367)..(367): n is a, c, g, or t
  Peptide Sequence Number=SeqID_131873
agaatagaaggttagacaagactaagaaagacaaacaagactaaaggacaaagcagctgacggaggttcatggagcatggttgccaccttggttagctgcacaatatgctcaatacctggaagtggtctcaggtcactggaatcaacgtgggaaacctgccatgcaaaatttttttgcagaaggcatcagaaaaatcagcacaggcgaagaaatgggctgaacctcatattgagactgctaagacgaaatggattccttttgctaaggaaaaatttggttgtcctcaagaaaaacgcagaaccttatgtacaaaagatctcaacaagatccgtggagctgtatgagtcatcccgggttgctgtgacncctcatgttgtcaaagttaagaacttgctgatcctta

SEQ ID NO: 65900 - DNA, 238 bp, Setaria italica
  Peptide Sequence Number=SeqID_131874
gttatccaaaaggaaagtgatgacattaagctttgcagtcagctcttctaccttcttctctgcatcgttagccagagaacagcacttgagtctagggctaacgatgcagagaagaaggtagaagagctgactgcaaagcttaatgttatccaaaaggaaaagtgatgaacaaaaagcgcaaaatcaagaagacagaacgtgctcttaaaagttgctgagggaggtaattgatgaggtt

SEQ ID NO: 65901 - DNA, 229 bp, Setaria italica
  misc_feature (49)..(49): n is a, c, g, or t
  Peptide Sequence Number=SeqID_131875
acaattcatagctttaagcgcgcttcaggagcgtattcacatggagggnaaaccccctagtacttccaaccacacatcacatacagatattacgaatctatgaccatatgattatgtgttcagtgattcgtaatatctgtatgtgatgtgtggtcatagaccacacatcacatgcagtggtctatgaccatatgattatgtgttcagtgattcgtaatatctgtatgtg

SEQ ID NO: 65902 - DNA, 140 bp, Setaria italica
  Peptide Sequence Number=SeqID_131876
ctcggtggaaggcagatgaagtggcccgctggttaaattacagagggcgggacatattgacatccttcaggcccattgtttatgacaacacggtacccatttgccaaaccttccgccttccgctcctcctcggggcggag

SEQ ID NO: 65903 - DNA, 223 bp, Setaria italica
  Peptide Sequence Number=SeqID_131877
cctatcccctgtgtgccttgcatatcccctgttgcgtgtctcagagtgacatgtagtgagtagcgactaatggataatcctttcaccctgttctgttccagtcatcttctggtgggtacatggtagctttcgccgggaggaaatacgccgcgaggtcagctccggtgttcgttggcaacagctcctacacggtgaccagctttaccctggtgttggagttcca

SEQ ID NO: 65904 - DNA, 269 bp, Setaria italica
  Peptide Sequence Number=SeqID_131878
ctttgcagagctcgtcactgatcataaatacatgtctcaagaaaatgatcatattgggagccctcttgtattgtcaaaggtgatgtacttgtcaaatatcaatgactcattgtctgttgctgctgtaccagttggagcaaggtgtgatgacttttcaaccgatccaaatctccgtgaggaacattggctggccagcttgacgttcttcgatcttagtattaggccgccagcatatttgtgacttttaatcagcaaaggtggcctcaacg

SEQ ID NO: 65905 - DNA, 279 bp, Setaria italica
  Peptide Sequence Number=SeqID_131879
acagaaaagccaggcggatcaacatagacctgacgaaactggagagcgaaactggcagcaatagctatcaggaacgctactaccataaaggcaatagcatagttgtatcgatagcaaagtcccactataaaaccacaaagagcaactatgacaagacatagaacaccctcttgccagattgacataattccaagggagcgacgactagttgctttgtcattccatctttaattgttgtattcgtctacttaagttctttgttatttacttaactttgtt

SEQ ID NO: 65906 - DNA, 176 bp, Setaria italica
  Peptide Sequence Number=SeqID_131880
agctgcaaggggcagcattgtactgaccatagccagcgtaaatgcccacggcgatcagactcaggatgacaaatctataccacgcttcttcatgtagctgagcaaacaggaccattgtttgtaagtaaaaactagtagtattaacttggtaacctagtcggttacccctaggtact

SEQ ID NO: 65907 - DNA, 255 bp, Setaria italica
  Peptide Sequence Number=SeqID_131881
gagtaattgtgcctttttgtaaggtgtgaggtcttatttgagtgtttagagtatgtcatcagcagtgttgtaaatatagcttcaagccttcgtaacagatcctttccctgcacagtagcgagcgttgtagcccttggttggtataggaattcctagtgactgatcaacactttgcaccttccacgcacagaattgtgcatcatgaacaagtggattggttgcacgaactggtggtgaccccacaaagtacggagg

SEQ ID NO: 65908 - DNA, 428 bp, Setaria italica
  Peptide Sequence Number=SeqID_131882
ttagtaattaaagttactttacgttaatttgttcttgtaaattcctagtagtccttctttggtcctagtcgtcctattgttcctttggtcttttcttcgtcttcggtcttcatacaggttgctgtcgcagaagtacttcccggacacgcccttcacctgtggatggagggccacatagcatgtggttgccgccccctgctgagcatttttcagcaccaatttcccaagagtccgatggagaacatctaggatactgtgatagcgaagaagattcgtgacaatggagccaggatgaagagaatttgcagttatgttgacatcctcttccttgaatcgcctggcaagttcattagcgtgcaagatgtttgcaagctttgactgcccatatgctccaatgctgctatacactgattcatcattaatcttat

SEQ ID NO: 65909 - DNA, 164 bp, Setaria italica
  Peptide Sequence Number=SeqID_131883
ggaaggaagaattgtcaacgtttgattcatgggaggtcttcttcatagtatccaacagaaggtgtgtcagcaggaaatgaccaacagtggttagttgcaaactgcatctcaataccttttgcacttgattcatgggaggtcttcttcatagtatccaacagaag

SEQ ID NO: 65910 - DNA, 134 bp, Setaria italica
  Peptide Sequence Number=SeqID_131884
ttaatcttatcaaagcggatgccttccccatatgtaaatctgtgcccctctgatgaaacgttgacaattcttccttccacatttgattcatgggaggtctttcctgcattgttgacgaggatgttgagggggag

SEQ ID NO: 65911 - DNA, 471 bp, Setaria italica
  Peptide Sequence Number=SeqID_131885
atctcctctatcttcagacactttatgtttaaattagcttaggtctcacgttgctatgagattataacaaagcatcacgtatgccttgtgtgctttgcttccaatagaggatgctgatagccacaatgattttttaccatttttttcctgccaaaatcaccatttggaacatcacacagttcacaatgaagatggaatcacagtttcttgggccttggttcccttcggcctccacatggtccgggctttcaccatggtcggacctgattcaaggctcagcagatgctcacagtgcaaggttgtttctccagactcgctgttgcaatcagtgtgcacggtagtgtgtgactgcagcacactatcccggccacactcccttttgtaatccgtacaggcctgactcctcggtgggctgatcttgatataaatcagcatgtcaataatgttaaatacattgcatggattcttgag

SEQ ID NO: 65912 - DNA, 254 bp, Setaria italica
  Peptide Sequence Number=SeqID_131886
ttgttctatatatcattgtcctccatgttatgttgttacttacccaaaagttttcatctgcaggtggccatgcaaaaaccttgatgtttgtgcagatcaacccagatgtctcatcttattcagagactctaagtactttaaagttcgctgaaagggtttctggagtggaactaggtgctgcaaaggcgaataaagagggcaaagatatcagagaatttatggaacagctttcactgctcaaagaataaaattgc

SEQ ID NO: 65913 - DNA, 254 bp, Setaria italica
  Peptide Sequence Number=SeqID_131887
gagcactatttataattaatttcagattattcctgtcgtaattgttacttgtattcagcaaaataaaccttatgagagcacgtgaagagaaatataaatcaaggataagagtattagaagcacttgcaagcgggatgagtggacaaacacaaatacactcgaatgcaacaaatggaaaagcaaatgttgctgcagattatgtcatagaagatggacaaaagcaaaggtgaagaacgaagattggttgacaaaag

SEQ ID NO: 65914 - DNA, 279 bp, Setaria italica
  Peptide Sequence Number=SeqID_131888
aattaatatgcttcatgatcgattagtatctaagtacttagaacacttaattacaaacagcttaagttgtgcttgctagtgttattgcaagattttgatgtagtgttcccaacaatccctttagctaattgtgtgaaatgactttcatgcatgaatcagcttgtggagaagcaaccggatttggcaattgtgtggttctggaaggcgatcaactccggtgatagggtggacagtgccctgaaggacatggccgtggtgatgaagcagcactactcacac

SEQ ID NO: 65915 - DNA, 397 bp, Setaria italica
  Peptide Sequence Number=SeqID_131889
ttagtttcgttgtagtattcgttgtagggtattgttctattcctaagtagtaactagtagttcctttggtcctggtggcttggattctatggctctgagttttgaagattgccctgattcctcagaggtatccatgaagcatgaattgggtcaagacaatatagagagcttggcaatgtctgatgatggccaagccggtcagggttctgtgtcagagtcatccagcagcgaggaatcattttcattgcaaaaacaactccatcaacactgatatactgctggggtcatctaatattttagaggctggtgttctgaaaagtatagtccaaaatgggactgcatcaggtacagcattcttggagacaaaccttgagaagcaagatgaagttccatctgg

SEQ ID NO: 65916 - DNA, 392 bp, Setaria italica
  Peptide Sequence Number=SeqID_131890
tttgtttcttattttatttcttacttaaccttccttattaaaaggttttgtaggttgttaaatccaaatgatattactttaaaaataacaactaggagtaaatgatttaatttatctgaaagtaattttgttgcacatgaaaagtaatttagaacaaggttatgtaatgcttggaacctaacagtgggcaacttgtgcttctgagtttattgtggaaggcaaaggcacagtgcttgcccgcaataaagcaatttttccagataacaaaacataaagagaagaaatagggggttaccggattcaggttaaggtactcagaaatgcgaagtgccaaaaggtgctgattagcattaatgagacgtccaatgagcactggtgcggtaagcaacttg

SEQ ID NO: 65917 - DNA, 250 bp, Setaria italica
  Peptide Sequence Number=SeqID_131891
tttcaagagagagaagaccaccaggaggctacaaacctttcgtggaagcatgccagtttccaactgtagctaaagcacatgttttaagccagtaccacctcttatcaggaaccttgaattctgacttcactttgagtgcagctcgctcatttcccattgcaatacaggttttgattgtatcactaacactagaacccataaatatcgcctgctttgtggactgagactaccaaggcacacaggggatagg

SEQ ID NO: 65918 - DNA, 449 bp, Setaria italica
  Peptide Sequence Number=SeqID_131892
ctttcagttttttgtaccagcgtcaatgcatgcttccacgaaaggtttgtagcctcctggtggtcttctctctcttgaaaacttttccaaagcatcccagtttccaactgtagctaaaagcacatgttttaaagccagtaccacctcttatcaggaaccttgaattctgacttcactttgagtgcagctcgctcatttcccattgcaatacaggttttgattgtatcactaacactagaacccataaatatcgcctgctttgtggaaacttccagttcatgctgtgatcttagcaatttagcatgctcttcagaagctttggattcaaaaacatgttcctttgtctcagcaaaaaagtctatgggcctgctcaattggcctcacttgctggaagaatagaagaataccccttagacttagaccaatagggaatttacttttaccaaata

SEQ ID NO: 65919 - DNA, 406 bp, Setaria italica
  Peptide Sequence Number=SeqID_131893
acacaggcagaagacagcacgctgcatgtcttcatagtaagtggcagggtgatctgttgaaatgtcaaatagagggttgctcttgaagttctcccacagcgaagctcgtgcacctcttgcatagtatccattgggctgggcaccatggagccctaggttggttgaggccgtggtctttggctgcattccagtcatcatagctgatgatattgtgctaccatttgcggatgcaatcccatgggaggaaattggtgtctttgttgaggagaaggatgtccctaaactagacacaatcctcacatcaatgccaatcgatgacattttaagaaagcaaaggttacttgcaaatccatcaatgaagcaggccatgttgtttccgcagccagcccaaaccaaagggaataga

SEQ ID NO: 65920 - DNA, 365 bp, Setaria italica
  Peptide Sequence Number=SeqID_131894
acagtgaagctcgggtacctctagcatagtacccaccctcagggtcattgccgttgtcatagaacagtcccctgaagtaaacaaagattgaacggggagtgtcaggtggaatcaagtgagcctgcatttttctgcggaggtgcatatggtggtataatgatggaaccctcctttaggcagacatggttcttctgtccaaatgtttggaccaatgtagcacgacggagcattggaagaattccacgttcaatagccttttcttcctgatagtgaaagcatgcaccaaaatcaatgacggaaacaaacaaaagaaagtaggtacaagactaccaatacaagtttttaattaccaagaaaaggaccaa

SEQ ID NO: 65921 - DNA, 325 bp, Setaria italica
  Peptide Sequence Number=SeqID_131895
tataccaccatatgcacctccgcagaaatgcaggctcacttgattccacctgacactccccgttcaatagccttttcttcctgatagtgaaagcatgcaccaaaatcatgcggaacaacaaagaagtggtcagctccatcagttttattccagaaaggccacttgtgtgaaataaattggattgcacttctcatcattcttggggacttgaatggcagtggaagtccggctggagtaagatcacaagtagtgtaaactggtgcgtagaaccaatcagcctcttctggtttgagtgttcgcaccgcactagagagcaagaaacgat

SEQ ID NO: 65922 - DNA, 259 bp, Setaria italica
  Peptide Sequence Number=SeqID_131896
gtaaccatcttcttgttgtacttcctcggcaagtcataaatgaagaccttcaacctccccacaggattatcttctaacacatcaccagcactccctgagatgcgctcgctgtgctgctgaacggcgtgctcagcctcgccgccgccgccggcggcggcggctgccgcgacccgcggcgcgagggcggaggcggctagcagcaggagggccacggggagccaccccgttcttgatcccatcccggagggaacgcccgccg

SEQ ID NO: 65923 - DNA, 301 bp, Setaria italica
  Peptide Sequence Number=SeqID_131897
ccggcaggtcatcggcgaggaagtcatacggtgcagccttgcctgtgtccaccactggctcccatcggaacccccgggcgctctggaagtccgacaaccaccggcaggtggctggtgttgaaggccacgtagatttcacctttggtttcatccttcatggagaaggcaacgaatcggctcccctccgaccagtcaggcttcccaggctgatgaccgtgccaatgcaactgttctgaagttgggaagtacctacaaaggaccaaagaagaattacgacaattaccttagacggaaatttaga

SEQ ID NO: 65924 - DNA, 263 bp, Setaria italica
  Peptide Sequence Number=SeqID_131898
acggaagtaattgacataatggtcatggcagtatgtattgttgttccctccctttgtatgaccatattcatcgcccatgtagaacatcggaactccttgagaaaccattagacaaacaaagaaattgcgcatttgcctcttcctcaatctcctgactgataggcttgcaaattctccttcctccccacaattccagctaagaattaatagaattttaccccaatactactagttagtacctacaacctaatttagtaactaaa

SEQ ID NO: 65925 - DNA, 448 bp, Setaria italica
  Peptide Sequence Number=SeqID_131899
ggaattctgctttgttcgcttgggtcggtgcagtctgaatcaatccatcctagctgattctcatcattgtcataggcaatcaactttccacgaagagaaacatctccaactattataactgaatcataaccgatcgctgtcccatcgagcacccccaggcagacattgcccttatcactgacgatcaagtaatcttcaggacgaatgttgaaagttctggagaagaaaaattgtttcttgaattgcagactcaagggcttgaaaaaatgtttcacatcatccacagacctcactgaaaaatcagctttcatacagaaaggcagcgttttatctgagtcatcgtgtacaaatctcggagatgcaccattcagctgttaaatttcaagaaaacgtaaggaacacagaattgacctgttccgtgattccattggtatttctactacttcta

SEQ ID NO: 65926 - DNA, 457 bp, Setaria italica
  Peptide Sequence Number=SeqID_131900
gtagtatgtgtgtaatgtttacaaaagttggttgtgcaatactttcctcaggaagaaaggaattctgctttgttcgcttgggtcggtgcagtctgaatcaatccatcctagctgattctcatcattgtcataggcaatcaactttccacgaagagaaacatctgcaagaaataggagggaaggataaatttagaaggaatgaattgggcagtggaaatttaacaagaaaatgaacactgaatacctccaactattataactgaatcataaccgatcgctgtcccatcgagcacccccaggcagacattgcccttatcctgaaatgaatcccagggaaaacatgatgatgtacttcaaaagaggaaaatggggtattcagctttaatcagatgcctgacagagtgacattgcataagaaccataggataggaacctacactgacgatcaagtaatctt

SEQ ID NO: 65927 - DNA, 408 bp, Setaria italica
  misc_feature (126)..(126): n is a, c, g, or t
  Peptide Sequence Number=SeqID_131901
tacattaactgaaactcacaaaatggaaaagagtttcaggttatatatccatctaactttcgtgatgtgaaattttatataatggtgtatacatgtgcattttggttcacagtaatattggagagngtaaagcaatacagcagagcagttaggcaatattttccctttgtggttgttccatgagagtgacaagaattggtaagatttttgaagatatgtctgctggaccatttcggacaggaacccatgtcattccccatctaggaatgtaatcatcaccaagaaacaaataaccaccactactgggatctgtcgtcatacagtgaccgaaaacattggaaataatccctcggctggctagctgtgtaggaaggcttattcccggctgcccaggcctagcactccatc

SEQ ID NO: 65928 - DNA, 355 bp, Setaria italica
  Peptide Sequence Number=SeqID_131902
tgaagtacatgatgctagctatgctttatctacctttcctttctctttctccctatctcataatcattttccctatctagtaattacattccttcacacgattacatcagaatttggacgcagaattgcacgtccataagaacaggcgcggtcagacgatctcaggtagtatgtgtgtaatgtttacaaaagttggttgtgcaatactttcctcaggaagaaaggaattctgctttgttcgcttgggtcggtgcagtctgaatcagctaggatggattgattcagactgcaccgacccatcctagctgtttctcttcgtggaaagttgattgcctatgacaatgatgagaatcag

SEQ ID NO: 65929 - DNA, 249 bp, Setaria italica
  Peptide Sequence Number=SeqID_131903
agaattggtaatgacctctgttgcattagaaagtggccatggtcaaactcatatctccatgttgatgtcataaatctggtattgcattgagcaggaccgcgaaaaggatgaactccctgctcacatgacatgtgtttccgaagcagaaattagaaaggccgagaaggcggaaaagggaagcaagagacctgaaaggcacgatgaggaaacggatggagttcctagacttcgattagttcccttgtggta

SEQ ID NO: 65930 - DNA, 168 bp, Setaria italica
  Peptide Sequence Number=SeqID_131904
acgatcctctgtcgttcccttttgctgtaccagccaaagggaacgacagaggatcgtgatccactgaacatagtctacatgagttgatgcaattacacaatagttctgtctcatgcaaagagggatcctcagttctcccgagagctcttgatctcatccatcagaaga

SEQ ID NO: 65931 - DNA, 316 bp, Setaria italica
  Peptide Sequence Number=SeqID_131905
caatagttgaactgtcaaggaccagtgtttgctaatgcactacacaagagttgagagaattagatttcctaggaatgtactcaaaaatatctcaactcatgatatatcaaattcacaataactgctgtgttgtctcatgttttgtcaatggaaactgaagaaatgtaacgtagcttcagtttccattgacaataactgctgtgttgtctcattgttttgtcaatggaaactgaagaaatgtaacgtagcttcagtcttagcacctgagcaatgcacaaaccacaccggagcatagcaaaaatgctagcatgaaaag

SEQ ID NO: 65932 - DNA, 345 bp, Setaria italica
  Peptide Sequence Number=SeqID_131906
tagttgagaggatagtggaacatgctggttggagtggattatagagagaaactagagaaggtccgagaattttgtttgcccacgtcatggtcgcatagcacatacaagaagcaacaattccagcatatagaatagctatgatctctgtttttgtcaatgcccactcatggagcccattggttgcaagtactccagttaacaccataaagatggaggcaaaaaatatgaataagctgtcaaggacaagcttgcaggatattttatcatcacaggagcctgtatgactagataaacagccaccaatgggctccatgagtgggcattgacaattccagcatatagaat

SEQ ID NO: 65933 - DNA, 306 bp, Setaria italica
  Peptide Sequence Number=SeqID_131907
tttaagacccaacgtacaataggtacgacaataagcacatacaagaagcaacaattccctgaatgtgcaagtaattaagaaatttggtcagataaccaggacaggttcctaaatcttagcatcactgcgatgcattatgcaagtgatcgatgcagtcttggcaataaggcatatagagatacttacagcatatagaatagctatgatctctgtttttgtcaatgcccactcatggagcccattggttgcaagtactccagttaacaccataaagatggaggcaaaaaaatatgaataagctgtcaa

SEQ ID NO: 65934 - DNA, 296 bp, Setaria italica
  Peptide Sequence Number=SeqID_131908
gttgagaggatagtggaacatgctggttggagtggattatagagagaaactagagaaggtccgagaatttgtttgcccacgtcatggtcgcatagcacatacaagaagcaacaattccctgaatgtgcaagtaattaagaaatttggtcagataaccaggacaggttcctaaatcttagcatcactgcgatgcattatgcaagtgatcgatgcagtcttggcaataaggcatatagagatacttacagcatatagaatagctatgatctctgtttttgtcaatgcccactcattgg

SEQ ID NO: 65935 - DNA, 211 bp, Setaria italica
  Peptide Sequence Number=SeqID_131909
aacttaagaacggtagtacgaccttacctacctagaagaataccaaacttacctaaaaagaatagccgccgcgacatacgaggcggcagacctcatcgcgaggggggccaccaatggcgagcccccagacctggtcgccttcctgaaagagcactggtcccaggctgccttcgccgaaggggtgagcgccggcgaggcgcatttcgtgaat

SEQ ID NO: 65936 - DNA, 463 bp, Setaria italica
  Peptide Sequence Number=SeqID_131910
cacatggcactctggccatgatgcaagaagaagtctcgtgatgtcttcatggatgtccgccgaaaagaagatttccgatggcgcttcttccactaccatctccggtcgagcctcttgaaagcatcaagtcagagaagatccaatcccaggtttccctcagagcttgttatactttgacgtcgatttaagagctcattgtgtccattgtcccccaagctagcgatactgacgtctccaatctctttcgaccaagccaatgtccaagtgcgccatcagtattgaagcattggtcaatgaagatcatcaaaacataataagcactgatcaaatccatcaaatatatatcttttatttttgttcttgaaggcgatatcccaaaatattgtctatctcataaacgatgaatacaaccctcagcttttgtaatccttatgtaaaaagctcgcacgacaaagcttataat

SEQ ID NO: 65937 - DNA, 364 bp, Setaria italica
  misc_feature (263)..(364): n is a, c, g, or t
  Peptide Sequence Number=SeqID_131911
gcttctttcacatggcactctggccatgatgcaagaagaagtctcgtgatgtcttcatggatgtccgccgaaaagaagatttccgatggcgcttcttccactaccatctccggtcgagcctcttgaaagcatcaagtcagagaagatccaatcccaggttttccatgccttttctttctcatgtatatctaagatcgatatcggctttgtaaccattgtaagaatcgactctggaataaaaaatctcccttgatcgaaaagtnnnnnnnnnnnnnnnnnnnnnnnnnnnnnnnnnnnnnnnnnnnnnnnnnnnnnnnnnnnnnnnnnnnnnnnnnnnnnnnnnnnnnnnnnnnnnnnnnnnnnn

SEQ ID NO: 65938 - DNA, 470 bp, Setaria italica
  Peptide Sequence Number=SeqID_131912
cgaacatgcagttcccaacacaaggctgtctgtgcatgcatacaaatatcggtaacacgaaaacaactaaccaaaatgagaaaaagaattgtatcaagaatttttcatgtttcatgatcactgatgtgcccaatgactacaaagccacaaaggtctgtggagaaagcatggttgataactctattaaagcataacttcgtgagaaaataacttgcattctctccacagaacagaacaccatgagtttcaacttttaagtacagaaatacagatactagtcttttatcaaaaagtccatagtccacatagcaataaacttacttgagctaagacaaaggtacaggtagtagatttgtgtagatttatccctcttaatgaaacactggatagtcccatctcgaggtccaggctgcttcagggaacaggaaagtgatcttcccagaaactctggctcttgacaatctctctac

SEQ ID NO: 65939 - DNA, 478 bp, Setaria italica
  Peptide Sequence Number=SeqID_131913
ggagtagaatctctggcttgttttccctgactgtgtagcactagctgcattgtatggtggctgagtatcatagattacaaactttgtgccaaggaaatttgacctcaatttcccaatgtatgtgttggtattggtagacctagatacattgccagaattcattgatattatatattctgtacatgttggacggatgtttctttttgctgacagaaggaatttgccattttcgacaagcacggctgtagagatgaacattcataacacatcaaatagcaatactggtaataagatattacaagttgatgagcaagaaaaacatgtactggcacattcttttttctacagaatgttgagactgatagtctgacaactacaaacctggtggatacaaacaccaaggccatgcactgacagctaatcagtcagttagttcataacatgctggaacgatcaacagagactaaaagaataaaac

SEQ ID NO: 65940 - DNA, 186 bp, Setaria italica
  Peptide Sequence Number=SeqID_131914
agcaggatgatctgctgaaacactaaatagcctagccccatgcatttctggggctgtttctgagtcaataaagcaccaccacctgcagcagaatggagtccccagctaaacttgggggcactcaactacactgaagagaaatgtgatgaagtacaacatgctacagcatccaatgggatgggaata

SEQ ID NO: 65941 - DNA, 235 bp, Setaria italica
  Peptide Sequence Number=SeqID_131915
ctgagaacaggagacactaggagaaagacatccaaaaacttccatggattgattccagagcttgctgctgctcttatggcaatatgtgaagtttttggatgtctttctcctagtgtttcctggactctgagaacaggagaggaaatatctgctcacacagtcttctcaacagcagaagatactcaggagttagctgtgagccaactggagcaccatctcccattactactaatta

SEQ ID NO: 65942 - DNA, 234 bp, Setaria italica
  Peptide Sequence Number=SeqID_131916
agcttactattgtagcaagagatgcaggcaggaaatcagccagatccttcaggcctgtagccagttcacgtggaaatagtcttccatgggaacaagcagtaagagcagcatcaaccacaaatggaagcagcatgcattgcctccttttgctttcttggagaatcaatctaacatcttgcagttttcaggttattaatattcaaacactttggtttcctgtcttgtaggagcata

SEQ ID NO: 65943 - DNA, 211 bp, Setaria italica
  Peptide Sequence Number=SeqID_131917
cttttcgtacctcctgccaagcttccatcaagtttatgagcttcattcagtgattattaccaacaacgatgtatgagaattaacaaatatgctgatattgagatatagagatattaatagctcaactccactgtgatttttttaatatacatccttctacaatgcggctgtttatttcttgttgggtttcaactctagccctaccccaact

SEQ ID NO: 65944 - DNA, 223 bp, Setaria italica
  Peptide Sequence Number=SeqID_131918
ttttgtctatttctggatcatgggtttctggtaaatgccaactcaaaagcttggcaaattatacaaagctcccttttcaaaggggaaaaagatacacacctgggagcaggagttgatgccaacatattaaccagtgactgagtcaatggcgcacccttcatgaaagatgaccacccagcaagttgactagggagtgtatgagaaacggagttgacatgattac

SEQ ID NO: 65945 - DNA, 456 bp, Setaria italica
  Peptide Sequence Number=SeqID_131919
aattgaatcatgggcacacttcattacttgccaattagccaatatcccacaagtaataggagaaggaatgtaaatgagtcagaacacgaatagtagatgacatacattgcagcttagaagtctaaacccggtggcggtgggcaatgaactagcgcccatgttcagaaagccacacgcagcgttcaagtaacaattgatacaagcttgcaacgcacaagagggcacagcaatagttcaccagcccattcattcttgacatccagctgctaaactactcgttcttcttagccttcaggttacctttgggtatcttgctcaagacaccttggtcgagcttctgatactgatcttgcagcagaccaagaaggctgtagaggaaattgtcgacttggtcttcatacttctcgtagagcactggaagtgtgtgagcacaaacaaatccaatatatataactg

SEQ ID NO: 65946 - DNA, 386 bp, Setaria italica
  Peptide Sequence Number=SeqID_131920
tagtaacctaaagtaaaggtacttagttaagtaaggtaaaatttgttcgtactttggttcttcatacttctcgtagagcactggaagtgtgtgagcacaaacaaatccaatatatataactgtcaggaaattgcaccaacttccaatcactgcagcagcccacagtccagcaatcgccactacaaaatgcttcaagtttctttcacaagacagatcttgaaggaagctcaggaacttgtttatttgcgcaccaattgcaacagcaatgttcacaaacagctcatcaggcaactcaactcggggcacttgagaaggagatccgcttagcatgtttgagaaattggaccagacaaactggacgaccattccaagaacaagggcaaatg

SEQ ID NO: 65947 - DNA, 238 bp, Setaria italica
  Peptide Sequence Number=SeqID_131921
aacaagggcaaatgaaacgattgtcaggaagtggtaatcaagccactcgaagaaaacccagatagctgttgcaacagccagaacgcttgatgatatcttcttgttcctccataacaggcaatcagcaggttttccaccacccagagctccatgcagggtcttctgacagttatatatattggatttgtttgtgctcacacacttccagtgctgtagaggaaattgtcgacttggtctt

SEQ ID NO: 65948 - DNA, 461 bp, Setaria italica
  Peptide Sequence Number=SeqID_131922
taaaaagaaaactaaagttaaacaaacaaaggggaacaaatttaactagggacaacggcactcctcccttgcctcttgctaggactaacttaaagctttggataactggttgaatacgaagcagatgcagcactagtggtccaaatgcatgtccccctgttttgagatccagctccataaccgaaaaaaccgacacaggaagttgagcaatcatttgcgcaaagctccatgcttcttccaacatatcaggctcatccagaatatgtatgtccagttgtaagccatgctgcttgcactcacgtattttgtagagtttccatagcccattgagcccaacatctaggaaatcacatacacatacccacttgagtatcgtcaccattggcgccgagaaggacaaactgaagtcttgtcaagacagaccttcaatatcaactccttcagcaccggagccacaactg

SEQ ID NO: 65949 - DNA, 424 bp, Setaria italica
  Peptide Sequence Number=SeqID_131923
cccgcactatcttcttctgtccatcttcacttggtgaatcggaaattctcatggtcaatctcctaagcactggtgcggattggagtataagttctaggaaatcaacttcatttgtcttctccttgcaagccatgaatttctacaacctcaagattaggcaaagagatgttttcaattctccagttgctagactgttcacaggggcaatttactgggcacggcactcctcccttgcctcttgctaggactaacttaaagcttttggataactggttgaatacgaagcagatgcagcactagtggtccaaatgcatgtccccctgttttgagataccaagactaccaataaaccgaaaaaaaccgaacaacaaggaaagttagaagacaaatacaattttagtacgtactaaaagtacttactatt

SEQ ID NO: 65950 - DNA, 449 bp, Setaria italica
  Peptide Sequence Number=SeqID_131924
ctcaaacataatcacaatattttcagatcaacagaatatgctcttcattgggtttgtgtcgctacactcagattcgacattggtttgtgtggtgctcgttgggtttcatctctagcctacagccctacactagttatccggccaatcaatatataaaccagaagaatgaccataccttaatgaatggtttctcagtcatgataattgtaacccatccgacatatggaaggtagcccacagctcgtcccattatgtggtgttgctggagccaaagctgcccatgtgcatacaatagtcggtcatccccaaaattattgtcacctttggtgaggatgtccacttctttagtgtcctgccgttcatggaccttaatcacacggtgtacaattggaatttcacggccgtcgacattgaaaacaactattctcctgtgcggataggatctttgc

SEQ ID NO: 65951 - DNA, 415 bp, Setaria italica
  Peptide Sequence Number=SeqID_131925
ctgttggttgttgcatttgatgaagttgactcttcatgacttaattacaggaaaatgccttgtacaccaacagctgattcaattcatcaactagtctgtaactacggaaaagtggatgctgcatgagatctggctatccaattagagggcaggcgcccgccaaatagacaaagaaatcttctcatttgatacacggtgaagtacagaacagattctcttaaagccttccggtcagccactgctctatgctgttgcaccacaagagcaaaatctacatgctgcggaagtttgacatctttactcttttgatgttatgaccagcaggcccagtgcgccaatcagaaggtacttaatgaatggtttctcagtcatgataattgtaacccatccgacatatggaaggtagcccacagct

SEQ ID NO: 65952 - DNA, 234 bp, Setaria italica
  Peptide Sequence Number=SeqID_131926
tttaaatccaggctccatgctaccagagagaacaactacaactggggactcgctgcccgtcacaactatcaaccccttccatatgatcaatgctgaggtaacaatcataccgaggctgatgatctgcgtgagcacttggcggatctgcatcgagcggatcgactccaaccgtgtcgccgacgaaccccatctcgctccctctccctcgggtcccggcggcgaacgacgacagag

SEQ ID NO: 65953 - DNA, 211 bp, Setaria italica
  Peptide Sequence Number=SeqID_131927
cctatcccctgtgtgccttgcctaccccctcgttgcgtgtctcagtaactacggaaaagtggatgctgcatgagatctggctatccaattagagggcaggcgcccgccaaatagacaaagaaatcttctcatttgatacacggtgaagtacagaacagattctcttaaagccttccggtcagccactgctctatgctgttgcaccacaaga

SEQ ID NO: 65954 - DNA, 191 bp, Setaria italica
  Peptide Sequence Number=SeqID_131928
cctcctcgacaattctgacgacatttttgacaccatccctcatctcccagaaggtggagccatccaaaggagatgagggatggtgtagaagaaggacctgatctccttgagcttggctttggccacagcaaggtcgcggaggcatcggagcacctgggagcgatgggccaggtgcgccctgtagctcatct

SEQ ID NO: 65955 - DNA, 235 bp, Setaria italica
  Peptide Sequence Number=SeqID_131929
tgcatcccgatgatacaattttcagggcagggcacatccagagaggtcaggatttgatggagcatggactaaagatccactgaaatttgacaattcctatttcgtgtaagccttgcctaaatatcacttgttcaacaaataggagcaggattgtattacctttttcttttaagattgtgcagtaatgtcacactgttttcgtcgctttgtatgatacagtgaactgctgaaaggt

SEQ ID NO: 65956 - DNA, 235 bp, Setaria italica
  Peptide Sequence Number=SeqID_131930
ccgttacccttgatcatgttttgctttcagaacagagcatttgtgatttatccatcttagcttgaacagagcatctgaatcactgtcatcgggccggttgcagcggtcagagcggcttccggtggttggaggaggccatgagcacgaccatggcgacggcgaacatgagcagcatgctcgccagcagcgtgtacgtccgccgcgtaccccgccgcctgcccggccatgaacgtga

SEQ ID NO: 65957 - DNA, 244 bp, Setaria italica
  Peptide Sequence Number=SeqID_131931
gcacgctggcggtcctccagagaaacagaggaattatttaagtcagcaatagcaatcttcatcaagtcagcatctgatggcatctttaacttctccatcagctccttaatctccatctgccgcttgagtaactcatccgctgataacctctccaattctgcagctttttctctcaacttatccgggtcagagttccccaaattgcaaatagttcgggctaaaatcggggaaatcactcagctaa

SEQ ID NO: 65958 - DNA, 230 bp, Setaria italica
  Peptide Sequence Number=SeqID_131932
aatcatcaaatagaattcttctgtcattatcggagatgatgatgccagggtggttggtgagggaggcatcagtgcgtatatatgttgcataaaggatcaagcccatttagaaagtaggaatgatgttaaattttactttgagaatccctttatttctgtaatgctaaaaagggatggcaagcttggagtaggtcaagatggtaaccgtatcacaaagattgtgagaaact

SEQ ID NO: 65959 - DNA, 256 bp, Setaria italica
  Peptide Sequence Number=SeqID_131933
caggctggcggtcttggccgccgcaggcaagccgccgggagaggcagaggagcaggtccctgcgtgggccaagcccggcgctgacgagccgccgccctgggagcgcgaaggcggggccgtgcaggggcaggaagccgggcaggtgccgttctacgcgtacctgctcgcgtccgcggtcaccgccatcgccgccgtgcgtttgctcggaaactcctccttttctttcgctgcacgtgacgcacttcgtcactcaccg

SEQ ID NO: 65960 - DNA, 252 bp, Setaria italica
  Peptide Sequence Number=SeqID_131934
gttggcatgggcagtggaggtggcggcggcggcggctatgacccaggctacggtggcatgggcagctatggccagagcttcttcaacataagctacgcgcgcagccagccacctccaccgcccgtcgccaagcaggtccgcatcgcccccgacgacgagcacatccacttccactccgacgacgactccgattccgagggcggcggccacatcaagttctccgacgaggagcccgacccggctcagcgcccg

SEQ ID NO: 65961 - DNA, 248 bp, Setaria italica
  Peptide Sequence Number=SeqID_131935
gctaaagatgttggatgagaaaggcgcagaagctgataagcttgaggccactgaaatttacatcaggaagctatcaacaaagattagcatagctattcaggttgtgaatactatttcacaaaagatcagtaagctgagggatgaggagttatggccacaaacatgtgagctaattcaagggtacgcagttcttttctgaaagcagctcttacgttcttatattagccggtaaagtactaacattgttg

SEQ ID NO: 65962 - DNA, 358 bp, Setaria italica
  Peptide Sequence Number=SeqID_131936
ttacttaactttaggttaatttagttaacttctagtagtcttgtctattgtaactttggtagtttgggttctaaagtctattgggagcaatgagatgatgtcatgaatctcagcagacttagcagaggtgctctgaaagttcggcgtgctggcatgccaatgtacagacagaggcgatgggggatgaatcagctgccgagacaatgttgctttcagcttcctgcgcgggcatcgtggccacacggcaccggaagtactctcgtagggttaccaccagaggttgattgatgagcttgtaggattagatcagatgtcctgacccgttatgcagatgcgctaacccctccggccatcatcg

SEQ ID NO: 65963 - DNA, 334 bp, Setaria italica
  Peptide Sequence Number=SeqID_131937
agagtgttttggtggaagctacaagtggaaatacaggcattggtcttgcctttattgctgcttctaagggatataagttgatattaacaatgccttcaccaatgaatatatccaccttcccctttgaatcctcccagatttctggcccagtagtctcataatgtacctttgggttggcagggttatcaaactgctgaagcatgtatgaattgggagtcttatctaaaatctccgtagccttgtctaaggcccctttcatccctttgcagcatcagtaaggacaagttcagcaccaaaagctctgagtaggacccttctctccatactcattgat

SEQ ID NO: 65964 - DNA, 200 bp, Setaria italica
  Peptide Sequence Number=SeqID_131938
aggtggatatattcattggtggaattggaacaggtggtacgatatctggtgctggccgtttcctgaaggagaaaaatcctgaaattaagatatcaagtgatgaagctgttgagacagcaaagcagttggcagttcaggaaggattattggttggaatctcttctggagcggccgctgctgctgccataaagttgcagcga

SEQ ID NO: 65965 - DNA, 360 bp, Setaria italica
  Peptide Sequence Number=SeqID_131939
ctttctgcacctcatgttgtactcatgttgtaaacataccttatgcaggttgtcaagtaccttctggcctctttcgaccataatcaattcaactgataatcacgggaatacagcattacatgtagcagcctatcgagggcaccaaacctgttgtcgaagcattggttactgcatcgccatcaaccttgtcagctatcaacaatgctggtgatacgtttctccattcagcagttgcaggattcaggaccccaggattccgacggcttgaccaccaattggagctgatgagatatctcatacgcgaaagaacgacagatatccagaagatcatcaacctgaaaacgacgccggacttaccgc

SEQ ID NO: 65966 - DNA, 480 bp, Setaria italica
  Peptide Sequence Number=SeqID_131940
aaatcaagcactgctctgaacactgcagctaattttcttgtccatgagttcttcacaactcattacttccaagatggtatacaacccatccctggggctcgagatgctctccaaaacctttcttctttctgtagcttgtcagtagtaacgtaagtccttcataagatttgagagatacgttcaatttgccttgccttatatgagtttacctaatggtgtccttctctgaaaagatctcggcaggatgcaattaagagtcacacgttagattggatcgagaggtattatccaggcttatttgagcagatacatttcggtaatcatttcgctttggagggtcagtcaagaccaaaatcagagatttgcaggtaaaacactggctcactgagggagggtagttttctcaatcatgttagagactgtagtagcattgtaatccggctccacatacactaaaagaacagcaatgattagaactgt

SEQ ID NO: 65967 - DNA, 174 bp, Setaria italica
  Peptide Sequence Number=SeqID_131941
ttactaagtacggtattgtcgtacttcgttctaacttcctagtttttgtctacctaagggttattgtagtttattctattaattcgaagagcaaaaccctcatgccatcattagcacactccatagcatatcttgggttgtcatctattaaaacctgagcgccaaaagatctgc

SEQ ID NO: 65968 - DNA, 266 bp, Setaria italica
  Peptide Sequence Number=SeqID_131942
aagaacggtgtgaggactgaggagagggagggaccgaggcgccgacctcgcgccgggggtttcgattcgtcctcatccctgaatcctgatctcgcgtgttcaggcaagcgattccgccggcgattgcatctggctttgtttcttttctcctcctttttctcggttgggctgtgacggaatctgatttgccgaatgcgaggcgtgcaggtttcttgggctggccgggggaaggaatgctggtggcgacatgctaagccgcggagccg

SEQ ID NO: 65969 - DNA, 430 bp, Setaria italica
  Peptide Sequence Number=SeqID_131943
tacgtttcttattttgagttaaagccttaattttgaatgtgaattcaattttaggatcatcacaactcctttcagatgctaaactagaaaactagtttttctcttttcaccatcaggtcaagctagtcttagatttgttgtttagctgcctgataataaagaactagcttgctagtgcatcttcccatgttagtcagaaggtatcaacaacatgaaaaatcagcctctgcggatcccaaatattgaacttactgccgatccgtagccacagataccattttatcaatgatatccttaacgtatatgctgctcctgaagtatgctttgatgtgtttttgcttagcttgtcactccttatggaaataatccattttacatcaaatgggccatgacaaattatttgttagttcagcactgagtagacatgata

SEQ ID NO: 65970 - DNA, 348 bp, Setaria italica
  Peptide Sequence Number=SeqID_131944
ttgagtaaaagcctaaatttgaatgtgaatcaatttaggatcatcacaactcctttcagatgctaaactagaaaactagttttctcttttcaccatcaggtcaagctagaaaactagtttttctcttttcaccatcaggtcaagctagtcttagatttgttgtttagctgcctgataataaagaactagcttgctagtgcatcttcccatgttagtcagaaggtatcaacaacatgaaaaatcagcctctgcggatcccaaatattgaacttactgccgatccgtagccacagataccattttatcaatgatatccttaacgtatatacttcaggagcagcatatacg

SEQ ID NO: 65971 - DNA, 452 bp, Setaria italica
  Peptide Sequence Number=SeqID_131945
ggagaaaaccctgccatttcatttagcttcgtcaatatttcagatggctttcccaaagccttcacgaaaagtctaccaacaaacctgagttcttccttctcagcatcataaagcttgaagaaaagtagtatgtcttctttgctcttctctggtggacgaattggacgtaactccggtccaagttcaacttccaggaacagcttcaactcagcacttgtgtgccttatttgagacttccctaagctgcccgaccgattgtgcttcttcatgggcggtcaacggacgatttggccggtatgtatggttctgcctcttagcccacaaccagaagcgctgaaactgtacaggtatgccatattcctttgcaacttcctccttgaaatgaagtaaaaaggacaaactagacttactagaaatagacggaaagactagacgaaactttttacgtagga

SEQ ID NO: 65972 - DNA, 497 bp, Setaria italica
  Peptide Sequence Number=SeqID_131946
taggtccttttgtttggttagtttaagttcctattattgtattggttttcttctaatttattaaatttttcacaggcttctcataggtgtgacgattctgattggctgtgtaagaccttttcgatgttgtatcagtgtgctccaagccaaggtattgttcccaagcaccgtatacgtctctcctctgaaaacgtgcagatacaacatcagtatcctggaggtactctggccggttcatggatatgaatgcaagcttccacttggagaattcctcatcggggactctaagttttctttggatgcgctccattacctcagcagcagtctcaccttcacggataaccatccaaaaaaaggatctccaaaaattctgaatctgctgattctgattagggtctttcatgaaatggtaaacatgaatcaatcgatcatgtgggccaagattcttctcttcctctgggatctcctcagcccgtagtgtccagtactgatcattt

SEQ ID NO: 65973 - DNA, 403 bp, Setaria italica
  Peptide Sequence Number=SeqID_131947
aaatatatatccttcccaatttgttgtttcaaatcctcatctcgagccaccttaataatggtataaagatgagcttcagctttttctttctttttgtgttctttatcttcttgttctttcttcaaccttacccttaaatgctcagcgatgtccttttcatcaacagtacacatgattttctccttgtcactctcacgaatataaacaagcatatacgcgtttgaatacttcgtgaatttaaacggggcgttgttgaagccagggtttacttgtggcaactcttcctcgccgccatattgttcttcaagggccttcttagcatcttcttttgttacacgctcatcatcaaatttgtacctcaacaatcagtggaaggatttgggacttgggaggattggggatt

SEQ ID NO: 65974 - DNA, 401 bp, Setaria italica
  Peptide Sequence Number=SeqID_131948
aatagtaccaaacaagaatagactaccaacacctcgatatttgacgggttgcggtttaggttgctgagagtagcaattatgggatgtaagccgaattttcgctggatcatccaactcaagttgacaagcaactctctcaacaacgtcgtcataggtatgaagctttgacaattccaaagaaaatcatcatcctttggtttctccaaagccggaaatgcacaacctgcaccaaacaagtactgcctattatggacatactccaaaaatgaaggaacgtctggatatcgcacttgtgtatcatggtcagctcttggtgctttttggaaacaagaatgtccccatcttcaagctgactagaacgaaagtaagttctggtcaatatttcacacatcacgtttggc

SEQ ID NO: 65975 - protein, 84 aa, Setaria italica
  misc_feature (12)..(12): Xaa can be any naturally occurring amino acid
  Transcript Sequence Number=SeqID_1
LNEASATRFLIXENNSMLEFTPDTIRIYVSKNLNATFKELVMVMMCCMHPQFLVSFSRWTSKLPSDGGEVSHLSSSSSDWLHQV

SEQ ID NO: 65976 - protein, 110 aa, Setaria italica
  Transcript Sequence Number=SeqID_2
  Subcellular localization annotation: CTP_CleavageSite=39; ConfidenceScore=5.74e-01
RPFLPPPRHPPPPGAYASAPPSSSSTAFSAARRPLLLPRLAAQGQTRGFRPNKYIGNLPLSVPTSLFRSDLVLSRRWRSSAGRRRSSSPPADERLRVWGHPTRPPRPPPP

SEQ ID NO: 65977 - protein, 34 aa, Setaria italica
  Transcript Sequence Number=SeqID_3
QVRVQILNKDSSTNLAKTSLHLVQQSRKKTTCIR

SEQ ID NO: 65978 - protein, 57 aa, Setaria italica
  misc_feature (26)..(26): Xaa can be any naturally occurring amino acid
  Transcript Sequence Number=SeqID_4
  Gene Ontology: Mol. function=catalytic activity
EILLHLLRSKIQIVVLLPNRERREGXLEHYSLHYNVALVSVKNYTVDCPVDLNHEKI

SEQ ID NO: 65979 - protein, 156 aa, Setaria italica
  Transcript Sequence Number=SeqID_5
  Gene Ontology: Mol. function=DNA binding; Cellular component =chromosome; Biological process=nucleosome assembly
  Homolog annotation: Hit_ID=Q94JJ7; Match level="QueryCoverage=64%, HitCoverage=67%, E-value=5e-29, Identity=67%"; Hit description =Histone H2B.3
  Pfam annotation: Domain name=Histone; Domain location=82-152; Score =107.4; E_value=5e-29; Accession=PF00125.16; Description=Core histone H2AH2BH3H4
  Subcellular localization annotation: CTP_CleavageSite=68; ConfidenceScore=5.78e-01
NPQSSSTSTRLLRASRAATPTRSRWRPRPRRSPPPRSPRRRSRRPRRRRRPRRGKKPKAEKRLPAGKSAGKDGEKKGKKKAKKSVETYKIYIFKVLKQVHPDIGISSKAMSIMNSFINDIFEKLAAEAAKLARYNKKPTITSREIQTSVRLVPPRR

SEQ ID NO: 65980 - protein, 56 aa, Setaria italica
  Transcript Sequence Number=SeqID_6
KKRLLVYGKSSMTVGLLVHGKISVTVIISIGFVYGCTFIVRCIFILILKDFCLHFL

SEQ ID NO: 65981 - protein, 78 aa, Setaria italica
  Transcript Sequence Number=SeqID_7
IKIKKKKHLITNVEWLCTHLQDEGEVFTPMRLICLFLSLTGFTRFRNTLFFKDVRKCTTRSRIILLGKKLVFPYPRRG

SEQ ID NO: 65982 - protein, 139 aa, Setaria italica
  misc_feature (113)..(113): Xaa can be any naturally occurring amino acid
  Transcript Sequence Number=SeqID_8
  Gene Ontology: Mol. function=catalytic activity; Cellular component =nucleus; Biological process=ribosome biogenesis
  Homolog annotation: Hit_ID=Q8H7V4; Match level="QueryCoverage=78%, HitCoverage=6%, E-value=3e-23, Identity=51%"; Hit description =Putative polyprotein from transposon TNT
KRQIRRIGVKLLPRPEGSIKIFGDVYPKGVWSELEHGVVSHILRNLVALASFKGESKLRTCTGFFIDYADKCPTILTSASLVRKNDAKIIEGLRIVVLLPNRERCEGKLEHYXLHYNVALVSIKNYTVDCPVDLNREHI

SEQ ID NO: 65983 - protein, 263 aa, Setaria italica
  misc_feature (88)..(88): Xaa can be any naturally occurring amino acid
  Transcript Sequence Number=SeqID_9
  Gene Ontology: Mol. function=catalytic activity; Cellular component =nucleus; Biological process=ribosome biogenesis
  Homolog annotation: Hit_ID=Q8H7V4; Match level="QueryCoverage=85%, HitCoverage=12%, E-value=4e-50, Identity=48%"; Hit description =Putative polyprotein from transposon TNT
TFLQIFRATNYYAISCQPGSIKIFGDVYPNGVWSELEHGVVSHILRNLVALASFKGESKLRTCTGFFIDYADKCPTILTSASLVRKTXAKIIEGLRIVVLLPNRERCEGKLEHYSLHYNVALVSIKNYTVDCPVDLNREHIDWSTKLLAVGRCFESGLAMAASGKCTRWSGNLDCKDLQYTACTITKAGIGGPLVAVNGKFVGMNYYDRNMGTPFLWFDLLRGILNYFKTGQTNYMKINHDSSVLICEVGCIVKDGEQQPPNR

SEQ ID NO: 65984 - protein, 565 aa, Setaria italica
  misc_feature (258)..(258): Xaa can be any naturally occurring amino acid
  Transcript Sequence Number=SeqID_10
  Gene Ontology: Mol. function=catalytic activity; Cellular component =nucleus; Biological process=ribosome biogenesis
  Homolog annotation: Hit_ID=Q8H7V4; Match level="QueryCoverage=87%, HitCoverage=27%, E-value=2e-84, Identity=38%"; Hit description =Putative polyprotein from transposon TNT
MLPSKRGADDLTRFSADNKRTCSGEEATDFLDIWRDLGVEVASKVSRSVVSIGLSDGQTVLYASSGVVIECQSSFTKFVTSASLVRALHDSETNDHTVKIVVRHEEDVAIGFLEEYDLDYEIAVVKVKAILDVYCVPLDHQVQFDPHGRKVVAVGRDISNRLLTTSGTCTDSHGSQYSRYLMFSTCKLSEVMQGGALYDFYGNFFGINLFWDMERPIFLPRSIILERVVHFRTSLKKSVFLNLVKPVRDKKRQIRRIXCENFSLVLKIFRATNYYAISCQPGSIKIFGDVYPNGVWSELEHGVVSHILRNLVALASFKGESKLRTCTGFFIDYADKCPTILTSASLVRKNDAKIIEGLRIVVLLPNRERCEGKLEHYSLHYNVALVSIKNYTVDCPVDLNREHIDWSTKLLAVGRCFESGLAMAASGKCTRWSGNLDCKDLQYTACTITKAGIGGPLVAVNGKFVGMNYYDRNMGTPFLWFDLLRGILNYFKTGQTNYMKINHDSSVLICEVGCIVKDGEQQPPNRRSEDKILEDQDEDASKDERAAIAHPNRYWYRNGNLSVYK

SEQ ID NO: 65985 - protein, 294 aa, Setaria italica
  misc_feature (73)..(73): Xaa can be any naturally occurring amino acid
  misc_feature (111)..(111): Xaa can be any naturally occurring amino acid
  Transcript Sequence Number=SeqID_11
  Gene Ontology: Mol. function=catalytic activity; Cellular component =nucleus; Biological process=ribosome biogenesis
  Homolog annotation: Hit_ID=Q8H7V4; Match level="QueryCoverage=84%, HitCoverage=17%, E-value=6e-36, Identity=33%"; Hit description =Putative polyprotein from transposon TNT
MQGGALFDFYGNFFGINLFWDMERPIFLPRSIILERVVHFRTSLKKSVFLNLVKPVRIKKDEEDDRCETSPPXEGSIKIFGDVYPNGVWSELEHGVVSHILRNLVALASFXIQIVVLLPNRERREGKLEHYSLHYNVALVSVKNYTVDCPVDLNHEKIDWSTKLVAVGRCFESALAMAASGKRTRWSGKLDCKDLHYTCTITKAGIGGPLVAVNGKFVGMNYYDRNMGTPSLWFDLLRGILNYFKTEQTNYMKIHHDSSVLSCEVGCIVKDVEQQPPNCWMVARRSKDNHRGSR

SEQ ID NO: 65986 - protein, 462 aa, Setaria italica
  Transcript Sequence Number=SeqID_12
  Gene Ontology: Mol. function=oxidoreductase activity, acting on paired donors, with oxidation of a pair of donors resulting in the reduction of molecular oxygen to two molecules of water; Biological process=fatty acid biosynthetic process
  Homolog annotation: Hit_ID=B6TV08; Match level="QueryCoverage=95%, HitCoverage=95%, E-value=0.0, Identity=90%"; Hit description =Desaturase/cytochrome b5 protein
  Pfam annotation: Domain name=Cyt-b5; Domain location=22-95; Score =86.5; E_value=9.6e-23; Accession=PF00173.20; Description=Cytochrome b5-like HemeSteroid binding doma
  Pfam annotation: Domain name=FA_desaturase; Domain location=150-422; Score=125.4; E_value=1.9e-34; Accession=PF00487.16; Description =Fatty acid desaturase
  Pfam module annotation: Pfam domain module=Cyt-b5::FA_desaturase; Domain location=22-95::150-422
MPPSADAMPAPGDAAGADDVRMISSKELRAHASPDDLWISISGDVYDVTPWLPHHPGGDLPLITLAGQDATDAFAAYHPPSARPLLRRFFVGRLSDYTVSPASADYRRLLAQLSSAGLFERVGPTPKVQLLLMATLFCAALYLVLACASACAHLLAGGLIGFIWIQSGWMGHDSGHHRITGHPLLDRVVQVLSGNCLTGLSIAWWKCNHNTHHIACNSLDHDPDLQHMPLFAVSPKLFGNIWSYFYRRTLAFDAASKFFISYQHWTFYPVMCVARINLLTQSALFVLTEKRVPQRLLEIAGVAAFWAWYPLLVSCLPNWWERVAFVLSSFTICGIQHVQFCLNHFSSEVYVGPPKGNDWFEKQTAGTLDILCSPWMDWFHGGLQFQIEHHLFPRLPRCHLRKVAPYVRDLCKKHGLTYSAASFWDANVLTWKTLRAAALQARNATSGAAPKNLVWEALNTHG

SEQ ID NO: 65987 - protein, 220 aa, Setaria italica
  misc_feature (22)..(22): Xaa can be any naturally occurring amino acid
  Transcript Sequence Number=SeqID_13
  Gene Ontology: Mol. function=ribonuclease H activity
  Homolog annotation: Hit_ID=B6TRZ9; Match level="QueryCoverage=92%, HitCoverage=72%, E-value=1e-109, Identity=93%"; Hit description=FIP1
  Pfam annotation: Domain name=GRAM; Domain location=96-177; Score =54.1; E_value=5.3e-13; Accession=PF02893.12; Description=GRAM domain
  Subcellular localization annotation: CTP_CleavageSite=28; ConfidenceScore=5.15e-01
EKLTSDSPTHVHAAAAAESSQXVSRGPAASSSKGAVDAMKETLSRWGKTWGETTKMVESLSRDTWQHFKTGPSLTEAAMGRLAQGTKVLAEGGYEKIFKQTFEVLPDEQLKICYACYLSTSAGPVMGVLYISTAKIAFCSDNPLSYKAGNKTEWSYYKVVIPLHQLRAANPSVSKMNPAEKYIQVVSVEGHEFWFMGFLMYDKAAASLQEALASARELQP

SEQ ID NO: 65988 - protein, 70 aa, Setaria italica
  Transcript Sequence Number=SeqID_14
  Homolog annotation: Hit_ID=Q01N17; Match level="QueryCoverage=62%, HitCoverage=11%, E-value=2e-14, Identity=88%"; Hit description =OSIGBa0147B06.6 protein
NADSLPLLSELRSLSAAGRSMHAIELEKRAIHLLVEEGKELQRMKALNVLGKVSPNASSKPTPLQRQSQK

SEQ ID NO: 65989 - protein, 203 aa, Setaria italica
  Transcript Sequence Number=SeqID_15
  Homolog annotation: Hit_ID=Q01N17; Match level="QueryCoverage=97%, HitCoverage=87%, E-value=3e-50, Identity=74%"; Hit description =OSIGBa0147B06.6 protein
VGIKRLQSDTPSSPGYHNVYVRRKVESEHSKVNPSQDLKGNGRDKAKEQETHQDVQQDQQEEASRTQVSSPVAESVEIVSSKSPEKTNAEIVPEKTEPPVASGTGIQEDVKQLSIQYWNERFNRLQTYLESCDHSTQEGYLRKLRSLSAAGRSMHAIELEKRAIHLLVEEGKELQRMKALNVLGKVSPNASSKPTPLQRQSQK

SEQ ID NO: 65990 - protein, 204 aa, Setaria italica
  Transcript Sequence Number=SeqID_16
MATRLHSPSTSLPLLLLLPLLLLAAAASALEDSPAETKNMMPRLGRSLQQLPNPLPQPMPQPNPNPQPQPLPQPNPNPQPQPLPQPNPQPGLSPPQPLPQPQPQPGLNPQPQPLPQPDPAAPQPPQPVPVPQPDPTVQPQPVPQPADPGLQQPQPGTTTQPAPNQQNPQPQPDQLLPTGGSSRMLMKNLQGLVYILLSLANLVM

SEQ ID NO: 65991 - protein, 146 aa, Setaria italica
  Transcript Sequence Number=SeqID_17
DVGLSSVLGGALFVSTVVAGVVAVVAESRGEVVIERRGFVRDVCFLLVALCYLLAVLLAGTVTVWAAASFLSLYAAYVLIVWFSHCCAAARAEDDDDPLLEDGKKPAAAANNSSDVLAAPLLLDVHGDGGAAPPLPSPSTSLPLPR

SEQ ID NO: 65992 - protein, 282 aa, Setaria italica
  misc_feature (80)..(80): Xaa can be any naturally occurring amino acid
  Transcript Sequence Number=SeqID_18
ALSAGDEFLENQSAGWSLWSFTSSDDHDAAAAYPETHGSGAAPSEEGSVRAPLEPPPCTQPTDDIFLSQFSDEEMRRMDXPFEALDMFPDSMHRLLSYEDMLSGVLTGSSSGDGEVKLERDGVDAMDTCGFPLFSHDLQNAEPNGSEEMLADTLSMDKDGMGTVKRSRSFADDESAGGFNFESLVLEELEDVVFQLTKKTRICFRDAFFRMAETSSNARCGSRIPAAADCCPERATNAIDRTVADLTMRPPSPAPLQDHGSCFDGGGSGAEAQSTTGWTATA

SEQ ID NO: 65993 - protein, 70 aa, Setaria italica
  Transcript Sequence Number=SeqID_19
NSPNHAHKELIATNNKHLTTNKATMKWDRTESPPEASSADVDADGDGAGRPPVRVRHEEEQLNEKEKEKQ

SEQ ID NO: 65994 - protein, 66 aa, Setaria italica
  Transcript Sequence Number=SeqID_20
SYTPESDQGETRPGTNVRVHLSSIITRFSCLPNAQGSMFRIFKSVKLSACCMMKITNPLMNCCAFG

SEQ ID NO: 65995 - protein, 399 aa, Setaria italica
  Transcript Sequence Number=SeqID_21
  Gene Ontology: Mol. function=acyltransferase activity; Cellular component=integral to membrane; Biological process=metabolic process
  Homolog annotation: Hit_ID=B6U6X8; Match level="QueryCoverage=100%, HitCoverage=100%, E-value=0.0, Identity=82%"; Hit description=1-acyl- sn-glycerol-3-phosphate acyltransferase 4
  Pfam annotation: Domain name=Acyltransferase; Domain location=105 -263; Score=47.9; E_value=4e-11; Accession=PF01553.13; Description =Acyltransferase
  Subcellular localization annotation: CTP_CleavageSite=72; ConfidenceScore=5.19e-01
MECPSSTSSQGHHVNGKQSTDPPGPAIVKNGPRHRPLTPIRRCRGVLCLVIMLLTAFMMMVYLSPITTFLVRLFSVHYSRKSTCFLFGMWLAMWPFLFEKVNKTRFIFSGESVPPKERVLLFANHRTEVDWMYLWDFALRKGRLQCIKYMLKKSLMKLPVFNWSFHLIEFIPVDRKWEIDEPIIRRRLSEFKNPRDPLWLAVFPEGTDYTEKKCIKSQEYAVEHGLPVLKNVLLPKTKGFNCCLQELRSSIDAVYDITIAYKHRLPTFLDNVYGIDPSEVHIHINSIQVSDIPTSEDEVAGWLVERFRLKDELLSKFSALGHFPNEGTEGDLSTLKCLVNFTAVVSVTGILTYLTLFSSVWFKVFVAFSCAFLTIVTCYSIHLPQLIGSPGLSSRAKYA

SEQ ID NO: 65996 - protein, 109 aa, Setaria italica
  Transcript Sequence Number=SeqID_22
  Subcellular localization annotation: CTP_CleavageSite=65; ConfidenceScore=5.66e-01
MTHGPPAQPPRPPAPLLRPADPVTARFSLSPRRRRGPRRLTVGLAAGRRLLPAPAVREQQSVAVVKEKVAAHPRTVGRRAGTSGGGGVSAFVNAVSKHQVPSGANPDSN

SEQ ID NO: 65997 - protein, 101 aa, Setaria italica
  Transcript Sequence Number=SeqID_23
AIADGESGSIKTWILCVGSTPLNDSVTKEMLCENSFENEPLHVLKSRFTANKLYPYPCYILCIFLLVSPFVVEVGLVDYFCTHPCFVASEKDPDFIAEDFE

SEQ ID NO: 65998 - protein, 391 aa, Setaria italica
  misc_feature (138)..(138): Xaa can be any naturally occurring amino acid
  Transcript Sequence Number=SeqID_24
  Homolog annotation: Hit_ID=B3IX45; Match level="QueryCoverage=77%, HitCoverage=39%, E-value=2e-65, Identity=48%"; Hit description =Transcription factor CPP
  Pfam annotation: Domain name=CXC; Domain location=148-189; Score =83.9; E_value=5.9e-22; Accession=PF03638.7; Description=TesminTSO1 -like CXC domain
  Pfam annotation: Domain name=CXC; Domain location=62-103; Score=81.9; E_value=2.3e-21; Accession=PF03638.7; Description=TesminTSO1-like CXC domain
  Pfam module annotation: Pfam domain module=CXC::CXC; Domain location =148-189::62-103
KECAWRKLLCAGENFTHSGGELLEFPMDDCSSGGFPLNDHVSSQSVSPQKKRRKTDNGDDGEACKRCSCKKSKCLKLYCECFAAGVYCSEPCSCQGCLNKPIHEEIVLSTRKQIEFRNPLAFAPKVIRMSDAGLETGXDPNNTPASARHKRGCNCKKSSCLKKYCECYQGGVGCSSNCRCESCKNTFGRRDAETELTEEMKQEGEQTENSGKEKENDQQKANVQSEDHPLVELVPITPPFDLSSSLLKLPNFSSAKPPRPSKARSGSSRSSASKATTTLQSCKSSKAAGSGIDEEMPDILKEADSPSRVKTTSPNRKRVSPPHNALSISPNRKGGRKLILKSIPSFPSLTGDSNSGSAMNNTDNTFSASPLPFLLVPYLLVEYRYSSLGAG

SEQ ID NO: 65999 - protein, 538 aa, Setaria italica
  Transcript Sequence Number=SeqID_25
  Gene Ontology: Mol. function=binding; Cellular component=spliceosome; Biological process=anti-apoptosis
  Homolog annotation: Hit_ID=B9S956; Match level="QueryCoverage=93%, HitCoverage=93%, E-value=0.0, Identity=63%"; Hit description =Apoptosis inhibitor, putative
  Pfam annotation: Domain name=API5; Domain location=10-538; Score =828.1; E_value=5.4e-246; Accession=PF05918.3; Description=Apoptosis inhibitory protein 5 (API5)
MAAADADAAEVERLYELGERLSSAKDKSEHAADYEAIIAAVKGQSVKAKQLAAQLIPRFFRSFPTLATRAMSAMFDLVEMEELAIRIQAIRGFPLLGKDTEFVSKIADILGQLLTSEENVERDAVHKALMSLIRQDVKNSLQPLFKHVESGSEIREKIICFLRDKVFPLKAELLKPQAEMERFITDLIKKSVQDVTGSEFELFMGFLRSLSIFGDSAPKESFQELIEIIQAQADLDSQFNVSDIDHIERWSSCMYMALPIFMRGASSSKFLNYFVKQIVPAFEKIPEEKKLDLLKTIAASSPYAAAQDSRQLLPSVVQLLKKYMPGKKVEDINHNYVECLLYTFHHLAHKTPNTTNSLCGYKIVTGQPSDRLGEDFSEHYKDFTERLTGTEETVRAAIKRLTQGMADFNKAISSAKTEEEKTKIKGDQQTATRTMRSYNNILAMTQPLHSKSPSFIGDKKITLSWMEQPKKPAATTAGEKRSQPATNGNGPASKRGRGGMQNQLVNRAFEGLSRGGRGSGRGRGRGGRGRGRGWGGYR

SEQ ID NO: 66000 - protein, 161 aa, Setaria italica
  Transcript Sequence Number=SeqID_26
MQFLRSGGGGGGGGGFGGAAWEVVRRHFSRKRSVDVRRINPKVPKEEAVAISGRLLQILSDHGPLTVGNTWNHAKDAGISGLNSKTHMKILLKWMTGRRIVKLSCVQVGNVKKFLYSQYTESSEAPKEASSSSALQEASAQGGKGKATRGQPKKKQAAALH

SEQ ID NO: 66001 - protein, 60 aa, Setaria italica
  Transcript Sequence Number=SeqID_27
TDITELTNAMELIIPTSFFKNKQVGQHWKLIKPNGYKMQQPKFKSLHIFSQNKKEITINE

SEQ ID NO: 66002 - protein, 479 aa, Setaria italica
  misc_feature (67)..(67): Xaa can be any naturally occurring amino acid
  Transcript Sequence Number=SeqID_28
  Homolog annotation: Hit_ID=Q2QP06; Match level="QueryCoverage=100%, HitCoverage=68%, E-value=1e-128, Identity=52%"; Hit description =Calmodulin-binding protein, putative, expressed
  Pfam annotation: Domain name=Calmodulin_bind; Domain location=1-191; Score=18.8; E_value=4.9e-11; Accession=PF07887.3; Description =Calmodulin binding protein-like
LEHAIFTDNSSFTSTKMFRLGLRLVSPSGERVLEGVTKPFRVKERRVEGFEKHYPPLLKDEVWRLKXIGKIGAYHQALLDNGIDSVKKFLQAYMKDEQKLIKIFNKMPQSTWKSIIEHAMTCQYGDSLYLYEVKDNDAGLFFDEIYQLVGVKFGDYYKSIDQLDQIEKNLVDSLKQAAYQNIDGIQSNYKMVNNYPVPHRFPAQGTSLLSPVLPNQQILNCGQHNSYLGDASTSQGFRSTYSKEKFSSSLQSSNVPVDISRFVQGQPSNDVQMIHEPITNRDVQYSSSQGTILPAPRITQLQIPSNEVTCFGLDASPSTVVPNDILASQVAARFNQSRQSEGSHFSEESYNLLPVHNLSSTDVVMSLMQSELHLPSNCDSFSNHWDQRCNDETIMQRQQVFTGFQTSRTNSFDSSSSEDLLQSFISQIPNSDGAAMPLSPRKWFKIKVAFKLASMGRVSRALRRGPHCPAPRPRLVKTI

SEQ ID NO: 66003 - protein, 87 aa, Setaria italica
  Transcript Sequence Number=SeqID_29
LLRISPSLHFLLATLLSLHAVKNHLESCNLQADIERDQSSIFAKAHNIYSSSARSHCQSHRAKVYWASLPLDLLLAVLLLGRQGISI

SEQ ID NO: 66004 - protein, 138 aa, Setaria italica
  Transcript Sequence Number=SeqID_30
  Gene Ontology: Mol. function=sequence-specific DNA binding; Cellular component=nucleus; Biological process=regulation of transcription, DNA-dependent
  Homolog annotation: Hit_ID=Q9LEE6; Match level="QueryCoverage=98%, HitCoverage=17%, E-value=6e-51, Identity=78%"; Hit description=OCL5 protein
  Pfam annotation: Domain name=Homeobox; Domain location=100-138; Score= 10.9; E_value=0.001; Accession=PF00046.21; Description=Homeobox domain
MTPARRMPAMIGRNGVAYGSSSALSLNQTDLLDSHHLQQAFQQQLFDQIPAGAVDSGDNIIHGRSDTLADEFESKSCSENPDGTSGDDGQEDPNQRPNKKKRYHRHTQHQIQEMEAFFKECPHPDDKQRKELSRELRT

SEQ ID NO: 66005 - protein, 331 aa, Setaria italica
  misc_feature (314)..(314): Xaa can be any naturally occurring amino acid
  misc_feature (324)..(324): Xaa can be any naturally occurring amino acid
  Transcript Sequence Number=SeqID_31
  Gene Ontology: Mol. function=sequence-specific DNA binding; Cellular component=nucleus; Biological process=regulation of transcription, DNA-dependent
  Homolog annotation: Hit_ID=Q9LEE6; Match level="QueryCoverage=100%, HitCoverage=42%, E-value=1e-155, Identity=84%"; Hit description=OCL5 protein
  Pfam annotation: Domain name=START; Domain location=104-322; Score =253.5; E_value=4.9e-73; Accession=PF01852.11; Description=START domain
AALGEMSFDEHHLRLENARLRDEIDRISGIAAKHVGKPMVSFPVLSSPLAAAAARSPLDVVGAFGVQPSGLGADHLFGVGASTGELLRSVSTGQLDADKPMIVELAVAAMDELLRMARLDAPLWGASAAGAQLDEEEYGRMFPGGLGLRQYGLRPEASRDGAVVIMTRDSLVEILMDANRFAAVFSSIVSRASTHEVLSTGVAGSYNGALQVMSMEFQVPSPLVPTRESYFARYCKNNADGTWAVVDVSLDSLRPSPVLKCRRRPSGCLIQEMPNGYSKVTWVEHVEVDDRSVHILYRPLVNSGLAFGAKRWVXTLDRQCERLXASAMASN

SEQ ID NO: 66006 - protein, 105 aa, Setaria italica
  Transcript Sequence Number=SeqID_32
  Gene Ontology: Mol. function=sequence-specific DNA binding; Cellular component=nucleus; Biological process=regulation of transcription, DNA-dependent
  Homolog annotation: Hit_ID=Q0J9X2; Match level="QueryCoverage=100%, HitCoverage=13%, E-value=1e-40, Identity=84%"; Hit description =Homeobox-leucine zipper protein ROC2
SGSYVIYAPVDVVAMNVVLNGGDPDYVALLPSGFAILPDGPAGGNMQGDGSVGSGGSLLTVAFQILVDSVPTAKLSLGSVATVNSLIACTVERIKAAVSGESNPQ

SEQ ID NO: 66007 - protein, 788 aa, Setaria italica
  Transcript Sequence Number=SeqID_33
  Gene Ontology: Mol. function=sequence-specific DNA binding; Cellular component=nucleus; Biological process=regulation of transcription, DNA-dependent
  Homolog annotation: Hit_ID=Q0J9X2; Match level="QueryCoverage=99%, HitCoverage=100%, E-value=0.0, Identity=82%"; Hit description =Homeobox-leucine zipper protein ROC2
  Pfam annotation: Domain name=Homeobox; Domain location=106-162; Score= 85.5; E_value=1.9e-22; Accession=PF00046.21; Description=Homeobox domain
  Pfam annotation: Domain name=START; Domain location=299-520; Score =279.1; E_value=1e-80; Accession=PF01852.11; Description=START domain
  Pfam module annotation: Pfam domain module=Homeobox::START; Domain location=106-162::299-520
MMIPARHMPSMMIGRNSAAAAYGSSSALSLGQPNLLDNPQLQQALQQQHLLDQIPATTAESGDDMMRGGGRGSDPLGDEFESKSGSENVDGVSVDDQDPNQRPSKKKRYHRHTQHQIQEMEAFFKECPHPDDKQRKELSRELGLEPLQVKFWFQNKRTQMKNQHERQENSQLRADNEKLRAENMRYKEALSSASCPNCGGPAALGEMSFDEHHLRIENARLREEIDRISAIAAKYVGKPMVSFPVLSSPLAAARASTLDIGVGAGAYGATDIFGGVTAGAGELLRGAVQSDADKPMIVELAVAAMEELVRMAQLDESLWNAPGLDGSSETLNEEEYARMFPRGLGPKQYGLKSEASRDSSVVIMTHANLVEILMDVNQYATVFSSIVSRAATLEVLSTGVAGNYNGALQVMSVEFQVPSPLVPTRESYFARYCKNNADGTWAVVDVSLDSLRPSPVLKCRRRPSGCLIQEMPNGYSKVTWVEHVEVDDRSVHILYRPLVNSGLAFGAKRWVGTLDRQCERLASVMASNIPTSDIGVITSTEGRKSMLKLAERMVMSFCGGVTASAAHQWTTLSGSGAEDVRVMTRKSVDDPGRPPGIVLNAATSFWLPVPPKRVFDFLRDESSRSEWDILSNGGVVQEMAHIANGRDHGNCVSLLRVNSANSNQSNMLILQESCTDASGSYVVYAPVDVVAMNVVLNGGDPDYVALLPSGFAILPDGPPGAAPHGESGSLEAGGGSLLTVAFQILVDSVPTAKLSLGSVATVNSLIACTVDRIKAAVCAEGNPQQPSI

SEQ ID NO: 66008 - protein, 78 aa, Setaria italica
  Transcript Sequence Number=SeqID_34
  Subcellular localization annotation: CTP_CleavageSite=51; ConfidenceScore=5.18e-01
LISSSQLNSLVHPIHSCLFTACSSDSNWSWIATLQPSADILQRQQQWLAARRSTRGRRRPTPRRRPTGRCCAPCTAWR

SEQ ID NO: 66009 - protein, 96 aa, Setaria italica
  Transcript Sequence Number=SeqID_35
PLITAQNHGTNPRQRTSSSQAQTLTNAIYNRYPPIRSRILDLSVQINLLLTPQITGKTHGMHPGDARNETQKHSTRHAHASTHAINVAMLRRRSPG

SEQ ID NO: 66010 - protein, 57 aa, Setaria italica
  Transcript Sequence Number=SeqID_36
LHYEIHFHRLHLSCGRMFSINWVKLRRHRTNSESLVFVDSMQRNMLLQQPETFKKKG

SEQ ID NO: 66011 - protein, 45 aa, Setaria italica
  Transcript Sequence Number=SeqID_37
  Gene Ontology: Mol. function=methyltransferase activity
ESMLSHHFGPDIVDALFHRYTELVTASMEREEVKSVQIGVVLTRL

SEQ ID NO: 66012 - protein, 91 aa, Setaria italica
  Transcript Sequence Number=SeqID_38
TVAQACSYGDQMHAQETNERASYRPAGRKDMESSSGSGISPSLLQRQAYMHARGCSSGPQREKNVTSARLLLSHSGHEDYDSHQPKSNSII

SEQ ID NO: 66013 - protein, 146 aa, Setaria italica
  Transcript Sequence Number=SeqID_39
  Gene Ontology: Mol. function=2 iron, 2 sulfur cluster binding; Biological process=electron transport chain
  Homolog annotation: Hit_ID=Q6JAD2; Match level="QueryCoverage=77%, HitCoverage=77%, E-value=5e-53, Identity=90%"; Hit description =Ferredoxin
  Pfam annotation: Domain name=Fer2; Domain location=49-123; Score =74.3; E_value=4.6e-19; Accession=PF00111.19; Description=2Fe-2S iron- sulfur cluster binding domain
  Subcellular localization annotation: CTP_CleavageSite=35; ConfidenceScore=5.37e-01
MAAASASLLHLATPIGSLRLSLRLRLRRHPTARPVASRLAPPRAYKVTIEHGGESRVVEVEGDETILSRALDEGLDVPHDCKLGVCMTCPARLVSGEVDQSDGMLSDDVVAQGYALLCAAYPRSDCTIRVIPEDELLQVQLATADD

SEQ ID NO: 66014 - protein, 68 aa, Setaria italica
  Transcript Sequence Number=SeqID_40
RSGRSKVRMASDQKEEVPAVAHMEQKVSDKCCNDPKEQEVVMVVEEEATKPEEDQECDKEDGSAMRQG

SEQ ID NO: 66015 - protein, 96 aa, Setaria italica
  Transcript Sequence Number=SeqID_41
  Homolog annotation: Hit_ID=B6TNQ7; Match level="QueryCoverage=92%, HitCoverage=31%, E-value=1e-26, Identity=70%"; Hit description =UPF0737 protein 6
  Subcellular localization annotation: CTP_CleavageSite=82; ConfidenceScore=5.68e-01
VFAVVFAGIGGSAVCQSTDSKSPSTSDNTNQNNMLPPTKATEKPQNGTSTEQPRLRTLGSLTTRTSSCSDIRKIMMEDMPMVSSKVEGPNARRIDG

SEQ ID NO: 66016 - protein, 56 aa, Setaria italica
  Transcript Sequence Number=SeqID_42
  Gene Ontology: Mol. function=protein binding; Cellular component =intracellular; Biological process=transport
  Homolog annotation: Hit_ID=B6TNQ7; Match level="QueryCoverage=83%, HitCoverage=16%, E-value=3e-22, Identity=97%"; Hit description =UPF0737 protein 6
MSSIIIFLYRYKKGEDVRIVCVCHGSFLTPAEFVKHAGGGDVSNPLRHIVVNPCRS

SEQ ID NO: 66017 - protein, 293 aa, Setaria italica
  misc_feature (62)..(62): Xaa can be any naturally occurring amino acid
  Transcript Sequence Number=SeqID_43
  Gene Ontology: Mol. function=protein binding; Cellular component =intracellular; Biological process=transport
  Homolog annotation: Hit_ID=B6TNQ7; Match level="QueryCoverage=55%, HitCoverage=56%, E-value=7e-66, Identity=76%"; Hit description =UPF0737 protein 6
  Pfam annotation: Domain name=DUF1675; Domain location=19-286; Score =368.2; E_value=1.5e-107; Accession=PF07897.3; Description=Protein of unknown function (DUF1675)
RPQAEDAAAGGAAGGESDDVELSLGLSLGGRFGTEAKRQRLARSSSIASVCSVSSLDGDDAXPSPAAPLPLLRTSSLPTETEEERWRRREMQSRRRLEARRKRVERRNSMGGAPPSAPPKPGGEATATAAANGVQLRRSVGSQGSNSVNTAEQGIGGSAVCQSTDSKSPSTSDNTNQNNMLPPTKATEKPQNGTSTEQPRLRTLGSLTTRTSSCSDIRKIMMEDMPMVSSKVEGPNARRIDGFLYRYKKGEDVRIVCVCHGSFLTPAEFVKHAGGGDVSNPLRHIVVNPSPFS

SEQ ID NO: 66018 - protein, 86 aa, Setaria italica
  misc_feature (1)..(8): Xaa can be any naturally occurring amino acid
  Transcript Sequence Number=SeqID_44
XXXXXXXXFFTHVLSNNWINQHKLRTTQGNLSSIGIICYPYRCTILYFVMHIITDDYCYITINPAGYPWISTDLLHSYINMISSKP

SEQ ID NO: 66019 - protein, 88 aa, Setaria italica
  Transcript Sequence Number=SeqID_45
  Homolog annotation: Hit_ID=B9SMF9; Match level="QueryCoverage=64%, HitCoverage=5%, E-value=2e-21, Identity=82%"; Hit description=WD -repeat protein, putative
GEARGRERRCGGGGGGGGKGRGAAEEVEVVVQFDTTRNRFLAAGDEFMVKIWDMDNTGLLTTIDADGGLPASPRIRFNKEGTLLAVST

SEQ ID NO: 66020 - protein, 70 aa, Setaria italica
  Transcript Sequence Number=SeqID_46
  Homolog annotation: Hit_ID=Q8H6S5; Match level="QueryCoverage=80%, HitCoverage=4%, E-value=7e-13, Identity=64%"; Hit description=CTV.2
SSSVHPVVVAAHPSEASQFALGLTDGGVYVLEPLESERKWGNPPPAENGSTSNLSTPPPNGASSSDQPER

SEQ ID NO: 66021 - protein, 1129 aa, Setaria italica
  Transcript Sequence Number=SeqID_47
  Homolog annotation: Hit_ID=Q8H6S5; Match level="QueryCoverage=100%, HitCoverage=100%, E-value=0.0, Identity=76%"; Hit description=CTV.2
  Pfam annotation: Domain name=LisH; Domain location=6-32; Score=18.9; E_value=0.0098; Accession=PF08513.3; Description=LisH
  Pfam annotation: Domain name=WD40; Domain location=1001-1039; Score =6.5; E_value=6.7; Accession=PF00400.24; Description=WD domain, G -beta repeat
  Pfam annotation: Domain name=WD40; Domain location=341-379; Score =2.5; E_value=20; Accession=PF00400.24; Description=WD domain, G-beta repeat
  Pfam annotation: Domain name=WD40; Domain location=401-440; Score =2.8; E_value=19; Accession=PF00400.24; Description=WD domain, G-beta repeat
  Pfam annotation: Domain name=WD40; Domain location=447-487; Score =34.6; E_value=3.9e-07; Accession=PF00400.24; Description=WD domain, G-beta repeat
  Pfam annotation: Domain name=WD40; Domain location=491-531; Score =22.3; E_value=0.002; Accession=PF00400.24; Description=WD domain, G -beta repeat
  Pfam annotation: Domain name=WD40; Domain location=581-620; Score =4.2; E_value=12; Accession=PF00400.24; Description=WD domain, G-beta repeat
  Pfam annotation: Domain name=WD40; Domain location=825-862; Score =10.9; E_value=2; Accession=PF00400.24; Description=WD domain, G-beta repeat
  Pfam annotation: Domain name=WD40; Domain location=866-905; Score =11.4; E_value=1.8; Accession=PF00400.24; Description=WD domain, G -beta repeat
  Pfam annotation: Domain name=WD40; Domain location=909-947; Score =31.6; E_value=3.1e-06; Accession=PF00400.24; Description=WD domain, G-beta repeat
  Pfam module annotation: Pfam domain module=LisH::WD40::WD40::WD40::WD4 0::WD40::WD40::WD40::WD40::WD40; Domain location=6-32::1001-1039::341- 379::401-440::447-487::491-531::581-620::825-862::866-905::909-947
MSSLSRELVFLILQFLDEEKFKETVHKLEQESGFYFNMKYFEDEVINGNWDEVERYLGGFTKVDDNRYSMKIFFEIRKQKYLEALDKHDRSKAVEILVKDLKVFASFNEELFKEITQLLTLENFRENEQLSKYGDTKSARAIMLVELKKLIEANPLFRDKLQFPNLKNSRLRTLINQSLNWQHQLCKNPRPNPDIKTLFVDHSCGQPNGARAPSPANNPLLGSIPKPGGFPPLGAHGPFQPAPTPVPPLAGWMSNPPAVTHPAVSGGAIGFGTPTNPAALLKHPRTPTTANPSMDYPSGDSDHVSKRSRPVGMAEEVNLPVNMLPVTYPQSHNYQQEDFHKTVARTLNQGSAPMSMDFHPLQQTLLLVGTNVGDIGLWDVGTKDRLALRNFKVWELGKCSMTLQASLVKDPAVSVNRIIWSPDGTLFGVAYSRHIVQIYSYNGGDDIRQHLEIDAHVGGVNDIAFAHPNKQLCIITCGDDKTIKVWEATSGAKQFSFEGHEAPVYSVCPHYKENIQFIFSTALDGKIKAWLYDNLGSRVDYDAPGHWCTTMAYSADGSRLFSCGTSKEGESHLVEWNESEGAVKRTYQGFRKRSMGVVQFDTTRNRFLAAGDEFMVKIWDMDNTGLLTTIDADGGLPASPRIRFNKEGTLLAVSTLDNGVKILANADGLRLLRTLENRSFDASRNATETVTKPLINPLTAAANAAAASSSGTPAPAAITAMNGDTRGLVDVKPRITDESLDKSKVWKLMEITESTQCRSIKLADNMRASKISRLIYTNSGVAILALTASAVHLLWKWPRSDRNSSGKATASVSPQLWQPPSGIFMTNDMTDNNPEDAVHCFALSKNDSYVMSASGGKISLFNMMTFKTMTTFMPPPPAATFLAFHPQDNNIIAIGMDDSTIQIYNVRIDEVKSKLRGHSKRITGLAFSNVLNVLVSSGADAQLCVWNTDGWEKQKNRFLQIPSGRPSNILDTRVQFHQDQMHFLVVHETQIAIYETTKLEPVKQWPVRENSPPITHATFSCDSQLIYASFMDATVGIFNASSLRLQCRILPASYLPPSISSSVHPVVVAAHPSEASQFALGLTDGGVYVLEPLESERKWGNPPPAENGSTSNLSTPPPNGASSSDQPER

SEQ ID NO: 66022 - protein, 73 aa, Setaria italica
  Transcript Sequence Number=SeqID_48
NSQNQEKLLSPAPSLLVISENHFRKSAENHFSLKNHLVKLLLELIENQFWEICQTHPTADGKWAYLGAQDWRQ

SEQ ID NO: 66023 - protein, 167 aa, Setaria italica
  misc_feature (152)..(152): Xaa can be any naturally occurring amino acid
  Transcript Sequence Number=SeqID_49
  Gene Ontology: Mol. function=zinc ion binding; Cellular component =intracellular
  Homolog annotation: Hit_ID=B7VCC0; Match level="QueryCoverage=100%, HitCoverage=33%, E-value=3e-68, Identity=80%"; Hit description=C2H2 zinc finger protein
  Pfam annotation: Domain name=zf-C2H2; Domain location=1-24; Score =18.9; E_value=0.022; Accession=PF00096.18; Description=Zinc finger, C2H2 type
LSCHRCGEHFGKWEALEAHHLSKHAVTELVEGDSSRKIVEIICRTSLLKSESSCVRIERVFKVHNTQRTLSRFEEYREAVKLKASKLPKKHPRCLADGNELLRFHGATLSCALGAGSGASSSLCASDRCAVCRIIRHGFSARKEGKAGVGVXFLPTSTSGRAFESIE

SEQ ID NO: 66024 - protein, 56 aa, Setaria italica
  misc_feature (20)..(20): Xaa can be any naturally occurring amino acid
  Transcript Sequence Number=SeqID_50
GEGRNALPQRMQMDDGFFGXQGNGVFDDVNSMMQQPQQAPVQQQQQPQPQQQFFIR

SEQ ID NO: 66025 - protein, 115 aa, Setaria italica
  misc_feature (11)..(11): Xaa can be any naturally occurring amino acid
  Transcript Sequence Number=SeqID_51
  Gene Ontology: Mol. function=transcription regulator activity; Cellular component=nucleus; Biological process=regulation of transcription, DNA-dependent
  Homolog annotation: Hit_ID=A0MQ94; Match level="QueryCoverage=37%, HitCoverage=7%, E-value=4e-16, Identity=95%"; Hit description=EIL2
FGEGDLVNPPXPAHDEIMSFPGGDDSDDGDDDVVGGIDELERRIWRDRVRLRRLKEQQLQQQRGGGRGKEVPRARQSQEQARRKKMSRAQDGILKYMLKMMEVCSAQGFVYGIIP

SEQ ID NO: 66026 - protein, 649 aa, Setaria italica
  misc_feature (97)..(97): Xaa can be any naturally occurring amino acid
  misc_feature (271)..(271): Xaa can be any naturally occurring amino acid
  misc_feature (294)..(294): Xaa can be any naturally occurring amino acid
  misc_feature (327)..(327): Xaa can be any naturally occurring amino acid
  misc_feature (504)..(504): Xaa can be any naturally occurring amino acid
  misc_feature (550)..(550): Xaa can be any naturally occurring amino acid
  Transcript Sequence Number=SeqID_52
  Gene Ontology: Mol. function=transcription regulator activity; Cellular component=nucleus; Biological process=regulation of transcription, DNA-dependent
  Homolog annotation: Hit_ID=B6U809; Match level="QueryCoverage=98%, HitCoverage=98%, E-value=0.0, Identity=80%"; Hit description =ETHYLENE-INSENSITIVE3-like 1 protein
  Pfam annotation: Domain name=EIN3; Domain location=78-469; Score =863.5; E_value=1.2e-256; Accession=PF04873.5; Description=Ethylene insensitive 3
MMGGGLMMDQGMVFPGVHNFVDLLQQNGDKNLGFGSLMPQTSSGDQCVMGEGDLVDPPPESFPDAGEDDSDDDVDDIEELERRMWRDRMKLKRLREXQQSRGKDQAAAGSGVGDGSSKPRQSQEQARRKKMSRAQDGILKYMLKMMEVCRAQGFVYGIIPEKGKPVSGASDNLRAWWKEKVRFDRNGPAAIAKYQADNAVPGAENELTSGTASPHSLQELQDTTLGSLLSALMQHCDPPQRRYPLEKGVPPPWWPTGDEEWWPELGIPKDXGPRPPYKKPHDLKKAWKVSVLTXAVIKHMSPDIEKIRRLVRQSKCLQDKMTAKEIXTWLSVVKQEEELYLKLHPGARPPVPTGGIASAISFNASSSEYDVDIVDECKGDEAGNQKAAVTDPTAFNLGAAILSDKFLMPTPMKEETAEVEFIQKRNAPGSAEPELMLNNRVYTCNNVQCPHNDYGYGFLDRNARNSHQYTCKYNDPLPQSTENKPPPTPAPTVTSLPGGLQSTXQALNNLDFSLPMDGQRSIAELMNMYDNNFMTNKNMSSDSVSIMEGXPNALPQRMQMDDGFFGQGNGVFDDVNSMMQQPQQAPVQQQQQPQPQQQFFIRDDTPFVSQMGDISGTSEFRFGSSFNMSSTVDYPGAAQQKNDGPNWYY

SEQ ID NO: 66027 - protein, 265 aa, Setaria italica
  misc_feature (86)..(86): Xaa can be any naturally occurring amino acid
  Transcript Sequence Number=SeqID_53
  Gene Ontology: Mol. function=protein serine/threonine kinase activity; Cellular component=integral to membrane; Biological process=protein amino acid phosphorylation
  Homolog annotation: Hit_ID=B9SF98; Match level="QueryCoverage=99%, HitCoverage=42%, E-value=1e-92, Identity=62%"; Hit description =Kinase, putative
  Pfam annotation: Domain name=Pkinase; Domain location=18-265; Score =145.1; E_value=2.2e-40; Accession=PF00069.17; Description=Protein kinase domain
  Pfam annotation: Domain name=Pkinase_Tyr; Domain location=18-263; Score=82.2; E_value=1.9e-21; Accession=PF07714.9; Description =Protein tyrosine kinase
  Pfam module annotation: Pfam domain module=Pkinase::Pkinase_Tyr; Domain location=18-265::18-263
ASHLSFKYEELRRATDEFNQINKLGQGGYGSVYKGVLPDGREVAVKRLFFNTRQWADQFFNEVKLVSQVQHKNLVKLLGCSVEGPXESLLVYEYLCNTSLDHYLFDAFKKNALDWERRFEIVLGTAEGLSYLHNASEIRIIHRDIKASNILLDERFRPKIADFGLARNFLEDQSHLSTGLAGTFGYMAPEYIVHGQLTEKADIYSYGVLVLEIITGRKNHNSVASSAEGLSLMALIWKHYNAGTLMELLDPNLRDQCSEEEALQV

SEQ ID NO: 66028 - protein, 123 aa, Setaria italica
  misc_feature (21)..(21): Xaa can be any naturally occurring amino acid
  misc_feature (54)..(54): Xaa can be any naturally occurring amino acid
  Transcript Sequence Number=SeqID_54
  Homolog annotation: Hit_ID=Q108V8; Match level="QueryCoverage=100%, HitCoverage=6%, E-value=2e-38, Identity=56%"; Hit description=DNAJ heat shock N-terminal domain-containing protein, putative, expressed
MKAADFIAKRAMEAVGAAETXRHGEWSVTRLRSAAHGTASIESLGLGVGPRGGXLGEQGDSVSRLLVLTNTSLVERRPENYEAVIVRPLSAVNALVRFAEEPQMFAFEFNDGCSIHVYASTSR

SEQ ID NO: 66029 - protein, 109 aa, Setaria italica
  Transcript Sequence Number=SeqID_55
  Homolog annotation: Hit_ID=O64533; Match level="QueryCoverage=88%, HitCoverage=4%, E-value=2e-12, Identity=46%"; Hit description =YUP8H12R.20
RLRKDQGSSKLHSKLPAQPEECLLAFLQSQNASAAVGHWLSLLLQASELEASRGHRGSADVRKEALHALRILIAKVGSADALAFFLPGIVSRLGKVLYRSKTMISGAAG

SEQ ID NO: 66030 - protein, 96 aa, Setaria italica
  misc_feature (77)..(77): Xaa can be any naturally occurring amino acid
  Transcript Sequence Number=SeqID_56
  Gene Ontology: Mol. function=DNA binding; Cellular component=nucleus; Biological process=regulation of transcription, DNA-dependent
  Homolog annotation: Hit_ID=B9RW57; Match level="QueryCoverage=95%, HitCoverage=45%, E-value=2e-32, Identity=70%"; Hit description =Protein ULTRAPETALA1, putative
LEIADKLTPAAFEKHSGKETAGKWRNTIWVMVQGEKVPLSKTALLKYYYLAHKSGNGSHKGRNGRPSHRDEFIRCTXCGKERRFRLGQRECRVYHD

SEQ ID NO: 66031 - protein, 132 aa, Setaria italica
  misc_feature (98)..(98): Xaa can be any naturally occurring amino acid
  Transcript Sequence Number=SeqID_57
  Gene Ontology: Mol. function=protein binding
  Homolog annotation: Hit_ID=B4G0B1; Match level="QueryCoverage=88%, HitCoverage=30%, E-value=5e-42, Identity=73%"; Hit description=F -box/LRR-repeat protein 2
VGELQIFHYHGARDHMNDLVISLAHKFTKLQVLSLRQIKPQLEDSGVEAVANYCHDLRELDLSRSFRLSDRSLYALAHGCPHLTRLNISGCSNFSDAXLVFLSSQCKDLKCLNLCGCVRAASDRALQVLHLL

SEQ ID NO: 66032 - protein, 379 aa, Setaria italica
  Transcript Sequence Number=SeqID_58
  Gene Ontology: Mol. function=protein binding; Cellular component =cytoplasm; Biological process=ubiquitin-dependent protein catabolic process
  Homolog annotation: Hit_ID=B4G0B1; Match level="QueryCoverage=100%, HitCoverage=100%, E-value=0.0, Identity=84%"; Hit description=F -box/LRR-repeat protein 2
  Pfam annotation: Domain name=LRR_1; Domain location=132-156; Score =3.3; E_value=71; Accession=PF00560.25; Description=Leucine Rich Repeat
  Pfam annotation: Domain name=LRR_1; Domain location=158-185; Score =6.5; E_value=18; Accession=PF00560.25; Description=Leucine Rich Repeat
  Pfam annotation: Domain name=LRR_1; Domain location=211-238; Score =8.2; E_value=8.1; Accession=PF00560.25; Description=Leucine Rich Repeat
  Pfam annotation: Domain name=LRR_1; Domain location=263-286; Score =2.7; E_value=94; Accession=PF00560.25; Description=Leucine Rich Repeat
  Pfam annotation: Domain name=LRR_1; Domain location=311-338; Score =2.5; E_value=1e+02; Accession=PF00560.25; Description=Leucine Rich Repeat
  Pfam module annotation: Pfam domain module=LRR_1::LRR_1::LRR_1::LRR _1::LRR_1; Domain location=132-156::158-185::211-238::263-286::311-338
MDSTKPLGGELNNSLDTLMVSSGVESKQAQNAGTETSLTGWKDLPMELLLRIMSLVGDDSMVIVASGVCTEWRDALGWGIANLSLSWCQDHMNDLVISLAHKFTKLQVLSLRQIKPQLEDSGVEAVANYCHDLRELDLSRSFRLSDRSLYALAHGCPHLTRLNISGCSNFSDAALVFLSSQCKDLKCLNLCGCVRAASDRALQAIACNCGQLQSLNLGWCDGITDKGVTSLASGCPELRALDLCGCVLITDESVVALANGCPHLRSLGLYYCQNITDRAMYSLAANSRVRSQGRGWDAAKRGSGKDRDRDGLASLNISQCTALTPPAVQAVCDSFPALHTCPERHSLNISGCLSLTSVHCACALHPHRAGRAILSNHAY

SEQ ID NO: 66033 - protein, 126 aa, Setaria italica
  Transcript Sequence Number=SeqID_59
KWKEPKSKYSDASVCTQGTHDVRHHSHTGGPCIVVPFPFMPMQEMPCYRKPLSPDPLPLSCNLKGTNPNTDTYYTHYRSIELLTTCTSTLQICSSFEHEHAHINAQYKYQESHKHNRIIPKCRVLQ

SEQ ID NO: 66034 - protein, 494 aa, Setaria italica
  Transcript Sequence Number=SeqID_60
  Gene Ontology: Mol. function=DNA binding; Cellular component=nucleus; Biological process=regulation of transcription, DNA-dependent
  Homolog annotation: Hit_ID=Q8S4P6; Match level="QueryCoverage=100%, HitCoverage=53%, E-value=0.0, Identity=81%"; Hit description=Histone- lysine N-methyltransferase EZ1
  Pfam annotation: Domain name=CXC; Domain location=275-315; Score=7.3; E_value=0.0013; Accession=PF03638.7; Description=TesminTSO1-like CXC domain
  Pfam annotation: Domain name=SET; Domain location=335-463; Score =159.2; E_value=1.3e-44; Accession=PF00856.20; Description=SET domain
  Pfam module annotation: Pfam domain module=CXC::SET; Domain location =275-315::335-463
SPSKVKIGPKGGIRKITNRRIAERILMSVKKGQREMASSDSNSVSGSPLARDMKLRSNTRNGNKESFVSSQQNSPSTRSTRKKSTPQIGNSSASAEAQNDSMEEDGYDSSRKEEFVDENICKQEDSFRSWKPIEQGLLVKGLEIFGRNSCLIARNLLGGMKTCRDVFQYMNYIENSSASGTLSVVDSLVKGYIKGNELRTRSRFFRRRGKVRRLKYTWKSAGYHSIRKRITERKDQPCRQYNPCGCQSACGKQCPCLTNATCCEKYCGCSKICKNRFRGCHCAKSQCRSRQCPCFAADRECDPDVCRNCWVGCGDGTLGVPNQRGDNYECRNMKLLLKQQQRVLLGRSDVSGWGAFLKNSVNKHEYLGEYTGELISHKEADKRGKIYDRENSSFLFNLNNEFVLDAYRMGDKLKFANHSPDPNCYAKVIMVAGDHRVGIFAKERILAGEELFYDYRYEPDRAPAWARKPEDSRGKDDGQPSNGRAKKLAQNTRG

SEQ ID NO: 66035 - protein, 70 aa, Setaria italica
  misc_feature (44)..(44): Xaa can be any naturally occurring amino acid
  Transcript Sequence Number=SeqID_61
  Gene Ontology: Mol. function=1,3-beta-glucan synthase activity; Cellular component=1,3-beta-glucan synthase complex; Biological process=1,3-beta-glucan biosynthetic process
  Homolog annotation: Hit_ID=Q5SMM3; Match level="QueryCoverage=90%, HitCoverage=3%, E-value=8e-13, Identity=64%"; Hit description =Putative callose synthase 1 catalytic subunit
VFLAKILEGYETVADPAEEKKSQRSLSSQLDAVADRKFIYVATXRYGTRNNMVIDVQTDILNLTVNGTAI

SEQ ID NO: 66036 - protein, 249 aa, Setaria italica
  Transcript Sequence Number=SeqID_62
  Gene Ontology: Mol. function=transporter activity; Cellular component= membrane; Biological process=oligopeptide transport
  Homolog annotation: Hit_ID=B6SWJ7; Match level="QueryCoverage=100%, HitCoverage=41%, E-value=5e-92, Identity=72%"; Hit description =Peptide transporter PTR2
  Pfam annotation: Domain name=PTR2; Domain location=1-248; Score=37.2; E_value=4.5e-08; Accession=PF00854.13; Description=POT family
GGLKANVSGFGSDQFDGRDPREERAMVFFFNRFYFCISLGSLFAVTVLVYVQDNVGRPWGYGVSAVAMVLAVAVFVAGTPKYRYRRPQGSPLTVIGRVLATACRKRRLPLPADAAELHGFHAAKVAHTDRLRCLDKAAIVEVDLSEKRAPAPAASTVTEVEEVKMVVKLLPIWSTCILFWTVYSQMTTFSVEQATRMDRRLRPGAAASSGGFEVPAGSFSVFLFISILLFTSLNERVLVPLAARATGRP

SEQ ID NO: 66037 - protein, 121 aa, Setaria italica
  misc_feature (45)..(45): Xaa can be any naturally occurring amino acid
  Transcript Sequence Number=SeqID_63
  Gene Ontology: Mol. function=metallopeptidase activity; Biological process=proteolysis
  Homolog annotation: Hit_ID=B9RCE0; Match level="QueryCoverage=99%, HitCoverage=9%, E-value=2e-32, Identity=58%"; Hit description =Aminopeptidase, putative
KRIADVSKLRIYQFPQDAGPMAHPIRPHSYIKMDNFYTGEFLCLXSLWHTVRWTKPSTDYNSSIVESSLVTSIMNNLAVTVYEKGAEVVRMYKTMFGASGFRKGMDLYFQRHDGQAVTCEA

SEQ ID NO: 66038 - protein, 78 aa, Setaria italica
  Transcript Sequence Number=SeqID_64
  Subcellular localization annotation: CTP_CleavageSite=43; ConfidenceScore=5.52e-01
VGMARRLISPAAACRGCGFVNAGFLGAFSSFHYQSLPSCSSKRSSSVKNCFSYRTGLRKEGSRWIRSEPFLSVNSTKF

SEQ ID NO: 66039 - protein, 104 aa, Setaria italica
  misc_feature (14)..(14): Xaa can be any naturally occurring amino acid
  misc_feature (80)..(80): Xaa can be any naturally occurring amino acid
  Transcript Sequence Number=SeqID_65
  Gene Ontology: Mol. function=metallopeptidase activity; Biological process=proteolysis
  Homolog annotation: Hit_ID=B9RCE0; Match level="QueryCoverage=94%, HitCoverage=11%, E-value=1e-41, Identity=79%"; Hit description =Aminopeptidase, putative
RDQEFSSDLGCRTXKRIADVSKLRIYQFPQDAGPMAHPIRPHSYIKMDNFYTVTVYEKGAEVVRMYKTMFGASGFRKGLXGILYFQRHDGQAVSCALFASHIAL

SEQ ID NO: 66040 - protein, 94 aa, Setaria italica
  Transcript Sequence Number=SeqID_66
  Gene Ontology: Mol. function=metallopeptidase activity; Biological process=proteolysis
  Homolog annotation: Hit_ID=B9RCE0; Match level="QueryCoverage=82%, HitCoverage=9%, E-value=5e-36, Identity=88%"; Hit description =Aminopeptidase, putative
RANHLLTTKYSDIPGNVVNVEKLLSHPAFDMRNPNKVYSLIGGFCGSPVNFHAKDGSGYKFLGEVVLQLDKINPQVASRMVSAFSRWRPPEGLS

SEQ ID NO: 66041 - protein, 110 aa, Setaria italica
  Transcript Sequence Number=SeqID_67
KLLLRDSFEELGRLVCACQGNELNLALVPLDGSRTGQMPSWFGGVWSIMQFTCWSHMVMVVPVSASKHVQHAGSCLVLYSCGCMGSLKGDLDGSGTVWTFPAMPGSVPLF

SEQ ID NO: 66042 - protein, 887 aa, Setaria italica
  Transcript Sequence Number=SeqID_68
  Gene Ontology: Mol. function=metallopeptidase activity; Biological process=proteolysis
  Homolog annotation: Hit_ID=B9RCE0; Match level="QueryCoverage=91%, HitCoverage=93%, E-value=0.0, Identity=79%"; Hit description =Aminopeptidase, putative
  Pfam annotation: Domain name=Peptidase_M1; Domain location=12-387; Score=167.3; E_value=4.6e-47; Accession=PF01433.12; Description =Peptidase family M1
MDAPKEIFLKDYKKPDYLFDTVDLQFQLGEDKTIVTSNIVVSPGVEGISAPLVLHGCDLKLLSIKVNGTELKGEEYAVTSRHLTLLTPPAGAFNLEIVTEIYPQLNTSLEGLYKSTGNFCTQCEAEGFRKITYFQDRPDVMAKYTCRIEADKTLYPVLLSNGNLIQQGDLEGGKHYALWEDPFKKPSYLFALVAGQLGCREDSFVTCTGRNVTLRIWTPAQDLPKTAHAMYSLKAAMKWDEEVFGLEYDLDLFNIVVVPDFNMGAMENKSLNIFQSRLVLASPETATDGDYAAILGVVGHEYFHNWTGNRVTCRDWFQLTLKEGLTVFRDQEFSSDLGCRTVKRIADVSKLRIYQFPQDAGPMAHPIRPHSYIKMDNFYTVTVYEKGAEVVRMYKTMFGASGFRKGMDLYFQRHDGQAVTCEDFYAAMCDANNAQLPNFLQWYSQAGTPTVKVASSYDPSSQTFSLKLSQDVPPTPGQLDKEPMFIPVAVGLVDSTGKDMPLTSVYSDGTLQTLSSDGQPVFTTVLQFKKKEEEFIFQNVPEKPVPSLLRGYSAPVRLDSDLSESDLFFLLANDSDEFNRWEAGQVLARKLMLSLVADFKQQKTLVLNPKFVDGLRSILRNTSLDKEFIAKAITLPGQGEIMDMMAVADPDAVHAVRNFIKKELASQLKDDLLAAVTSNRSSEPYTFNHDSMARRALKNTCLAYLASLNEPDVTELALHEYKTATNMTEQFAALAALSQNPGQVRDDALLDFYNKWQNEYLVVSKWFALQATSDIPGNVVNVEKLLSHPAFDMRNPNKVYSLIGGFCGSPVNFHAKDGSGYKFLGEVVLQLDKINPQVASRMVSAFSRWRRYDETRQALAKAQLEMIVSANGLSENVYEIASKSLAD

SEQ ID NO: 66043 - protein, 158 aa, Setaria italica
  Transcript Sequence Number=SeqID_69
  Gene Ontology: Mol. function=protein serine/threonine kinase activity; Biological process=protein amino acid phosphorylation
  Homolog annotation: Hit_ID=Q53QB7; Match level="QueryCoverage=98%, HitCoverage=44%, E-value=5e-35, Identity=38%"; Hit description =Leucine Rich Repeat family protein
  Pfam annotation: Domain name=LRR_1; Domain location=119-141; Score =10.0; E_value=3.7; Accession=PF00560.25; Description=Leucine Rich Repeat
  Pfam annotation: Domain name=LRR_1; Domain location=143-157; Score =1.1; E_value=1.9e+02; Accession=PF00560.25; Description=Leucine Rich Repeat
  Pfam annotation: Domain name=LRR_1; Domain location=20-42; Score =10.7; E_value=2.7; Accession=PF00560.25; Description=Leucine Rich Repeat
  Pfam annotation: Domain name=LRR_1; Domain location=44-65; Score=2.4; E_value=1e+02; Accession=PF00560.25; Description=Leucine Rich Repeat
  Pfam annotation: Domain name=LRR_1; Domain location=70-92; Score=2.4; E_value=1.1e+02; Accession=PF00560.25; Description=Leucine Rich Repeat
  Pfam annotation: Domain name=LRR_1; Domain location=95-117; Score =7.0; E_value=14; Accession=PF00560.25; Description=Leucine Rich Repeat
  Pfam module annotation: Pfam domain module=LRR_1::LRR_1::LRR_1::LRR _1::LRR_1::LRR_1; Domain location=119-141::143-157::20-42::44-65::70 -92::95-117
HLSDNELTGSIPASIGNLSDLSFLVLDTNMLTGPIPVTLGNLGSLGLLSFGWNRFKGDLDFLGALSNCRQLSYLGISSNSHSGSLPDYIGNLSKTLVTFRASDNNIIGGLPATISNLTSLQFIDLIGNELSKPIPKSVVTMENLQVLGLASNSISGVL

SEQ ID NO: 66044 - protein, 86 aa, Setaria italica
  Transcript Sequence Number=SeqID_70
  Gene Ontology: Mol. function=transporter activity; Cellular component= mitochondrial inner membrane; Biological process=transport
  Homolog annotation: Hit_ID=B9RIA7; Match level="QueryCoverage=70%, HitCoverage=15%, E-value=1e-17, Identity=65%"; Hit description=ADP ,ATP carrier protein, putative
  Pfam annotation: Domain name=Mito_carr; Domain location=26-86; Score=- 3.4; E_value=0.0067; Accession=PF00153.19; Description=Mitochondrial carrier protein
  Subcellular localization annotation: CTP_CleavageSite=63; ConfidenceScore=5.51e-01
MPTAHATGGSAPPAVQASAPAEKSKSFVADLLLGGASSAVSKTVAAPVERVKMLLQNQEALIRAGRLWYPYGGIGDCFRRTVREEG

SEQ ID NO: 66045 - protein, 58 aa, Setaria italica
  Transcript Sequence Number=SeqID_71
  Gene Ontology: Cellular component=mitochondrion
  Homolog annotation: Hit_ID=Q7XJU7; Match level="QueryCoverage=98%, HitCoverage=6%, E-value=1e-14, Identity=56%"; Hit description =OSIGBa0124N08.1 protein
HSDTSQAPIRVIKNTRMCNDCHEVAKHISAICDREIILRDADRFHHFTGGKCSCNDCW

SEQ ID NO: 66046 - protein, 104 aa, Setaria italica
  Transcript Sequence Number=SeqID_72
  Gene Ontology: Mol. function=1,3-beta-glucan synthase activity; Cellular component=1,3-beta-glucan synthase complex; Biological process=1,3-beta-glucan biosynthetic process
  Homolog annotation: Hit_ID=Q6WGM8; Match level="QueryCoverage=100%, HitCoverage=5%, E-value=2e-51, Identity=90%"; Hit description=Beta 1, 3 glucan synthase
MSRAEANWERLVRAALRGERLAGGYGHPVTGIAGVVPSSLGNNVHIEEVLRAADEIQDEDPTVARILCEHAYALAQNLDPNSEGRGVLQFKTGLMSVIRQKLAK

SEQ ID NO: 66047 - protein, 154 aa, Setaria italica
  Transcript Sequence Number=SeqID_73
  Gene Ontology: Mol. function=ubiquitin-protein ligase activity; Cellular component=ubiquitin ligase complex; Biological process =ubiquitin-dependent protein catabolic process
  Homolog annotation: Hit_ID=Q8H333; Match level="QueryCoverage=50%, HitCoverage=11%, E-value=2e-16, Identity=64%"; Hit description=Arm repeat-containing protein-like
  Pfam annotation: Domain name=U-box; Domain location=50-132; Score =28.9; E_value=4.3e-07; Accession=PF04564.7; Description=U-box domain
  Subcellular localization annotation: CTP_CleavageSite=21; ConfidenceScore=5.22e-01
MGAERARRWKLLPFRSLSLPPASASKPKRRSPDVPVPLSPARTEKEVEEEVPAEFLCPILRAPMADPVILPPGRTYERACVRACADLGLSLGPDGVVAGEGNTQGGGGGAVAIPNDALRAAVRTWCARSGRAAPVAPSAEKASEAVLQAVPSAR

SEQ ID NO: 66048 - protein, 196 aa, Setaria italica
  misc_feature (174)..(174): Xaa can be any naturally occurring amino acid
  Transcript Sequence Number=SeqID_74
SQAKNSASDTSSEKSDGEHVKYLEVLESLPEKNRDATSEASCAVREADANKVEARPERFVPNRMAAVHSQSGFSFNDSQATCAPSSALKLESALRDVSREVREAKYRRIRHEEKGEAKQPARARDNSPRSVVNSIPPPNAYPGEGPSEYPMKPGFRHANGELADSRNSDGANRXKALEKDRSELLRILDELRDQVT

SEQ ID NO: 66049 - protein, 105 aa, Setaria italica
  Transcript Sequence Number=SeqID_75
  Gene Ontology: Mol. function=microtubule motor activity; Cellular component=microtubule associated complex; Biological process =microtubule-based movement
  Homolog annotation: Hit_ID=B9RXV1; Match level="QueryCoverage=93%, HitCoverage=12%, E-value=3e-29, Identity=63%"; Hit description =Kinesin, putative
GAMTRTTALEETCSSQRETIKTLEIKLAAASEKLKRSDLTALETMTEYENQKKMLENLQSRLEEAEQQILDGEKLRKKLHNTILELKGNIRVFCRVRPLMYKRIR

SEQ ID NO: 66050 - protein, 117 aa, Setaria italica
  Transcript Sequence Number=SeqID_76
  Subcellular localization annotation: CTP_CleavageSite=17; ConfidenceScore=5.06e-01
HLVYFHTRNHIYQKCMRCSSATLPCTSASSIAIFLLVSALGLQFRSNGLDGVAGACCSLSGVLGLAATSVIISFFFSVLFLLSVLVLAATSSFFLVLFLLGFGGARGGASEPYTISL

SEQ ID NO: 66051 - protein, 400 aa, Setaria italica
  Transcript Sequence Number=SeqID_77
  Gene Ontology: Mol. function=protein binding; Cellular component =nuclear matrix; Biological process=signal transduction
  Homolog annotation: Hit_ID=B9SVG7; Match level="QueryCoverage=100%, HitCoverage=67%, E-value=1e-163, Identity=67%"; Hit description =Nuclear matrix protein, putative
FLAHFFPLSERSALNIKGVFNTSNVTKYEKDATDGISVDFNFYKTLWSLQEHFSNPALTNTNLAKWQKFSSNLAVVLSTFEALPLSDDDGKLNNLDQEEDAAFNIKYLTSSKLMGLELKDPSFRRHILVQCLIFFDYLKAPGKNEKEGPTGRMKDEIKSCEERVKKLLEVIPPKGKEFLKSIEHILEREKNWVWWKRDGCLAFEKAPFEKKPVQAGGRKRKPRWRLGNKELSQLWKWAEQNPNVLTNPDRVRMPSITEYWKPLAEDMDPSAGIEEEYHHKSNRVYCWKGLRFSARQDLDGFARFSDYGIEGVVPSELLPPEVNAKFSSKPAEKVKRVKREDSKGASAQPKEQQVAATPETDGGGSGGDPEEGAVPMDSDNGAAEDGQKQSPEEVSGPESG

SEQ ID NO: 66052 - protein, 273 aa, Setaria italica
  Transcript Sequence Number=SeqID_78
  Gene Ontology: Mol. function=RNA binding; Cellular component=nuclear matrix; Biological process=signal transduction
  Homolog annotation: Hit_ID=B9SVG7; Match level="QueryCoverage=99%, HitCoverage=44%, E-value=1e-122, Identity=79%"; Hit description =Nuclear matrix protein, putative
ENQSLENALRTLLQELVSSAVQSGKKIMQYGNSLDSGESNCLITRLLDIVLYLCERGHVEGGMVFQLLEDLTEMSTIKDCKDIFGYIESQQDVLGKQELFGRGKLVMLRTCNQLLRRLSKANDVVFCGRIIMFLAHFFPLSERSALNIKGVFNTSNVTKYEKDATDGISVDFNFYKTLWSLQEHFSNPALTNTNLAKWQKFSSNLAVVLSTFEALPLSDDDGKLNNLDQEEDAAFNIKYLTSSKLMGLELKDPSFRRHILVQCLIFFDYLKVC

SEQ ID NO: 66053 - protein, 170 aa, Setaria italica
  Transcript Sequence Number=SeqID_79
  Homolog annotation: Hit_ID=B9SVG7; Match level="QueryCoverage=86%, HitCoverage=26%, E-value=1e-37, Identity=49%"; Hit description =Nuclear matrix protein, putative
LRTKEIRKKDMDPSAGIEEEYHHKSNRVYCWKGLRFSARQDLDGFARFSDYGIEGVVPSELLPPEVNAKFSSKPAEKVKRVKREDSKGASAQPKEQQVAATPETDGGGSGGDPEEGAVPMDSDNGAAEDGQKQSPEEVSGPESGQCEPEADADDNMKTETTSRDARAGEK

SEQ ID NO: 66054 - protein, 60 aa, Setaria italica
  Transcript Sequence Number=SeqID_80
LRNLEYKNGPIWVQRRLNSKKALTSCFHESIYYKVGTANVQRTHYLTSTCAVYQSQSKLK

SEQ ID NO: 66055 - protein, 30 aa, Setaria italica
  Transcript Sequence Number=SeqID_81
MYRGSIVSFHTVSKGYWGECGQRGGYFGHY

SEQ ID NO: 66056 - protein, 99 aa, Setaria italica
  Transcript Sequence Number=SeqID_82
  Gene Ontology: Mol. function=transferase activity, transferring nitrogenous groups; Biological process=biosynthetic process
  Homolog annotation: Hit_ID=Q45RS3; Match level="QueryCoverage=100%, HitCoverage=20%, E-value=8e-36, Identity=73%"; Hit description=AlaT1
  Subcellular localization annotation: CTP_CleavageSite=52; ConfidenceScore=5.12e-01
PWLLQMGVMVNPPKPGDISYLKFAAESKSILDSLRRRARMMTDGFNSCRNVVCNFTEGAMYSFPQIRLPPRAIEAAKRSWQSTRCFLTASKLLEATGIS

SEQ ID NO: 66057 - protein, 150 aa, Setaria italica
  misc_feature (68)..(68): Xaa can be any naturally occurring amino acid
  Transcript Sequence Number=SeqID_83
  Gene Ontology: Mol. function=transferase activity, transferring nitrogenous groups; Biological process=biosynthetic process
  Homolog annotation: Hit_ID=Q45RS3; Match level="QueryCoverage=84%, HitCoverage=26%, E-value=3e-62, Identity=85%"; Hit description=AlaT1
GYLTVLKVLRVRFTRLVSFHTVSKGYWGECGQRGGYFEMTNLPPQTVDEIYKVASIALSPNVPGQIFXGMMVNPPKPGDISYLKFAAESKSILDSLRRRARMMTDGFNSCRNVVCNFTEGAMYSFPQIRLPPRAIEDKTKTKEHKEQKRN

SEQ ID NO: 66058 - protein, 478 aa, Setaria italica
  Transcript Sequence Number=SeqID_84
  Gene Ontology: Mol. function=transferase activity, transferring nitrogenous groups; Cellular component=mitochondrial matrix; Biological process=biosynthetic process
  Homolog annotation: Hit_ID=Q45RS3; Match level="QueryCoverage=100%, HitCoverage=99%, E-value=0.0, Identity=88%"; Hit description=AlaT1
  Pfam annotation: Domain name=Aminotran_1_2; Domain location=60-461; Score=53.1; E_value=1.1e-12; Accession=PF00155.13; Description =Aminotransferase class I and II
MARKPLDYEELNENVKKVQYAVRGELYLRASELQKEGKKIIFTNVGNPHALGQKPLTFPRQVVALCQAPFLLDDPNVGLMFPADAIARAKHYLSLATGGLGAYSDSRGIPGIRKEVADFIQRRDGYPSDPELIYLTDGASKGVMQMLNTIIRNERDGILVPVPQYPLYSATISLFGGSLVPYYLEEEANWGLDFVNIRKTVAEARSKGITVRAMVIINPGNPTGQCLSEANIKEVLQFCYHENLVLLADEVYQQNVYQDERPFISAKKVLFDMGPPLSREVQLVSFHTVSKGYWGECGQRGGYFEMTNLPPQTVDEIYKVASIALSPNVPGQIFMGVMVNPPKPGDISYLKFAAESKSILDSLRRRARMMTDGFNSCRNVVCNFTEGAMYSFPQIRLPPRAIEAAKRAGKAPDVFYCLKLLEATGISTVPGSGFGQKEGVFHLRTTILPAEEDFPAIMSSFKNFNDSFMAQYEGYSRM

SEQ ID NO: 66059 - protein, 136 aa, Setaria italica
  Transcript Sequence Number=SeqID_85
  Gene Ontology: Mol. function=transferase activity, transferring glycosyl groups; Biological process=metabolic process
  Homolog annotation: Hit_ID=B6SXW3; Match level="QueryCoverage=99%, HitCoverage=27%, E-value=1e-67, Identity=90%"; Hit description =Cytokinin-O-glucosyltransferase 2
MIPSSTSIHTIGPLAFLTEEIVPRGGPLDTLGSNLWKEDVSCFDWLDGREPSSVVYVNYGSITVMTNEELVEFAWGLANSGHDFLWIIRPDLVHGDAAVLPPEFLEAVEGRGHLATWCPQEAVLRHEAVGVFLTHS

SEQ ID NO: 66060 - protein, 182 aa, Setaria italica
  Transcript Sequence Number=SeqID_86
  Gene Ontology: Mol. function=drug transporter activity; Cellular component=membrane; Biological process=multidrug transport
  Homolog annotation: Hit_ID=Q9LE20; Match level="QueryCoverage=90%, HitCoverage=35%, E-value=2e-31, Identity=43%"; Hit description =F14O23.25 protein
  Pfam annotation: Domain name=MatE; Domain location=63-181; Score =32.5; E_value=1.7e-06; Accession=PF01554.10; Description=MatE
LVFGLGFGVRGVAAAQALTNTNMLLFLLAYIRWARACDDTWRGWARITAVASGLPELARLAVPSCVGVCLEWWWYEVVTVLAGYLPNPAAAVGGAGVLIQTTSLMYTVPMALAACVSTRVGNELGAGKPRRARMAAMVALACALAIGAVHVAWTAALSRQWVELFTTEPAVVRLAAAAMPIV

SEQ ID NO: 66061 - protein, 415 aa, Setaria italica
  Transcript Sequence Number=SeqID_87
  Homolog annotation: Hit_ID=Q7XQQ0; Match level="QueryCoverage=57%, HitCoverage=32%, E-value=1e-57, Identity=51%"; Hit description =OSIGBa0160I14.5 protein
AVAETVNLLSSGQASEMVIGESANESSLTNIESENREDQVCQQNTNSGAPCAEPIEPMLLQENETSMSIVNMAEEKVDAQPHVVQEYKEETNLSPVADAHKENLMQETSLSPFTASHKDSLVQEDGLMQETDLSPLTANHRDSLIEETTLPPLAASHKEDSLTQETELSRTISSHENNLKLQFKEGTQNCDIDMLPQDVDLIELSDERKVVGHDVGAEAVIKMEEGKLDQSFSLNLSDLDLVGGTEVAAIHDNPALVQLSEAGSSAELHNKQQEDPETFTGENISATDDLCKLPLENKDVQVIDIECGTPVEVGGFDSSKSKNEMVCSSMDSMMDPGIHTDVLPGIQDGYSLAFSDFLGADISCYPSMQSDLHAGIGVNDSEGIAVMDDPIYGSLTDIGFMDVWGQPTQDYDKFF

SEQ ID NO: 66062 - protein, 101 aa, Setaria italica
  Transcript Sequence Number=SeqID_88
MDTLDKESCIQSELVALLVHTIEVLYAIRVETMYIAMDTQHSSKSSTNPKHTELEDISTCQLQNRYSVDVNYQIRGPLEHKIYMHGFEEKSSIWIRENIKK

SEQ ID NO: 66063 - protein, 92 aa, Setaria italica
  Transcript Sequence Number=SeqID_89
ANARKPSPKPLRKAEPAAAGTPEKPAAAAAKEEEGAKRNAVGGGGGGAPKGASPVPSPRRTPPGPPPRRNDAPLLQPSLPLSSSCSSDASAE

SEQ ID NO: 66064 - protein, 56 aa, Setaria italica
  Transcript Sequence Number=SeqID_90
  Subcellular localization annotation: CTP_CleavageSite=42; ConfidenceScore=5.08e-01
PLFCAYTLPFSYSTTLTGMTSVDSKNSSSNDRIVDAFIFSFCAFVVVELQSSYLKH

SEQ ID NO: 66065 - protein, 129 aa, Setaria italica
  Transcript Sequence Number=SeqID_91
MLSEKYNFYYHYVFGSVCRECIVEKFTDKNINRCPKCDTDLGCNPLEKLRNELTDEVDPWIVAVERSKTRMATDEEWSTEGWTAAMTREEVGREEVAERANAATAAREEADEARALEVVSARALEGSRR

SEQ ID NO: 66066 - protein, 132 aa, Setaria italica
  Transcript Sequence Number=SeqID_92
  Gene Ontology: Mol. function=RNA-directed DNA polymerase activity; Biological process=RNA-dependent DNA replication
  Homolog annotation: Hit_ID=Q7XMF6; Match level="QueryCoverage=89%, HitCoverage=8%, E-value=1e-10, Identity=32%"; Hit description =OSJNBa0061G20.3 protein
NFGENFGLQLHCKKGGSSVRPVFGQCDYSRQVWLQVGQATDNQFPSLNSASTLIDWWLSIRRAMINAKARGLDSTIMLVCWRLWKERNGRAFATDIARTPQQLLPLIADEASLWVQSGARNLEAFGWKPPDR

SEQ ID NO: 66067 - protein, 72 aa, Setaria italica
  Transcript Sequence Number=SeqID_93
  Homolog annotation: Hit_ID=Q7XPI9; Match level="QueryCoverage=100%, HitCoverage=24%, E-value=2e-26, Identity=79%"; Hit description =OSJNBa0087O24.21 protein
IVGEPIEFDMASLKQAASMVPHDSSSERKGWPTITPDGLDEAAQRWLYQKMSDKIQSAMEGLRKRLLNQSQH

SEQ ID NO: 66068 - protein, 136 aa, Setaria italica
  misc_feature (80)..(80): Xaa can be any naturally occurring amino acid
  misc_feature (114)..(114): Xaa can be any naturally occurring amino acid
  Transcript Sequence Number=SeqID_94
  Gene Ontology: Mol. function=heat shock protein binding
  Subcellular localization annotation: CTP_CleavageSite=88; ConfidenceScore=5.12e-01
MARKGNQSKSGPNHASSNWQSTADGDVLSTPERGTMDGGNLSSHGQGRSKGSEGSSEKKGRSSKKNSRINSMSSLGKQQXMDTNYDISSSEENELPSRGTKNRRGNKKPSRRGXGKSFWIEQTPLPGLAENVLEKT

SEQ ID NO: 66069 - protein, 594 aa, Setaria italica
  Transcript Sequence Number=SeqID_95
  Gene Ontology: Mol. function=heat shock protein binding; Cellular component=endoplasmic reticulum membrane; Biological process=protein folding
  Homolog annotation: Hit_ID=A2Q660; Match level="QueryCoverage=90%, HitCoverage=73%, E-value=1e-161, Identity=53%"; Hit description=Heat shock protein DnaJ
  Pfam annotation: Domain name=DnaJ; Domain location=300-364; Score =83.8; E_value=6.1e-22; Accession=PF00226.23; Description=DnaJ domain
PGLAENVLEKTRCMACMASSIFRASMMYLVEQSKRSIDRNRPTIDAYMAIVNKGRAYVLNKIEYIYPIVRTWILNAGRLMLLLLTVWLDCNVRGFDSLLRLGTNSLLAVLWCSMLSVLAMIGIKKMLIFMVIAASAAAFIGLGFAILLISVLAVVILWFYGSFWTTSSVIILGGASFFLKRERIALLIVCLYSMYCARSYVGWLGLLLSLNLSFFSSDVLVQFLKNKVDSKKSNGSSRSSEQSSGGSGNIFEEFQPSADNTSQAGYARASYRNPGDPSTSGAEKELTSEDEVARLLNCTDHYSALGFRRYENIDVSSLKREYKKKAMLVHPDKNMGNDKAADAFKKLQNAYEVLLDSLKRKTYDDELRREELLNYFRRFQSVSQKNGRNGTFQHGFSPSEGVDEDPYGLSRRIACKKCGDFHIWIYTGRAKSQARWCQDCKDFHQAKDGDGWVEQSFQPVLFGMLQKPDLPHAYVCAESYIFDVTEWFNCQGMRCPANTHKPSFHVNASMAKQNSGKGSTSAQRGGKVPNGANMDGGLNEDEFFEWFQNAVNSGMFESSFGEQGDPTSPGSGSNAKGSSSNSSGRKKKKGKKQW

SEQ ID NO: 66070 - protein, 414 aa, Setaria italica
  Transcript Sequence Number=SeqID_96
  Gene Ontology: Mol. function=protein phosphatase type 2A regulator activity; Cellular component=protein phosphatase type 2A complex; Biological process=signal transduction
  Homolog annotation: Hit_ID=Q5VRD6; Match level="QueryCoverage=100%, HitCoverage=82%, E-value=0.0, Identity=86%"; Hit description =Putative serine/threonine protein phosphatase 2A (PP2A) regulatory subunit B' (B'gamma)
  Pfam annotation: Domain name=B56; Domain location=1-385; Score=714.1; E_value=1.1e-211; Accession=PF01603.12; Description=Protein phosphatase 2A regulatory B subunit (B56 family)
YDFSDRGKDSPEKERKRQMLMSLVDCIGAAEEPLTETMIAACVRMFAANLFRVFPPKVRSGTTASETEEDEPFFDPSWYHLQVVYEFLLRFVTSPLVDAKVARKYVDSAFVSKLLDLFDSDDPRERDCLKTILHRIYGKFMGNRPFIRKAVSNIFYRFVFETDHHNGIAELLEVFGSVISGFAKPLKEEHKLFLWKALIPLHKPKSVGVYLPQLTYCITQFIEKEPKLAGTVIRGLLKYWPVTNSQKEVMFLGELEEVLELTDMAEFQKCMIPLFRRIACCLNNSHFQIAERALFLWNNEHLFDMISQNRQVILPIVYPALERNTRWHWNQSVLNVTMNVRKMFHDMDERLLLACQNNFEEEEETRAATEERRRLMWEQLERSAARGYHQPVIAADVSFPPPPSSARLVAPTVT

SEQ ID NO: 66071 - protein, 232 aa, Setaria italica
  Transcript Sequence Number=SeqID_97
  Gene Ontology: Mol. function=hydrolase activity, acting on acid halide bonds, in C-halide compounds; Cellular component=cytoplasm; Biological process=metabolic process
  Homolog annotation: Hit_ID=B6UHU7; Match level="QueryCoverage=93%, HitCoverage=79%, E-value=1e-107, Identity=86%"; Hit description =Catalytic/ hydrolase/ phosphoglycolate phosphatase
  Pfam annotation: Domain name=Hydrolase; Domain location=7-183; Score =81.1; E_value=4.1e-21; Accession=PF00702.18; Description=haloacid dehalogenase-like hydrolase
QRSRRPLRGVVFDMDGTLTVPVIDFQAMYREVLGGDAAYAAARAAGGGSVDILHCIEGWAPDKQRHAYEVIARFEKEGLDRLQIMPGASELCGFLDSKRIRRGLITRNVKDAVDLFHQRFGMMFAPALSREFRPYKPDPAPLLHICSTWNIPPHEVIMVGDSLKDDVVCGKRAGAFTCLLDETGRYGPHDSLPEEVKPDFKVSSLTEVFTMLEENFDLAPANLTPASAESRI

SEQ ID NO: 66072 - protein, 114 aa, Setaria italica
  misc_feature (33)..(33): Xaa can be any naturally occurring amino acid
  misc_feature (78)..(78): Xaa can be any naturally occurring amino acid
  Transcript Sequence Number=SeqID_98
  Gene Ontology: Mol. function=hydrolase activity, acting on glycosyl bonds; Cellular component=extracellular region; Biological process =cell wall organization and biogenesis
  Homolog annotation: Hit_ID=Q5VR14; Match level="QueryCoverage=100%, HitCoverage=24%, E-value=4e-47, Identity=75%"; Hit description =Putative polygalacturonase
RSETAMVEQITVSNCSFVGTMTGVRIKSWQGGXGYAKGFLFESLNMTEVQYPIVIDQFYCPQGNCPTKHGGVAISDAXFIDIQGTSSEHDAIRLLCSQSVHCKDIYLSNINLSW

SEQ ID NO: 66073 - protein, 251 aa, Setaria italica
  Transcript Sequence Number=SeqID_99
  Gene Ontology: Mol. function=metal ion binding; Cellular component =nucleus
  Homolog annotation: Hit_ID=Q10J83; Match level="QueryCoverage=45%, HitCoverage=10%, E-value=1e-25, Identity=47%"; Hit description=JmjC domain containing protein, expressed
MIRCEMCEQRIYCVPCVRKRYPTMSDAEVRERCPSCRGVCNCTSCKDKQVGPESLVLKKCNSIGSTTRKKRPISACVESHRIPSAARQTKGIDHSIVRTNMMNNASAMLDEVDTSDVSTDAPETKRKYASYLLHYLLPCLTQLSKDQMEEKEVEARIQGLELSELIVEQAEIRRDERVFCDNCRTSIFDLHRSCPDCMYDLCIVCCKELRECHLEGSCQEAPVDYPERGPDYMHGGDLGPSPNSNLIKVNY

SEQ ID NO: 66074 - protein, 61 aa, Setaria italica
  Transcript Sequence Number=SeqID_100
YFFYLPHRIGFCMVLFVTSYLFISYNKLIICFAKVLIKGSKYKLLEPSPQLMIHDIFYEGT

SEQ ID NO: 66075 - protein, 161 aa, Setaria italica
  Transcript Sequence Number=SeqID_101
  Gene Ontology: Mol. function=aspartic-type endopeptidase activity; Cellular component=chromatin; Biological process=chromatin assembly or disassembly
  Homolog annotation: Hit_ID=Q0JKY7; Match level="QueryCoverage=99%, HitCoverage=9%, E-value=3e-36, Identity=46%"; Hit description =Carbonic anhydrase
ASLKHLLDKRLLTIPQHTWVSKLFGYGFQVEYKLGKQNATADALSRHNEHEVAGRVHTISQPEFALFEDFREEASSVPEVQAKEIEDGTAGAAWTIVDGFVMHRGRIFVPDSSALWPQLLATAHDAGHEGTQKTLHRLRASFYSPHAPMMVRDYVKGCAVC

SEQ ID NO: 66076 - protein, 65 aa, Setaria italica
  Transcript Sequence Number=SeqID_102
  Subcellular localization annotation: CTP_CleavageSite=26; ConfidenceScore=5.22e-01
GRDDLIDMLNWRRGSHGPTASAAATTASPASTTTTLTTSGAGAADGSCSNNNDDDGGELDLNLSL

SEQ ID NO: 66077 - protein, 78 aa, Setaria italica
  Transcript Sequence Number=SeqID_103
GMYAAAGLLPHFHRTPWAGEGSRKQRTSGRFVWGCLTEEDANKLREGNQDWFTSPNQVVGSSPHNIWLQTKTINHVLV

SEQ ID NO: 66078 - protein, 53 aa, Setaria italica
  Transcript Sequence Number=SeqID_104
MASLSLTAVVYLVPEEQAWQVALQAVAALVCVVGGAAAVAASTFVSRLQSSSG

SEQ ID NO: 66079 - protein, 64 aa, Setaria italica
  Transcript Sequence Number=SeqID_105
  Pfam annotation: Domain name=DUF1118; Domain location=2-63; Score= -40.7; E_value=0.0039; Accession=PF06549.4; Description=Protein of unknown function (DUF1118)
GVVLSWSSSSLPLLAAGPAVVYLVPEEQAWQVALQAVAALVCVVGGAAAVAASTFVSRLQSSSG

SEQ ID NO: 66080 - protein, 614 aa, Setaria italica
  misc_feature (48)..(48): Xaa can be any naturally occurring amino acid
  misc_feature (571)..(571): Xaa can be any naturally occurring amino acid
  Transcript Sequence Number=SeqID_106
  Gene Ontology: Mol. function=DNA binding; Cellular component =chromosome; Biological process=embryonic development ending in birth or egg hatching
  Homolog annotation: Hit_ID=B9RF70; Match level="QueryCoverage=57%, HitCoverage=38%, E-value=2e-62, Identity=36%"; Hit description =Always early, putative
  Pfam annotation: Domain name=DIRP; Domain location=281-382; Score =160.6; E_value=4.5e-45; Accession=PF06584.5; Description=DIRP
CAIVPTNDCSPDRSSGITETNKAGQGHTFLETKGTGDTVICQQQLKKXRIQQPKEEGQTGKVKNETVMASDEGNKLVDSLKPHDMLSNIISEDDMLVLDVLNSLVNAPSKTSKLEMNAPSGSHGKTDSALSDRREEGHPTIDLSKQGKPVGKSSASKTRKKMRKKLLGAEVLAEAQNISVTNLVLPEAQKVGITDDSSLRTDSASVGIPEASEDISAKVPSATLEIKPEIRMSRRTRRKHQMHCKTKHMSCNEDSDNLQAKKLLHCLSSESLRRWCTYEWFYSAVDYPWFSNNEFVHYLDHAKLSHLSRLTRSEWSAIRSSLGKPRRFSDNFLAVEKEKLEDYREKVRKIYAQLRDGSRDSLPADLARPFSIGQEVIVRHPSSRELCDGKVVMMGPDCYKVHFINPDLGVNIVKDTDCMPVNWLYNRPDNMRRSYLSNNVYNILETEHIPDLTPSENWDRAVNGVTVPEQPKSLRLTSDKQLKVESVVNGERLSTSDGPTKSIGGPDNTAGHNDELESYIAAFVQRSLSQARQMVDKAMKANSEGSDERVWASNQATDSVGPESESVVCGXQLPSNLISNCIATVLSIKHLSDSRHPPANIAGVLERVSTMLRP

SEQ ID NO: 66081 - protein, 56 aa, Setaria italica
  Transcript Sequence Number=SeqID_107
SPVCLAFPCCVSQHVLYRTATGEEKHVGDEPFSAFVKSVRRITIRSDAGSDSTGSQ

SEQ ID NO: 66082 - protein, 264 aa, Setaria italica
  Transcript Sequence Number=SeqID_108
  Gene Ontology: Mol. function=protein dimerization activity; Cellular component=nucleus; Biological process=regulation of transcription, DNA-dependent
  Homolog annotation: Hit_ID=Q6K223; Match level="QueryCoverage=91%, HitCoverage=36%, E-value=6e-56, Identity=49%"; Hit description=Auxin response factor 8
PPLAPHPRPHHDQNPHPHALVPLFPFPDGSAAAGIQGARHAQFAPFFSDLHVGNLQQGLLFCGFRPADHHTTPPAPRISTDLAIGIPPPPRQDAPRSPPSAASKKADDDVKPARIMLFGRAILTEEQMNCNSPTSPGATGEGAPKPDRDAEKGPNTPDGSGSGVTEGSPTKNNLWEPGQCKVFVKSDSVGRNLDLSALGTFDELYARLAAMFRFDNADLRSHVLYRTATGEEKHVGDEPFSAFVKSVRRITIRSDAGSDSTGSQ

SEQ ID NO: 66083 - protein, 58 aa, Setaria italica
  Transcript Sequence Number=SeqID_109
VNGLQKISSCFLNLPIVLTVDMDILTLIFPPCTSRAMPHIKTFTRYSGTKHCVSFGIA

SEQ ID NO: 66084 - protein, 177 aa, Setaria italica
  Transcript Sequence Number=SeqID_110
  Gene Ontology: Mol. function=protein serine/threonine kinase activity; Cellular component=plasma membrane; Biological process =protein amino acid phosphorylation
  Homolog annotation: Hit_ID=B9SFK9; Match level="QueryCoverage=86%, HitCoverage=23%, E-value=9e-19, Identity=36%"; Hit description =Kinase, putative
SPDCTACTTALSKAAAAYLLPGSPGAGNNSVTGCVQYPPIYAGAKASPRGPADLATAYCLFLLKANPPQSQSSGAAPWIYGVAFGSLAAVLLLAAAAGSFFIVRRRRARAAAASLAADTRSKRSQAMESISASTTLVKFSYDEIKAATDGFSRESIIGRGGFGNVYKGVLRDGAEVA

SEQ ID NO: 66085 - protein, 134 aa, Setaria italica
  misc_feature (26)..(26): Xaa can be any naturally occurring amino acid
  misc_feature (42)..(42): Xaa can be any naturally occurring amino acid
  Transcript Sequence Number=SeqID_111
  Gene Ontology: Mol. function=protein serine/threonine kinase activity; Biological process=protein amino acid phosphorylation
  Homolog annotation: Hit_ID=Q8S5G8; Match level="QueryCoverage=100%, HitCoverage=50%, E-value=9e-45, Identity=38%"; Hit description =Leucine Rich Repeat family protein
  Pfam annotation: Domain name=LRR_1; Domain location=114-134; Score =3.4; E_value=67; Accession=PF00560.25; Description=Leucine Rich Repeat
  Pfam annotation: Domain name=LRR_1; Domain location=18-40; Score =14.2; E_value=0.54; Accession=PF00560.25; Description=Leucine Rich Repeat
  Pfam annotation: Domain name=LRR_1; Domain location=42-64; Score =10.5; E_value=2.9; Accession=PF00560.25; Description=Leucine Rich Repeat
  Pfam annotation: Domain name=LRR_1; Domain location=66-88; Score =10.3; E_value=3.3; Accession=PF00560.25; Description=Leucine Rich Repeat
  Pfam annotation: Domain name=LRR_1; Domain location=90-112; Score =4.7; E_value=38; Accession=PF00560.25; Description=Leucine Rich Repeat
  Pfam module annotation: Pfam domain module=LRR_1::LRR_1::LRR_1::LRR _1::LRR_1; Domain location=114-134::18-40::42-64::66-88::90-112
SGNRFSNYLPSEVGSLTTLTYLYIHXNNLSGVLPDSLSNCRXLMELRLDDNSFNGSIPTSISKMHGLVLLNLTKNSLTGMIPQELGFMNGITELYLAQSYLTGRIPETMESMASLYRLDISCNHLDGQVPENGV

SEQ ID NO: 66086 - protein, 68 aa, Setaria italica
  Transcript Sequence Number=SeqID_112
LMHRLTSDLTLEWIITPERTNTGYYNFEYEAASLYSTLGRSFASQNRHRIQYYTRNARNQFVALTNLN

SEQ ID NO: 66087 - protein, 49 aa, Setaria italica
  Transcript Sequence Number=SeqID_113
YDTDVKWPCFCGAIHTACVHADGGGLDKAVPCWQCTWHVTSDFVVESPS

SEQ ID NO: 66088 - protein, 124 aa, Setaria italica
  misc_feature (16)..(16): Xaa can be any naturally occurring amino acid
  Transcript Sequence Number=SeqID_114
  Homolog annotation: Hit_ID=Q7XV43; Match level="QueryCoverage=93%, HitCoverage=28%, E-value=3e-53, Identity=85%"; Hit description =OSJNBa0086B14.12 protein
TDRLQTELKSGIQYWXLERKLCQALTRNEKISIDDVMKAIHLKSFDYRVLNLLMYQLTGQQVNELHMDFLSISEFLVEISDDLYDYEDDVINNTFNILRMFAAIYGPSEAPNMLAKCIGEAEER

SEQ ID NO: 66089 - protein, 49 aa, Setaria italica
  Transcript Sequence Number=SeqID_115
PGGRLEVSLDYAQREFSHVKHDGSVGGWVMDGLIARPLPVRIQVGDVTP

SEQ ID NO: 66090 - protein, 233 aa, Setaria italica
  Transcript Sequence Number=SeqID_116
  Gene Ontology: Mol. function=glutamate N-acetyltransferase activity; Cellular component=integral to membrane; Biological process=arginine biosynthetic process
  Homolog annotation: Hit_ID=Q013C7; Match level="QueryCoverage=85%, HitCoverage=19%, E-value=8e-26, Identity=37%"; Hit description =Putative glutamate/ornithine acetyltransferase (ISS)
  Pfam annotation: Domain name=DUF647; Domain location=58-233; Score= -8.3; E_value=5.7e-11; Accession=PF04884.6; Description=Protein of unknown function, DUF647
RPVGADGVARGAVWEVRGGARTRLVPDPTWTSYLIAGDDGSKREEGDGKGGGSRVDVAALRRQLERSWRRCADVAVQLLLPDGYPHSVSSDYLNYSLWRAVQGVASQISGVLSTQALLYAVGLGKGAIPTAAAVNWVLKDGLGYLSKIMLSKFGRHFDVNPKGWRLFADLLENTAYGLEILTPVFPHLFVPIGAAAGAGRSAAALIQAATRSCFYAGFAVQRNFAEVCLSSYV

SEQ ID NO: 66091 - protein, 142 aa, Setaria italica
  misc_feature (79)..(79): Xaa can be any naturally occurring amino acid
  Transcript Sequence Number=SeqID_117
HLFSRMIMLQDVIKLFCPFYEGLVFSEYLLSGQIPSVKEVNDEEPLFFNLSLGASRKECKILSAEAKDAADQICQRLQXGSKLSEIIESKEGACALFDLYKNEQYLLTNYKGKFCIVLKEGSSPEDMLKSFQPIQNRLSVAG

SEQ ID NO: 66092 - protein, 325 aa, Setaria italica
  Transcript Sequence Number=SeqID_118
  Gene Ontology: Mol. function=molecular_function; Biological process =biological_process
  Homolog annotation: Hit_ID=Q9LMX1; Match level="QueryCoverage=92%, HitCoverage=64%, E-value=1e-20, Identity=25%"; Hit description =F21F23.21 protein
  Pfam annotation: Domain name=DUF647; Domain location=1-319; Score =251.1; E_value=2.7e-72; Accession=PF04884.6; Description=Protein of unknown function, DUF647
LGLNSRSCGDQRLVSITDLLENTAYGLEILTPVFPHLFVPIGAAAGAGRSAAALIQAATRSCFYAGFAVQRNFAEVIAKGEAQGMVSKFVGIGLGIVLANHIHSSVPLALISFAGVTAVHMYCNLKSYQSIQLRTLNPYRASLVFSEYLLSGQIPSVKEVNDEEPLFFNLSLGASRKECKILSAEAKDAADQICQRLQLGSKLSEIIESKEDACALFDLYKNEQYLLTNYKGKFCIVLKEGSSPEDMLKSLFHVSYLYWLERFMGFRPSNIVSECRPGGRLEVSLDYAQREFSHVKHDGSVGGWVMDGLIARPLPVRIQVGDVTP

SEQ ID NO: 66093 - protein, 122 aa, Setaria italica
  Transcript Sequence Number=SeqID_119
  Gene Ontology: Mol. function=peptidase activity
  Homolog annotation: Hit_ID=B6TU32; Match level="QueryCoverage=93%, HitCoverage=36%, E-value=7e-60, Identity=95%"; Hit description=OTU -like cysteine protease family protein
  Pfam annotation: Domain name=OTU; Domain location=18-120; Score=68.8; E_value=2e-17; Accession=PF02338.11; Description=OTU-like cysteine protease
RLQWLDVECIRSGRPIPNEDLQRKLADELRAMVADEFVKRREETEWFVEGDFDTYVSHIREPHVWGGEPELFMASRVLQMPITVYMHDEDAGGLIAIAEYGQQYGKEEPIQVLYHGFGHYDA

SEQ ID NO: 66094 - protein, 67 aa, Setaria italica
  Transcript Sequence Number=SeqID_120
  Gene Ontology: Mol. function=protein serine/threonine kinase activity; Biological process=protein amino acid phosphorylation
  Homolog annotation: Hit_ID=Q9LRY7; Match level="QueryCoverage=98%, HitCoverage=5%, E-value=3e-29, Identity=89%"; Hit description =Similarity to protein kinase
VFAGRSSEQEKLTNDFWREAQILSKLHHPNVVAFYGVVPDGTGGTLATVTEFMVNGSLRNVLLRKDR

SEQ ID NO: 66095 - protein, 796 aa, Setaria italica
  Transcript Sequence Number=SeqID_121
  Gene Ontology: Mol. function=protein serine/threonine kinase activity; Biological process=protein amino acid phosphorylation
  Homolog annotation: Hit_ID=B9S555; Match level="QueryCoverage=38%, HitCoverage=23%, E-value=1e-153, Identity=82%"; Hit description =Serine/threonine protein kinase, putative
  Pfam annotation: Domain name=Pkinase; Domain location=516-779; Score =194.7; E_value=2.6e-55; Accession=PF00069.17; Description=Protein kinase domain
  Pfam annotation: Domain name=Pkinase_Tyr; Domain location=516-779; Score=268.4; E_value=1.7e-77; Accession=PF07714.9; Description =Protein tyrosine kinase
  Pfam module annotation: Pfam domain module=Pkinase::Pkinase_Tyr; Domain location=516-779::516-779
LYGLEAWLSGHINKKQNDADKNIGIGSPMQHSHIQRQVKGLAGNDSDLIPCTNYGISTPVEASLYSEKASVHPENAGWAPGQQEHTAQILGMTHAFSDPLLKNLNDVPASNMSLPAGSYITQSFSHKICQSNELERTSKTRPAFECVKPPDIARTDEPNFLVSNHIHQRYDQGVIGPDSSQPPVSSQHEILSSNVTQKGHDGGPVVQQQDKSAGPSDAPWSNFVDAGLIYPTHGARLSSYELDALESSVPKPMRATDHSLSYLLNVSQGGGNSNHGSHIEKPNSGLIDYGTTGYVHGNDKVAPEPHKVFPINTSEAFVLQRTMVNVESSVHQNGNVCQSSVHNSGLATTPHVGLIDTDLSMNLHGNGGLPLSSSQNPIIDGVPRREDPHHDWGNITCPEVVIGFDHTIITNESMKLPHRMHDNGHMNVPVIVEDVTDNMPSGIPSSSSVIPQVVIAAEERQEVIMSSQKDDDTRSNGAEFANEDHDGAVDGSISDAAVAELEASMYGLQIIKNGDLEELRELGSGTFGTVYYGKWRGTDVAIKRIKKSCFAGRSSEQEKLTNDFWREAQILSKLHHPNVVAFYGVVPDGTGGTLATVTEFMVNGSLRNVLLRKDRMLDRRRKLTIAMDAAFGMEYLHSKSIVHFDLKCDNLLVNLRDPQRPICKVGDFGLSRIKRNTLVSGGVRGTLPWMAPELLNGSSSRVSEKVDVFSFGIVLWEILTGEEPYANMHCGAIIGGIVNNTLRPPIPENCDPDWRKLMEQCWSANPDVRPSFTEVTDRLRAMPPVLQSRGQAPGNR

SEQ ID NO: 66096 - protein, 58 aa, Setaria italica
  Transcript Sequence Number=SeqID_122
KLKISSAQIISLSKPFIFCIKETGFCLLLNANCIFGAFEIGKSTSNSCCWDPFYLLHD

SEQ ID NO: 66097 - protein, 330 aa, Setaria italica
  misc_feature (20)..(20): Xaa can be any naturally occurring amino acid
  Transcript Sequence Number=SeqID_123
  Homolog annotation: Hit_ID=A2Q337; Match level="QueryCoverage=99%, HitCoverage=32%, E-value=3e-34, Identity=32%"; Hit description=PWWP
LDLAQVISDIRNLPLAPSTXADRRISDAARSFVLAFRSKYYKKSYENDPPEESKKSLDKPSAAATAAADGQPVKKKKLVVRPGAGNDPTRAGVKRGPSDRQEELAVKKKAKLDKIKTLSSEKKAGGLEQRDSSVASPVAQQQARPKAETGAAKKKEPAPAPRIRTPSPMALMMKFPLKSTLPSVASLKARFARFGPLDVDGIRVYWKSHMCRVIYRFKADAEAALRYASGNAMFGQVDTQYHLREVESAGREPAAPEAPPSQQRSELRLMETAAFRPGSSGNGAPLPMSRAVPARPAVGQQPKSILKKSTDDGTAGAAAREAPRVKFMLD

SEQ ID NO: 66098 - protein, 377 aa, Setaria italica
  misc_feature (9)..(9): Xaa can be any naturally occurring amino acid
  Transcript Sequence Number=SeqID_124
  Gene Ontology: Mol. function=zinc ion binding
  Homolog annotation: Hit_ID=B9SWC9; Match level="QueryCoverage=95%, HitCoverage=38%, E-value=8e-58, Identity=39%"; Hit description =Transcription factor, putative
  Pfam annotation: Domain name=PB1; Domain location=267-349; Score =81.1; E_value=4.1e-21; Accession=PF00564.16; Description=PB1 domain
  Pfam annotation: Domain name=RWP-RK; Domain location=2-46; Score =79.4; E_value=1.3e-20; Accession=PF02042.7; Description=RWP-RK domain
  Pfam module annotation: Pfam domain module=PB1::RWP-RK; Domain location=267-349::2-46
WNVLRKYFXGSLREASMSLGVCPTTLKRICRQHGISRWPSRKINKVNRSLKKIQTVINSVHGVDRSLQYDPATGSLVPAASLPDKMPFSACDSLPTSSVGKTMEEKSSPKSEQGFSSPDGWQRGDCQFHVSNISKREGEGDEVRMLANNNNGSRNYAPDVAKFTPHSNSEDAQGPLYPIVVNSLRIGETGYTNSPTSLHPSIDDQTMGRNSSFVQQADVTMVDGHDTKEHTHPSTSGMTDSSSGSASSQPTFKGNPGYVIKDRSSPALTVKATYNGDTVRFKFLPAMGWYHLLEEIAKRFRLTTGAFQLKYKDDEDEWVILASDSDLQECVDILDSIGSRNVKLQVRDLPCLISSSGSSSCLQVVLGRVNLRGVLPL

SEQ ID NO: 66099 - protein, 70 aa, Setaria italica
  Transcript Sequence Number=SeqID_125
  Gene Ontology: Mol. function=electron carrier activity; Cellular component=mitochondrial respiratory chain; Biological process =electron transport chain
  Homolog annotation: Hit_ID=Q0DI31; Match level="QueryCoverage=100%, HitCoverage=62%, E-value=2e-32, Identity=94%"; Hit description =Cytochrome c
  Pfam annotation: Domain name=Cytochrom_C; Domain location=1-69; Score= 13.9; E_value=0.01; Accession=PF00034.13; Description=Cytochrome c
GLFGRQSGTTPGYSYSSANKNMAVIWEENTLYDYLLNPKKYIPGTKMVFPGLKKPQERADLIAYLKNATA

SEQ ID NO: 66100 - protein, 112 aa, Setaria italica
  Transcript Sequence Number=SeqID_126
  Gene Ontology: Mol. function=electron carrier activity; Cellular component=mitochondrial respiratory chain; Biological process =electron transport chain
  Homolog annotation: Hit_ID=P00070; Match level="QueryCoverage=100%, HitCoverage=100%, E-value=3e-56, Identity=92%"; Hit description =Cytochrome c
  Pfam annotation: Domain name=Cytochrom_C; Domain location=12-111; Score=132.0; E_value=1.9e-36; Accession=PF00034.13; Description =Cytochrome c
MASFSEAPPGNPKAGEKIFKTKCAQCHTVEKGAGHKQGPNLNGLFGRQSGTTAGYSYSAGNKNKAVVWEENTLYEYLLNPKKYIPGTKMVFPGLKKPQERADLIAYLKEATA

SEQ ID NO: 66101 - protein, 40 aa, Setaria italica
  Transcript Sequence Number=SeqID_127
LLTLLHISKIQMFLLVVRVGHFACDLNALQIGNSYVIDSL

SEQ ID NO: 66102 - protein, 111 aa, Setaria italica
  misc_feature (29)..(29): Xaa can be any naturally occurring amino acid
  misc_feature (99)..(99): Xaa can be any naturally occurring amino acid
  Transcript Sequence Number=SeqID_128
  Gene Ontology: Mol. function=nucleotide binding; Biological process =defense response
  Homolog annotation: Hit_ID=Q53Q49; Match level="QueryCoverage=96%, HitCoverage=31%, E-value=4e-19, Identity=48%"; Hit description=NBS -LRR disease resistance protein, putative
FKGAHNAKVFSEIADEVVYIKGEIEQVKXLQKDYFPAVQAVPAGPAVIVRRGSRGCLPELIQDDDLVGITFNQQKLIGWIHRDDPNRRLITVSGMGGLXGKTTLVMNVLSV

SEQ ID NO: 66103 - protein, 147 aa, Setaria italica
  Transcript Sequence Number=SeqID_129
  Homolog annotation: Hit_ID=B8Q893; Match level="QueryCoverage=54%, HitCoverage=16%, E-value=3e-21, Identity=65%"; Hit description=SKIP interacting protein 7 (Fragment)
RHRGRRAPAADEASADADRPRSSGGFGAHVAASVMEHDKLHEERCPSRQPLSPASYTSSVGATTVNLVSPTRSLDCNARFRHTGNDLKTSTELLKVLNRIWSLEEQHAADVSAMKGLKRELHHAKACIQELMQERQRYHHEIDSLAR

SEQ ID NO: 66104 - protein, 82 aa, Setaria italica
  Transcript Sequence Number=SeqID_130
FCSHWWHLGKAYEDSCAWYGTCIVIFEGCVLWCVCSDDSTRTLKPKLVEAWYGTLLVDRRLRYDKDGVLLWWCSGLRWSQRC

SEQ ID NO: 66105 - protein, 61 aa, Setaria italica
  Transcript Sequence Number=SeqID_131
  Gene Ontology: Mol. function=sequence-specific DNA binding; Cellular component=nucleus; Biological process=regulation of transcription, DNA-dependent
  Homolog annotation: Hit_ID=B6SW91; Match level="QueryCoverage=85%, HitCoverage=10%, E-value=6e-16, Identity=85%"; Hit description =Homeodomain protein JUBEL1
RRTYNQGNQVSNWFINARVRLWKPMIEEMYQDLKKSSGVGGQGPAMEPHTSKRRICELEGQ

SEQ ID NO: 66106 - protein, 102 aa, Setaria italica
  Transcript Sequence Number=SeqID_132
  Subcellular localization annotation: CTP_CleavageSite=10; ConfidenceScore=5.02e-01
PLVNNPSSELASLAKSVSLPNHRSLLSLSNLSLLLPLISHYLLLLLCLCASREERRRDEGGDGGGLVGAGAGGEVGAAPRRRCWRGWKDYGQEGAFALVGRS

SEQ ID NO: 66107 - protein, 166 aa, Setaria italica
  Transcript Sequence Number=SeqID_133
  Gene Ontology: Mol. function=extracellular-glutamate-gated ion channel activity; Cellular component=integral to membrane; Biological process=G-protein coupled receptor protein signaling pathway
  Homolog annotation: Hit_ID=Q69L09; Match level="QueryCoverage=98%, HitCoverage=17%, E-value=2e-42, Identity=55%"; Hit description =Putative Avr9/Cf-9 rapidly elicited protein 141
  Pfam annotation: Domain name=Lig_chan; Domain location=1-146; Score= -106.0; E_value=0.0007; Accession=PF00060.18; Description=Ligand -gated ion channel
LLEQLGFDKSKIKPYNSREAIEIALSVGSKNGGIAAYVHEVPYIKVFLAEHSQEYTMVGPHYKTAGFGFALPKGSPLLGDISKAILDIVEGDTIIQIRNKWRVSQDKYSNIVPASVPDPLTTDKFMAPFLLSAVVSTSSLLIAVIIYLHEKKNKRMTSMQGDQNKD

SEQ ID NO: 66108 - protein, 66 aa, Setaria italica
  Transcript Sequence Number=SeqID_134
  Pfam annotation: Domain name=efhand; Domain location=34-62; Score =34.4; E_value=4.6e-07; Accession=PF00036.24; Description=EF hand
  Subcellular localization annotation: CTP_CleavageSite=52; ConfidenceScore=5.39e-01
MENAAPPPAAAKPSLSKKPSPSFRLRNGSLNALRLRRVFDLFDRNGDGEITLDEMASALDALGLGA

SEQ ID NO: 66109 - protein, 110 aa, Setaria italica
  Transcript Sequence Number=SeqID_135
RCDVGWRGRDRNRPSRLPPPPPPAIPIRRPAPAGEPPPLPHHFISIESQSQEPSSQPTLDPPPLGSAPAPAPAQRDPIPPAWPLPSPPTTRPTPTSSTSSSTTTTPRPTT

SEQ ID NO: 66110 - protein, 59 aa, Setaria italica
  Transcript Sequence Number=SeqID_136
TFLNFVREWHVRHECILYSRHAHLPVKTHCPEPETGIQMLEIVNSSFRLNNNLCLSAIS

SEQ ID NO: 66111 - protein, 129 aa, Setaria italica
  Transcript Sequence Number=SeqID_137
EPIPIQFQLPEWKEAKQDTRKAAMVAMSIGCRSGWGAVGLNFAWLHPPAHSFRVDTRQGKRLAGPEFVKQQADASHFPTLSSGKGTPRGQGEGNYTWDDVVSCGTVGIRTTTLISISSRQNDFVLSARY

SEQ ID NO: 66112 - protein, 46 aa, Setaria italica
  Transcript Sequence Number=SeqID_138
IEKRKTYLGTNVPSFVWHSGLQVEMHVLISFSNLKNASRLQKLWSH

SEQ ID NO: 66113 - protein, 79 aa, Setaria italica
  Transcript Sequence Number=SeqID_139
  Subcellular localization annotation: CTP_CleavageSite=68; ConfidenceScore=5.33e-01
HRQERSSSKPTPPPADSPTSPPLLAIPPPKGPPGISPTSHTPPCLSFPAGKLQIAAIPVRRPPSPDPRDVTTPGVGIHG

SEQ ID NO: 66114 - protein, 77 aa, Setaria italica
  Transcript Sequence Number=SeqID_140
GCISWLPPLLRSTDGTTPEVRIHGIQLEMDSVREVWSTSFNKEVFRRTNLVDPRKPAGTHRRGSPEDLGYLMSLMIL

SEQ ID NO: 66115 - protein, 113 aa, Setaria italica
  Transcript Sequence Number=SeqID_141
VRSTNFLGSCPRVRPTILTSHTHLISAPRRRSSESPPYQSAGRRHPIPQDVTTPGVGIHGIQLEMDSIREVWSASFNKQVFRRTNLVDPRKPAGTHRRGSSEDLGYLMSLMIL

SEQ ID NO: 66116 - protein, 108 aa, Setaria italica
  Transcript Sequence Number=SeqID_142
  Subcellular localization annotation: CTP_CleavageSite=27; ConfidenceScore=5.57e-01
LRHLSLQFHSPKVPTATPQRPKLLHSPASRRQAPVCRHTDPPAAVTQFPKTSQLLEWESMEFSWRWTAFARCGVPLLIKKFSEELTLLIPGKPGAFIPIYFGVVISCD

SEQ ID NO: 66117 - protein, 90 aa, Setaria italica
  misc_feature (67)..(67): Xaa can be any naturally occurring amino acid
  Transcript Sequence Number=SeqID_143
  Gene Ontology: Mol. function=aspartic-type endopeptidase activity; Biological process=DNA integration
  Homolog annotation: Hit_ID=O23864; Match level="QueryCoverage=94%, HitCoverage=6%, E-value=1e-25, Identity=60%"; Hit description =Polyprotein
SQGMIRSRSVERGEIDFRVGNNARVAALTVGTMQLHLPSGFIMELNNCYFVPSLSRNILSPSCLMKXGYSFASENNGCVIFKNDMFMAFV

SEQ ID NO: 66118 - protein, 114 aa, Setaria italica
  Transcript Sequence Number=SeqID_144
GKHCFVLIPCRQLVSLMKGICFCEHDWNYNFYMHQHQVSLSEDIDCCQRWRNCKINSFSKCRVLQWQTGQSNFQLKLLFKAQHLLSFCDVPELVHLFTFNEYSLHSTFSDLVLI

SEQ ID NO: 66119 - protein, 82 aa, Setaria italica
  misc_feature (82)..(82): Xaa can be any naturally occurring amino acid
  Transcript Sequence Number=SeqID_145
EARKEETEEIEEGDWDWPLLRLWLIRSPILPNAAAFLPPIPKSLTLRRDPPESGVQASPTCSRYPPRRLGRPQFRLTPSHPX

SEQ ID NO: 66120 - protein, 195 aa, Setaria italica
  Transcript Sequence Number=SeqID_146
  Gene Ontology: Mol. function=metal ion binding; Cellular component =integral to membrane; Biological process=ubiquitin-dependent protein catabolic process
  Homolog annotation: Hit_ID=Q5GAQ1; Match level="QueryCoverage=50%, HitCoverage=38%, E-value=3e-27, Identity=62%"; Hit description=Ring -H2 zinc finger protein
  Pfam annotation: Domain name=zf-C3HC4; Domain location=18-59; Score =26.4; E_value=9.8e-05; Accession=PF00097.17; Description=Zinc finger, C3HC4 type (RING finger)
IAALPRREVAAGDPPPDCAVCIAEVSAGDPARVLPRCGHAFHVECVDMWLRSHSTCPLCRCAVADEEAPVPAPRAPEADPESPNFPTNVLFFGSQDAVSTRGAAPTPTEPPPRTGARQPAPTVPAQAPQLIQGPIAGVAAVVEAARVATLRRLLGCGGAATAPPTPPQHEQQDRDLEAGLGGGESSGSPPPAKPH

SEQ ID NO: 66121 - protein, 111 aa, Setaria italica
  Transcript Sequence Number=SeqID_147
  Subcellular localization annotation: CTP_CleavageSite=47; ConfidenceScore=5.44e-01
MCSGSWSTKRYPSPVVFNLKRRRQQKTKHHVSVAIRRRRRLRLRRLRAGAEAMEMVNLKLYLENRCIIAENERLRERATALRRENLALRQNLSKTAAEAELPAAGAGAGAA

SEQ ID NO: 66122 - protein, 188 aa, Setaria italica
  Transcript Sequence Number=SeqID_148
  Gene Ontology: Mol. function=transferase activity, transferring glycosyl groups
  Homolog annotation: Hit_ID=B6UDC6; Match level="QueryCoverage=80%, HitCoverage=24%, E-value=3e-80, Identity=94%"; Hit description =Secondary cell wall-related glycosyltransferase family 8
FGIGKQSLTKAHEPCGCASKRPQPIPNLFPCKNLVRHEGNAWLYSPDSKALREKLRLPVGSCELAVPLKAKSRLFSVDRRREAYATILHSASEYVCGAISAAQSIRQAGSTRDLVILVDETISDHHRRGLEAAGWKVRIIQRIRNPKATRDAYNEWNYSKFRLWQLTDYDKIILLFVLSCTFLLISLG

SEQ ID NO: 66123 - protein, 469 aa, Setaria italica
  Transcript Sequence Number=SeqID_149
  Gene Ontology: Mol. function=transferase activity, transferring glycosyl groups
  Homolog annotation: Hit_ID=B6UDC6; Match level="QueryCoverage=98%, HitCoverage=73%, E-value=0.0, Identity=88%"; Hit description =Secondary cell wall-related glycosyltransferase family 8
  Pfam annotation: Domain name=Glyco_transf_8; Domain location=144-356; Score=202.6; E_value=1e-57; Accession=PF01501.12; Description =Glycosyl transferase family 8
LYPEWIDEEEETEIPSCPSLPEPNVRRGVRFDVIAVKLPCTRVAGWSRDVARLHLQLSAAKLAVASSKRNHKVHVLFVSDCFPIPNLFPCKNLVRHEGNAWLYSPDSKALREKLRLPVGSCELAVPLKAKSRLFSVDRRREAYATILHSASEYVCGAISAAQSIRQAGSTRDLVILVDETISDHHRRGLEAAGWKVRIIQRIRNPKATRDAYNEWNYSKFRLWQLTDYDKIIFIDADLLILRNVDFLFAMPEITATGNNATLFNSGVMVIEPSNCTFQLLMDHINEITSYNGGDQGYLNEIFTWWHRIPKHMNFLKHFWEGDDEEMKAKKTQLFGADPPMLYVLHYLGLKPWLCFRDYDCNWNNAAMREFASDVAHARWWKVHDKMPRKLQSYCLLRTRQKAGLEWDRRQAEKANSEDGHWRRNITDPRLKTCFEKFCFWESMLWHWGESNNRTKSSPATVTTPSLASS

SEQ ID NO: 66124 - protein, 248 aa, Setaria italica
  Transcript Sequence Number=SeqID_150
  Gene Ontology: Mol. function=hydrolase activity; Cellular component =ribosome; Biological process=biological_process
  Homolog annotation: Hit_ID=B9RDY6; Match level="QueryCoverage=82%, HitCoverage=72%, E-value=1e-86, Identity=71%"; Hit description=DECOY, putative
  Subcellular localization annotation: CTP_CleavageSite=31; ConfidenceScore=5.07e-01
MLSRSPATASLLLRSLLRQPRGFSSSAAAAPAAAKEGSDGKLVASVLFERLPVVIPKIHPVVYAFQEFSFRWRQQYRRQYPDDVLGKADARGKGDYQIDYVPAPRITEADKTNDRKSLQRALDNKLYLLLYGNAYGAPDGKPVWHFPEKVFENEETMRLCAESALKSVLGGLDNTYFVGNAPMAHMAVEQTDSNVSSFKRFFFKSQVVGTTKYHIGKCKDYAWVTKDELLEYFPENKDFFNKMIIHIR

SEQ ID NO: 66125 - protein, 269 aa, Setaria italica
  Transcript Sequence Number=SeqID_151
  Gene Ontology: Mol. function=3-oxoacyl-[acyl-carrier-protein] reductase activity; Cellular component=chloroplast; Biological process=fatty acid biosynthetic process
  Homolog annotation: Hit_ID=B9RAK4; Match level="QueryCoverage=91%, HitCoverage=77%, E-value=1e-107, Identity=72%"; Hit description =Short chain type dehydrogenase, putative
  Pfam annotation: Domain name=Epimerase; Domain location=29-264; Score= -54.1; E_value=0.0043; Accession=PF01370.13; Description=NAD dependent epimerasedehydratase family
  Pfam annotation: Domain name=KR; Domain location=27-212; Score=5.4; E_ value=3.8e-07; Accession=PF08659.2; Description=KR domain
  Pfam annotation: Domain name=adh_short; Domain location=27-195; Score= 162.9; E_value=9.6e-46; Accession=PF00106.17; Description=short chain dehydrogenase
  Pfam module annotation: Pfam domain module=Epimerase::KR::adh_short; Domain location=29-264::27-212::27-195
NQLRRGDRIIRPASAVSMDGWAQLEAPVAVVTGASRGIGRAIAVALGKAGCKVVVNYAKSSTEAEEVCREIEESGGTAISFAADVSCETEVESMMTTVIDAWGTLDVLVNNAGITRDALLMRMKRTQWQEVVDVNLTGVYLCAQAAATVMMRRRKGRIINITSVSGIIGNVGQANYCAAKAGVIGLTKAMAREYGSRNINVNAVAPGWVASDMTAKLGEDVERKALETIPLGRFGRPEEVAGLVEFLAVHPAASYITGQVLPVDGGLSI

SEQ ID NO: 66126 - protein, 80 aa, Setaria italica
  Transcript Sequence Number=SeqID_152
  Gene Ontology: Mol. function=zinc ion binding
  Homolog annotation: Hit_ID=Q8RZI5; Match level="QueryCoverage=68%, HitCoverage=14%, E-value=6e-19, Identity=80%"; Hit description =OJ1485_B09.11 protein
  Pfam annotation: Domain name=zf-MYND; Domain location=8-49; Score =48.8; E_value=2.1e-11; Accession=PF01753.10; Description=MYND finger
ALRLCSQALCGRPETRRHEFRRCSVCGVVNYCSRACQALHWKMAHKAECTPTDRWLDAAAAHPDAGNAANGDAAAVAPAP

SEQ ID NO: 66127 - protein, 148 aa, Setaria italica
  Transcript Sequence Number=SeqID_153
QDDDTHPNSTEKSQVSTGEKEGGEGKKKKEKPERIPSAEPAPCLATPGLRWTGGTDTEPWACRGLVLVRHVSRWREGAPPAAAVGSSSLRGLAGVGGGEEPPVHGHALRLVRALPVQRLARAGAVVGGAAHGAPPELVPPGLAPPAPA

SEQ ID NO: 66128 - protein, 88 aa, Setaria italica
  Transcript Sequence Number=SeqID_154
ACVLSCVWFGSLPFQAALLLTARTAFHIAIAACYWVGNWKWERLREIVAGISTAHCCISWMLFVQNPVFDLPLQKKGRVLYLEFSIYT

SEQ ID NO: 66129 - protein, 110 aa, Setaria italica
  Transcript Sequence Number=SeqID_155
DDDDVRVSFASAMGDQSFQSFRRYQTAVLEEEDEEQEEAEDPSKYDMWMSDEPMSIQERRRRLHQGLGMASSRDLALRRHSMKKRPADMPRSMSRSVSRQLTPAFGADPA

SEQ ID NO: 66130 - protein, 83 aa, Setaria italica
  Transcript Sequence Number=SeqID_156
  Gene Ontology: Mol. function=RNA-directed DNA polymerase activity; Biological process=RNA-dependent DNA replication
  Homolog annotation: Hit_ID=Q7XUX8; Match level="QueryCoverage=97%, HitCoverage=22%, E-value=8e-09, Identity=39%"; Hit description =OSJNBa0027G07.11 protein
AFQTENRSLREAITNNAWVTDIDLQHQSFSVIHFIELQRIWNVASGLQLRPGVPDTIRWKLTADGHYSTSSAYRAQFFGSTNT

SEQ ID NO: 66131 - protein, 88 aa, Setaria italica
  Transcript Sequence Number=SeqID_157
CFQYKKSTNKSEAKSLSKTCIAQIILKIPCTRLGSTYWRTRLSIQILIRCMVGNLPSTSQQSESPSEAHLQPLSYSCLLKLASLAFLF

SEQ ID NO: 66132 - protein, 103 aa, Setaria italica
  Transcript Sequence Number=SeqID_158
  Subcellular localization annotation: CTP_CleavageSite=56; ConfidenceScore=5.41e-01
FFLAATLSYGSVTINGALVHPGSEGKVKITQILSSSTGSNAQSWTFPPPFPRGHVRSRMLTAHPSSSSLPRTSVLPEYDASQLASGCGLLDSSVDCLFFRTCP

SEQ ID NO: 66133 - protein, 74 aa, Setaria italica
  misc_feature (6)..(6): Xaa can be any naturally occurring amino acid
  misc_feature (9)..(9): Xaa can be any naturally occurring amino acid
  Transcript Sequence Number=SeqID_159
VFFSFXFFXFLSKQSFRFQKLSNLICNWKLELQLQSAMSALHTHVSKPLCMSCHLKKGIQQLEIGALQCRLSQQ

SEQ ID NO: 66134 - protein, 95 aa, Setaria italica
  Transcript Sequence Number=SeqID_160
  Gene Ontology: Mol. function=metal ion binding; Cellular component =cellular_component; Biological process=ubiquitin-dependent protein catabolic process
  Homolog annotation: Hit_ID=Q9MAS8; Match level="QueryCoverage=72%, HitCoverage=9%, E-value=3e-15, Identity=55%"; Hit description =F13M7.22 protein
  Pfam annotation: Domain name=zf-C3HC4; Domain location=48-88; Score =38.7; E_value=2.3e-08; Accession=PF00097.17; Description=Zinc finger, C3HC4 type (RING finger)
FCILFVSDDYENLIALDSSNYHRGASDDQINSLPLSLVEGDSCSDEPCPICLDCPAAGDCLRHLPCMHKFHKECIDRWLGMRISCPVCKSTVFSQ

SEQ ID NO: 66135 - protein, 111 aa, Setaria italica
  Transcript Sequence Number=SeqID_161
  Gene Ontology: Mol. function=transporter activity; Cellular component= membrane; Biological process=oligopeptide transport
  Homolog annotation: Hit_ID=Q5N741; Match level="QueryCoverage=86%, HitCoverage=16%, E-value=4e-28, Identity=62%"; Hit description =Putative oligopeptide transporter
NEIQFAGLYATVAEGYFQGLGMLTLSSTFVPQQPSEFGDNVDSSVSWMSIHLAFFYVSLYVVACAQGGHKPCVQAFGADQFDENDPEECASRSSFFNWWYFGAYGSNIVTV

SEQ ID NO: 66136 - protein, 140 aa, Setaria italica
  Transcript Sequence Number=SeqID_162
  Gene Ontology: Mol. function=transporter activity; Cellular component= membrane; Biological process=oligopeptide transport
  Homolog annotation: Hit_ID=Q5N741; Match level="QueryCoverage=70%, HitCoverage=18%, E-value=1e-20, Identity=52%"; Hit description =Putative oligopeptide transporter
MDAAVEILLPQPATALDHVGRPVSRLTTGRWPAAVFIIGVEISERFAFAGISGNLISYLTGPLGQSTASAAAAINAWIGAALMLPLLGAAVADSWLGRYRAIISASLLYILGCSGHLRFPFINFCATGCIQFPHISADLQ

SEQ ID NO: 66137 - protein, 106 aa, Setaria italica
  Transcript Sequence Number=SeqID_163
  Subcellular localization annotation: CTP_CleavageSite=65; ConfidenceScore=5.53e-01
VSVSSCCLFPLPPTAPPRAAPPRAAPRQSSTRRTSTPPLSPDLHAPDLHAPPLYATGPPCTAPPRATPPVSAKPSEASCFSSWPASLVVWCWWKYQMDLGRAVLVH

SEQ ID NO: 66138 - protein, 124 aa, Setaria italica
  Transcript Sequence Number=SeqID_164
  Subcellular localization annotation: CTP_CleavageSite=7; ConfidenceScore=5.08e-01
SLCVHLKCTMYPSAVAPLGFTLHSFSALLGIMSKQAIAAQATASTSMISAPILHTRDPSDTSTTTTQPTRLATTKSRASAYPNQATSRSMLLNFGPQASSTGYASRRAALRSSVKTILLTLSRR

SEQ ID NO: 66139 - protein, 118 aa, Setaria italica
  Transcript Sequence Number=SeqID_165
  Gene Ontology: Mol. function=oxidoreductase activity; Biological process=oxidation reduction
  Homolog annotation: Hit_ID=B5M6A0; Match level="QueryCoverage=99%, HitCoverage=31%, E-value=1e-44, Identity=72%"; Hit description =Leucoanthocyanidin dioxygenase-like protein
VLDWGDYFFLHLAPEAAKSPAKFWPANPGNCKEVSEEYGREVVRLCELLMRVLSVSLGLDEAHFQRAFGGAACGATLRANYYPRCPQPDLTLGLSAHSDPGVLTVLLADEHVRGLQVR

SEQ ID NO: 66140 - protein, 65 aa, Setaria italica
  Transcript Sequence Number=SeqID_166
SLIRGCLNLRAQTTHICYIYSYSYGSSNFLAFLKRMTECQELSFSKILDVSVSVAHLFSFLPLDW

SEQ ID NO: 66141 - protein, 67 aa, Setaria italica
  Transcript Sequence Number=SeqID_167
CISEKIILESLFSKIPFGRAPLGICQTDPDYFMQLPISKVSRFTTSALAQPLLWHNVRFKIPPPPQV

SEQ ID NO: 66142 - protein, 109 aa, Setaria italica
  misc_feature (59)..(59): Xaa can be any naturally occurring amino acid
  Transcript Sequence Number=SeqID_168
MSRGSGSGVRSARLELQLNLSPPAAVGMEVGQDDSDSSSPSSCVSSDGRSSSGGSPREXSPPMVIGACTRCLMYCMVAKKDYPTCINCKQPCLVDLLHGEAGGGGGKRK

SEQ ID NO: 66143 - protein, 47 aa, Setaria italica
  Transcript Sequence Number=SeqID_169
MDDYFYQSLLLSVLAVALLQLLKLAMAAPRAPRRPLPPGPWKLPVIG

SEQ ID NO: 66144 - protein, 132 aa, Setaria italica
  misc_feature (115)..(115): Xaa can be any naturally occurring amino acid
  Transcript Sequence Number=SeqID_170
  Homolog annotation: Hit_ID=B6TLA4; Match level="QueryCoverage=93%, HitCoverage=29%, E-value=3e-48, Identity=80%"; Hit description=CCT motif family protein
  Pfam annotation: Domain name=CCT; Domain location=49-93; Score=85.7; E_value=1.6e-22; Accession=PF06203.6; Description=CCT motif
KDNDPCRGGARQMGGGMSPGQLPAAGAVTEASSLEDASFKSARISTEERREKIHRYIKKRNERNFSKKIKYACRKTLADSRPRVRGRFAKNDDYGEPSRAMQNHDEYDQIAGLKXEDMLDPDALQAHLSGMN

SEQ ID NO: 66145 - protein, 88 aa, Setaria italica
  Transcript Sequence Number=SeqID_171
  Gene Ontology: Mol. function=ubiquitin thiolesterase activity
  Homolog annotation: Hit_ID=Q25AN5; Match level="QueryCoverage=87%, HitCoverage=14%, E-value=2e-22, Identity=70%"; Hit description =H0811D08.10 protein
APHASASAGPGHQIAVDVDRAELFCAACGDQVYDPDFDHAVFLAQSSSLLPSTSSTSAPPAPRKRRRVDYRAWAPDPAEFALMSSADP

SEQ ID NO: 66146 - protein, 85 aa, Setaria italica
  misc_feature (85)..(85): Xaa can be any naturally occurring amino acid
  Transcript Sequence Number=SeqID_172
  Homolog annotation: Hit_ID=B6UIK0; Match level="QueryCoverage=55%, HitCoverage=37%, E-value=1e-14, Identity=80%"; Hit description =Gibberellin-regulated protein 1
  Pfam annotation: Domain name=GASA; Domain location=1-84; Score=7.8; E_ value=8.8e-08; Accession=PF02704.6; Description=Gibberellin regulated protein
MKKQQQILFLVVVFILMVVLADDDLKQLQVKQQLWSTSRSLLQQAPPKIDCPSACVVRCANNWKNEMCNKMCNVCCNHCSCVPPX

SEQ ID NO: 66147 - protein, 39 aa, Setaria italica
  Transcript Sequence Number=SeqID_173
MGIILWIPTRSPGGAFKVFPTETIPTLCSNLGLTPSFCM

SEQ ID NO: 66148 - protein, 87 aa, Setaria italica
  Transcript Sequence Number=SeqID_174
  Gene Ontology: Mol. function=dihydroorotate dehydrogenase activity; Cellular component=cytoplasm; Biological process='de novo' pyrimidine base biosynthetic process
  Homolog annotation: Hit_ID=Q8S3J6; Match level="QueryCoverage=82%, HitCoverage=34%, E-value=1e-29, Identity=86%"; Hit description =Putative dihydroorotate dehydrogenase (Fragment)
RLNNPLSRKKDFRRQELQDFMTKKTTNFSSIEEFRGASLPYFTTHTDLVHRQQEAIKQRKAIKKGLQSDKDWTGDGFVKETESMVSN

SEQ ID NO: 66149 - protein, 62 aa, Setaria italica
  Transcript Sequence Number=SeqID_175
PWTAGWYPQIIPITLMIVLMAETPSHPGLVAILAGCKMLSKYVGKNNSNTKKNKEKKSYPAI

SEQ ID NO: 66150 - protein, 380 aa, Setaria italica
  Transcript Sequence Number=SeqID_176
  Gene Ontology: Mol. function=dihydroorotate dehydrogenase activity; Cellular component=cytoplasm; Biological process='de novo' pyrimidine base biosynthetic process
  Homolog annotation: Hit_ID=Q8H6B5; Match level="QueryCoverage=99%, HitCoverage=88%, E-value=0.0, Identity=87%"; Hit description =Putative dehydrogenase
  Pfam annotation: Domain name=DHO_dh; Domain location=5-316; Score =53.9; E_value=5.8e-14; Accession=PF01180.13; Description =Dihydroorotate dehydrogenase
AGEPDLSVRVNGLQMPNPFVIGSGPPGTNYTVMKRAFDEGWGGVIAKTVSLDAEKVINVTPRYAKLRAEPNGAAMGRIIGWQNIELISDRPLETMLNEFKQLKKEYPDRILIGSIMEEYNKAAWHELIERVEESGVDALEINFSCPHGMPERKMGAAVGQDCDLLEEVCGWINEKATVPVWAKMTPNITDITQPARIALKSGCEGVSAINTIMSVMGINLKTLRPEPCVEGYSTPGGYSARAVHPIALAKVMQIARMVKEEFADGQSLSAIGGVETGNDAAEFILLGADTVQVCTGVMMHGYPLVKKLCAELQDFMREHNFSSIEEFRGASLPYFTTHTDLVHRQQEAIKQRKAIKKGLQSDKDWTGDGFVKETESMVSN

SEQ ID NO: 66151 - protein, 93 aa, Setaria italica
  Transcript Sequence Number=SeqID_177
EHTAFVNYESLKILIICYNFSGTPKFRATNQKREARLYPMKRHKIFNKYVIKASTYNGRICAALDATPAHFVAAIYKFVFALFQAQLTNLSAR

SEQ ID NO: 66152 - protein, 84 aa, Setaria italica
  misc_feature (56)..(56): Xaa can be any naturally occurring amino acid
  misc_feature (73)..(73): Xaa can be any naturally occurring amino acid
  Transcript Sequence Number=SeqID_178
  Gene Ontology: Mol. function=dihydroorotate dehydrogenase activity; Cellular component=cytoplasm; Biological process='de novo' pyrimidine base biosynthetic process
  Homolog annotation: Hit_ID=Q8H6B5; Match level="QueryCoverage=60%, HitCoverage=15%, E-value=4e-12, Identity=54%"; Hit description =Putative dehydrogenase
MLQACLQKPRDPGGFNTAALKGWRSATDTCFRYDVFEINVSCPHGMLEEVCGWINXKAVVPFWATVTPNIRDXIQPARIATNPG

SEQ ID NO: 66153 - protein, 207 aa, Setaria italica
  misc_feature (16)..(16): Xaa can be any naturally occurring amino acid
  Transcript Sequence Number=SeqID_179
  Homolog annotation: Hit_ID=A9LY26; Match level="QueryCoverage=91%, HitCoverage=50%, E-value=9e-28, Identity=36%"; Hit description=F-box GID2-like protein
LSTISDLPSVPSMEQXRKDGKLWRELNDGIKLSWIIVNRKMKRAVNLTSWHPLGGQRHWPTDTDFVLRFGSVLPAKEVLPCQVAECILLMKFRMISMGSEESGESSTLALTELSMQIEDMGGVHLNGRCSLLLLKEALSCHRSRNYDEVLESCNLYLKAQSELKEEKIRSEYRFDTLCIVSGITIFGAICTMCYRMLYVCRIQQLRV

SEQ ID NO: 66154 - protein, 417 aa, Setaria italica
  Transcript Sequence Number=SeqID_180
  Gene Ontology: Mol. function=protein serine/threonine kinase activity; Cellular component=plasma membrane; Biological process =protein amino acid phosphorylation
  Homolog annotation: Hit_ID=Q94C42; Match level="QueryCoverage=94%, HitCoverage=94%, E-value=0.0, Identity=87%"; Hit description =Serine/threonine protein kinase
  Pfam annotation: Domain name=Pkinase; Domain location=136-390; Score =219.7; E_value=7.4e-63; Accession=PF00069.17; Description=Protein kinase domain
  Pfam annotation: Domain name=Pkinase_Tyr; Domain location=136-390; Score=257.4; E_value=3.4e-74; Accession=PF07714.9; Description =Protein tyrosine kinase
  Pfam module annotation: Pfam domain module=Pkinase::Pkinase_Tyr; Domain location=136-390::136-390
MVEGPNFAGMIGGIGGHDNGGNFCDMAYYRKLGEGSNMSIDSLNSMQTSTHGGSIAMSVDNSSVGSCDSHTRMLNHPGLKGPVVGNYSVGGHSIFRHGRVSHALSDDALAQALMDPRYPTETLKDYEEWTIDLAKLHMGMPFAQGAFGKLYRGTYNGEDVAIKLLERPEADPERAGLMEQQFVQEVMMLATLRHQNIVKFVGACRKPVVWCIVTEYAKGGSVRQFLTKRQNRSVPLKLAVKQALDVARGMAYVHGLGFIHRDLKSDNLLIAGDKSIKIADFGVARIEVKTEGMTPETGTYRWMAPEMIQHRPYDQKVDVYSFGIVLWELITGMLPFANMTAVQAAFAVVNKGVRPAIPQDCLPTLGEIMTRCWDPNPDVRPPFTEVVRMLEHAEMEILSTVRKARFRCCISQPMTTD

SEQ ID NO: 66155 - protein, 83 aa, Setaria italica
  Transcript Sequence Number=SeqID_181
  Gene Ontology: Mol. function=transferase activity, transferring groups other than amino-acyl groups
  Homolog annotation: Hit_ID=Q5I2Q5; Match level="QueryCoverage=90%, HitCoverage=16%, E-value=5e-20, Identity=61%"; Hit description =Putative alcohol acyl-transferases
ADLMVLTGRPLFVLSRTYIVSDVSHAGFKSVDFGWGEAVYGGPAKGGEGPFPGVTNYFSRAKNGKGEECTVVPVCPRPEGPPV

SEQ ID NO: 66156 - protein, 221 aa, Setaria italica
  misc_feature (58)..(58): Xaa can be any naturally occurring amino acid
  misc_feature (85)..(85): Xaa can be any naturally occurring amino acid
  Transcript Sequence Number=SeqID_182
  Gene Ontology: Mol. function=aspartic-type endopeptidase activity; Cellular component=chromatin; Biological process=DNA integration
  Homolog annotation: Hit_ID=Q7XM06; Match level="QueryCoverage=99%, HitCoverage=13%, E-value=9e-53, Identity=52%"; Hit description =OSJNBa0086O06.3 protein
LRLSSLMQQLERYGDDEINEEKAVAKFLRVVSKYSQLAISIETLLDFSALSIEELTGXFKAFDDCEEMTSCGPVTIGGKLHPTEXVACLPEGSGRRGAFFLNRRPRCGGRGARRWGQLAATALHLDEPRAHVLLGDGSSDDKIDDRFLDSGATHHMTGCRECFSDLNVDVRGFVKFGDSSVVNIKGIGSVDLVAKIGEHRLQTRVFYIPALRNSIISLGVG

SEQ ID NO: 66157 - protein, 57 aa, Setaria italica
  Transcript Sequence Number=SeqID_183
  Gene Ontology: Mol. function=oxidoreductase activity; Biological process=fatty acid metabolic process
  Homolog annotation: Hit_ID=Q6L4L7; Match level="QueryCoverage=77%, HitCoverage=5%, E-value=3e-13, Identity=77%"; Hit description =Putative glyoxysomal fatty acid beta-oxidation multifunctional protein
LTVSSFCVNSLYRLADLIGFGVVTATTKQYFQSYPERCYKSMLLLQIMLEDNRTGYL

SEQ ID NO: 66158 - protein, 559 aa, Setaria italica
  misc_feature (146)..(146): Xaa can be any naturally occurring amino acid
  Transcript Sequence Number=SeqID_184
  Gene Ontology: Mol. function=oxidoreductase activity; Cellular component=glyoxysome; Biological process=fatty acid metabolic process
  Homolog annotation: Hit_ID=Q6L4L7; Match level="QueryCoverage=96%, HitCoverage=73%, E-value=0.0, Identity=75%"; Hit description =Putative glyoxysomal fatty acid beta-oxidation multifunctional protein
  Pfam annotation: Domain name=3HCDH; Domain location=328-422; Score =111.0; E_value=4e-30; Accession=PF00725.14; Description=3 -hydroxyacyl-CoA dehydrogenase, C-terminal domain
  Pfam annotation: Domain name=3HCDH_N; Domain location=147-326; Score =248.8; E_value=1.3e-71; Accession=PF02737.10; Description=3 -hydroxyacyl-CoA dehydrogenase, NAD binding domain
  Pfam module annotation: Pfam domain module=3HCDH::3HCDH_N; Domain location=328-422::147-326
MSKAIKGREAHELGLVDAITSANELVNTACSWALEIVRKKEEPWFKSLYRTDRLPDLVEVRDILKFARVQTKNEAPNVPHPIVCIDVIEEGIVSGPRVGLMKEVLSAKMLQQTQTSKSLRHIFFAQRATSKIPNITNIGLTPRKIXKAAIVGGGLMGSGIATVLILNNFKVILKEVNEQSLSAGINRVKGNLQSFVRQGQLTKEDCENKFSLVSGVLDYEQFRDADLVIEAVIEDVLLKQQIFSDLEKYCHHNCIFSTNTSMIDLNLIGQKTTSQDRILGAHFFSPAHVMPLLEIVRTHQTSSQVVVDLLDVAKKIRKTAIVVGNCTGFAVNRVFFPYSQAASFLVDYGLDVYHIDHVITQFGMPMGPFRLADLIGFGVVTATTKQYFQSYPERCYKSMLLLQIMLEDNRTGESSRKGFYVYDNKRKASRDPDLRKYVEKSRDMAGVKQDPKLMKLTDNDIVEIIFFPVVNEACRVLDEGISLKASDLDVASVMGMGFPSYRGGVMFWADSLGAKYVYDRLEAWSKDYGEFFKPCEYLAARARQGASLAAKLDSAKSRL

SEQ ID NO: 66159 - protein, 70 aa, Setaria italica
  Transcript Sequence Number=SeqID_185
KLTTKVQSFVLPDQQLDTAPCMLLTEYTLNLYSTMHKRGKQRKATEGQYYCQTQGELHVHLDCLLDHSAI

SEQ ID NO: 66160 - protein, 315 aa, Setaria italica
  Transcript Sequence Number=SeqID_186
  Gene Ontology: Mol. function=glycine dehydrogenase (decarboxylating) activity; Cellular component=mitochondrion; Biological process =glycine metabolic process
  Homolog annotation: Hit_ID=Q6V9T1; Match level="QueryCoverage=100%, HitCoverage=30%, E-value=1e-172, Identity=91%"; Hit description =Glycine dehydrogenase P protein
  Pfam annotation: Domain name=GDC-P; Domain location=14-315; Score =550.8; E_value=1.6e-162; Accession=PF02347.8; Description=Glycine cleavage system P-protein
VSVSALQPSDTFPRRHNSATPAEQAAMASTCGFDTVDALIDATVPAAIRAPTMHFAGKFDEGFTESQMIDHMQRLASMNKAYKSFIGMGYYNTHVPAVILRNLMENPAWYTQYTPYQAEIAQGRLESLLNYQTMIADLTGLPMSNASLLDEATAAAEAMAMCNGILRGKKKTFLIASNCHPQTIDVCETRAAGFDIKVIVADAKDFDYSSGDVCGVLVQYPGTEGEVLDYAEFVKDAHAHGVKVVMATDLLALTTLRPPGEIGADIAVGSAQRFGVPMGYGGPHAAFLATSQEYKRLMPGRIIGVSVDSTGKPAL

SEQ ID NO: 66161 - protein, 144 aa, Setaria italica
  misc_feature (62)..(62): Xaa can be any naturally occurring amino acid
  Transcript Sequence Number=SeqID_187
  Gene Ontology: Mol. function=protein binding; Cellular component =cytosol; Biological process=embryonic development ending in birth or egg hatching
  Homolog annotation: Hit_ID=B9RT69; Match level="QueryCoverage=100%, HitCoverage=40%, E-value=7e-62, Identity=71%"; Hit description =PP1/PP2A phosphatases pleiotropic regulator PRL1, putative
  Pfam annotation: Domain name=WD40; Domain location=14-51; Score=19.2; E_value=0.017; Accession=PF00400.24; Description=WD domain, G-beta repeat
  Pfam annotation: Domain name=WD40; Domain location=83-121; Score =17.7; E_value=0.049; Accession=PF00400.24; Description=WD domain, G -beta repeat
  Pfam module annotation: Pfam domain module=WD40::WD40; Domain location=14-51::83-121
SHDTTIKFWDLVAGRTMCTLTHHKKSVRAMALHPKEKAFASASAGNIMKFSLPKGEFLHNMXDNGSLWFWDWKSGHNFHQDQTAVQAGSLASEACIYALSYDASGSRLVTCEADKTIKMWREDLTTTPETHPINFKPPKDIRGY

SEQ ID NO: 66162 - protein, 477 aa, Setaria italica
  Transcript Sequence Number=SeqID_188
  Gene Ontology: Mol. function=protein binding; Cellular component =cytosol; Biological process=Golgi organization and biogenesis
  Homolog annotation: Hit_ID=Q42384; Match level="QueryCoverage=98%, HitCoverage=98%, E-value=0.0, Identity=70%"; Hit description =PP1/PP2A phosphatases pleiotropic regulator PRL1
  Pfam annotation: Domain name=WD40; Domain location=157-195; Score =51.8; E_value=2.7e-12; Accession=PF00400.24; Description=WD domain, G-beta repeat
  Pfam annotation: Domain name=WD40; Domain location=199-237; Score =36.7; E_value=9.1e-08; Accession=PF00400.24; Description=WD domain, G-beta repeat
  Pfam annotation: Domain name=WD40; Domain location=241-279; Score =41.0; E_value=4.5e-09; Accession=PF00400.24; Description=WD domain, G-beta repeat
  Pfam annotation: Domain name=WD40; Domain location=283-321; Score =36.7; E_value=9e-08; Accession=PF00400.24; Description=WD domain, G -beta repeat
  Pfam annotation: Domain name=WD40; Domain location=325-362; Score =17.5; E_value=0.054; Accession=PF00400.24; Description=WD domain, G -beta repeat
  Pfam annotation: Domain name=WD40; Domain location=367-404; Score =7.5; E_value=5.1; Accession=PF00400.24; Description=WD domain, G -beta repeat
  Pfam annotation: Domain name=WD40; Domain location=417-454; Score =17.5; E_value=0.057; Accession=PF00400.24; Description=WD domain, G -beta repeat
  Pfam module annotation: Pfam domain module=WD40::WD40::WD40::WD40::WD4 0::WD40::WD40; Domain location=157-195::199-237::241-279::283 -321::325-362::367-404::417-454
MSTAAADGLPVEPQSLKKLSLKSLKRSLDLFAPAHSLLFAPDAESKRIRTGCKVRAEYGAVKDLPAEQGRGQGNGTSAAPSTALALPGTQDTKDAQRGGTSNAIVPAPLMLPKAPESTIPGKNTTLSIPGSSDRFSTSALMERIPSRWPRPAWHAPWKNYRVISGHLGWVRSIAFDPGNEWFCTGSADRTIKIWDLASGTLKLTLTGHIEQIRGLAVSQRHTYLFSAGDDKQVKCWDLEQNKVIRSYHGHLSGVYCLALHPTIDVLLTGGRDSVCRVWDIRTKAHVSALTGHDNTVCSVFARPTDPQVVTGSHDTTIKLWDLVAGRTMCTLTHHKKSVRAMAMHPKEKSFASASADNIKKFSLPKGEFLHNMLSQQKTIINAMAVNEDGVMATGGDNGSMWFWDWKSGHNFQQEQTIVQPGSLESEACIYALSYDVSGSRLVSCEADKTIKMWKEDLTATPETHPINFKPPKDIRRY

SEQ ID NO: 66163 - protein, 124 aa, Setaria italica
  Transcript Sequence Number=SeqID_189
  Subcellular localization annotation: CTP_CleavageSite=52; ConfidenceScore=5.48e-01
KYSTRLPTLSLASSLFSSCSVADPAVYVSITAPPPSPPVGDARKAGIFSRTRARRGRANLVIFFPPAPPPLTCAPSRREPCSHLPAHPDSPAPRQLSTLPRPVRRSPWTLARHPARHIFQTPSG

SEQ ID NO: 66164 - protein, 115 aa, Setaria italica
  misc_feature (60)..(60): Xaa can be any naturally occurring amino acid
  misc_feature (63)..(63): Xaa can be any naturally occurring amino acid
  Transcript Sequence Number=SeqID_190
TLRLSRTSGIELKGSRSTWQVALGARQQPVFVDSIGVTCMQHEHPASNAKCKQSHLLVFXNKXEREKLAAGRAPRLIDLSPPFILPPQLQPPATKMGIRGGRGAQPSASLLRRVS

SEQ ID NO: 66165 - protein, 143 aa, Setaria italica
  Transcript Sequence Number=SeqID_191
  Homolog annotation: Hit_ID=B6T7M2; Match level="QueryCoverage=89%, HitCoverage=32%, E-value=3e-13, Identity=38%"; Hit description=RHC1A
MSTPAAAYFAAAARKQYFCYQCNRTVLIAASAAAAGELSCPDCRGDFLEEVTVPAPTFIPLPFPFPFASTTIPAASTAPAPAPAGAPATGSGGSPSLSSSSSSAATSPSRHNDISSILHTFLGLHEQPGRVGRGRQRTLRRRH

SEQ ID NO: 66166 - protein, 130 aa, Setaria italica
  Transcript Sequence Number=SeqID_192
PWLPILPENVSRKYLTLLLNAMSRCAFFLAAEPSVFGADDDLVHRFCVATLEECVKVQTIDSLLVVARKICSSLDLSWEGSTRLLLGLLKCATDSVVCLKADLPKAVNDFLVFVAYVSRCFLSVNRDGRV

SEQ ID NO: 66167 - protein, 67 aa, Setaria italica
  Transcript Sequence Number=SeqID_193
HFPLIFHWMNELVYITPKSLHQAMWSRLRRKRTSTSYFLCIFALAETLDSPLNTPNHTESDWEEAEV

SEQ ID NO: 66168 - protein, 120 aa, Setaria italica
  Transcript Sequence Number=SeqID_194
  Homolog annotation: Hit_ID=O04559; Match level="QueryCoverage=72%, HitCoverage=15%, E-value=1e-22, Identity=52%"; Hit description =T7N9.16
GRTRPAPRLSKLESSDSFSAPLHKVEGRAIHYHIADDLGNVDDGTEGHSFTFNGSNLEELANKLQEKTGMDDLIICTRSPINGKLTPLRLQLPPNNAAMHIVLVQESSKVAKTFPWPYGS

SEQ ID NO: 66169 - protein, 146 aa, Setaria italica
  misc_feature (20)..(20): Xaa can be any naturally occurring amino acid
  Transcript Sequence Number=SeqID_195
  Gene Ontology: Mol. function=metal ion binding; Biological process =metal ion transport
SVSIDRMHGKVTVMGSVSQXKVLRAARRSGRLAVLWPSAYNNPAYHHAYAQPAAAYYPNHYQAKPAQALAQHHHYFSSVPRGGVSSAARMPVAQYPQGKASSYNYHVHGYYDSELYGNYHEQPGVVPAAVRNYFSDENPTGACSIM

SEQ ID NO: 66170 - protein, 125 aa, Setaria italica
  Transcript Sequence Number=SeqID_196
  Subcellular localization annotation: CTP_CleavageSite=66; ConfidenceScore=5.79e-01
FPSRKNTEAPADTSKTDTPHNSAPRTPNLVRKRPPFPVPGSGPRRKKPRRSSPARSGVTWPANGTKTSKGKERPFSQVEEAGGAPHGVAHATEVAPLERAPCALHHRRRRRGAPRGHLVRRHHGL

SEQ ID NO: 66171 - protein, 55 aa, Setaria italica
  Transcript Sequence Number=SeqID_197
NQTIFLFTKYEGQQYLLNKIHRKLTTKTHIRVKKHPRTNNSHMLELLKMLRHAIS

SEQ ID NO: 66172 - protein, 81 aa, Setaria italica
  misc_feature (17)..(17): Xaa can be any naturally occurring amino acid
  Transcript Sequence Number=SeqID_198
  Homolog annotation: Hit_ID=B9RET1; Match level="QueryCoverage=98%, HitCoverage=18%, E-value=1e-17, Identity=55%"; Hit description =Transcription regulator, putative
  Pfam annotation: Domain name=DUF573; Domain location=1-81; Score =92.3; E_value=1.7e-24; Accession=PF04504.6; Description=Protein of unknown function, DUF573
EFTAARGTAFASHQYDXDPFYEDMRRRLQLDFSKSQLVEKLRRLKRKYRNCVSRLRESGATFSFRSPHEQAIFEIARNIWR

SEQ ID NO: 66173 - protein, 419 aa, Setaria italica
  Transcript Sequence Number=SeqID_199
  Gene Ontology: Mol. function=hydrolase activity, hydrolyzing O -glycosyl compounds; Cellular component=beta-galactosidase complex; Biological process=carbohydrate metabolic process
  Homolog annotation: Hit_ID=B9RGA7; Match level="QueryCoverage=99%, HitCoverage=37%, E-value=1e-156, Identity=63%"; Hit description=Beta- galactosidase, putative
  Pfam annotation: Domain name=Glyco_hydro_2; Domain location=262-390; Score=33.0; E_value=4.2e-07; Accession=PF00703.13; Description =Glycosyl hydrolases family 2, immunoglobulin-like beta-sandwich domain
  Pfam annotation: Domain name=Glyco_hydro_2_N; Domain location=85-260; Score=327.5; E_value=2.7e-95; Accession=PF02837.10; Description =Glycosyl hydrolases family 2, sugar binding domain
  Pfam module annotation: Pfam domain module=Glyco_hydro_2::Glyco_hydro_ 2_N; Domain location=262-390::85-260
MALAYASAVVPPSNRSYKAWEDPSFFKWRKRDAHVPLRSQDTLEGALRYWHERRNVNYLNADTAVWNDDAVRGALESAALWSKGLPYTKSLSGYWKFLLAPSAESVPEKFFDAHFDDSNWEALPVPSNWQMHGFDRPIYTNTTYPFPINPPFVSTDNPTGCYRTVFHIPKEWKGRRILLHFEAVDSAFFAWVNGVPIGYSQDSRLPAEFEVTDCCHPCDSDKENVLAVQVMRWSDGSYLEDQDHWWLSGIHRDVLLLSKPQIFITDYFFKATMDENFSLADIEVEVEIDSHKQDREHVSTLSIEATLYDNSGPSISLDGDLSFANVVNLKPKPKTSRGPCLGFHGYVLGGKIENPKLWSSEHPNLYTLVVLLKDANGKLIECESCQVGIRNVVRAHKQMLVNGCPVVLRGVNRHEHHPR

SEQ ID NO: 66174 - protein, 217 aa, Setaria italica
  misc_feature (205)..(205): Xaa can be any naturally occurring amino acid
  Transcript Sequence Number=SeqID_200
  Gene Ontology: Mol. function=phosphoprotein phosphatase activity; Cellular component=cytoplasm
  Homolog annotation: Hit_ID=Q5VRS7; Match level="QueryCoverage=97%, HitCoverage=65%, E-value=1e-105, Identity=86%"; Hit description =Serine/threonine protein phosphatase
  Pfam annotation: Domain name=Metallophos; Domain location=35-214; Score=122.7; E_value=1.2e-33; Accession=PF00149.20; Description =Calcineurin-like phosphoesterase
MHKILSSISAATGRQLKHSVKIFQIRTLNLLELEAPIKICGDIHGQYSDLLRLFEYGGYPPEANYLFLGDYVDRGKQSIETICLLLAYKIKYPENFFLLRGNHECASINRIYGFFDECKRRFNVRIWKIFTECFNCLPVAALIDDKILCMHGGLSPELKNMDQIRNIARPVDVPDHGLLCDLLWSDPDKDIEGWGDNDRGVSFTXFGADKVAEFLEK

SEQ ID NO: 66175 - protein, 301 aa, Setaria italica
  Transcript Sequence Number=SeqID_201
  Gene Ontology: Mol. function=phosphoprotein phosphatase activity; Cellular component=cytoplasm; Biological process=carbohydrate metabolic process
  Homolog annotation: Hit_ID=Q5VRS7; Match level="QueryCoverage=99%, HitCoverage=99%, E-value=1e-161, Identity=86%"; Hit description =Serine/threonine protein phosphatase
  Pfam annotation: Domain name=Metallophos; Domain location=54-226; Score=134.9; E_value=2.5e-37; Accession=PF00149.20; Description =Calcineurin-like phosphoesterase
MEAAAVDDMIRRLLEARGGRTPRNAQVTDAEIRRLCAAAKDVFLSQPNLLELEAPIKICGDIHGQYSDLLRLFEYGGYPPEANYLFLGDYVDRGKQSIETICLLLAYKIKYPENFFLLRGNHECASINRIYGFFDECKRRFNILCMHGGLSPELKNMDQIRNIARPVDVPDHGLLCDLLWSDPDKDIEGWGDNDRGVSFTFGADKVAEFLEKHDLDLVCRAHQVVEDGYEFFAKRQLVTIFSAPNYCGEFDNAGAMMSIDDSLTCSFQILKPSEKKGKAGTVNMSKPGTPPRKIKISVTRI

SEQ ID NO: 66176 - protein, 106 aa, Setaria italica
  Transcript Sequence Number=SeqID_202
RLHVRFPPKFIWIEPFHRNFEGLKGWPILCSNPTRILWNKWPHRKNSYRIQILQHFYMNPMFQREPKRCRASCERSGSDERFGGGRKGGVRKSLNSNTRQHASDIS

SEQ ID NO: 66177 - protein, 229 aa, Setaria italica
  Transcript Sequence Number=SeqID_203
  Homolog annotation: Hit_ID=B9RY36; Match level="QueryCoverage=100%, HitCoverage=72%, E-value=1e-58, Identity=35%"; Hit description =Pentatricopeptide repeat-containing protein, putative
  Pfam annotation: Domain name=PPR; Domain location=11-45; Score=46.6; E_value=9.4e-11; Accession=PF01535.12; Description=PPR repeat
  Pfam annotation: Domain name=PPR; Domain location=116-150; Score =38.2; E_value=3.2e-08; Accession=PF01535.12; Description=PPR repeat
  Pfam annotation: Domain name=PPR; Domain location=151-185; Score =34.8; E_value=3.5e-07; Accession=PF01535.12; Description=PPR repeat
  Pfam annotation: Domain name=PPR; Domain location=186-220; Score =45.0; E_value=3e-10; Accession=PF01535.12; Description=PPR repeat
  Pfam annotation: Domain name=PPR; Domain location=46-80; Score=44.3; E_value=4.9e-10; Accession=PF01535.12; Description=PPR repeat
  Pfam annotation: Domain name=PPR; Domain location=81-115; Score=42.8; E_value=1.3e-09; Accession=PF01535.12; Description=PPR repeat
  Pfam module annotation: Pfam domain module=PPR::PPR::PPR::PPR::PPR::PP R; Domain location=11-45::116-150::151-185::186-220::46-80::81-115
MKKQGVMANVVTFSTFVDAFCKEGLVREAMKLFAQMRVRGMMPNEFTYTSLVDGTCKAGRLDDAIVLLDEMVHQGVAPNVVTYTVLVDGLCKVGKVAEADGVLRLMERAGVKANELLYTTLIHGHFMNKNGERALDLLSEMKNKGMELDVSLYGTLIWGLCNVQKVDEAKNLLHKMAGCGLKPNNVIYTTIMDACFKAGKESEAIALLHEMLNSGFQPNVVTYCALIDG

SEQ ID NO: 66178 - protein, 182 aa, Setaria italica
  misc_feature (151)..(151): Xaa can be any naturally occurring amino acid
  Transcript Sequence Number=SeqID_204
  Homolog annotation: Hit_ID=B9SMU3; Match level="QueryCoverage=67%, HitCoverage=15%, E-value=1e-21, Identity=43%"; Hit description =Pentatricopeptide repeat-containing protein, putative
MQRILSRAARRCTSSSAAFKSPHAQVNVASGVHSEDAPTCSNEYDDFTWKTTLVRSMQADIVNALRRGDRQRASIILSNFQNTNWALNKEDFSYILEYCAEAPDPLFVMETLELMEEKAIGMSKGIYRYVIRALSRGGYVKEALHWLMLLXEKESTHATLPFFNIFLNACGSSANLKDVECC

SEQ ID NO: 66179 - protein, 333 aa, Setaria italica
  misc_feature (57)..(57): Xaa can be any naturally occurring amino acid
  Transcript Sequence Number=SeqID_205
  Gene Ontology: Mol. function=metal ion binding; Cellular component =nucleus; Biological process=regulation of transcription, DNA -dependent
  Homolog annotation: Hit_ID=B6SV09; Match level="QueryCoverage=100%, HitCoverage=59%, E-value=1e-133, Identity=71%"; Hit description=PHD -finger family protein
  Pfam annotation: Domain name=PHD; Domain location=194-250; Score =14.2; E_value=0.00074; Accession=PF00628.21; Description=PHD-finger
  Pfam annotation: Domain name=PHD; Domain location=251-296; Score =57.0; E_value=7.2e-14; Accession=PF00628.21; Description=PHD-finger
  Pfam annotation: Domain name=PHD; Domain location=80-127; Score=39.1; E_value=1.7e-08; Accession=PF00628.21; Description=PHD-finger
  Pfam module annotation: Pfam domain module=PHD::PHD::PHD; Domain location=194-250::251-296::80-127
KFEQVGQEMVGLASSLSVISQASCQKQASGVSEIDMTEHKIEETSLVGVAHKTLREXDPPCDSGHSTIPKRSGTSGLDGICKDCGRKADSEGRIICDRCEAAFHVSCLKPAIDDVPAKWFCPTCNELDAAIKNNNNGRSHEDCDVCEWLEVKVPEENPEDVSRTELAVKTQESSVSSMDGDSEPDLSTTALSNLCKHCGTCEDEDKKFLVCGHPYCAYKFYHVLCLKESQIAIQKQKNRACWYCPSCLCRGCFKAKDDEWTVLCDGCDDAYHIYCMNPPRIDIPKGSWYCTSCSARRSMDAMQKYEKSVLETVMHVPGAKRSKVVASGAPETK

SEQ ID NO: 66180 - protein, 224 aa, Setaria italica
  Transcript Sequence Number=SeqID_206
  Gene Ontology: Cellular component=chloroplast
  Homolog annotation: Hit_ID=Q2QYC9; Match level="QueryCoverage=99%, HitCoverage=82%, E-value=2e-62, Identity=61%"; Hit description=FHA domain containing protein, expressed
  Pfam annotation: Domain name=FHA; Domain location=116-183; Score =69.6; E_value=1.2e-17; Accession=PF00498.18; Description=FHA domain
  Subcellular localization annotation: CTP_CleavageSite=81; ConfidenceScore=5.80e-01
MEAAAATTSSLVLFSTTPRRSPISSFASPSLLLRPPCNYSCSVSSAKQQHLVCLAGPWLNSKKSRVLRCSSSLADGASTVRSSVRWVLDPAGDGDWRHIGYKVARPGAFEIASDAVTVGRVADKADIVLPVATVSGTHARLEKKDGRLFVTDLDSTNGTYINERRLNPGFPIPIDPGSLIIFGDIHLAMFRVRKMIVEVPSETQGAQQETNTEVVSTAVQDTAS

SEQ ID NO: 66181 - protein, 125 aa, Setaria italica
  misc_feature (14)..(14): Xaa can be any naturally occurring amino acid
  misc_feature (29)..(29): Xaa can be any naturally occurring amino acid
  Transcript Sequence Number=SeqID_207
  Gene Ontology: Mol. function=DNA binding; Cellular component=nucleus; Biological process=regulation of transcription
  Homolog annotation: Hit_ID=Q6ER21; Match level="QueryCoverage=48%, HitCoverage=23%, E-value=3e-32, Identity=98%"; Hit description =Putative ZF-HD homeobox protein
  Subcellular localization annotation: CTP_CleavageSite=40; ConfidenceScore=5.48e-01
LGSGAQGAAAQRLXPPQLTPSSAPPPGGXMPRKRFRTKFTAEQKQRMQELSERLGWRLQKRDEAIVDEWCRDIGVGKGVFKVWMHNNKHNFLGGHSARRSASSSAPAGPGAGAAPVHTSTANAGV

SEQ ID NO: 66182 - protein, 158 aa, Setaria italica
  Transcript Sequence Number=SeqID_208
  Gene Ontology: Mol. function=protein methyltransferase activity; Cellular component=cytoplasm; Biological process=protein amino acid methylation
  Homolog annotation: Hit_ID=B6U5U6; Match level="QueryCoverage=98%, HitCoverage=31%, E-value=4e-35, Identity=49%"; Hit description =Protein binding protein
GENGTRSQTRHGNASGSSGRMAKGGRVAKLVDQLRNADDFDSKLSLYLVLLPLDGQSVPKLEKPYLSCQPTLSVQHLCQFVALQLSRQPKEVEIYIRKSSMDASLSANNTCKDEIKPDQSNGLERLWEEKSLSELYPSLTTCQGDLELLYSLKAQGQV

SEQ ID NO: 66183 - protein, 78 aa, Setaria italica
  Transcript Sequence Number=SeqID_209
TPWCCLQPNKRRNKTHHISDAATEGHNLQPRARRNNSEVADEHIARDPNHDTIGDFLCDNWRSLSPSTNRSLIRLIWP

SEQ ID NO: 66184 - protein, 136 aa, Setaria italica
  Transcript Sequence Number=SeqID_210
  Homolog annotation: Hit_ID=Q7XUR6; Match level="QueryCoverage=63%, HitCoverage=36%, E-value=7e-29, Identity=71%"; Hit description =OSJNBa0084K11.15 protein
  Pfam annotation: Domain name=DUF1014; Domain location=6-134; Score =218.9; E_value=1.3e-62; Accession=PF06244.4; Description=Protein of unknown function (DUF1014)
PPPKVTEAELTRRREEERLRLEREAEAAKKRAARMAEEEEYERVVLVANTNRDDSLIEARSVEEAIARMSVVDPQAALPADKHPERRLKSSFKAFEEAELPKLKEEKPGLTLNQYKDMIWKLWKKSPDNPLNQAAE

SEQ ID NO: 66185 - protein, 47 aa, Setaria italica
  Transcript Sequence Number=SeqID_211
  Gene Ontology: Mol. function=DNA binding; Cellular component=nucleus; Biological process=regulation of transcription
  Homolog annotation: Hit_ID=Q2A703; Match level="QueryCoverage=100%, HitCoverage=20%, E-value=5e-21, Identity=100%"; Hit description =Transcription factor MYB8
MGRSPCCEKAHTNKGAWTKEEDQRLVAYIKAHGEGCWRSLPKAAGLL

SEQ ID NO: 66186 - protein, 166 aa, Setaria italica
  Transcript Sequence Number=SeqID_212
  Gene Ontology: Mol. function=DNA binding; Cellular component=nucleus; Biological process=regulation of transcription
  Homolog annotation: Hit_ID=Q9S7E3; Match level="QueryCoverage=69%, HitCoverage=43%, E-value=1e-52, Identity=78%"; Hit description =GmMYB29A1 protein
  Pfam annotation: Domain name=Myb_DNA-binding; Domain location=14-61; Score=55.3; E_value=2.4e-13; Accession=PF00249.23; Description=Myb -like DNA-binding domain
  Pfam annotation: Domain name=Myb_DNA-binding; Domain location=67-112; Score=40.6; E_value=6.4e-09; Accession=PF00249.23; Description=Myb -like DNA-binding domain
  Pfam module annotation: Pfam domain module=Myb_DNA-binding::Myb_DNA -binding; Domain location=14-61::67-112
MGRAPCCEKEGLRRGAWSPEEDQRLVAYIRQHGHPNWRALPRQAGLLRCGKSCRLRWINYLRPDIKRGNFSADEEALIVRLHLELGNRWSAIAAQLPGRTDNEIKNVWHTHIKKRLEDDAEANAAAAGGGRPKQQKARKSKPAAAAKKATAAAAAVSDSSEQQPFT

SEQ ID NO: 66187 - protein, 91 aa, Setaria italica
  Transcript Sequence Number=SeqID_213
  Gene Ontology: Mol. function=DNA binding; Cellular component=nucleus; Biological process=regulation of transcription, DNA-dependent
  Homolog annotation: Hit_ID=P81393; Match level="QueryCoverage=100%, HitCoverage=39%, E-value=3e-42, Identity=91%"; Hit description=Myb -related protein 308
  Pfam annotation: Domain name=Myb_DNA-binding; Domain location=14-61; Score=47.6; E_value=4.9e-11; Accession=PF00249.23; Description=Myb -like DNA-binding domain
MGRSPCCEKAHTNKGAWTKEEDDRLVAYIKAHGEGCWRSLPKAAGLLRCGKSCRLRWINYLRPDLKRGNFTEEEDELIIRDHLLPRRLWSL

SEQ ID NO: 66188 - protein, 139 aa, Setaria italica
  misc_feature (126)..(126): Xaa can be any naturally occurring amino acid
  Transcript Sequence Number=SeqID_214
  Gene Ontology: Mol. function=cysteine-type peptidase activity; Cellular component=nucleus; Biological process=regulation of transcription
  Homolog annotation: Hit_ID=Q53ML6; Match level="QueryCoverage=97%, HitCoverage=5%, E-value=3e-69, Identity=91%"; Hit description =Transposon protein, putative, CACTA, En/Spm sub-class, expressed
  Pfam annotation: Domain name=Myb_DNA-binding; Domain location=14-61; Score=50.3; E_value=7.4e-12; Accession=PF00249.23; Description=Myb -like DNA-binding domain
  Pfam annotation: Domain name=Myb_DNA-binding; Domain location=67-112; Score=56.5; E_value=1e-13; Accession=PF00249.23; Description=Myb-like DNA-binding domain
  Pfam module annotation: Pfam domain module=Myb_DNA-binding::Myb_DNA -binding; Domain location=14-61::67-112
MGRSPCCEKAHTNKGAWTKEEDQRLIAYIKAHGGGCWRSLPKAAGLLRCGKSCRLRWMNYLRPDLKRGNFTEEEDELIIKFHELFGNKWSLIAGRLPGRTDNEIKNYWNTHIKRKLVARGIDPQTXHRPIAAAASGAPG

SEQ ID NO: 66189 - protein, 248 aa, Setaria italica
  Transcript Sequence Number=SeqID_215
  Gene Ontology: Mol. function=DNA binding; Cellular component=nucleus; Biological process=regulation of transcription, DNA-dependent
  Homolog annotation: Hit_ID=P20025; Match level="QueryCoverage=100%, HitCoverage=100%, E-value=3e-99, Identity=75%"; Hit description=Myb -related protein Zm38
  Pfam annotation: Domain name=Myb_DNA-binding; Domain location=14-61; Score=47.6; E_value=4.9e-11; Accession=PF00249.23; Description=Myb -like DNA-binding domain
  Pfam annotation: Domain name=Myb_DNA-binding; Domain location=67-112; Score=52.3; E_value=1.9e-12; Accession=PF00249.23; Description=Myb -like DNA-binding domain
  Pfam module annotation: Pfam domain module=Myb_DNA-binding::Myb_DNA -binding; Domain location=14-61::67-112
MGRSPCCEKAHTNKGAWTKEEDDRLVAYIKAHGEGCWRSLPKAAGLLRCGKSCRLRWINYLRPDLKRGNFTPDEDDLIVSLHSLLGNKWSLIAARLPGRTDNEIKNYWNTHIRRKLLARGIDPVTHRPVAADVGGVTTISFHPPPQQQQLKPPPRCPDLNLDLCISPPCHQQEEEDDQPLDVEVDLIKPVVVVKREVLQAGHGHGSRGALCFGCSLGLQKGAPGCSCSDSHFLGLRAGMLDFRGLEMK

SEQ ID NO: 66190 - protein, 246 aa, Setaria italica
  Transcript Sequence Number=SeqID_216
  Gene Ontology: Mol. function=DNA binding; Cellular component=nucleus; Biological process=regulation of transcription
  Homolog annotation: Hit_ID=Q2A702; Match level="QueryCoverage=100%, HitCoverage=100%, E-value=1e-110, Identity=75%"; Hit description =Transcription factor MYB31
  Pfam annotation: Domain name=Myb_DNA-binding; Domain location=14-61; Score=49.2; E_value=1.6e-11; Accession=PF00249.23; Description=Myb -like DNA-binding domain
  Pfam annotation: Domain name=Myb_DNA-binding; Domain location=67-112; Score=54.9; E_value=3.1e-13; Accession=PF00249.23; Description=Myb -like DNA-binding domain
  Pfam module annotation: Pfam domain module=Myb_DNA-binding::Myb_DNA -binding; Domain location=14-61::67-112
MGRSPCCEKAHTNKGAWTKEEDERLVAYIKAHGEGCWRSLPKAAGLLRCGKSCRLRWINYLRPDLKRGNFTDEEDELIIKLHSLLGNKWSLIAGRLPGRTDNEIKNYWNTHIRRKLLSRGIDPVTHRPINEHASNITISFEAAAAAATAREEKGAVFRLEEPKAAAIGRDQNAADWGQGKPLKCPDLNLDLCISPPCQEPMMKPVKREAGLCFSCSLGLPKSADCKCSNFLGLRTAMLDFRSLEMK

SEQ ID NO: 66191 - protein, 125 aa, Setaria italica
  misc_feature (94)..(94): Xaa can be any naturally occurring amino acid
  Transcript Sequence Number=SeqID_217
  Gene Ontology: Mol. function=oxidoreductase activity, acting on the CH-OH group of donors, NAD or NADP as acceptor; Biological process =oxidation reduction
  Homolog annotation: Hit_ID=Q2R114; Match level="QueryCoverage=82%, HitCoverage=32%, E-value=6e-29, Identity=60%"; Hit description =Mannitol dehydrogenase, putative
FGRKKLRPAPNDATGHRRSLHFSIDTMSGTYPIDHYLSLLKVGGMMVLSFPSEIKVQAANLNLSSVTGGTKGIEEMINFWAATKIYPEVDMIKXNYIDVALQRLIDQDDRYPFVVDRESFQVLKL

SEQ ID NO: 66192 - protein, 76 aa, Setaria italica
  Transcript Sequence Number=SeqID_218
LIFSLKMLSKFLPYKMIALLPDLNGVFFPVKLGIQEQDHRAVRNASSSNHSDYASIQGSCIWNMKVLYKFKMILRC

SEQ ID NO: 66193 - protein, 195 aa, Setaria italica
  Transcript Sequence Number=SeqID_219
  Gene Ontology: Mol. function=receptor activity
  Homolog annotation: Hit_ID=Q7XIS2; Match level="QueryCoverage=89%, HitCoverage=29%, E-value=4e-21, Identity=37%"; Hit description =Receptor-like kinase-like
GRAVAPIQPGTGAAVANGMLHLVVDTDGTTGPNNLVAVDEEGNTRRTIPLPRREVAEKDWHSVFVARSQGRLHYVMCVRPPHGRLSEEHPLKLLVWVLEDHDAGEWVLKHTVSFPELFGRIACQFRVEYSVVAVHPDGNWVFFVRHWDRKLVAYDMDRREVIVVPDLGAGGEVGDELPTPYVPLYSKCSALTNIQ

SEQ ID NO: 66194 - protein, 50 aa, Setaria italica
  misc_feature (32)..(32): Xaa can be any naturally occurring amino acid
  Transcript Sequence Number=SeqID_220
KDTSTPPTLSRGMRRSSEPCFRNTLPALCWGXMPTPSAKRIQQDKVKYCV

SEQ ID NO: 66195 - protein, 97 aa, Setaria italica
  Transcript Sequence Number=SeqID_221
  Gene Ontology: Mol. function=protein binding; Cellular component =cytoplasm; Biological process=ubiquitin-dependent protein catabolic process
  Homolog annotation: Hit_ID=Q94DM8; Match level="QueryCoverage=68%, HitCoverage=64%, E-value=9e-30, Identity=100%"; Hit description =Probable ubiquitin-fold modifier 1
  Pfam annotation: Domain name=Ufm1; Domain location=12-87; Score =167.9; E_value=2.9e-47; Accession=PF03671.6; Description=Ubiquitin fold modifier 1 protein
  Subcellular localization annotation: CTP_CleavageSite=35; ConfidenceScore=5.17e-01
MAAVAAGGGGGGKVSFKIILTSDPKLPFKVFSVPEAAPFTAVLKFAAEEFKVPPQTSAIITNDGVGINPQQSAGNVFLGVDANSQKHVACTLLGVGI

SEQ ID NO: 66196 - protein, 106 aa, Setaria italica
  Transcript Sequence Number=SeqID_222
  Subcellular localization annotation: CTP_CleavageSite=96; ConfidenceScore=5.27e-01
KDTSTPPTLSRGMRRSSEPCFRNTLPALCWGLMPTPSLVMMALVWGGTLNSSAANLSTAVKGAASGTLNTLKGSLGSEVRMILKDTFPPPPPPAATAAMGSPGRKD

SEQ ID NO: 66197 - protein, 223 aa, Setaria italica
  Transcript Sequence Number=SeqID_223
  Gene Ontology: Mol. function=oxidoreductase activity, acting on NADH or NADPH; Cellular component=mitochondrial respiratory chain; Biological process=electron transport chain
  Homolog annotation: Hit_ID=Q42599; Match level="QueryCoverage=89%, HitCoverage=90%, E-value=4e-88, Identity=80%"; Hit description=NADH dehydrogenase [ubiquinone] iron-sulfur protein 8, mitochondrial
  Pfam annotation: Domain name=Fer4; Domain location=117-140; Score =28.5; E_value=1.4e-05; Accession=PF00037.19; Description=4Fe-4S binding domain
  Pfam annotation: Domain name=Fer4; Domain location=156-179; Score =38.5; E_value=2.7e-08; Accession=PF00037.19; Description=4Fe-4S binding domain
  Pfam module annotation: Pfam domain module=Fer4::Fer4; Domain location=117-140::156-179
MATLLARQAAQALRARQTAQLGPFASAMQGHLRTYFNAGTPKRFKEDEEKEQLAKEIAKDWNAVFERGINTLFLTEMVRGLSLTLKYFFDRNVTINYPFEKGPLSPRFRGEHALRRYESGEERCIACKLCEAICPAQAITIEAEEREDGSRRTTRYDIDMTKCIYCGFCQEACPVDAIVEGPNFEFATETHEELLYDKEKLLENGDRWETEIAENLRSESLYR

SEQ ID NO: 66198 - protein, 75 aa, Setaria italica
  Transcript Sequence Number=SeqID_224
RGHFTFVHSKSSSKSCLSKLNDHALMIEIRAVCLNSLPLSYKNAARQEHQFVCEQEDQFPSFQLASKLPHQNTVI

SEQ ID NO: 66199 - protein, 158 aa, Setaria italica
  Transcript Sequence Number=SeqID_225
  Gene Ontology: Mol. function=zinc ion binding; Cellular component =intracellular
  Homolog annotation: Hit_ID=B6SNS1; Match level="QueryCoverage=100%, HitCoverage=100%, E-value=7e-86, Identity=94%"; Hit description=NudC domain-containing protein 2
  Pfam annotation: Domain name=CS; Domain location=19-93; Score=82.4; E_ value=1.6e-21; Accession=PF04969.8; Description=CS domain
MAEKLAPEKRHAFVHNGQKVFEWDQTLEEVNMYIELPKGVPTKLFRCTIQAGHVEVGIRGNPPYLNHDLTYPVKTDTSFWTIVDGEMHITLQKREKGKTWSSPIQGQGILDPYVADQEQKRLMLQRFQEENPGFDFSQAQFSGTCPDPRTFMGGIRSE

SEQ ID NO: 66200 - protein, 103 aa, Setaria italica
  Transcript Sequence Number=SeqID_226
  Subcellular localization annotation: CTP_CleavageSite=36; ConfidenceScore=5.25e-01
LGSGGMDNIFSPRRLSRQNSFGSIGTPRTPTMQAIADVMGSKNTLEATISSLQVEISESKAKCAALISQASSTEDQNRSEDIRQLNEKLESMQSLVTRLRTLI

SEQ ID NO: 66201 - protein, 49 aa, Setaria italica
  Transcript Sequence Number=SeqID_227
  Gene Ontology: Mol. function=nucleic acid binding; Cellular component= intracellular
SIGSQRTPKCDKALNGLVSGLGDCPEKLHQECLIHTLLQVCSFVSTCLF

SEQ ID NO: 66202 - protein, 119 aa, Setaria italica
  Transcript Sequence Number=SeqID_228
  Gene Ontology: Mol. function=nucleic acid binding; Cellular component= intracellular
  Homolog annotation: Hit_ID=B5LXD8; Match level="QueryCoverage=95%, HitCoverage=30%, E-value=2e-55, Identity=89%"; Hit description =Transcription factor IIIA
  Pfam annotation: Domain name=zf-C2H2; Domain location=11-35; Score =30.7; E_value=6.1e-06; Accession=PF00096.18; Description=Zinc finger, C2H2 type
  Pfam annotation: Domain name=zf-C2H2; Domain location=43-68; Score =6.2; E_value=2.5; Accession=PF00096.18; Description=Zinc finger, C2H2 type
  Pfam annotation: Domain name=zf-C2H2; Domain location=71-92; Score =7.0; E_value=2.1; Accession=PF00096.18; Description=Zinc finger, C2H2 type
  Pfam module annotation: Pfam domain module=zf-C2H2::zf-C2H2::zf-C2H2; Domain location=11-35::43-68::71-92
DGSPCESKKEFICPEVNCGKTFKYASKLKKHEESHVELDYTEVICCEPGCMKTFTNVECLKAHNQSCHQHVQCDVCGTKQLKRNFKRHRQMHEGSCVTERVKCHFEDCKCSFSKVGFVI

SEQ ID NO: 66203 - protein, 290 aa, Setaria italica
  Transcript Sequence Number=SeqID_229
  Gene Ontology: Mol. function=nucleic acid binding; Cellular component= intracellular; Biological process=regulation of transcription, DNA -dependent
  Homolog annotation: Hit_ID=B5LXD8; Match level="QueryCoverage=81%, HitCoverage=62%, E-value=1e-117, Identity=86%"; Hit description =Transcription factor IIIA
  Pfam annotation: Domain name=zf-C2H2; Domain location=108-132; Score =31.3; E_value=4e-06; Accession=PF00096.18; Description=Zinc finger, C2H2 type
  Pfam annotation: Domain name=zf-C2H2; Domain location=140-165; Score =6.2; E_value=2.5; Accession=PF00096.18; Description=Zinc finger, C2H2 type
  Pfam annotation: Domain name=zf-C2H2; Domain location=168-189; Score =7.0; E_value=2.1; Accession=PF00096.18; Description=Zinc finger, C2H2 type
  Pfam annotation: Domain name=zf-C2H2; Domain location=198-223; Score =22.1; E_value=0.0023; Accession=PF00096.18; Description=Zinc finger, C2H2 type
  Pfam annotation: Domain name=zf-C2H2; Domain location=229-255; Score =19.5; E_value=0.014; Accession=PF00096.18; Description=Zinc finger, C2H2 type
  Pfam annotation: Domain name=zf-C2H2; Domain location=42-66; Score =29.7; E_value=1.1e-05; Accession=PF00096.18; Description=Zinc finger, C2H2 type
  Pfam annotation: Domain name=zf-C2H2; Domain location=71-96; Score =24.2; E_value=0.00055; Accession=PF00096.18; Description=Zinc finger, C2H2 type
  Pfam module annotation: Pfam domain module=zf-C2H2::zf-C2H2::zf -C2H2::zf-C2H2::zf-C2H2::zf-C2H2::zf-C2H2; Domain location=108 -132::140-165::168-189::198-223::229-255::42-66::71-96
SIGSQRTPKCDKALNGLVSGLGDCPEKLHQECLIHTLLQRPFACHIDGCPLSYSRKDHLNRHLLTHQGKLFVCPIEGCDRKFNIKGNMQRHVQEMHKDGSPCESKKEFICPEVNCGKTFKYASKLKRHEESHVELDYTEVICCEPGCMKTFTNVECLKAHNQSCHQHVQCDVCGTKQLKRNFKRHRQMHEGSCVTERVKCHFEDCKCSFSKKSNLDKHVKAVHEQRRPFVCQFSGCGKKFSYKHVRDNHEKSSAHVHTEFAHLFQLAYSKIFPFVPAVVIYMCLYNCTFY

SEQ ID NO: 66204 - protein, 223 aa, Setaria italica
  misc_feature (92)..(92): Xaa can be any naturally occurring amino acid
  Transcript Sequence Number=SeqID_230
  Gene Ontology: Mol. function=zinc ion binding; Cellular component =intracellular
  Homolog annotation: Hit_ID=B5LXD8; Match level="QueryCoverage=96%, HitCoverage=48%, E-value=8e-83, Identity=72%"; Hit description =Transcription factor IIIA
  Pfam annotation: Domain name=zf-C2H2; Domain location=139-165; Score =19.5; E_value=0.014; Accession=PF00096.18; Description=Zinc finger, C2H2 type
  Pfam annotation: Domain name=zf-C2H2; Domain location=15-40; Score =6.2; E_value=2.5; Accession=PF00096.18; Description=Zinc finger, C2H2 type
  Pfam annotation: Domain name=zf-C2H2; Domain location=43-64; Score =7.0; E_value=2.1; Accession=PF00096.18; Description=Zinc finger, C2H2 type
  Pfam module annotation: Pfam domain module=zf-C2H2::zf-C2H2::zf-C2H2; Domain location=139-165::15-40::43-64
TFGTCGAVELDYTEVICCEPGCMKTFTNVECLKAHNQSCHQHVQCDVCGTKQLKRNFKRHRQMHEGSCVTERVKCHFEDCKCSFSKVGFVIXHCLILLWFVLSILLAKVLCYPFLVNLELQKSNLDKHVKAVHEQRRPFVCQFSGCGKKFSYKHVRDNHEKSSAHVHTEGDFVEADEQRPRSAGGRKRKPVSVETLMRKRVAAPDDAPAHVDGTEHLRWLLSG

SEQ ID NO: 66205 - protein, 93 aa, Setaria italica
  misc_feature (63)..(63): Xaa can be any naturally occurring amino acid
  misc_feature (77)..(77): Xaa can be any naturally occurring amino acid
  Transcript Sequence Number=SeqID_231
SSRGHDIGPSADIRMEEKWERRVQGPEKPSFLRSKSPDDHWCKEMLDGRGSSSEPQSKKERKXKSGKKEKRDKKKEXDAKKSKHRHHKSRRRE

SEQ ID NO: 66206 - protein, 108 aa, Setaria italica
  Transcript Sequence Number=SeqID_232
  Gene Ontology: Cellular component=chloroplast
MDLETENRLASLLLEEARRLQLEADREGVHAYLRKPNVRHRPNSRFLTATVRGVQQANRVVEVNEMWRAREKELELESKMRSGSSKSKDLYDSRGEKRKSDSRNHSSS

SEQ ID NO: 66207 - protein, 237 aa, Setaria italica
  Transcript Sequence Number=SeqID_233
  Gene Ontology: Cellular component=chloroplast
  Subcellular localization annotation: CTP_CleavageSite=37; ConfidenceScore=5.10e-01
RLQLEAYNVGVHAYLRKPNVRHRPNSRFLTATVRGVQQANRVVEVNEMWRAREKELELESKMRSGSSKSKDLYDSRGEKRKSDSRNHSSSSRVQQEGTTYSYSDQEDGLGDDEIERFLHSRVKRGRGAIGSRMDEPGPYLDSSSRGHDNEPSPDIRVEEKWERRVQGPEKPSFLKSKSPDDWHKESLDGKSSSSEPRSKKEKKRKSEKKDKRDKNKEKYKKKSKHRHHHHQKSRRRE

SEQ ID NO: 66208 - protein, 51 aa, Setaria italica
  misc_feature (8)..(8): Xaa can be any naturally occurring amino acid
  Transcript Sequence Number=SeqID_234
  Homolog annotation: Hit_ID=Q5W794; Match level="QueryCoverage=100%, HitCoverage=21%, E-value=8e-17, Identity=84%"; Hit description =Protein DEHYDRATION-INDUCED 19 homolog 2
DNNFLLNXFPNEKNEEEAEPSLSEKDQKERAQRSKFVRGLVLSTIFDDDDL

SEQ ID NO: 66209 - protein, 109 aa, Setaria italica
  Transcript Sequence Number=SeqID_235
  Subcellular localization annotation: CTP_CleavageSite=35; ConfidenceScore=5.13e-01
NLAPLSPLLLILLRQGWFSSVDSPPHQFNQRLDTEVNMVTTSFCNVQDFVQHTSFRWPFTTSIEKLRNTCKQTNKIKVCSFHRPTSRCKRRAFWDAIMHACHVDIHSIG

SEQ ID NO: 66210 - protein, 174 aa, Setaria italica
  misc_feature (140)..(140): Xaa can be any naturally occurring amino acid
  Transcript Sequence Number=SeqID_236
  Gene Ontology: Mol. function=protein binding; Cellular component =nucleus
  Homolog annotation: Hit_ID=Q5W794; Match level="QueryCoverage=100%, HitCoverage=64%, E-value=2e-66, Identity=75%"; Hit description =Protein DEHYDRATION-INDUCED 19 homolog 2
  Pfam annotation: Domain name=Di19; Domain location=1-168; Score=49.4; E_value=1.3e-11; Accession=PF05605.4; Description=Drought induced 19 protein (Di19)
VCPICATRVGMDLIGHLTMQHGSYFKMQRRRRVRKISSGSHSLLSLLRKDWRDGSLQSFLGGSSYVSNPPAAAPDPFLSSLICSLPVAEPSKDLHSNSSDNNFLLNKFPDEKTVERYVTSSLFFLPPHSAPSLPRYHCIXAEPSLSEKDQKERAQRSKFVRGLVLSTIFDDDDL

SEQ ID NO: 66211 - protein, 220 aa, Setaria italica
  misc_feature (171)..(171): Xaa can be any naturally occurring amino acid
  Transcript Sequence Number=SeqID_237
  Gene Ontology: Mol. function=protein binding; Cellular component =nucleus
  Homolog annotation: Hit_ID=Q5W794; Match level="QueryCoverage=93%, HitCoverage=87%, E-value=4e-99, Identity=85%"; Hit description =Protein DEHYDRATION-INDUCED 19 homolog 2
  Pfam annotation: Domain name=Di19; Domain location=1-211; Score =225.3; E_value=1.5e-64; Accession=PF05605.4; Description=Drought induced 19 protein (Di19)
MDAAVRRLQARYDLYMGLNDADAGGDEAVDPRGGAELYNCPFCGEDFDFVSLCCHIDDEHAVEAKSGVCPICATRVGMDLIGHLTMQHGSYFKMQRRRRVRKISSGSHSLLSLLRKDWRDGSLQSFLGGSSYVSNPPAAAPDPFLSSLICSLPVAEPSKDLHSNSSDNNFXLNKFPDEKTVERAEPSLSEKDQKERAQRSKFVRGLVLSTRCVAFYSILS

SEQ ID NO: 66212 - protein, 168 aa, Setaria italica
  Transcript Sequence Number=SeqID_238
  Gene Ontology: Mol. function=ubiquitin-protein ligase activity; Cellular component=ubiquitin ligase complex; Biological process =ubiquitin-dependent protein catabolic process
  Homolog annotation: Hit_ID=O48700; Match level="QueryCoverage=57%, HitCoverage=12%, E-value=4e-41, Identity=73%"; Hit description=U-box domain-containing protein 6
  Pfam annotation: Domain name=U-box; Domain location=22-94; Score =79.2; E_value=1.5e-20; Accession=PF04564.7; Description=U-box domain
NFQGLPSIEQIKGLSGSMPLPPEELRCPISLQLMYEPVVIASGQTYERACIEKWFNSGNTTCPKTRKQLPQLSVTPNYCIKGLIASWCEQNGVLVPSAAPESPKLKYLRISSLRSSTCLVTNGVNTVLFEDTSAKDDAKSDSAVIVEKFSRQNSTEATSKIRVDEVTP

SEQ ID NO: 66213 - protein, 88 aa, Setaria italica
  Transcript Sequence Number=SeqID_239
MNKQAMANPQVLQNYYPQMYGLTSPTASPYHQYVGYMAPPAPTPRPLLPPPPPAQQVAVQPLAQHPPAAQQVAMQPLLQHPTPQIQSS

SEQ ID NO: 66214 - protein, 169 aa, Setaria italica
  Transcript Sequence Number=SeqID_240
  Gene Ontology: Mol. function=catalytic activity; Cellular component =integral to membrane; Biological process=metabolic process
  Homolog annotation: Hit_ID=B6U172; Match level="QueryCoverage=78%, HitCoverage=21%, E-value=2e-62, Identity=86%"; Hit description=Gl1 protein
YVRTNVPSFFDYLRCMGYSNVEVISHRAFAAVPALRYLIYTPTYLSLHHREKDCNFCLFMPLFDALGGTINSRSWELQKEVDQGMNDRVPDFVFLAHVVDVVSSMHVPFGFRSCSSLPFSTHLVLLPLWPLAFAFMVLQWLMPFFADGMKYWKPYLGTLQVWWSRPWRK

SEQ ID NO: 66215 - protein, 100 aa, Setaria italica
  Transcript Sequence Number=SeqID_241
CNVFHIFLPYPSGYIDQCVFADASSVIAATNQTPLSVLSQGVELDDAGGDWLRRNDTYAATARSKLKSVTDHMLFGETVLSATNIIIRNPCMLSFVLLSL

SEQ ID NO: 66216 - protein, 276 aa, Setaria italica
  misc_feature (8)..(8): Xaa can be any naturally occurring amino acid
  misc_feature (26)..(26): Xaa can be any naturally occurring amino acid
  Transcript Sequence Number=SeqID_242
  Gene Ontology: Mol. function=aminoacyl-tRNA ligase activity; Cellular component=cytoplasm; Biological process=tRNA aminoacylation for protein translation
  Homolog annotation: Hit_ID=B9RXG5; Match level="QueryCoverage=97%, HitCoverage=27%, E-value=1e-113, Identity=70%"; Hit description =Leucyl-tRNA synthetase, putative
  Pfam annotation: Domain name=Anticodon_1; Domain location=118-238; Score=29.3; E_value=6.4e-07; Accession=PF08264.5; Description =Anticodon-binding domain
IDCYQKKXPADKVTKVGDHYVLKDDXNIRLNARAYKMSKSRGNVINPDDVVLEYGADSLRLYEMFMGPLRDSKTWSTGGIEGVHRFLGRTWRLVVGPPLPDGSYKDGTVTYENEPTLDQLRVLHKCIARVTEEIHETRFNTAISAMMEFVNAAYKWETQPKSVIESFVLLLSPFAPHLAEELWFRLGHPQSLAYEQFPEAKSEYLEESKLVLPVQINGKTRGTILIDKSCSEDDAFQIAASDEKLSKYLAGKGIRKRIYVPGRILNVILDQQKAKA

SEQ ID NO: 66217 - protein, 64 aa, Setaria italica
  Transcript Sequence Number=SeqID_243
LYFAELLLISFSPSWQSKVVILAMSVLNANGLKAILSIGSALHSNGVVDQWRCNINTFMFHVGC

SEQ ID NO: 66218 - protein, 535 aa, Setaria italica
  Transcript Sequence Number=SeqID_244
  Gene Ontology: Mol. function=aldehyde dehydrogenase (NAD) activity; Cellular component=mitochondrial matrix; Biological process =oxidation reduction
  Homolog annotation: Hit_ID=Q3S832; Match level="QueryCoverage=98%, HitCoverage=95%, E-value=0.0, Identity=91%"; Hit description=Delta-1- pyrroline-5-carboxylate dehydrogenase
  Pfam annotation: Domain name=Aldedh; Domain location=41-502; Score= -130.8; E_value=5.7e-12; Accession=PF00171.14; Description=Aldehyde dehydrogenase family
RSAPLACVSRWLHTPSFATVSPQEISGSNPAEVHNFVQGSWTASANWNWIVDPLNGEKFIKIAEVNGTEIKPFVESLSKCPKHGLHNPLKAPERYLMYGDISAKAAHMLGQPAVSDFFAKLIQRVSPKSYQQALAEVQVSQKFLENFCGDQVRFLARSFAVPGNHLGQRSNGYRWPYGPVAIITPFNFPLEIPLLQVMGALYMGNKPLLKVDSKVSVVMEQMLRLLHDCGLPAEDMDFINSDGVTMNKLLLEANPKMTLFTGSSRVAEKLAADLKGRVKLEDAGFDWKILGPDVQEVDYIAWVCDQDAYACSGQKCSAQSVLFMHKNWSSSGLLEKMKKLSERRKLEDLTIGPVLTVTTEAMTEHMNNLLKIPGSKVLFGGEPLENHSIPKIYGALKPTAVFVPLEEILKSGNFELVTKEIFGPFQVVTEYSEDQLDLVLEACERMNAHLTAAVVSNDPLFLQDVLGRSVNGTTYAGIRARTTGAPQNHWFGPAGDPRGAGIGTPEAIKLVWSCHREIIYDIGPVPKNWSLPSAT

SEQ ID NO: 66219 - protein, 69 aa, Setaria italica
  Transcript Sequence Number=SeqID_245
  Gene Ontology: Mol. function=nucleic acid binding; Cellular component= nucleus; Biological process=nuclear mRNA splicing, via spliceosome
  Homolog annotation: Hit_ID=Q6YXY3; Match level="QueryCoverage=82%, HitCoverage=4%, E-value=9e-27, Identity=96%"; Hit description =Putative splicing factor 3b, subunit 3, 130kDa
SIPTYLLLVSSIHMAYRSAYFPVKDVIDGDLCEQYPTLPADMQRKIADELDRTPGEILKKLEDIRNKII

SEQ ID NO: 66220 - protein, 565 aa, Setaria italica
  misc_feature (138)..(138): Xaa can be any naturally occurring amino acid
  Transcript Sequence Number=SeqID_246
  Gene Ontology: Mol. function=nucleic acid binding; Cellular component= nucleus; Biological process=nuclear mRNA splicing, via spliceosome
  Homolog annotation: Hit_ID=Q6YXY3; Match level="QueryCoverage=99%, HitCoverage=45%, E-value=0.0, Identity=93%"; Hit description =Putative splicing factor 3b, subunit 3, 130kDa
  Pfam annotation: Domain name=CPSF_A; Domain location=208-508; Score =296.4; E_value=6.3e-86; Accession=PF03178.7; Description=CPSF A subunit region
  Subcellular localization annotation: CTP_CleavageSite=47; ConfidenceScore=5.35e-01
FQANLFLNAGLQNGVLFRTNVDMVTGQLSDTRSRFLGLRPPKLFPCMVSHRQAMLCLSSRPWLGYIHQGHFLLTPLSCDTLESAASFSSDQCSEGVVAVAGDALRIFTIERLGETFNETAIPLRYTPRKFVILPKKKXIAVIESDKGAFSAEEREAAKKECLEASGAAENGNANNGDPMENGDGQEDGAEEGNTFPDEQYGYPKAESERWVSCIRILDPRSRDTTCLLELQDNEAAVSICTVNFHDKEHGTLLAVGTAKGLQFWPKRTLAAGFIHIYKFVSDGRSLELLHKTQVEEVPLALCQFQGRLLAGVGSVLRLYDLGKRKLLRKCENKLFPKTIVSIHTYRDRIYVGDMQESFHYCKYRRDENQLYIFADDSVPRWVTAAQHIDFDTMAGADKFGNIYFARLPQDISDEIEEDPTGGKIKWEQGKLNGAPNKVEEIVQFHVGDVVTSLQKASLIPGGGECLIYGTVMGSVGALLAFTSREDVDFFSHLEMHLRQEHPPLCGRDHMAYRSAYFPVKDVIDGDLCEQYPSLPADMQRKIADELDRTPGEILKKLEDIRNKII

SEQ ID NO: 66221 - protein, 269 aa, Setaria italica
  misc_feature (225)..(225): Xaa can be any naturally occurring amino acid
  Transcript Sequence Number=SeqID_247
  Pfam annotation: Domain name=DUF1618; Domain location=122-243; Score =26.4; E_value=1.5e-07; Accession=PF07762.6; Description=Protein of unknown function (DUF1618)
ILVAPLTRVDIDRPGHQSFHWRDSKPRYFVLDAATGSAFRLPDPRPQETIEHQALVGLVACPGGGGRYMVAELVPMFGRDKASLRCYFSDFGEWVIKSVHYPLPPRPLAPICTLAHHGRLWWVDYSWGIITADPFADDPVLRFLPLPRSCLLGYREAGGVLDKFRYVGVSAGKLRFVNTYRRGGAPNKVTVWTLPDADATEWALEHEATFADIWADDTYKATGLXQQPPVLALIHPHNPAVVYFLLKDHLFGVDVRARKVVECDCYHLV

SEQ ID NO: 66222 - protein, 44 aa, Setaria italica
  Transcript Sequence Number=SeqID_248
  Gene Ontology: Mol. function=transition metal ion binding
MPPEDFPLAAPPQALGYFTKGAGVLERLASLWPFHKGAGATNGK

SEQ ID NO: 66223 - protein, 943 aa, Setaria italica
  Transcript Sequence Number=SeqID_249
  Gene Ontology: Mol. function=transition metal ion binding; Cellular component=cytoplasm; Biological process=inositol metabolic process
  Homolog annotation: Hit_ID=A2Q2R2; Match level="QueryCoverage=100%, HitCoverage=89%, E-value=0.0, Identity=78%"; Hit description =Histidine acid phosphatase
  Pfam annotation: Domain name=Acid_phosphat_A; Domain location=258 -847; Score=329.5; E_value=6.8e-96; Accession=PF00328.14; Description= Histidine acid phosphatase
  Pfam annotation: Domain name=PGAM; Domain location=262-504; Score= -7.1; E_value=0.0099; Accession=PF00300.14; Description =Phosphoglycerate mutase family
  Pfam annotation: Domain name=RimK; Domain location=2-212; Score= -64.8; E_value=0.025; Accession=PF08443.3; Description=RimK-like ATP -grasp domain
  Pfam module annotation: Pfam domain module=Acid_phosphat _A::PGAM::RimK; Domain location=258-847::262-504::2-212
RKVYEHLEKYGIPVPNYALVNREYPYQELDYFIEQEDFVEVHGKRFLKPFVEKPVNGDDHRIMIYYPSSAGGGMKELFRKVGNRSSEFHPDVRRVRREGSYIYEEFMPTGGTDVKVYTVGPGYAHAEARKSPVVDGVVMRNPDGKEVRYPVLLTPMEKQMARDVCSAFKQMVCGFDLLRSDGRSYVCDVNGWSFVKNSYKYYDDAACILRKIFLDAKAPHLSSTIPPTLPWKSEPVQPTEGLTRQGSGIIGTFGQSEELRCVIVVIRHGDRTPKQKVKLKVTEEKLLNLMLKYNGGKPRAETKLKSAIQLQDLLDATRQLVPPTRSGRESDSDAEDIEHVEKLRQVKAVLEEGGHFSGIYRKVQLKPLKWIKVPKRNGDGQEERPIEALMILKYGGVLTHAGRKQAEELGRFFRNNIYPGEGTGLLRLHSTYRHDLKIYSSDEGRVQMSAAAFAKGLLDLEGQLTPILVSLVSKDSSMLDGLEDASTEMNEAKARLHEIIISNTKEKDTEGSAEFPWMVDGAGLPVNASQLLPKMAKLTKEVTAQVKLLAEGEDEKLALTSSFSKYDQAKALGKTTIDVARIAAGLPCGSESFLLMFARWRKLERDLYNERKDRFDITQIPDVYDSCKYDLLHNAHLDLEGLKELFKVAQTLADGVIPNEYGINPKQKLKIGSKIARRLLGKILIDLRNTREEAISVAEPKFIEDEAIFLPTKEAEHQQKIHVRNEDGRRSSSTSEKSLDQEDEDDRETKYRLDPKYANVRTPERHVRTRLYFTSESHIHSLMNVLRYCNLDECLQGEDSLVCQSALDRLHRTKELDYMSNIVLRMFENIEVPLEDEKRFRIEMTFSRGADLSPLEDKASESSSLLQEHTLPIMGPERLQEVGSCLTMDKFEKMVRPFAMPPEDFPPAAPPQALGYFTKGAGVLERLASLWPFHKGAGATNGK

SEQ ID NO: 66224 - protein, 172 aa, Setaria italica
  Transcript Sequence Number=SeqID_250
  Gene Ontology: Mol. function=protein binding; Biological process =protein amino acid phosphorylation
  Homolog annotation: Hit_ID=Q2LGG6; Match level="QueryCoverage=93%, HitCoverage=98%, E-value=3e-63, Identity=81%"; Hit description =Fasciated Ear2 protein (Fragment)
  Pfam annotation: Domain name=LRR_1; Domain location=107-129; Score =11.7; E_value=1.7; Accession=PF00560.25; Description=Leucine Rich Repeat
  Pfam annotation: Domain name=LRR_1; Domain location=131-153; Score =18.0; E_value=0.041; Accession=PF00560.25; Description=Leucine Rich Repeat
  Pfam annotation: Domain name=LRR_1; Domain location=155-171; Score =2.6; E_value=97; Accession=PF00560.25; Description=Leucine Rich Repeat
  Pfam annotation: Domain name=LRR_1; Domain location=35-57; Score =11.4; E_value=2; Accession=PF00560.25; Description=Leucine Rich Repeat
  Pfam annotation: Domain name=LRR_1; Domain location=59-81; Score =15.1; E_value=0.3; Accession=PF00560.25; Description=Leucine Rich Repeat
  Pfam annotation: Domain name=LRR_1; Domain location=8-31; Score=6.7; E_value=16; Accession=PF00560.25; Description=Leucine Rich Repeat
  Pfam annotation: Domain name=LRR_1; Domain location=83-105; Score =17.3; E_value=0.065; Accession=PF00560.25; Description=Leucine Rich Repeat
  Pfam module annotation: Pfam domain module=LRR_1::LRR_1::LRR_1::LRR _1::LRR_1::LRR_1::LRR_1; Domain location=107-129::131-153::155 -171::35-57::59-81::8-31::83-105
TRLSFSARLAALDLSRNAISGAVPPRIVADPDASALLLLDLSHNRFSGEIPAGITAIRSLQGLFLAGNQLSGEIPPGIGNLTYLQVLDLSNNRLSGAVPAGLAGCFQLLYLRLGGNRLSGLLRPELDALDSLKVLDLSNNKISGEIPLPLAGCRSLEVVDLSGNDISGDLSS

SEQ ID NO: 66225 - protein, 62 aa, Setaria italica
  Transcript Sequence Number=SeqID_251
RQGSRMPHGNFSTDPLEAPIPEIHLPNETGATGKASCRLQHNPALGMPWLQPYKRELQIMGF

SEQ ID NO: 66226 - protein, 177 aa, Setaria italica
  misc_feature (175)..(175): Xaa can be any naturally occurring amino acid
  Transcript Sequence Number=SeqID_252
MACHLRSASVPSSPCSSGTNVKEQIQILTATVSTPSATIETMIDGLSKLGSIYSCIDELICFPSSQRQQRKAVEEELECSLVLLDLCDAMQESFAEFRTSIQEMQLGLKRGDDVAVQAKAQSYARSVKKAQKQFKKINSKVALDTDNCRVIKLLSEARELALSMLESTLYLLYKXIL

SEQ ID NO: 66227 - protein, 140 aa, Setaria italica
  Transcript Sequence Number=SeqID_253
GFVLSFVTTCINLSRVVFKLLSEARELALSMLESTLYLLSKEILMPSASKWSLVSKAFQKKRVLCKEEQLQVLELEIVDLESELQIVFRRLIQSRVSLLNTLSLALSLQHRHLTIDEILAVYMVTDATSSACSVIYRGKP

SEQ ID NO: 66228 - protein, 177 aa, Setaria italica
  misc_feature (152)..(152): Xaa can be any naturally occurring amino acid
  Transcript Sequence Number=SeqID_254
  Gene Ontology: Mol. function=aminoacyl-tRNA ligase activity; Cellular component=cytoplasm; Biological process=tRNA aminoacylation for protein translation
  Homolog annotation: Hit_ID=Q7G2B1; Match level="QueryCoverage=100%, HitCoverage=16%, E-value=3e-83, Identity=82%"; Hit description=Valyl- tRNA synthetase
  Pfam annotation: Domain name=tRNA-synt_1; Domain location=8-177; Score=-389.7; E_value=0.0024; Accession=PF00133.14; Description=tRNA synthetases class I (I, L, M and V)
DPAAVEKSWYAWWESSQYFEADAASSKPPFVIVQPPPNVTGVLHIDEYNKQAIEDAIIRWRRMSGYNALWVPGMDHAGIATQVVVEKKLMREKNLSRHDVGREKFLGEVLKWKEQHGGAILKQLRILGASLDWSRECFTMDEQRSKAVTEAXRLYKDGLIYRAHRLVNWDCTLRTAI

SEQ ID NO: 66229 - protein, 53 aa, Setaria italica
  Transcript Sequence Number=SeqID_255
SISWFSLPPKVFLGSVYPKVFLGSVYSRNYANWFNLDINTILLFFFFHAQVEF

SEQ ID NO: 66230 - protein, 148 aa, Setaria italica
  Transcript Sequence Number=SeqID_256
  Homolog annotation: Hit_ID=B9RT72; Match level="QueryCoverage=63%, HitCoverage=63%, E-value=1e-09, Identity=39%"; Hit description =Phylloplanin, putative
  Pfam annotation: Domain name=Pollen_Ole_e_I; Domain location=35-148; Score=-38.6; E_value=0.077; Accession=PF01190.9; Description=Pollen proteins Ole e I family
MASKAVLLLAAAAVAAACVLGTSEARLGKLGRLVITGVVPCNTGSLIDIATSPVFPNADVELRCAGRMVAGATTNTNGTFSMELDMTSALAAFIGGCTLVVDTPLIKCNADLTDVGTLVSYLQGPLTRLLGGIFHLFPAGFSFHARRE

SEQ ID NO: 66231 - protein, 63 aa, Setaria italica
  Transcript Sequence Number=SeqID_257
  Gene Ontology: Mol. function=phosphoenolpyruvate carboxylase activity; Cellular component=cytoplasm; Biological process=carbon utilization by fixation of carbon dioxide
  Homolog annotation: Hit_ID=A7DX17; Match level="QueryCoverage=88%, HitCoverage=9%, E-value=8e-21, Identity=91%"; Hit description =Phosphoenolpyruvate carboxylase (Fragment)
TLKRIRDGGFKPAARGAPLSKELLGSTAEELVKLNPSSEYDPGLEDTLILTMKGIAAGMQNTG

SEQ ID NO: 66232 - protein, 424 aa, Setaria italica
  Transcript Sequence Number=SeqID_258
  Gene Ontology: Mol. function=protein binding; Cellular component =nucleus
  Homolog annotation: Hit_ID=B6U5T1; Match level="QueryCoverage=86%, HitCoverage=98%, E-value=6e-94, Identity=58%"; Hit description=ZIM motif family protein
  Pfam annotation: Domain name=CCT_2; Domain location=340-366; Score =55.7; E_value=1.8e-13; Accession=PF09425.2; Description=Divergent CCT motif
  Pfam annotation: Domain name=tify; Domain location=192-227; Score =71.7; E_value=2.7e-18; Accession=PF06200.6; Description=tify domain
  Pfam module annotation: Pfam domain module=CCT_2::tify; Domain location=340-366::192-227
MERDFLGAIGRAGKAGVSVKNESRTEPDNPPATQWQFPAKSGAAPAFMSFRTAAREEGSKEFSISGFRPAAATGDAFDGIKKQASLPVTPQQRQFGLNSHVTAQQYPAAAHGQRVQGMDYSAAAHHPLPGRSRMVQPLSVRHPAPFSQANPMMLRSQSFHSGAGMPFKNQPFTMSNGFGGSTVGVYGSRNPRSQTSTQLTIFYNGSVNVFDNVPVEKAKEIMMLASRASIPSPPSASHKPGSPISAPAKVNVPELLPARQIVVQKSEPSVPHLSSTSSPIPIVPQVVSLSRSTSNCTTESTGPRPSVQMPMTAPTSQASTSQQMPLATTSAAAVVPRAVPQARKASLARFLEKRKERVTSVEPYPTSKSPLQSSDTIGSPSAPTKSSSTDFAPASSNGKEPLHFGQPRNISFSSEACPSTKLHI

SEQ ID NO: 66233 - protein, 142 aa, Setaria italica
  misc_feature (63)..(63): Xaa can be any naturally occurring amino acid
  Transcript Sequence Number=SeqID_259
  Gene Ontology: Mol. function=hydrolase activity, acting on carbon -nitrogen (but not peptide) bonds; Biological process=nitrogen compound metabolic process
  Homolog annotation: Hit_ID=C3SA37; Match level="QueryCoverage=87%, HitCoverage=52%, E-value=1e-59, Identity=85%"; Hit description =Nitrilase (Fragment)
MDCSLFLICDFHDVLSLLSGDTIVAVDSPFGRFGPTVCYDLRFPELYQILRFKHEAQVLLVPXAFTKVTGEAHWEILLRARAIETQCYVIAAAQAGKHNEKRESYGDSIIIDPWGTVIARLPVADLDLSKVEAVRTRMPIAE

SEQ ID NO: 66234 - protein, 292 aa, Setaria italica
  misc_feature (262)..(262): Xaa can be any naturally occurring amino acid
  Transcript Sequence Number=SeqID_260
  Gene Ontology: Mol. function=hydrolase activity, acting on carbon -nitrogen (but not peptide) bonds; Cellular component=intracellular membrane-bounded organelle; Biological process=nucleobase, nucleoside, nucleotide and ...
  Gene Ontology: Biological process=nucleic acid metabolic process
  Homolog annotation: Hit_ID=C3SA37; Match level="QueryCoverage=77%, HitCoverage=88%, E-value=1e-122, Identity=93%"; Hit description =Nitrilase (Fragment)
  Pfam annotation: Domain name=CN_hydrolase; Domain location=43-220; Score=182.5; E_value=1.2e-51; Accession=PF00795.14; Description =Carbon-nitrogen hydrolase
  Subcellular localization annotation: CTP_CleavageSite=30; ConfidenceScore=5.61e-01
MALASLAASLPIAAAAARFRFGVRFRGMASASAAGAAMGAPARVGVVQMTSVGDVDANYATCSRLTKEAAASGVKFLCFPEVFSFIGSKDGESVKLAEPLDGPIMQRYCSLAKESGMWLSLGGFQEKGPDDSHQYNTHVLIDDSGKVRSSYRKIHLFDVDVPGNMVYKESRFTTAGDTIVAVDSPFGRLGLTVCYDLRFPELYQILRFKHEAQVLLVPSAFTKVTGEAHWEILLRARAIETQCYVIAAAQAGKHNEKRESYXGDSIIIDPWGTVIARLPDRLSTGFAVADLD

SEQ ID NO: 66235 - protein, 183 aa, Setaria italica
  Transcript Sequence Number=SeqID_261
  Gene Ontology: Mol. function=hydrolase activity, acting on carbon -nitrogen (but not peptide) bonds; Cellular component=cellular _component; Biological process=nitrogen compound metabolic process
  Homolog annotation: Hit_ID=C3SA37; Match level="QueryCoverage=88%, HitCoverage=64%, E-value=1e-86, Identity=93%"; Hit description =Nitrilase (Fragment)
IFGIKVTVHSFPFLCGKHLFDVDVPGNMVYKESRFTTAGDTIVAVDSPFGRLGLTVCYDLRFPELYQILRFKHEAQVLLVPSAFTKVTGEAHWEILLRARAIETQCYVIAAAQAGKHNEKRESYGDSIIIDPWGTVIARLPDRLSTGFAVADLDLSKVEAVRTRMPIAEHRKFDSDWKSLTHQ

SEQ ID NO: 66236 - protein, 75 aa, Setaria italica
  Transcript Sequence Number=SeqID_262
  Subcellular localization annotation: CTP_CleavageSite=17; ConfidenceScore=5.44e-01
QARPRSRGRIPATTMSPAASVQGGATTPAPMSDTATVRGGTTPTPTVHRIPTLASSADGGIDDHGADRLNNLGTY

SEQ ID NO: 66237 - protein, 57 aa, Setaria italica
  Transcript Sequence Number=SeqID_263
LIYQTFKDMHLVFTCVMCTNVLFSVVHLCCVSCITYASLVLLQTLTYNKVVEFHSCS

SEQ ID NO: 66238 - protein, 333 aa, Setaria italica
  Transcript Sequence Number=SeqID_264
  Gene Ontology: Mol. function=protein binding; Cellular component =clathrin adaptor complex; Biological process=intracellular protein transport
  Homolog annotation: Hit_ID=P49661; Match level="QueryCoverage=99%, HitCoverage=65%, E-value=1e-145, Identity=81%"; Hit description =Coatomer subunit delta-3
MVVLAASIISKSGKALVSRQFVDMSRSRIEGLLAAFPKLVGTGKQHTYVETENVRYVYQPIEALYLLVITNKQSNILEDLETLRLLSKLVPEYSPSLDEEGVCRAAFDLASAFDEAISLGNKENVTVAQVKQYCEMESHEEKLYKLVMQSKINETKDHMRRRVTEIEKSKIDRGKTEKAFGPLRPPNGFSDMNTRGTGLGGDPIFADSFAQKPKGLPSASTPATSKVAGGMKLGKARKTNQFLESLKAEGELISEDTRPSGIQSRLSSVPPSDPIAVAIEEKINVTVKRDGGIHNFDVQGTLALQVLNDTNGFIQLQIENQDLPGLSFKTHPY

SEQ ID NO: 66239 - protein, 282 aa, Setaria italica
  Transcript Sequence Number=SeqID_265
  Gene Ontology: Mol. function=protein binding; Cellular component =clathrin adaptor complex; Biological process=intracellular protein transport
  Homolog annotation: Hit_ID=P49661; Match level="QueryCoverage=100%, HitCoverage=54%, E-value=1e-142, Identity=85%"; Hit description =Coatomer subunit delta-3
  Pfam annotation: Domain name=Adap_comp_sub; Domain location=35-272; Score=166.1; E_value=1.1e-46; Accession=PF00928.13; Description =Adaptor complexes medium subunit family
KLGKARKTNQFLESLKAEGELISEDTRPSGIQSRLSSVPPSDPIAVAIEEKINVTVKRDGGIHNFDVQGTLALQVLNDTNGFIQLQIENQDLPGLSFKTHPYINKELFNSQQIVGAKDPNRPFPSGHNETPFVKWRIQELDESSLPLSVNCWPSVSGNETYVNIEYEASEMFDLHNVVISIPLPALREAPSVRQIDGEWKYDSRNSVMEWSITLIDQSNRSGSMEFAVPAADPSTFFPISVVFSASSTFSDLKVTAILPLREGSPPKFSERIQLVTDNYLVI

SEQ ID NO: 66240 - protein, 45 aa, Setaria italica
  Transcript Sequence Number=SeqID_266
FVVVCFFFVKELVAGKLRLYFPVLVLIGDFSCRYRSHVMHVTLLM

SEQ ID NO: 66241 - protein, 169 aa, Setaria italica
  misc_feature (135)..(135): Xaa can be any naturally occurring amino acid
  Transcript Sequence Number=SeqID_267
  Gene Ontology: Mol. function=phosphotransferase activity, alcohol group as acceptor; Biological process=nucleobase, nucleoside, nucleotide and nucleic acid metabolic process
  Homolog annotation: Hit_ID=B6U6Y9; Match level="QueryCoverage=27%, HitCoverage=9%, E-value=1e-09, Identity=72%"; Hit description=ATP binding protein
  Subcellular localization annotation: CTP_CleavageSite=40; ConfidenceScore=5.38e-01
LEAAPPHPRGSAALIAAEPPLLRPFPCRHRSQRCTSSLPRAASVLYAAAAAPLLLSSPRMPALCLAGSPFATSRPVANPSRIRSPPWLRCGGGRRGLCSAEAARRGGDAEEEKEKGGGGRAVPERRQRGRSDALXESGELLAIPGVGPRNLRKLVDKGFDGVAQLKQLY

SEQ ID NO: 66242 - protein, 326 aa, Setaria italica
  Transcript Sequence Number=SeqID_268
  Gene Ontology: Mol. function=catalytic activity; Cellular component =plasma membrane
  Homolog annotation: Hit_ID=Q2RBJ6; Match level="QueryCoverage=92%, HitCoverage=70%, E-value=1e-118, Identity=73%"; Hit description =Probable protein phosphatase 2C 73
  Pfam annotation: Domain name=PP2C; Domain location=1-220; Score=92.1; E_value=1.9e-24; Accession=PF00481.13; Description=Protein phosphatase 2C
SNTDLDSSDKSDSTTSSDDTSDEKHLLSTWKNIFVKTFEQVDEELRQHSEIDCICSGTTAVAVVRQGDHLFIANLGDSRAVLCTRDSKDRLIPVQLTTDLKPDLPSELARILNCKGRVFAMDDEPDVPRMWLPDQDAPGLAMARAFGDFCLKSHGLICTPEVYCRKLSEKDEFLVLATDGIWDVLSNKEVVKIVSSVTDPSKAARQLIDRAVRAWRCKYPTSMVDDCAAVCLFLNRPASPDEESLTGTGDVKPPREQAGMSFTGSFRRVVSSRGGGEASEEGTTVWRALEGVTRANSVMRLPRIGRVLSWRRRSTNSLDEDEDDRD

SEQ ID NO: 66243 - protein, 78 aa, Setaria italica
  Transcript Sequence Number=SeqID_269
LSTVFCMLTQVPPFNILLCWRKQIYHRKGTKNYPIPLILVSCGLYLPQFPPCDFTRLSQTWYSTGSFCLPLRKPIFKC

SEQ ID NO: 66244 - protein, 83 aa, Setaria italica
  Transcript Sequence Number=SeqID_270
  Gene Ontology: Mol. function=diacylglycerol kinase activity; Cellular component=integral to membrane; Biological process=activation of protein kinase C activity
  Homolog annotation: Hit_ID=B7E3Y0; Match level="QueryCoverage=100%, HitCoverage=36%, E-value=8e-36, Identity=85%"; Hit description =Similar to Diacylglycerol kinase 1
QSIKMQMFAPFPVQVDGEPWVQQPCTLKISHHGQAFMLRAAIEEPLGHAAAIITDVLEHAESSHVINASQKRALLQEMALRLA

SEQ ID NO: 66245 - protein, 111 aa, Setaria italica
  Transcript Sequence Number=SeqID_271
PFPLLTSPPTSDAAEEDDNDEEAAAALLPPDPITHQPAAPPHRTLQIHGSARSARHCPASTPHSPEAAPGCGWPRARRLGGRERGPRPMQLLPPTASDASVAWLHARPLGR

SEQ ID NO: 66246 - protein, 78 aa, Setaria italica
  Transcript Sequence Number=SeqID_272
SSLKLDKPLKECCSPPSEVEPIFFYPHASASARHHPSIGGGWSWQISKEWPIDLNSEQKICLSFLVQFLLSVHSKSTA

SEQ ID NO: 66247 - protein, 75 aa, Setaria italica
  misc_feature (7)..(7): Xaa can be any naturally occurring amino acid
  Transcript Sequence Number=SeqID_273
  Gene Ontology: Mol. function=transferase activity, transferring glycosyl groups; Cellular component=cell wall
  Homolog annotation: Hit_ID=O64492; Match level="QueryCoverage=100%, HitCoverage=7%, E-value=7e-24, Identity=66%"; Hit description =F20D22.8 protein
YPLLMLXPSGIKKMGELHLAVRFCCGNVGNMFHAYVRPLLPKMHYAEPLLVRQVETLRFQATNVVAARLGRAEPP

SEQ ID NO: 66248 - protein, 126 aa, Setaria italica
  Transcript Sequence Number=SeqID_274
  Gene Ontology: Mol. function=transferase activity, transferring nitrogenous groups; Biological process=biosynthetic process
  Homolog annotation: Hit_ID=B6TMW7; Match level="QueryCoverage=100%, HitCoverage=31%, E-value=2e-50, Identity=80%"; Hit description =Transaminase/ transferase, transferring nitrogenous groups
MGSLAKLARRAVETDAPVMVKIQELLRGATNVMSLAQGVVYWQPPESAMNKIEKIIREPAVSKYGSDDGLPELREALLEKLRKENKLTKSSVMVTAGANQAFVNLVLTLCDAGDSVVMFAPYYFNA

SEQ ID NO: 66249 - protein, 84 aa, Setaria italica
  Transcript Sequence Number=SeqID_275
  Homolog annotation: Hit_ID=B6TMW7; Match level="QueryCoverage=72%, HitCoverage=15%, E-value=1e-11, Identity=60%"; Hit description =Transaminase/ transferase, transferring nitrogenous groups
MQVQPPESAMNKIEKIIREPAVSKYGSDDGLPELREALLEKLRKENKLTKSSVMVTAGANQVIVMFHLDRPGISFYFSCCLFSL

SEQ ID NO: 66250 - protein, 107 aa, Setaria italica
  misc_feature (93)..(93): Xaa can be any naturally occurring amino acid
  misc_feature (100)..(100): Xaa can be any naturally occurring amino acid
  Transcript Sequence Number=SeqID_276
  Gene Ontology: Mol. function=transferase activity, transferring nitrogenous groups; Biological process=biosynthetic process
  Homolog annotation: Hit_ID=B6TMW7; Match level="QueryCoverage=95%, HitCoverage=25%, E-value=8e-52, Identity=94%"; Hit description =Transaminase/ transferase, transferring nitrogenous groups
MSKTADWLEKVLKENDPVPKLVTVVNPGNPSGAFIPRPMLERISDICKNAGAWLVVDNTYEYFMYDGMEHYCLEDNHIVNLFSFSKAYGMMGXRVGYIAXFPNEADG

SEQ ID NO: 66251 - protein, 99 aa, Setaria italica
  Transcript Sequence Number=SeqID_277
  Gene Ontology: Mol. function=transferase activity, transferring nitrogenous groups; Biological process=biosynthetic process
  Homolog annotation: Hit_ID=B6TMW7; Match level="QueryCoverage=96%, HitCoverage=24%, E-value=4e-31, Identity=73%"; Hit description =Transaminase/ transferase, transferring nitrogenous groups
MGSLAKLARRAVETDAPVMVKIQELLRGATNVMSLAQGVVYWQPPESAMNKIEKIIREPAVSKYGSDDGLPELREALLEKLRKENKLTKSSVMVTATCL

SEQ ID NO: 66252 - protein, 166 aa, Setaria italica
  misc_feature (9)..(9): Xaa can be any naturally occurring amino acid
  Transcript Sequence Number=SeqID_278
  Gene Ontology: Mol. function=aspartic-type endopeptidase activity; Biological process=DNA integration
  Homolog annotation: Hit_ID=Q7XN66; Match level="QueryCoverage=100%, HitCoverage=13%, E-value=1e-45, Identity=57%"; Hit description =OSJNBa0089N06.16 protein
NGFILHLSXMFFCTSLCRNLISVSRLDDVWFSCHFGDGQCKIKFNNEIVGLAFRQDELYLLSLCENVNAGSTKNVNASSSMNVKNKWKRIDDVSSKLWHCRLGHILRERIERLVKESILPPLEFSNLEQCIDCIKGKFIKKIKKDAKRSIGVLEIIHTDICCPFPV

SEQ ID NO: 66253 - protein, 57 aa, Setaria italica
  Transcript Sequence Number=SeqID_279
  Subcellular localization annotation: CTP_CleavageSite=36; ConfidenceScore=5.28e-01
MRGGAAPAAGAGHHHQRWSGSAGTTPRSLSTGSSPRGSDRSSDDGEELVEVTLDLQE

SEQ ID NO: 66254 - protein, 395 aa, Setaria italica
  Transcript Sequence Number=SeqID_280
  Gene Ontology: Mol. function=receptor activity; Cellular component =photosystem II; Biological process=photosynthesis
  Homolog annotation: Hit_ID=A5JVZ6; Match level="QueryCoverage=92%, HitCoverage=93%, E-value=0.0, Identity=88%"; Hit description=Plastid high chlorophyll fluorescence 136
  Pfam annotation: Domain name=BNR; Domain location=113-124; Score=8.6; E_value=11; Accession=PF02012.12; Description=BNRAsp-box repeat
  Pfam annotation: Domain name=BNR; Domain location=159-170; Score=5.9; E_value=24; Accession=PF02012.12; Description=BNRAsp-box repeat
  Pfam annotation: Domain name=BNR; Domain location=202-213; Score=8.2; E_value=12; Accession=PF02012.12; Description=BNRAsp-box repeat
  Pfam annotation: Domain name=BNR; Domain location=348-359; Score=9.8; E_value=7.4; Accession=PF02012.12; Description=BNRAsp-box repeat
  Pfam module annotation: Pfam domain module=BNR::BNR::BNR::BNR; Domain location=113-124::159-170::202-213::348-359
  Subcellular localization annotation: CTP_CleavageSite=50; ConfidenceScore=5.44e-01
MATSSAATASLHLLLPASRRRRLLVPRATTHSNSDPTAVDRRRFIAHTAAAAAVAPLVLPRWTPTARADEAPALSEWERVFLPIDPGVVLLDIAFVPDDPSHGFLLGTRQTILETKDGGNTWFPRSIPSAEDEDFNYRFNSVSFKGKEGWIIGKPAILLHTSNAGESWERIPLSAQLPGNMVYIKATGEQSAEMVTDEGAIYVTSNRGYNWKAAVQETVSATLNRTVSSGISGASYYTGTFNTVNRSPDGRYVAVSSRGNFYLTWEPGQPFWQPHNRAVARRIQNMGWRADGGLWLLVRGGGLFLSKGTGITEDFEEVQVQSRGFGILDVGYRSQDEAWAAGGSGVLLKTTNGGKNWVRDKAADNIAANLYSVKFLDDRKGFVLGNDGVLLRYLG

SEQ ID NO: 66255 - protein, 85 aa, Setaria italica
  Transcript Sequence Number=SeqID_281
TYTARSPVPRTRALIHPSPSHGSSAWHPIPVLHSSPHAPRLHLSPATTPVSLNDGRYMSRSLELTLDNIESSIDIKDFYKATGMY

SEQ ID NO: 66256 - protein, 92 aa, Setaria italica
  Transcript Sequence Number=SeqID_282
SPVLSCILDCLIICSGNMKLLCFIHVIMKRILGGPLIDIHVEFLLCFCPMVHMFHALVSFSISFRICAIAIPTLRKRFSYFHAFSLLITISF

SEQ ID NO: 66257 - protein, 174 aa, Setaria italica
  Transcript Sequence Number=SeqID_283
  Gene Ontology: Cellular component=plasma membrane
  Pfam annotation: Domain name=DUF599; Domain location=1-155; Score =97.8; E_value=3.7e-26; Accession=PF04654.4; Description=Protein of unknown function, DUF599
  Subcellular localization annotation: CTP_CleavageSite=12; ConfidenceScore=5.35e-01
SLALSVISSSISASANLASLSIALGSLIGAWISSTTKVFMTGLVYGDRSQGTAAVKYISLLVCFLASFTCFIHSARYYVQASFLITTLDSDVPAAYVQHAVIRGGNFWSMGLRALYFATTLLMWIFGPIPMFTCSLLMVVILHMLDTNSLPLHQHQFTVRKRHEQQRGLSLTSA

SEQ ID NO: 66258 - protein, 143 aa, Setaria italica
  Transcript Sequence Number=SeqID_284
MGVLALEEAEGLLQSVPEDLKARALGGLLGLCCFRGGWGMGERIALRLIELEPNNNAHYALLCSVYAAAGRWEEAHRVKATMKERHGSFSPGYRLVNLNEIIHDFRAREKQPENQEIYAILDDLVTRLKLGCKENEQSDFGTL

SEQ ID NO: 66259 - protein, 85 aa, Setaria italica
  misc_feature (75)..(75): Xaa can be any naturally occurring amino acid
  Transcript Sequence Number=SeqID_285
  Pfam annotation: Domain name=DUF295; Domain location=3-57; Score=9.2; E_value=0.083; Accession=PF03478.10; Description=Protein of unknown function (DUF295)
WANDQMLFLGRPCSRVMSASQYGVPGDQIFFLDDVLENYCKEYSFDEETTSVSVYNMKSGKVSSPLPMVWKHEMXILATWLFPWD

SEQ ID NO: 66260 - protein, 238 aa, Setaria italica
  Transcript Sequence Number=SeqID_286
  Gene Ontology: Mol. function=protein serine/threonine kinase activity; Biological process=protein amino acid phosphorylation
  Homolog annotation: Hit_ID=Q2QM26; Match level="QueryCoverage=93%, HitCoverage=20%, E-value=3e-80, Identity=61%"; Hit description =Leucine Rich Repeat family protein
  Pfam annotation: Domain name=Pkinase; Domain location=32-237; Score =46.0; E_value=3.1e-11; Accession=PF00069.17; Description=Protein kinase domain
  Pfam annotation: Domain name=Pkinase_Tyr; Domain location=32-236; Score=0.4; E_value=9.4e-14; Accession=PF07714.9; Description=Protein tyrosine kinase
  Pfam module annotation: Pfam domain module=Pkinase::Pkinase_Tyr; Domain location=32-237::32-236
MRRRQRVPNVPFMEDQHWQVSFEEIQKATDQFSPSNLIGTGSFGSVYRGILSPGAQQVAIKVIDLQQHGAENSFLAECRVLRSIRHRNLVKVITACSSINHQGNDFKALVYEFMPNGDLDKWLHQGLATQDNVPKTKRRLTMSQRVNIALEVAQALDYLHNHGQVPIVHCDLKPSNVLLDNEMVAHVADFGLARFIRKTASNSIEEISTSIGIKGTIGYIPPEYGMDGNVSIQRTIVN

SEQ ID NO: 66261 - protein, 103 aa, Setaria italica
  Transcript Sequence Number=SeqID_287
  Subcellular localization annotation: CTP_CleavageSite=79; ConfidenceScore=5.57e-01
PGPNGGPSSPPKRTNRRSRRPRHPRHGGAAPRPLRHPSLQPPPFPPRLPLSPEPSWSTTRASRKPRQGRAMRSRARGAAAMMEMGARRRAFASSPRLPPPPPP

SEQ ID NO: 66262 - protein, 137 aa, Setaria italica
  Transcript Sequence Number=SeqID_288
  Gene Ontology: Mol. function=electron carrier activity; Biological process=oxidation reduction
  Homolog annotation: Hit_ID=B6SSZ4; Match level="QueryCoverage=100%, HitCoverage=25%, E-value=9e-70, Identity=89%"; Hit description =Cytochrome P450 CYP709C14
VRGPAYRFFSGNLGDIKRLRAEGAGVTLDVGDHDFIPMVQPHFRKWISLYGRTFVYWTGARPNVCVADVNVVKQVLFDRTGLYPKNLMNPHISRLLGKGLVLTDGDDWKRHRKVVHPAFSMDKLKMMTATMSDCAQS

SEQ ID NO: 66263 - protein, 69 aa, Setaria italica
  Transcript Sequence Number=SeqID_289
  Gene Ontology: Mol. function=protein serine/threonine kinase activity; Biological process=protein amino acid phosphorylation
  Homolog annotation: Hit_ID=O48512; Match level="QueryCoverage=100%, HitCoverage=7%, E-value=1e-13, Identity=44%"; Hit description =Receptor kinase 1
  Pfam annotation: Domain name=PAN_2; Domain location=1-43; Score=30.0; E_value=1.2e-06; Accession=PF08276.3; Description=PAN-like domain
LGLDECRQACLGNCGCRAYASANVSSSGPGTGCFMWTGDLLDMRQFGNGGQNLFVRLAASDLREFRFSS

SEQ ID NO: 66264 - protein, 73 aa, Setaria italica
  misc_feature (39)..(39): Xaa can be any naturally occurring amino acid
  Transcript Sequence Number=SeqID_290
  Homolog annotation: Hit_ID=B6SV26; Match level="QueryCoverage=98%, HitCoverage=12%, E-value=3e-18, Identity=70%"; Hit description=Amino acid permease
LIPTYALTMTPLALSLEELLPPNQQTYPNIVMLRSALGXLSLIVALSVPFFGLVMSLVGSFLTMFVAYILPCA

SEQ ID NO: 66265 - protein, 105 aa, Setaria italica
  Transcript Sequence Number=SeqID_291
  Gene Ontology: Mol. function=transcription regulator activity; Cellular component=nucleus; Biological process=regulation of transcription
  Homolog annotation: Hit_ID=B6TY97; Match level="QueryCoverage=98%, HitCoverage=24%, E-value=1e-46, Identity=92%"; Hit description=Helix- loop-helix DNA-binding domain containing protein
  Pfam annotation: Domain name=HLH; Domain location=28-78; Score=50.4; E_value=7.2e-12; Accession=PF00010.18; Description=Helix-loop-helix DNA-binding domain
EMAAIEKFLQFQDAVPCKIRAKRGCATHPRSIAERVRRTKISERIRKLQELVPNMEKVTKTNTADMLDLAVDYIKGLQKQVKVLNDGRISCTCSAGKLLQNQFAS

SEQ ID NO: 66266 - protein, 116 aa, Setaria italica
  Transcript Sequence Number=SeqID_292
EKKNSCRCRCQVRRTKISERIRKLQELVPNMEKVTKPNPKSQTPRKIDGTVNVTFCLQTTVLDEFTTSYYAFGSLFMMNAANQHCRHVGSGRGLHQGSSEAGQGICQKPFLSNQDC

SEQ ID NO: 66267 - protein, 41 aa, Setaria italica
  Transcript Sequence Number=SeqID_293
VTEPTECHGDETPLASDENSPSSLIPMILPRQQNCLMWYRI

SEQ ID NO: 66268 - protein, 37 aa, Setaria italica
  Transcript Sequence Number=SeqID_294
LSPGPALAQADESAAPSARAGVAALVALAAAGLVVLF

SEQ ID NO: 66269 - protein, 78 aa, Setaria italica
  Transcript Sequence Number=SeqID_295
PASITPDADPCMGDYFYSIFVDESKDDERSDSEHRSPTKEIDQSTRNPVALPHSGWKCENGYPNYRTSISTKGPYPLK

SEQ ID NO: 66270 - protein, 115 aa, Setaria italica
  misc_feature (83)..(83): Xaa can be any naturally occurring amino acid
  misc_feature (104)..(104): Xaa can be any naturally occurring amino acid
  Transcript Sequence Number=SeqID_296
  Homolog annotation: Hit_ID=Q5N730; Match level="QueryCoverage=100%, HitCoverage=8%, E-value=6e-40, Identity=71%"; Hit description =Erythroid differentiation-related factor 1-like protein
DEGEKIFRRQNNQPKGSDPSIFLNFAMHSVRAEACDCPPSHQPSQEKQTASAVLRGPFDCREGSFDSPPSSSFSTSPYLDQNXIVKSRKAQQCTHESLYLGARXNKQKAKGSDPI

SEQ ID NO: 66271 - protein, 133 aa, Setaria italica
  Transcript Sequence Number=SeqID_297
  Gene Ontology: Mol. function=protein dimerization activity; Cellular component=nucleus; Biological process=regulation of transcription, DNA-dependent
  Homolog annotation: Hit_ID=B6TZX9; Match level="QueryCoverage=96%, HitCoverage=63%, E-value=3e-33, Identity=60%"; Hit description =Transcription factor RF2b
INWCLQIMLHEGWSESAQLTLLQRDTSGLTTENRELKLRLQAMEEQAKLRDALNDALREEVQRLKIAAGQVPNMNGNPFNGGLPQQQQQQQMASYFSQPQQMQYFGGHQGQHHHHRNSSNGGGQSLSDSMDFM

SEQ ID NO: 66272 - protein, 263 aa, Setaria italica
  Transcript Sequence Number=SeqID_298
  Gene Ontology: Mol. function=protein dimerization activity; Cellular component=nucleus; Biological process=regulation of transcription, DNA-dependent
  Homolog annotation: Hit_ID=B6SK78; Match level="QueryCoverage=71%, HitCoverage=58%, E-value=9e-72, Identity=75%"; Hit description =Transcription factor PosF21
  Pfam annotation: Domain name=ATG16; Domain location=21-173; Score= -45.1; E_value=0.061; Accession=PF08614.3; Description=Autophagy protein 16 (ATG16)
  Pfam annotation: Domain name=bZIP_1; Domain location=91-152; Score =29.5; E_value=1.4e-05; Accession=PF00170.13; Description=bZIP transcription factor
  Pfam annotation: Domain name=bZIP_2; Domain location=89-143; Score =30.4; E_value=7.3e-06; Accession=PF07716.7; Description=Basic region leucine zipper
  Pfam module annotation: Pfam domain module=ATG16::bZIP_1::bZIP_2; Domain location=21-173::91-152::89-143
  Subcellular localization annotation: CTP_CleavageSite=45; ConfidenceScore=5.10e-01
SLQQQAAQASSAQRPPSGAHMRSLSLDAAFFDGLSLQGGGGGGGVAGHKRSGSMDGATSPFEGESALSSVLPDYAKKAVPAEKLAELALIDPKRAKRILANRQSAARSKERKIKYTSELERKVQTLQTEATTLSAQLTLLQRDTTGLTAENRELKLRLQSMEEQAKLRDALNEALREEVQRLKISAGQAVNMNGNIFNGGVQQQMPSYFMQQQQQLQQQQQQQMSYFGGHQAQHHNQNHHHQSPSNGGQSLSGQSLNDSMDFI

SEQ ID NO: 66273 - protein, 552 aa, Setaria italica
  Transcript Sequence Number=SeqID_299
  Gene Ontology: Mol. function=cysteine-type peptidase activity; Cellular component=cytoplasm; Biological process=ubiquitin-dependent protein catabolic process
  Homolog annotation: Hit_ID=B9F1W9; Match level="QueryCoverage=98%, HitCoverage=80%, E-value=0.0, Identity=64%"; Hit description =Ubiquitin carboxyl-terminal hydrolase
  Pfam annotation: Domain name=UCH; Domain location=35-320; Score =189.9; E_value=7.2e-54; Accession=PF00443.21; Description=Ubiquitin carboxyl-terminal hydrolase
VALNTDQWNSNIGETCDAEDKQFPLSFSYRRQPQSVGAGLSNMGNTCFLNATLQCITHTVPLFLKLRSTDHSTPCSYDKDGFCSFCALKEHVDESIRRPGQQEDAHEFLRCLLDNLHKCTLDPMSKGKGSSFDEESIVKDIFGGQLKSQLSCCECGHSSETFEPFLDLSLEIDQVDHLVDAMESFTKVEQIGDSEDKLTCERCNAQVCKNKQLTLHRAPDVIAFHLKRFTTLDNSVEKIDKHVVYPSEVDLKPFHSNPDTVGELKYDLYGVVEHSGLPNYGHYVCSIRSSPSTWYLMNDSHVDSITDASALNKEAYILFYVRQGKFPWFSSLLEVKDALHAEDARGASPVSVLENIDANCSTSSGGGSSSNSARQLEELEKDETSQYKVSFCHEEPSKRSSLGASNINNTRDEISPPRASLQDDVVRCPRSVETTNLDRPSTPLPSKRSFSHNEFGVFEFEDFDDDEDTPLLPDLKFHPKAKKPKAASASKAVKGPSIDQNARRLMSGMPSSRRKGLLDCMVTQQNAHQESRSRRCPTSDPLDKKKRKLVQC

SEQ ID NO: 66274 - protein, 136 aa, Setaria italica
  misc_feature (79)..(79): Xaa can be any naturally occurring amino acid
  Transcript Sequence Number=SeqID_300
  Homolog annotation: Hit_ID=B6T2P7; Match level="QueryCoverage=86%, HitCoverage=46%, E-value=5e-49, Identity=80%"; Hit description =Phosphoglycerate mutase family protein
  Pfam annotation: Domain name=PGAM; Domain location=1-132; Score=16.3; E_value=4.9e-05; Accession=PF00300.14; Description=Phosphoglycerate mutase family
GFEQARAAGEQLRKELEEMGVPVDSVKIRYSPFSRTTETARAVAGVLCIPFEGPSCEAVMGLCERYFGPSYELLSHDKXVWAVDEAHPYMAPEGGESVADVANRLSAVLSSTESEFHRYISICTSCSTNSNFFYFT

SEQ ID NO: 66275 - protein, 119 aa, Setaria italica
  misc_feature (12)..(12): Xaa can be any naturally occurring amino acid
  Transcript Sequence Number=SeqID_301
  Homolog annotation: Hit_ID=B6T2P7; Match level="QueryCoverage=96%, HitCoverage=49%, E-value=3e-45, Identity=70%"; Hit description =Phosphoglycerate mutase family protein
ERYFGPSYELLXHDKYAEVWAVDEAHPYMAPEGGESVADVANRLSAVLSSTESEFHSSAILIVSHGDPLQIFQAVLSAAKENSSFLDVSDLKVKGTTLASVLSQHRKFALATGELRRVV

SEQ ID NO: 66276 - protein, 232 aa, Setaria italica
  Transcript Sequence Number=SeqID_302
  Homolog annotation: Hit_ID=B6T2P7; Match level="QueryCoverage=97%, HitCoverage=93%, E-value=1e-105, Identity=77%"; Hit description =Phosphoglycerate mutase family protein
  Pfam annotation: Domain name=PGAM; Domain location=16-185; Score =93.5; E_value=7.5e-25; Accession=PF00300.14; Description =Phosphoglycerate mutase family
KDSSGSSPSPAILRNRYWIVRHGRSVPNERGLIVSSLENGTKPEFGLAPQGFEQARAAGEQLRKELEEMGVPVDSVKIRYSPFSRTTETARAVAGVLGIPFEGPSCEAVMGLCERYFGPSYELLSHDKYAEVWAVDEAHPYMAPEGGESVADVANRLSAVLSSTESEFHSSAILIVSHGDPLQIFQAVLSAAKENSSFLDVSDLKVKGTTLASVLSQHRKFALATGELRRVV

SEQ ID NO: 66277 - protein, 52 aa, Setaria italica
  Transcript Sequence Number=SeqID_303
  Homolog annotation: Hit_ID=B6T2P7; Match level="QueryCoverage=78%, HitCoverage=16%, E-value=4e-11, Identity=75%"; Hit description =Phosphoglycerate mutase family protein
YAEVWAVDEAHPYMAPEGGESVADVANRLSAVLSSTESEFHRYISICTSLFY

SEQ ID NO: 66278 - protein, 80 aa, Setaria italica
  misc_feature (14)..(14): Xaa can be any naturally occurring amino acid
  Transcript Sequence Number=SeqID_304
  Homolog annotation: Hit_ID=B4F7X1; Match level="QueryCoverage=97%, HitCoverage=26%, E-value=1e-21, Identity=67%"; Hit description =Ankyrin repeat protein
FPSSSPFSRLEAAXQQEQELRREIELLLTPEEKAILDQHETPDVSKISSPKWHPLHSYALALQIPLMDKLLNSGVDINSL

SEQ ID NO: 66279 - protein, 81 aa, Setaria italica
  Transcript Sequence Number=SeqID_305
  Homolog annotation: Hit_ID=B4F7X1; Match level="QueryCoverage=55%, HitCoverage=15%, E-value=2e-18, Identity=93%"; Hit description =Ankyrin repeat protein
MLAISFSRGIALMLQNQFYNYYFVPLEIELLLTPEEKAILDQHETPDVSKISSPKWHPLHSYALALQIPLMDKLLNSGVDI

SEQ ID NO: 66280 - protein, 140 aa, Setaria italica
  misc_feature (97)..(97): Xaa can be any naturally occurring amino acid
  Transcript Sequence Number=SeqID_306
  Gene Ontology: Mol. function=protein serine/threonine kinase activity; Biological process=protein amino acid phosphorylation
  Homolog annotation: Hit_ID=B6U918; Match level="QueryCoverage=87%, HitCoverage=23%, E-value=7e-48, Identity=79%"; Hit description=Wee1 -like protein
NDRLTYKTDKPPAPLPQEASPMDADEPMEEKDCCILSQDFFCTPDYITPEMPQVANEFDDDKENIPCPKSPEKSANPRSKRYRTDCSSKGLESTEFXFDRQITPVHFDSLIQDDSEEEKLMQPALHKRVLSLQSAMALRW

SEQ ID NO: 66281 - protein, 124 aa, Setaria italica
  misc_feature (20)..(20): Xaa can be any naturally occurring amino acid
  Transcript Sequence Number=SeqID_307
  Gene Ontology: Mol. function=protein serine/threonine kinase activity; Cellular component=plasma membrane; Biological process =protein amino acid phosphorylation
  Homolog annotation: Hit_ID=B6SP14; Match level="QueryCoverage=100%, HitCoverage=13%, E-value=3e-64, Identity=95%"; Hit description =Receptor protein kinase-like
  Pfam annotation: Domain name=Pkinase_Tyr; Domain location=2-124; Score=-108.5; E_value=1.6e-06; Accession=PF07714.9; Description =Protein tyrosine kinase
PDGQLVAIKRSKEGSMQGGXLEFKTEIELLSRVHHKNLVGLVGFCFEKGEKMLVYEFIPNGTLSEALYGMKGIQLDWSRRLKIALDSARGLAYLHDHANPPIIHRDVKSTNILLDEKMTAKVAD

SEQ ID NO: 66282 - protein, 44 aa, Setaria italica
  Transcript Sequence Number=SeqID_308
STNYKAINQQSPMRRTVISAIAQIIVIPKESFVDNIDKSSRHDC

SEQ ID NO: 66283 - protein, 91 aa, Setaria italica
  Transcript Sequence Number=SeqID_309
  Gene Ontology: Mol. function=glycolipid transporter activity; Cellular component=cytoplasm; Biological process=glycolipid transport
GFRTQMPWSSSAQASAQEQLCEGTAAVVAARQGMETPLKEVAEAFEELARGMDADAGELRLAPFGDTCALVSVLFSSLGMAFRFAEIEYVT

SEQ ID NO: 66284 - protein, 45 aa, Setaria italica
  Transcript Sequence Number=SeqID_310
CRRHRWVGRSVALINEVLTDDELRTVLTRLGPEAERDAFGLVCRR

SEQ ID NO: 66285 - protein, 77 aa, Setaria italica
  Transcript Sequence Number=SeqID_311
  Gene Ontology: Mol. function=DNA binding; Cellular component=nucleus; Biological process=regulation of transcription
  Homolog annotation: Hit_ID=B6U7M0; Match level="QueryCoverage=88%, HitCoverage=23%, E-value=2e-22, Identity=76%"; Hit description=ZF-HD homeobox protein
  Pfam annotation: Domain name=ZF-HD_dimer; Domain location=18-73; Score=105.3; E_value=2e-28; Accession=PF04770.4; Description=ZF-HD protein dimerisation region
MMDQLSLVPYEGAGGGGDGGGKYKECMRNHAAAMGGQAFDGCGEYMPSSPDSLKCAACGCHRSFHRRAAGSSSSCGG

SEQ ID NO: 66286 - protein, 113 aa, Setaria italica
  Transcript Sequence Number=SeqID_312
  Subcellular localization annotation: CTP_CleavageSite=36; ConfidenceScore=5.12e-01
DDLRSRWSPVASLLIAAGTTYYSAAAASSAPGPSRRAAGGSGGSNRAPAGDDADLDGAREMGAGVGEGIGGGPRRGEANLSGRGGEGERAAAFRRTTLLSVVVGKLSRSNSRT

SEQ ID NO: 66287 - protein, 97 aa, Setaria italica
  Transcript Sequence Number=SeqID_313
  Gene Ontology: Mol. function=ubiquitin-protein ligase activity; Cellular component=ubiquitin ligase complex; Biological process =ubiquitin-dependent protein catabolic process
  Homolog annotation: Hit_ID=B6SVN8; Match level="QueryCoverage=84%, HitCoverage=18%, E-value=5e-23, Identity=60%"; Hit description =Immediate-early fungal elicitor protein CMPG1
  Pfam annotation: Domain name=U-box; Domain location=37-97; Score =36.1; E_value=7e-08; Accession=PF04564.7; Description=U-box domain
MVLPMSRATRAASRLVPEIPLLRRGSKQSAAAAEEVAVPAHFVCPISLDLMRDPVTAPTGITYDRESVEGWLARGNARCPVTGRPLRLADLVPNHAT

SEQ ID NO: 66288 - protein, 75 aa, Setaria italica
  Transcript Sequence Number=SeqID_314
SFQGSKAQSGGELPRRLRFDPRARSSVLAWGWRLPGSVPLRAPGLSSFHCHSRNHLSWEQNCVTGNQKALSVYPK

SEQ ID NO: 66289 - protein, 463 aa, Setaria italica
  misc_feature (8)..(8): Xaa can be any naturally occurring amino acid
  Transcript Sequence Number=SeqID_315
  Gene Ontology: Mol. function=protein serine/threonine kinase activity; Biological process=protein amino acid phosphorylation
  Homolog annotation: Hit_ID=C4P7T4; Match level="QueryCoverage=95%, HitCoverage=95%, E-value=0.0, Identity=86%"; Hit description=CBL -interacting protein kinase 31
  Pfam annotation: Domain name=NAF; Domain location=310-369; Score =110.4; E_value=5.8e-30; Accession=PF03822.6; Description=NAF domain
  Pfam annotation: Domain name=Pkinase; Domain location=12-266; Score =319.3; E_value=8.1e-93; Accession=PF00069.17; Description=Protein kinase domain
  Pfam annotation: Domain name=Pkinase_Tyr; Domain location=12-264; Score=35.0; E_value=4.7e-16; Accession=PF07714.9; Description =Protein tyrosine kinase
  Pfam module annotation: Pfam domain module=NAF::Pkinase::Pkinase_Tyr; Domain location=310-369::12-266::12-264
MDERRNIXMDRYEIGRQLGQGNFAKVYYARNLTSGQAVAIKIIDKDKVTRVGLIVQIKREISIMRLVRLTYVLQLFEVMASKSKIYFVLEYAKGGELFNKISKGKFSEDVARRYFHQLISAVEYCHSRGVYHRDLKPENLLLDDNDNLKVSDFGLSALAESKRQDGLLHTTCGTPAYVAPEVLSRRGYDGSKADIWSCGVILFVLVAGYLPFHDPNLIELYRKISKAEYRCPRSFSVELKDLLFRMLDPDPSTRIPISRIKRSTWYRKPFELNPPKVKHDTARDKVCNGEATTSNSRECSNSEENQVLQNLPNMNAFDIISLSTGFDLSNLFEEKYGRKEERFTTRQPAETVFAKLHELAERLKLKIKKKDNGVLKLAAPKEGIKGFLELDAEIFELAPSFLLVELKKTNGDTIEYKKLVKDEIRPALKDMVWAWQSDRHQQQEQIMQGEQQQSPLPPGPPQQ

SEQ ID NO: 66290 - protein, 243 aa, Setaria italica
  Transcript Sequence Number=SeqID_316
  Homolog annotation: Hit_ID=P73343; Match level="QueryCoverage=56%, HitCoverage=88%, E-value=2e-19, Identity=36%"; Hit description =Slr1195 protein
REDAAAASATTARERRLVKVREERRRREYDREHTYPGWARVLENACRDDEELRAILGDSIGNPELMKQRIQERVRKKGRAQFNKSKTGSIVSFKVSFRDFNPLNSFIWFELFGEPTDRDVDLLGGVIQAWYVMGRLGAYNSSNLQLSNSMLDYDPSYDSGEASSVLPSSFHDISDVEFQDNWGRVWVDLGTSDYLALDVLLNCLTQLSSEHVGIKQIVFGGKRMGDWEEGMTNSDYGYKHFKI

SEQ ID NO: 66291 - protein, 85 aa, Setaria italica
  Transcript Sequence Number=SeqID_317
  Subcellular localization annotation: CTP_CleavageSite=71; ConfidenceScore=5.68e-01
VCGLAVADRCSLGAPCYHVNFLAASPQARSPTTTTTTGTAGKRSSSRNSGASAHAWTTPYGTAAWTSRSRRSAAPWHSLLITLAV

SEQ ID NO: 66292 - protein, 329 aa, Setaria italica
  Transcript Sequence Number=SeqID_318
  Gene Ontology: Mol. function=hydrolase activity, hydrolyzing O -glycosyl compounds; Cellular component=vacuole; Biological process =carbohydrate metabolic process
  Homolog annotation: Hit_ID=P49175; Match level="QueryCoverage=92%, HitCoverage=45%, E-value=1e-142, Identity=84%"; Hit description=Beta- fructofuranosidase 1
  Pfam annotation: Domain name=Glyco_hydro_32N; Domain location=57-329; Score=448.6; E_value=9.3e-132; Accession=PF00251.12; Description =Glycosyl hydrolases family 32 N termi
GGDVAAAAGRVVEVAATRGVAEGVSEKSTAPLLGGAGALRDYSWTNAMLAWQRTAFHFQPPKNWMNDPNGPLYHKGWYHLFYQWNPHSAVWGNITWGHAVSRDLVHWLHLPLAMVPDHWYDANGVWSGSATRLPDGRIVMLYTGSTADSVQVQNLAEPADPSDPLLREWVKSDANPVLVPPPGIGLKDFRDPTTAWRVPNDTAWRVAIGSKDRSHAGLALVYRTEDFVRYDPDPALMHVVPGTGMWECVDFYPVATGSGGAGENSGLETSAPPGPGVKHVVKASLDDDKHDYYAIGTYDAAADTWTPDDTVNDVGIGLRYDYGKFYASK

SEQ ID NO: 66293 - protein, 64 aa, Setaria italica
  misc_feature (30)..(30): Xaa can be any naturally occurring amino acid
  Transcript Sequence Number=SeqID_319
  Gene Ontology: Mol. function=cyclin-dependent protein kinase activity; Cellular component=nucleus; Biological process=protein amino acid phosphorylation
  Homolog annotation: Hit_ID=P29620; Match level="QueryCoverage=73%, HitCoverage=11%, E-value=3e-17, Identity=80%"; Hit description =Cyclin-dependent kinase D-1
VFARWYRAPELLFGSKQYGSAVDIWAAGCXFAELLTRRPFAQVNNNLLILLMEYICCLFNSIQG

SEQ ID NO: 66294 - protein, 132 aa, Setaria italica
  misc_feature (103)..(103): Xaa can be any naturally occurring amino acid
  Transcript Sequence Number=SeqID_320
  Gene Ontology: Mol. function=hydrolase activity, hydrolyzing O -glycosyl compounds; Cellular component=cytoplasm; Biological process= carbohydrate metabolic process
  Homolog annotation: Hit_ID=B6SJQ8; Match level="QueryCoverage=95%, HitCoverage=96%, E-value=2e-41, Identity=72%"; Hit description =Glucan endo-1,3-beta-glucosidase
  Pfam annotation: Domain name=X8; Domain location=45-128; Score=118.5; E_value=2.2e-32; Accession=PF07983.5; Description=X8 domain
MASSNVTLLAFCVALTLSVLCNNASALAEAVAQPLRQSHREASKTWCVAKPSSEVAALQDNLDFACSESDCGAIQGTGGCTRPDSLLSRASVAMNAYYQARGXRNSWNCFFNGTGLITITDPSLGTLSKINV

SEQ ID NO: 66295 - protein, 64 aa, Setaria italica
  Transcript Sequence Number=SeqID_321
LDTQAGIDLASEVITVFTSLGLSTAALQLSRIRLVGSLKTYLGSSYLAPLASESEVSHAQAIMP

SEQ ID NO: 66296 - protein, 65 aa, Setaria italica
  Transcript Sequence Number=SeqID_322
  Gene Ontology: Cellular component=cytoplasm; Biological process =protein modification process
  Homolog annotation: Hit_ID=B6UG62; Match level="QueryCoverage=95%, HitCoverage=50%, E-value=4e-27, Identity=90%"; Hit description =Dendritic cell-derived ubiquitin-like protein
YADSTKKVRKPKPWKHPQPITVAQLRQMRDEFWDTAPHYGGQKEIWDALRVASESEVSHAQAIVE

SEQ ID NO: 66297 - protein, 119 aa, Setaria italica
  Transcript Sequence Number=SeqID_323
  Gene Ontology: Cellular component=cytoplasm; Biological process =protein modification process
  Homolog annotation: Hit_ID=B6UG62; Match level="QueryCoverage=100%, HitCoverage=100%, E-value=2e-59, Identity=90%"; Hit description =Dendritic cell-derived ubiquitin-like protein
MGCAGSTPATKETGGSSDSTKKVRKPKPWKHPQPITVAQLRQMRDEFWDTAPHYGGQKEIWDALRVASESEVSHAQAIVESAGIIVSNADLTLCYDERGAKYELPKYVLSEPTNLIRDS

SEQ ID NO: 66298 - protein, 137 aa, Setaria italica
  Transcript Sequence Number=SeqID_324
  Homolog annotation: Hit_ID=Q9ZVU9; Match level="QueryCoverage=59%, HitCoverage=44%, E-value=4e-14, Identity=49%"; Hit description =T5A14.6 protein
  Subcellular localization annotation: CTP_CleavageSite=54; ConfidenceScore=5.04e-01
LVLIYWYCLNSIGFSVRFLSSFIWIQMYRLGASSSTPTYFDANHEVRNSFLSPRSDSVRRSSMADDILGGSIYDPSYYSSLFEDGRNNACNHQGDKQSGSNDSGSTSAGQSPRLKSFSCRSLLTNDVESGLRRPLNP

SEQ ID NO: 66299 - protein, 49 aa, Setaria italica
  misc_feature (48)..(48): Xaa can be any naturally occurring amino acid
  Transcript Sequence Number=SeqID_325
AYCTAVFFFLSLLRPSPGRLIHRPLFSVLLPPLRPLIKTTCRLLSPAXR

SEQ ID NO: 66300 - protein, 63 aa, Setaria italica
  Transcript Sequence Number=SeqID_326
  Subcellular localization annotation: CTP_CleavageSite=24; ConfidenceScore=5.10e-01
LSVLYLSSRSPHQQKRFIRLTTFSASYDKNGDLTTVSSRRLRYCSVPEEVTEPMLEHPVAYWM

SEQ ID NO: 66301 - protein, 112 aa, Setaria italica
  Transcript Sequence Number=SeqID_327
  Gene Ontology: Mol. function=protein serine/threonine kinase activity; Biological process=protein amino acid phosphorylation
  Homolog annotation: Hit_ID=Q0Z988; Match level="QueryCoverage=43%, HitCoverage=5%, E-value=3e-10, Identity=63%"; Hit description =Nonfunctional Rpg1
EKKDYKDGEKKPEEQPKPKPKPEPPKPKPEPPEPCSYPGYYYGVPHPVESFTLEFLNHITNDFSEELIIDRGRYGAIYKGILVNGKCIAVRKLHLKPGIEEEEFNNEFNKLM

SEQ ID NO: 66302 - protein, 138 aa, Setaria italica
  Transcript Sequence Number=SeqID_328
  Gene Ontology: Mol. function=metal ion binding; Biological process =metal ion transport
  Homolog annotation: Hit_ID=Q9LMN0; Match level="QueryCoverage=47%, HitCoverage=32%, E-value=2e-12, Identity=56%"; Hit description =F22L4.5 protein
  Pfam annotation: Domain name=HMA; Domain location=9-69; Score=32.5; E_ value=1.7e-06; Accession=PF00403.18; Description=Heavy-metal -associated domain
MATTKMKIVLGVDLPDYKQKKKAFKALSNLSGIDSVTMDTRAQKMTVIGCVDPVDVVSKLRKLWFTVHVITVSLSEEKKDYKDGEKKPEEQPKPKPKPEPPKPKPEPPEPCSYPGYGAIYKGILVNGKCIAVRKLHLK

SEQ ID NO: 66303 - protein, 92 aa, Setaria italica
  Transcript Sequence Number=SeqID_329
  Gene Ontology: Mol. function=ATPase activity, coupled to transmembrane movement of substances; Cellular component=integral to membrane; Biological process=transport
  Homolog annotation: Hit_ID=Q8GU72; Match level="QueryCoverage=100%, HitCoverage=57%, E-value=6e-36, Identity=66%"; Hit description=MDR -like ABC transporter
TNTRQDNNRLFETIERKPEIDSGDTSGVVLEDMNGNVELKDVHFCYPSRPDQLILDGLSLQVASGTTMAIVGESGSGKSTVISLVERFYDPQ

SEQ ID NO: 66304 - protein, 192 aa, Setaria italica
  misc_feature (31)..(31): Xaa can be any naturally occurring amino acid
  misc_feature (90)..(90): Xaa can be any naturally occurring amino acid
  misc_feature (96)..(96): Xaa can be any naturally occurring amino acid
  misc_feature (114)..(114): Xaa can be any naturally occurring amino acid
  Transcript Sequence Number=SeqID_330
  Gene Ontology: Mol. function=transporter activity; Cellular component= integral to membrane; Biological process=transport
  Homolog annotation: Hit_ID=Q8H6D6; Match level="QueryCoverage=100%, HitCoverage=36%, E-value=2e-75, Identity=76%"; Hit description=Major facilitator superfamily antiporter
QLMSAVTLYCIFSLHDTAYLEIFSLWSVSSXKFRGLSLTSQDVGTVLAISGFGILVYQLAIYPFLAKYFGPIKPFRPAAVLSILLLAKNXITLNKXGTKPNKGTRKTTKNNLLXTIASLLKNMFAATITVACNILQNTAVTQEQRGVANGISVTLMSMFKAVAPAAAGILFSWAQKHLSGLFLPGDQILFLM

SEQ ID NO: 66305 - protein, 240 aa, Setaria italica
  misc_feature (86)..(86): Xaa can be any naturally occurring amino acid
  misc_feature (134)..(134): Xaa can be any naturally occurring amino acid
  Transcript Sequence Number=SeqID_331
  Gene Ontology: Mol. function=transporter activity; Cellular component= integral to membrane; Biological process=transport
  Homolog annotation: Hit_ID=Q8H6D6; Match level="QueryCoverage=86%, HitCoverage=31%, E-value=1e-55, Identity=56%"; Hit description=Major facilitator superfamily antiporter
FSVAFSLDKPSKFASIFRFPYFLPCFVISVLAAGSCIACIWLPETLHFHNDDKVEAIDELEAQAGDSKLEAGNAKESRGESTKSLXKNWQLMSAVTLYCIFSLHDTAYLEVIYILFSASAIKINRRRHFHPCPXITSKKLHVKFQKKKTARGDANMLCKNYLQIFSLWSVSSRKFRGLSLTSQDVGTVLAISGFGILVYQLAIYPFLAKYFGPIKPFRPAAVCNKCIIVGFASLHSCKRI

SEQ ID NO: 66306 - protein, 80 aa, Setaria italica
  Transcript Sequence Number=SeqID_332
  Gene Ontology: Mol. function=transporter activity; Cellular component= integral to membrane; Biological process=transport
  Homolog annotation: Hit_ID=Q8H6D6; Match level="QueryCoverage=56%, HitCoverage=9%, E-value=6e-14, Identity=77%"; Hit description=Major facilitator superfamily antiporter
  Subcellular localization annotation: CTP_CleavageSite=16; ConfidenceScore=5.06e-01
AGSAVRRALPAPKECAAQRFESPTSFPPRPRLFSWAQKHLSGLFLPGDQILFLMLNMVSVIGLVLTFKPFLSLSNVMRRS

SEQ ID NO: 66307 - protein, 99 aa, Setaria italica
  Transcript Sequence Number=SeqID_333
  Gene Ontology: Mol. function=transporter activity; Cellular component= integral to membrane; Biological process=transport
  Homolog annotation: Hit_ID=Q8H6D6; Match level="QueryCoverage=91%, HitCoverage=19%, E-value=2e-29, Identity=70%"; Hit description=Major facilitator superfamily antiporter
ISILSVVVFNTLFGLSTTYWMAIVTRGLLGLLCGILGPIKAYASEVCRKEHQALGISLVTSSRAIALVIGPAIGGFLAQVSIIAREVKFARAIIKRTLA

SEQ ID NO: 66308 - protein, 128 aa, Setaria italica
  Transcript Sequence Number=SeqID_334
  Gene Ontology: Mol. function=transporter activity; Cellular component= integral to membrane; Biological process=transport
  Homolog annotation: Hit_ID=Q8H6D6; Match level="QueryCoverage=94%, HitCoverage=24%, E-value=1e-53, Identity=85%"; Hit description=Major facilitator superfamily antiporter
PITYYLATYPFMANLQGLELKILLNIASLLKNMIQATITVACNILQNTAVTQEQRGVANGISVTLMSMFKAVAPAAAGILFSWAQKHLSGLFLPGDQILFLMLNMVSVIGLVLTFKPFLSLSNVMRRS

SEQ ID NO: 66309 - protein, 499 aa, Setaria italica
  Transcript Sequence Number=SeqID_335
  Gene Ontology: Mol. function=transporter activity; Cellular component= integral to membrane; Biological process=transport
  Homolog annotation: Hit_ID=Q8H6D6; Match level="QueryCoverage=93%, HitCoverage=93%, E-value=0.0, Identity=82%"; Hit description=Major facilitator superfamily antiporter
  Pfam annotation: Domain name=MFS_1; Domain location=54-445; Score =104.8; E_value=3e-28; Accession=PF07690.8; Description=Major Facilitator Superfamily
  Pfam annotation: Domain name=Sugar_tr; Domain location=57-496; Score=- 103.8; E_value=6.9e-05; Accession=PF00083.16; Description=Sugar (and other) transporter
  Pfam module annotation: Pfam domain module=MFS_1::Sugar_tr; Domain location=54-445::57-496
MADGEAGEVSAPLLLPRAAETTTKKHYHEGCPGCRLDEANKGKTGVPLLNFFYIWLVCLVAALPIQSLFPYLYFMIRDLKVAKEEQDIGFYAGFVGATYFLGRTISAVPWGMFADKYGRKPCIVISILSVVVFNTLFGLSTTYWMAIVTRGLLGLLCGILGPIKAYASEVCRKEHQALGISLVTSSRAIALVIGPAIGGFLAQPAKKYPNLFSEESIFGRFPYFLPCFVISVLAAGSCIACIWLPETLHFHNDDKVEAIDELEAQAGDSKLEAGNAKESRGESTKSLLKNWQLMSAVTLYCIFSLHDTAYLEIFSLWSVSSRKFRGLSLTSQDVGTVLAISGFGILVYQLAIYPFLAKYFGPIKPFRPAAVLSILLLATYPFMANLQGLELKILLNIASLLKNMFAATITVACNILQNTAVTQEQRGVANGISVTLMSMFKAVAPAAAGILFSWAQKHLSGLFLPGDQILFLMLNMVSVIGLVLTFKPFLSLSNVMRRS

SEQ ID NO: 66310 - protein, 155 aa, Setaria italica
  Transcript Sequence Number=SeqID_336
  Gene Ontology: Mol. function=binding
  Homolog annotation: Hit_ID=Q53K35; Match level="QueryCoverage=100%, HitCoverage=5%, E-value=5e-56, Identity=70%"; Hit description=HEAT repeat, putative
AYDAMKKVLSSSSGLAEDTLFLFTDWLSLVGERLSMLKQGDMDNSSDSQLPFTPSIEVLVKCLFLIAPYAVVHSLRSYSRLILCSHHPCLSSSASPAGVYKRLQRRLRQQQIVFVDLITPNISVICKELLSQDGLFSSNKQVQSAALCSLSTLMT

SEQ ID NO: 66311 - protein, 902 aa, Setaria italica
  misc_feature (14)..(14): Xaa can be any naturally occurring amino acid
  Transcript Sequence Number=SeqID_337
  Gene Ontology: Mol. function=binding; Cellular component=cytoplasm
  Homolog annotation: Hit_ID=Q53K35; Match level="QueryCoverage=98%, HitCoverage=34%, E-value=0.0, Identity=77%"; Hit description=HEAT repeat, putative
  Pfam annotation: Domain name=HEAT; Domain location=264-299; Score =17.7; E_value=0.048; Accession=PF02985.14; Description=HEAT repeat
  Pfam annotation: Domain name=HEAT; Domain location=348-385; Score =10.6; E_value=2.5; Accession=PF02985.14; Description=HEAT repeat
  Pfam annotation: Domain name=HEAT; Domain location=524-560; Score =18.6; E_value=0.025; Accession=PF02985.14; Description=HEAT repeat
  Pfam module annotation: Pfam domain module=HEAT::HEAT::HEAT; Domain location=264-299::348-385::524-560
REDGRLRLYRLTLXYYFAKAAESPSDTASLVDLIFQTLPIYDDRASRKAVDDMVIQALGEPTFMKPFAAALVQSMEKNLKVTNPLTSFKLLRWSHYLLKWSQFATLSKGAFSRLANAQAVLCQVLMNGSYRRRRTCKQLFIHLFSEPSGMYKMYIEEVRDLRISMRDSPAFLNLILDFTITSPSLSAEYKSMFLDLYAKIVLSSKDRPPKAATEAFKPLFVEIGHEDFKNTVMPSCIKMLKRNPEIVLQSIGYLLKTVRLDLSKYCMEFMPVVLHQARHSDEERRINALSIIGTLSEKSSDPDALPSMVNAIKAILGGSEGKLSLPYQRIGTINALEQLSRSPPKQISRLAPSVSSFLLKCYKDDGIEEVKLAILSALGSWALVSAEAVQPDVVSFIAAGLKEKDTLRKGHLKLLRLVCKKSDSLTKVTSLLDHLIQLSKAGFSKATQRLDGIYALFAVLRFAAVDTKADGAVLKEKLWPLIAQNEPSLISLQLLPKLADDDCLAAVDLLQSLFVEHLFRVREYFSIESLLQLLIYLACHPSWEVRKVAYDAMKKVLSSSSGLAEDTLFLFTDWLSLVGERLSMLKQGDMDNSSDSQLPFTPSIEVLVKCLFLIAPYAVVHSLRSYSRLILCSHHPCLSSSASPAGVYKRLQRRLRQQQIVFVDLITPNISVICKELLSQDGLFSSNKQVQSAALCSLSTLMTITPNDTFLEFEKHFIGLEERTLHDSFSENDIKIFYTPEGQLSTEQGVYVAEAVASKNTKLAKGRFRAYDDQDADTARSVVPAKTEKRESSGTGKRETGKSTKKTAPVDKAKTAKEEARELLLKEEASVRMKVGQVQKNLSLMLDALGELAIANPIFTHGQLPSLVNYVDPLLSSAIVSDAAFRTMLRLARCTAPPLCNW

SEQ ID NO: 66312 - protein, 147 aa, Setaria italica
  Transcript Sequence Number=SeqID_338
  Gene Ontology: Mol. function=RNA binding
  Homolog annotation: Hit_ID=B6U0F3; Match level="QueryCoverage=84%, HitCoverage=32%, E-value=1e-43, Identity=71%"; Hit description=RNA binding protein
  Pfam annotation: Domain name=ENT; Domain location=85-146; Score=36.7; E_value=9.2e-08; Accession=PF03735.6; Description=ENT domain
VDSPCFMLGEKYTHASYKGHTITAEDFSDTESISSSVASCSPNSSSHKSQHYNLVYQTGDICSRTDDDEASTSERETSEHDNHGSREETHLLEFHAYRATMLALYACGSISWEQEALLTNLRLTLNISTDEHLAELRSLVTHAVTSR

SEQ ID NO: 66313 - protein, 87 aa, Setaria italica
  Transcript Sequence Number=SeqID_339
HVHRQDRLRCRGSSSARRGSSAARRWLVQVLQAQHLQGIHTCREEASQVGLLDPRVATGEGVGGAAEVFRKRCETLGRPHPSIYRGS

SEQ ID NO: 66314 - protein, 114 aa, Setaria italica
  Transcript Sequence Number=SeqID_340
  Gene Ontology: Mol. function=receptor activity
  Homolog annotation: Hit_ID=B9RYI6; Match level="QueryCoverage=100%, HitCoverage=21%, E-value=6e-37, Identity=63%"; Hit description =Serine-threonine protein kinase, plant-type, putative
  Subcellular localization annotation: CTP_CleavageSite=31; ConfidenceScore=5.07e-01
LYFQDNRAPSALSWRVFDVAVNGQPFFAGLNVSTAGTMVYGAEWPLSGQTRIKLTPAPDSPVGPVINAAELMMIVPLGGRTHPRDVIGMEALARGFWNPPSDWRGDPCLPKGNS

SEQ ID NO: 66315 - protein, 295 aa, Setaria italica
  Transcript Sequence Number=SeqID_341
  Homolog annotation: Hit_ID=B6U1F2; Match level="QueryCoverage=99%, HitCoverage=76%, E-value=1e-109, Identity=70%"; Hit description =Senescence-associated protein 12
  Pfam annotation: Domain name=Senescence; Domain location=1-288; Score= 229.2; E_value=1.1e-65; Accession=PF06911.4; Description=Senescence -associated protein
  Subcellular localization annotation: CTP_CleavageSite=72; ConfidenceScore=5.21e-01
LFTLPDRDGTFLNYGVSFDAAANADAAALASLDGFLRSNACFSAPSSSAAVVPSKSSRARPTQQQQQQSAASSDAYWNDFAPRMEGYNGVLAKAIAAGTGQLVKGIFMCSEAYASQVQRGADLFRPQAAGGASSRFGGAGRSSSQASTKRGAVNKSLKRVRKLSEMTEQMSQSLLDTVISVTGSMAAPLLRSKQGRAFLATVPGEVVLASLDAINKVMDAVEAAERRSLAATSNVVAGAVSRRYGESAGEATEDAFATAGHAVGTAWNLFKIRKAVTPSSSLPGNMVKSAVRNRK

SEQ ID NO: 66316 - protein, 223 aa, Setaria italica
  Transcript Sequence Number=SeqID_342
MVSKKTMSSLAFLMAVLLIACSSMSSAARYLEETKPEYPPHPTVPEIPKPELPPHPTVPELPKPELPPHPTVPEHPKPELPPHPTEPEHPKQPELPPHPTLPELPKPELPPHPTVPEHPKPEIPHPVPEVPKPELPHPAVPELPHPHVPEVPKPELPHPAVPEVPKPELPHPEVPKPELPHPELPKPELPPHPEVPELPKPEAPHVPEVPKPEGHYPVPEAKP

SEQ ID NO: 66317 - protein, 136 aa, Setaria italica
  Transcript Sequence Number=SeqID_343
IYQLEIDISSNTSSARKWKHKHKAQGNHVRPGERVPAQSSKHGRWWVTPREPRLQHGGCTWGSGGVATVGGSTQTAGRRRPRQLTAPGKASRRCRAGARDGRLHVGDSVPEQDSFTVARKGRAAVVAVGPSSPSPG

SEQ ID NO: 66318 - protein, 55 aa, Setaria italica
  Transcript Sequence Number=SeqID_344
DKIDEVVKDWDAQKEEFYERTGLSRGNELAVIDNGESGVQHHDYDDFDELSQLLE

SEQ ID NO: 66319 - protein, 218 aa, Setaria italica
  Transcript Sequence Number=SeqID_345
  Homolog annotation: Hit_ID=A3QME3; Match level="QueryCoverage=100%, HitCoverage=43%, E-value=1e-30, Identity=35%"; Hit description=Wax synthase
EAAATVAMRVHHALADGMALITLLVSSSRSAADPAIPALPPPPPARRAGAIYAPAPPRSGGLITFLVVWVWSYLLLAWHTMVDVAAFVATIFFLTDPPTLFKRADHGGEPRRGMRFVHRTLSLDDVKFFKNAMNCTVNDVLVGVTSAALSRYFFRKTGDTKTRKVVLRSILPVNTRPATSLQMDVDMIESGKSNAVRWGNQLGYIILPFHLAMHDDPL

SEQ ID NO: 66320 - protein, 73 aa, Setaria italica
  Transcript Sequence Number=SeqID_346
  Gene Ontology: Mol. function=transporter activity; Cellular component= membrane; Biological process=oligopeptide transport
  Homolog annotation: Hit_ID=B6SWJ7; Match level="QueryCoverage=97%, HitCoverage=12%, E-value=2e-12, Identity=50%"; Hit description =Peptide transporter PTR2
TVSMGFYLSSALLAAASADTGGAWVRDNLDDGRLELFYWMLAVFGVFNFAGFLWFASRHEYKREAPAAQRPRR

SEQ ID NO: 66321 - protein, 74 aa, Setaria italica
  Transcript Sequence Number=SeqID_347
  Gene Ontology: Mol. function=carbohydrate binding; Biological process= carbohydrate metabolic process
  Homolog annotation: Hit_ID=B4FPM2; Match level="QueryCoverage=95%, HitCoverage=21%, E-value=1e-24, Identity=71%"; Hit description =Aldose 1-epimerase
DRVRLTNVGAAVTSLLVPDKKGVLADVVLGFDTLDPYLNGTSPYFGCIVGRVANRIKNGKFTLNGVQHNLSINN

SEQ ID NO: 66322 - protein, 581 aa, Setaria italica
  Transcript Sequence Number=SeqID_348
  Gene Ontology: Mol. function=protein kinase activity; Cellular component=integral to membrane; Biological process=protein amino acid phosphorylation
  Homolog annotation: Hit_ID=B9T3Y7; Match level="QueryCoverage=99%, HitCoverage=68%, E-value=0.0, Identity=58%"; Hit description=ATP binding protein, putative
  Pfam annotation: Domain name=LRR_1; Domain location=124-150; Score =0.5; E_value=2.4e+02; Accession=PF00560.25; Description=Leucine Rich Repeat
  Pfam annotation: Domain name=LRR_1; Domain location=27-47; Score=7.4; E_value=11; Accession=PF00560.25; Description=Leucine Rich Repeat
  Pfam annotation: Domain name=LRR_1; Domain location=4-25; Score=5.4; E_value=28; Accession=PF00560.25; Description=Leucine Rich Repeat
  Pfam annotation: Domain name=LRR_1; Domain location=52-75; Score=7.2; E_value=13; Accession=PF00560.25; Description=Leucine Rich Repeat
  Pfam annotation: Domain name=LRR_1; Domain location=77-98; Score =14.5; E_value=0.46; Accession=PF00560.25; Description=Leucine Rich Repeat
  Pfam annotation: Domain name=LRR_1; Domain location=99-122; Score =15.6; E_value=0.21; Accession=PF00560.25; Description=Leucine Rich Repeat
  Pfam annotation: Domain name=Pkinase; Domain location=272-570; Score =60.2; E_value=7.6e-15; Accession=PF00069.17; Description=Protein kinase domain
  Pfam annotation: Domain name=Pkinase_Tyr; Domain location=272-570; Score=47.5; E_value=7e-17; Accession=PF07714.9; Description=Protein tyrosine kinase
  Pfam module annotation: Pfam domain module=LRR_1::LRR_1::LRR_1::LRR _1::LRR_1::LRR_1::Pkinase::Pkinase_Tyr; Domain location=124-150::27 -47::4-25::52-75::77-98::99-122::272-570::272-570
AGSALVYLDLSGNELLGEFNIAGRFRNLRHVNLAHNQLSNANLLVSMGEISELEYVNLSSTGLHGQIPPQFSSRLVGLKVLDLSRNNISGVVPDMSSLRLRVLDLSVNNLTGEIPVELVKKLASMDRFNFSYNNLTVCASELSPEAFAAAFAKSRNDCPIAVNPDSIKKSRGKRKGMKLALAVVLSLFFSVLGLLCLAVACRRRRKRCDTLPVVKQVSFKEEPAVSGPFAFQADSTTWVADVKVATSVPVVIFEKPLLSFTFADLLAATSNFDRGTLLAEGRFGPVYRGFLPGGIQVAVKVLVHGSVMEDQDAARELERLGRIKHPNLVPLTGYCLAGDQRIAIYEYMENGNLHNLLHDLPLGVQMTEDWSRDTWEDNVDGVATEIITPEGTATWMFRHKIALGAARALAFLHHGCIPQIVHRDVKASSIYFDCAMEPRLSDFGLSMIAGTSIDNDLLHHSPGYTPPEFSISENAMATAKSDVYSFGVVLFELVTGKKPLGDEYPDQKEASLVNWARAMVKANLGSSIIDPKIRDTGLERQMEEALRIAYLCTAELPSKRPAMQQIVGLLKDIEPKVAEQH

SEQ ID NO: 66323 - protein, 97 aa, Setaria italica
  Transcript Sequence Number=SeqID_349
  Gene Ontology: Mol. function=N-acetyltransferase activity; Cellular component=core TFIIH complex; Biological process=metabolic process
  Homolog annotation: Hit_ID=B6TH38; Match level="QueryCoverage=95%, HitCoverage=35%, E-value=9e-32, Identity=73%"; Hit description=N -acetyltransferase
KGGLSVYLESGHGDQLTLPVRKYIQNLLKVNMEEPYGPEWPSEEKVKRQEMVAPEARYIFIKQYSNGFTTECSMNQDAGVEHMHTPCNEGHLVGFVH

SEQ ID NO: 66324 - protein, 170 aa, Setaria italica
  Transcript Sequence Number=SeqID_350
  Gene Ontology: Mol. function=hydrolase activity
  Homolog annotation: Hit_ID=A7WPK6; Match level="QueryCoverage=94%, HitCoverage=19%, E-value=3e-44, Identity=54%"; Hit description =Putative hydrolase
SLNDIDLKPGDTAIVYACELPDIKGKFDPAKAAALGLKPGPKYRELQLGNSVQSDKFDEMVHPSDVLGPSIPGPTVLLVDCPTQYHMPELFSLQSLSCFYEDSSDPTKSGKTVNCIIHLGPSSVTKAVDYQNWMKKFGATQHIMAGHEIKNMEIPILKGSARISSRLNFV

SEQ ID NO: 66325 - protein, 142 aa, Setaria italica
  Transcript Sequence Number=SeqID_351
  Gene Ontology: Mol. function=actin binding; Cellular component =cytoskeleton; Biological process=cytoskeleton organization and biogenesis
  Homolog annotation: Hit_ID=Q10L72; Match level="QueryCoverage=98%, HitCoverage=14%, E-value=5e-56, Identity=80%"; Hit description =Villin-3, putative, expressed
  Pfam annotation: Domain name=Gelsolin; Domain location=3-83; Score =12.7; E_value=0.026; Accession=PF00626.14; Description=Gelsolin repeat
EWKLEVTEVYNFSQDDLLTEDTMILDTHSEVFVWMGQCVDTKEKQKAFDIGQKYVEHAVAFEGISPDVPLYKVIEGNEPCFFRTYFSWDNTRSVIHGNSFEKKLSVLFGVRSEGGPKSSGDGGPTQRASALAALSSALNPSS

SEQ ID NO: 66326 - protein, 384 aa, Setaria italica
  Transcript Sequence Number=SeqID_352
AGGGGGRKPRIPPLPPARTLLTALAAAVALAVLCLLSSSPAASLSGAWRSGARSGDKYLYWGGRVDCPGKHCGSCAGLGHQESSLRCALEEALFLGRVFVMPSRMCLSSVHNTKGVLQSSETSKQRWEESSCAMESLYDIDQISRTVPVILDNSKTWHDIVSKSVKLEVGGVAHVQGISRGELKQNSLYSTALIINRTASPLAWFMECKDRKNRSSVMLSYTFLPSMPAKKLRDAANKMKEILDDYDAIHVRRGDLLKNRKDRFGVERSLHPHLDRDTRPEYIRKRIAKWIPPGRTLYIASNERTPGFFSSLSDRYKLAYSSNFSSILEPVIENNYQLFMVERLIMQGAKTFVKTMREFDSDLTLCDDPKKNTKVWQRPVYTDD

SEQ ID NO: 66327 - protein, 89 aa, Setaria italica
  Transcript Sequence Number=SeqID_353
YITIWCLLKVFAHSFGQQSRYKLAYSSNFSSILEPVIENNYQLFMVERLIMQGAKTFVKTMREFDSDLTLCDDPKKNTKVWQRPVYTDD

SEQ ID NO: 66328 - protein, 84 aa, Setaria italica
  Transcript Sequence Number=SeqID_354
RNFGSRLLVSIQFRGLYAKHFCCDGDGFRRPETPALPPLRLLRALSRSARPGRQFAPLRFALTGWGTMRNSVGDGELFAQVLES

SEQ ID NO: 66329 - protein, 64 aa, Setaria italica
  Transcript Sequence Number=SeqID_355
LDDCTKSERLFETVFPPLGYNIVSQSNAYPMRHPSSSVIGDCEPEACLFDEIQASNSPSAGKCA

SEQ ID NO: 66330 - protein, 56 aa, Setaria italica
  Transcript Sequence Number=SeqID_356
  Subcellular localization annotation: CTP_CleavageSite=15; ConfidenceScore=5.23e-01
NCFMINPAQFSFLFSVSSLTRTLFWVFQTVSRNVYNYMFIYHMQINRNTGNRLSKW

SEQ ID NO: 66331 - protein, 119 aa, Setaria italica
  Transcript Sequence Number=SeqID_357
  Homolog annotation: Hit_ID=Q2R1S7; Match level="QueryCoverage=86%, HitCoverage=25%, E-value=9e-11, Identity=36%"; Hit description=F-box domain containing protein
  Pfam annotation: Domain name=DUF295; Domain location=27-85; Score =58.6; E_value=2.3e-14; Accession=PF03478.10; Description=Protein of unknown function (DUF295)
RSLSFEHDRTVAFDVFEADLSTNPGHWRRVNKLGGQALFVGRHCSKSFAAKEYNGIQEDCIYFMCDYPWPDSVVDPLRDSGVYNLRNGTITPLLSQTATVPQHHGGHWRPTWFFPADSI

SEQ ID NO: 66332 - protein, 83 aa, Setaria italica
  Transcript Sequence Number=SeqID_358
PGENFTGKSSNPNLHPIGADAVTVAVFVNTKVEGFKPPQRITVESISVTKVVANGGSTMKGDRTGGWHIHLQEDLILSYFKLY

SEQ ID NO: 66333 - protein, 227 aa, Setaria italica
  Transcript Sequence Number=SeqID_359
QTRKGGQRTPAHTNEVVEYFTESPPDNSLVRGHEFGAADDITGAGNTNKPTKDSSINADEKDEKQSPMPNLLQKILLPCTARPRTATRTRPPAIKPSPEKPGWKQKIPGENLTGKSSNPNLHPMVLKEPTLSPSPPSSTPRWRDSSLRSASPLNPSALPKSPPTVDPPWREIELNHRGAGHPPPPTPANRRRRGGRPNRRQEVFRLSTVDGDRDHFRIGKILFVLRT

SEQ ID NO: 66334 - protein, 210 aa, Setaria italica
  Transcript Sequence Number=SeqID_360
  Gene Ontology: Cellular component=membrane
  Homolog annotation: Hit_ID=B9RR06; Match level="QueryCoverage=50%, HitCoverage=44%, E-value=2e-22, Identity=54%"; Hit description =Transmembrane protein 14, putative
  Pfam annotation: Domain name=Tmemb_14; Domain location=107-204; Score= 119.6; E_value=1e-32; Accession=PF03647.5; Description=Transmembrane proteins 14C
  Subcellular localization annotation: CTP_CleavageSite=48; ConfidenceScore=5.63e-01
MALALATTPLAHLALAPPPISASQSSLLLLPRRPSPAPVSISLRSRLVAAVATKEPELGDGGSEGGDGAGGSGGGGGGGDGDPREGGPEGEGEGEEEKMGQGLSMSQKLTLAYAALVGAGGVMGYMKSGSQKSLAAGGISALILYFVHTQLPVRPVFASSIGLGISAALLSVMGSRFKKSGKIFPAGVVSLVSLVMVGGYFHGILRSSHA

SEQ ID NO: 66335 - protein, 254 aa, Setaria italica
  Transcript Sequence Number=SeqID_361
  Gene Ontology: Mol. function=nucleic acid binding; Cellular component= cytoplasm; Biological process=nuclear-transcribed mRNA catabolic process, deadenylation-dependent decay
  Homolog annotation: Hit_ID=A2ZVY5; Match level="QueryCoverage=92%, HitCoverage=69%, E-value=1e-66, Identity=60%"; Hit description=Zinc finger CCCH domain-containing protein 9
  Pfam annotation: Domain name=zf-CCCH; Domain location=179-205; Score =55.5; E_value=2e-13; Accession=PF00642.16; Description=Zinc finger C- x8-C-x5-C-x3-H type (and similar)
  Pfam annotation: Domain name=zf-CCCH; Domain location=217-243; Score =26.2; E_value=0.00013; Accession=PF00642.16; Description=Zinc finger C-x8-C-x5-C-x3-H type (and similar)
  Pfam module annotation: Pfam domain module=zf-CCCH::zf-CCCH; Domain location=179-205::217-243
DAATGHRLQLARLALQYQEVADRYELCLARLADAADEAAALRRENAELRAANGDLTRRLALLSGIGKQAAAAAIADEVRRLRFSEQKAVPAAKERAQPEKLAVLPKSISVRSNDYLKMNQPNQAPATPAANNRKPRASNPTKPSSRVYIGDGGDKKGEEAKQQHAAGAMELEVYNQGMFKTELCNKWEETGACPYGDQCQFAHGVAELRPVIRHPRYKTQVCRMVLAGEVCPYGHRCHFRHSLTSAERLLLPRP

SEQ ID NO: 66336 - protein, 77 aa, Setaria italica
  Transcript Sequence Number=SeqID_362
YTELAPPPPPNRHTYCQETNANDDAGCICITEVYVKRTLKFDTLPKREDTSQKQDHHGVSMGKITLLICLLFVYYQK

SEQ ID NO: 66337 - protein, 107 aa, Setaria italica
  Transcript Sequence Number=SeqID_363
  Subcellular localization annotation: CTP_CleavageSite=30; ConfidenceScore=5.09e-01
IIVFKPLYVQFYFASDQCLPGVLSYCSCPSNENVSSTLPFVLFSLYLPFAHLRCRIVCSWVRNVFAPCRPPPWPVAGSVATSVYAQPPVLLQSGNCSFQMMWWILPQ

SEQ ID NO: 66338 - protein, 167 aa, Setaria italica
  misc_feature (155)..(155): Xaa can be any naturally occurring amino acid
  Transcript Sequence Number=SeqID_364
  Gene Ontology: Mol. function=ubiquitin-protein ligase activity; Biological process=multicellular organismal development
  Homolog annotation: Hit_ID=B9SIX2; Match level="QueryCoverage=99%, HitCoverage=3%, E-value=8e-70, Identity=73%"; Hit description =Ubiquitin-protein ligase, putative
LKCVLFGVWYHAKNPLRETMLTILLQKVTHLPMYGQNIVEYTDLMISLLGKVNDSSAKQNDSELVNKCLAPEVISCIFDTLHSQNELLANHPNSRIYNTLSCLVEFDGYYLESEPCVTCSCPDVPYSRMKLETLKSETKFTDNRIIIKCTGSFTXIQSVTMNVYDAR

SEQ ID NO: 66339 - protein, 674 aa, Setaria italica
  misc_feature (147)..(147): Xaa can be any naturally occurring amino acid
  misc_feature (159)..(159): Xaa can be any naturally occurring amino acid
  misc_feature (179)..(179): Xaa can be any naturally occurring amino acid
  Transcript Sequence Number=SeqID_365
  Gene Ontology: Mol. function=ubiquitin-protein ligase activity; Biological process=multicellular organismal development
  Homolog annotation: Hit_ID=B9SIX2; Match level="QueryCoverage=97%, HitCoverage=14%, E-value=0.0, Identity=75%"; Hit description =Ubiquitin-protein ligase, putative
VDDGSEGSSEKSCMDMEQVVEMFNDKEGDLLKRFIDIFLLEWNSAGVRHEAKCVLFGVWYHAKNPLRETMLTILLQKVSHLPMYGQNIVEYTDLMISLLGKVNDSSAKQNDSELVNKCLAPEVISCIFDTLHSQNELLANQSHSYPXNTLSCLVEFDGXYLENALEALLYSQLKLETLXKSETKFTDNRIIIKCTGSFTIQSVTMNVYDARKSKSVKVLNLYYNNRPVTDLSELKNNWTLWKRAKSCHLTFNQTELKVEFPIPITACNFMIELDSFYENLQASSLESLQCPRCSRSVTDKHGICSNCHENAYQCRQCRNINYENLDSFLCNECGYSKYGRFEFHFMAKPSFSFDNMENDDDMRKGLAAIESESENAHRRYQQLMGFKKPLIKLVSSIGEQEIDSQQKDAVQQMMVSLPGPTCKVNRKIALLGVLYGEKCKAAFDSVSKSVQTLQGLRRVLMTYLHQKSSSDTNALPAFSIPRSPSSCYGCSTTFVTQCLELLQVLSKHANCRKQLVSSGILSELFENNIHQGPRTARTLARAVLSSFSESDADAVQELNSLIQKKVMYCLEHHRSMDIAQSTREELLLLSETCALVDEFWEARLRVAFQLLFSSIKVGAKHPAISEHIILPCLRIISQACTPPKSDGDKESGLGISSLALQSKNDDTTGNTTTN

SEQ ID NO: 66340 - protein, 81 aa, Setaria italica
  Transcript Sequence Number=SeqID_366
KQDADQIAVFRSSSRFASKPNCMRSTVAHPSPANTIDPDYCYLQKLRNRTQEDGAPLTKERLRFCVTVDAYRTSSEPNVLP

SEQ ID NO: 66341 - protein, 133 aa, Setaria italica
  misc_feature (34)..(34): Xaa can be any naturally occurring amino acid
  Transcript Sequence Number=SeqID_367
  Gene Ontology: Mol. function=protein tyrosine kinase activity; Cellular component=plasma membrane; Biological process=protein amino acid phosphorylation
  Homolog annotation: Hit_ID=B9RKA4; Match level="QueryCoverage=36%, HitCoverage=7%, E-value=2e-17, Identity=82%"; Hit description=ATP binding protein, putative
SIAVGAARGLRYLHEECRVGCIIHRDMRPNNILXVTHDFEPLVWSYLTDWSVKLSIVLVSLALVIFPYMLKILYLMQSSGNTYIDWWRTIVSINFCDDSWVLLFMEANHLILCYYTSLDDGRVQQTIYNQFTN

SEQ ID NO: 66342 - protein, 75 aa, Setaria italica
  Transcript Sequence Number=SeqID_368
  Gene Ontology: Mol. function=protein tyrosine kinase activity; Cellular component=plasma membrane; Biological process=protein amino acid phosphorylation
  Homolog annotation: Hit_ID=B9SN51; Match level="QueryCoverage=68%, HitCoverage=6%, E-value=3e-18, Identity=76%"; Hit description=ATP binding protein, putative
LCVELIIFGSHQARPFLEAYAIDELIDPRIGDRYCENEVHCMLHAANLCIRRDPHARPRMSHVSGTILNSYHNHC

SEQ ID NO: 66343 - protein, 247 aa, Setaria italica
  Transcript Sequence Number=SeqID_369
  Gene Ontology: Mol. function=protein tyrosine kinase activity; Cellular component=plasma membrane; Biological process=protein amino acid phosphorylation
  Homolog annotation: Hit_ID=Q5ZBB1; Match level="QueryCoverage=100%, HitCoverage=32%, E-value=7e-69, Identity=55%"; Hit description=Dual -specific kinase DSK1-like
RAHASWVVLDKELKHEEKRCLEELQCNIVVMKRSQPKVLRLNLVGKPEKDSNSTPELPPEPSTSDSNTASNINEQRSSIQGPSVTPSSSPESEAPFDTTDAGTSSVSSSDPATSPFCASDTNSSLTKEATKDNIQHSDANISDSESEASTPAASSLQPWMVDKLQGPASTRLLGNRPRRTPTADSLLEKIAKLDLLTEINAIRSRSDLNFRGNVRDAVSLSRRAPPGPPPLCSICQHKTPVFGKPPR

SEQ ID NO: 66344 - protein, 75 aa, Setaria italica
  Transcript Sequence Number=SeqID_370
  Gene Ontology: Mol. function=protein tyrosine kinase activity; Biological process=protein amino acid phosphorylation
  Homolog annotation: Hit_ID=Q5ZBB1; Match level="QueryCoverage=100%, HitCoverage=9%, E-value=2e-11, Identity=51%"; Hit description=Dual -specific kinase DSK1-like
VLRILEGDMVVDSGSVTGSSDSGSRSWRMLNEQQHFHEYSSPGQQDSQRTVEGKRSYNALRASWDRDKQSISNRY

SEQ ID NO: 66345 - protein, 749 aa, Setaria italica
  misc_feature (81)..(81): Xaa can be any naturally occurring amino acid
  Transcript Sequence Number=SeqID_371
  Gene Ontology: Mol. function=protein tyrosine kinase activity; Cellular component=plasma membrane; Biological process=protein amino acid phosphorylation
  Homolog annotation: Hit_ID=Q5ZBB1; Match level="QueryCoverage=94%, HitCoverage=89%, E-value=0.0, Identity=75%"; Hit description=Dual -specific kinase DSK1-like
  Pfam annotation: Domain name=Pkinase; Domain location=409-679; Score =95.9; E_value=1.4e-25; Accession=PF00069.17; Description=Protein kinase domain
  Pfam annotation: Domain name=Pkinase_Tyr; Domain location=409-679; Score=75.3; E_value=2.3e-19; Accession=PF07714.9; Description =Protein tyrosine kinase
  Pfam module annotation: Pfam domain module=Pkinase::Pkinase_Tyr; Domain location=409-679::409-679
MMVGSSQQQLLQRKGKAVAEKGATTATAAEEKVVVAVRAATREISKTAIIWALTHVVQPGGSILVLVVIPAHTSGRKFWGXFPLFAGDCASGHKSMLDQKYDISEQCDQMMKKLDAYHKDKIIVKTKLVSGSPSGVVAAECKRAQASWVVLDKELKHEEKRCVEELQCNIVVMKRSQPKVLRLNLVRSPEKESKSTCTLPPVLDGSTGKTATDIKEAHSSTRGPAVTPNSSPDLETPFGSSTEVGTSSVSSSDPGTSPFSACETNGSLKKEVQITKDQIQHSDVNISDSDSESPSPPATFSVQPWMADIMQASASSRSLGKGPRKTRTATADVLLEKISKLDLLNEISAMRSRSDLNFRGDVRDAVSLARSAPPGPPPLCSICQHKAPVFGKPPRWFSYAELELATGGFSQANFLAEGGFGSVHRGVLPDGQAIAVKQHKLASSQGDVEFCSEVEVLSCAQHRNVVMLIGFCVEDKRRLLVYEYICNGSLDSHLYGRNRETLEWAARQKIAVGAARGLRYLHEECRVGCIIHRDMRPNNILVTHDFEPLVGDFGLARWQPDGDMGVETRVIGTFGYLAPEYAQSGQITEKADVYSFGVVLVELVTGRKAVDINRPKGQQFLTEWARPFLEAYAIDELIDPRIGDRYCENEVHCMLHAANLCIRRDPHARPRMSHVLRILEGDMVVDSGSVTGSSDSGSRSWRMLNEQQHFHEYSSPGQQDSQRTVEGKRSYNALRASWDRDKQSISNRY

SEQ ID NO: 66346 - protein, 107 aa, Setaria italica
  Transcript Sequence Number=SeqID_372
QQTKRPLLSYVRYGDKQRDVRRLSSAKTHKFTSKEADSLRELKTQDFRRSFLLGCYWPLCFLTGQQHQYNVVSSCAAGSWEYTPGLVIDPLRLIVHLLPPSHPPWAT

SEQ ID NO: 66347 - protein, 374 aa, Setaria italica
  Transcript Sequence Number=SeqID_373
THLDIDQISPLRMVLTASVAFHDQSVKPGSPLLISVSLLSHLPSPVVVDQLEVQFNQSDCNFVIHSTQEDSPPLDSNLHGQVVEATSLTLFTNKWMRLTREIKSGQSGKLECLLVKATINKHLVICCHAESPASMEDFPLWKFEDQVETLPTKDNVLAFSGQKLIQVEEPDAQVDVVLNSAGPALVGEIFIVPVTVFSKGHTVHSGELKINLVDARGGGLLMSPREAEESESHHVELLGVSTVSDGKESKEEVDSIRKIQYSFGVVSVPTLSVGDSWSCKLEIKWHRAKSVMLYVSLGYSLGSSEEEALHRLNVHRSLQIEGQIPLLVTHQLLRPFRREPLLLSEIRSLGDGDKKCSLAMNESNMFIVNARLVL

SEQ ID NO: 66348 - protein, 127 aa, Setaria italica
  misc_feature (118)..(118): Xaa can be any naturally occurring amino acid
  Transcript Sequence Number=SeqID_374
MDAVELPLPAKVDFGNILAPAAAVEGVDGVVVGGGGPGGGGGEVLRRCADADRRHGGDVKQQSQNIEGFPSFRSKRTSLEVPMQKSLGFGLKSENGKRDFVGHDAIQSLHKQDSKIVXKKAIKLLDR

SEQ ID NO: 66349 - protein, 77 aa, Setaria italica
  Transcript Sequence Number=SeqID_375
CKPKIIKKFKINKNCYLGSRTMKYDNIYVNVIDSWLSESWPSRLLLCCTHVAQISGPFYDTISAQTVGICLKHMNNT

SEQ ID NO: 66350 - protein, 71 aa, Setaria italica
  Transcript Sequence Number=SeqID_376
  Gene Ontology: Mol. function=3'-5'-exoribonuclease activity; Cellular component=exosome (RNase complex); Biological process=RNA processing
  Homolog annotation: Hit_ID=B6T763; Match level="QueryCoverage=91%, HitCoverage=26%, E-value=5e-27, Identity=90%"; Hit description =Exosome complex exonuclease RRP41
MTMCISGTRSACINAATLALSDAGIPMRDIVTSCSDGYLCSTPLLDLNYIEDSAGGPDVTVGILSKMDKVT

SEQ ID NO: 66351 - protein, 401 aa, Setaria italica
  Transcript Sequence Number=SeqID_377
  Gene Ontology: Mol. function=transferase activity, transferring groups other than amino-acyl groups
  Homolog annotation: Hit_ID=Q75GN9; Match level="QueryCoverage=100%, HitCoverage=86%, E-value=1e-118, Identity=53%"; Hit description =Putative hypersensitivity-related protein
  Pfam annotation: Domain name=Transferase; Domain location=1-386; Score=90.1; E_value=7.8e-24; Accession=PF02458.7; Description =Transferase family
KAIKTALAEALVYYYPIAGRLREAAGEKLVVDCTAEGVVFVEADADVRLEEFGKPLLPPYPCVEELLCDAGETRAVVGKPLVLMQVTRLQCGGFVIGFHMCHNIADGFGMVQFVRSVAELARGEAVPTILPVWKRDLLTGCNPSFITHLDAAYNPSPNDLQYKSDDVMLSTPIEDMIVQYFLFGPREIASLRSHVRGSLANSATSFVRHRHMIAVSSSVLLHYESNQWVRLMITMNARGKWNKHTFIPRGYYGNAHFSPIVEATVNELCSQPLAHTVELVRKTKLSVTKESMKSMIHTIALTRQWPPPMMDRIYEVSDTKWIATNVTRFGWAELVGGGIPLAGDLTSKLGSDHMRCKNEDDEYSTIVSMLLPKPAMERFTNEMSVWLNKHDEKNLVILSAL

SEQ ID NO: 66352 - protein, 77 aa, Setaria italica
  misc_feature (9)..(9): Xaa can be any naturally occurring amino acid
  misc_feature (17)..(17): Xaa can be any naturally occurring amino acid
  Transcript Sequence Number=SeqID_378
  Subcellular localization annotation: CTP_CleavageSite=26; ConfidenceScore=5.31e-01
KPSSAAKKXKTETSSAXKKQETANPSSATKKQETANAPSATKETESAPLNVKTEKAVLAVAVNCRSQRVRKPKVFAE

SEQ ID NO: 66353 - protein, 62 aa, Setaria italica
  Transcript Sequence Number=SeqID_379
CTDAVSGDLIPLHWVKRKESPCFVGIINQLFSVFSHTISFISFALKLMLTCLDVDVKCSITY

SEQ ID NO: 66354 - protein, 207 aa, Setaria italica
  Transcript Sequence Number=SeqID_380
  Homolog annotation: Hit_ID=Q9SPP7; Match level="QueryCoverage=54%, HitCoverage=40%, E-value=4e-17, Identity=47%"; Hit description =Fertilin alpha subunit
VKQVQWASFGGGPDDGADPFADLSGGAAADSFFGSQTLDTSVGTSDHDFFAGNQSLAAQVTDQDFFGGTSTSDQNADGQLQRTGSGAVDSTDPKYFETMYPGWKYDEVTQQWYQVDTSNTTGNAAQVVDNSSQNLQQQQLDASYLQNSAHAGLEPIAEEGSATAGVSSWGQGGASEYPPNMLFYAEYPGWYFDTNTQQWQSLESYQQ

SEQ ID NO: 66355 - protein, 119 aa, Setaria italica
  misc_feature (16)..(16): Xaa can be any naturally occurring amino acid
  Transcript Sequence Number=SeqID_381
  Gene Ontology: Mol. function=oxidoreductase activity; Biological process=oxidation reduction
  Homolog annotation: Hit_ID=Q0PWF8; Match level="QueryCoverage=89%, HitCoverage=28%, E-value=7e-48, Identity=85%"; Hit description =Gibberellin 20-oxidase
  Subcellular localization annotation: CTP_CleavageSite=42; ConfidenceScore=5.19e-01
RRRLARRWRSIRPTPXAFVVNIGDTFMALSNGRYRSCLHRAVVNSRVPRRSLAFFLCPEMDKVVRPPGELVDDRNPRAYPDFTWRALLDFTMRHYRADMRTLEAFSNWLLIHGNNSHQL

SEQ ID NO: 66356 - protein, 158 aa, Setaria italica
  Transcript Sequence Number=SeqID_382
GTAACLPGTPRCRRVLAESPIHTAAAADCQVIPPRSRQQEPPCVSRRGRDPPRRRTQGRGHTRARLPGGVGALHPQLLERGGFPLMLLLATSSSDGFGPWRLLLVRGGGLPRSAPVGSSASAKVLTKLVKEFAGDISGNGGVLVAPTTHKLEETEGAI

SEQ ID NO: 66357 - protein, 98 aa, Setaria italica
  Transcript Sequence Number=SeqID_383
  Subcellular localization annotation: CTP_CleavageSite=87; ConfidenceScore=5.60e-01
CWKKSGLCIARARNPIICTCLCSACCSRASMAAMSARVLCCSCRSFTTSASRMFLSRLSRSISSSRPPNWPTSRHVPSWAACCCCCCCESGEVGRPAA

SEQ ID NO: 66358 - protein, 59 aa, Setaria italica
  Transcript Sequence Number=SeqID_384
  Gene Ontology: Cellular component=plasma membrane
  Homolog annotation: Hit_ID=Q00RR3; Match level="QueryCoverage=94%, HitCoverage=19%, E-value=4e-19, Identity=80%"; Hit description =H0525G02.7 protein
QARSRLSYEQFGAFLANIKELNAHKQSREETLKKAEEIFGPDNKDLYLSFQGLLNRSMP

SEQ ID NO: 66359 - protein, 62 aa, Setaria italica
  Transcript Sequence Number=SeqID_385
MHLQRINYTCNLKLVTLHLLSSEQNFLNNTYNGYTLHRNRSIHITSNGTHRRMHHMRANNFP

SEQ ID NO: 66360 - protein, 193 aa, Setaria italica
  misc_feature (112)..(112): Xaa can be any naturally occurring amino acid
  Transcript Sequence Number=SeqID_386
  Gene Ontology: Cellular component=exocyst; Biological process =exocytosis
  Homolog annotation: Hit_ID=Q6Z5V5; Match level="QueryCoverage=98%, HitCoverage=35%, E-value=3e-29, Identity=38%"; Hit description =Putative leucine zipper-containing protein
  Pfam annotation: Domain name=Exo70; Domain location=1-186; Score= -76.0; E_value=0.00095; Accession=PF03081.7; Description=Exo70 exocyst complex subunit
MILLNIEGVNLTGPLVSGIISDLESVVQESSSYVPEGLKFVFLMNNTNFVPQQVEESDVRLMVGDQWIKKRHYNIKQYIRDYLSSSWKQVVRPLETASTSSSQKRLRTASLXIFYPTPSPLQSFELAFNKACKSQMHWIVCSPVLRIKLRVSIIEYVVQAYQAYRDSLEESARRDLEDLEPNLKRKVSVLFEG

SEQ ID NO: 66361 - protein, 124 aa, Setaria italica
  Transcript Sequence Number=SeqID_387
  Gene Ontology: Mol. function=catalytic activity; Cellular component =peroxisome; Biological process=metabolic process
  Homolog annotation: Hit_ID=Q10S72; Match level="QueryCoverage=85%, HitCoverage=19%, E-value=4e-32, Identity=69%"; Hit description=4 -coumarate--CoA ligase-like 4
AGTVALVDAATGRRVTFPELWRAVASAATALAAPPLSLRKGHVALILSPNSVHFPVAALAAMSLGAVITTANPLNTPAEIAKQVADARPVVAFVAAVYLLILDRTNWKTNMMTALLVPYVFFTL

SEQ ID NO: 66362 - protein, 212 aa, Setaria italica
  Transcript Sequence Number=SeqID_388
  Gene Ontology: Cellular component=plasma membrane
  Homolog annotation: Hit_ID=B6T512; Match level="QueryCoverage=100%, HitCoverage=100%, E-value=2e-87, Identity=78%"; Hit description=Cold acclimation protein COR413-PM1
  Pfam annotation: Domain name=WCOR413; Domain location=9-200; Score =439.3; E_value=5.9e-129; Accession=PF05562.3; Description=Cold acclimation protein WCOR413
MGKGFASYLAMKTGPEAGDASAAVQALIDADLRELGVAARKLANHAFVLGGGLGFGTSFLKWLAFVAAVYLLILDRTNWKTNMMTALLVPYVFFTLPHVLFSLIRGEIGKWIAIIAVILRLFFPRHFPDWLELPGAIILLTVVAPNLFADTFRNDLIGIFICLVIGCYLLSEHIKASGGFRNAFRKGNGVLNSIGILLLFIYPVWALVLNFL

SEQ ID NO: 66363 - protein, 116 aa, Setaria italica
  Transcript Sequence Number=SeqID_389
GLCDDEQKRQRTVSPVIPSSSIGRNTLWKLTSPVSWDMNPGKQQGLGFRRLQIQKGMPQSIWRVGSTITGDDIPQDPSLHVERRNAKMVQQGWLLKYSTHGQWRCIKSPSFLYACM

SEQ ID NO: 66364 - protein, 157 aa, Setaria italica
  Transcript Sequence Number=SeqID_390
  Gene Ontology: Mol. function=catalytic activity; Cellular component =chloroplast; Biological process=metabolic process
  Homolog annotation: Hit_ID=Q7X988; Match level="QueryCoverage=98%, HitCoverage=46%, E-value=1e-47, Identity=54%"; Hit description =Putative fatty acyl-CoA reductase
  Pfam annotation: Domain name=Sterile; Domain location=53-151; Score= -7.4; E_value=0.0014; Accession=PF03015.11; Description=Male sterility protein
LSSNPTSKIGELIHIMFRYFSEKPFVGAGGEGIKVKQLIVPATMASFYKHMDIHYKVPMQDTAGRGLSTTDELDRYNHLKREYNFTVALAEVFRPGTFFKRRFDDSNMQRLIAMMNKRDRELIPCDTKFINWEKYLMETHIPGVMGYESREAARARL

SEQ ID NO: 66365 - protein, 110 aa, Setaria italica
  misc_feature (104)..(104): Xaa can be any naturally occurring amino acid
  Transcript Sequence Number=SeqID_391
  Gene Ontology: Mol. function=catalytic activity; Cellular component =chloroplast; Biological process=metabolic process
  Homolog annotation: Hit_ID=Q7X988; Match level="QueryCoverage=77%, HitCoverage=21%, E-value=1e-24, Identity=60%"; Hit description =Putative fatty acyl-CoA reductase
WKLQIICSNKCKSLQISIIFVDGLQVPADTVVNGMLCVISYHPRGQSGLIYHIGSSMRNPLKIGELIHIMFRYFSEKPFVGAGGEGIKVKQLIVPATMASFISXMDIHYK

SEQ ID NO: 66366 - protein, 494 aa, Setaria italica
  Transcript Sequence Number=SeqID_392
  Gene Ontology: Mol. function=catalytic activity; Cellular component =chloroplast; Biological process=metabolic process
  Homolog annotation: Hit_ID=Q7X988; Match level="QueryCoverage=72%, HitCoverage=100%, E-value=1e-143, Identity=63%"; Hit description =Putative fatty acyl-CoA reductase
  Pfam annotation: Domain name=Epimerase; Domain location=15-337; Score= -50.7; E_value=0.0024; Accession=PF01370.13; Description=NAD dependent epimerasedehydratase family
  Pfam annotation: Domain name=NAD_binding_4; Domain location=17-318; Score=307.3; E_value=3.3e-89; Accession=PF07993.4; Description=Male sterility protein
  Pfam annotation: Domain name=Sterile; Domain location=390-488; Score=- 7.4; E_value=0.0014; Accession=PF03015.11; Description=Male sterility protein
  Pfam annotation: Domain name=adh_short; Domain location=13-187; Score= -54.7; E_value=0.055; Accession=PF00106.17; Description=short chain dehydrogenase
  Pfam module annotation: Pfam domain module=Epimerase::NAD_binding _4::Sterile::adh_short; Domain location=15-337::17-318::390-488::13 -187
MEPAGVAERLHNKTILITGATGFIAKLLVEKVLRLQPPVKRLYLLVRAGDQASATERVRSEIMQLQIFRPLREKYQKHFSSWFWDKVYPVAGDVSLKNLGIGDVALAEDILKQTDIIVHMAATVNFRERYDTALAINTMGVKHIIEIASQCAKLELLLLVSTAYVNGKESGIMLEKPFHQYRSYDGQSDLDISEEMALTEAKLKELVCRNASEDTIRRTMKKIGTQRAQKFGWMSTYVFTKAMGEMLAYEQRLRLPIAIIRPTSTTSTWKEPFPGWIEGIKTIDTWITNYGKGILKVLPADVTTVIDIVPADTVVNGMLCVISYHPRGQSGLIYHIGSSMRNPLKIGELIHIMFRYFSEKPFVGAGGEGIKVKQLIVPATMASFYKHMDIHYKVPMQDTAGRGLSTTDELDRYNHLKREYNFTVALAEVFRPGTFFKRRFDDSNMQRLIAMMNKRDRELIPCDTKFINWEKYLMETHIPGVMGYESREAARARL

SEQ ID NO: 66367 - protein, 129 aa, Setaria italica
  misc_feature (16)..(16): Xaa can be any naturally occurring amino acid
  misc_feature (21)..(21): Xaa can be any naturally occurring amino acid
  Transcript Sequence Number=SeqID_393
  Gene Ontology: Mol. function=oxidoreductase activity; Cellular component=anchored to membrane
  Homolog annotation: Hit_ID=B6U762; Match level="QueryCoverage=99%, HitCoverage=22%, E-value=1e-59, Identity=82%"; Hit description =Monocopper oxidase
GTYTNQQNYTNLDIHXGQSYXFLVTMDQNASTDYYIVASPRFISNPQWSQVTGVAILQYSNSKGKASGPLPDAPNDYYDKYYSINQAKSIRMNTSAGAARPNPQGSFHYGSINITQTFVLKNEAPFALF

SEQ ID NO: 66368 - protein, 764 aa, Setaria italica
  Transcript Sequence Number=SeqID_394
  Gene Ontology: Mol. function=binding
  Homolog annotation: Hit_ID=Q8W3E4; Match level="QueryCoverage=30%, HitCoverage=19%, E-value=1e-79, Identity=66%"; Hit description =Putative membrane-associated protein
ACSRCVGICASAERRRVLRAQGLLQQIIDAKKILDIDDPPCAIGAGALLFVLASDVQDNNLLDSETCVHFLLKLLNPPVNVVDAKTSSIGSKLLGISKFQMLNGPNKDTDSSSEDILSKVEEILLSCKEIKPLDRDGRRTARPELCSKWLALLTMEKACLSAVALEETSDMVTRVGGSFKETLRQSGGLDNIFNIMVNCHSELERLVKDTSTTAVELKEGTPLQSAALLLKCFKILENATFLSDNNKSHLLRMSHKLSPKCSLPFIGVVINTIELLSALSLLQNSSSVSRKADSKSSKVSNGGCSADSRGAALLNRHGKCKNSTNKNLLLNQRRQNCLSSKLEVSHITISSSSDACHSQRTRDCSPSISSNGASSGSFVERRSNGIGLKLNVRKDRSKANPIRGSSGWISIKAQTSDVNSRELAKKRRLSENADTGLSNGGDDPFAFDDVDQEPSSWDLFGPKQKSPQKRAKQANGKVLDNCGTAVIESPESCQPEDIFESGATSDSKAEGESSLLEDCLLASVKVLMNLANDNPSGCEHIASCGGINTMASLIIKHFPSFDFSMNKNNQLKESVSSCQDVNVNKDLSSYQNSKAQQVKAKQLRDHELDFLVAILGLLVNLVEKDSLNRVRLANARVSVNTSQNQDSGGAQRDVIPLLCSIFLASQGAGETAEAISPDDEESLLQGAREAEMMIVEAYAALVLAFLSTESMKVREAITSCLPDNSLKILVPVLEKFVTFHLQLNMMSRETHSSVTEVIDRCRLS

SEQ ID NO: 66369 - protein, 74 aa, Setaria italica
  misc_feature (60)..(60): Xaa can be any naturally occurring amino acid
  Transcript Sequence Number=SeqID_395
  Gene Ontology: Mol. function=oxidoreductase activity; Biological process=cell redox homeostasis
  Homolog annotation: Hit_ID=B6U038; Match level="QueryCoverage=63%, HitCoverage=19%, E-value=3e-12, Identity=74%"; Hit description=Thiol- disulfide isomerase and thioredoxins
CSCVRTYVSCSFSGFLYERILTFSILQDGPERMAEEAKIVQNILFPYLYDESQEVAKSFXAVCTPEFYCLKKDR

SEQ ID NO: 66370 - protein, 183 aa, Setaria italica
  Transcript Sequence Number=SeqID_396
  Gene Ontology: Mol. function=oxidoreductase activity; Biological process=cell redox homeostasis
  Homolog annotation: Hit_ID=B6U038; Match level="QueryCoverage=100%, HitCoverage=75%, E-value=1e-100, Identity=93%"; Hit description =Thiol-disulfide isomerase and thioredoxins
  Pfam annotation: Domain name=AhpC-TSA; Domain location=5-135; Score =57.8; E_value=4.2e-14; Accession=PF00578.13; Description=AhpCTSA family
  Pfam annotation: Domain name=Redoxin; Domain location=4-158; Score =41.3; E_value=3.7e-09; Accession=PF08534.2; Description=Redoxin
  Pfam module annotation: Pfam domain module=AhpC-TSA::Redoxin; Domain location=5-135::4-158
TGVAVGFRAPEFELPEPLTGKLWTLDDFEGNPALLVMFICNHCPFVKHLKKDIAKLTSFYMEKGLGAVAISSNSIRTHPQDGPERMAEEAKLFKYPFPYLYDESQEVAKAFRAVCTPEFYLFKKDGRRPFELFYHGQFDDSRPSNNVPVTGRDLSRAIDCALSGQELPFVEKPSVGCSIKWHP

SEQ ID NO: 66371 - protein, 86 aa, Setaria italica
  Transcript Sequence Number=SeqID_397
VQVAIATVIEEASQGNARPSVALVVRHKIRSSEENRKEQPWSSRYRCASSLHKIRVQMLSSQDVACKHVQFVTRLRCHHKREADLR

SEQ ID NO: 66372 - protein, 103 aa, Setaria italica
  Transcript Sequence Number=SeqID_398
  Gene Ontology: Mol. function=methyltransferase activity; Biological process=methylation
  Homolog annotation: Hit_ID=B9STP1; Match level="QueryCoverage=98%, HitCoverage=33%, E-value=1e-28, Identity=45%"; Hit description =Pentatricopeptide repeat-containing protein, putative
  Pfam annotation: Domain name=PPR; Domain location=16-50; Score=43.1; E_value=1.1e-09; Accession=PF01535.12; Description=PPR repeat
  Pfam annotation: Domain name=PPR; Domain location=51-85; Score=2.5; E_ value=4.5; Accession=PF01535.12; Description=PPR repeat
  Pfam module annotation: Pfam domain module=PPR::PPR; Domain location =16-50::51-85
GKARALFYQCTEKDLILWTAMINACVQDGSFEEALSLFRDMQLQRVEPDRFTVVTLLTCCANIGALDQGEWIHQYAEGRKMKIDAVLGTALIEMYSKCGHVEF

SEQ ID NO: 66373 - protein, 296 aa, Setaria italica
  Transcript Sequence Number=SeqID_399
  Gene Ontology: Mol. function=protein serine/threonine kinase activity; Cellular component=plasma membrane; Biological process =protein amino acid phosphorylation
  Homolog annotation: Hit_ID=B9SHD1; Match level="QueryCoverage=100%, HitCoverage=47%, E-value=1e-143, Identity=81%"; Hit description =BRASSINOSTEROID INSENSITIVE 1-associated receptor kinase 1, putative
  Pfam annotation: Domain name=Pkinase; Domain location=2-245; Score =41.3; E_value=6e-11; Accession=PF00069.17; Description=Protein kinase domain
  Pfam annotation: Domain name=Pkinase_Tyr; Domain location=1-245; Score=24.2; E_value=2.5e-15; Accession=PF07714.9; Description =Protein tyrosine kinase
  Pfam module annotation: Pfam domain module=Pkinase::Pkinase_Tyr; Domain location=2-245::1-245
RLKDYNAVGGEVQFQTEVEVISLAVHRNLLRLIGFCTTECERLLVYPYMPNGSVASQLREHVNGKPALDWSRRKRIALGTARGLLYLHEQCDPKIIHRDVKASNVLLDEYFEAIVGDFGLAKLLDHQESHVTTAVRGTVGHIAPEYLSTGQSSEKTDVFGFGVLLVELITGQKALDFGRVANQKGGVLDWVKKLHQEKQLSMMVDKDLGSNYDRVELEEMVQVALLCTQYYPSHRPRMSEVIRMLEGDGLAEKWEASQNVDTPKSVSSELLPPKYMDFAADESSLGLEAMELSGPR

SEQ ID NO: 66374 - protein, 359 aa, Setaria italica
  misc_feature (308)..(308): Xaa can be any naturally occurring amino acid
  Transcript Sequence Number=SeqID_400
  Gene Ontology: Mol. function=protein serine/threonine kinase activity; Cellular component=plasma membrane; Biological process =protein amino acid phosphorylation
  Homolog annotation: Hit_ID=Q5VQL8; Match level="QueryCoverage=81%, HitCoverage=69%, E-value=1e-146, Identity=85%"; Hit description =Putative brassinosteroid insensitive 1-associated receptor kinase 1
  Pfam annotation: Domain name=LRR_1; Domain location=27-49; Score =12.9; E_value=1; Accession=PF00560.25; Description=Leucine Rich Repeat
  Pfam annotation: Domain name=LRR_1; Domain location=3-25; Score=19.6; E_value=0.013; Accession=PF00560.25; Description=Leucine Rich Repeat
  Pfam annotation: Domain name=LRR_1; Domain location=51-74; Score=8.5; E_value=7.3; Accession=PF00560.25; Description=Leucine Rich Repeat
  Pfam annotation: Domain name=Pkinase; Domain location=184-358; Score=- 30.2; E_value=1.1e-06; Accession=PF00069.17; Description=Protein kinase domain
  Pfam annotation: Domain name=Pkinase_Tyr; Domain location=184-358; Score=-48.9; E_value=1.8e-10; Accession=PF07714.9; Description =Protein tyrosine kinase
  Pfam module annotation: Pfam domain module=LRR_1::LRR_1::LRR _1::Pkinase::Pkinase_Tyr; Domain location=27-49::3-25::51-74::184 -358::184-358
LGMLKTLDMSDNQLTGSIPSSLGNLRNLNYLKLNNNSLSGVLPDSLATIDGLALVDLSFNNLSGPLPKISARTFIIAGNPMICGAKSGDNCSSVSLDPLSYPPDDLKTQPQQGIVKGHRIATICGATVGSVAFATIVVGMLLWWRHRRNQQIFFDVNDQYDPEVCLGHLKRYAFKELRAATNNFNSKNILGEGGYGIVYKGYLRDGSVVAVKRLKDYNAVGGEVQFQTEVEVISLAVHRNLLRLIGFCTTECERLLVYPYMPNGSVASQLREHVNGKPALDWSRRKRIALGTARGLLYLHEQCDPKIXHRDVKASNVLLDEYFEAIVGDFGSTQLRELQIQTHQSSLMTGQLTDTPVLY

SEQ ID NO: 66375 - protein, 109 aa, Setaria italica
  misc_feature (79)..(79): Xaa can be any naturally occurring amino acid
  Transcript Sequence Number=SeqID_401
  Homolog annotation: Hit_ID=Q67VB7; Match level="QueryCoverage=89%, HitCoverage=21%, E-value=7e-27, Identity=65%"; Hit description =Ankyrin repeat protein-like
MAARRETPHTMKPRLLKAVATGDLGLLEQALGLKPSPATAEQGDLSCLDGVTAGGGSALHVAASRGHLELVKMVCAQAXLLIRRRNHLGDTALICAARAGHADVADYLA

SEQ ID NO: 66376 - protein, 121 aa, Setaria italica
  Transcript Sequence Number=SeqID_402
EGRGGREVGQRRDACVLLLRHRLSSVASCRQNFVPQSFCSTKLFLFRRGLASLESGQVYWVVAISSPPVSSSVRTLEFPLLLVMGMGGCLDSKKNRKLHWELVKAATIKYNLKAVATTTEP

SEQ ID NO: 66377 - protein, 160 aa, Setaria italica
  misc_feature (13)..(13): Xaa can be any naturally occurring amino acid
  Transcript Sequence Number=SeqID_403
  Gene Ontology: Mol. function=metal ion binding; Cellular component =plasma membrane
  Homolog annotation: Hit_ID=B9SJF7; Match level="QueryCoverage=85%, HitCoverage=12%, E-value=1e-27, Identity=51%"; Hit description=Ran GTPase binding protein, putative
  Pfam annotation: Domain name=K-box; Domain location=2-81; Score= -18.7; E_value=0.019; Accession=PF01486.9; Description=K-box region
LSIAKTAADSLAXKTNEMLNQEVERLRAQVDNLRHRCELQELELQKSAKKVQEAMTLVSEESAKSKAAKEVIKSLTAQLKDMAESLPPDQGAYDGSEAKQVHVPNGIEMYASIYTSMNGIHQPRNESVSAVSTPSLNMGRALHPNGISSQHKYSEVLNLR

SEQ ID NO: 66378 - protein, 85 aa, Setaria italica
  Transcript Sequence Number=SeqID_404
  Homolog annotation: Hit_ID=B9GL79; Match level="QueryCoverage=78%, HitCoverage=14%, E-value=6e-18, Identity=62%"; Hit description =Proline transporter (Fragment)
  Subcellular localization annotation: CTP_CleavageSite=52; ConfidenceScore=5.12e-01
LSCALLTATIVGVVGAVGFIPLDFVLPVLMYNMALAPPRRSPVFLANTAVMVLFAGVGVIGAFASIRKLVLDAGQFKLFSNNVVD

SEQ ID NO: 66379 - protein, 87 aa, Setaria italica
  Transcript Sequence Number=SeqID_405
MPDADVDAEMRDAAAAAAAPAGDDGEDDTGEEEDDEDDIDDEDEEEPTAPVPVPPVEPPVPAPVSVLPGNPNQLTLLFQGEVYVFES

SEQ ID NO: 66380 - protein, 145 aa, Setaria italica
  misc_feature (39)..(39): Xaa can be any naturally occurring amino acid
  Transcript Sequence Number=SeqID_406
  Gene Ontology: Mol. function=binding
  Homolog annotation: Hit_ID=Q8H4B6; Match level="QueryCoverage=95%, HitCoverage=65%, E-value=6e-24, Identity=41%"; Hit description =Brassinolide responsible protein-like protein
AEALSNLSMENPANCSSILEETRYDLIDNLKKMILNDEXCICAESLLENLCSHSRNKLQQQESREHLSSALQGVLVKMMVAEGKQLEFLIGLASQIYTVIPESFAHKLESHANATGLVQKLVVTLNSNKKPSHEYPRMRRVVVEM

SEQ ID NO: 66381 - protein, 243 aa, Setaria italica
  Transcript Sequence Number=SeqID_407
  Gene Ontology: Mol. function=amino acid binding; Biological process =nitrogen compound metabolic process
  Homolog annotation: Hit_ID=B9S2P0; Match level="QueryCoverage=99%, HitCoverage=52%, E-value=8e-70, Identity=57%"; Hit description=Amino acid binding protein, putative
  Pfam annotation: Domain name=ACT; Domain location=135-198; Score =39.2; E_value=1.6e-08; Accession=PF01842.17; Description=ACT domain
  Pfam annotation: Domain name=ACT; Domain location=58-124; Score=17.9; E_value=0.043; Accession=PF01842.17; Description=ACT domain
  Pfam module annotation: Pfam domain module=ACT::ACT; Domain location =135-198::58-124
ALANFAVGSAPHHVDRRLHQLMHADVDVDGDAAPAALAAGEGDRPVVTVEHCEEKSYSVVNVKCRDRSKLLFDIVCTLTDMQYVVFHAAVSSEASYGIQELYIRRKDGKTLLKNEAERVIRCLEAAISRRVSEGFTLELCGRDRVGLLSDVTRVLREHGLTVARADVTTVGGQATNVFYVRNPSGQPVDMKTIEGLRGRVGQTIMLSAKSVPANVAKAPEPASGGLARASFFSFGNLFAKLRA

SEQ ID NO: 66382 - protein, 337 aa, Setaria italica
  Transcript Sequence Number=SeqID_408
  Gene Ontology: Cellular component=membrane
  Homolog annotation: Hit_ID=B6TBR3; Match level="QueryCoverage=100%, HitCoverage=86%, E-value=1e-165, Identity=86%"; Hit description =Vacuolar membrane protein
  Pfam annotation: Domain name=DUF606; Domain location=97-229; Score= -60.5; E_value=0.054; Accession=PF04657.5; Description=Protein of unknown function, DUF606
  Pfam annotation: Domain name=TPT; Domain location=183-327; Score= -35.1; E_value=0.073; Accession=PF03151.8; Description=Triose -phosphate Transporter family
  Pfam annotation: Domain name=UAA; Domain location=54-333; Score= -171.0; E_value=0.083; Accession=PF08449.3; Description=UAA transporter family
  Pfam module annotation: Pfam domain module=DUF606::TPT::UAA; Domain location=97-229::183-327::54-333
  Subcellular localization annotation: CTP_CleavageSite=45; ConfidenceScore=5.23e-01
PLSFLKDFIYNSMRRHSGNTGASKITSKSSFGGSAPLKNGEFQKMLEMESQKTIVIPVVEETKPLIYGITEINDGILKEKQLSTKEIATYGLYLCPLWFVTEYLSNAALARTSVASTTVLSSTSGLFTLFIGVLLGQDSINAAKIIAVFISMAGVVMTTMGQTWASDESEVGKSGATERTLLGDMFGLMSAIAYGLFTVLLKKFCGEEGEKVDVQKLFGYLGLFSLVALWWLVWPLTALGIEPKFSMPHSAKVDEVVVANGLIGSVLSDYFWALSVVWTTPLVATLGMSLTIPLAMVADMIIHGRHYSAVYILGSVQVFSGFVIANLADRFSRSLGL

SEQ ID NO: 66383 - protein, 109 aa, Setaria italica
  Transcript Sequence Number=SeqID_409
MPLFIAAEELAVVADTAAVADTAAVAERADAEQTCALLEQRYASAEFDRSQAEVAELSAAAERRAAELASSQVEIHQLRIQAIAKDGEVERLKVEIAELQKSKCHWLEL

SEQ ID NO: 66384 - protein, 84 aa, Setaria italica
  Transcript Sequence Number=SeqID_410
KLQKVSYGNMKVKPQPKDIQNNGLIVCTLSLPLKHYTSTSLLICVTCISSFNSEYTNFNLFRIHQCQPRLCYTWFVISKLIRNH

SEQ ID NO: 66385 - protein, 274 aa, Setaria italica
  Transcript Sequence Number=SeqID_411
  Gene Ontology: Mol. function=substrate-specific transmembrane transporter activity; Cellular component=integral to membrane; Biological process=transmembrane transport
  Homolog annotation: Hit_ID=B6TI70; Match level="QueryCoverage=100%, HitCoverage=56%, E-value=5e-98, Identity=69%"; Hit description=Major myo-inositol transporter iolT
  Pfam annotation: Domain name=Sugar_tr; Domain location=1-271; Score= -54.5; E_value=8.2e-07; Accession=PF00083.16; Description=Sugar (and other) transporter
PESPRWLAMKGRVAEAKAVLDKTSDTPAEAEQRLLEIEDVVNGGGRSGEGSGGGAWKEVATKAGVRRVLAIVLTLQFFQQSSGIDSVVLYGPRVLAMAGVTSNTLLLSLNVLFGVAKAGSILIAMALADRVGRRPLLLASTGGMTASLLVLGSLFAAFTGAKDDAAVAAVSFAAVVAFVVSFSVGFGPLAWVYSSEILPLRLRGQGAGLGTAMNRITSGVVTMTFISLYQAITMAGAFYLYAAIAAASFVFVYACLPETRGRSLEDMEDLFHTK

SEQ ID NO: 66386 - protein, 83 aa, Setaria italica
  Transcript Sequence Number=SeqID_412
  Gene Ontology: Mol. function=aspartic-type endopeptidase activity; Cellular component=chromatin; Biological process=RNA-dependent DNA replication
  Homolog annotation: Hit_ID=Q8SA93; Match level="QueryCoverage=95%, HitCoverage=2%, E-value=3e-11, Identity=39%"; Hit description =Putative polyprotein
VISWRWEAYRTYSARSAYHMFFRGSTVSPIFRTVWCTWAPLKVKFFICLAAKGRIWTAARRKRHGLQNTDECNLCGQEAETVV

SEQ ID NO: 66387 - protein, 311 aa, Setaria italica
  misc_feature (8)..(8): Xaa can be any naturally occurring amino acid
  misc_feature (143)..(143): Xaa can be any naturally occurring amino acid
  misc_feature (166)..(166): Xaa can be any naturally occurring amino acid
  misc_feature (263)..(263): Xaa can be any naturally occurring amino acid
  Transcript Sequence Number=SeqID_413
  Gene Ontology: Mol. function=protein serine/threonine kinase activity; Biological process=protein amino acid phosphorylation
  Homolog annotation: Hit_ID=B9MSR9; Match level="QueryCoverage=100%, HitCoverage=76%, E-value=1e-134, Identity=75%"; Hit description=GSK -like kinase
  Pfam annotation: Domain name=Pkinase; Domain location=1-283; Score =164.1; E_value=4.1e-46; Accession=PF00069.17; Description=Protein kinase domain
  Pfam annotation: Domain name=Pkinase_Tyr; Domain location=2-264; Score=-103.4; E_value=7.4e-07; Accession=PF07714.9; Description =Protein tyrosine kinase
  Pfam module annotation: Pfam domain module=Pkinase::Pkinase_Tyr; Domain location=1-283::2-264
ETGETVAXKKVLQDKRYKNRELQTMRVLDHPNVVALKHCFFSKTEKEELYLNLVLEYVPETAHRVIKHYNKMNQRMPLIYAKLYMYQICRALAYIHNCIGVCHRDIKPPKSPGISGLVISICLNTSLFNYKCSFRWFDAYYFXLQVNPHTHQLKLCDFGSAKVLGXKGETKLFSYICSRYYRAPELIFGATEYTTAIDVWSAGCVLAELLLGQPLFPGDSGVDQLVEIIKVLGTPTREEIKCMNPNYTEFKFPQIKAHPWHKXLQYSPNLRSTALEALIHPFFDELRDPNTRLPNGRFLPPLFNFKPHELK

SEQ ID NO: 66388 - protein, 410 aa, Setaria italica
  Transcript Sequence Number=SeqID_414
  Gene Ontology: Mol. function=protein serine/threonine kinase activity; Biological process=protein amino acid phosphorylation
  Homolog annotation: Hit_ID=Q1AMT7; Match level="QueryCoverage=100%, HitCoverage=100%, E-value=0.0, Identity=92%"; Hit description =Glycogen synthase kinase
  Pfam annotation: Domain name=Pkinase; Domain location=74-358; Score =312.3; E_value=1e-90; Accession=PF00069.17; Description=Protein kinase domain
  Pfam annotation: Domain name=Pkinase_Tyr; Domain location=74-358; Score=-11.8; E_value=6.1e-13; Accession=PF07714.9; Description =Protein tyrosine kinase
  Pfam module annotation: Pfam domain module=Pkinase::Pkinase_Tyr; Domain location=74-358::74-358
MASAGVARSSLGFQNDTSSSSDADRLPNELGNMSIRDDKDIEDIVVNGNGTEPGHIIVTSIDGRNGQAKQTISYMAERVVGHGSFGTVFQAKCLETGETVAIKKVLQDKRYKNRELQTMRVLDHPNVVALKHCFFSKTEKEELYLNLVLEYVPETAHRVIKHYNKMNQRMPLIYAKLYMYQICRALAYIHNCIGVCHRDIKPQNLLVNPHTHQLKLCDFGSAKVLVKGEPNISYICSRYYRAPELIFGATEYTTAIDVWSAGCVLAELLLGQPLFPGDSGVDQLVEIIKVLGTPTREEIKCMNPNYTEFKFPQIKAHPWHKIFHKRMPAEAVDLVSRLLQYSPNLRSTALEALIHPFFDELRDPNTRLPNGRFLPPLFNFKPHELKSMPMDFLVKLIPEHARKQCAFVGW

SEQ ID NO: 66389 - protein, 86 aa, Setaria italica
  Transcript Sequence Number=SeqID_415
CKVEQVTATRSAVCKVVTCGDAIAAVAKPMSPALPSRDKNKVVSCYDKVKVIYEPEKNKFQAIQASQIRCSIFPTTILKHNYKRKS

SEQ ID NO: 66390 - protein, 59 aa, Setaria italica
  misc_feature (25)..(25): Xaa can be any naturally occurring amino acid
  Transcript Sequence Number=SeqID_416
VTSSGYMLLRALFSLFNETLIKVEXKGDMSAVLLTYKSVTFKLVKRLPPKQALKGSISL

SEQ ID NO: 66391 - protein, 149 aa, Setaria italica
  misc_feature (85)..(85): Xaa can be any naturally occurring amino acid
  Transcript Sequence Number=SeqID_417
  Homolog annotation: Hit_ID=Q2QUQ5; Match level="QueryCoverage=100%, HitCoverage=56%, E-value=3e-58, Identity=44%"; Hit description =Pentatricopeptide, putative, expressed
  Pfam annotation: Domain name=PPR; Domain location=110-144; Score =14.9; E_value=0.15; Accession=PF01535.12; Description=PPR repeat
  Pfam annotation: Domain name=PPR; Domain location=40-74; Score=33.2; E_value=1.1e-06; Accession=PF01535.12; Description=PPR repeat
  Pfam module annotation: Pfam domain module=PPR::PPR; Domain location =110-144::40-74
KSGLDSVVNLSNALVDMYGKFGDLEASMRVFNGMPEKNEVSWNSALGCFVHAGFYEDVLELFRAMSEQGVTPGSVTLSSLLPALXDLGYFHLGKEVHGYSIRRAMDLDIFIANSLMDMYAKFGCSEKASAIFEKIEARNVVSIGKLVLN

SEQ ID NO: 66392 - protein, 130 aa, Setaria italica
  Transcript Sequence Number=SeqID_418
MAAPALQVALLAAVLLLPFLSVPAEAQTKKFCLTQFAIASQACAILPPTSPEHHHHDHDEDEDEDNDDDEDEDEDNDEDSGGGGGGDRRRDRDQEKMKSGLVSKPASKSGSVASKPASSMITVEADDEVD

SEQ ID NO: 66393 - protein, 72 aa, Setaria italica
  Transcript Sequence Number=SeqID_419
  Subcellular localization annotation: CTP_CleavageSite=42; ConfidenceScore=5.05e-01
ELSHHCFRAKISCTSTATLATSYKLSYRVAAPDQPQPTAVGVAMAPAAASLGTAVQAEQRHKPRPYHPSPWG

SEQ ID NO: 66394 - protein, 93 aa, Setaria italica
  Transcript Sequence Number=SeqID_420
LLVCYYRLQSTDQPRAESGHEHFRTRGIPPLAVAQSKWRPQVIHAATWRAHTGRQLIQSDKAAAASDATTSVSYIFCHAATGARDCSTEKAPS

SEQ ID NO: 66395 - protein, 51 aa, Setaria italica
  Transcript Sequence Number=SeqID_421
YPQIIRPTSHEKTEGDMKEKKESGGRGSDAQLTIYSLSRAAALTYATKDEL

SEQ ID NO: 66396 - protein, 115 aa, Setaria italica
  misc_feature (38)..(38): Xaa can be any naturally occurring amino acid
  misc_feature (109)..(109): Xaa can be any naturally occurring amino acid
  Transcript Sequence Number=SeqID_422
  Gene Ontology: Mol. function=oxidoreductase activity; Biological process=metabolic process
  Homolog annotation: Hit_ID=Q7XMT5; Match level="QueryCoverage=100%, HitCoverage=36%, E-value=2e-31, Identity=65%"; Hit description =OSJNBa0029L02.2 protein
MWGLLRRRMSPSGFSPSSTAEEVTAGIDGSGLVAIVTXASSGIGAETCRVLALRGVHVVMGVRNLSTGSQVREKIVEQVPKAKIEMLELDLSSMSSVRRFVEKFNALDXPLNILM

SEQ ID NO: 66397 - protein, 153 aa, Setaria italica
  misc_feature (9)..(9): Xaa can be any naturally occurring amino acid
  misc_feature (24)..(24): Xaa can be any naturally occurring amino acid
  Transcript Sequence Number=SeqID_423
SALIQEDSXGRPLLIATKVLEGTXHYVVHPNGSSMFVARMGEPSTEAFPWQTDGESRNVDVERGFAGEGIATGYGFRYPGSKPGSLFVLQDGQLAFVWKETGAVLTLKRLNLEELLKKGERVPALQPVPNFAYLTKSYSNVFTGFPGSSASPR

SEQ ID NO: 66398 - protein, 89 aa, Setaria italica
  Transcript Sequence Number=SeqID_424
LELPVMFKCHLSWGPQAGHSSWWQTIQMPSLKGPQAGHSWYLNVALDATLWDTAIPSMPLPARGSSAMPAKYMRHYPVNRMHLYTLPGN

SEQ ID NO: 66399 - protein, 715 aa, Setaria italica
  Transcript Sequence Number=SeqID_425
  Gene Ontology: Mol. function=protein serine/threonine kinase activity; Cellular component=plasma membrane; Biological process =protein amino acid phosphorylation
  Homolog annotation: Hit_ID=C0LGM5; Match level="QueryCoverage=99%, HitCoverage=99%, E-value=0.0, Identity=47%"; Hit description=Leucine- rich repeat receptor-like protein kinase (Fragment)
  Pfam annotation: Domain name=LRR_1; Domain location=13-35; Score=9.5; E_value=4.6; Accession=PF00560.25; Description=Leucine Rich Repeat
  Pfam annotation: Domain name=LRR_1; Domain location=176-198; Score =8.5; E_value=7.2; Accession=PF00560.25; Description=Leucine Rich Repeat
  Pfam annotation: Domain name=LRR_1; Domain location=200-222; Score =9.8; E_value=4; Accession=PF00560.25; Description=Leucine Rich Repeat
  Pfam annotation: Domain name=LRR_1; Domain location=224-246; Score =14.0; E_value=0.64; Accession=PF00560.25; Description=Leucine Rich Repeat
  Pfam annotation: Domain name=LRR_1; Domain location=248-270; Score =17.1; E_value=0.075; Accession=PF00560.25; Description=Leucine Rich Repeat
  Pfam annotation: Domain name=LRR_1; Domain location=272-293; Score =10.5; E_value=3; Accession=PF00560.25; Description=Leucine Rich Repeat
  Pfam annotation: Domain name=LRR_1; Domain location=295-317; Score =8.6; E_value=7; Accession=PF00560.25; Description=Leucine Rich Repeat
  Pfam annotation: Domain name=LRR_1; Domain location=36-57; Score=3.4; E_value=67; Accession=PF00560.25; Description=Leucine Rich Repeat
  Pfam annotation: Domain name=Pkinase; Domain location=436-707; Score =146.5; E_value=8.4e-41; Accession=PF00069.17; Description=Protein kinase domain
  Pfam annotation: Domain name=Pkinase_Tyr; Domain location=436-707; Score=73.8; E_value=6.4e-19; Accession=PF07714.9; Description =Protein tyrosine kinase
  Pfam module annotation: Pfam domain module=LRR_1::LRR_1::LRR_1::LRR _1::LRR_1::LRR_1::LRR_1::LRR_1::Pkinase::Pkinase_Tyr; Domain location= 13-35::176-198::200-222::224-246::248-270::272-293::295-317::36 -57::436-707::436-707
FWTDPKELGQCSNLKFLNLSLNRLSGLLDKDLCPHCMSVFDVSGNELSGSIPACVNKVCASQLMLDEMTSSYSSVLMSKTLAELPFSFCNSGQCSVVYHNFANNNLEGHLTSLPFSADRFGNKMTYVFVVDHNKFSGSLDAILLEKCSILKGLIVSFRDNKISGQLTAEFSTKCTAIRALDLAGNQISGVMPANVGLLGALVKMDMSRNFLEGQIPASFKDFKSLRFLSLAGNNLSGRIPSCLGQLRSLKVLDLSSNSLAGKIPSNLVTLRDLSVLLLNNNRLSGNIPDLTSSPSLSIFNVSFNDLSGPLPSKIHSLTCDSVLGNPSLLPCEMSALSNPLANVRALTETDNNPPADNTAPDGSSSGGGFSKIEIASITSASAIVAVLLALIILYIYTRKCASRPSRRSLRRREVTVFVDIGAPLTYETVLRASGSFNASNCIGSGGFGATYKAEVAPGKLVAIKRLAIGRFQGIQQFQAEVKTLGRCRHPNLVTLIGYHLSDNEMFLIYNFLPGGNLERFIQERNKRPIDWRMLHKIALDVARALAYLHDNCVPRILHRDVKPSNILLDNDYTAYLSDFGLARLLGNSETHATTGVAGTFGYVAPEYAMTCRVSDKADVYSYGVVLLELISDKKALDPSFSPYGNGFNIVAWACMLLQKGRAREFFIEGLWDVAPHDDLVEILHLGIKCTVDSLSSRPTMKQVVRRLKELRPPSY

SEQ ID NO: 66400 - protein, 54 aa, Setaria italica
  Transcript Sequence Number=SeqID_426
LSSFLTPNLQMRRGMLSSQESKADTEHQLRVWRSRRCEAGEGMDHLGLNCKVMS

SEQ ID NO: 66401 - protein, 98 aa, Setaria italica
  Transcript Sequence Number=SeqID_427
  Gene Ontology: Mol. function=protein serine/threonine kinase activity; Cellular component=cell surface; Biological process =protein amino acid phosphorylation
  Homolog annotation: Hit_ID=Q01K03; Match level="QueryCoverage=77%, HitCoverage=71%, E-value=2e-28, Identity=73%"; Hit description =H0525E10.5 protein
MPLIPTLCGFLLFLYILPCCAAKDTITPGQALVGSEKLISSNGKFALGFFQTGSKSSQNTLNWYLGIWFNRVPKLTQVWVANGDNPLTDQTSSELKIS

SEQ ID NO: 66402 - protein, 151 aa, Setaria italica
  misc_feature (69)..(69): Xaa can be any naturally occurring amino acid
  Transcript Sequence Number=SeqID_428
  Gene Ontology: Mol. function=sequence-specific DNA binding; Cellular component=nucleus; Biological process=regulation of transcription, DNA-dependent
  Homolog annotation: Hit_ID=Q69T58; Match level="QueryCoverage=92%, HitCoverage=19%, E-value=5e-58, Identity=76%"; Hit description =Homeobox-leucine zipper protein ROC8
  Pfam annotation: Domain name=START; Domain location=10-148; Score= -27.7; E_value=0.021; Accession=PF01852.11; Description=START domain
LGPRTGGGHDGGREVLNVDTYDSIFAKPGGSFRGPDVHVEGSRDSGLVFMSAIGLVDMFMDSSKWMEFXPGIVAKARTIDVLVNGMAGRSESLVLMYEELHVTSPVVPTREFCFLRYCRQIEHGLWAIADVSVDLQPRDARFGAPPSRSCR

SEQ ID NO: 66403 - protein, 397 aa, Setaria italica
  Transcript Sequence Number=SeqID_429
GDPGGRRLPPPPPRRKGKDVGSRVLVSGAMLVEVETVLQTQEPVIRPSWDTFASSLSGNWKGVGAVFSPITAEMEPVGVGSKEEYLYDCYTLSHIERSFDGDHGSEIRRKTNWVPINPFGEAEKQIASYDGGSYDASSGKGTADLPSYESFELNRSAVLDEETFAMEPGIVFFEDGSYSRGPVDIAISDYDESKYFLSPTYKFEQCLVKGCHKRLRIVHTIEFNEGGANIQIVRVAVYEEKWASPASIHVEDSDTLVDLKPFSQRRRTKPSELTGSWKVYEVSATPIFSDEMQELEGGAPFVYLCMETVKKRTLPESSVFFGEEEMLDMQDVTVLWLPGGVTAYVDISEDGVLCIGVGWYSEEGINLVMERDYGTDGRLREVRSKTEVKRRWYQSVP

SEQ ID NO: 66404 - protein, 52 aa, Setaria italica
  Transcript Sequence Number=SeqID_430
RQACQYLDGELEMREEAVLVFSDVDSLDVGSSAFLTWSSCNTMSGGSLLAGR

SEQ ID NO: 66405 - protein, 56 aa, Setaria italica
  Transcript Sequence Number=SeqID_431
NKLVKEPILIPSSLQHSRSALCSAIQLSHVSSFKFYFCSKYKTIVPRQVLWITIDK

SEQ ID NO: 66406 - protein, 54 aa, Setaria italica
  Transcript Sequence Number=SeqID_432
RFMIAAVILVSRHTKSIKALQSLESLKIKIYCVASRISASNKGSTSSIILDQSA

SEQ ID NO: 66407 - protein, 54 aa, Setaria italica
  Transcript Sequence Number=SeqID_433
SFIMLSLLQCDIRNADCSTHHPGLLHPAGALNSLTSQVLKSLMLLTVLFRFHDC

SEQ ID NO: 66408 - protein, 89 aa, Setaria italica
  Transcript Sequence Number=SeqID_434
  Gene Ontology: Mol. function=metal ion binding
  Homolog annotation: Hit_ID=Q25A03; Match level="QueryCoverage=98%, HitCoverage=17%, E-value=3e-38, Identity=84%"; Hit description =H0821G03.13 protein
  Pfam annotation: Domain name=BRAP2; Domain location=3-80; Score=40.1; E_value=8.5e-09; Accession=PF07576.4; Description=BRCA1-associated protein 2
SLCGPYLERASDIRFIRDDGVEDRYSVLVEFEDQKSADGFYLDLNGWRFSSSEGEVCHVLFIAAVQYTPSSEIATTPPAGSTELPICPV

SEQ ID NO: 66409 - protein, 45 aa, Setaria italica
  Transcript Sequence Number=SeqID_435
VQVRVLMTLIPLSQVPSPNLSHASPLGTGAWVHPVSKGTCSGPPR

SEQ ID NO: 66410 - protein, 371 aa, Setaria italica
  misc_feature (157)..(157): Xaa can be any naturally occurring amino acid
  Transcript Sequence Number=SeqID_436
  Gene Ontology: Mol. function=protein serine/threonine kinase activity; Biological process=protein amino acid phosphorylation
  Homolog annotation: Hit_ID=B6THZ7; Match level="QueryCoverage=99%, HitCoverage=91%, E-value=0.0, Identity=89%"; Hit description=Shaggy -related protein kinase eta
  Pfam annotation: Domain name=Pkinase; Domain location=30-315; Score =298.0; E_value=2e-86; Accession=PF00069.17; Description=Protein kinase domain
  Pfam annotation: Domain name=Pkinase_Tyr; Domain location=30-280; Score=-24.7; E_value=4.4e-12; Accession=PF07714.9; Description =Protein tyrosine kinase
  Pfam module annotation: Pfam domain module=Pkinase::Pkinase_Tyr; Domain location=30-315::30-280
MIEGGDPVTGHIISTTIGGKNGEPKRTISYMAERVVGTGSFGIVFQAKCLETGETVAIKKVLQDKRYKNRELQIMRSMDHCNVVSLKHCFFSTTSRDELFLNLVMEFVPESLYRVLKHYSNMNQRMPLIYVKLYTYQIFRGLAYIHTVPGVCHRDVXKPQNLLVDPLTHQVKICDFGSAKMLVKGEANISYICSRYYRAPELIFGATEYTTSIDIWSAGCVLAELLLGQPLFPGESAVDQLVEIIKVLGTPTREEIRCMNPNYTEFRFPQIKAHPWHKIFHKRMPPEAIDLASRLLQYSPNLRCTALEACAHPFFDELREPHARLPNGRPFPPLFNFKQELANASPELINRLIPDHARRHLGLTFLPATGP

SEQ ID NO: 66411 - protein, 385 aa, Setaria italica
  Transcript Sequence Number=SeqID_437
  Homolog annotation: Hit_ID=UPI0000196D09; Match level="QueryCoverage =94%, HitCoverage=40%, E-value=1e-103, Identity=51%"; Hit description= ubiquitin family protein
  Pfam annotation: Domain name=PPR; Domain location=118-152; Score=3.6; E_value=3.3; Accession=PF01535.12; Description=PPR repeat
  Pfam annotation: Domain name=PPR; Domain location=225-259; Score=6.6; E_value=1.5; Accession=PF01535.12; Description=PPR repeat
  Pfam annotation: Domain name=PPR; Domain location=295-329; Score =13.8; E_value=0.21; Accession=PF01535.12; Description=PPR repeat
  Pfam module annotation: Pfam domain module=PPR::PPR::PPR; Domain location=118-152::225-259::295-329
FAQEGRDAYCALEVFDWLRRANRVDGETMELMAAIACGWIERLVGAGGDVADVAALLGEMDCVGLRPGFSLVEKAVALYWDRGEREHAVEFVRDVLRRGGLGAGGEHGSADGDGERGGPVGYLAWKMMMDGDYREAVRLVIEFKESGLKPEVYSYLIGLTALVKEQKEFSKALRKLNSSVKDGSISKLDAESMHSIEKYQSELLSDGVLLSNWAVEEGSREVLGLVHERLLSLYTCAGCGLEAEHQLWEMKLLGREPDTQLYDVVLAICASQGEAAAVRRLLAGVESTSAGRRKKSMSWLLRGYVKGGFILDASETLMQMLDMGIFPDYLDRAAVLTALRRNIQESGSLESYMKLCKRLSETDLIGPCIVYLYVRKFKLWMMHML

SEQ ID NO: 66412 - protein, 317 aa, Setaria italica
  misc_feature (260)..(260): Xaa can be any naturally occurring amino acid
  misc_feature (269)..(269): Xaa can be any naturally occurring amino acid
  misc_feature (291)..(291): Xaa can be any naturally occurring amino acid
  Transcript Sequence Number=SeqID_438
  Gene Ontology: Mol. function=acyltransferase activity; Cellular component=plastoglobule; Biological process=metabolic process
  Homolog annotation: Hit_ID=B9REV2; Match level="QueryCoverage=100%, HitCoverage=43%, E-value=1e-59, Identity=41%"; Hit description =Catalytic, putative
PHIDLILVLVNPATSYEKSSIQQLLSFFSLFSDQACMAITALLNYNIDNEAHMAVSSMINGKHPLEELNRLTSNMSSFLKHSNILDKIPKDTMKWKMKLIKRAASYANYRLQSVQAEVLLLASCADKLLPSKAEADRLQKLLPKCTIYFFDKHGHSLLLEYGVHVASIIKCTDLYRHSRRYHRVFDYIPPSATELKEVDKATRDLRFRTCPAMYSTLQDGTVVRGLAGVPQDGPVLLVGNHMLLGIELISLAAEFLRLKXVVVRGIAHXQLFPDKKRAWSEGHDFFDFLNXLWGGVPMMYKSIYELLAAGEFVLLYP

SEQ ID NO: 66413 - protein, 263 aa, Setaria italica
  misc_feature (12)..(12): Xaa can be any naturally occurring amino acid
  misc_feature (20)..(20): Xaa can be any naturally occurring amino acid
  Transcript Sequence Number=SeqID_439
  Gene Ontology: Mol. function=receptor activity; Cellular component =mediator complex; Biological process=positive regulation of transcription from RNA polymerase II promoter
  Homolog annotation: Hit_ID=Q9SR02; Match level="QueryCoverage=99%, HitCoverage=14%, E-value=2e-81, Identity=55%"; Hit description =F7O18.23 protein
ALQDERRPTLKXLNTLVRAXITRNAIPKEISEVSVTDGIANLRVDGEFKVLLTLGYRGHFSLWRVLHMELLVGEKTGPIKLEETRRYALGDDIERRMANTDNPFMILYTVLHELCISLVMDTVIRQANVLRQCRWKDAIKSELISDSSAAQGGNAPVQLGQDGELDLSGFRIPGLKVHYWLDENSSGSAEPDLSPFISIEAGKDMLISCLHSTFILDPLTDKEANLSIDLRCIDVEALILKAIACNRHTRLLDIQRELSKNIQ

SEQ ID NO: 66414 - protein, 562 aa, Setaria italica
  Transcript Sequence Number=SeqID_440
  Gene Ontology: Mol. function=oxidoreductase activity; Biological process=metabolic process
  Homolog annotation: Hit_ID=B6SVW5; Match level="QueryCoverage=97%, HitCoverage=92%, E-value=0.0, Identity=90%"; Hit description =Carotenoid isomerase 1
  Pfam annotation: Domain name=Amino_oxidase; Domain location=50-548; Score=17.6; E_value=3.5e-06; Accession=PF01593.16; Description =Flavin containing amine oxidoreductase
  Pfam annotation: Domain name=DAO; Domain location=42-546; Score= -20.0; E_value=0.00023; Accession=PF01266.16; Description=FAD dependent oxidoreductase
  Pfam annotation: Domain name=Pyr_redox_2; Domain location=42-530; Score=-66.6; E_value=0.093; Accession=PF07992.6; Description =Pyridine nucleotide-disulphide oxidore
  Pfam module annotation: Pfam domain module=Amino_oxidase::DAO::Pyr _redox_2; Domain location=50-548::42-546::42-530
GRVAPASARCRAVAADERPADPAFPEGQNRGLSGAVERPEADVVVIGSGLGGLCCAGLLARYGQDVLVLESHDRPGGAAHSFDIKGFNFDSGPSLFSGFQSRGPQANPLAQVLDALGESVPCASYDSWMVHVPEGQFLSRIGPTEFLKDLETFVGVDAVQEWKKLLDAVIPMSAAAMALPPLSIRGDLGILSTAAGRYAPSLLKSFIQMGPQGALGATKLLRPFQEIVDSLGLKNPFVRNWIDLLCFLLAGVKSDGALSAEMVYMFAEWYKPGCMLEYPLGGTGAIIDALVSGIEKFGGRIALRSHVEKILIENGRAVGVKLQSGQVVRAKKAVVSNASMWDTLDLLPPDVVPKSYEDKVKATPQCDSFMHLHLGFDVENAREDLGIHHIVVDDWNKGVDGEQNVVLISVPSVLSKDLAPPGKHILHAYTPGTEPFRLWEGMDRKSADYRRLKEERSEVMWKAVEVALGPKFGREKCDVKLVGTPLTHKRFLRRNRGTYGPAIKAGEATFPGQATPIPQLFCCGDSTFPGIGVPAVAASGAIVANTLVSVSQHSELLDAVGI

SEQ ID NO: 66415 - protein, 128 aa, Setaria italica
  Transcript Sequence Number=SeqID_441
  Gene Ontology: Cellular component=integral to membrane
  Homolog annotation: Hit_ID=B9SEZ5; Match level="QueryCoverage=85%, HitCoverage=16%, E-value=1e-34, Identity=62%"; Hit description =Endosomal P24A protein, putative
LCCGKAGALGLYHNTKFKVLVHEYEGNNVEIIGTGEEGSGVISEIDKKGMSGYQIVGFQVVPCSVKRNAEDFSKLNMYDSIDPVDCPVELKKAQVIRQQERITFTYDVEFVERSRIIQSRTNTKVGNR

SEQ ID NO: 66416 - protein, 661 aa, Setaria italica
  Transcript Sequence Number=SeqID_442
  Gene Ontology: Cellular component=integral to membrane
  Homolog annotation: Hit_ID=B9SEZ5; Match level="QueryCoverage=96%, HitCoverage=96%, E-value=0.0, Identity=79%"; Hit description =Endosomal P24A protein, putative
  Pfam annotation: Domain name=EMP70; Domain location=59-619; Score =845.0; E_value=4.5e-251; Accession=PF02990.8; Description =Endomembrane protein 70
MAGALHSSCFMAPLLWVVLLLVVSPGNAFYLPGSYMHTYSQGELISAKVNSLTSIETEMPFNYYSLPYCRPQGGIKKSAENLGELLMGDQIDNSPYRFHVNVNESIFLCTTKGLNENDAKLLKQRARDLYQVNMMLDNLPVMRFTEQNGVTVQWTGFPVGYSPAGSSEDYIINHLKFKVLVHEYEGNNVEIIGTGEEGSGVISEIDKKGMSGYQIVGFQVVPCSVKRNAEDFSKLNMYDSIDPVDCPVELKKAQVIRQQERITFTYDVEFVKSDIKWPSRWDAYLKMEAGSKVHWFSIMNSLMVILFLAGIVFVIFLRTVRRDLTRYEELDKEAQAQMNEELSGWKLVVGDVFREPTCSKLLCIMIGDGVQILGMAIVTIVFATLGFMSPASRGMLLTGMIVLYLFLGIAAGYASVRFWRTIKGTSEGWRSVSWLTACFFPGVMFTVLTVLNFVLWKSGSTGALPISLFFTLLALWFCISVPLTLVGGFLGTRAEQIEFPVRTNQIPREIPARKCPSWLLVLGAGTLPFGTLFIELFFILSSIWLGRFYYVFGFLLIVLLLLVVVCAEVSVVLTYMNLCVEDWRWWWKAFFAPGSVAIYVFLYSINYLVFDLRSLSGPVSAMLYVGYSFLMAFAIMLATGTIGFLTSFAFVHYLFSSVKID

SEQ ID NO: 66417 - protein, 55 aa, Setaria italica
  Transcript Sequence Number=SeqID_443
  Homolog annotation: Hit_ID=B6TE25; Match level="QueryCoverage=100%, HitCoverage=13%, E-value=3e-18, Identity=81%"; Hit description=HIT zinc finger family protein
LFFMTCWVHEQPGEAWPPLARIVEVQKASLEELDTGNCKADKKSKQQSKVLIEEL

SEQ ID NO: 66418 - protein, 47 aa, Setaria italica
  Transcript Sequence Number=SeqID_444
LAAIIGRSVGSEMSYVPHAGKDSLHVVHNSSPWKPPCDVFHYQHFCR

SEQ ID NO: 66419 - protein, 132 aa, Setaria italica
  Transcript Sequence Number=SeqID_445
  Gene Ontology: Cellular component=peroxisome
  Homolog annotation: Hit_ID=B4YYB3; Match level="QueryCoverage=56%, HitCoverage=87%, E-value=1e-26, Identity=72%"; Hit description=ST103- 2
  Pfam annotation: Domain name=DUF1138; Domain location=57-129; Score =167.6; E_value=3.7e-47; Accession=PF06592.5; Description=Protein of unknown function (DUF1138)
  Subcellular localization annotation: CTP_CleavageSite=43; ConfidenceScore=5.15e-01
LFRTSSASIFFSCDPPRTPVQRSPDSFSSPQLLQDLPLAASVRAEHRVDPDPETMTAGYIVGSLVGSFAIAYLCDTFVSDKKAFGGSIPKTVSDKEWLKATDAKFQAWPRTAGPPVIMNPISRQNFIVKSTE

SEQ ID NO: 66420 - protein, 79 aa, Setaria italica
  Transcript Sequence Number=SeqID_446
  Gene Ontology: Cellular component=peroxisome
  Homolog annotation: Hit_ID=B9S0H2; Match level="QueryCoverage=69%, HitCoverage=69%, E-value=4e-20, Identity=80%"; Hit description =ATOZI1, putative
  Pfam annotation: Domain name=DUF1138; Domain location=3-75; Score =160.5; E_value=5e-45; Accession=PF06592.5; Description=Protein of unknown function (DUF1138)
MSGKYIIAALAASAAIAYASDVLVAQKKVFGGTTPRTVSDKEWWEATDKQFQAWPRTAGPPVVMNPISRQNFIVKDIKP

SEQ ID NO: 66421 - protein, 44 aa, Setaria italica
  Transcript Sequence Number=SeqID_447
INMAKSGQLISLSSIYEHQPCNFFYTAMQMHRAVSVTEFSLKQG

SEQ ID NO: 66422 - protein, 425 aa, Setaria italica
  Transcript Sequence Number=SeqID_448
  Homolog annotation: Hit_ID=Q01IS4; Match level="QueryCoverage=95%, HitCoverage=96%, E-value=1e-166, Identity=71%"; Hit description =OSIGBa0134P10.12 protein
  Pfam annotation: Domain name=DUF1022; Domain location=42-419; Score =675.4; E_value=5.1e-200; Accession=PF06258.3; Description=Protein of unknown function (DUF1022)
MRPIRLPEPPGVDGMETPEIFSGGGSGAKVVRRAVLIGNGSPGAENQCLGLARALGLADNLTLYRVTRPRGGINEWLHFLPISLHKFIDQVLRQFFRNTRFTIVVQGRKPYRVLNSSSVGLSTILEPDVKKIVTVARETYEKEGPTLVVACGWDTISYSSLIRKLASDNVFVIQIQHPRSRLDRFDLVVTPRHDYYALTASGQQEIPRLFRRWITPQEPPRSNVVLTVGALHQADSAALRLAAIAWHDELAPLPKPLLVVNIGGPTRNCKYGIDLAKQLISSLYNVLDSCGSVRISFSRRTPWKVSDIVFKEFAGHPKVYIWEGEEPNPHMGHLAWGDAFVITADSISMLSEACSTGKPVYVIGTEHCKWKFSAFHKALRERGVVRPFTGLEDISNSWSYAPLNDAIEVATRVREVIAERGWTVG

SEQ ID NO: 66423 - protein, 63 aa, Setaria italica
  Transcript Sequence Number=SeqID_449
QVFSKIKGEATSWVAVGAKHPWHVYCSFLEGVFVAPFLFSVCVVFFFLVKGVHFSGPSSVPSF

SEQ ID NO: 66424 - protein, 391 aa, Setaria italica
  Transcript Sequence Number=SeqID_450
MPMGARGLAALVVLLLASALLPCPASGSVRRVLEGEKHSSGQVAPAPTVAAGGSPKGDSPKESGQSSAAGQKPESHRHQKSLPPAPSPPKDTKVPSSDKGKEGGEAQASTTPPPPPPAQDTNSQKASPPPGGLGPNGGGEAKSGTDQEDTGSQGKKEDMDKMKADMEKCDTSHKCSAKEFSACLQASDHASVGSLIIVHNEGKNDIIVNIKEPSNIDIDKTPLHLAKGAFRQINIPNVSGNITLTDGHGDCFIHLGQSVESQSVSNWQQQIQMFAAYATRLNPIYGASFFIFTVVLVGILCACCKFARRRGNDAVPYQQLEMGAQAPNSSVVDSTTSTTDGWEDGWDDDWDDEEAPARPSDKKPTSSVAANGLSLRTQTNSKDGWDVDWDD

SEQ ID NO: 66425 - protein, 42 aa, Setaria italica
  Transcript Sequence Number=SeqID_451
MGTFSYFSSPDWFLKIYSIYVFTGFEEAKNKKFSYFKHAKIY

SEQ ID NO: 66426 - protein, 684 aa, Setaria italica
  Transcript Sequence Number=SeqID_452
  Gene Ontology: Mol. function=serine-type endopeptidase activity; Cellular component=plasma membrane; Biological process=negative regulation of catalytic activity
  Homolog annotation: Hit_ID=B3TZE7; Match level="QueryCoverage=83%, HitCoverage=100%, E-value=0.0, Identity=81%"; Hit description =Subtilisin protease (Fragment)
  Pfam annotation: Domain name=PA; Domain location=279-374; Score =113.9; E_value=5.5e-31; Accession=PF02225.14; Description=PA domain
  Pfam annotation: Domain name=Peptidase_S8; Domain location=23-505; Score=35.1; E_value=1.3e-08; Accession=PF00082.14; Description =Subtilase family
  Pfam module annotation: Pfam domain module=PA::Peptidase_S8; Domain location=279-374::23-505
PGRGVLAVYPDQARQLHTTHTPAFLHLTEAAGLLPAATRGASSAVVGVLDTGLYPIGRGSFAAPAGLGPAPASFSGGCVSTGSFNASAYCNSKLIGAKVFYQGYEAALGHPIDETKESKSPLDTEGHGTHTASTAAGSPVAGAGFFDYAKGQAVGMDAGARIAAYKICWKSGCYDSDILAAMDEAVADGVDVISLSVGAGGYAPSFFQDSIAIGAFHAVSKGIVVSCSAGNSGPGEYTATNIAPWILTVGASTIDREFPADVVLGDGRVFGGVSLYAGDPLNSTQLPLVFAGDCGSRLCLLGELDPKKVAGKIVLCERGKTARVEKGAAVKLAGGAGMILANTEASGEELVADSHLVPATMVGQKFGDKIKYYVQTDPSPTATIVFRGTVIGKSPSAPRVASFSSRGPNYRAREILKPDVIAPGVNILAAWTGAASPTDLDIDSRRVEFNIISGTSMSCPHVSGLAALLRQAHPDWSPAAIKSALMTTAYNLDNSGETIKDLATGVESTPFVRGAGHVDPNSALDPGLVYDAGTDDYVAFLCTLGYPPSLISIFTKDSSVADCSRKFARSGDLNYPAFAAVFSSYKDSVTYHRVVRNVGSNSSAVYESKIVSPSGVDVTVSPSKLVFDDKNRSLAYEITIAVSGNPVIVDAKYSFGSISWSDGVHNVTSPIAVTWPSNGGSAAM

SEQ ID NO: 66427 - protein, 381 aa, Setaria italica
  Transcript Sequence Number=SeqID_453
  Gene Ontology: Mol. function=protein serine/threonine kinase activity; Biological process=protein amino acid phosphorylation
  Homolog annotation: Hit_ID=B6SYF0; Match level="QueryCoverage=100%, HitCoverage=100%, E-value=0.0, Identity=88%"; Hit description =Serine/threonine-protein kinase receptor
  Pfam annotation: Domain name=Pkinase; Domain location=46-317; Score =128.8; E_value=1.8e-35; Accession=PF00069.17; Description=Protein kinase domain
  Pfam annotation: Domain name=Pkinase_Tyr; Domain location=46-317; Score=76.9; E_value=7.4e-20; Accession=PF07714.9; Description =Protein tyrosine kinase
  Pfam module annotation: Pfam domain module=Pkinase::Pkinase_Tyr; Domain location=46-317::46-317
MSCFSHFFKRKKGPQQQDDPSSVYFTGSENITRYSYRELARATSNFDQTNKIGEGGYGPVYKGTLRDGTAIAVKVLSLHSRQGAKEFLNELLAISDVAHENLVKLYGCCVEGNHRILVYKYLENNSLAHTLLGSGHSSIQFNWRARVNICIGVAQGLTFLHDSVRPHIVHRDIKASNILLDTDLTPKISDFGLAKLLPSDVSHVSTRVAGTLGYLAPEYAIRGQVTRKADVYSYGVLLIEIVSGRCNTDTKLPYDDQILLEKTWRYYDQGNLEKIIDSSLGDDLDVDEACRFLKVGLLCTQDFTKRRPGMSAVVAMLKGEADVDTEMISKPDVIRDFRDLKLRSRATSSTLLTSIMARSSPLSSGETTRTSITFTAISERD

SEQ ID NO: 66428 - protein, 450 aa, Setaria italica
  Transcript Sequence Number=SeqID_454
  Gene Ontology: Mol. function=protein tyrosine kinase activity; Cellular component=integral to membrane; Biological process=protein amino acid phosphorylation
  Homolog annotation: Hit_ID=B9RBF5; Match level="QueryCoverage=86%, HitCoverage=43%, E-value=1e-133, Identity=58%"; Hit description=Lrr receptor protein kinase, putative
  Pfam annotation: Domain name=Pkinase; Domain location=80-360; Score= -29.8; E_value=1e-06; Accession=PF00069.17; Description=Protein kinase domain
  Pfam annotation: Domain name=Pkinase_Tyr; Domain location=80-360; Score=-53.5; E_value=3.6e-10; Accession=PF07714.9; Description =Protein tyrosine kinase
  Pfam module annotation: Pfam domain module=Pkinase::Pkinase_Tyr; Domain location=80-360::80-360
  Subcellular localization annotation: CTP_CleavageSite=46; ConfidenceScore=5.22e-01
GGGLLLIAAVAAVVFCIACSGRRTNDQRESGAPPSAPSGVSATGAVAATGGTQPSALPANTAKVGDSFAYDQLANATSGFGEERLIKHGHSGDLYHGVLQDGTAVVVKRITARVARKDAYLAELDLFAKGLHERLVPFLGHCLDKEEEKVLVYRFVRNGDLSSALHRKSREEDEGMQSLDWIKRLKIATGVAEALCYLHHECTPPMVHRDVQASSVLLDDKFDVRLGSLSEVCPQEGEGHQNVITKLLRFSSAADQGSSGSPSATCSYDVYCFGKVLLELVTGRLGISASNDAATSEWLDTTLRYVNIYEKELMSKIIDPTLIIDEDHLEEVWAMAIVAKSCLNPRSSKRPPMKYILKALENPLKVVREDNGSSSARLRATSSRGSWNAALFGSWRHSSSDIGPSRDDNILKRSETIKSSGGSNGDHSSSRRRQSKEIFPEPSGSRDTED

SEQ ID NO: 66429 - protein, 66 aa, Setaria italica
  Transcript Sequence Number=SeqID_455
  Gene Ontology: Mol. function=protein kinase activity; Biological process=protein amino acid phosphorylation
  Homolog annotation: Hit_ID=Q2R2T2; Match level="QueryCoverage=59%, HitCoverage=7%, E-value=1e-15, Identity=92%"; Hit description=ABC1 family protein
IVKFSFSSSHVVFTFQVAKALIELFGEMVFVHGFVHGDPHPGNILVCPQGNGKFSLGTHFLNIVFF

SEQ ID NO: 66430 - protein, 50 aa, Setaria italica
  Transcript Sequence Number=SeqID_456
TEEFLREVREGQTCLYNDQNTTMCFLFARKFAPSALEPLLELAPTVLGFG

SEQ ID NO: 66431 - protein, 160 aa, Setaria italica
  Transcript Sequence Number=SeqID_457
ARRPRRLRGASRNSARDLLEWTRRGSGLRAILVISVGTVMLVALTGLLIFMFFLLVATANAVVVSVLMSLAAAGGFLAIFFACLVAVYVGAVSVAAFAISATVISAIVGVTIATGWVGFFWMIWFAARKSMDLTKHSIGATSSAIQSYSASRHANWKPVD

SEQ ID NO: 66432 - protein, 122 aa, Setaria italica
  misc_feature (39)..(39): Xaa can be any naturally occurring amino acid
  misc_feature (50)..(50): Xaa can be any naturally occurring amino acid
  Transcript Sequence Number=SeqID_458
  Homolog annotation: Hit_ID=Q9AVH2; Match level="QueryCoverage=78%, HitCoverage=34%, E-value=4e-48, Identity=92%"; Hit description =Putative senescence-associated protein (Fragment)
VVSSSINSVLLRLVFRVLLGLFNLSAMTNCVNQRFLSYXVELLSRHGHQXGKTNLSHDGLNPAHVPYWWVNNPTLGEFCFTMIGRADIEGSKSNVAMNAWLPQASYPCGNFSDTSSFKLRRS

SEQ ID NO: 66433 - protein, 101 aa, Setaria italica
  misc_feature (94)..(94): Xaa can be any naturally occurring amino acid
  Transcript Sequence Number=SeqID_459
  Gene Ontology: Mol. function=hydrolase activity, acting on ester bonds; Biological process=nucleobase, nucleoside, nucleotide and nucleic acid metabolic process
  Homolog annotation: Hit_ID=B6TEN1; Match level="QueryCoverage=90%, HitCoverage=38%, E-value=1e-36, Identity=85%"; Hit description =Holliday junction resolvase
RRRAVGAIRASPASGVSEGAGELPAPLLPNARRRGRDPLWHGGGFSLGVDLGDARTGLAVGRGITLPRPLTVLKLRGQKLEVTLLDVARQQEAXDELIIGL

SEQ ID NO: 66434 - protein, 105 aa, Setaria italica
  Transcript Sequence Number=SeqID_460
  Gene Ontology: Mol. function=hydrolase activity, acting on ester bonds; Biological process=nucleobase, nucleoside, nucleotide and nucleic acid metabolic process
  Homolog annotation: Hit_ID=B6TEN1; Match level="QueryCoverage=100%, HitCoverage=44%, E-value=8e-47, Identity=90%"; Hit description =Holliday junction resolvase
  Pfam annotation: Domain name=UPF0081; Domain location=1-94; Score= -1.3; E_value=4.1e-06; Accession=PF03652.7; Description =Uncharacterised protein family (UPF0081)
LDVARQQEADELIIGLPVSADGRETPQSNKVRSVVGRLAVQAAERGLRVYLQDEHGTSIDALDYMISRGVKKSARYVKSDAYAAVMILARYFKSSGQGAQIVLPR

SEQ ID NO: 66435 - protein, 152 aa, Setaria italica
  misc_feature (55)..(55): Xaa can be any naturally occurring amino acid
  misc_feature (114)..(114): Xaa can be any naturally occurring amino acid
  Transcript Sequence Number=SeqID_461
  Gene Ontology: Mol. function=hydrolase activity, acting on ester bonds; Biological process=nucleobase, nucleoside, nucleotide and nucleic acid metabolic process
  Homolog annotation: Hit_ID=B6TEN1; Match level="QueryCoverage=98%, HitCoverage=70%, E-value=4e-63, Identity=75%"; Hit description =Holliday junction resolvase
  Pfam annotation: Domain name=UPF0081; Domain location=6-123; Score =32.8; E_value=2.9e-09; Accession=PF03652.7; Description =Uncharacterised protein family (UPF0081)
TTEGGVFSLGVDLGDARTGLAVGRGITLPRPLTVLKLRGQKLEVTLLDVARQQEXDELIIGLPVSADGRETPQSNKVRSVVGRLAVQAAERGLRVYLQDEHGTSIDALDYMISXMILARYFKSSGQGAQIVLPRQQELQDNLIAHSRRDAEN

SEQ ID NO: 66436 - protein, 86 aa, Setaria italica
  Transcript Sequence Number=SeqID_462
  Pfam annotation: Domain name=DUF1070; Domain location=26-86; Score =55.6; E_value=1.9e-13; Accession=PF06376.4; Description=Protein of unknown function (DUF1070)
HDSIRAAQDRSSALINQLALPILLDHQRCLLLLAGLMATVEAAHGAEAAAAAKSAQRRVLVDGRAVDHVVAYVLMAAALAVTYLVH

SEQ ID NO: 66437 - protein, 139 aa, Setaria italica
  misc_feature (15)..(15): Xaa can be any naturally occurring amino acid
  Transcript Sequence Number=SeqID_463
AAPEPPPPPPDEGGXWVLLPPSEVEGVDDPKVIHWEDLQQELARLWSLSAALQTARDRKAHLAARLESALEARRAFLQQDNELAEMRQSLQQHTDHLGDLKMHTKKSSEDVEDRRAQLCISLRTLSVASKTLGTARGNL

SEQ ID NO: 66438 - protein, 221 aa, Setaria italica
  Transcript Sequence Number=SeqID_464
  Gene Ontology: Mol. function=zinc ion binding
  Homolog annotation: Hit_ID=B9S9C1; Match level="QueryCoverage=78%, HitCoverage=33%, E-value=2e-26, Identity=45%"; Hit description =Protein binding protein, putative
MENAEGQAPELGDRAALDHDGSAQTTPGHNSRRPNLSLQIPARTMDTGVPTSTRINISSSPSSTRAGLPPRPNSTRTKSSIKNILPQNSFRARSSAQDGDRVILLNPGTSSEGQQDNPTTARSFSFRKVINSLSAKRTHSLPVTPVGTTDKVSSPSNHLESLPSTSNREVEAKIKRSLSVPGNRKNRSLRRADSLGVIRVIPTTPRPVPVDATTSNDAIEE

SEQ ID NO: 66439 - protein, 71 aa, Setaria italica
  Transcript Sequence Number=SeqID_465
  Homolog annotation: Hit_ID=B4FH72; Match level="QueryCoverage=66%, HitCoverage=15%, E-value=2e-17, Identity=85%"; Hit description=F-box domain containing protein
  Pfam annotation: Domain name=F-box; Domain location=26-71; Score =27.0; E_value=7.9e-05; Accession=PF00646.25; Description=F-box domain
EDELSSQYSALLVTSHCDVLFSIPLTGLPHIPHDVLVHIFSFLDMHSLVAAGLVCWYWNSAANDNDLWKMN

SEQ ID NO: 66440 - protein, 126 aa, Setaria italica
  misc_feature (15)..(15): Xaa can be any naturally occurring amino acid
  Transcript Sequence Number=SeqID_466
  Homolog annotation: Hit_ID=B4FH72; Match level="QueryCoverage=91%, HitCoverage=38%, E-value=1e-53, Identity=92%"; Hit description=F-box domain containing protein
MPVRRRQPRRQETGXAAERYREMGIAAALSRPWDYPTACGELAALLRLGYVDLPKAAQALVASDVLLAFRLLPDVQTGYALSAANALLQAVEVALPKQKKAQAVSEFKHSVIAHKRRARVQQNSGT

SEQ ID NO: 66441 - protein, 224 aa, Setaria italica
  misc_feature (20)..(20): Xaa can be any naturally occurring amino acid
  Transcript Sequence Number=SeqID_467
  Homolog annotation: Hit_ID=B4FH72; Match level="QueryCoverage=99%, HitCoverage=71%, E-value=1e-87, Identity=72%"; Hit description=F-box domain containing protein
  Pfam annotation: Domain name=F-box; Domain location=41-88; Score =42.8; E_value=1.4e-09; Accession=PF00646.25; Description=F-box domain
LLLLQAVEVALPKQKKAQAXVSEFKHSVIAHKRRARVQQNSGLPHIPHDVLVHIFSFLDMHSLVAAGLVCWYWNSAANDNDLWKMNYSVFFGICHLSCNSIPVSGVQNSRDLVQSSMDLVSIGPSFRWKESFHSKYTECASWKFASNRALCGHCRSVIWLSNLTCTSPHHCPKNGRDEIKLQPLLPDTVAKYILHNDDLAASSSESDDTDDSDYENGHPRFWTF

SEQ ID NO: 66442 - protein, 117 aa, Setaria italica
  Transcript Sequence Number=SeqID_468
  Gene Ontology: Mol. function=DNA binding; Cellular component =chromosome; Biological process=nucleosome assembly
  Homolog annotation: Hit_ID=Q43216; Match level="QueryCoverage=46%, HitCoverage=39%, E-value=4e-16, Identity=77%"; Hit description =Histone H2B.5
  Pfam annotation: Domain name=Histone; Domain location=61-115; Score =44.4; E_value=4.5e-10; Accession=PF00125.16; Description=Core histone H2AH2BH3H4
MAPKAEKKPAAKKPAEEEPAEKAAPAEKAPAGKKPKAEKRLPAGKSAGKEGGDKKGKKKAKKSVETYKIYIFKVLKQVHPDIGISSKAMSIMNSFINDIFEKLAAEAAKLARYNKNA

SEQ ID NO: 66443 - protein, 105 aa, Setaria italica
  Transcript Sequence Number=SeqID_469
  Gene Ontology: Mol. function=substrate-specific transmembrane transporter activity; Cellular component=integral to membrane; Biological process=transmembrane transport
  Homolog annotation: Hit_ID=B6TDG1; Match level="QueryCoverage=82%, HitCoverage=16%, E-value=8e-38, Identity=90%"; Hit description =Proton myo-inositol cotransporter
  Subcellular localization annotation: CTP_CleavageSite=69; ConfidenceScore=5.27e-01
VYTSEIFPLRVRALGFAVGVASNRVTSGVISMTFLSLSKAITIGGSFFLYSGIAVLAWVFFFTYLRETRGRTLEEMGKLFGMEDTDMAGEENAAAKEKTVEMRTS

SEQ ID NO: 66444 - protein, 515 aa, Setaria italica
  Transcript Sequence Number=SeqID_470
  Gene Ontology: Mol. function=substrate-specific transmembrane transporter activity; Cellular component=integral to membrane; Biological process=transmembrane transport
  Homolog annotation: Hit_ID=B6TDG1; Match level="QueryCoverage=94%, HitCoverage=95%, E-value=0.0, Identity=72%"; Hit description=Proton myo-inositol cotransporter
  Pfam annotation: Domain name=MFS_1; Domain location=28-436; Score =94.6; E_value=3.3e-25; Accession=PF07690.8; Description=Major Facilitator Superfamily
  Pfam annotation: Domain name=Sugar_tr; Domain location=24-485; Score =403.6; E_value=3.4e-118; Accession=PF00083.16; Description=Sugar (and other) transporter
  Pfam module annotation: Pfam domain module=MFS_1::Sugar_tr; Domain location=28-436::24-485
MASAALPEAVEPKKKGNTRFAFACAILASMTSILLGYDIGVMSGASLYIQKDLKITDKELEVLMGILNVYSLIGSFAAGRTSDWIGRRYTIVFAAAIFFAGAFLMGFAVNYGMLMFGRFVAGVGVGYALMIAPVYTAEVSPASARGFLTSFPEVFINFGILLGYVSNYAFSRLPLKLGWRVMLGIGAAPSVVLALMVLGMPESPRWLVMKGRLADAKVVLGKTSDTPEEAAERLADIKAAAGIPAELDGDVVTVPKREKSEEARVWKELILSPTPAMRRILLSGIGIHFFQQASGIDAVVLYSPRVFKSAGITSDNQVLGTTCAVGVTKTLFILVATFLLDKVGRRPLLLSSVGGMIFSLVGLATGLTVIGHYPDAKIPWAIAVSIASTMAYVAFFSIGLGPITWVYSSEIFPLQVRAMGCALGVATNRVTSGVISMTFISLSNAITIGGAFFLYGGIAVLAWVFFFSFLPETRGRTLESMSKLFGATDDEDDLRPQQGGDTKDKKLEMAAATTN

SEQ ID NO: 66445 - protein, 314 aa, Setaria italica
  Transcript Sequence Number=SeqID_471
  Gene Ontology: Mol. function=calcium ion binding; Cellular component =integral to membrane
  Homolog annotation: Hit_ID=B6U1M5; Match level="QueryCoverage=100%, HitCoverage=55%, E-value=1e-115, Identity=67%"; Hit description =Calcium ion binding protein
  Pfam annotation: Domain name=Na_Ca_ex; Domain location=170-304; Score= 65.7; E_value=1.8e-16; Accession=PF01699.16; Description =Sodiumcalcium exchanger protein
  Pfam annotation: Domain name=efhand; Domain location=39-67; Score =25.4; E_value=0.00023; Accession=PF00036.24; Description=EF hand
  Pfam annotation: Domain name=efhand; Domain location=79-107; Score =4.5; E_value=6.8; Accession=PF00036.24; Description=EF hand
  Pfam module annotation: Pfam domain module=Na_Ca_ex::efhand::efhand; Domain location=170-304::39-67::79-107
RRRLEYARLKHVMSGLLRHAQMHVFGRLLDEDGRPNVPVIEKLFHKIDQDNDGKLERGELQAFIIGVKFEDIDLDSSLAAEQVMADFDTSQNYAIEKAEFVDGILRWLKEAKRSVASSGAYSKKFLQDFHTRTRDEHNLLLGKDDEDGEAIEYPTWTCFKAISLLLLGTAMAAAFADPLVDAVHNFSNATSIPSFFVSFIAMPFATNSSEAVSAIIFASRKKQRTLSLTFSEVYGGVTMNNTLCLAVFLALVYVRGLTWDFSAEVLVIFLVCTIMGLFTSFRTNFPLWTCFVAYLLYPLSLIIVYVLDFKFGWS

SEQ ID NO: 66446 - protein, 162 aa, Setaria italica
  Transcript Sequence Number=SeqID_472
  Homolog annotation: Hit_ID=Q00RL5; Match level="QueryCoverage=93%, HitCoverage=28%, E-value=2e-28, Identity=42%"; Hit description =OSIGBa0117N13.2 protein
  Subcellular localization annotation: CTP_CleavageSite=49; ConfidenceScore=5.16e-01
KSQFFLHSNYKTKYSFPCSLLFGGCGNSIRHLRLTNCAFRPPVGFDCLRSLTKVHLYEVCITGDELGNLFSNSFALEHLELISCSDLISLKIPFWLERLSFLRVFECNMLQVIESKAPNLHTFKFFGNPGHLTLGESSQVKSLDFRLSNNFNSITYAITKLP

SEQ ID NO: 66447 - protein, 155 aa, Setaria italica
  misc_feature (13)..(13): Xaa can be any naturally occurring amino acid
  misc_feature (87)..(87): Xaa can be any naturally occurring amino acid
  misc_feature (139)..(139): Xaa can be any naturally occurring amino acid
  Transcript Sequence Number=SeqID_473
  Gene Ontology: Mol. function=nucleic acid binding; Cellular component= intracellular
QVEAQKYLSEWGXGICQAKCKPVTEFEDHCRGRGHQQKIEALLKGGTNTRSSVFQVLKKPPSDGSNSKGRSSEVMGLMATQTTLHFXKLCDLHCNSKNTLAEHRRGKKHTEKVEKRMSLSYCKVCNLHCNSEKMLAHHXRTGKARSSKGQWLLMG

SEQ ID NO: 66448 - protein, 138 aa, Setaria italica
  Transcript Sequence Number=SeqID_474
  Gene Ontology: Mol. function=histone-lysine N-methyltransferase activity; Cellular component=nucleus; Biological process=chromatin modification
  Homolog annotation: Hit_ID=B9IBB4; Match level="QueryCoverage=76%, HitCoverage=14%, E-value=2e-49, Identity=77%"; Hit description=SET domain protein (Fragment)
  Pfam annotation: Domain name=SET; Domain location=4-106; Score=12.0; E_value=0.00019; Accession=PF00856.20; Description=SET domain
QTIELEARNNQLAGKAKHTYPVLLNADWGTEGVLKDEEALCLDGTFYGNVARFINHRCFDGNIIDIPVEIETPDHHYYHVAFFTTREVDAFEELTWDYGIDFDDVDHPVKAFKCHCGSEFCRDKSRSSRSKARALVLR

SEQ ID NO: 66449 - protein, 153 aa, Setaria italica
  Transcript Sequence Number=SeqID_475
SVRAVCKKVKEALVQSLECTQRVLTNGQSSLRSNRADDLLWACRHDNNMHQYYDKASSEQKENQEQKENQTHFILTWHIATGHCEGLARGDLNQRDIDVATKLSKYCAYLVVSKPSFFLGTTMTHDVCLKQSQRKQLKRGVNQKISSTRACFH

SEQ ID NO: 66450 - protein, 85 aa, Setaria italica
  Transcript Sequence Number=SeqID_476
MEDWLFYSLTTLLCLLCSLLLRAGRARSLGGSKAHAAADSLPPLPPGPAPLPVLGPLLFLARRDFDVEPALRPIARDHGPVFTFA

SEQ ID NO: 66451 - protein, 72 aa, Setaria italica
  misc_feature (7)..(7): Xaa can be any naturally occurring amino acid
  misc_feature (24)..(24): Xaa can be any naturally occurring amino acid
  Transcript Sequence Number=SeqID_477
GEVEYVXGDDMEEMGDMEDMEDFXGLSDGGTDEDDRLDDQVTKKPKGSGSSLKQNAGKRSRKVMTEVKVLSN

SEQ ID NO: 66452 - protein, 285 aa, Setaria italica
  Transcript Sequence Number=SeqID_478
  Gene Ontology: Mol. function=transferase activity; Cellular component= nucleus; Biological process=multicellular organismal development
  Homolog annotation: Hit_ID=B6TJ52; Match level="QueryCoverage=62%, HitCoverage=63%, E-value=2e-91, Identity=88%"; Hit description=MAK16- like protein RBM13
  Pfam annotation: Domain name=Mak16; Domain location=1-226; Score =443.1; E_value=4.2e-130; Accession=PF04874.6; Description=Mak16 protein
MSDDVIWHCIRHNHCSFMAKITTGIFCRNPYNATGICNRSSCPLANSRYATIRDHDGVFYLYMKTAERAHLPKKLWERVKLPRNYEKAMDVINKDLEFWPKLLVHKIKQRLTKMTQYRIRMRKLQLKVREKVMTMPRKQTQRDLRRLEKAEKAAQLEKNIESELKERLKKGVYGDIYNIPFKEFDEVLEMERDQVVLEEEDEEEGEVEYVEGDDMEEMGDMEDMEDFGGLSDGGTDEDDRLDDQVTKKPKGSGSSLKQNAGKRSRKVMTEVEQDEETNTRQRTRM

SEQ ID NO: 66453 - protein, 174 aa, Setaria italica
  Transcript Sequence Number=SeqID_479
  Gene Ontology: Cellular component=cytoplasm; Biological process =response to stress
  Homolog annotation: Hit_ID=P13853; Match level="QueryCoverage=80%, HitCoverage=89%, E-value=4e-29, Identity=46%"; Hit description=17.6 kDa class I heat shock protein
  Pfam annotation: Domain name=HSP20; Domain location=70-173; Score =140.7; E_value=4.5e-39; Accession=PF00011.13; Description=Hsp20alpha crystallin family
MSMITSMLGRKQQGQQKGGAGARTAGGVGGAEVEPASIDIVLEPFVDAISLTALAAPSLGLAPFATASMDWKETPAAHVFMADLPGVRRDEVKVEVEEEKVLRISGQRQRAAEDKGDRWHRVERSSERFVRTVRLPPNANTDSVHATLENGVLTITVPKDNERKAYGRLIPITN

SEQ ID NO: 66454 - protein, 174 aa, Setaria italica
  Transcript Sequence Number=SeqID_480
  Gene Ontology: Mol. function=binding; Cellular component =intracellular; Biological process=RNA processing
  Homolog annotation: Hit_ID=B9S614; Match level="QueryCoverage=85%, HitCoverage=16%, E-value=6e-57, Identity=70%"; Hit description=XPA -binding protein, putative
MPSAAGPVAVASASAAAKAAATPAVGISPELYPSEDDLPYEEEILREPFKLKGWWRYLVARAAAPFSKRAVIYERALKALPGSYKLWHAYLRERLDHARPHPIDHPAYSSLNNTFERALATMHKMPRIWVLYLTSLLDQRLLTRSRRAFDRALRALPVTQHDRIWPLYLRLASL

SEQ ID NO: 66455 - protein, 353 aa, Setaria italica
  Transcript Sequence Number=SeqID_481
  Gene Ontology: Mol. function=nucleoside-triphosphatase activity; Cellular component=membrane; Biological process=transport
  Homolog annotation: Hit_ID=B9HQM2; Match level="QueryCoverage=94%, HitCoverage=58%, E-value=1e-113, Identity=59%"; Hit description =White-brown-complex ABC transporter family
  Pfam annotation: Domain name=ABC2_membrane; Domain location=59-271; Score=97.3; E_value=5.4e-26; Accession=PF01061.16; Description=ABC-2 type transporter
QDDQGDFSSVSMDTAVAIRTLEATYKQSADSVAVESMIAKLTEKEGPYLKSKGRASDATRIVVLTWRSLLIMSRDWKYYWSRLALYMFIALSIGTIFSDIGHSLSSVVVRVSAIFAFVSFVILLSVSGVPAHIDDVKIYCHEETNRHSGAMVFLLGHFLSSFPFLFLVSISSSLVFYYLIGLRNEFSFLMYFVVTLFMCLLANEALMMIVAYIWLETYKCTLTLNCLYVIMMLVAGYFRIRESLPYAVWTYPLSFISFHTYAVQGLVENEYVGTSFAVGQIRSIPGVQAVRGSYDISSSANAKWVNLLVLLLMAIGYRIVLYMLLRLNVRKHARRLGSWRSCWFSIHGSASAK

SEQ ID NO: 66456 - protein, 40 aa, Setaria italica
  misc_feature (30)..(30): Xaa can be any naturally occurring amino acid
  Transcript Sequence Number=SeqID_482
IQTQGSMNNPFGSTFVYGYQNIAFEVMKNXYIATVTLFQS

SEQ ID NO: 66457 - protein, 136 aa, Setaria italica
  Transcript Sequence Number=SeqID_483
  Gene Ontology: Mol. function=protein binding
  Homolog annotation: Hit_ID=B7ZV70; Match level="QueryCoverage=98%, HitCoverage=35%, E-value=9e-31, Identity=44%"; Hit description =Si:dkey-102f14.5
  Pfam annotation: Domain name=UPF0183; Domain location=2-136; Score= -202.2; E_value=0.0011; Accession=PF03676.6; Description =Uncharacterised protein family (UPF0183)
KQVDQMVIHSGSDTRPRTTLCGDYFYNYFSRGIDILFDGQTHRIKKFVLHTNFPGHSDFNSYKKCNFPGNVSKNCITPRTKWEQVKEILGDCGRAAIQTQGSMNNPFGSTFVYGYQNIAFEVMKNGYIATVTLFQS

SEQ ID NO: 66458 - protein, 94 aa, Setaria italica
  Transcript Sequence Number=SeqID_484
  Homolog annotation: Hit_ID=Q55AH8; Match level="QueryCoverage=64%, HitCoverage=11%, E-value=3e-14, Identity=54%"; Hit description =UPF0183 family protein
GHSDFNSYKKCNFVIYDAEVEGTYQPGNVSKNCITPRTKWEQVKEILGDCGRAAIQTQGSMNNPFGSTFVYGYQNIAFEVMKNGYIATVTLFQS

SEQ ID NO: 66459 - protein, 421 aa, Setaria italica
  Transcript Sequence Number=SeqID_485
  Gene Ontology: Mol. function=protein binding
  Homolog annotation: Hit_ID=Q55AH8; Match level="QueryCoverage=91%, HitCoverage=83%, E-value=7e-62, Identity=42%"; Hit description =UPF0183 family protein
  Pfam annotation: Domain name=UPF0183; Domain location=48-421; Score =239.6; E_value=7.7e-69; Accession=PF03676.6; Description =Uncharacterised protein family (UPF0183)
  Subcellular localization annotation: CTP_CleavageSite=17; ConfidenceScore=5.09e-01
GPGGGAATAAAPLGMPSQAAVPVRRRCEGTAMGAITLDLRPGLGVGPFTLGMPISDAFAQIEHQPNIYDVVHVKYFDEEPLKLDFIISFPDHGFHLRFDPWSQRLRLIEIYDVKRLQLRYATSLIGGPSTLATFAAVYALFGPTFPGIYDKERGIYTLFYPGLSFAFPIPSQYTNLFTNGEVADLPLEFPDGTTPVTCRVSIYDSSTDSKVGVGSLMDRAAVPALPSGSLYMEEVHAKLGEELWFTIGGQRIPFGASPQDVWTDLGRPCGIHQKQVDQMVIHSGSDTRPRTTLCGDYFYNYFSRGIDILFDGQTHRIKKFVLHTNFPGHSDFNSYKKCNFVIYDAEVEGTYQPGNVSKNCITPRTKWEQVKEILGDCGRAAIQTQGSMNNPFGSTFVYGYQNIAFEVMKNGYIATVTLFQS

SEQ ID NO: 66460 - protein, 96 aa, Setaria italica
  Transcript Sequence Number=SeqID_486
  Gene Ontology: Mol. function=transferase activity, transferring glycosyl groups; Cellular component=integral to endoplasmic reticulum membrane; Biological process=macromolecule biosynthetic process
  Homolog annotation: Hit_ID=Q6Z2X5; Match level="QueryCoverage=58%, HitCoverage=68%, E-value=7e-15, Identity=71%"; Hit description =Putative dolichol-phosphate (Beta-D) mannosyltransferase 2
  Pfam annotation: Domain name=DPM2; Domain location=1-80; Score=182.6; E_value=1.1e-51; Accession=PF07297.4; Description=Dolichol phosphate -mannose biosynthesis r
MELGDKAVGFLLTLTSLSIFTYYTFWVIILPFVDSDHFVHKYFLPQEYAILIPVIAGVVLLSFLSVFVGLVMLKSKKKRRPIDCFDMYTVFFTYYD

SEQ ID NO: 66461 - protein, 61 aa, Setaria italica
  Transcript Sequence Number=SeqID_487
VMCFSRYIYRLCQVTCVVVFSTWLREMSVHRELVILKSRQAPFFSFLRERGHGRWATISTG

SEQ ID NO: 66462 - protein, 498 aa, Setaria italica
  Transcript Sequence Number=SeqID_488
  Gene Ontology: Mol. function=Rho guanyl-nucleotide exchange factor activity
  Homolog annotation: Hit_ID=B9SR08; Match level="QueryCoverage=97%, HitCoverage=84%, E-value=0.0, Identity=67%"; Hit description=Rop guanine nucleotide exchange factor, putative
  Pfam annotation: Domain name=PRONE; Domain location=1-397; Score =603.7; E_value=1.9e-178; Accession=PF03759.5; Description=PRONE (Plant-specific Rop nucleotide
SLPTPASAAAFYLSKPAADLSEIDMMKERFAKLLLGEDMSGSGKGVCTALAISNAITNLSATVFGELWRLEPLAPARKAMWTREMEWLLSVADSIVELTPSIQELPEGGGQFEVMVPRPRSDLYMNLPALKKLDAMLLAMIDGFKETEFWYVDRGIVVEDSGGPFPSSSSSSCGRPSVRQEEKWWLPCPRVPPKGLSEDARRKLQQSRDCANQILKAAMAINSDVLAEMEIPEVYLETLPKSGKSCLGEIIYRYITAEQFSPECLLDCLDLSSEHHTLEVANRIEAAIHVWRLKGQKKLTPQAKSKKSWGGKVKGLVGDKEKSHFLSERADGLLQSLRLRYPGLPQTSLDMNKIQYNKDVGQSILESYSRVLESLAFNIIARIDDVIYVDDATKKSAAAESVSIFNRGIGVPVQKRISPSPFSIQNTPYASPFATPTFCSSTPVTGSPGRAQPPLNKNSLGKQEIKVEKLFSGDLEKVWTYAGNLSARKDAGDAPERD

SEQ ID NO: 66463 - protein, 218 aa, Setaria italica
  Transcript Sequence Number=SeqID_489
  Gene Ontology: Mol. function=transcription regulator activity; Cellular component=nucleus; Biological process=regulation of transcription
  Homolog annotation: Hit_ID=B6UE48; Match level="QueryCoverage=99%, HitCoverage=68%, E-value=3e-91, Identity=77%"; Hit description=Helix- loop-helix DNA-binding domain containing protein
TIQMLKDLTSHVNKLKAEYTSLSEEARELTQEKNELRDEKASLKSEVDNLTNQYQQRMRVLYPWAGMEPSVVIGPPPAYPYPVPVPIPSGAVPMHPQLQAYPFFRSQTSGTIPNACTPYMAYTQPCHPPTDQPSNQPNSPVANSSSHRSNSPARDCRSKSSTLQQASCGVRSSDVGDVATDLELKTPGSSGPSHSEIANKDSSSDLKTKKQCIKLLKS

SEQ ID NO: 66464 - protein, 74 aa, Setaria italica
  Transcript Sequence Number=SeqID_490
MVFFCFLVDQRRTVRSSKPAAGICSRCGGCASVADMETSTRVCYLLTVHRRTWRAIICTFCGAMLKSYRHYRLY

SEQ ID NO: 66465 - protein, 187 aa, Setaria italica
  Transcript Sequence Number=SeqID_491
  Gene Ontology: Cellular component=membrane
  Homolog annotation: Hit_ID=Q9FG57; Match level="QueryCoverage=82%, HitCoverage=48%, E-value=2e-45, Identity=64%"; Hit description =Transmembrane protein FT27/PFT27-like
  Pfam annotation: Domain name=UPF0016; Domain location=75-149; Score =96.6; E_value=8.4e-26; Accession=PF01169.11; Description =Uncharacterized protein family UPF0016
MDPNPRAPLLLLAVVVLLALAASVAAAAEDDASGISLGRRAGGFLHGLKKKDAVVEGDHGVALDEVGPGLFDALFASLSMILVSEIGDETFIIAALMAMRHPKSIVLSGALSALYVMTVLSTGLGRIVPNLISRKHTNSAATVLYLFFGLRLLYIAWKSDPKGSQKKEMEEVEEKLESGQGKIKLTT

SEQ ID NO: 66466 - protein, 281 aa, Setaria italica
  Transcript Sequence Number=SeqID_492
  Gene Ontology: Cellular component=membrane
  Homolog annotation: Hit_ID=B9RM88; Match level="QueryCoverage=90%, HitCoverage=29%, E-value=1e-98, Identity=75%"; Hit description =Pentatricopeptide repeat-containing protein, putative
  Pfam annotation: Domain name=UPF0016; Domain location=197-272; Score =117.0; E_value=6.2e-32; Accession=PF01169.11; Description =Uncharacterized protein family UPF0016
  Pfam annotation: Domain name=UPF0016; Domain location=75-149; Score =96.6; E_value=8.4e-26; Accession=PF01169.11; Description =Uncharacterized protein family UPF0016
  Pfam module annotation: Pfam domain module=UPF0016::UPF0016; Domain location=197-272::75-149
MDPNPRAPLLLLAVVVLLALAASVAAAAEDDASGISLGRRAGGFLHGLKKKDAVVEGDHGVALDEVGPGLFDALFASLSMILVSEIGDETFIIAALMAMRHPKSIVLSGALSALYVMTVLSTGLGRIVPNLISRKHTNSAATVLYLFFGLRLLYIAWKSDPKGSQKKEMEEVEEKLESGQGKSTARRFFARFCTPIFLEAFILTFLAEWGDRSQIATIALATHKNAIGVAVGASLGHTVCTSLAVIGGSMLASKISQRTVATIGGVLFLGFSVSSYFYPPL

SEQ ID NO: 66467 - protein, 66 aa, Setaria italica
  Transcript Sequence Number=SeqID_493
  Gene Ontology: Mol. function=zinc ion binding
  Homolog annotation: Hit_ID=B6U1Q2; Match level="QueryCoverage=100%, HitCoverage=24%, E-value=3e-29, Identity=95%"; Hit description=Zinc finger, C3HC4 type family protein
AIVLVGLLYGFFIAIICGQRITERHYHVLAKQELTKEYIVEDLEGADQVPDLDPSHVTELKVLGLY

SEQ ID NO: 66468 - protein, 71 aa, Setaria italica
  Transcript Sequence Number=SeqID_494
TVSLANVAFCEQTAAACVQVMAYFTISAVAVAMEAAMIGKYGNTQFQWMKTCHLYKRFCAQAGGAVACAVA

SEQ ID NO: 66469 - protein, 158 aa, Setaria italica
  Transcript Sequence Number=SeqID_495
  Gene Ontology: Cellular component=integral to membrane
  Homolog annotation: Hit_ID=A7R385; Match level="QueryCoverage=91%, HitCoverage=71%, E-value=1e-36, Identity=51%"; Hit description =UPF0497 membrane protein 12
  Pfam annotation: Domain name=DUF588; Domain location=1-135; Score =93.2; E_value=8.9e-25; Accession=PF04535.4; Description=Domain of unknown function (DUF588)
GLAVLGLELLGADRQTRIFFSMEKEARYSDMQSLVFLVIANGMAACYSLLQGARCMVSILTGGVLISKPMAWAIFSCDQVMAYFTISAVAVAMEAAMIGKYGNTQFQWMKTCHLYKRFCAQAGGAVACAVAASLNMVGISLVSAFNLFRLYGSGKGRK

SEQ ID NO: 66470 - protein, 66 aa, Setaria italica
  Transcript Sequence Number=SeqID_496
ASNSQGKEWSSKSAKFNTWWSNSPNNLILHGSVWHCGGFSKRTYFFLDMDVRVGYEHHFRIHNTKI

SEQ ID NO: 66471 - protein, 70 aa, Setaria italica
  Transcript Sequence Number=SeqID_497
PYHHATWLSISLVILWKQNSIALCHFFKEKISASIMLHNEYLCTIYPQWPIDSVCSKSTGAHPLMMKNHV

SEQ ID NO: 66472 - protein, 61 aa, Setaria italica
  Transcript Sequence Number=SeqID_498
  Gene Ontology: Mol. function=ARF guanyl-nucleotide exchange factor activity; Cellular component=intracellular; Biological process =regulation of ARF protein signal transduction
  Homolog annotation: Hit_ID=Q7F8R6; Match level="QueryCoverage=55%, HitCoverage=2%, E-value=8e-11, Identity=85%"; Hit description =Putative guanine nucleotide-exchange protein GEP2
MATPTAPLGGASPSGRVLGPALDRIIKNAAWRKHSALVAAAKAALDLLSSSSAYPSPDPTS

SEQ ID NO: 66473 - protein, 121 aa, Setaria italica
  Transcript Sequence Number=SeqID_499
ENFELPLSLCRAPPPLFRSRRGLRAAAAGAPWPGRRQPQLSPPLPPPSATAAPPPAPRAGPSKLRRRPQPPAPRRGRRRNLAKSPRRSRRPPRRSATSRSPKRAASVRSSRRPATRRRLRR

SEQ ID NO: 66474 - protein, 105 aa, Setaria italica
  Transcript Sequence Number=SeqID_500
  Subcellular localization annotation: CTP_CleavageSite=62; ConfidenceScore=5.83e-01
YRTDRKTNRSWAWALASPMRAFRPTTTSTSTKTITVVPPSHVTSNGNTSASALSISSPTPPSSEAAAALMATVTAAELKLEAACPVNHPSFPRFPALLDSPHIHV

SEQ ID NO: 66475 - protein, 90 aa, Setaria italica
  Transcript Sequence Number=SeqID_501
  Homolog annotation: Hit_ID=Q7XTU4; Match level="QueryCoverage=100%, HitCoverage=27%, E-value=5e-24, Identity=67%"; Hit description =OSJNBa0058K23.8 protein
  Subcellular localization annotation: CTP_CleavageSite=27; ConfidenceScore=5.08e-01
RVVFRGLERCSSTPASAGIGPRRPRPRGMERSYSANVRVDPVINVFGFGLLFMPSSPAKERKSDKEREKDGGGRKNRAEKLAMVLRDPQD

SEQ ID NO: 66476 - protein, 181 aa, Setaria italica
  Transcript Sequence Number=SeqID_502
  Gene Ontology: Mol. function=metal ion binding
  Homolog annotation: Hit_ID=B9SSQ5; Match level="QueryCoverage=64%, HitCoverage=9%, E-value=1e-27, Identity=55%"; Hit description =Protein binding protein, putative
  Pfam annotation: Domain name=C1_1; Domain location=28-79; Score=3.8; E_value=0.011; Accession=PF00130.14; Description=Phorbol estersdiacylglycerol binding do
TKIVVRPKLLFPENEAKSTEYTSKIASGAKFACPLHKCDICKYGENKEVKELQFAVCRRCPKAYHRRCLPRNIALEDITESGQCVFQRAWEDLLPNNRILIYCLKHDIDPKHRTPARNHIKFPEDPAAIKKPAAIKKPLSYVNGMNKKIVKIRRIDELPSAPLPGVKRSSGMVKRFFLFGV

SEQ ID NO: 66477 - protein, 277 aa, Setaria italica
  misc_feature (130)..(130): Xaa can be any naturally occurring amino acid
  misc_feature (213)..(213): Xaa can be any naturally occurring amino acid
  Transcript Sequence Number=SeqID_503
  Gene Ontology: Mol. function=RNA-directed DNA polymerase activity; Biological process=RNA-dependent DNA replication
  Homolog annotation: Hit_ID=Q7XVC3; Match level="QueryCoverage=94%, HitCoverage=66%, E-value=9e-61, Identity=45%"; Hit description =OSJNBa0072D21.13 protein
  Pfam annotation: Domain name=RVT_1; Domain location=8-237; Score =77.1; E_value=6.2e-20; Accession=PF00078.19; Description=Reverse transcriptase (RNA-dependent DNA pol
YKIIAKSLADRIKPFLPNKIHASQAAFIPGRHISSNIIIAQEITHSFGLTSWKHKCFLLKIDLAKAFDRIEWNFITNAMLRIGLPTHIVNLISACISTTDFSVLVNGQSSPSFLSQRGIRQGCPLSPYLXLAMNELSHTSQIALQSNHLSGISLGHNCPPIHSFLFADDLLICGKATAAEACQIKEILSRFCQASGQTPNWAKSSILMLMSKXKQEIQNLFPVSLMTSQTTHLGHPIIFSYKDRTQAYGFILTKFRAKLTGIKANKLNHAGRITYIN

SEQ ID NO: 66478 - protein, 45 aa, Setaria italica
  Transcript Sequence Number=SeqID_504
  Gene Ontology: Mol. function=sequence-specific DNA binding; Cellular component=nucleus
  Homolog annotation: Hit_ID=Q2RAA7; Match level="QueryCoverage=66%, HitCoverage=4%, E-value=1e-08, Identity=93%"; Hit description =Associated with HOX family protein, expressed
MAAYYHGGAGTDIQASTDGLQTLYLMNPSYTAGYADAGASPPGPA

SEQ ID NO: 66479 - protein, 94 aa, Setaria italica
  Transcript Sequence Number=SeqID_505
QRNGAQMSTQAHTHTHHSARAPSISHHLSLYIYLLLILPQELMQLMSSCTCCPLLRIRKLILLRLSLLSLSRRYKKKRRSLKILARKRQQEEGR

SEQ ID NO: 66480 - protein, 109 aa, Setaria italica
  Transcript Sequence Number=SeqID_506
  Gene Ontology: Mol. function=sequence-specific DNA binding; Cellular component=nucleus
  Homolog annotation: Hit_ID=Q2RAA7; Match level="QueryCoverage=95%, HitCoverage=16%, E-value=5e-26, Identity=66%"; Hit description =Associated with HOX family protein, expressed
MAAYYHGGAGTDIQASTDGLQTLYLMNPSYTAGYADAGASPPGPANMMLLNSAVSTMTPASFGHHQQSPSAAQQHFVGIPLQAPPAGYNLWAPATSGAADMSPPQAQTP

SEQ ID NO: 66481 - protein, 119 aa, Setaria italica
  Transcript Sequence Number=SeqID_507
  Gene Ontology: Mol. function=calcium ion binding; Cellular component =membrane; Biological process=abscisic acid mediated signaling
  Homolog annotation: Hit_ID=A4ZKI4; Match level="QueryCoverage=86%, HitCoverage=46%, E-value=3e-52, Identity=96%"; Hit description =Calcineurin B-like protein 2-2
  Pfam annotation: Domain name=efhand; Domain location=16-44; Score =14.1; E_value=0.57; Accession=PF00036.24; Description=EF hand
  Pfam annotation: Domain name=efhand; Domain location=60-88; Score =27.7; E_value=4.7e-05; Accession=PF00036.24; Description=EF hand
  Pfam module annotation: Pfam domain module=efhand::efhand; Domain location=16-44::60-88
MFVTEGTQKLRAVSTILAVSFQLYDLKQQGFIERQEVKQMVVATLAESGMNLSDEVIESIIDKTFEEADTKHDGKIDKEEWRNLVLRHPSLLKNMTLQYLKDITTTFPSFVFHSQVDDT

SEQ ID NO: 66482 - protein, 106 aa, Setaria italica
  misc_feature (99)..(99): Xaa can be any naturally occurring amino acid
  Transcript Sequence Number=SeqID_508
  Gene Ontology: Mol. function=calcium ion binding; Cellular component =membrane; Biological process=abscisic acid mediated signaling
  Homolog annotation: Hit_ID=Q3HRP5; Match level="QueryCoverage=78%, HitCoverage=36%, E-value=4e-39, Identity=92%"; Hit description =Calcineurin B-like protein 2
  Pfam annotation: Domain name=efhand; Domain location=47-75; Score =27.7; E_value=4.7e-05; Accession=PF00036.24; Description=EF hand
RFKIRDCWSCIARTTKQSPNSIWLSKMVVATLAESGMNLSDEVIESIIDKTFEEADTKHDGKIDKEEWRNLVLRHPSLLKNMTLQYLKDITTTFPSFVXHSQVDDT

SEQ ID NO: 66483 - protein, 125 aa, Setaria italica
  Transcript Sequence Number=SeqID_509
  Gene Ontology: Mol. function=calcium ion binding; Cellular component =membrane; Biological process=abscisic acid mediated signaling
  Homolog annotation: Hit_ID=Q3HRP5; Match level="QueryCoverage=92%, HitCoverage=51%, E-value=5e-53, Identity=88%"; Hit description =Calcineurin B-like protein 2
  Pfam annotation: Domain name=efhand; Domain location=74-102; Score =22.4; E_value=0.0019; Accession=PF00036.24; Description=EF hand
RGVLLKCCDIDLKQPNGLEDPEVLARETVFSVSEIEALYELFKKISSAVIDDGLINKEEFQLALFKTSKKESLFAYRVFDLFDTKHNGILGFEEFARALSVFHPNAPLDEKIDCKFIKKLGQFHG

SEQ ID NO: 66484 - protein, 228 aa, Setaria italica
  misc_feature (3)..(3): Xaa can be any naturally occurring amino acid
  misc_feature (11)..(11): Xaa can be any naturally occurring amino acid
  Transcript Sequence Number=SeqID_510
  Gene Ontology: Mol. function=calcium ion binding; Cellular component =membrane; Biological process=abscisic acid mediated signaling
  Homolog annotation: Hit_ID=Q3HRP5; Match level="QueryCoverage=98%, HitCoverage=99%, E-value=1e-117, Identity=92%"; Hit description =Calcineurin B-like protein 2
  Pfam annotation: Domain name=efhand; Domain location=125-153; Score =17.3; E_value=0.062; Accession=PF00036.24; Description=EF hand
  Pfam annotation: Domain name=efhand; Domain location=169-197; Score =27.7; E_value=4.7e-05; Accession=PF00036.24; Description=EF hand
  Pfam annotation: Domain name=efhand; Domain location=88-116; Score =22.4; E_value=0.0019; Accession=PF00036.24; Description=EF hand
  Pfam module annotation: Pfam domain module=efhand::efhand::efhand; Domain location=125-153::169-197::88-116
VPXLQCLDGVXRHLCGVLLKCCDIDLKQPNGLEDPEVLARETVFSVSEIEALYELFKKISSAVIDDGLINKEEFQLALFKTSKKESLFAYRVFDLFDTKHNGILGFEEFARALSVFHPNAPLDEKIDFSFQLYDLKQQGFIERQEVKQMVVATLAESGMNLSDEVIESIIDKTFEEADTKHDGKIDKEEWRNLVLRHPSLLKNMTLQYLKDITTTFPSFVFHSQVDDT

SEQ ID NO: 66485 - protein, 32 aa, Setaria italica
  Transcript Sequence Number=SeqID_511
  Gene Ontology: Mol. function=actin binding; Cellular component =intracellular
  Homolog annotation: Hit_ID=Q0DLA3; Match level="QueryCoverage=100%, HitCoverage=23%, E-value=1e-09, Identity=93%"; Hit description=Actin- depolymerizing factor 7
ANAASGMAVDDECKLRFLELKAKRTHRFIIYK

SEQ ID NO: 66486 - protein, 114 aa, Setaria italica
  Transcript Sequence Number=SeqID_512
  Subcellular localization annotation: CTP_CleavageSite=55; ConfidenceScore=5.94e-01
SFPAADPVASSPRSSPPCAAQMVSVAVFSSPSPLVPAQLCWPSLLRAHSASMFCSSATRSRSSLSRCERRFCEIDRSDILPPLFRSLSYGTVPVCRQDIFCARLIIVNLDHMDR

SEQ ID NO: 66487 - protein, 139 aa, Setaria italica
  Transcript Sequence Number=SeqID_513
  Gene Ontology: Mol. function=actin binding; Cellular component =intracellular
  Homolog annotation: Hit_ID=Q0DLA3; Match level="QueryCoverage=100%, HitCoverage=100%, E-value=1e-59, Identity=81%"; Hit description =Actin-depolymerizing factor 7
  Pfam annotation: Domain name=Cofilin_ADF; Domain location=12-139; Score=195.0; E_value=2.1e-55; Accession=PF00241.12; Description =Cofilintropomyosin-type actin-binding pr
MANAASGMAVDDECKLRFLELKAKRTHRFIIYKIDEKKKMVVVEKVGEPVLNYDDFAATLPANECRYAIFDYDFVTEENCQKSKIFFIAWSPDTARVRSKMIYASSKERFKRELDGIQVELQATDSAEVGLDVIQGRAN

SEQ ID NO: 66488 - protein, 167 aa, Setaria italica
  Transcript Sequence Number=SeqID_514
  Gene Ontology: Mol. function=cytochrome-c oxidase activity; Cellular component=mitochondrion
  Homolog annotation: Hit_ID=B4FCQ4; Match level="QueryCoverage=100%, HitCoverage=100%, E-value=1e-56, Identity=67%"; Hit description =Cytochrome c oxidase subunit
  Pfam annotation: Domain name=COX6B; Domain location=94-166; Score =132.4; E_value=1.4e-36; Accession=PF02297.9; Description=Cytochrome oxidase c subunit VIb
MAAEAKTPSLAEEYSLPPEEVPAEKAAEEKPSSGTETEAAPSTNDETPPAVEDKNETPEVQDTADKSEAEETNPVAEETSETAEEEEAEEKPEIKIETAPADFRFPTTNQTRHCFTRYVEYHRCVAAKGEDAPECDKFAKYYRSLCPGEWVDRWNEQRENGTFPGPL

SEQ ID NO: 66489 - protein, 42 aa, Setaria italica
  Transcript Sequence Number=SeqID_515
MHMGISNKGYQTLSSELVCLAYATNWLISYLMATHRMADFSA

SEQ ID NO: 66490 - protein, 117 aa, Setaria italica
  Transcript Sequence Number=SeqID_516
  Gene Ontology: Mol. function=metal ion binding; Cellular component =nucleus; Biological process=multicellular organismal development
  Homolog annotation: Hit_ID=Q7XPY1; Match level="QueryCoverage=92%, HitCoverage=28%, E-value=7e-35, Identity=68%"; Hit description =Squamosa promoter-binding-like protein 8
GVVVVGGGHSAHDILQFYPSSHYLASAGNPYSHFSGSTAAFPSYYPPAQAAPEYYFPTLVSSAEENMASFAATQLGLNLGYRTYFPPRGGYTYGHHPPRCQAEGCKADLSSAKRYHR

SEQ ID NO: 66491 - protein, 143 aa, Setaria italica
  misc_feature (18)..(18): Xaa can be any naturally occurring amino acid
  Transcript Sequence Number=SeqID_517
  Homolog annotation: Hit_ID=B9SQN9; Match level="QueryCoverage=86%, HitCoverage=7%, E-value=9e-14, Identity=38%"; Hit description =Meiotic checkpoint regulator cut4, putative
SDASYLYSSSHADSEWEXFCYEIKRVCTKYGQTLPTKSPISPSKAWDFLINSKYHAQYCKRAPMSSNSFLPVSYGTHKTGFNPFLQDEHSSDMSFYIRFMRETLETLHALYENLKLNILRKEDLGCLASLLCVVASSLLTILL

SEQ ID NO: 66492 - protein, 348 aa, Setaria italica
  Transcript Sequence Number=SeqID_518
  Gene Ontology: Mol. function=peptidyl-prolyl cis-trans isomerase activity; Cellular component=nucleus; Biological process=protein folding
  Homolog annotation: Hit_ID=A6N0B8; Match level="QueryCoverage=63%, HitCoverage=91%, E-value=1e-106, Identity=86%"; Hit description=Gcip- interacting family protein-like (Fragment)
  Pfam annotation: Domain name=SYF2; Domain location=175-341; Score =308.3; E_value=1.6e-89; Accession=PF08231.4; Description=SYF2 splicing factor
MGKEDAVAGPAAEGKSRPECINSSNPYHECSDYCLRKIAEARQRLDDELPDSWKRPPEQRTVHPNCINASNPYHDCSEYCFKRIADAESGLERGEPQPPSIGAGTSDAADQQPDDNDAEKEEDAGADDGYPQMTEKQKKLFELRLKMNEARKANQQAMVAEKKRMEPRGESRGVSKQKWLEDRKKKIGKLLDSNGLDMSKAYMLDTQETAEGKYKKWEKEPAPYGWDVFNQKTLYDAYKKRTKNIEVDMDAYNKAKEADPEFYRDASSLQYGKVSKVPDENIDKMVKELKEREEKRKSFSRRRKFNEDKDIDSINDRNEHFNKKIERAFGKYTLEIKNNLERGTALPD

SEQ ID NO: 66493 - protein, 51 aa, Setaria italica
  Transcript Sequence Number=SeqID_519
VLYRLSGKNAVCRVKDGTWLTECTGAVNCASHTLPVHSVSHVPSLTLLISV

SEQ ID NO: 66494 - protein, 127 aa, Setaria italica
  Transcript Sequence Number=SeqID_520
  Gene Ontology: Mol. function=nucleic acid binding
  Homolog annotation: Hit_ID=Q8S3W5; Match level="QueryCoverage=88%, HitCoverage=11%, E-value=7e-57, Identity=88%"; Hit description=Mei2 -like protein
  Pfam annotation: Domain name=RRM_2; Domain location=5-100; Score =181.3; E_value=2.7e-51; Accession=PF04059.4; Description=RNA recognition motif 2
MQTRKPKQSFVNILWYTSKMLLAAIDESHRGIYDFIYLPIDFKNKCNVGYAFINMINPENIVPFYKTFNGKRWEKFNSEKVASLAYARIQGKSALVAHFQNSSLMNEDKRCRPILFHSDGPNAGDQD

SEQ ID NO: 66495 - protein, 225 aa, Setaria italica
  Transcript Sequence Number=SeqID_521
  Gene Ontology: Mol. function=nucleic acid binding
  Homolog annotation: Hit_ID=Q8S3W5; Match level="QueryCoverage=99%, HitCoverage=22%, E-value=1e-85, Identity=73%"; Hit description=Mei2 -like protein
  Pfam annotation: Domain name=RRM_2; Domain location=166-225; Score =84.7; E_value=3.4e-22; Accession=PF04059.4; Description=RNA recognition motif 2
QINIPSRPSMQLHGFSRAPLRMLDNIIPMNHEHVGSSPAFNPSIWDRRHGYSGEMMEAPGFHPGTAGSVIGFSGSTHLHQLETNGMHNGGTFMDPAISPAHMSAPSPQQRGHMFHRMSHMAPIPSSFDSAGERMRIRRNESNVNQSDNKRLFELDIDRIVRGEDSRTTLMIKNIPNKYTSKMLLAAIDESHRGIYDFIYLPIDFKNKCNVGYAFINMINPENIVP

SEQ ID NO: 66496 - protein, 423 aa, Setaria italica
  Transcript Sequence Number=SeqID_522
  Gene Ontology: Mol. function=nucleic acid binding
  Homolog annotation: Hit_ID=Q8S3W5; Match level="QueryCoverage=97%, HitCoverage=40%, E-value=1e-107, Identity=57%"; Hit description=Mei2- like protein
  Pfam annotation: Domain name=RRM_1; Domain location=266-331; Score =38.9; E_value=2.1e-08; Accession=PF00076.14; Description=RNA recognition motif. (a.k.a. RRM, RBD, o
  Pfam annotation: Domain name=RRM_1; Domain location=350-415; Score =34.0; E_value=6.2e-07; Accession=PF00076.14; Description=RNA recognition motif. (a.k.a. RRM, RBD, o
  Pfam module annotation: Pfam domain module=RRM_1::RRM_1; Domain location=266-331::350-415
MPTEQRRRMAPTHFLPAGSESSPFTDELGLRPERQVGLLKQGCSPENFGRFACSPSGAVVNQLDMQPYKLMDQKAQFGLDDKLLDQRNVNLPPSFWRADQNHVHQRDSFPKLLVSPLEGRTGSLNGTQYESGLFSSSLPDIFDKKMRLTPKDSVVGQLVEKVDHNQADDEPFEMTKEIENQIIGNLLPDDDDLLSGVLGYVGYNTQGNYQDDIEDDIFCTGGGMELEADRNEKLLKVNGGVDYSDTRSNVQRNGKCAYAEQPSRILIVGNIDSNIEDSELKFIFEQYGDMHTLNASCKHHGFVIVSYYDVRSAENAVRALQSKAIRHRKLDIRYSVPKDYPLEKYINHGTLILNLDPSITNDDLHRIFGVYGEIKEIHNTSDNDRHKSIEFFDLRAAEAAQYALNRSDIAGNKIKLEPAVWMV

SEQ ID NO: 66497 - protein, 606 aa, Setaria italica
  Transcript Sequence Number=SeqID_523
  Gene Ontology: Mol. function=nucleic acid binding
  Homolog annotation: Hit_ID=Q8S3W5; Match level="QueryCoverage=98%, HitCoverage=62%, E-value=0.0, Identity=63%"; Hit description=Mei2 -like protein
  Pfam annotation: Domain name=RRM_2; Domain location=434-530; Score =231.2; E_value=2.7e-66; Accession=PF04059.4; Description=RNA recognition motif 2
GVYGEIKEIHNTSDNDRHKSIEFFDLRAAEAAQYALNRSDIAGNKIKLEPSCLDGTKRLMKQTSRALEQERFGVCKLGSPNSPLSTYFGSVKMASIRSTGPESGTVQVLRSRGQTPINQFREGRSFLGLPSTTIPSRSSPVGIATAGSESSHYALDEHCHSLKKMNGQNNERMDYGVQESSGFHPHSLPEFNGRLNNCGPYNFSIPSVGVKSNTRATEAMDARHIYRGGSGNLRNQSSTHTEAIGISRIGSCPLHDHDLARSNSNNLHCQPSSPMLWSSTGPSINNIPSRPSMQLHGFSRAPLRMLDNIIPMNHEHVGSSPAFNPSIWDRRHGYSGEMMEAPGFHPGTAGSVIGFSGSTHLHQLETNGMHNGGTFMDPAISPAHMSAPSPIPSSFDSAGERMRIRRNESNVNQSDNKRLFELDIDRIVRGEDSRTTLMIKNIPNKYTSKMLLAAIDESHRGIYDFIYLPIDFKNKCNVGYAFINMINPENIVPFYKTFNGKRWEKFNSEKVASLAYARIQGKSALVAHFQNSSLMNEDKRCRPILFHSDGPNAGDQEPFPVGPNVRSRPGRSRILSWEQNHHNVLSDHAKGETPPLPVITDPTSVA

SEQ ID NO: 66498 - protein, 289 aa, Setaria italica
  Transcript Sequence Number=SeqID_524
  Gene Ontology: Mol. function=protein serine/threonine kinase activity; Cellular component=plasma membrane; Biological process =protein amino acid phosphorylation
  Homolog annotation: Hit_ID=B9T173; Match level="QueryCoverage=81%, HitCoverage=22%, E-value=1e-117, Identity=84%"; Hit description =Receptor protein kinase CLAVATA1, putative
  Pfam annotation: Domain name=Pkinase; Domain location=86-289; Score =67.3; E_value=5.6e-17; Accession=PF00069.17; Description=Protein kinase domain
  Pfam annotation: Domain name=Pkinase_Tyr; Domain location=86-289; Score=12.6; E_value=1.4e-14; Accession=PF07714.9; Description =Protein tyrosine kinase
  Pfam module annotation: Pfam domain module=Pkinase::Pkinase_Tyr; Domain location=86-289::86-289
  Subcellular localization annotation: CTP_CleavageSite=16; ConfidenceScore=5.52e-01
ALPFPCCVSQFLSPCRSHGVATSAFGSLSSTSKLLLVLGLLALSIIFAAAAVLKARSLKRSAEARAWRLTAFQRLDFAVDDVLDCLKEENVIGKGGSGIVYKGAMPGGAVVAVKRLPAIGRAGAAHDDYGFSAEIQTLGRIRHRHIVRLLGFAANRETNLLVYEYMPNGSLGEVLHGKKGGHLQWATRFKIAVEAAKGLCYLHHDCSPPILHRDVKSNNILLDADFEAHVADFGLAKFLRGNAGGSECMSAIAGSYGYIAPEYAYTLKVDEKSDVYSFGVVLLELITGR

SEQ ID NO: 66499 - protein, 134 aa, Setaria italica
  Transcript Sequence Number=SeqID_525
TTRQCEVPAGPAGLFRLPTDSIPRNEMASSDGYGSRFSLTAANELHVLTSYPANHIMSAPSFSQYGSELSPDPYHDPHSSMLLSMPTSGGYNITAPDFRMGSGSFLPEVSRFSNDFRRVIPSGNAGMHFQYGHG

SEQ ID NO: 66500 - protein, 144 aa, Setaria italica
  misc_feature (22)..(22): Xaa can be any naturally occurring amino acid
  Transcript Sequence Number=SeqID_526
VAKDRVIEQRKADGSDHDFSSXTAIVASSHGELQVRKNVLTTKSYLEGSGNNLGKSVLPPQASCDSILNARYDKGQGDENSDSGSSYRVNARSFERYVNTSSVGSPLSDTPKSEVSEWSSSCFHNHTENQLDTRLHQPSSDDVG

SEQ ID NO: 66501 - protein, 81 aa, Setaria italica
  Transcript Sequence Number=SeqID_527
ESCISANLIFRQLDNLTTICFKAAMSFFNLYITMFFPFKNFLQHERKKNYPRQGLNWRTDSRGRGRRGRAKARTGGTGART

SEQ ID NO: 66502 - protein, 72 aa, Setaria italica
  Transcript Sequence Number=SeqID_528
  Subcellular localization annotation: CTP_CleavageSite=20; ConfidenceScore=5.12e-01
FSFFFPLCSLPWLAAASSPRPSLVDGSLDCSRHRAVQPSVLDLLVLYFSKRDLFASYCVSNLDNLTTWRKKE

SEQ ID NO: 66503 - protein, 51 aa, Setaria italica
  Transcript Sequence Number=SeqID_529
LAAIRTRYDVNWYGVHYPRRANTSFIHYSSDGFASGQMSGGTKFNIRLVFL

SEQ ID NO: 66504 - protein, 60 aa, Setaria italica
  Transcript Sequence Number=SeqID_530
LAAIRTRYDANWYGVHYPRRANTSFIHYSLDGFASGQMFGGANFNISLFSSLASSSIFTT

SEQ ID NO: 66505 - protein, 81 aa, Setaria italica
  Transcript Sequence Number=SeqID_531
  Subcellular localization annotation: CTP_CleavageSite=49; ConfidenceScore=5.16e-01
LAAIRTRYDVNWYGVHYPRRANTSFIHYSSDGFASGQMSGGTNFNIGLSSSLASSSIFTTTLIGGWLFGLFETQSSATFGG

SEQ ID NO: 66506 - protein, 484 aa, Setaria italica
  misc_feature (105)..(105): Xaa can be any naturally occurring amino acid
  misc_feature (124)..(124): Xaa can be any naturally occurring amino acid
  misc_feature (248)..(248): Xaa can be any naturally occurring amino acid
  Transcript Sequence Number=SeqID_532
  Homolog annotation: Hit_ID=Q25AP3; Match level="QueryCoverage=87%, HitCoverage=52%, E-value=1e-29, Identity=31%"; Hit description =H0811D08.6 protein
AVSQTEGQEGKNIAAEGVKDGQERSDCTVCTDEQPDFDGEGSHDGRGSSGNRGLNDDGDRFAMVYEKDGEMERVLEKQAELIGQYEAEENAQMEWEKKFSESPHXSTTDNVNLNNKLNQAGKCXWRMETAQIVDKEMVCEHARSSEDYHNPSEFLPKGSVSELPPNVAKDSVTEQRKADGSDHDFVVGTMIVASSHGELQVRKNMLTTKSYLEGSGNNLGKSVLPPQASCDSILNARYDKGQGDVASXMQDMTEVKEKNSDSGSSYRVNARSFERYVNTSSVGSPLSDTPKSEVSEWSSSCFHNHTENQLDTRLHQPSSDDVGGVLEALQRARMSLRAKLSQPSPASQNILALPAPNHLPANAMQLSLSRSNPLGQEVLALQAPAGYFNRVLPQGNVKVPAGPAGLFRLPTDSIPRNEMASSDGYGSRFSLTAANELHVLTSYPANHIMSAPSFSQYGSELSPDPYHDPHSSMLLSMPTSGGYR

SEQ ID NO: 66507 - protein, 82 aa, Setaria italica
  Transcript Sequence Number=SeqID_533
LLSELDMMLIGMEYIIQEEQTHLLFIILQTGLLQVRCPEVPTSTSACPLPWLPAASSPRPSLVDGSLDCSRHRAVQPSVLDL

SEQ ID NO: 66508 - protein, 69 aa, Setaria italica
  Transcript Sequence Number=SeqID_534
HSSWRKIKFAEIQDSYKSSTEGCTALCLEQSKEPSTNEGRGEDAAGSQGREQADVEVGTSVTILVPCKS

SEQ ID NO: 66509 - protein, 116 aa, Setaria italica
  Transcript Sequence Number=SeqID_535
EGGQGRDGRTGVELEEGRESGGRPAHSHGRDGIRRRQRRIRELTHSLGNTESGPFLHLSWQRTTWLPHLNSFFSPPHPPTIPSVGRSTLGPAVGRPALLAWFSSLRAWPSFAWSGS

SEQ ID NO: 66510 - protein, 125 aa, Setaria italica
  Transcript Sequence Number=SeqID_536
CQLIWSTISKKSQHIFYSLFFIRGCFKLDVRRCQLQHPLVLFLGLQQHLHHGPHWWTALWIVQDTEQCNLQCLIYKSLVFQALKVALLCVLNNPKSRPPMRVVVKMLLEAKEENKLMLKLAPPDI

SEQ ID NO: 66511 - protein, 91 aa, Setaria italica
  Transcript Sequence Number=SeqID_537
  Gene Ontology: Mol. function=protein binding; Cellular component =cytoplasm; Biological process=ubiquitin-dependent protein catabolic process
  Homolog annotation: Hit_ID=B6TTL1; Match level="QueryCoverage=100%, HitCoverage=100%, E-value=3e-46, Identity=98%"; Hit description =Autophagy-related 12 variant 1
  Pfam annotation: Domain name=APG12; Domain location=1-91; Score =156.2; E_value=9.6e-44; Accession=PF04110.5; Description=Autophagy protein Apg12
MAAEVDQKVVVHVRSTGDAPILKQSKFKISGRDKFLKVIEFLRRQLHQDTLFVYINSAFSPNPDELVIDLYNNFGIDGKLVVNYALSAAWG

SEQ ID NO: 66512 - protein, 73 aa, Setaria italica
  Transcript Sequence Number=SeqID_538
DNQQGMIRSRPIKKEGDLICITGPHHPVREQVVSCRVSHKPTCKTRAAKIIQTRLTCVHAGPAHAGWNQLPTK

SEQ ID NO: 66513 - protein, 133 aa, Setaria italica
  misc_feature (89)..(89): Xaa can be any naturally occurring amino acid
  Transcript Sequence Number=SeqID_539
TGLNLGSKQLQNKLHTMQRAFLSWKDLQVQSGLGCDKETGGVAADSTFWDDDEGETSAGAAQTSSAKPPLFLDELYTLFGHTTQDRGTXLTTGGIREATPSMGTEDNAHDIYLDPWLLVVLITCLKGNPGNLC

SEQ ID NO: 66514 - protein, 249 aa, Setaria italica
  misc_feature (27)..(27): Xaa can be any naturally occurring amino acid
  misc_feature (87)..(87): Xaa can be any naturally occurring amino acid
  misc_feature (163)..(163): Xaa can be any naturally occurring amino acid
  misc_feature (197)..(197): Xaa can be any naturally occurring amino acid
  Transcript Sequence Number=SeqID_540
  Homolog annotation: Hit_ID=Q10BK1; Match level="QueryCoverage=81%, HitCoverage=38%, E-value=1e-20, Identity=34%"; Hit description =Transposon protein, putative, CACTA, En/Spm sub-class
MSNRASWDVHTTKNFAELCIEQKKPAXNWSDKCLTKLGWKHVYSCFRAATGLQLGSKQLQNKLNNMRRAFLGWLALQNKSGLGRDTXTGGVSAYATYWEQDQQDTQARSQSSSVKPPPFLDELFELFVHEPQDRGTLMTAGGIREATPSMRTKGNAADLEQDXPASSARAMSKQPVREFSVDSPTKKRSDNLEQYIXGLSESVAKRSLLRADRTHDQMVRCMQILKEDGIQEGSPLHNQAMYLCTKSAS

SEQ ID NO: 66515 - protein, 288 aa, Setaria italica
  misc_feature (202)..(202): Xaa can be any naturally occurring amino acid
  Transcript Sequence Number=SeqID_541
  Homolog annotation: Hit_ID=Q10BK1; Match level="QueryCoverage=76%, HitCoverage=40%, E-value=2e-25, Identity=33%"; Hit description =Transposon protein, putative, CACTA, En/Spm sub-class
LQLLCTQMNNRASWDEGTTKTLLDLCIAQKNQLNWSNRCLTKLGWKNVYSSFRAQTGLHLGSKQLQNKLNNLRRTFLSWMALQKQSGLGRDTQTGGVSADATYWEEDKEDTTGGDAPPRSQQSSQPTSVKPPPFLDELFELFGHEPQDRGTLLTAGGIREATPSVGTEGSAADLDLDPMAASSARAMSKRPAREFSVDNPPXKRSDNLEQYISELSESVAVADRTHEQIVRCLQLLKEDGIQEGSLLHCQAMYLCCKSAEYRSVLMGMTTKEGRMSWIQFYWDKFNKK

SEQ ID NO: 66516 - protein, 287 aa, Setaria italica
  Transcript Sequence Number=SeqID_542
  Gene Ontology: Mol. function=transposase activity; Biological process= transposition, DNA-mediated
  Homolog annotation: Hit_ID=Q10BK1; Match level="QueryCoverage=74%, HitCoverage=38%, E-value=9e-22, Identity=33%"; Hit description =Transposon protein, putative, CACTA, En/Spm sub-class
MSNRASWDVHTTKILLELCIEQKNLLNWSDRCLTKLGWKHVHSRFRAATGLQLGRKQLQNKVNNLRRQFFGWRLLENKTGLGRDTQTGGVSADATYWEEDQQDTQARSQPPSVKPPPCLDLLFELFGHEPQDRGTLLSAGGIREDTPSMGGTPSMGTEGNFVDLEDEQAPPSSARFSARAKGKRPVREYSVDSPTKKRSDTLEQYIRDISDSVAKRSLQRGPSGHEATNRCLQILKEDGIEQGSELHNQVMYCCAHSSDCRSTFLGLDTKDARLSWINFYWNLLQKK

SEQ ID NO: 66517 - protein, 71 aa, Setaria italica
  Transcript Sequence Number=SeqID_543
  Gene Ontology: Mol. function=transporter activity; Cellular component= membrane
  Homolog annotation: Hit_ID=B4FQ14; Match level="QueryCoverage=60%, HitCoverage=7%, E-value=2e-10, Identity=58%"; Hit description =Peptide transporter PTR2
WLQDNINRGRIDNYYWLVTCIMLLNFGYFLICFHFYTTKPLEVADEHGDHDKECELSSVQKNGGRGANGMV

SEQ ID NO: 66518 - protein, 152 aa, Setaria italica
  Transcript Sequence Number=SeqID_544
  Gene Ontology: Mol. function=catalytic activity; Cellular component =chloroplast envelope; Biological process=metabolic process
DCFWEAWACLCSSSTHLRQKTRIERVIGFFLAIWGILFYSRLLSAMTEQFRTHMHKVREGAQLQVIEDDHIIICGVNSHLMSILNQLDKFHESSIRLGLATARKQRILLLSDLPRKQVDKIADNMAKDLNHIDVITKSCSLSMPKSFERAAA

SEQ ID NO: 66519 - protein, 120 aa, Setaria italica
  Transcript Sequence Number=SeqID_545
  Homolog annotation: Hit_ID=Q6EPK9; Match level="QueryCoverage=98%, HitCoverage=16%, E-value=3e-20, Identity=48%"; Hit description =Ankyrin-like protein
AQGQTPLDIADTKVPTGLSYFQNPEVQIWLALRIFGGTHGASCLHHHLGKNYEGIHQGPKIVCEKEELENIKETTQSLCVGSVLIATVAFGAAFALPGGYRQDDGTPILAGRYTFHAFVM

SEQ ID NO: 66520 - protein, 66 aa, Setaria italica
  Transcript Sequence Number=SeqID_546
  Gene Ontology: Mol. function=structural constituent of ribosome; Cellular component=ribonucleoprotein complex; Biological process =translation
  Homolog annotation: Hit_ID=B6TKD3; Match level="QueryCoverage=87%, HitCoverage=27%, E-value=2e-13, Identity=70%"; Hit description=60S ribosomal protein L13a
CSFNCYCCLLMISFSCVFNFNQELEEKRKEKAKVAYERRKQLAKLRVKAEKTAEEKLGSQLEILAP

SEQ ID NO: 66521 - protein, 72 aa, Setaria italica
  Transcript Sequence Number=SeqID_547
LKMTFYPSYPPETRDGIDPSPSQRPHLDAAPLLRTLLPHSSEHRRPSPTGCRNTTPLQLSPRAMPPSLRETK

SEQ ID NO: 66522 - protein, 80 aa, Setaria italica
  Transcript Sequence Number=SeqID_548
QPATFFFFLGVESNTAGPFKHCELMPALKVTSHPIRHERSRALESRRDRVHTIGWVHTVHHFLQCVMGMIYFSKSLEPLL

SEQ ID NO: 66523 - protein, 180 aa, Setaria italica
  Transcript Sequence Number=SeqID_549
  Gene Ontology: Cellular component=integral to membrane
  Homolog annotation: Hit_ID=Q6Z5L0; Match level="QueryCoverage=99%, HitCoverage=33%, E-value=1e-51, Identity=61%"; Hit description =Glucose-6-phosphate/phosphate-tranlocator-like
  Pfam annotation: Domain name=TPT; Domain location=1-138; Score=9.7; E_ value=0.00017; Accession=PF03151.8; Description=Triose-phosphate Transporter family
TCVALAWIVPSAVNKILWSSLQQSGNWTALALMWKTTPITIFFLLTLMPLLDPPGLLLFSWNFRNSCAIIISALFGFLLQWSGALALGATSALSHVVLGQFKTIVIVLSGYLIFGSDPGITSICGAVVALGGMSFYTYLGLKKDSATSGKKAPSRQNSFMSKPKTAADNDNADSDKEGTV

SEQ ID NO: 66524 - protein, 290 aa, Setaria italica
  Transcript Sequence Number=SeqID_550
  Gene Ontology: Biological process=response to stress
  Homolog annotation: Hit_ID=P46524; Match level="QueryCoverage=94%, HitCoverage=95%, E-value=4e-23, Identity=37%"; Hit description =Dehydrin COR410
  Pfam annotation: Domain name=Dehydrin; Domain location=42-285; Score =109.2; E_value=1.4e-29; Accession=PF00257.11; Description=Dehydrin
MEDERNTQLHHQGGEAQEKAADQVEVKDRGILDTLLGRKKPEDQEKKQEEELVTGMEKVTVAEPEKHEHKKEEHEAGEKKESLLAKLHRTSSSSSSSSDEEEEVIDENGEIVKRKKKKGLKEKIKEKLPGHKDHAEGEHHTAVPAPAPAPVETHAYKEDDHKPYVPAPAPPPVETHVHHHDHAVVVQKIEDDAKTDAPPAPEEEKKGLLDKIKEKLPGGHKKPEDAAGAPAVHAPAPTPHTEDVSSPDGKEKKGLLGKIMDKIPGYNKGSGEEDHKAAGAAAGEHKTTSS

SEQ ID NO: 66525 - protein, 343 aa, Setaria italica
  Transcript Sequence Number=SeqID_551
  Gene Ontology: Mol. function=binding; Cellular component=integral to membrane; Biological process=transport
  Homolog annotation: Hit_ID=B4FRM4; Match level="QueryCoverage=93%, HitCoverage=93%, E-value=1e-170, Identity=90%"; Hit description =Peroxisomal membrane carrier protein
  Pfam annotation: Domain name=Mito_carr; Domain location=110-222; Score=77.6; E_value=4.6e-20; Accession=PF00153.19; Description =Mitochondrial carrier protein
  Pfam annotation: Domain name=Mito_carr; Domain location=233-328; Score=84.8; E_value=3e-22; Accession=PF00153.19; Description =Mitochondrial carrier protein
  Pfam annotation: Domain name=Mito_carr; Domain location=3-96; Score =52.9; E_value=1.2e-12; Accession=PF00153.19; Description =Mitochondrial carrier protein
  Pfam module annotation: Pfam domain module=Mito_carr::Mito_carr::Mito_ carr; Domain location=110-222::233-328::3-96
MSDALINGLAGAGGGIIAQLLTFPLQTVNARQQTERDPSKPAFKDGAARQLYLVVKNEGWERLYGGLMPSLVGTAASQGVYYYFYQIFRNRAEAKALERSRRGLGDGSVGMLQSLTVAALSGCVNVLLTNPIWVAVTRMQTHRKANIQQSPQDLICANDKALEASTTENTPYKTIDVFQELYKEAGVLGFWKGVIPSLIMVSNPAIQFMLYETLLKRIKKRRASNLKGADGLTALEIFLLGAVAKLGATVLTYPLLVVKARLQVKQRIDGDKRHHYKGTFDAITKLVQYEGLRGMYKGMGTKIVQSVFASALLFMIKEELVKGARLLVTGNTSLVKKLPSKPS

SEQ ID NO: 66526 - protein, 150 aa, Setaria italica
  misc_feature (65)..(65): Xaa can be any naturally occurring amino acid
  Transcript Sequence Number=SeqID_552
  Subcellular localization annotation: CTP_CleavageSite=45; ConfidenceScore=5.87e-01
PRSCAGARSPGPSSPGASRTRRRRRRRGRPSRRGAPCACAPSPPSCTSPSRPGRSRTHRRRTFCXSSSPDFLCTRRRRRTCCTRRRRCCSRRSPTCCTRRRRCGRSRRCRTCCSRPRSRPCRRGGRCTRRRRCGRSRRRRTCCTRAVAAV

SEQ ID NO: 66527 - protein, 358 aa, Setaria italica
  Transcript Sequence Number=SeqID_553
  Gene Ontology: Mol. function=nutrient reservoir activity; Cellular component=protein body; Biological process=protein oligomerization
  Homolog annotation: Hit_ID=Q6Y4Q3; Match level="QueryCoverage=100%, HitCoverage=96%, E-value=1e-156, Identity=75%"; Hit description =Legumin-like protein
  Pfam annotation: Domain name=Cupin_1; Domain location=193-342; Score =83.3; E_value=8.4e-22; Accession=PF00190.14; Description=Cupin
  Pfam annotation: Domain name=Cupin_1; Domain location=5-160; Score =74.3; E_value=4.5e-19; Accession=PF00190.14; Description=Cupin
  Pfam module annotation: Pfam domain module=Cupin_1::Cupin_1; Domain location=193-342::5-160
MAVDLTPRQPKKAYGGEGGAYYEWSPADLPMLGVASIGAAKLSLAAGGLSLPSYSDSAKVAYVLQGKGTCGIVLPEATKEKIVGVKEGDALALPFGVVTWWHNAPDATTELIVLFLGDTSKGHKAGQFTNFQLTGANGIFTGFSTEFVGRAWDLAQDDAAKLVSSQPASGIVKLGAGQKLPAPSAQDREGMALNCLEAPLDVDIKNGGRVVVLNTQNLPLVKEVGLGADLVRIDAHSMCSPGFSCDSAYQVTYIVRGSGRVQVVGTDGKRVLETQVEGGYLFIVPRFFVVSKIADASGLEWFSIITTPNPIFSHLAGKTSVWKAISPEVLEASFNTTPKMEKLFRSKRLDSEIFFAPN

SEQ ID NO: 66528 - protein, 127 aa, Setaria italica
  Transcript Sequence Number=SeqID_554
VVSYFLHLAVSFNQDNLYIFVGIYVSVTTFPSLTAVLGQMFLECVILHWMDVLQIDIIPTIYNRWTRLVSVACSYLCLMDHIIGKLLVVTMGVMELALVAATQSGGHFAIWFELIYISYTVVLNFLV

SEQ ID NO: 66529 - protein, 79 aa, Setaria italica
  Transcript Sequence Number=SeqID_555
  Subcellular localization annotation: CTP_CleavageSite=59; ConfidenceScore=5.46e-01
KNNSSRDNFALKTLGRSSSLKAQAEQRPPNPRFRPLSRPPRDLDLTRLPVPPSASYLLAAAAVLGLLGGLLLYMLPRKR

SEQ ID NO: 66530 - protein, 63 aa, Setaria italica
  Transcript Sequence Number=SeqID_556
  Gene Ontology: Mol. function=small protein activating enzyme activity; Cellular component=cytoplasm; Biological process=ubiquitin- dependent protein catabolic process
  Homolog annotation: Hit_ID=P20973; Match level="QueryCoverage=95%, HitCoverage=5%, E-value=1e-26, Identity=93%"; Hit description =Ubiquitin-activating enzyme E1 1
  Pfam annotation: Domain name=UBACT; Domain location=6-63; Score=70.8; E_value=5e-18; Accession=PF02134.13; Description=Repeat in ubiquitin -activating (UBA) protein
AVFYMQDDDTNFHMDLIAGFANMRARNYSIPEVDKLKAKFIAGRIIPAIATSTAMATGLVCLE

SEQ ID NO: 66531 - protein, 39 aa, Setaria italica
  Transcript Sequence Number=SeqID_557
REVAKVEVPSYRRHLDVVVACEDDDDNDVDIPLVSIYFR

SEQ ID NO: 66532 - protein, 490 aa, Setaria italica
  Transcript Sequence Number=SeqID_558
  Gene Ontology: Mol. function=dihydrolipoyl dehydrogenase activity; Cellular component=cytoplasm; Biological process=cell redox homeostasis
  Homolog annotation: Hit_ID=Q9ASP4; Match level="QueryCoverage=91%, HitCoverage=89%, E-value=0.0, Identity=94%"; Hit description =Dihydrolipoyl dehydrogenase
  Pfam annotation: Domain name=DAO; Domain location=27-449; Score= -29.4; E_value=0.00095; Accession=PF01266.16; Description=FAD dependent oxidoreductase
  Pfam annotation: Domain name=FAD_binding_2; Domain location=27-355; Score=-141.3; E_value=0.019; Accession=PF00890.16; Description=FAD binding domain
  Pfam annotation: Domain name=GIDA; Domain location=27-351; Score= -218.0; E_value=0.0018; Accession=PF01134.14; Description=Glucose inhibited division protein A
  Pfam annotation: Domain name=HI0933_like; Domain location=26-347; Score=-242.2; E_value=0.0012; Accession=PF03486.6; Description =HI0933-like protein
  Pfam annotation: Domain name=Pyr_redox; Domain location=198-295; Score=117.0; E_value=6.1e-32; Accession=PF00070.19; Description =Pyridine nucleotide-disulphide oxidore
  Pfam annotation: Domain name=Pyr_redox_2; Domain location=27-341; Score=270.4; E_value=4.2e-78; Accession=PF07992.6; Description =Pyridine nucleotide-disulphide oxidore
  Pfam annotation: Domain name=Pyr_redox_dim; Domain location=370-480; Score=196.3; E_value=8.3e-56; Accession=PF02852.14; Description =Pyridine nucleotide-disulphide oxidored
  Pfam annotation: Domain name=Thi4; Domain location=8-243; Score= -136.0; E_value=0.05; Accession=PF01946.9; Description=Thi4 family
  Pfam module annotation: Pfam domain module=DAO::FAD_binding _2::GIDA::HI0933_like::Pyr_redox::Pyr_redox_2::Pyr_redox_dim::Thi4; Domain location=27-449::27-355::27-351::26-347::198-295::27-341::370- 480::8-243
CGGRRRRRAGAAVSAWRAYAAAGEESDVVVVGGGPGGYVAAIKAAQLGLKTTCIEKRGTLGGTCLNVGCIPSKALLHSSHMYHEAKSSFAHHGVKFSNLEVDLPAMMAQKDKAVTGLTKGIEGLFKKNKVTYVKGFGKLASPSEVSVDLIDGGNTVVKGKNIIIATGSDVKSLPGITIDEKKVVSSTGALCLSEIPKKLVVIGAGYIGLEMGSVWNRLGSEVTVVEFAPDIVPSMDGEVRKQFQRMLEKQKFKFMLKTKVVGCDTSGDGVKLTLEPAAGGEQTILEADVVLVSAGRTPFTSGIGLETLGVETDKAGRILVDKRFMTNVKGVYAIGDAIPGPMLAHKAEEDGVACVEFIAGKEGHVDYDTVPGVVYTHPEVASVGKTEEQVKALGIAYRVGKFPLLANSRAKAIDDAEGIVKVVAEKETDNPILGVHIMAPNAGEIIHEAVLALQYGASSEDVARTCHAHPTVSEALKEACLQTFSKAIHI

SEQ ID NO: 66533 - protein, 502 aa, Setaria italica
  misc_feature (468)..(468): Xaa can be any naturally occurring amino acid
  Transcript Sequence Number=SeqID_559
  Gene Ontology: Mol. function=dihydrolipoyl dehydrogenase activity; Cellular component=cytoplasm; Biological process=cell redox homeostasis
  Homolog annotation: Hit_ID=B9FML1; Match level="QueryCoverage=93%, HitCoverage=92%, E-value=0.0, Identity=92%"; Hit description =Dihydrolipoyl dehydrogenase
  Pfam annotation: Domain name=DAO; Domain location=39-428; Score= -41.3; E_value=0.0057; Accession=PF01266.16; Description=FAD dependent oxidoreductase
  Pfam annotation: Domain name=FAD_binding_2; Domain location=39-367; Score=-132.3; E_value=0.0067; Accession=PF00890.16; Description=FAD binding domain
  Pfam annotation: Domain name=GIDA; Domain location=39-363; Score= -220.8; E_value=0.0027; Accession=PF01134.14; Description=Glucose inhibited division protein A
  Pfam annotation: Domain name=HI0933_like; Domain location=38-359; Score=-240.6; E_value=0.00096; Accession=PF03486.6; Description =HI0933-like protein
  Pfam annotation: Domain name=Pyr_redox; Domain location=210-307; Score=124.0; E_value=4.7e-34; Accession=PF00070.19; Description =Pyridine nucleotide-disulphide oxidore
  Pfam annotation: Domain name=Pyr_redox_2; Domain location=39-353; Score=278.3; E_value=1.7e-80; Accession=PF07992.6; Description =Pyridine nucleotide-disulphide oxidore
  Pfam annotation: Domain name=Pyr_redox_dim; Domain location=382-492; Score=207.5; E_value=3.6e-59; Accession=PF02852.14; Description =Pyridine nucleotide-disulphide oxidored
  Pfam annotation: Domain name=Thi4; Domain location=10-255; Score= -132.7; E_value=0.029; Accession=PF01946.9; Description=Thi4 family
  Pfam module annotation: Pfam domain module=DAO::FAD_binding _2::GIDA::HI0933_like::Pyr_redox::Pyr_redox_2::Pyr_redox_dim::Thi4; Domain location=39-428::39-367::39-363::38-359::210-307::39-353::382- 492::10-255
MAMASLARRRAADALLRRPQAAAWASALRAYAASGEESDVVVIGGGPGGYVAAIKAAQMGLKTTCIEKRGTLGGTCLNVGCIPSKALLHSSHMYHEAKSSFAHHGVKFSNLEIDLPAMMSQKDKAVAGLTKGIEGLFKKNKVDYVKGFGKFVSPSEVSVDLIDGGSTTVKGKNIIIATGSDVKSLPGVTIDEKKIVSSTGALALQEIPKKLVVIGAGYIGLEMGSVWNRLGSEVTVVEFAPEIVPSMDGEIRKQFQRMLEKQKMKFMLKTKVVGVDTSGSGVKLTVEPAAGGEQSVLDADIVLVSAGRTPYTAGLGLDTIGVEMDKGGRILVDKRFMTNVNGVYAIGDAIPGPMLAHKAEEDGVACVEFIAGKEGHVDYDTVPGVVYTHPEVASVGKTEEQVKASGIAYQVGKFPLMANSRAKAIDDAEGLVKVVAEKETDRVLGVHIMAPNAGEIIHEAVLALQYGXASSEDIARTCHAHPTVSEALKEACLQTYTKAIHI

SEQ ID NO: 66534 - protein, 1053 aa, Setaria italica
  Transcript Sequence Number=SeqID_560
  Gene Ontology: Mol. function=small protein activating enzyme activity; Cellular component=cytoplasm; Biological process=ubiquitin- dependent protein catabolic process
  Homolog annotation: Hit_ID=B9GBE8; Match level="QueryCoverage=100%, HitCoverage=100%, E-value=0.0, Identity=86%"; Hit description =Ubiquitin-activating enzyme E1
  Pfam annotation: Domain name=ThiF; Domain location=464-608; Score =173.1; E_value=8.2e-49; Accession=PF00899.13; Description=ThiF family
  Pfam annotation: Domain name=ThiF; Domain location=67-206; Score =22.8; E_value=3.7e-08; Accession=PF00899.13; Description=ThiF family
  Pfam annotation: Domain name=UBACT; Domain location=751-812; Score =47.8; E_value=4.2e-11; Accession=PF02134.13; Description=Repeat in ubiquitin-activating (UBA) protein
  Pfam annotation: Domain name=UBACT; Domain location=852-920; Score =118.9; E_value=1.7e-32; Accession=PF02134.13; Description=Repeat in ubiquitin-activating (UBA) protein
  Pfam annotation: Domain name=UBA_e1_C; Domain location=926-1048; Score=234.4; E_value=2.9e-67; Accession=PF09358.2; Description =Ubiquitin-activating enzyme e1 C-term
  Pfam annotation: Domain name=UBA_e1_thiolCys; Domain location=610 -658; Score=132.2; E_value=1.7e-36; Accession=PF10585.1; Description =Ubiquitin-activating enzyme active si
  Pfam module annotation: Pfam domain module=ThiF::ThiF::UBACT::UBACT::U BA_e1_C::UBA_e1_thiolCys; Domain location=464-608::67-206::751 -812::852-920::926-1048::610-658
MLPRKRGVDAGEVQDLHNKAPRPASPSPDQDKEELLGEMAARAPEIDEDLHSRQLAVYGRETMKRLFGSNVLVSGLQGLGAEIAKNLVLAGVKSVTLHDDGKVDLWDLSSNFFLSEKDVGQNRAQACVPKLQELNNAVIISTITGDLTKEQLSNFQAVVFTDISIEKAVEFDDYCHSHQPPIAFIKSEVRGLFGSVFCDFGPEFTVLDVDGEEPHTGIVASISNDNPALVSCVDDERLEFQDGDLVVFSEVHGMTELNDGKPRKIKSARPYSFTLEEDTTSYGTYIRGGIVTQVKPPKVLKFKTLKEAIKEPGEFLMSDFSKFDRPPLLHLAFQALDKFRAELLRFPIAGSADDAKKLIDFAMSINESLGDSKLEEIDKKLLQHFASGSRAVLNPMAAMFGGIVGQEVVKACSGKFHPLYQFFYFDSVESLPVEPLEPSDLKPENSRYDAQISVFGAKLQKKLEQSKIFMVGSGALGCEFLKNLALMGISCSENGKLTVTDDDVIEKSNLSRQFLFRDWNIGQPKSTVAATAAMAINPKLHVEALQNRASPETENVFNDAFWESLDAVVNALDNVTARMYIDSRCVYFQKPLLESGTLGAKCNTQMVIPHLTENYGASRDPPEKQAPMCTVHSFPHNIDHCLTWARSEFEGLLEKTPTEVNAFLSNPSGYATAARTAGDAQARDQLERVIECLDRDKCETFQDCITWARLKFEDYFANRVKQLTFTFPEDAMTSSGAPFWSAPKRFPRPLEFSSADPSHLNFLLAASILRAETFGIPIPDWAKNPKKLAEAVDKVIVPDFQPRQGVKMETDEKATSLSSASVDDAAVIEELIAKLESINKTLPSGFHMNPIQFEKDDDTNFHMDLIAGFANMRARNYSIPEVDKLKAKFIAGRIIPAIATSTAMATGLVCLELYKVLAGGHKVEDYRNTFANLAIPLFSMAEPVPPKTIKHQDMSWTVWDRWTITGNITLRELLEWLKEKGLNAYSISCGTSLLYNSMFPRHKERLDKKVVDVAREVAKVEVPSYRRHLDVVVACEDDDDNDVDIPLVSIYFR

SEQ ID NO: 66535 - protein, 93 aa, Setaria italica
  Transcript Sequence Number=SeqID_561
FEGVALKISDFSLAAQQGFGAVLQGCCSRAHLLFLYLVQLFLIPWWRRQLKVGRAVPARELEEGRTVAARGMEGEAREQKNCWRLPPVNRNGS

SEQ ID NO: 66536 - protein, 67 aa, Setaria italica
  Transcript Sequence Number=SeqID_562
GRYIELIFQYLKGLNKCLSYQLQLIGWRFELCHHEHQVFSSCVTCTCYPLNMKHVGVLCFHNHILKL

SEQ ID NO: 66537 - protein, 95 aa, Setaria italica
  misc_feature (51)..(51): Xaa can be any naturally occurring amino acid
  Transcript Sequence Number=SeqID_563
  Homolog annotation: Hit_ID=B6TKR2; Match level="QueryCoverage=95%, HitCoverage=20%, E-value=3e-16, Identity=51%"; Hit description=Nuf2 family protein
RKKNKQKMTTLKSEVESELKCLADREREIEEKIAKAADLCSQSDSVEVAGXKKREEIYATFEQVCETANMYMDGIDRSRKEVDEASMAIISQIGP

SEQ ID NO: 66538 - protein, 72 aa, Setaria italica
  Transcript Sequence Number=SeqID_564
GSSKTIDLSRLIIISKIYQTTGSISQDYTLASRSECYLCRIISAEIPGNKNRESASSTCSSPFLKYNHKTLE

SEQ ID NO: 66539 - protein, 173 aa, Setaria italica
  Transcript Sequence Number=SeqID_565
  Homolog annotation: Hit_ID=B6U078; Match level="QueryCoverage=98%, HitCoverage=41%, E-value=1e-14, Identity=37%"; Hit description=F-box domain containing protein
APFADAADFSYSFVPAGRWLTPWHPRDVRQGRVLLECTPECDPAFEYYDTVLLRDLDLAVCDPLSRRYSLLPRIPINLCGQHKHLIGFGLFLAPTGEDDEETTFRVVCVACNKTMVVVFEFTSITGEWHIPAYLSCNSLGTVMTDTRYSSSCHDNEQSRFYWIVPWRSKLLVL

SEQ ID NO: 66540 - protein, 54 aa, Setaria italica
  Transcript Sequence Number=SeqID_566
TRKNRLIEEVKNLEQAANFREFTGHDHWIVDLSSKDKTRNNNAPALNPVSAAAE

SEQ ID NO: 66541 - protein, 61 aa, Setaria italica
  Transcript Sequence Number=SeqID_567
LYAPSPPSPSFLPPLRSPAHRLEEPPPDLAQGNRPTTPASPDWRSGSPARYFSDLKIPYYL

SEQ ID NO: 66542 - protein, 87 aa, Setaria italica
  misc_feature (60)..(60): Xaa can be any naturally occurring amino acid
  Transcript Sequence Number=SeqID_568
  Subcellular localization annotation: CTP_CleavageSite=38; ConfidenceScore=5.73e-01
MPSPASYLLINPAKPSSFRRLPPPPPSPRLPTRRLHVSCDAPRGSGRSGGVGGRRETIPXAGASKAKKQIVFFDAAPPVSQPQPQQG

SEQ ID NO: 66543 - protein, 65 aa, Setaria italica
  Transcript Sequence Number=SeqID_569
VDQLGPIPASLDCTMFRPKKTLTFLYTNPAYIWQLFFRSQFDIARFSNYFFSIKVSFGIHKECIH

SEQ ID NO: 66544 - protein, 88 aa, Setaria italica
  misc_feature (71)..(71): Xaa can be any naturally occurring amino acid
  Transcript Sequence Number=SeqID_570
  Homolog annotation: Hit_ID=B6TVU6; Match level="QueryCoverage=86%, HitCoverage=40%, E-value=4e-36, Identity=92%"; Hit description =YGL010w-like protein
LRPTQLFCWTWQFLGHGLFEKKGPTVSELPEVFLMEPFLIFLQILNKLFGYEPYPGFCKNVDKKMEADLRXAESSSRGRPADRSVIWY

SEQ ID NO: 66545 - protein, 125 aa, Setaria italica
  misc_feature (33)..(33): Xaa can be any naturally occurring amino acid
  Transcript Sequence Number=SeqID_571
  Subcellular localization annotation: CTP_CleavageSite=29; ConfidenceScore=5.16e-01
GTRLQEPPRPPARSPHQPLPPPPSPPLGVAELXASRLALQPPGAAPQLRRWSPRAPSPPPSPPAPPRTAAAGRYPRPEGARPTSSSSPAAVVPTSETPLLPAPPSLSTPPPPPSSRKVATAAVVC

SEQ ID NO: 66546 - protein, 155 aa, Setaria italica
  Transcript Sequence Number=SeqID_572
  Homolog annotation: Hit_ID=Q69T67; Match level="QueryCoverage=94%, HitCoverage=17%, E-value=2e-36, Identity=47%"; Hit description =Lustrin A-like
  Pfam annotation: Domain name=DUF231; Domain location=1-146; Score =195.1; E_value=1.9e-55; Accession=PF03005.7; Description=Arabidopsis proteins of unknown function
KGDHVHPHLEASTAFQRALITWASWIDRYIDPRKTRVFFRSSSPSHFSGGEWNSGGHCRESTLEPNDSCAWPMPEINVMLEQISKQMKMPVTILNITDLSRLRTDGHPSVFRRKGVDLTASSAQDCSHWCLPGVPDTWNELLFYHLLSSKKDLTR

SEQ ID NO: 66547 - protein, 60 aa, Setaria italica
  Transcript Sequence Number=SeqID_573
  Subcellular localization annotation: CTP_CleavageSite=50; ConfidenceScore=5.47e-01
KQAVREKKKRTPRTSTSPRKSQSLPLRTTYLPPPVQPPYLACSRASPPTPAASVQASISL

SEQ ID NO: 66548 - protein, 112 aa, Setaria italica
  Transcript Sequence Number=SeqID_574
  Gene Ontology: Mol. function=nucleotide binding; Cellular component =endoplasmic reticulum lumen; Biological process=response to stress
  Homolog annotation: Hit_ID=P24067; Match level="QueryCoverage=75%, HitCoverage=12%, E-value=6e-37, Identity=88%"; Hit description =Luminal-binding protein 2
NLNTDLVLVAEGSLGTLSFPPQLSKSTGPVKKAMEDAGLEKSQIHEIVLVGGSTRIPKVQQLLRDYFDGKEPSKGVNPDEAVAYGAAVQGSILSGEGGDETKGLSLFLCSLF

SEQ ID NO: 66549 - protein, 266 aa, Setaria italica
  Transcript Sequence Number=SeqID_575
  Gene Ontology: Mol. function=nucleotide binding; Cellular component =endoplasmic reticulum lumen; Biological process=RNA interference
  Homolog annotation: Hit_ID=P24067; Match level="QueryCoverage=90%, HitCoverage=36%, E-value=1e-134, Identity=97%"; Hit description =Luminal-binding protein 2
  Pfam annotation: Domain name=HSP70; Domain location=5-266; Score =76.3; E_value=1.1e-19; Accession=PF00012.12; Description=Hsp70 protein
QGPWSCGTDHCSAPQTWHGSTAMEDAGLEKSQIHEIVLVGGSTRIPKVQQLLRDYFDGKEPSKGVNPDEAVAYGAAVQGSILSGEGGDETKDILLLDVAPLTLGIETVGGVMTKLIPRNTVIPTKKSQVFTTYQDQQTTVSMQVFEGERSMTKDCRLLGKFDLSGIPPAPRGTPQIEVTFEVDANGILNVKAEDKGTGKSEKITITNEKGRLSQEEIDRMVREAEEFAEEDKKVKEKIDARNQLETYVYNMKNTIGDKDKLADKLE

SEQ ID NO: 66550 - protein, 209 aa, Setaria italica
  misc_feature (80)..(80): Xaa can be any naturally occurring amino acid
  misc_feature (203)..(203): Xaa can be any naturally occurring amino acid
  Transcript Sequence Number=SeqID_576
  Gene Ontology: Mol. function=nucleotide binding; Cellular component =endoplasmic reticulum lumen; Biological process=response to stress
  Homolog annotation: Hit_ID=P24067; Match level="QueryCoverage=91%, HitCoverage=28%, E-value=2e-99, Identity=96%"; Hit description =Luminal-binding protein 2
  Pfam annotation: Domain name=HSP70; Domain location=1-209; Score= -132.5; E_value=1.7e-09; Accession=PF00012.12; Description=Hsp70 protein
LIGHPSDGFPHVGSCELIGSTRIPKVQQLLRDYFDGKEPSKGVNPDEAVAYGAAVQGSILSGEGGDETKDILLLDVAPLXPLGIETVGGVMTKLIPRNTVIPTKKSQVFTTYQDQQTTVSIQVFEGERSMTKDCRLLGKFDLSGIPPAPRGTPQIEVTFEVDANGILNVKAEDKGTGKSEKITITNEKGRLSQEEIDRMVREXAEEFAE

SEQ ID NO: 66551 - protein, 132 aa, Setaria italica
  Transcript Sequence Number=SeqID_577
  Subcellular localization annotation: CTP_CleavageSite=42; ConfidenceScore=5.42e-01
MLCTYVSSWFRASISACMLLVVLLVSLLSSPSSPSPLTASIAAATGGGGGVSGGVGDDIPTALVTALTFVVAVTAATFLLALLFYLRCTPCLRAYLGFSALAVLFVLGGQVALLLLSRLRFPLDAVSFALLL

SEQ ID NO: 66552 - protein, 67 aa, Setaria italica
  Transcript Sequence Number=SeqID_578
IVSPGYICNRCTSQWLLTIAHVHFLQFHLSDSLRTAQVIVSCLLVTSIPNQRNKVIHIQTWYHIPTN

SEQ ID NO: 66553 - protein, 667 aa, Setaria italica
  misc_feature (279)..(279): Xaa can be any naturally occurring amino acid
  misc_feature (403)..(403): Xaa can be any naturally occurring amino acid
  misc_feature (501)..(501): Xaa can be any naturally occurring amino acid
  misc_feature (635)..(635): Xaa can be any naturally occurring amino acid
  Transcript Sequence Number=SeqID_579
  Gene Ontology: Mol. function=nucleotide binding; Cellular component =endoplasmic reticulum lumen; Biological process=RNA interference
  Homolog annotation: Hit_ID=P24067; Match level="QueryCoverage=96%, HitCoverage=97%, E-value=0.0, Identity=90%"; Hit description=Luminal- binding protein 2
  Pfam annotation: Domain name=HSP70; Domain location=35-644; Score =1327.3; E_value=0; Accession=PF00012.12; Description=Hsp70 protein
  Pfam annotation: Domain name=MreB_Mbl; Domain location=33-418; Score=- 217.3; E_value=6e-06; Accession=PF06723.5; Description=MreBMbl protein
  Pfam module annotation: Pfam domain module=HSP70::MreB_Mbl; Domain location=35-644::33-418
MDRVRGSAFLLGVLLAGSLFAFSVAKEETKKLGTVIGIDLGTTYSCVGVYKNGHVEIIANDQGNRITPSWVAFTDSERLIGEAAKNQAAVNPERTIFDVKRLIGRKFQDKEVQRDMKLVPYNIVNKEGKPYIQVKIKDGENKVFSPEEISAMILGKMKDTAEAYLGKKINDAVVTVPAYFNDAQRQATKDAGVIAGLNVARIINEPTAAAIAYGLDKKGGEKNILVFDLGGGTFDVSILTIDNGVFEVLATNGDTHLGGEDFDQRIMEYFIKLIKKKYXKDISKDNRALGKLRREAERAKRALSNQHQVRVEIESLFDGTDFSEPLTRARFEELNNDLFRKTMGPVKKAMEDAGLEKSQIHEIVLVGGSTRIPKVQQLLRDYFDGKEPSKGVNPDEAVAYGAXAVQGSILSGEGGDETKDILLLDVAPLTLGIETVGGVMTKLIPRNTVIPTKKSQVFTTYQDQQTTVSIQVFEGERSMTKDCRLLGKFDLSGIPPAPRGXPQIEVTFEVDANGILNVKAEDKGTGKSEKITITNEKGRLSQEEIDRMVREAEEFAEEDKKVKEKIDARNQLETYVYNMKNTIGDKDKLADKLESEEKEKVEEALKEALEWLDDNQSAEKEDYEEKLKEVEAVCXNPIISAVYQKSGGAPGGGADEEGGVDDDHDEL

SEQ ID NO: 66554 - protein, 115 aa, Setaria italica
  Transcript Sequence Number=SeqID_580
  Homolog annotation: Hit_ID=Q6ASX1; Match level="QueryCoverage=93%, HitCoverage=8%, E-value=3e-17, Identity=51%"; Hit description=FYVE zinc finger containing protein
KGDDILPVLASEPIKSVDTLGGSPSKPQIETVVSKQGHASKESSGQGHASKESSGGTSSALPQPAFTDPLGSEKGSQSPSEVLDHKEPQKTHGDDTLKAEILLHKRKAVAFKRRK

SEQ ID NO: 66555 - protein, 488 aa, Setaria italica
  misc_feature (15)..(15): Xaa can be any naturally occurring amino acid
  Transcript Sequence Number=SeqID_581
  Homolog annotation: Hit_ID=Q6ASX1; Match level="QueryCoverage=100%, HitCoverage=43%, E-value=1e-109, Identity=51%"; Hit description=FYVE zinc finger containing protein
  Pfam annotation: Domain name=DUF2051; Domain location=228-475; Score=- 151.4; E_value=0.079; Accession=PF09738.1; Description=Double stranded RNA binding protein (
  Pfam annotation: Domain name=TPR_2; Domain location=230-263; Score =9.4; E_value=2.3; Accession=PF07719.9; Description=Tetratricopeptide repeat
  Pfam annotation: Domain name=TPR_2; Domain location=330-363; Score =10.1; E_value=1.9; Accession=PF07719.9; Description=Tetratricopeptide repeat
  Pfam annotation: Domain name=TPR_2; Domain location=451-484; Score =7.6; E_value=3.8; Accession=PF07719.9; Description=Tetratricopeptide repeat
  Pfam annotation: Domain name=TPR_2; Domain location=57-90; Score=8.6; E_value=2.9; Accession=PF07719.9; Description=Tetratricopeptide repeat
  Pfam module annotation: Pfam domain module=DUF2051::TPR_2::TPR_2::TPR_ 2::TPR_2; Domain location=228-475::230-263::330-363::451-484::57-90
VTDNDMQDPALLSVXLKNMGWEDVDTDSVKRTDKPLISSHVVPQKSSKTKGQLQKELLGIKRKALALRREGKNIEAEEELEKAKVLEQQLAEIEESSNLTASQQGVTTAGHQITENKYDVQHIPSVDATAPTSSVRKAMKGDDILPVLASEPIKSVDTLGGSPSKPQIETVVSKQGHASKESSGGTSSALPQPAFTDPLGSEKGSQSPSEVLDHKEPQKTHGDDTLKAEILLHKRKAVAFKREGKMAEAREELKLAKLLEKRLEGAQQESVDVGDESTTAVQQSSMVQQLASSSNHTDAVASAPPARASMSMQPKKAMSSRDRLKIQRESLAHKRNALKLRREGKTAEADAEFELAKELESQLEESDNQGSSSGGEPNDAVVENLLDPQIMSALKSIGWSDMDLSMQSSSSQPLKPAQSSMAQPPKKLEAKKAAAATSKPQSERSQLEEEIKAEKLKALNLKREGKQAEALEALRSAKRLEKKLASLG

SEQ ID NO: 66556 - protein, 271 aa, Setaria italica
  Transcript Sequence Number=SeqID_582
  Gene Ontology: Mol. function=iron-sulfur cluster binding; Cellular component=mitochondrion; Biological process=iron-sulfur cluster assembly
  Homolog annotation: Hit_ID=B9SG71; Match level="QueryCoverage=76%, HitCoverage=76%, E-value=1e-103, Identity=85%"; Hit description=HIRA- interacting protein, putative
  Pfam annotation: Domain name=Nfu_N; Domain location=73-159; Score =204.7; E_value=2.5e-58; Accession=PF08712.3; Description=Scaffold protein NfuNifU N terminal
  Pfam annotation: Domain name=NifU; Domain location=187-257; Score =129.0; E_value=1.5e-35; Accession=PF01106.9; Description=NifU-like domain
  Pfam module annotation: Pfam domain module=Nfu_N::NifU; Domain location=73-159::187-257
  Subcellular localization annotation: CTP_CleavageSite=32; ConfidenceScore=5.40e-01
MARRRLLALAFQLQRRAPATQPWRRASPRFLSSAAYSSLERLRTPPFAGPAARNPAASPWDRFGGGQKRTMFIQTQSTPNPQSLMFYPGKPVMEVGSSDFPNARTAMTSPLAKALFAIDGVTRVFFGSDFVTVTKSEETSWDYLKPEVFAAIMDFYSSGQPIFLDSNVAASMDTAIHEDDSEIVAMIKELLETRIRPAVQDDGGDIEYRGFDPETGIVKLKMQGACSGCPSSSVTLKSGIENMLMHYVPEVKGVEQEFDGDEEAELAGQLE

SEQ ID NO: 66557 - protein, 69 aa, Setaria italica
  Transcript Sequence Number=SeqID_583
AMKVEIYQNISERWRASVSRVRNIHDLIIFLEYAGERHIFILRKEHRLQCATTNRALKHPNRLELYYAS

SEQ ID NO: 66558 - protein, 60 aa, Setaria italica
  Transcript Sequence Number=SeqID_584
  Homolog annotation: Hit_ID=Q2QQ52; Match level="QueryCoverage=100%, HitCoverage=24%, E-value=6e-20, Identity=75%"; Hit description =Autophagocytosis associated protein, C-terminal domain containing protein, expressed
  Pfam annotation: Domain name=Autophagy_act_C; Domain location=10-60; Score=28.1; E_value=3.5e-05; Accession=PF03987.7; Description =Autophagocytosis associated protein,
WVQSSSDNIHVYDFHVVYSHSYKVPVLYFQGHRSDGQLLTTDEIKQDLPSNSLKVLSESK

SEQ ID NO: 66559 - protein, 216 aa, Setaria italica
  Transcript Sequence Number=SeqID_585
  Gene Ontology: Mol. function=protein binding; Cellular component =intracellular; Biological process=positive regulation of protein modification process
  Homolog annotation: Hit_ID=B8XVR1; Match level="QueryCoverage=100%, HitCoverage=100%, E-value=2e-87, Identity=75%"; Hit description =Autophagy-related 10 variant 1
  Pfam annotation: Domain name=Autophagy_act_C; Domain location=96-169; Score=115.7; E_value=1.6e-31; Accession=PF03987.7; Description =Autophagocytosis associated protein,
MGGSPVGDGTLSLDGFNASATALVKRWKEIEVDDSLPDWTWKPCSNLGVPSQVEGYLALEGVYRDCGGSQIEEEDSSDGADVGYDTWVQSSSDNIHVYDFHVVYSHSYKVPVLYFQGHRSDGQLLTTDEIKQDLPSNSLKVLSESKWTFITREEHPHLSRPWFTLHPCATGDWMKLLLEESKVAYEEQSPRYLPAWLSVVGQAVGLKIPLELHCKS

SEQ ID NO: 66560 - protein, 214 aa, Setaria italica
  misc_feature (71)..(71): Xaa can be any naturally occurring amino acid
  Transcript Sequence Number=SeqID_586
  Gene Ontology: Mol. function=RNA-directed DNA polymerase activity; Biological process=RNA-dependent DNA replication
  Homolog annotation: Hit_ID=Q9LGH0; Match level="QueryCoverage=65%, HitCoverage=39%, E-value=2e-40, Identity=55%"; Hit description=NAM -like protein-like
MKPIKGILIIITIHVLTNSHKQLKKVPAAPPARPNHKRSKNFSDHEDEVLVSGWLNVSLDPVVGKDQKRCXYWSRIYEYFNQHKMCPSTRTMNSLMHRWETIQKCVNKFSGCLSRIELRRQSGTTMQDKVAEACALYKFEDEHQKTFQFMHCWNKLRTQPKWLAKIDELAAGKTSHKKQKTSSSASLPIELGEGEVQGIEDNALTRPIGKKKAN

SEQ ID NO: 66561 - protein, 97 aa, Setaria italica
  Transcript Sequence Number=SeqID_587
  Gene Ontology: Biological process=Mo-molybdopterin cofactor biosynthetic process
  Homolog annotation: Hit_ID=B6TYR9; Match level="QueryCoverage=40%, HitCoverage=16%, E-value=4e-13, Identity=97%"; Hit description =Molybdenum cofactor synthesis protein 2 large subunit
  Pfam annotation: Domain name=MoaE; Domain location=34-97; Score= -28.3; E_value=0.0065; Accession=PF02391.9; Description=MoaE protein
MAGGDLPPAEEATAAAAVKEAEEEEAAAEEDLIEIVEEGSGRLDIARYVDHVRDLSAGAIATFEGTTRDHFAGRHVVELRYEAYAAMARRRLAGILR

SEQ ID NO: 66562 - protein, 74 aa, Setaria italica
  Transcript Sequence Number=SeqID_588
  Gene Ontology: Mol. function=protein serine/threonine phosphatase activity; Cellular component=protein serine/threonine phosphatase complex; Biological process=protein amino acid dephosphorylation
  Homolog annotation: Hit_ID=A5A6P8; Match level="QueryCoverage=86%, HitCoverage=13%, E-value=5e-30, Identity=93%"; Hit description =Protein phosphatase 2C
NLVTSNCGDSRAVLCRGKQPVPLSVDHKPNREDEYARIEAEGGKVIQWNGYRVFGVLAMSRSIGMPVQHTALLI

SEQ ID NO: 66563 - protein, 58 aa, Setaria italica
  Transcript Sequence Number=SeqID_589
SLMNRRNVVTYMLTSTISQSSWQIEQTNSQISVKFYDLHNGERYMHILYKYIETKTAN

SEQ ID NO: 66564 - protein, 387 aa, Setaria italica
  Transcript Sequence Number=SeqID_590
  Gene Ontology: Mol. function=protein serine/threonine phosphatase activity; Cellular component=protein serine/threonine phosphatase complex; Biological process=protein amino acid dephosphorylation
  Homolog annotation: Hit_ID=B6SVM9; Match level="QueryCoverage=95%, HitCoverage=76%, E-value=1e-166, Identity=79%"; Hit description =Protein phosphatase 2C ABI2
  Pfam annotation: Domain name=PP2C; Domain location=73-370; Score =247.6; E_value=3e-71; Accession=PF00481.13; Description=Protein phosphatase 2C
SADFEGVGLGFFAAAEGGGPMVFEDSAASAATVEAEARVAAGGRSVFAVDCVPLWGYTSICGRRPEMEDAVATVPRFFDVPLWMLTGNAAIDGLDPMTFRLPAHFFGVYDGHGGAQVANYCREHLHVALVEQLSRIEGTVCAANLGDVEFKEQWENAFVDCFARVDDEVGGKASRGGGGTGTSDASAAVVPEPVAPETVGSTAVVAVICSSHIIVSNCGDSRAVLCRGKQPVPLSVDHKPNREDEYARIEAEGGKVIQWNGYRVFGVLAMSRSIGDRYLKPWIIPVPEVTIVPRAKDDECLVLASDGLWDVMSNEEVCDIARKRILLWHKKNGTSSSSAPRVGDSADPAAQAAAECLSKLALQKGSKDNITVVVVDLKAQRKFKSKT

SEQ ID NO: 66565 - protein, 62 aa, Setaria italica
  Transcript Sequence Number=SeqID_591
  Gene Ontology: Mol. function=transcription cofactor activity; Cellular component=nucleus; Biological process=transcription from RNA polymerase II promoter
  Homolog annotation: Hit_ID=Q10AP7; Match level="QueryCoverage=100%, HitCoverage=15%, E-value=7e-21, Identity=77%"; Hit description=Pirin, putative, expressed
  Pfam annotation: Domain name=Pirin; Domain location=20-62; Score= -26.8; E_value=0.018; Accession=PF02678.8; Description=Pirin
ERPRQVVRKFLARPQHEGVGAVVRRSIGRFELRYFDPFLVLDEFSVSAPAGFPDHPHRGFET

SEQ ID NO: 66566 - protein, 147 aa, Setaria italica
  Transcript Sequence Number=SeqID_592
  Gene Ontology: Cellular component=nucleus
  Homolog annotation: Hit_ID=B9SN16; Match level="QueryCoverage=36%, HitCoverage=18%, E-value=9e-13, Identity=64%"; Hit description=Pirin, putative
PRKRSERAGRGELSLLTSRRNGIRADSRAPPLLLLLYKRPQRQRAKPSSSSYSPARNTGPAAGGRRSRSRRLEAWRSSSREEVGDLSQQPAAMEKPRQVVRKFLARPQHEGVGAVVRRSIGRFELRYFDPFLVLDEFSVSAPGPGSP

SEQ ID NO: 66567 - protein, 112 aa, Setaria italica
  Transcript Sequence Number=SeqID_593
  Gene Ontology: Mol. function=structural constituent of ribosome; Cellular component=ribonucleoprotein complex; Biological process =translational elongation
  Homolog annotation: Hit_ID=O24415; Match level="QueryCoverage=100%, HitCoverage=100%, E-value=2e-27, Identity=63%"; Hit description=60S acidic ribosomal protein P2B
  Pfam annotation: Domain name=Ribosomal_60s; Domain location=17-111; Score=119.1; E_value=1.4e-32; Accession=PF00428.11; Description=60s Acidic ribosomal protein
MKMIAAYLLAVLGGNTSPTADDVKSILESVGAEADEEKLDFLLTELKDKDITEVIAAGREKFASVPSGGGAIAMGAPVAAAGGAAPAEEEKKEEKVEEKEESDDDMGFSLFD

SEQ ID NO: 66568 - protein, 65 aa, Setaria italica
  Transcript Sequence Number=SeqID_594
KSWCRLCNGLALICILLVHKIVLTENQFVNETPSYMKTSQQTCCGCRSVGDWVGRFNGKISPKRW

SEQ ID NO: 66569 - protein, 56 aa, Setaria italica
  Transcript Sequence Number=SeqID_595
IFSIIEQIQLIIDNRVKTTLKDVCKLFPFSVINCFLVHCSQLFLTNLFLRAQAEIF

SEQ ID NO: 66570 - protein, 68 aa, Setaria italica
  Transcript Sequence Number=SeqID_596
  Homolog annotation: Hit_ID=B6UBY7; Match level="QueryCoverage=91%, HitCoverage=35%, E-value=3e-23, Identity=83%"; Hit description =Lachrymatory-factor synthase
ESNKGIGRYRATLRVEHDPAGCAVAWSFEADPVEGWTQEGFLGFLDKLARGVARRLEEEINVVEGDGV

SEQ ID NO: 66571 - protein, 309 aa, Setaria italica
  Transcript Sequence Number=SeqID_597
  Gene Ontology: Mol. function=DNA binding; Cellular component=nucleus
  Homolog annotation: Hit_ID=B6TRL2; Match level="QueryCoverage=63%, HitCoverage=42%, E-value=1e-57, Identity=63%"; Hit description=Brain acid soluble protein 1
  Pfam annotation: Domain name=MBD; Domain location=14-84; Score=46.9; E_value=8.1e-11; Accession=PF01429.11; Description=Methyl-CpG binding domain
MATDGEQQQQAPPAEEVVSVEMPAPEGWTKKFTPQRGGRSEIVFVSPTGEEIKNKRQLSQYLKAHPGGPAVSEFDWGTGDTPRRSARISEKVKVFDSPEGEKIPKRSRNSTGRKGRQEKKEAPETEEAKDAEAGKDAAEEAPGEDAVKDTDVAMKPAEEVKEAPTETEGAENAVDKADAPAPAPAAEENKETEKPAESVVAPPAPLEEKKDAVEENKEDANPAEAEAAAPAPASNPTEISAPAPAEPAAAAAPAPETKSDAAAAAAAPASGTKPDAAPVENSADKGASQESQPNAVNNGQLPPSAVKCT

SEQ ID NO: 66572 - protein, 73 aa, Setaria italica
  Transcript Sequence Number=SeqID_598
TNSRNHVTEYNYEINALKIQICKDQNMTASSMSVKTGNRSMPTTDGSFLIFGDMVKFANQSCKVITSHNIDAC

SEQ ID NO: 66573 - protein, 284 aa, Setaria italica
  misc_feature (274)..(274): Xaa can be any naturally occurring amino acid
  Transcript Sequence Number=SeqID_599
  Homolog annotation: Hit_ID=B9S8B9; Match level="QueryCoverage=98%, HitCoverage=18%, E-value=5e-72, Identity=50%"; Hit description=Wd40 protein, putative
  Pfam annotation: Domain name=WD40; Domain location=1-38; Score=7.4; E_ value=5.2; Accession=PF00400.24; Description=WD domain, G-beta repeat
  Pfam annotation: Domain name=WD40; Domain location=189-230; Score =40.4; E_value=7.4e-09; Accession=PF00400.24; Description=WD domain, G-beta repeat
  Pfam annotation: Domain name=WD40; Domain location=43-82; Score=17.4; E_value=0.059; Accession=PF00400.24; Description=WD domain, G-beta repeat
  Pfam module annotation: Pfam domain module=WD40::WD40::WD40; Domain location=1-38::189-230::43-82
PKPLETYNYNRDEINQIAVSSKGFLAAADDSGDVKIVNTIQKCLYKRLREAHTSICSSVQFIPWRPWTAITGGLDSKLAAWDFSKGRTLFSIDYGSPELQNGSSSGSAGQCFNPAFVHSLAVSEEGILGGLYKVCAVARGDGAVDVVNLEYELAPAKSKGPPWAATSTMSSKRTEVGDGSSNQSQVKRIHLDYTMGGHTAAVSCVTFSAFGEKGKFLVSGGNDASVKIWDWSKGFSSETNSNAELVLDIDVKKKVNWLCTTPTDSDNLIVCDTXSKVVKVYNFR

SEQ ID NO: 66574 - protein, 68 aa, Setaria italica
  Transcript Sequence Number=SeqID_600
RLFSLFFFFSVGWWRRNQKMRITSVLATSVAFDYPYQLHSLTSAGRVCHPWWEAHLSVSLDSRSRIFF

SEQ ID NO: 66575 - protein, 70 aa, Setaria italica
  Transcript Sequence Number=SeqID_601
TATMKAISTRVRGGVLACALLIVAQTASLACCSSLTQLLPEALPRNVRSCEAFGGERRAAWNRGRGRRYV

SEQ ID NO: 66576 - protein, 64 aa, Setaria italica
  Transcript Sequence Number=SeqID_602
AFLDTFYVLGARMIGRWLGGDPAMARRRGEMIGRWKGRRRSDRSSPPAVHHAGALALDPGDAEA

SEQ ID NO: 66577 - protein, 128 aa, Setaria italica
  Transcript Sequence Number=SeqID_603
  Subcellular localization annotation: CTP_CleavageSite=74; ConfidenceScore=5.66e-01
GGARPTPGLNLRSYSASYAASYGPTITPGRSGGGGQLKRSGSVTNWTSANRRSVNLRGYTPSFAALDDTATAVPAAKKAAALDDAELQRRKRLVMYKTYDVEGKVRESVRRGVTWIKGKCSRVVYGWW

SEQ ID NO: 66578 - protein, 68 aa, Setaria italica
  misc_feature (6)..(6): Xaa can be any naturally occurring amino acid
  Transcript Sequence Number=SeqID_604
  Subcellular localization annotation: CTP_CleavageSite=50; ConfidenceScore=5.28e-01
RNGRRXALSSSPPSRPPHSSTPTLTLVTHVYSLSQRVHLLSFLLLLVHILCKVAVFYLIQVNSLDFWC

SEQ ID NO: 66579 - protein, 334 aa, Setaria italica
  Transcript Sequence Number=SeqID_605
  Gene Ontology: Mol. function=zinc ion binding; Cellular component =integral to membrane
  Homolog annotation: Hit_ID=Q28H82; Match level="QueryCoverage=90%, HitCoverage=91%, E-value=7e-32, Identity=33%"; Hit description=Novel protein containing rhomboid domain
  Pfam annotation: Domain name=DER1; Domain location=30-234; Score= -69.3; E_value=0.0048; Accession=PF04511.7; Description=Der1-like family
  Pfam annotation: Domain name=Rhomboid; Domain location=68-222; Score =65.4; E_value=2.2e-16; Accession=PF01694.14; Description=Rhomboid family
  Pfam annotation: Domain name=zf-RanBP; Domain location=273-302; Score= 21.9; E_value=0.0022; Accession=PF00641.10; Description=Zn-finger in Ran binding protein and others
  Pfam module annotation: Pfam domain module=DER1::Rhomboid::zf-RanBP; Domain location=30-234::68-222::273-302
RGFGLEASRGMLPLLALQVLMEYGRAGASRPPVTAALLAANALIYLRPGALHEILPSIDRVSFNPQLIIEYRDWARFFLSPFYHLSESHLFYNMTSLLWKGIQLETSMGSAEFASMVAALLGLSQGITLLLAKGLILFGDYTAYYDQYAVGFSGVLFAMKVVLNAWSDDFVYLHGMVIPAKYAAWAELILIQIFIPGTSFLGHLGGILAGLVYLWLKRTFNGPDPLTLLISSITKVVTWPLKFAQKLLRSVRSQGRITGRGRVGRRASARETGRGLWRCSTCTYDNSIATDICEMCSTAREDRSFSQRQNHQAGGSGELSVVEIRRRRLQRFDR

SEQ ID NO: 66580 - protein, 281 aa, Setaria italica
  Transcript Sequence Number=SeqID_606
  Gene Ontology: Cellular component=nucleolus
  Homolog annotation: Hit_ID=O48698; Match level="QueryCoverage=58%, HitCoverage=56%, E-value=1e-61, Identity=70%"; Hit description =F3I6.25 protein
GRGGQITTQMAPVAPLPLSPSDRDIQAIVDAYKEDPGNPRYAFRHLLFSVTDPSQRVKPVAASDIMWAEAMGKLECMDSADRERLWPQLVQGFKDLSHRLKLQDEVLVSDTDRLSMTHSNVKKLQRHFQADTYPWIQRLKQQELVIQRRLLRFVRIVEALENRGYRSPLTTEEADLYERLVAMLKRLKGPSADLSRRVNTLISTSRLLASTGGAGGPVYIPNSAKVDERSVTELLEALQQQTEAVAKLGNVLKRDIRDLEIIQSEDTDMAEDSVGRRALKI

SEQ ID NO: 66581 - protein, 108 aa, Setaria italica
  Transcript Sequence Number=SeqID_607
TILVISLPSFKLVRMGRCLYARDPRGETSACVVLVLALVAAFEENPVCAEKCSLRVDLPGETVEPESCVSVAGDGEGAVWAGLVLKRASEACGEYRVGLSHKHSSTTG

SEQ ID NO: 66582 - protein, 76 aa, Setaria italica
  misc_feature (28)..(28): Xaa can be any naturally occurring amino acid
  misc_feature (48)..(48): Xaa can be any naturally occurring amino acid
  Transcript Sequence Number=SeqID_608
  Gene Ontology: Mol. function=nucleic acid binding
  Homolog annotation: Hit_ID=Q2R3J1; Match level="QueryCoverage=88%, HitCoverage=2%, E-value=8e-10, Identity=49%"; Hit description =Transposon protein, putative, Mutator sub-class
RCTTPMILYYVVELQMLHRVMRQFGRMXPCPPLELSTSEQLHRIDRRXRYKDNDWRVKHAQYLIMWENRQSCAPRN

SEQ ID NO: 66583 - protein, 81 aa, Setaria italica
  Transcript Sequence Number=SeqID_609
  Gene Ontology: Mol. function=hydrolase activity
  Homolog annotation: Hit_ID=B6U4K5; Match level="QueryCoverage=100%, HitCoverage=14%, E-value=5e-35, Identity=87%"; Hit description =Embryogenesis-associated protein EMB8
KCRSLHGRYLATPWLASPHLQTLFLGISGRPPSFTYKRQLYTVRDGGTIALDWLLVSDLEDGDGFISENSSTPLVVVVPGL

SEQ ID NO: 66584 - protein, 466 aa, Setaria italica
  Transcript Sequence Number=SeqID_610
  Gene Ontology: Mol. function=hydrolase activity; Cellular component =integral to membrane; Biological process=biological_process
  Homolog annotation: Hit_ID=B6U4K5; Match level="QueryCoverage=99%, HitCoverage=80%, E-value=0.0, Identity=87%"; Hit description =Embryogenesis-associated protein EMB8
  Pfam annotation: Domain name=Abhydrolase_1; Domain location=71-293; Score=24.6; E_value=5.7e-05; Accession=PF00561.12; Description =alphabeta hydrolase fold
LQFTYKRQLYTVRDGGTIALDWLLVSDLEDGDGFISENSSTPLVVVVPGLTSDSAAAYVKHLVYSIASKGWNVVVSNHRGLGGVSITSDCFYNGGWTEDVREVIKYLHHRYPKTPLFCVGTSIGANIVVKYLGEEGENTPVAGAAAICSPWDLLIGDRFISRKLVQRIYDKALAIGLKGYAKLHQPVLARLANWEGIKKSRSIREFDHHATCVVSRYETVDTYYRRCSSASYVGNVSVPLLCINALDDPLCTREAIPWDECRANKNIVLATTPNGGHLAFFQGLTARRLWWVGAASEFLFALHDSSYMHWQKANDHVLHSSLESSIDKSPYVNIMEDGMVAPVTKDGPGNNDGSPSKHEVDGVQLSNGVGGRQQLEVSGEKHDEHANGTGNDSTAGSANRQGEDVYNNKLHEIIAPVKRSINQLTRYQGRSVWLLAYIAFVTSWPLLGSLAFITFRKKFRNLLRAK

SEQ ID NO: 66585 - protein, 93 aa, Setaria italica
  Transcript Sequence Number=SeqID_611
FHLDTPKIKAISKQLNFRTQSRSISIFRQNHKRRQVYFTISIPHAAHHPTSRYCTNPNLHHQSPFKEPHKMTCPQKLSRQRKSRGFCICCHRV

SEQ ID NO: 66586 - protein, 166 aa, Setaria italica
  misc_feature (49)..(49): Xaa can be any naturally occurring amino acid
  misc_feature (81)..(81): Xaa can be any naturally occurring amino acid
  Transcript Sequence Number=SeqID_612
  Gene Ontology: Mol. function=ATPase activity, coupled to transmembrane movement of ions, phosphorylative mechanism; Cellular component=integral to membrane; Biological process=phospholipid transport
  Homolog annotation: Hit_ID=P98205; Match level="QueryCoverage=100%, HitCoverage=15%, E-value=7e-77, Identity=78%"; Hit description =Putative phospholipid-transporting ATPase 2
MKRFVYINDDLRRQSYCDNRISNTKYNLWNFFPKNLWEQFRRFMNQYFXLIACLQLWSRITPVSPATTWGPLIIIFIVSAXKEAWDDYNRYLSDKKANEREVWLVKDGIRRQIKAQEIHVGDIVWLHENDEIPCDLVLIGTSDPQGICYVETSALDGETDLKTRIV

SEQ ID NO: 66587 - protein, 88 aa, Setaria italica
  Transcript Sequence Number=SeqID_613
  Homolog annotation: Hit_ID=B6TUU3; Match level="QueryCoverage=56%, HitCoverage=32%, E-value=6e-21, Identity=98%"; Hit description =Surfeit locus protein 5
  Pfam annotation: Domain name=SURF5; Domain location=17-86; Score =11.8; E_value=0.00044; Accession=PF06179.4; Description=Surfeit locus protein 5
  Subcellular localization annotation: CTP_CleavageSite=70; ConfidenceScore=5.25e-01
MSKVGGGAGSAPGPTAAAAAAAVQKQKSLLQKADADVSSLVDNFSSLINIARVNDPPVRNSQEAFQMEMRAARMVHSADSLLKLVSVT

SEQ ID NO: 66588 - protein, 58 aa, Setaria italica
  Transcript Sequence Number=SeqID_614
  Gene Ontology: Mol. function=aspartic-type endopeptidase activity; Biological process=proteolysis
  Homolog annotation: Hit_ID=B6TJN6; Match level="QueryCoverage=81%, HitCoverage=9%, E-value=2e-15, Identity=82%"; Hit description=Pepsin A
VQPKVKTTPLVPGMPHYNVNLKGIAVGGATLQLPTNTFDSGRNKGTINCLREVRQCCP

SEQ ID NO: 66589 - protein, 68 aa, Setaria italica
  misc_feature (13)..(13): Xaa can be any naturally occurring amino acid
  Transcript Sequence Number=SeqID_615
  Gene Ontology: Mol. function=aspartic-type endopeptidase activity; Cellular component=plasma membrane; Biological process=proteolysis
  Homolog annotation: Hit_ID=B6U0A1; Match level="QueryCoverage=97%, HitCoverage=13%, E-value=3e-28, Identity=87%"; Hit description =Pepsin A
PLHCNVYPHDYLXFQNGNDFYCVGFLNGGLQTKDGKDMVLLGDLVLSNKLVVYDLENQVIGWTDYNCK

SEQ ID NO: 66590 - protein, 449 aa, Setaria italica
  Transcript Sequence Number=SeqID_616
  Gene Ontology: Mol. function=aspartic-type endopeptidase activity; Cellular component=plasma membrane; Biological process=proteolysis
  Homolog annotation: Hit_ID=B6U0A1; Match level="QueryCoverage=93%, HitCoverage=86%, E-value=0.0, Identity=82%"; Hit description=Pepsin A
  Pfam annotation: Domain name=Asp; Domain location=45-399; Score= -67.5; E_value=1.5e-09; Accession=PF00026.15; Description=Eukaryotic aspartyl protease
AGGAGEEAEEHLAALRRHDGRRHGRLLGAVDLPLGGVGLPTETGLYFTRIEIGAPPKGYYVQVDTGSDILWVNCIRCDGCPTRSGLGIELTQYDPAGSGSTVGCNQEFCVANNDGVRPTCSSESPCQFRITYGDGSSTTGFFVNDLLQYDKVSGDGQTTPSNASITFGCGAQLGGDLGSSSQALDGILGFGQSNSSMLSQLAAAGKVQKIFAHCLDTVHGGGIFAIGNVVQPKVKTTPLVPGMPHYNVNLKGIAVGGATLQLPTNTFDSGRNKGTIIDSGTTLAYLPEAVYKTLMSAVFDKYQDMTIRTYQDFLCFKFSGSVDDGFPIITFSFEEDLTLNVYPHDYLFQNGNDFYCVGFLNGGLQTKDGKDMVLLGDLVLSNKLVVYDLENQVIGWTDYNCSSSIKIKDDMTGFTYTVDAHNLSSGWRFQWHNSLVLLLVTTIWSYLMF

SEQ ID NO: 66591 - protein, 104 aa, Setaria italica
  Transcript Sequence Number=SeqID_617
LQIPEKKKKGKLCILCHAISVNRSMQIAEFAFALFPNMLGQSCRGLVLVLEKLRNFFTVCSTNECQLEILKFRKFHCEMQRLKLGPALTHSQPLRCGEKYELAR

SEQ ID NO: 66592 - protein, 176 aa, Setaria italica
  misc_feature (158)..(158): Xaa can be any naturally occurring amino acid
  Transcript Sequence Number=SeqID_618
  Gene Ontology: Mol. function=ATPase activity, coupled to transmembrane movement of substances; Cellular component=integral to membrane; Biological process=transport
  Homolog annotation: Hit_ID=Q6UNK5; Match level="QueryCoverage=98%, HitCoverage=12%, E-value=5e-84, Identity=86%"; Hit description=PGP1
NDDAKKATPPAALRDLFRFADGLDCVLMLVGTLGALVHGCSLPVFLRFFADLVDSFGSHADDPDTMVRLVVKYAFYFLVVGAAIWASSWAEISCWMWTGERQTTRMRIRYLDAALRQDVSFFDTDVRASDVIYAINADAVLVQDAISEKLGNLIHLLXSFVAGFVVGFTAAWQLRR

SEQ ID NO: 66593 - protein, 86 aa, Setaria italica
  Transcript Sequence Number=SeqID_619
  Gene Ontology: Mol. function=transferase activity, transferring glycosyl groups; Biological process=metabolic process
  Homolog annotation: Hit_ID=B6UAG9; Match level="QueryCoverage=97%, HitCoverage=16%, E-value=2e-34, Identity=82%"; Hit description =Cytokinin-O-glucosyltransferase 3
GAPGLVDSRACSDDARRCMAWLDAKKANSVLYVSFGSAGRMPPEQLMQLGLALVSCPWPVIWVIKGADSLPDDVHEWLQHNTNDDG

SEQ ID NO: 66594 - protein, 133 aa, Setaria italica
  misc_feature (36)..(36): Xaa can be any naturally occurring amino acid
  Transcript Sequence Number=SeqID_620
  Gene Ontology: Mol. function=acid phosphatase activity; Cellular component=cell wall; Biological process=biological_process
  Homolog annotation: Hit_ID=B6SWS9; Match level="QueryCoverage=93%, HitCoverage=26%, E-value=2e-65, Identity=96%"; Hit description =Purple acid phosphatase
MTPYLASKSSSPMWYAVRRASAHIIVLSSYSPFVKXTPQWWWLKNELKRVDREKTPWLIVLMHSPMYNSNEAHYMEGESMRAAFEKWFVKYKVDLVFAGHVHAYERSYRISNVNYNITSGNRYHIAFQMSTTT

SEQ ID NO: 66595 - protein, 362 aa, Setaria italica
  Transcript Sequence Number=SeqID_621
  Gene Ontology: Mol. function=acid phosphatase activity; Cellular component=extracellular region; Biological process=biological_process
  Homolog annotation: Hit_ID=B6SWS9; Match level="QueryCoverage=100%, HitCoverage=76%, E-value=0.0, Identity=93%"; Hit description=Purple acid phosphatase
  Pfam annotation: Domain name=Metallophos; Domain location=41-238; Score=72.4; E_value=1.7e-18; Accession=PF00149.20; Description =Calcineurin-like phosphoesterase
HHCLVSGLEYNTKYYYKIGNGDSAREFWFETPPAIDPDASYTFGIIGDLGQTFNSLSTLQHYEKTGGQTVLFVGDLSYADRYEHDDGIRWDSWGRLVERSTAYQPWIWNSGNHEIEYRPDLGETSTFKPYLHRYMTPYLASKSSSPMWYAVRRASAHIIVLSSYSPFVKYTPQWWWLKNELKRVDREKTPWLIVLMHSPMYNSNEAHYMEGESMRAAFEKWFVKYKVDLVFAGHVHAYERSYRISNVNYNITSGNRYPVPNKSAPVYITVGDGGNQEGLASRFLDPQPDYSAFREASYGHSILQLKNRTHAVYCWNRNDDGNHVPADTVVFHNQYWTSSTRRRRLKKNHFHLENLEGLISLF

SEQ ID NO: 66596 - protein, 246 aa, Setaria italica
  Transcript Sequence Number=SeqID_622
  Gene Ontology: Mol. function=acid phosphatase activity; Cellular component=extracellular region; Biological process=biological_process
  Homolog annotation: Hit_ID=B6SWS9; Match level="QueryCoverage=82%, HitCoverage=42%, E-value=1e-112, Identity=95%"; Hit description =Purple acid phosphatase
  Subcellular localization annotation: CTP_CleavageSite=22; ConfidenceScore=5.01e-01
MMCWGLLVLSLHALSCLVSGVTSSRTSSYVRTAFPSTDIPLESEWFAVPKGYNAPQQVHITQGDYDGKAVIVSWVTQEEPGPSEVFYGKEKQYDQKAEGTTTNYTFYDYKSGYIHHCLVSGLEYNTKYYYKIGNGDSAREFWFETPPAIDPDASYTFGIIGDLGQTFNSLSTLQHYEKTGGQTVLFVGDLSYADRYEHDDGIRWDSWGRLVERSTAYQPWIWNSGNHEIEYRPDLVSYLHGFAIFC

SEQ ID NO: 66597 - protein, 93 aa, Setaria italica
  Transcript Sequence Number=SeqID_623
  Gene Ontology: Cellular component=nucleus; Biological process=cell -cell signaling
  Homolog annotation: Hit_ID=A4L9Q6; Match level="QueryCoverage=90%, HitCoverage=14%, E-value=2e-39, Identity=95%"; Hit description =Putative splicing factor
  Pfam annotation: Domain name=RED_N; Domain location=1-93; Score= -52.2; E_value=0.00055; Accession=PF07808.5; Description=RED-like protein N-terminal region
TFLAVVDGQDAHKISIEKSKYLGGDLEHTHLVKGLDYALLHKVRSEIEKKPDAEDGKDAKSRATKEDQAVSFRTAAAKSVYQWIIKPQSIIKE

SEQ ID NO: 66598 - protein, 58 aa, Setaria italica
  Transcript Sequence Number=SeqID_624
  Gene Ontology: Cellular component=nucleus
  Homolog annotation: Hit_ID=A4L9Q6; Match level="QueryCoverage=100%, HitCoverage=10%, E-value=3e-27, Identity=94%"; Hit description =Putative splicing factor
SQSVYQWIIKPQSIIKENELFLPGRMSFIYNMEEGLTNDIPTTLHRSKADCPVPEEMV

SEQ ID NO: 66599 - protein, 50 aa, Setaria italica
  Transcript Sequence Number=SeqID_625
  Gene Ontology: Cellular component=nucleus
  Homolog annotation: Hit_ID=A4L9Q6; Match level="QueryCoverage=100%, HitCoverage=8%, E-value=2e-20, Identity=96%"; Hit description =Putative splicing factor
EEGLTNDIPTTLHRSKADCPVPEEMVTVSVDGSVLDRIAKIMTYLRLGSS

SEQ ID NO: 66600 - protein, 54 aa, Setaria italica
  Transcript Sequence Number=SeqID_626
NIYKQISSIASARVKDIYFIPATLNKSSATQLAAKHGTVTIGVIFTLSATRTEK

SEQ ID NO: 66601 - protein, 164 aa, Setaria italica
  Transcript Sequence Number=SeqID_627
  Gene Ontology: Cellular component=nucleus
  Homolog annotation: Hit_ID=A4L9Q6; Match level="QueryCoverage=94%, HitCoverage=26%, E-value=6e-70, Identity=84%"; Hit description =Putative splicing factor
KTKKYLVSEDMDESPHNHQKQSYFTEPMYGPVPPSEPAQAWQQPNGYDAVQAQMVAAGYQGDWSGYAYAEQQLGYPEQYVQQSIQEYDVLADPSIAQDPSIAQDPRFMTQADKDRGLGSVFKRDDQRLNQLREKDAREKDPNFISDSYSECYPGYQEYHNEVAG

SEQ ID NO: 66602 - protein, 102 aa, Setaria italica
  Transcript Sequence Number=SeqID_628
  Subcellular localization annotation: CTP_CleavageSite=92; ConfidenceScore=5.09e-01
DGKLAFNSNNRLGTYKKLKREHTKKIGSVFVALPTKNMLYSWKRTQRSLLQCTSTFPSCTPAPARHPPCIQRHRPSLLSAPDSAGVTRFRPLAFAAFCRRTH

SEQ ID NO: 66603 - protein, 84 aa, Setaria italica
  Transcript Sequence Number=SeqID_629
  Gene Ontology: Cellular component=nucleus
  Homolog annotation: Hit_ID=A4L9Q6; Match level="QueryCoverage=95%, HitCoverage=14%, E-value=5e-25, Identity=73%"; Hit description =Putative splicing factor
  Pfam annotation: Domain name=RED_C; Domain location=1-81; Score=67.8; E_value=4.1e-17; Accession=PF07807.3; Description=RED-like protein C -terminal region
GGWYAEEEWAKYNDQKEAMPKAAFQFGVKMQDGRKTRKQNKDQKLNNDLHKINKILARKKGEKDGTDDGGHYDDDLPSAKKHRG

SEQ ID NO: 66604 - protein, 567 aa, Setaria italica
  Transcript Sequence Number=SeqID_630
  Gene Ontology: Cellular component=nucleus; Biological process=cell -cell signaling
  Homolog annotation: Hit_ID=A4L9Q6; Match level="QueryCoverage=100%, HitCoverage=100%, E-value=0.0, Identity=83%"; Hit description =Putative splicing factor
  Pfam annotation: Domain name=RED_C; Domain location=445-564; Score =229.9; E_value=6.4e-66; Accession=PF07807.3; Description=RED-like protein C-terminal region
  Pfam annotation: Domain name=RED_N; Domain location=5-222; Score =345.9; E_value=7.8e-101; Accession=PF07808.5; Description=RED-like protein N-terminal region
  Pfam module annotation: Pfam domain module=RED_C::RED_N; Domain location=445-564::5-222
MSSKKNYYKEKMMRRKEEKKEEPETPRYRDRAKERREDQNPDYEPTELGSFHAVAPPGTDLRLADAHKISIEKSKYLGGDLEHTHLVKGLDYALLHKVRSEIDKKPDAEDGKDAKSRATKEDQAVSFRTATAKSVYQWIIKPQSIIKENELFLPGRMSFIYNMEEGFTNDIPTTLHRSKADCPVPEEMVTVSVDGSVLDRIAKIMTYLRLGSSGKVLKKKKKERDTKGKNNLASGDYDEAVKPTQTNGSDLKHQSEKNMPPPPPPPPLNNNSNGKEKQSVPLARADNDDIFVGDGVDYSVPNKEMSQSPVSEDMDESPHNHQKQSYFTEPMYGPVPPSEPAQAWQQPSGYDAVQAQMVAAGYQGDWSGYAYAEQQMGYPEQFVQQSTQEYDVLADPSIAQDPRFMTQADKDRGLGSVFKRDDQRLNQLREKDAREKDPNFISDSYSECYPGYQEYHNEIAGSDDEDDLSKMDMGGRAKGRLHRWDFETEEEWAKYNDQKEAMPKAAFQFGVKMQDGRKTRKQNKDQKLNNDLHKINKILARKKGEKDGTDDGGHYDDDLPSAKKHRG

SEQ ID NO: 66605 - protein, 179 aa, Setaria italica
  Transcript Sequence Number=SeqID_631
DRQITTTKVTKGIHACKKQDLLSNEFPEFSLNYPPETHKTPKFRARTHNSLEQAHQSTEFSTRAQEAAWFPWAFLNHQQVEPTEASPRARQFNSRGKRIAGSLHPSDTPPTSSQFKKACGKHARAPFFPSLPFPSPSGEDEGHADHNSRLVAIGSTARPPKEKERVEGYGEMERETLVV

SEQ ID NO: 66606 - protein, 109 aa, Setaria italica
  Transcript Sequence Number=SeqID_632
  Gene Ontology: Mol. function=protein serine/threonine kinase activity; Biological process=protein amino acid phosphorylation
  Homolog annotation: Hit_ID=B6SVR9; Match level="QueryCoverage=100%, HitCoverage=18%, E-value=3e-42, Identity=79%"; Hit description =Protein kinase
KAANGKKGSSNLSVAVPREPTDDESPGALEFSFHPDEQSLKLQRACSSPAPFPRKETPGNDALTRSSSLSVLCDGPMVKQRARSPLPSRHIPEVFQEAKSASKRFSTPP

SEQ ID NO: 66607 - protein, 235 aa, Setaria italica
  Transcript Sequence Number=SeqID_633
  Gene Ontology: Mol. function=5'-3' exonuclease activity; Cellular component=nucleus; Biological process=nucleobase, nucleoside, nucleotide and nucleic acid metabolic process
  Homolog annotation: Hit_ID=B4FJZ1; Match level="QueryCoverage=100%, HitCoverage=55%, E-value=1e-124, Identity=93%"; Hit description=DNA polymerase I
  Pfam annotation: Domain name=5_3_exonuc; Domain location=102-205; Score=106.7; E_value=7.9e-29; Accession=PF01367.12; Description=5' -3' exonuclease, C-terminal SAM fold
  Pfam annotation: Domain name=5_3_exonuc_N; Domain location=1-99; Score=1.8; E_value=2.4e-10; Accession=PF02739.8; Description=5'-3' exonuclease, N-terminal resolvase-like domain
  Pfam module annotation: Pfam domain module=5_3_exonuc::5_3_exonuc_N; Domain location=102-205::1-99
PAYKSNRTPTPDTVVQGMQYLKASIKAMSIKVIEVPGVEADDVIGTLAVNSVSAGYKVRIVSPDKDFFQILSPSLRLLRIAPRGSGMVSFGVEDFVKRYGALKPSQFVDVVALSGDKADNIPGVDGIGDVNAVKLITKFGSLENLLKSVDEVEDERIKQALISDSEQAILCKSLATLRSDLPPYMVPFKTTDLVFQKPQDDGTKFIKLLRALEAYAEGSSADPIIRRATYLWNKL

SEQ ID NO: 66608 - protein, 87 aa, Setaria italica
  Transcript Sequence Number=SeqID_634
  Gene Ontology: Mol. function=5'-3' exonuclease activity; Cellular component=nucleus
  Homolog annotation: Hit_ID=B4FJZ1; Match level="QueryCoverage=100%, HitCoverage=20%, E-value=2e-37, Identity=87%"; Hit description=DNA polymerase I
EVEDERIKQALISDSEQAILCKSLAKLRSDLPPYMVPFKTTDLAFQKPQDDGTKFIKLLRALEAYAEGSSADPIIRRATYLWNKLKS

SEQ ID NO: 66609 - protein, 319 aa, Setaria italica
  misc_feature (84)..(84): Xaa can be any naturally occurring amino acid
  misc_feature (136)..(136): Xaa can be any naturally occurring amino acid
  Transcript Sequence Number=SeqID_635
  Gene Ontology: Mol. function=endonuclease activity; Cellular component=cytoplasm; Biological process=RNA-dependent DNA replication
  Homolog annotation: Hit_ID=Q2HUP4; Match level="QueryCoverage=57%, HitCoverage=63%, E-value=1e-47, Identity=51%"; Hit description =Endonuclease/exonuclease/phosphatase
  Pfam annotation: Domain name=Exo_endo_phos; Domain location=22-260; Score=61.9; E_value=2.4e-15; Accession=PF03372.15; Description =EndonucleaseExonucleasephosphatase family
QGSSHLSRRVRRARKLVEPTRIRVGSWNVGSLTGKLRELVELATRRHVNILCVQETKWKGQKTKVDNTGFKLWYIGTTANRNGXGVLIDKSLKDGAVDVRRQGYRIILVRLVVGDMVLNVISAYGPQVGHDESAKXAFWEDLDSLVRTVPSSEKLFIGDLNGHVGTTSAGFEAVHGGFGYGSRNQEGEEVLDFAVAFDLMIANTFFRKRWSHLVTFSSGQHYSQIDFILTRREDKRACLDCKVIPGECVVSQHKLVVADFRFQMRARRDKQAKIARTKWWKLKGKTSEVFNARTQRGPLQERSRMQTTCGRRWQTAFGR

SEQ ID NO: 66610 - protein, 52 aa, Setaria italica
  Transcript Sequence Number=SeqID_636
VSSISNSNAMCTRWRIPRGLTKTCMPMIVCIERFGSCLYSIHVICMSKFSPH

SEQ ID NO: 66611 - protein, 135 aa, Setaria italica
  Transcript Sequence Number=SeqID_637
  Homolog annotation: Hit_ID=B9HUU3; Match level="QueryCoverage=89%, HitCoverage=33%, E-value=8e-25, Identity=48%"; Hit description=PAF1 complex component
VVFFERPFKDRNALLDARGRDFLAVFQAALRRQDEQRKAGGKDAAASSRPDSGAGASALAKPKVVDRALGDGVVPIILVPSASQTLITIYNVKEFLEDGVFVPSEERMRATKGGKPESVTVQKKLIRAERAGAAG

SEQ ID NO: 66612 - protein, 88 aa, Setaria italica
  Transcript Sequence Number=SeqID_638
  Subcellular localization annotation: CTP_CleavageSite=62; ConfidenceScore=5.20e-01
WCKPQMWRTDLSNNCRYSSNWSDCLASCRTKMQHSMFIGWNSSGAAKSCGDRSLSRIPTLTRASNKIVRSVQLNGSTITSLPSPSHQA

SEQ ID NO: 66613 - protein, 91 aa, Setaria italica
  Transcript Sequence Number=SeqID_639
SIKLMCCNEARIKPVDCIIQNKIICFDLYVNSIWCSLNHCSISCATIPKCTGISYSRDRNILIVKTLHSIPKRWNAVKCCIVIKPLHSIPK

SEQ ID NO: 66614 - protein, 280 aa, Setaria italica
  misc_feature (26)..(26): Xaa can be any naturally occurring amino acid
  Transcript Sequence Number=SeqID_640
  Gene Ontology: Mol. function=methyltransferase activity; Cellular component=cytoplasm; Biological process=methylation
  Homolog annotation: Hit_ID=Q8WVE0; Match level="QueryCoverage=77%, HitCoverage=95%, E-value=3e-38, Identity=39%"; Hit description=N(6) -adenine-specific DNA methyltransferase 2
  Pfam annotation: Domain name=DPPF; Domain location=102-268; Score =297.1; E_value=3.9e-86; Accession=PF10237.1; Description =Uncharacterized conserved protein (DPPF)
  Subcellular localization annotation: CTP_CleavageSite=36; ConfidenceScore=5.12e-01
HWPVVSKWTSEAVVTARCPAPPPPPXSSPPHCRVVDAMAASGMEDERLSGEVRREEEDDDVPQLSAAAMEALREFLAEQQRPEEKDEEGREGGVELVAEDWRLSQFWYDERTARALVEEVVRLVSPSVSGSAAGAVACIACPTLYAYLKKTDPGVPAQLLEYDERFGQYGGDFTFYDYNRPEELPPAMKHAYRVVVADPPYLSKECLEKVAKTVSFLAQPEGSFLLMLTGEVQKDRALELLNVHPCGFRPQHSNKLGNEFRLFTNYDPADRLGGWDLGAK

SEQ ID NO: 66615 - protein, 171 aa, Setaria italica
  Transcript Sequence Number=SeqID_641
MAAAAARRQLPVPVPVPVRRVMSAKDKEEPDHKKETVEEEVVRLRGEVEALRREVQRLLRLNADLALVQTQRGQSKAIGGSDLPQQQQDKHDPATNRTQPPNKAPGGVPARPPPPPPPPPPRQKKPQGPSAPSTSPVSKATAVVDMYNSLTSNKKPQQQIDRGRSHHLLIN

SEQ ID NO: 66616 - protein, 169 aa, Setaria italica
  Transcript Sequence Number=SeqID_642
  Gene Ontology: Mol. function=lipid binding; Biological process=lipid transport
  Homolog annotation: Hit_ID=Q84RV7; Match level="QueryCoverage=42%, HitCoverage=26%, E-value=2e-10, Identity=43%"; Hit description=Non -specific lipid-transfer protein
  Subcellular localization annotation: CTP_CleavageSite=75; ConfidenceScore=5.29e-01
MAPSNNCTLIALLLVAFAVVLQPSSAIRVVEGALARATASSATEAAAPSSPGGSGGMPCSGFITNSSVYAPEPTCCDGFNSMFTYDTVTCLCHVVNGDVGRLLPAPMIHMRMVELFSVCGHDVPVEILAAACNMMDDVPPIDLPSPPPSTPLPLPAASAIAVGRMAMIN

SEQ ID NO: 66617 - protein, 173 aa, Setaria italica
  Transcript Sequence Number=SeqID_643
  Subcellular localization annotation: CTP_CleavageSite=43; ConfidenceScore=5.28e-01
HPTHYTQSYMVSRVLVQTLGLRLPLPSRRPGRSISAGGSTLVGCAADPSDPPCRRGQPAAEGPTCTHGCSDPWPRRHGAAVGPAMPPRRRFLRLCIWIRRSLCAPAQAPPLPTCTATPLPLSVSTWLRKTPVGTLGHRAVGAVGPLHRRLTSSSGRSAVGLRPSCPPSPVLSP

SEQ ID NO: 66618 - protein, 148 aa, Setaria italica
  Transcript Sequence Number=SeqID_644
  Homolog annotation: Hit_ID=Q5QT28; Match level="QueryCoverage=60%, HitCoverage=44%, E-value=7e-16, Identity=57%"; Hit description =Putative remorin 1 protein (Fragment)
  Pfam annotation: Domain name=Remorin_C; Domain location=87-146; Score= -21.0; E_value=0.062; Accession=PF03763.5; Description=Remorin, C -terminal region
  Pfam annotation: Domain name=Remorin_N; Domain location=18-85; Score =36.0; E_value=1.5e-07; Accession=PF03766.5; Description=Remorin, N -terminal region
  Pfam module annotation: Pfam domain module=Remorin_C::Remorin_N; Domain location=87-146::18-85
NERNGTNRNGPTRRTAKEDVAEEKAVIPASEPPAAEEKPVVEEKPADDSKALAIVEKVADEPAAEKPAAEKQGSSNDRDLALARVETEKRNSLIKAWEENEKTKAENKAAKKISAILSWENTKKANIEAQLKKIEVISFSPSFTPYNF

SEQ ID NO: 66619 - protein, 212 aa, Setaria italica
  Transcript Sequence Number=SeqID_645
  Gene Ontology: Mol. function=galacturonate binding; Cellular component=plasma membrane; Biological process=cell-cell signaling
  Homolog annotation: Hit_ID=B6SMZ7; Match level="QueryCoverage=73%, HitCoverage=76%, E-value=3e-35, Identity=56%"; Hit description =Remorin
  Pfam annotation: Domain name=Remorin_C; Domain location=98-207; Score= 162.6; E_value=1.2e-45; Accession=PF03763.5; Description=Remorin, C -terminal region
  Pfam annotation: Domain name=Remorin_N; Domain location=29-96; Score =36.0; E_value=1.5e-07; Accession=PF03766.5; Description=Remorin, N -terminal region
  Pfam module annotation: Pfam domain module=Remorin_C::Remorin_N; Domain location=98-207::29-96
MAEEAAKKVEVEVAKEPEAAPAAAEAAKEDVAEEKAVIPASEPPAAEEKPVVEEKPADDSKALAIVEKVADEPAAEKPAAEKQGSSNDRDLALARVETEKRNSLIKAWEENEKTKAENKAAKKISAILSWENTKKANIEAQLKKIEEELEKKKAEYAEKMKNKVAIIHKEAEEKRAMVEAKRGEEVLKAEEMAAKYRATGHAPKKLIGCFGA

SEQ ID NO: 66620 - protein, 85 aa, Setaria italica
  Transcript Sequence Number=SeqID_646
NLRIDFLNQAFQFLISFNSRTTQRQQQQEQHGSTIRLAPNPGLESSQMHHCFLHWPFSIRSSPNQNGLVNGSQLLLSKSGDFELT

SEQ ID NO: 66621 - protein, 243 aa, Setaria italica
  misc_feature (25)..(25): Xaa can be any naturally occurring amino acid
  misc_feature (173)..(173): Xaa can be any naturally occurring amino acid
  misc_feature (234)..(234): Xaa can be any naturally occurring amino acid
  Transcript Sequence Number=SeqID_647
  Gene Ontology: Mol. function=kinase activity; Cellular component =plasma membrane
  Homolog annotation: Hit_ID=Q94CG5; Match level="QueryCoverage=88%, HitCoverage=23%, E-value=2e-24, Identity=33%"; Hit description =Kinase interacting protein 1
QVCPSKKGQSSALHGSSEIEKCDEXSDGTVAQKQLVPKEPEGEEKILLEDYASVFQSYKDTEQKLSEMERRNQEYHIEAISELKELKSANATKDEEIHSLRRMLSSLQKKMTASITESIEKSEETSKISTSPATEDKEVAEIEEYIKQCQVDDSLACSVAEEKFRTEIDRVLXENLDFWLRFSTSYHQIQNFQTSFDKLKTEMRKLTDEQEQGGTYGFAASYQVAKLESAVLEXFRDLNTDLQ

SEQ ID NO: 66622 - protein, 230 aa, Setaria italica
  Transcript Sequence Number=SeqID_648
  Gene Ontology: Mol. function=oxidoreductase activity, acting on the CH-OH group of donors, NAD or NADP as acceptor; Cellular component =chloroplast; Biological process=cellular carbohydrate metabolic process
  Homolog annotation: Hit_ID=A7PMW6; Match level="QueryCoverage=97%, HitCoverage=74%, E-value=2e-97, Identity=77%"; Hit description =Malate dehydrogenase
  Pfam annotation: Domain name=Ldh_1_C; Domain location=54-221; Score =206.9; E_value=5.5e-59; Accession=PF02866.10; Description =lactatemalate dehydrogenase, alphabeta C-t
SAGIVKELAEAVAEHAPGALVHIISNPVNSTVPIAAEVLKQKGAYDPRKLFGVTTLDVVRANAFVAARKGLPLADVDVPVVGGHSGATILPLLSKARPKAPFTDEEVEELTARVQNAGTEVVEAKAGAGSATLSMAYAAARFVEASLRGLDGDGDVYECAYVQSQVVPELPFFASRVKLGREGMEEVVASELRGLSEYEARALEALKPQLKASIDKGVAYAQQQQEAALN

SEQ ID NO: 66623 - protein, 543 aa, Setaria italica
  Transcript Sequence Number=SeqID_649
  Gene Ontology: Mol. function=nucleic acid binding
  Homolog annotation: Hit_ID=B9SA19; Match level="QueryCoverage=97%, HitCoverage=61%, E-value=1e-129, Identity=44%"; Hit description =Pentatricopeptide repeat-containing protein, putative
  Pfam annotation: Domain name=PPR; Domain location=283-317; Score=2.1; E_value=5; Accession=PF01535.12; Description=PPR repeat
  Pfam annotation: Domain name=PPR; Domain location=318-352; Score=5.9; E_value=1.8; Accession=PF01535.12; Description=PPR repeat
  Pfam annotation: Domain name=PPR; Domain location=353-386; Score =11.8; E_value=0.36; Accession=PF01535.12; Description=PPR repeat
  Pfam annotation: Domain name=PPR; Domain location=388-422; Score =26.5; E_value=0.00011; Accession=PF01535.12; Description=PPR repeat
  Pfam annotation: Domain name=PPR; Domain location=489-523; Score =12.2; E_value=0.32; Accession=PF01535.12; Description=PPR repeat
  Pfam module annotation: Pfam domain module=PPR::PPR::PPR::PPR::PPR; Domain location=283-317::318-352::353-386::388-422::489-523
PPSKDPLMHWRREVAREKKKQYIFKNVESRRYTKLMQLCANKLGTKSTIEFFGKLGRETGVKEFNSLIKLCLNKARACNDVDSAAEYIYRAYRLFETMRDKGLMIEQDIYGPFLLYLVDVGLLEEFEMFTAFFKDANPQSSRIAYYEMLRYIRVQDEEKIQELCHSVENYNEEAHYDIAESYMLAFAESSRKEDLIALLDLLDLAKVSGSKYISNIFKSLGRLELENYAEKLLQGMRSKGCADGNISSLILYYAANIPNIMVEDMLVAFHKWHEKFEVAPSIAVYDKIISICCNSSKIGLALEVADCMCKSSSNVPIESFHPIIHACEQRGELHMARPMYNLIRQHNLKLKSETFRSMISLFVKMKDFEGAYNILTDAEESGELSTVSLYNAIMLGYYREKNHNGAQMVMSQMQIAGVKPDSETFSYLIVNCESEEDISKYHDQLRQDGIQMTRNIYMALINAYARLGNFDMAKQVLLDKEIPRKLLNDTKSALVGALASNGQVLDALHMYDDIKQSGGSIEPRAAIALIEHIRTEGELDRMH

SEQ ID NO: 66624 - protein, 293 aa, Setaria italica
  Transcript Sequence Number=SeqID_650
  Homolog annotation: Hit_ID=B9SA19; Match level="QueryCoverage=84%, HitCoverage=28%, E-value=2e-65, Identity=51%"; Hit description =Pentatricopeptide repeat-containing protein, putative
  Pfam annotation: Domain name=PPR; Domain location=111-144; Score=0.1; E_value=8.6; Accession=PF01535.12; Description=PPR repeat
  Pfam annotation: Domain name=PPR; Domain location=183-217; Score=5.7; E_value=1.9; Accession=PF01535.12; Description=PPR repeat
  Pfam annotation: Domain name=PPR; Domain location=43-77; Score=12.2; E_value=0.32; Accession=PF01535.12; Description=PPR repeat
  Pfam module annotation: Pfam domain module=PPR::PPR::PPR; Domain location=111-144::183-217::43-77
LLFNCLLRLSCLPLINAYARLGNFDMAKQVLLDKEIPRKLLNDTKSALVGALASNGQVLDALHMYDDIKQSGGSIEPRAAIALIEHIRTEGELDRMHQLLDELNDSSSWFEGCGRVILYCVQHNYPDAAIDLLKQLKEKDEMSTYMVVDQVFGQIWEMEITNLDLGMVLLHAVKELGLNVSRTSLDFLLSACVKLKNLQCAQQIWSEYESAGVSHNVLTSLRMYQALLSSGCWKAAKKLLKTISKEDEHVRYIINACHMTYCKEDLKPSATIKFGSKNRASSKQRATNEATEG

SEQ ID NO: 66625 - protein, 63 aa, Setaria italica
  misc_feature (12)..(12): Xaa can be any naturally occurring amino acid
  Transcript Sequence Number=SeqID_651
  Gene Ontology: Mol. function=protein binding; Cellular component =cytoskeleton; Biological process=actin filament polymerization
  Homolog annotation: Hit_ID=B6UFY0; Match level="QueryCoverage=100%, HitCoverage=36%, E-value=3e-28, Identity=95%"; Hit description=Actin- related protein 2/3 complex subunit 4
  Pfam annotation: Domain name=ARPC4; Domain location=1-62; Score=-0.3; E_value=6e-08; Accession=PF05856.4; Description=ARP23 complex 20 kDa subunit (ARPC4)
RKPVQGYDISFXTNYHCEDMHKHKLIDFIVQFMEDIDKEISELKLSVNTRGRLVATEFLKQFI

SEQ ID NO: 66626 - protein, 170 aa, Setaria italica
  misc_feature (135)..(135): Xaa can be any naturally occurring amino acid
  Transcript Sequence Number=SeqID_652
  Gene Ontology: Mol. function=protein binding; Cellular component =cytoskeleton; Biological process=actin filament polymerization
  Homolog annotation: Hit_ID=B6UFY0; Match level="QueryCoverage=99%, HitCoverage=97%, E-value=9e-92, Identity=98%"; Hit description=Actin- related protein 2/3 complex subunit 4
  Pfam annotation: Domain name=ARPC4; Domain location=1-169; Score =437.4; E_value=2.1e-128; Accession=PF05856.4; Description=ARP23 complex 20 kDa subunit (ARPC4)
MANTLRLYLTCIRNTLEAAMCLQNFPCQEVERHNKPEVELKTSPELLLNPVLICRNEAEKCLIETSINSIRISMKVKQADELENILAKKFLRFLSMRAEAFQVLRRKPVQGYDISFLITNYHCEDMHKHKLIDFXIVQFMEDIDKEISELKLSVNTRGRLVATEFLKQFI

SEQ ID NO: 66627 - protein, 105 aa, Setaria italica
  Transcript Sequence Number=SeqID_653
  Subcellular localization annotation: CTP_CleavageSite=33; ConfidenceScore=5.45e-01
TLHHRELPSLLTSRPSTALPSAVVSSLAHRSSTAARASSCLLHPRAEPPLPCLDPSLPAAPPSSPPVQDGAGAGRELQPPKLIATIPAHKLVYPEGLVECGSEIL

SEQ ID NO: 66628 - protein, 51 aa, Setaria italica
  misc_feature (44)..(44): Xaa can be any naturally occurring amino acid
  Transcript Sequence Number=SeqID_654
GFDERKRGLVKSIGFEGILYFPSLRQTNRKFALWIMSRVDPLSXTLVINDS

SEQ ID NO: 66629 - protein, 141 aa, Setaria italica
  misc_feature (70)..(70): Xaa can be any naturally occurring amino acid
  misc_feature (123)..(123): Xaa can be any naturally occurring amino acid
  Transcript Sequence Number=SeqID_655
  Gene Ontology: Mol. function=aspartic-type endopeptidase activity; Cellular component=chromatin; Biological process=DNA integration
  Homolog annotation: Hit_ID=Q7XM06; Match level="QueryCoverage=97%, HitCoverage=9%, E-value=1e-33, Identity=52%"; Hit description =OSJNBa0086O06.3 protein
QEMWDAVQYGDVDSHENRRALEALLAAVPMEMAANLSGKETAKAAWDAIAAARVGSDCARKSTLQKLRQXWDHLAFKPGEDVDNFALHLSSLMQWLEQYDDDKINKEKAITKFLRVVPKKYSXLAISIETLLDLSVVCSYS

SEQ ID NO: 66630 - protein, 36 aa, Setaria italica
  misc_feature (13)..(13): Xaa can be any naturally occurring amino acid
  Transcript Sequence Number=SeqID_656
  Gene Ontology: Mol. function=protein binding
  Homolog annotation: Hit_ID=Q6J6M8; Match level="QueryCoverage=100%, HitCoverage=6%, E-value=5e-12, Identity=88%"; Hit description=GAMYB -binding protein
MDPDFSRGSGGPXFEFAFNSVNFSDRVLRIEIVAGD

SEQ ID NO: 66631 - protein, 557 aa, Setaria italica
  Transcript Sequence Number=SeqID_657
  Pfam annotation: Domain name=CytochromB561_N; Domain location=1-557; Score=908.0; E_value=4.7e-270; Accession=PF09786.1; Description =Cytochrome B561, N terminal
AVLGLVALVTLLAFFRALILYNGKKALTKDDKVVLSERQLGLLGLKTAGSGGGMGEQTKRPPKTKPSTPSEPIVPIRKSSFSYTPSRPLGQSRIGSSHLSPGGERLTTALQMSPSTPLQKSVSSPSTPWSRKSSGSAKGIQTEAMLEQFLAGLDENIDKITDSETKTATPPATISSFGVATPVSVTTSTTPSGAARSTPLRPVRMSPSSHQKYSTPPKKGEGELPPPMSLEQAVEAFESLGVYPEIEQWRDSLRQWFSSVVMNPLVHKIKTSHTQVKQTTATVGASVTVSQVGSDLPSTTTPVTLSPLGGTKDWQPTVTVDEDGILNQLRSTLLRSRDAPVAQTFGSPQQPQQNPLLPAIQTCIDAITEHQRLNTLMKGELIKGLLPQSSVRADFTVQRVQELAEGTCLKNYDYMGHGNGYGKSEKKWISELPTDSHLLLYLFAAFLEHPKWMLHVDPTSYSGAQSSKNPLFLGVLPPKERFPEKYVALISGVPAIIHPGALILAVSKQSPPIFALYWDKKLQFSLQGRTALWDAILLLCHQINAGYCGVVRGIHYS

SEQ ID NO: 66632 - protein, 209 aa, Setaria italica
  Transcript Sequence Number=SeqID_658
  Gene Ontology: Mol. function=oxidoreductase activity, acting on the aldehyde or oxo group of donors, NAD or NADP as acceptor; Cellular component=cytoplasm; Biological process=methionine biosynthetic process
  Homolog annotation: Hit_ID=B6TWW1; Match level="QueryCoverage=100%, HitCoverage=54%, E-value=2e-98, Identity=85%"; Hit description =Aspartate-semialdehyde dehydrogenase
  Pfam annotation: Domain name=Semialdhyde_dhC; Domain location=9-194; Score=180.5; E_value=4.8e-51; Accession=PF02774.10; Description =Semialdehyde dehydrogenase, dimerisation domain
MVCLLGAFCKQINGHLLIWQVLRMVVSTYQAASGAGAAAMEELKLQTKEVLEGKAPTCNIFKQQYAFNIFSHNAPVLENGYNEEEMKMVKETRKIWNDKDVKVTATCIRVPVMRAHAESVNLQFEKALDEDTAREILRAAPGVTIVDDRAANRFPTPLEVSDKDDVAVGRIRQDLSQDDNRGLDIFVCGDQIRKGAALNAVQIAEMLLK

SEQ ID NO: 66633 - protein, 56 aa, Setaria italica
  Transcript Sequence Number=SeqID_659
RCFSFAFCFFPGSNEDGGGRCSLIFANCGSFLMHLICVIWVREVSCRNSRHHVCCD

SEQ ID NO: 66634 - protein, 286 aa, Setaria italica
  Transcript Sequence Number=SeqID_660
  Gene Ontology: Mol. function=zinc ion binding; Cellular component =cytoplasm; Biological process=intracellular protein transport
  Homolog annotation: Hit_ID=P93231; Match level="QueryCoverage=100%, HitCoverage=29%, E-value=1e-119, Identity=71%"; Hit description =Vacuolar protein sorting-associated protein 41 homolog
TGGLAGQVLVLTKKTWGGYHKKVLRDGEGPIHSMKWRTDLLAWANDAGVKVHDMKTDKGIAFIERPKGIPRPEFLLPHLVWQDDTVLVIGWGTSVKIAAIRTDSSQGLNGIQRTIAAVGSEKYVDIVGSFQTGYHISGIAPFGDLLVVLAYIPDEDEKEKKISTSVTSRQGTAQRPEIHLVSWKNDEVTTDALPIHGYEHYKAKDYALAHAPFSGSSNAGGQWAAGDEPLYYIVSPKDIVVAKPRDAEDHIAWLLQHDCHEKALAAVEAGQGPTELLDEVGSRYLD

SEQ ID NO: 66635 - protein, 119 aa, Setaria italica
  Transcript Sequence Number=SeqID_661
  Gene Ontology: Mol. function=metal ion binding
  Homolog annotation: Hit_ID=B9SHW0; Match level="QueryCoverage=95%, HitCoverage=29%, E-value=1e-36, Identity=64%"; Hit description =Ubiquitin-protein ligase, putative
  Pfam annotation: Domain name=TPR_2; Domain location=11-44; Score =15.3; E_value=0.26; Accession=PF07719.9; Description=Tetratricopeptid e repeat
  Pfam annotation: Domain name=TPR_2; Domain location=59-92; Score=9.0; E_value=2.5; Accession=PF07719.9; Description=Tetratricopeptide repeat
  Pfam module annotation: Pfam domain module=TPR_2::TPR_2; Domain location=11-44::59-92
EHRSRLVHTLSVSLNKIGDLRYYDGNLQSARNYYARSLDVRRNAVKEHSAVASQVIDLATSLAKVADVERNLGNESAAVEGFEEAIQCLEKLKLDSEQANLEQRRLSVLDFLHNQLADK

SEQ ID NO: 66636 - protein, 379 aa, Setaria italica
  Transcript Sequence Number=SeqID_662
  Gene Ontology: Mol. function=metal ion binding
  Homolog annotation: Hit_ID=Q9M2V1; Match level="QueryCoverage=98%, HitCoverage=91%, E-value=1e-124, Identity=58%"; Hit description=RING finger-like protein
  Pfam annotation: Domain name=TPR_1; Domain location=226-259; Score =6.7; E_value=0.92; Accession=PF00515.20; Description=Tetratricopeptid e repeat
  Pfam annotation: Domain name=TPR_1; Domain location=271-304; Score =8.1; E_value=0.63; Accession=PF00515.20; Description=Tetratricopeptid e repeat
  Pfam annotation: Domain name=TPR_1; Domain location=326-358; Score =3.3; E_value=2.3; Accession=PF00515.20; Description=Tetratricopeptide repeat
  Pfam annotation: Domain name=TPR_2; Domain location=226-259; Score =10.4; E_value=1.7; Accession=PF07719.9; Description=Tetratricopeptide repeat
  Pfam annotation: Domain name=TPR_2; Domain location=271-304; Score =15.3; E_value=0.26; Accession=PF07719.9; Description=Tetratricopeptid e repeat
  Pfam annotation: Domain name=TPR_2; Domain location=319-352; Score =9.0; E_value=2.5; Accession=PF07719.9; Description=Tetratricopeptide repeat
  Pfam annotation: Domain name=zf-C3HC4; Domain location=89-123; Score =13.4; E_value=0.003; Accession=PF00097.17; Description=Zinc finger, C3HC4 type (RING finger)
  Pfam module annotation: Pfam domain module=TPR_1::TPR_1::TPR_1::TPR _2::TPR_2::TPR_2::zf-C3HC4; Domain location=226-259::271-304::326 -358::226-259::271-304::319-352::89-123
MSSLCPFAGATTGGGVCPVKSDKSGAGVCPAKSDKSISGVCPVTGKDNSSEHKESTDNADEKGTDPRMVPAKCPFGYDSNTFKLGPLSCIICQALLHESSKCKPCAHKFCKACISRFKDCPLCGADIEGIEPDAELQALVDRFIDGHARIKRSHAARDVEAAGGNNKVIYEDVSMERGAFLVQQAMRAFRAQNIESAKSRLTMCADDIREELKSSEDNLDLCSQLGAVLGMLGDCCRTLGDAPSAITYYEESSEFLSKLPTKDLELVHTLSVSLNKIGDLRYYDGNLQSARNYYARSLDVRRNAVKEHSAVASQVIDLATSLAKVADVERNLGNESAAVEGFEEAIQCLEKLKLDSEQANLEQRRLSVLDFLHNQLADK

SEQ ID NO: 66637 - protein, 65 aa, Setaria italica
  Transcript Sequence Number=SeqID_663
  Gene Ontology: Mol. function=metal ion binding
  Homolog annotation: Hit_ID=B9SHW0; Match level="QueryCoverage=98%, HitCoverage=16%, E-value=2e-14, Identity=65%"; Hit description =Ubiquitin-protein ligase, putative
VIDLATSLAKVADVERNLGNESAAVEGFEEAIQCLEKLKLDSEQANLEQRRLSVLDFLHNQLADK

SEQ ID NO: 66638 - protein, 473 aa, Setaria italica
  Transcript Sequence Number=SeqID_664
  Gene Ontology: Mol. function=nucleic acid binding; Cellular component= ribonucleoprotein complex; Biological process=regulation of alternative nuclear mRNA splicing, via spliceosome
  Homolog annotation: Hit_ID=B6UFA0; Match level="QueryCoverage=89%, HitCoverage=94%, E-value=1e-179, Identity=72%"; Hit description=RNA binding protein
  Pfam annotation: Domain name=RRM_1; Domain location=142-213; Score =72.4; E_value=1.6e-18; Accession=PF00076.14; Description=RNA recognition motif. (a.k.a. RRM, RBD, o
  Pfam annotation: Domain name=RRM_1; Domain location=389-459; Score =80.4; E_value=6.6e-21; Accession=PF00076.14; Description=RNA recognition motif. (a.k.a. RRM, RBD, o
  Pfam annotation: Domain name=RRM_1; Domain location=54-125; Score =39.6; E_value=1.3e-08; Accession=PF00076.14; Description=RNA recognition motif. (a.k.a. RRM, RBD, o
  Pfam module annotation: Pfam domain module=RRM_1::RRM_1::RRM_1; Domain location=142-213::389-459::54-125
RANPSPASQPARQPASARPMAEDGGDRDQQQQAAGAAGAGVAAAEGRGTESVKLFVGQVPKQMTESELAAMFSRVALVDEVTVIRDRATRVSRGCCFLICPSREEADKAVTAYHNKCTLTGASSPLQVKYADGELERLEHKLFVGMLPKNVTDAEMTDLFSQYGNIKDLQILRGSQQASKAGCAFLKYETKEQAVAAIEALNGKHKIEGSSVPLVVKWADTEKERQARKAQKAQFQSSNMLNANAMQQTSLFGALQMGYVPQYNGFGYQPQGTYGLMQYPPLSPMQNQAAFQNMVQPVNQGSSIRGANSELSPNSAPRSFNSTQLGSPYSPLPGMQYPGAYPGGAINNRPFANSHNPIKVQNSNANSPTSSGASSNPGPQIEGPPGANLFIYHIPQEFGDHDLASAFQSFGRVLSAKVFVDKATGVSKCFGFVSYDSPASAQTAISMMNGFQLGGKKLKVQLKRDNSKHSKPF

SEQ ID NO: 66639 - protein, 182 aa, Setaria italica
  Transcript Sequence Number=SeqID_665
  Homolog annotation: Hit_ID=O64533; Match level="QueryCoverage=97%, HitCoverage=13%, E-value=3e-38, Identity=50%"; Hit description =YUP8H12R.20
HIVWRLLALSPFRRKRMSMMDEKAIILPYRDTSLTSEEPMAEISSQKIQIAVLDMIATISSSKRSAIALESVLKKVCGLVVGIAYSSLTGLQEAAIRALAGLACMDADLVWLLLADVYYSLNQRDIPLPPNQDVAEISDLLPPPMSAREYLFVQYGGDGVRCDVDPSSVHEVFKRMQDVVLT

SEQ ID NO: 66640 - protein, 74 aa, Setaria italica
  Transcript Sequence Number=SeqID_666
PSHNLILHGGWLNYSRVSKQFRGWKKHMKNILYYTKSPIINTHRTHSNIFYSTWKNIKCHSHRFFLHFVSCSIV

SEQ ID NO: 66641 - protein, 89 aa, Setaria italica
  Transcript Sequence Number=SeqID_667
  Gene Ontology: Mol. function=RNA methyltransferase activity; Biological process=RNA processing
  Homolog annotation: Hit_ID=B9RSV9; Match level="QueryCoverage=62%, HitCoverage=25%, E-value=9e-11, Identity=66%"; Hit description=rRNA methylase, putative
  Subcellular localization annotation: CTP_CleavageSite=46; ConfidenceScore=5.43e-01
ATLTPTNRAGAAKTAAMAAAAAVESVVVVHNVAKRHNVGTLARSATAFGVAEVVVVGRRDVSAFGSHGATSHLRFRHFASLALARAYLK

SEQ ID NO: 66642 - protein, 77 aa, Setaria italica
  misc_feature (39)..(39): Xaa can be any naturally occurring amino acid
  Transcript Sequence Number=SeqID_668
  Gene Ontology: Mol. function=protein serine/threonine kinase activity; Cellular component=cytoplasm; Biological process=protein amino acid phosphorylation
  Homolog annotation: Hit_ID=C3TX65; Match level="QueryCoverage=88%, HitCoverage=16%, E-value=2e-20, Identity=75%"; Hit description =Protein kinase
LKEKMVCDNGLEEATARNYLRDIISGLMYLHSHLNLDYXNVIHGDIKPDNLLVTSTGNVKIGDFSVSQVFEVRSIVL

SEQ ID NO: 66643 - protein, 311 aa, Setaria italica
  misc_feature (282)..(282): Xaa can be any naturally occurring amino acid
  misc_feature (304)..(304): Xaa can be any naturally occurring amino acid
  Transcript Sequence Number=SeqID_669
  Gene Ontology: Mol. function=protein serine/threonine kinase activity; Cellular component=cytoplasm; Biological process=protein amino acid phosphorylation
  Homolog annotation: Hit_ID=C3TX65; Match level="QueryCoverage=80%, HitCoverage=62%, E-value=1e-95, Identity=71%"; Hit description =Protein kinase
  Pfam annotation: Domain name=Pkinase; Domain location=116-311; Score =91.6; E_value=2.8e-24; Accession=PF00069.17; Description=Protein kinase domain
  Pfam annotation: Domain name=Pkinase_Tyr; Domain location=117-309; Score=-46.4; E_value=1.2e-10; Accession=PF07714.9; Description =Protein tyrosine kinase
  Pfam module annotation: Pfam domain module=Pkinase::Pkinase_Tyr; Domain location=116-311::117-309
PREADGILSEDLLKRQSAEDPDGSFYTGDDPDVSFYNGDDLDRSFYNWDDPDRSFYDRDDAEYLHGSDDGPPRKTSEDIIQSRAQNGFACREIPVKETKKVFRSEDENGYKMVNQYVHLGKIGSGSYGKVVLYRNIKDGKLYAVKVLNKPYMMKIRVVRSETAMTDVLREVSIMKMLNHPNIVNLVEVIDDPNIDKFYMVLEYVEGKMVCDNGLEEATARNYLRDIISGLMYLHSHNVIHGDIKPDNLLVTSTGNVKIGDFSVSQVFEDDDDMLWRSPGTPXFTAPECCQGSAYHGRASDTWAXVGVTLYC

SEQ ID NO: 66644 - protein, 133 aa, Setaria italica
  Transcript Sequence Number=SeqID_670
  Gene Ontology: Mol. function=protein serine/threonine kinase activity; Cellular component=cytoplasm; Biological process=protein amino acid phosphorylation
  Homolog annotation: Hit_ID=C3TX65; Match level="QueryCoverage=84%, HitCoverage=32%, E-value=1e-47, Identity=75%"; Hit description =Protein kinase
DDDDMLWRSPGTPVFTAPECCQGSAYHGRASDTWAVGVTLYCMISGQYPFLGDTLQETYDKIANDPVQIPDDMNPQLADLLQRLLCKDPGDRITLQAAAEHPWVAGDKGPVPEFFCRCGFGRRKRNDFREEVQ

SEQ ID NO: 66645 - protein, 131 aa, Setaria italica
  Transcript Sequence Number=SeqID_671
QVKLQATWLPDHRNQTTARRCTRRSANSRTRCIWSHLDVLTGDPLVHDTANRAELELELYTKFTENQSNQDRFTQDFGPRSPHIMCKQIQEDEPQNIKNSSSILQISGNLEKFWGNNKFEVLGEGFVRESP

SEQ ID NO: 66646 - protein, 85 aa, Setaria italica
  Transcript Sequence Number=SeqID_672
FTAIRFALFMKKGLRQYAEYLGHFNGCCVLLTATVIQRNSRWALLFVICLDVGLDQCQYVWCSNHHAVHSCVFSFFPKKIMSVKC

SEQ ID NO: 66647 - protein, 47 aa, Setaria italica
  Transcript Sequence Number=SeqID_673
SLKFSEVHPLRKSFKDDAYTSDIAKMLEDNFMSISYMEIVHILDSAT

SEQ ID NO: 66648 - protein, 86 aa, Setaria italica
  Transcript Sequence Number=SeqID_674
  Gene Ontology: Mol. function=catalytic activity; Cellular component =peroxisome; Biological process=metabolic process
  Homolog annotation: Hit_ID=B9R8M5; Match level="QueryCoverage=90%, HitCoverage=14%, E-value=3e-26, Identity=74%"; Hit description=AMP dependent ligase, putative
LPWGVAMQGGTNVCLRHFTAKVIFDSIARHGVTHMGGAPTVLNMIANLPAADRKPLPGPVRVMTGGAPPPPRVLFAVEISASWSYH

SEQ ID NO: 66649 - protein, 274 aa, Setaria italica
  Transcript Sequence Number=SeqID_675
  Gene Ontology: Mol. function=phosphoinositide phospholipase C activity; Cellular component=plasma membrane; Biological process =intracellular signaling cascade
  Homolog annotation: Hit_ID=Q9FSW1; Match level="QueryCoverage=100%, HitCoverage=43%, E-value=1e-155, Identity=95%"; Hit description =Phosphoinositide-specific phospholipase C
  Pfam annotation: Domain name=C2; Domain location=148-239; Score=82.5; E_value=1.5e-21; Accession=PF00168.22; Description=C2 domain
  Pfam annotation: Domain name=PI-PLC-Y; Domain location=9-127; Score =89.0; E_value=1.7e-23; Accession=PF00387.11; Description =Phosphatidylinositol-specific phospholipase C, Y domain
  Pfam module annotation: Pfam domain module=C2::PI-PLC-Y; Domain location=148-239::9-127
ETSKHVATEYKHLITIKAGKPKGPLVDALKNDPDKVRRLSLSEQELAKVAANHGPNIVSFTHRNMLRIYPKGTRFNSSNYNPFLGWVHGAQMVAFNMQGYGRALWLMHGFYKANGGCGYVKKPDFLMQTCPDGKVFDPKADLPVKATLKVKVYMGEGWHKDFKQTHFDTYSPPDFYVKVGIAGVPLDSVMRKTKAVEDNWVPVWEEEFAFPLTVPEIAVLRVEVHEQDVSEDDFGGQTALPVEELRPGIRAVPLFDHKGHKFKSVKLLMRFEFT

SEQ ID NO: 66650 - protein, 151 aa, Setaria italica
  Transcript Sequence Number=SeqID_676
QAKRFSDSTLKQLIAELNEAIAAKLYMNTNSGTMPQIAIADHSGSYSGRFRTLLHSYKGEQHHLMALHSRAPTAAIILFMLSSVFSASILFFIGFQYLSCPIILCTTTVGEATSLSLKTISFRVFQIAHIAPAQIKSRNLLDLAALSFKSL

SEQ ID NO: 66651 - protein, 61 aa, Setaria italica
  Transcript Sequence Number=SeqID_677
GSINLVGWSGFGSCRFSVHGLVGFSALLQVSAEKFGSRELLRYGWPNLPHWICFGLFNTLS

SEQ ID NO: 66652 - protein, 140 aa, Setaria italica
  misc_feature (33)..(33): Xaa can be any naturally occurring amino acid
  Transcript Sequence Number=SeqID_678
  Gene Ontology: Mol. function=protein dimerization activity
  Homolog annotation: Hit_ID=Q2R0X2; Match level="QueryCoverage=100%, HitCoverage=23%, E-value=2e-26, Identity=45%"; Hit description=HAT family dimerisation domain containing protein
FDEQNDKTEELQLSDIDEFKVSYFLVIVDAAIXTSRFEQLKKFEKIFSFLLNSENLKSLDDNDLRKCCTTFAKSFSHDNKSDVELDVFFSELKVLQVSLLEELMSVPEILQFVKAADCYPNVSIAYRILLTIPVTVASVE

SEQ ID NO: 66653 - protein, 124 aa, Setaria italica
  Transcript Sequence Number=SeqID_679
  Gene Ontology: Mol. function=heat shock protein binding
PESGGGDAVAALGLVDAALELSPRMEAALELRARALLVLRRYREVAEMLRDYIPSCGKSCSGDDTASSSSAASLLSSGSGDLGTISRAKLLSPDRHRSDDAEPDARPVRSFRCFDISELKRRVL

SEQ ID NO: 66654 - protein, 103 aa, Setaria italica
  misc_feature (94)..(94): Xaa can be any naturally occurring amino acid
  Transcript Sequence Number=SeqID_680
  Gene Ontology: Cellular component=plasma membrane; Biological process= positive regulation of cell proliferation
  Homolog annotation: Hit_ID=A6N067; Match level="QueryCoverage=100%, HitCoverage=47%, E-value=8e-51, Identity=94%"; Hit description =Tonneau 1b (Fragment)
MDDYAREMMELKTLVTRTLEKKGVLAKIRAELRASVFEAIEEEDRVIENEDGGNSALLGSCNDRAKQLHASPSGRLLTALVCEYLEWAQLSHTXKVYLPECNL

SEQ ID NO: 66655 - protein, 105 aa, Setaria italica
  misc_feature (12)..(12): Xaa can be any naturally occurring amino acid
  Transcript Sequence Number=SeqID_681
  Gene Ontology: Mol. function=protein serine/threonine kinase activity; Cellular component=plasma membrane; Biological process =protein amino acid phosphorylation
  Homolog annotation: Hit_ID=Q2RBQ5; Match level="QueryCoverage=90%, HitCoverage=10%, E-value=9e-48, Identity=94%"; Hit description =Leucine-rich repeat family protein, putative, expressed
  Pfam annotation: Domain name=Pkinase_Tyr; Domain location=12-105; Score=-152.9; E_value=0.0015; Accession=PF07714.9; Description =Protein tyrosine kinase
FYLEIEDATDKXFERRIGSGGFGIVYYGKLADGREIAVKLLTNDSYQGIREFLNEVTLLSRIHHRHLVTFLGYSQQDGKNILVYEFMHNGTLKEHLRGKSTSTCW

SEQ ID NO: 66656 - protein, 256 aa, Setaria italica
  Transcript Sequence Number=SeqID_682
  Gene Ontology: Cellular component=plasma membrane; Biological process= positive regulation of cell proliferation
  Homolog annotation: Hit_ID=B6U9F3; Match level="QueryCoverage=100%, HitCoverage=100%, E-value=1e-104, Identity=76%"; Hit description =Tonneau 1b
  Pfam annotation: Domain name=FOP_dimer; Domain location=61-139; Score= 9.2; E_value=0.0025; Accession=PF09398.2; Description=FOP N terminal dimerisation domain
MDDYAREMMELKTLVTRTLEKKGVLAKIRAELRASVFEAIEEEDRVIENEDGGNSALLGSCNDRAKQLHASPSGRLLTALVCEYLEWAQLSHTMKVYLPECNLPKDFWKNELKDFSNKSGAEGSRSAESGPMLLDVLEGYLKYENLSQTRMGGRRMMSSESELSLNAEHRNSRRPPSSSVGSLPPMGRPVSSSQTSDRRGGSSASNTRKDEYNWRYDPEDISEEVLRTSTALENIQLDRKSRNLPTSWRHSGDAAE

SEQ ID NO: 66657 - protein, 101 aa, Setaria italica
  Transcript Sequence Number=SeqID_683
  Gene Ontology: Mol. function=protein serine/threonine kinase activity; Biological process=protein amino acid phosphorylation
  Homolog annotation: Hit_ID=Q2RBQ5; Match level="QueryCoverage=97%, HitCoverage=10%, E-value=1e-20, Identity=57%"; Hit description =Leucine-rich repeat family protein, putative, expressed
CQFIDQSMDRGYDLQSVWKIAEVAIMCVKPKGAQRPPISEVLKEIQDAIAIERGPQHSIQIQQQLLLSNSNRSMSMADSSSVNNNLDAASLDELLMRPGLR

SEQ ID NO: 66658 - protein, 247 aa, Setaria italica
  Transcript Sequence Number=SeqID_684
  Gene Ontology: Mol. function=protein serine/threonine kinase activity; Cellular component=plasma membrane; Biological process =protein amino acid phosphorylation
  Homolog annotation: Hit_ID=Q2RBQ5; Match level="QueryCoverage=95%, HitCoverage=25%, E-value=7e-99, Identity=77%"; Hit description =Leucine-rich repeat family protein, putative, expressed
  Pfam annotation: Domain name=Pkinase; Domain location=1-194; Score= -46.7; E_value=1e-05; Accession=PF00069.17; Description=Protein kinase domain
  Pfam annotation: Domain name=Pkinase_Tyr; Domain location=1-194; Score=-109.7; E_value=2e-06; Accession=PF07714.9; Description =Protein tyrosine kinase
  Pfam module annotation: Pfam domain module=Pkinase::Pkinase_Tyr; Domain location=1-194::1-194
MSVIFWWCSSGAADEKITSWLKRLEIAEDAAKGIEYLHTGCSPTIIHRDLKSSNILLDKNMRAKVADFGLSKPAVDGSHVSSIVRGTVGYLDPEYYISQQLTEKSDIYSFGVILLELISGHEPISNDNFGLNCRNIVAWARSHIESGNIHAIIDQSMDRGYDLQSVWKIAEVAIMCVKPKGAQRPPISEVLKEIQDAIAIERGPQHSIQIQQQLLLSNSNRSMSMADSSSANNNLDLDELLMRPGLR

SEQ ID NO: 66659 - protein, 869 aa, Setaria italica
  Transcript Sequence Number=SeqID_685
  Gene Ontology: Mol. function=protein serine/threonine kinase activity; Cellular component=plasma membrane; Biological process =protein amino acid phosphorylation
  Homolog annotation: Hit_ID=Q2RBQ5; Match level="QueryCoverage=95%, HitCoverage=89%, E-value=0.0, Identity=84%"; Hit description=Leucine- rich repeat family protein, putative, expressed
  Pfam annotation: Domain name=LRR_1; Domain location=416-438; Score =3.6; E_value=62; Accession=PF00560.25; Description=Leucine Rich Repeat
  Pfam annotation: Domain name=LRR_1; Domain location=440-461; Score =14.0; E_value=0.61; Accession=PF00560.25; Description=Leucine Rich Repeat
  Pfam annotation: Domain name=LRR_1; Domain location=463-485; Score =19.6; E_value=0.013; Accession=PF00560.25; Description=Leucine Rich Repeat
  Pfam annotation: Domain name=LRR_1; Domain location=487-510; Score =16.6; E_value=0.11; Accession=PF00560.25; Description=Leucine Rich Repeat
  Pfam annotation: Domain name=Pkinase; Domain location=601-845; Score =101.7; E_value=2.6e-27; Accession=PF00069.17; Description=Protein kinase domain
  Pfam annotation: Domain name=Pkinase_Tyr; Domain location=602-853; Score=78.4; E_value=2.5e-20; Accession=PF07714.9; Description =Protein tyrosine kinase
  Pfam module annotation: Pfam domain module=LRR_1::LRR_1::LRR_1::LRR _1::Pkinase::Pkinase_Tyr; Domain location=416-438::440-461::463 -485::487-510::601-845::602-853
MASAFTAAALLLFFHFQLLAPPSAAQPGFISLDCGGARDHTDAIGIQWTSDASFVSGGQAAQLLVQNGLRSQQFTTVRYFPADNRKYCYTMNVRNRTRYLVRATFLYGNFDNSNVYPKFDISLGASPWSTIVIDDATTPVVEEAIILAAAPTLSVCLSNASTGQPFISTLELRQFNGSLYYTTDETRFFLALSARINFGAESNDSVRYPDDPFDRIWESDSVRRANYLVDVAPGTERISTTKPVFVGTNEEPPEKVMQTAVVGQDGSLNYRLDLEGFPANAWGVSYFAEIEDLAPNETRKFKLDVPGMPALSKPTVDVEENAQGKYRLYEPGYTNLSLPFVFSFGFKKTDDSSKGPILNALEIYKYVQITMGSQDANIMASMVSRYSQAGWAQEGGDPCLPASWSWVQCSSEDAPRVFSITLSGKNITGSIPVELTKLSGLVELRLDGNSFSGQIPDFSECHNLQYIHLENNQLTGELPPSLGDLPNLKELYIQNNKLSGQVPKSLFKRSIILNFSGNSGLHIVNSGISHTIIIICVVIGAIVLLGAAIGCYFFTSRRKKKHHEDTVVIAAPAKKLGSYFSEVATESAHRFSLSEIEDATDKFERRIGSGGFGIVYYGKLADGREIAVKLLTNDSYQGIREFLNEVTLLSRIHHRHLVTFLGYSQQDGKNILVYEFMHNGTLKEHLRGTADEKITSWLKRLEIAEDAAKGIEYLHTGCSPTIIHRDLKSSNILLDKNMRAKVADFGLSKPAVDGSHVSSIVRGTVGYLDPEYYISQQLTEKSDIYSFGVILLELISGHEPISNDNFGLNCRNIVAWARSHIESGNIHAIIDQSMDRGYDLQSVWKIAEVHFHLLVNLHCRINGKLSVGG

SEQ ID NO: 66660 - protein, 163 aa, Setaria italica
  Transcript Sequence Number=SeqID_686
  Gene Ontology: Cellular component=plasma membrane
  Homolog annotation: Hit_ID=B6U9F3; Match level="QueryCoverage=96%, HitCoverage=68%, E-value=2e-67, Identity=81%"; Hit description =Tonneau 1b
MKVYLPECNLPKDFWKNELKDFSNKSGAEGSRSAESGPMLLDVLEGYLKYENLSQTRMGGRRMMSSESELSLNAEHRNSRRPPSSSVGSLPPMGRPVSSSQTSDRRGGSSASNTRKDEYNWRYDPDDISEEVLRTSTALENIQLDRKSRNLPTSWRHSGDGAE

SEQ ID NO: 66661 - protein, 72 aa, Setaria italica
  Transcript Sequence Number=SeqID_687
  Homolog annotation: Hit_ID=B6TWQ7; Match level="QueryCoverage=80%, HitCoverage=45%, E-value=1e-14, Identity=52%"; Hit description =Invertase inhibitor
MKLLSSVLFLLLVVPTCKSSTLEDACRSFAAGHPSIGYDYCIRVFQADKASVAALCAVERDARRRDRLAVCA

SEQ ID NO: 66662 - protein, 64 aa, Setaria italica
  Transcript Sequence Number=SeqID_688
GSGFAVLHFHLLRFKSWWRTLTHALHFVIKYLPLYASLLCDKGTPGFVSLLCMCSSGCACAFSL

SEQ ID NO: 66663 - protein, 54 aa, Setaria italica
  Transcript Sequence Number=SeqID_689
YKIFSMVLRLSLLCCSSRQQYADSCSDCWCYQCCIPTARAMTSSSPPSLWIAPC

SEQ ID NO: 66664 - protein, 92 aa, Setaria italica
  Transcript Sequence Number=SeqID_690
  Homolog annotation: Hit_ID=B6T2W4; Match level="QueryCoverage=64%, HitCoverage=45%, E-value=2e-11, Identity=64%"; Hit description =Photosystem II reaction center W protein
  Pfam annotation: Domain name=PsbW; Domain location=1-92; Score=71.5; E_value=3e-18; Accession=PF07123.4; Description=Photosystem II reaction centre W protein, PsbW
  Subcellular localization annotation: CTP_CleavageSite=27; ConfidenceScore=5.49e-01
CSRQQDGSGKGAAAPAAGASSLLAVASAMTTSSPALALVDERMSTEGTGLSLGLSNNLLGWILLGVFGLIWSLYTVYTSTLDEDEESGGLSL

SEQ ID NO: 66665 - protein, 94 aa, Setaria italica
  misc_feature (81)..(81): Xaa can be any naturally occurring amino acid
  Transcript Sequence Number=SeqID_691
  Gene Ontology: Cellular component=anchored to membrane; Biological process=cell wall catabolic process
  Homolog annotation: Hit_ID=B6TLZ0; Match level="QueryCoverage=100%, HitCoverage=23%, E-value=2e-32, Identity=74%"; Hit description =Erwinia induced protein 1
  Subcellular localization annotation: CTP_CleavageSite=36; ConfidenceScore=5.18e-01
FASPGAANRILPAGTALRVPTRCGCADGVRKSVAVRYATRPSDTLGNVADVVFAGLPSADQIRTANGLAAEDPDAPLAPGXKLVIPLPCVCFNS

SEQ ID NO: 66666 - protein, 87 aa, Setaria italica
  Transcript Sequence Number=SeqID_692
MGYWWDRVVLPVRRVWLGVASRFGVRQTGLWRLRQEVSTCEYEDVHVMWEMLSRTTAAPPAPAPRRHSRFRQQPRPWGDRFRLCRGF

SEQ ID NO: 66667 - protein, 71 aa, Setaria italica
  Transcript Sequence Number=SeqID_693
  Gene Ontology: Mol. function=4 iron, 4 sulfur cluster binding; Biological process=tRNA processing
  Homolog annotation: Hit_ID=Q8H8N3; Match level="QueryCoverage=92%, HitCoverage=10%, E-value=3e-28, Identity=83%"; Hit description=tRNA wybutosine-synthesizing protein 1 homolog
WLLTNDRPLFSNLWERFLDSLKSLHEKDQQTVYRRTLVKVWNAEDIDAYAKLLNLGQPDFLEIKGITYCGS

SEQ ID NO: 66668 - protein, 72 aa, Setaria italica
  misc_feature (71)..(71): Xaa can be any naturally occurring amino acid
  Transcript Sequence Number=SeqID_694
  Gene Ontology: Mol. function=4 iron, 4 sulfur cluster binding; Biological process=tRNA processing
  Homolog annotation: Hit_ID=Q8H8N3; Match level="QueryCoverage=93%, HitCoverage=10%, E-value=6e-28, Identity=80%"; Hit description=tRNA wybutosine-synthesizing protein 1 homolog
WLLTNDRPLFSNLWERFLDSLKSLHEKDQQTVYRRTLVKVWNAEDIDAYAKLLNLGQPDFLEIKGITYCGXT

SEQ ID NO: 66669 - protein, 64 aa, Setaria italica
  Transcript Sequence Number=SeqID_695
DSPVILLGLIPCNPTMTPPCNRLVILPPGVYKGGQGYLNRELRPTKLRTIINSQQPGYTTYCGS

SEQ ID NO: 66670 - protein, 47 aa, Setaria italica
  Transcript Sequence Number=SeqID_696
ELLVTIEIHRTYIYWPKDTAFQGTRACLVAQGKSLIKCAYAWNFTKQ

SEQ ID NO: 66671 - protein, 145 aa, Setaria italica
  misc_feature (123)..(123): Xaa can be any naturally occurring amino acid
  Transcript Sequence Number=SeqID_697
  Homolog annotation: Hit_ID=Q6AV56; Match level="QueryCoverage=98%, HitCoverage=9%, E-value=6e-56, Identity=76%"; Hit description=BHLH family protein, putative, expressed
SRTSEYEEARSMVESLTANRDGEIASLRSSLAEKVTLLKEMGYSKERLEQENDDLRSTLKEYQEAQISGADAVVSLKDLREKFRALEQTHRSCTEKLRDKEDKWRMQMEKLGSDLDGCLSQLXSKDTLTRELQNELLGSYKSLEL

SEQ ID NO: 66672 - protein, 146 aa, Setaria italica
  Transcript Sequence Number=SeqID_698
  Gene Ontology: Mol. function=serine-type carboxypeptidase activity; Cellular component=extracellular region; Biological process =proteolysis
  Homolog annotation: Hit_ID=Q67Y83-2; Match level="QueryCoverage=90%, HitCoverage=31%, E-value=3e-33, Identity=54%"; Hit description =Isoform 2 of Serine carboxypeptidase-like 51
TEGSLGSAPNNTIDGDMNGPIKKMFKLIPKGLFWQEASIDVYDALVNDFMKPAIEQVDELLSHGVNVTVYQGQLDVICSTIGAEAWVRKLKWSGLRDFLSLRRKPLHFCDSAIYCSKEIKAYVRSYKNFEFYWILEAGHIGCPVCT

SEQ ID NO: 66673 - protein, 57 aa, Setaria italica
  misc_feature (49)..(49): Xaa can be any naturally occurring amino acid
  Transcript Sequence Number=SeqID_699
  Homolog annotation: Hit_ID=A3FPG3; Match level="QueryCoverage=85%, HitCoverage=15%, E-value=1e-10, Identity=63%"; Hit description =Serine/threonine protein kinase
MAPDASRGSKPSLLSTLPNELPAEFLKDITDGFSLERKLGQGAFGTVYXGILQDGQP

SEQ ID NO: 66674 - protein, 249 aa, Setaria italica
  Transcript Sequence Number=SeqID_700
  Gene Ontology: Mol. function=protein serine/threonine kinase activity; Biological process=protein amino acid phosphorylation
  Homolog annotation: Hit_ID=A3FPG3; Match level="QueryCoverage=99%, HitCoverage=76%, E-value=3e-90, Identity=64%"; Hit description =Serine/threonine protein kinase
  Pfam annotation: Domain name=Pkinase; Domain location=4-243; Score =60.4; E_value=6.7e-15; Accession=PF00069.17; Description=Protein kinase domain
  Pfam annotation: Domain name=Pkinase_Tyr; Domain location=1-243; Score=-38.1; E_value=3.4e-11; Accession=PF07714.9; Description =Protein tyrosine kinase
  Pfam module annotation: Pfam domain module=Pkinase::Pkinase_Tyr; Domain location=4-243::1-243
FLNEVINLMAVQHENIVKLFGYCHATLKKVLEHGGRYILVDVVERLLCYEYCPKGNLDKCIFDASTRPDWKTCFKIIKGICQGLHFLHKEMDRPIVHLDLQPANILLDDNMVPKISDFGLSRLFGEEQTRINTINVVGAKGYMAPEYLYRGEISTRSDIYSLGVLIIEITTGERNFSSEKDMSARDFIDKVRAKWTDEHIASKCSSLDAVSLQEVRTCIEIGLKCVDIDQRKRPTIVEILDKLNGRHAP

SEQ ID NO: 66675 - protein, 74 aa, Setaria italica
  Transcript Sequence Number=SeqID_701
  Gene Ontology: Mol. function=metal ion binding
  Homolog annotation: Hit_ID=B9RMQ0; Match level="QueryCoverage=52%, HitCoverage=15%, E-value=4e-10, Identity=74%"; Hit description =Protein binding protein, putative
  Subcellular localization annotation: CTP_CleavageSite=45; ConfidenceScore=5.24e-01
KDRYISPELSLGQSDASSLCVLSSSNSETYRGCRYTRSQSCPFCRGSLKRVRSRDLWVLTGDDDVIDTVTLEKE

SEQ ID NO: 66676 - protein, 83 aa, Setaria italica
  Transcript Sequence Number=SeqID_702
  Gene Ontology: Mol. function=drug transporter activity; Cellular component=membrane; Biological process=multidrug transport
  Homolog annotation: Hit_ID=Q9LUH2; Match level="QueryCoverage=83%, HitCoverage=14%, E-value=3e-18, Identity=60%"; Hit description =Aberrant lateral root formation 5
GVSRGCGWQHLVALTNLVAFYLIAMPLAILFAFKLKLYTKGLWMGLICGLACQVCSLLVITARTKWSKIVAEAMQEEKADYIA

SEQ ID NO: 66677 - protein, 87 aa, Setaria italica
  misc_feature (10)..(10): Xaa can be any naturally occurring amino acid
  Transcript Sequence Number=SeqID_703
  Subcellular localization annotation: CTP_CleavageSite=54; ConfidenceScore=5.00e-01
SRIAIAAALXKKKWKLKTKPDSRLLSPPKIQPVWHHLPHSLPRRFPGRRQQRLKVSGGDDLLPSASPPIFSPISFYTLNTKPPPLSR

SEQ ID NO: 66678 - protein, 49 aa, Setaria italica
  Transcript Sequence Number=SeqID_704
LHRKIICETNILSLINPSLTHVYRSITLSNHELIRFNRFISQIRLHLCN

SEQ ID NO: 66679 - protein, 61 aa, Setaria italica
  Transcript Sequence Number=SeqID_705
YILSILILDSLRCYNENKVRQASGSRFFLKDLVDPTSDLGSHEVQLPWYYIMLKSPKGILF

SEQ ID NO: 66680 - protein, 100 aa, Setaria italica
  Transcript Sequence Number=SeqID_706
EERQQCWGYCSRPCVTCVCVTSGGRLDNLHRGAPAATRSALLAATFFVGMAVAELSFDSWHSRLVRSGREVRMQGCLPALVPIRLITPCQAAAPGDAAGG

SEQ ID NO: 66681 - protein, 219 aa, Setaria italica
  misc_feature (50)..(50): Xaa can be any naturally occurring amino acid
  misc_feature (204)..(204): Xaa can be any naturally occurring amino acid
  Transcript Sequence Number=SeqID_707
  Gene Ontology: Mol. function=phenylalanine-tRNA ligase activity; Cellular component=cytoplasm; Biological process=phenylalanyl-tRNA aminoacylation
  Homolog annotation: Hit_ID=B6SHI1; Match level="QueryCoverage=92%, HitCoverage=33%, E-value=1e-87, Identity=81%"; Hit description =Phenylalanyl-tRNA synthetase beta chain
  Pfam annotation: Domain name=B5; Domain location=69-141; Score=57.9; E_value=3.7e-14; Accession=PF03484.7; Description=tRNA synthetase B5 domain
GRQQLQTNTTLRTRNVFIECTATDLNQRQMMYHFNWFHFKLILTILREHXPFEVVHHDGSKTVYPDLSCYKMEAPLSHILGPIGISLDAKQVVCLLNKMQLQAESHSLKGEPWISVSVPPTRSDILHARDLVEDVAIAYGYNNVPKSKPKCMTIGGRQPLNRFSDKIRAEVARAGYMEVLTFILSSHEENFDMLNRTDDKSKAXVIIANPRTSEFEVNW

SEQ ID NO: 66682 - protein, 594 aa, Setaria italica
  Transcript Sequence Number=SeqID_708
  Gene Ontology: Mol. function=phenylalanine-tRNA ligase activity; Cellular component=cytoplasm; Biological process=phenylalanyl-tRNA aminoacylation
  Homolog annotation: Hit_ID=B6SHI1; Match level="QueryCoverage=100%, HitCoverage=100%, E-value=0.0, Identity=90%"; Hit description =Phenylalanyl-tRNA synthetase beta chain
  Pfam annotation: Domain name=B3_4; Domain location=120-282; Score =94.4; E_value=3.9e-25; Accession=PF03483.9; Description=B34 domain
  Pfam annotation: Domain name=B5; Domain location=307-379; Score=57.9; E_value=3.7e-14; Accession=PF03484.7; Description=tRNA synthetase B5 domain
  Pfam annotation: Domain name=tRNA-synt_2d; Domain location=383-593; Score=-162.2; E_value=0.0096; Accession=PF01409.12; Description=tRNA synthetases class II core domain (F)
  Pfam module annotation: Pfam domain module=B3_4::B5::tRNA-synt_2d; Domain location=120-282::307-379::383-593
MPTVGVGRDRFFVALGRAYTQEEFDLLCFAFGIELDDVTTEKAIIRKEKHLDDDGDVEGDDEVIYKIEVPANRYDLLCLEGLSRALRVFTGSEAIPVFRVSSIPRGSMLQMHVKPQTSQIRPHIVCAVLRGVTFDEARYNSFIDLQDKLHQNICRKRTLVAIGTHDLDTLQAPFSYEALPPHEINFVPLKQEESFRADKLMEFYKSDMKLKKFLHIIENSPVYPVIYDSNRTVLSLPPIINGAHSAITLATRNVFIECTATDLTKAKIVLNTMVTMFSEYCENKFEVEPVEVVHHDGSKTVYPDLSCYKMEAPLSHILGPIGISLDAKQVVCLLNKMQLQAESHSLKGEPWISVSVPPTRSDILHARDLVEDVAIAYGYNNVPKSKPKCMTIGGRQPLNRFSDKIRAEVARAGYMEVLTFILSSHEENFDMLNRTDDKSKAVIIANPRTSEFEVVRTSLMSCLLKTLKHNIDHPRPIKIFEVGDVVTLDPSRDVGASNNRRLAALYCNRVSGFEEIMGLVDSIVKVVRAPHVNFGEKYYVPTNEPEFFPKRQCKIVTSDGKQVGYLGVVHAEVLRKFGIPDPCTFVEMDIEALL

SEQ ID NO: 66683 - protein, 263 aa, Setaria italica
  misc_feature (41)..(41): Xaa can be any naturally occurring amino acid
  Transcript Sequence Number=SeqID_709
  Homolog annotation: Hit_ID=Q5VQ32; Match level="QueryCoverage=97%, HitCoverage=59%, E-value=1e-105, Identity=72%"; Hit description=Leaf senescence protein-like
  Pfam annotation: Domain name=DUF231; Domain location=159-263; Score =18.6; E_value=2.3e-08; Accession=PF03005.7; Description=Arabidopsis proteins of unknown function
PDDDAPYYTNLTCPLIQEHQNCMKYGRPDTGFLRWRWRPAXCELPRFDAAAFLDAVRDTSMAFVGDSLARNHMQSLMCLLSKVAYPKDISKTTHPEFRTMHYESHNFTVAIFWSPFLVRGYQPDPRRHMWDIHLDEPDAAWASGIAGFDRVVLSAANWFTRPAMFYESGRVVGCHYCLAPGVPDLTHRHSLRMAFRAALRVLVAGFNGTVIVRTLSPTSHFEGGAWDRGGDCRRTRPLTAGEVRMGGLDLDYHTAQVEEFARA

SEQ ID NO: 66684 - protein, 234 aa, Setaria italica
  misc_feature (15)..(15): Xaa can be any naturally occurring amino acid
  misc_feature (190)..(190): Xaa can be any naturally occurring amino acid
  misc_feature (226)..(226): Xaa can be any naturally occurring amino acid
  Transcript Sequence Number=SeqID_710
  Gene Ontology: Mol. function=nucleic acid binding; Cellular component= chromatin; Biological process=chromatin assembly or disassembly
  Homolog annotation: Hit_ID=Q2QSH9; Match level="QueryCoverage=95%, HitCoverage=15%, E-value=2e-59, Identity=52%"; Hit description =Retrotransposon protein, putative, unclassified, expressed
  Pfam annotation: Domain name=Chromo; Domain location=165-219; Score =40.9; E_value=5.1e-09; Accession=PF00385.16; Description='chromo' (CHRromatin Organisation MOdifier)
WYNSSYHTSLGCSPXALYGYEADLGTLLPLSAQEHNLALDFLQEKEQQLASLKHHLAVAQNRIKLQADRHRSDRNFQVGAQVLLKLQPYVQHSVVTRPYPKLAFKYSGPVEVEQKIGSAAYRLALPEGSQIHPMFHVSQLKPFTPNYTLVFKELPTVADLSTQDLSPETILDRRPVKKDTRAIPQVLIKXTTLPATSATWEDYYVIKNKFPDAVAWGQASSEAGGXVRPSQTVD

SEQ ID NO: 66685 - protein, 208 aa, Setaria italica
  misc_feature (33)..(33): Xaa can be any naturally occurring amino acid
  misc_feature (70)..(70): Xaa can be any naturally occurring amino acid
  Transcript Sequence Number=SeqID_711
  Homolog annotation: Hit_ID=Q5Z6M5; Match level="QueryCoverage=87%, HitCoverage=58%, E-value=5e-87, Identity=85%"; Hit description =Aluminum-activated malate transporter-like
  Pfam annotation: Domain name=UPF0005; Domain location=1-205; Score =42.7; E_value=1.4e-09; Accession=PF01027.12; Description =Uncharacterised protein family UPF0005
NLISKNFTGVAKSLEGCVDGYLKCMEYERIPSXKILVYQASDDPLYSGYRAAVEASAQEETLLGFAVWEXPPHGPYKTMNYPWRSFTKVGGALRHCSFAVMALHGCILSEIQAPPESRRVFAAEIQKVGQEGAKALRELGNRVKTMTKLSSIDILLEVHMAAEELQKKIDEKSYLLVNTERWDASKQAQGIKEVLNGTNTVEKGNRNR

SEQ ID NO: 66686 - protein, 60 aa, Setaria italica
  misc_feature (11)..(11): Xaa can be any naturally occurring amino acid
  misc_feature (24)..(24): Xaa can be any naturally occurring amino acid
  Transcript Sequence Number=SeqID_712
  Homolog annotation: Hit_ID=Q69T67; Match level="QueryCoverage=86%, HitCoverage=6%, E-value=9e-11, Identity=51%"; Hit description =Lustrin A-like
AYQRALTTWAXWVDRYINPQQTRXFFRSTSPSHFSGGEWNSGGHCRESTVPLNDTHARPV

SEQ ID NO: 66687 - protein, 76 aa, Setaria italica
  Transcript Sequence Number=SeqID_713
  Gene Ontology: Mol. function=catalytic activity; Cellular component =plasma membrane; Biological process=cellular metabolic process
  Homolog annotation: Hit_ID=B6TDM4; Match level="QueryCoverage=90%, HitCoverage=20%, E-value=2e-27, Identity=84%"; Hit description =Dihydroflavonol-4-reductase
NETTVSDPQKQLMVPAVEGTLNVLRAAKEAGGVRRVVVTSSISAIVPSPGWPAGEVRDGRCWTDVDYCEENGVPQG

SEQ ID NO: 66688 - protein, 45 aa, Setaria italica
  Transcript Sequence Number=SeqID_714
KLIIEVWEYSKLNKTQKRNIHLIENIETHHHDMILAFYSQNTTGS

SEQ ID NO: 66689 - protein, 374 aa, Setaria italica
  Transcript Sequence Number=SeqID_715
  Pfam annotation: Domain name=DUF1668; Domain location=19-354; Score =123.9; E_value=5.1e-34; Accession=PF07893.5; Description=Protein of unknown function (DUF1668)
MPKRRCGERDGGSTAKPRKPRLYLVCDDWDSGYSIRKLSLPADSDEGAVQGLPTLFWRVVAPREDPHHFTSAFGTKIMGGDAIIDVRTRCVLPGPESNAPAFPIYFPVGDDRIYVLDSGSMEICHFPPEQSDAESGGGESSLYEYGFDSKDVWFWHDLQMPPFAIMDVTSYAMHPHSHGHTILVSIKSEDLDAATFSFETGVSAWNFVGDWTLPFTGRGHYESELGALVGLSKEKESFGYIYACDVPNTSNRPPAWKLSKKKVFSKNPAEKHVSASLIYLGCQRKFCLVECVLVKEDKACQEVKEHKDDQVLLEKPEGTCVPQHSRYMYRLMTFSLKYDKMGDLRIRHRRVRYYKVPSKVSTECISQDPVVFWL

SEQ ID NO: 66690 - protein, 76 aa, Setaria italica
  Transcript Sequence Number=SeqID_716
  Gene Ontology: Mol. function=ATP binding; Biological process=apoptosis
  Homolog annotation: Hit_ID=Q8H5J9; Match level="QueryCoverage=84%, HitCoverage=11%, E-value=3e-11, Identity=51%"; Hit description =Fusarium resistance protein I2C-5-like
PRELHQMVCSLQAMIDGMDEFVVLLMSCPPLYRQPYSVHLSLDRCMFGRHMEKETVMEFLLNNTEPPPSDAVNLGV

SEQ ID NO: 66691 - protein, 169 aa, Setaria italica
  misc_feature (25)..(25): Xaa can be any naturally occurring amino acid
  Transcript Sequence Number=SeqID_717
  Homolog annotation: Hit_ID=B6SVM5; Match level="QueryCoverage=99%, HitCoverage=25%, E-value=3e-50, Identity=64%"; Hit description =EMB2756
GSEESLPEWNQSKSWKELKFGHGGXGRSARDSRYWDRDDRRRDEDYTEDEKEKISGGSGTATDAGGSGDKGVTAEAGVEDKGLTLETAAKDVPEVAEGGKGGTLYNEGGRKELEQYEAAAMGAAGTGVREVDPDDEYDDGIDTQDDLEDSHLHSADGGRKLGDGSHESA

SEQ ID NO: 66692 - protein, 79 aa, Setaria italica
  Transcript Sequence Number=SeqID_718
IRQHYTGCRLSGACEPRHQAAPLSVSKQGIAAVAGHALTVDAAYASSGMRTHRSGSSTGNRSSAWRGMCADMPACHRCT

SEQ ID NO: 66693 - protein, 151 aa, Setaria italica
  Transcript Sequence Number=SeqID_719
  Gene Ontology: Mol. function=signal transducer activity; Biological process=response to light stimulus
  Homolog annotation: Hit_ID=Q9LQ43; Match level="QueryCoverage=99%, HitCoverage=46%, E-value=8e-59, Identity=66%"; Hit description =T30E16.31
  Pfam annotation: Domain name=DUF569; Domain location=1-142; Score =333.6; E_value=4e-97; Accession=PF04601.5; Description=Protein of unknown function (DUF569)
MELFARAKVVRLKSHHDKFLYADEDEVHVTQDRNGASPNARWSVEAVPQAPGVVRLRSRYGRYLTASNEPFLLGMTGRKVLQTAPARPDSSVEWEPVRDGFQTRLKTRYGHFLRANGGLPPWRNSVTHDVPHRTATQDWVLWDVEVVQVLT

SEQ ID NO: 66694 - protein, 39 aa, Setaria italica
  Transcript Sequence Number=SeqID_720
NISSYTLFHSQYIYIYISVGYKCVFSSLKYQQSAVFTPL

SEQ ID NO: 66695 - protein, 55 aa, Setaria italica
  Transcript Sequence Number=SeqID_721
REDKVEVVVAMAMAVGRGRGAEEEVGEQGGRGGCVGPNIYSSLYVSDGLACRNCT

SEQ ID NO: 66696 - protein, 78 aa, Setaria italica
  Transcript Sequence Number=SeqID_722
  Homolog annotation: Hit_ID=B4FSI0; Match level="QueryCoverage=92%, HitCoverage=36%, E-value=3e-32, Identity=93%"; Hit description=CAPIP1
AVLPLLQNYSSIITVHPESIDGRPGTLVIESFVVDVPDGNTKDETCYFVEAVIKCNLTSLAEVSERLAVQSPTSPLEH

SEQ ID NO: 66697 - protein, 110 aa, Setaria italica
  Transcript Sequence Number=SeqID_723
DRQPPRGQRQDRPAGDHQHREARAARRRRAHTRRQVRRRRPPPPGPFCCCGLNVDCFPAHALFSHVLCLLVTVAFFSLVWEIMLACFVTTSLQDTRQYCKSGTHSDHWVF

SEQ ID NO: 66698 - protein, 195 aa, Setaria italica
  misc_feature (54)..(54): Xaa can be any naturally occurring amino acid
  Transcript Sequence Number=SeqID_724
  Homolog annotation: Hit_ID=B4FSI0; Match level="QueryCoverage=93%, HitCoverage=92%, E-value=4e-93, Identity=90%"; Hit description=CAPIP1
  Pfam annotation: Domain name=Polyketide_cyc2; Domain location=35-182; Score=53.6; E_value=7.5e-13; Accession=PF10604.1; Description =Polyketide cyclase  dehydrase and li
RRRTLEAGDPAAVANGGGEADHVRRLHRHAPADHQCTSTLVKHIKAPVHLVWEXLVRSFDQPQRYKPFVSRCVVRGDQLEIGSLREVNVKTGLPATTSTERLEQLDDDEHILGVKFVGGDHRLQNYSSIITVHPESIDGRPGTLVIESFVVDVPDGNTKDETCYFVEAVIKCNLTSLAEVSERLAVQSPTSPLEH

SEQ ID NO: 66699 - protein, 67 aa, Setaria italica
  Transcript Sequence Number=SeqID_725
GCAKLGHRPPSCHWIERLEELALTSRCIQMSQIKNAQQPVNLDELIQQFSHRKIGSSRQSLEKYILA

SEQ ID NO: 66700 - protein, 117 aa, Setaria italica
  Transcript Sequence Number=SeqID_726
TGAAAACRRRREARACGEHRAHRSKLTHRLLGVTVRRAQGCSGGRRSRERDHHRAGRLGLPLGCACWPPLGYLQAADSLMSSDSMVPSAAEAESAASASGRLLVLYASQTGNAMDAA

SEQ ID NO: 66701 - protein, 157 aa, Setaria italica
  misc_feature (14)..(14): Xaa can be any naturally occurring amino acid
  Transcript Sequence Number=SeqID_727
SGFMVVEFQFIVGXHRASLHCFSSQTGAWVEKDVRNPLPRWIWNFNNVVSHNGKLWWVDTAAGLLACDPFADNPDMAYVPLPENDDDNRDDGARGCACYYCSERQIATRRRVQLSNATFRCVQITSARKTKDHAHDTAPATVTMRTRLGPYSGSTVP

SEQ ID NO: 66702 - protein, 135 aa, Setaria italica
  misc_feature (27)..(27): Xaa can be any naturally occurring amino acid
  Transcript Sequence Number=SeqID_728
  Homolog annotation: Hit_ID=Q8YQX2; Match level="QueryCoverage=88%, HitCoverage=57%, E-value=1e-13, Identity=31%"; Hit description =Alr3689 protein
KIGAKGLESTFLKGGSALTVKTIYESXRLSGKLVMEAANYEIKKELVKQGGRLAAVNLESRAGLLAARQGLARAASRYAGLRSVMTFLGPIMWGTLLADIVIQMLGTDYARIVQAIYAIAQIRLTRTSYIEPHEE

SEQ ID NO: 66703 - protein, 196 aa, Setaria italica
  Transcript Sequence Number=SeqID_729
  Homolog annotation: Hit_ID=P72875; Match level="QueryCoverage=92%, HitCoverage=62%, E-value=1e-11, Identity=29%"; Hit description =Slr0975 protein
RRFTSNLAADARSIIRGWRPSYRDVLLGVRKKLGVQCSSKLSTADLEAEIFLHLVNEYSSHQKDPASFPWDKQKSPNEISSLGVNKWKVLTDAAWKIGAKGLESTFLKGGSALTVKTIYESLASRLSGKLVMEAANYEIKKELVKQGGRLAAVNLESRAGLLAARQGLARAASRYAGLRSVMTFLGPMYASSNSKV

SEQ ID NO: 66704 - protein, 71 aa, Setaria italica
  Transcript Sequence Number=SeqID_730
MKLEKGSLDLVLVPCGLVVMLSYHLLLLYRILRHPSTTIIGYENHNKAAWVRRMVRASPDETSLALSVISS

SEQ ID NO: 66705 - protein, 167 aa, Setaria italica
  Transcript Sequence Number=SeqID_731
  Gene Ontology: Mol. function=catalytic activity; Cellular component =peroxisome; Biological process=metabolic process
  Homolog annotation: Hit_ID=B9RMJ5; Match level="QueryCoverage=77%, HitCoverage=23%, E-value=3e-35, Identity=51%"; Hit description=AMP dependent CoA ligase, putative
VLAAVGRFGATRLALAPPTLLAIVRAAEEDETLIARAATLQAVNCGGAPMATELFRRFCHKFPDVCLQQGYGLTETTAGFCRAAGEEESGEIGSVGRLLWGAEVKIVHPETGLALPPGMPGELWVRGPFVMKGYAGDKDSTSKILDSEGWLRTGDLCYIDKDGFVLC

SEQ ID NO: 66706 - protein, 295 aa, Setaria italica
  Transcript Sequence Number=SeqID_732
  Gene Ontology: Mol. function=catalytic activity; Cellular component =peroxisome; Biological process=metabolic process
  Homolog annotation: Hit_ID=Q84P23; Match level="QueryCoverage=97%, HitCoverage=51%, E-value=1e-49, Identity=39%"; Hit description=4 -coumarate--CoA ligase-like 9
  Pfam annotation: Domain name=AMP-binding; Domain location=1-294; Score=12.8; E_value=7.8e-08; Accession=PF00501.20; Description=AMP -binding enzyme
MAVGAIVSPANPALTADEISGLVALSGPSVAFAVKATTGKLPPGLNTVLLDSARFLSFLHKPHDEDGTADGTDVVIHQSDPAAILYSSGTTGRAKAVVLTHRNLMASNATRGPATAEVLMLALPIFHIYGFTFCFRVAPSANTLVLHTARRFDAREVLAAVGRFGATRLALAPPTLLAIVRAAEEDETLIARAATLQAVNCGGAPMATELFRRFCHKFPDVCLQQGYGLTETTAGFCRAAGEEESGEIGSVGRLLWGAEVKIVHPETGLALPPGMPGELWVRGPFVMKGRSIAVI

SEQ ID NO: 66707 - protein, 77 aa, Setaria italica
  Transcript Sequence Number=SeqID_733
CLEVQSFKTFGMISKVYWSKLINISQSDQPGLHLEPNLDWQICVTLLVILNSATETNVMKSNSETCVHMHMLDASRR

SEQ ID NO: 66708 - protein, 861 aa, Setaria italica
  misc_feature (489)..(489): Xaa can be any naturally occurring amino acid
  Transcript Sequence Number=SeqID_734
  Gene Ontology: Mol. function=alpha-mannosidase activity; Cellular component=plasma membrane; Biological process=carbohydrate metabolic process
  Homolog annotation: Hit_ID=Q10A54; Match level="QueryCoverage=94%, HitCoverage=100%, E-value=0.0, Identity=78%"; Hit description =Glycosyl hydrolase family 38 protein, putative, expressed
  Pfam annotation: Domain name=Alpha-mann_mid; Domain location=211-285; Score=81.6; E_value=2.8e-21; Accession=PF09261.3; Description=Alpha mannosidase, middle domain
  Pfam annotation: Domain name=Glyco_hydro_38; Domain location=1-206; Score=78.7; E_value=2.1e-20; Accession=PF01074.14; Description =Glycosyl hydrolases family 38
  Pfam annotation: Domain name=Glyco_hydro_38C; Domain location=341 -858; Score=453.7; E_value=2.7e-133; Accession=PF07748.5; Description= Glycosyl hydrolases family 38 C-termi
  Pfam module annotation: Pfam domain module=Alpha-mann_mid::Glyco _hydro_38::Glyco_hydro_38C; Domain location=211-285::1-206::341-858
QTTLGHRMIKKQFNKTPRAGWQIDPFGHSAVQAYLLGAELGFDSVHFASKLNYQEAKRKADKGLEVIWRGSRTFGSSSQIFTNAFPVHYSPPDGFSFEVLDENVTPVQDDMSLFDYNVIERVNDFVAAAIAQANVTRTNHIMWTMGDDFNYQYAESWFRNMDKLIQYVNKDGRVHALYSTPSIYTDAKHASDESWPVKYDDYFPYADSTNAYWTGYFTSRPTFKRYVRVYSGYYLAARQIEFLVGRSSLGLFTSSLEDAMGIAQHHDAVSGTAKQHTTDDYSKRLALGASKVEKGVNTALTCLTSSNGTCVSSVVNFNQCPLLNISYCPSTEEASSATKSLVVVVYNPLGWERSDFIRVPVNDENLAVKNSDGTIVESQVVKVDSVTGNLRKFYVKAYLGITADKPPKYWLVFQASVPPMGWNSYYISRPTGAAYNGTGYATAVVSATHDTIEVGPGPLKMSFSSASGQLKRIFNSISGVDLPIQQSFXWYRSSEGDDVDSQASGAYIFRPDGNRPTTVSSSSVPLKVIRGPLVDEVHQQFSSWVYQITRLYKNKEHAEVEYTIGPIPVNDDVGKEVITRMTANMVTNSTFYTDSNGRDFLKRVRNYREDWDLQVTQPVAGNYYPVNLGVYIADGKYELSVLVDRAVGASSIHDGQLEIMLHRRILKDDARGVGEPLDEVVCDGEDCEGLTARGTYYVNVEKLGHGAHWRRTYGQQVYSPFLLAFTHEEETSWKSYNVPKSSMMDANYSLPHNVAIVTLQNLDDGTTLLRLAHLFQAAEDPEYSVLAKVDLRKMFGKRTIKELTETNLSANQNKSEMKKLNWKVIGETENDPAPIKGGPVDSQALVVELGPMEIRTFLLKF

SEQ ID NO: 66709 - protein, 68 aa, Setaria italica
  Transcript Sequence Number=SeqID_735
  Homolog annotation: Hit_ID=Q9XIJ9; Match level="QueryCoverage=100%, HitCoverage=36%, E-value=5e-10, Identity=45%"; Hit description =T10O24.15
MGNCQAAEAATVLLQHPGGRVERLCWSTSAAEVMRANPGHYVALVTLRVAEERQDAPGGESRTVRLTR

SEQ ID NO: 66710 - protein, 66 aa, Setaria italica
  Transcript Sequence Number=SeqID_736
  Subcellular localization annotation: CTP_CleavageSite=44; ConfidenceScore=5.40e-01
LHETKQSKPSIYSSIKLASFPLRQERSTMDAPSSSTSTSTNSSRSASEQHQQQHRQHQAVGAPAAS

SEQ ID NO: 66711 - protein, 554 aa, Setaria italica
  Transcript Sequence Number=SeqID_737
  Gene Ontology: Mol. function=molecular_function; Cellular component =cellular_component; Biological process=regulation of cyclin -dependent protein kinase activity
  Homolog annotation: Hit_ID=B6T2L5; Match level="QueryCoverage=100%, HitCoverage=100%, E-value=0.0, Identity=81%"; Hit description =CDK5RAP3-like protein
  Pfam annotation: Domain name=DUF773; Domain location=4-539; Score =582.9; E_value=3.4e-172; Accession=PF05600.4; Description=Protein of unknown function (DUF773)
MHDPSEIRNLPIDIAFARLQEWLVDRKRVPQDWRKRLAGIRARIAAAFPSLPRDLHPSLLGLEPEEIGYLEAKKIYSILLDSNTESRNIFGRLTGSAGEWESVVKAYEKDHVFLGEAAQIMVQNVNYDIPYQRKQMQKTQQQLAELDRKEADIKRLAALSATRYVEACQELGLQGVNVREELIESAKTLPSTFSKILEVLNSDPVSKAMEHYTAFVRDCHSEDKGSCDSVLRNLKSLQENPPPLHVSVYTEVKSSIGEALKSHRSIEQIDSNIPAEDIDWEISVDANEIDWDIGAVEQPVEEAGNGFGSYEIIDANIELAGSENYDVSASDNPSLNKEGLASSESGICWDITADNSEESVHDNANIQNAPMVAEDRSRLLEKEYRNDILDDLLEVKSFLTQRLGEMRNGETSSLQHQVQAVSPFVLQQYAPDSLENMLVEVSSAISLLTNQKTLDLIMILNSKRFLDRLVSTLEEKKHHEVKLREGLGDLSVKRMELQNALSSSWPKQEAAITKTRELKKLCEATLSSVFDGRPVHIIGEINTLLSSSVSQLAG

SEQ ID NO: 66712 - protein, 169 aa, Setaria italica
  Transcript Sequence Number=SeqID_738
  Gene Ontology: Mol. function=iron ion binding; Cellular component =integral to membrane; Biological process=iron ion transport
  Homolog annotation: Hit_ID=Q7XN54; Match level="QueryCoverage=100%, HitCoverage=25%, E-value=3e-59, Identity=73%"; Hit description =Probable metal-nicotianamine transporter YSL16
  Subcellular localization annotation: CTP_CleavageSite=58; ConfidenceScore=5.42e-01
GFVFTVITMKLSLTTGLNTTMNVSAALLAFLTLRGWTRALERLGIASRPFTRQENTVVQTTIVACYTIGYGGGFGSFLLGMNKKTYELSGETTPGNVPGSYKEPAIGWMTGFLLAVSFVGLLTLLPLRKVLVIDYKLTYPSGTATAVLINGFHTPQGDKNAKKQMRGFL

SEQ ID NO: 66713 - protein, 137 aa, Setaria italica
  Transcript Sequence Number=SeqID_739
  Gene Ontology: Mol. function=nucleic acid binding; Cellular component= ribonucleoprotein complex
  Homolog annotation: Hit_ID=Q2HTD6; Match level="QueryCoverage=96%, HitCoverage=23%, E-value=1e-19, Identity=39%"; Hit description=RNA -binding region RNP-1 (RNA recognition motif); Calcium-binding EF-hand
  Pfam annotation: Domain name=RRM_1; Domain location=21-90; Score =102.9; E_value=1.1e-27; Accession=PF00076.14; Description=RNA recognition motif. (a.k.a. RRM, RBD, o
MAAARSDFDDQDRRAAKGTEVFVGGLPRSATESTLREVFSPCGEIVDVRIMKDQNGLPKGYAFVRFAKREYANTAKRQKNGMELQGKRLVVDLSMDQDTLFFGNLCKEWTSEEFEELIHTTFKDVVSVDLAMDLQNT

SEQ ID NO: 66714 - protein, 64 aa, Setaria italica
  Transcript Sequence Number=SeqID_740
TPFVSWERCYVKMGILIKMLAPGLSGDCLLKDNSASFSACICNYVLLNPKICMSRYLVFAIMYV

SEQ ID NO: 66715 - protein, 48 aa, Setaria italica
  Transcript Sequence Number=SeqID_741
CILLVKSPLIWHLTLSRIVILHFDMNVISTTVYQLALQQFNLIPRRVF

SEQ ID NO: 66716 - protein, 94 aa, Setaria italica
  Transcript Sequence Number=SeqID_742
  Subcellular localization annotation: CTP_CleavageSite=26; ConfidenceScore=5.10e-01
PRQMKKIKRSSDSSLVATEARTTTIKAMANAITRTTTIAPIMTTEATTRVVKIARESQTILSRQCPSLPRGRWKSRKDPVQGTPKKVVPMSPTL

SEQ ID NO: 66717 - protein, 58 aa, Setaria italica
  Transcript Sequence Number=SeqID_743
EDQNMDMFKEIELLPLILELNVEVNGVTKKKLVRIFNFEWYPDETLLVTVQSLYIRDL

SEQ ID NO: 66718 - protein, 64 aa, Setaria italica
  Transcript Sequence Number=SeqID_744
YTPWTQHVLLSPLLTIPIENGFHAFVSLILSECPILLTSIPVFCSIFFLKEISFWLLAKWCFFL

SEQ ID NO: 66719 - protein, 113 aa, Setaria italica
  Transcript Sequence Number=SeqID_745
  Gene Ontology: Mol. function=protein serine/threonine kinase activity; Biological process=protein amino acid phosphorylation
  Homolog annotation: Hit_ID=C4P7U2; Match level="QueryCoverage=92%, HitCoverage=24%, E-value=6e-50, Identity=91%"; Hit description=CBL -interacting protein kinase 15
  Pfam annotation: Domain name=NAF; Domain location=1-32; Score=3.0; E _value=0.0028; Accession=PF03822.6; Description=NAF domain
KKKARFTSSQSASTIISKLEDVATCSKLTVKKKEGGVLKMEGESEGRKGVLSIDAEIFEVTPSFHLVEIKKNNGDTLEYENLFKQDMKPALKDIVWAWQGERQDQPHEDHKQI

SEQ ID NO: 66720 - protein, 154 aa, Setaria italica
  Transcript Sequence Number=SeqID_746
  Gene Ontology: Mol. function=protein binding
  Homolog annotation: Hit_ID=Q2QVR2; Match level="QueryCoverage=79%, HitCoverage=14%, E-value=2e-14, Identity=42%"; Hit description =Leucine Rich Repeat family protein
  Pfam annotation: Domain name=LRR_1; Domain location=118-141; Score =2.9; E_value=83; Accession=PF00560.25; Description=Leucine Rich Repeat
  Pfam annotation: Domain name=LRR_1; Domain location=22-44; Score=4.2; E_value=47; Accession=PF00560.25; Description=Leucine Rich Repeat
  Pfam annotation: Domain name=LRR_1; Domain location=70-92; Score=3.1; E_value=78; Accession=PF00560.25; Description=Leucine Rich Repeat
  Pfam annotation: Domain name=LRR_1; Domain location=94-116; Score =7.1; E_value=13; Accession=PF00560.25; Description=Leucine Rich Repeat
  Pfam annotation: Domain name=LRR_2; Domain location=22-45; Score =20.0; E_value=0.0096; Accession=PF07723.5; Description=Leucine Rich Repeat
  Pfam module annotation: Pfam domain module=LRR_1::LRR_1::LRR_1::LRR _1::LRR_2; Domain location=118-141::22-44::70-92::94-116::22-45
LKILEGTNFSYDTPSSFGNLESLKTLRLSTMGIDNELASLISELPALDYLQLIGSDLEKPVLSWVSNLTQLTNLLLDGYDFSKSVPTWIGKLTRLEILTIWDCSFSVPIPYQIRNLTKLAALEFYSCDFSEQRMPSWIGNLTKLTSLTIEEYLS

SEQ ID NO: 66721 - protein, 470 aa, Setaria italica
  Transcript Sequence Number=SeqID_747
  Gene Ontology: Mol. function=histone-lysine N-methyltransferase activity; Cellular component=nucleus; Biological process=chromatin modification
  Homolog annotation: Hit_ID=B9HSV4; Match level="QueryCoverage=98%, HitCoverage=88%, E-value=1e-179, Identity=63%"; Hit description=SET domain-containing protein (Fragment)
  Pfam annotation: Domain name=Pre-SET; Domain location=208-308; Score =108.6; E_value=2.2e-29; Accession=PF05033.8; Description=Pre-SET motif
  Pfam annotation: Domain name=SET; Domain location=310-465; Score =118.0; E_value=3.2e-32; Accession=PF00856.20; Description=SET domain
  Pfam annotation: Domain name=YDG_SRA; Domain location=22-178; Score =329.4; E_value=7.1e-96; Accession=PF02182.9; Description=YDGSRA domain
  Pfam module annotation: Pfam domain module=Pre-SET::SET::YDG_SRA; Domain location=208-308::310-465::22-178
RRHLDGAAALMADHDLWLNRDRRIVGPMPGISVGDAFFFRMELCVLGLHGQVQAGIDYVTAGKSASGEPIATSIIVSGGYEDDDDHGDVLVYTGHGGRDPNLHKHCVDQKLEGGNLALERSMAYGIEIRVIRGVKSRRSPVGKVYFYDGLYKVVDYWLDRGKSGFGVYKYKMLRIEGQEPMGTVNYRIAEQLKVDVFAVRPTGYLSFDISMGRELLPVALYNDFDNDRDPLLFEYLARPIFPTSAVQGKFAEGGGGCDCAESCSIGCNCAGRNGGEFAYDKTGALLRGKPLVYECGPYCRCPPSCPNRVSQKGLQHRLEVFRSRETGWGVRSLDLIKAGTFICEFSGIVLTQQQSEIVAANGDCLVRPNRFPPRWLDWGDISDVNPEYVAPDYPTLPELNFAIDVSRARNVACYFSHSCSPNVFVQFVLFDHYNASYPHLMIFAMENIPPLRELSIDYGMVDEWVGQLTM

SEQ ID NO: 66722 - protein, 87 aa, Setaria italica
  Transcript Sequence Number=SeqID_748
DLDEDEEEGEDELAEDAAEEVRLRRLAFLFVFIQVGAAMTIDGKTNAGGNLTAVALGQALAVWKPATAGFHIWATMYRADRNRVIWP

SEQ ID NO: 66723 - protein, 67 aa, Setaria italica
  Transcript Sequence Number=SeqID_749
  Gene Ontology: Mol. function=transporter activity; Cellular component= integral to membrane; Biological process=transport
  Homolog annotation: Hit_ID=Q9ATL4; Match level="QueryCoverage=61%, HitCoverage=16%, E-value=2e-13, Identity=92%"; Hit description =Aquaporin TIP4-3
MGKLALGRRGEASEPDFFRGVLGELVLTFLFVFIQVGAAMTIDGMQLHRQLERVSSPCEMIIHKPIK

SEQ ID NO: 66724 - protein, 246 aa, Setaria italica
  Transcript Sequence Number=SeqID_750
  Gene Ontology: Mol. function=transporter activity; Cellular component= integral to membrane; Biological process=transport
  Homolog annotation: Hit_ID=Q9ATL4; Match level="QueryCoverage=99%, HitCoverage=99%, E-value=1e-102, Identity=79%"; Hit description =Aquaporin TIP4-3
  Pfam annotation: Domain name=MIP; Domain location=11-228; Score =241.3; E_value=2.4e-69; Accession=PF00230.12; Description=Major intrinsic protein
MGKLALGRRGEASEPDFFRGVLGELVLTFLFVFIQVGAAMTIDGKTNAGGNLTAVALGQALAVCVIATAGFHISGGHVNPAVTLSMAVGGQITLFRSALYIVAQMLGSSTACVLLRWLTGGLVATPVHALAAGVGPIQGVVAEVVFTFSLLFVIYATILDPRKILPGVGPLLTGLLVGANSIAGAVLSGASMNPARSFGPALATGVWTHHWVYWVGPLAGGPLAVVVYECLFMAPAGAHQLLPEEA

SEQ ID NO: 66725 - protein, 371 aa, Setaria italica
  Transcript Sequence Number=SeqID_751
  Homolog annotation: Hit_ID=B6T4Q3; Match level="QueryCoverage=57%, HitCoverage=58%, E-value=2e-52, Identity=57%"; Hit description =Plasminogen activator inhibitor 1 RNA-binding protein
  Pfam annotation: Domain name=HABP4_PAI-RBP1; Domain location=155-264; Score=142.9; E_value=1e-39; Accession=PF04774.7; Description =Hyaluronan  mRNA binding family
  Pfam annotation: Domain name=Stm1_N; Domain location=5-90; Score= -6.4; E_value=0.026; Accession=PF09598.2; Description=Stm1
  Pfam module annotation: Pfam domain module=HABP4_PAI-RBP1::Stm1_N; Domain location=155-264::5-90
MGTKNQFDLLVDVDNDDPSHLIAAAEKKAAASPKPAPAAPAKLPTKPPPPAQAVKESRNHGAPARDGAGRGGPGRGRGGFRGGRTGPRREYGEGDANGVEGGYGGGSFGDGFPRREDGEGRAMERGRGPRQPYRGGGRRGGYTDGEGGDESGRPPRRAYERHSGTGRGYEMKREGAGRGNWGTVTDEAQETLEAVNTEGTPAVAEDENKLEEVPHSEVEKGKEGEPTEEEEPEDKEMTLEEYEKVLEEKRKALLGLKTEVRKVEVDKELQSMQQLSVKKGSDEIFIKLGSDKEKKKENAERDERAKKSVSINEFLKPAEGERYYSPGGRGRGRGRGRGDRGGFRSGYSPREPGALAPAIQDQAQFPSLGGK

SEQ ID NO: 66726 - protein, 74 aa, Setaria italica
  Transcript Sequence Number=SeqID_752
EGRNKYYQELSHVSSSFFLLRLDMVLPLFCLGIIYTLLICCYHVFFCFSVINLARVLSYCFLHRRSFVHVPTKI

SEQ ID NO: 66727 - protein, 238 aa, Setaria italica
  Transcript Sequence Number=SeqID_753
IKNPVNVFADEETKKCHEWAKDGVEGTNFTGNDSQKLDKDMQDKRVQKKVVKVMSAFNGWSDVVFDPVMFPAKEVANFSEEVKELELEPEILPDNTRCLFTSGKRADAPTAKQLKSSVKPRLQERKALQDLSNTLSGRKDHQDISNTLKEKSILKERPSLRRHEAIKNPLKIFAVEETKKCHEWAKDVVEGTHLTGNYPQKLDKDVQEERDKAQLAEDSSTDDELDEYPFLDNNPVTF

SEQ ID NO: 66728 - protein, 84 aa, Setaria italica
  Transcript Sequence Number=SeqID_754
  Subcellular localization annotation: CTP_CleavageSite=55; ConfidenceScore=5.19e-01
STSAAQGRRRRSTPSRGSKLAGELPKLQGTSTPLVQWRRELIRDGSSALSHSMSRQSACQGRVLCISICTTIFPSTRDDCSAGC

SEQ ID NO: 66729 - protein, 441 aa, Setaria italica
  Transcript Sequence Number=SeqID_755
  Gene Ontology: Mol. function=chromatin binding; Cellular component =intracellular; Biological process=chromatin assembly or disassembly
  Homolog annotation: Hit_ID=Q8LI34; Match level="QueryCoverage=100%, HitCoverage=100%, E-value=0.0, Identity=88%"; Hit description =Putative MYST-like histone acetyltransferase 1
  Pfam annotation: Domain name=MOZ_SAS; Domain location=223-409; Score =485.6; E_value=6.7e-143; Accession=PF01853.10; Description=MOZSAS family
  Pfam annotation: Domain name=zf-C2H2; Domain location=199-221; Score =17.5; E_value=0.055; Accession=PF00096.18; Description=Zinc finger, C2H2 type
  Pfam module annotation: Pfam domain module=MOZ_SAS::zf-C2H2; Domain location=223-409::199-221
MGSMEPSTAPENGSAAGGGGAACNGAGAAPNGGGMERRLRSSAASASWAAHLPLEVGTRVMCRWRDQKLHPVKVIERRKGSSSSSPADYEYYVHYTEFNRRLDEWVKLEQLDLDTVETDVDEKVEDKATSLKMTRHQKRKIDETHVEQGHEELDAASLREHEEFTKVKNIAKIELGRYEIDTWYFSPFPPEYNDCPKLFFCEFCLNFVKRKEQLQRHMKKCDLKHPPGDEIYRSGTLSMFEVDGKKNKVYGQNLCYLAKLFLDHKTLYYDVDLFLFYVLCECDDRGCHMVGYFSKEKHSEESYNLACILTLPPYQRKGYGKFLIAFSYELSKKEGKVGTPERPLSDLGLLSYRGYWTRVLLEILKKHKGNISIKELSDMTAIKADDILSTLQSLDLIQYRKGQHVICADPKVLDRHLKAAGRGGLDVDVSKLIWTPYKEQG

SEQ ID NO: 66730 - protein, 167 aa, Setaria italica
  Transcript Sequence Number=SeqID_756
  Gene Ontology: Mol. function=oxidoreductase activity
KPIPSSTPRYIGVNGMRSLADAMLPESDMIKVVRPCWISKLEPFNGLWRLFENEKPRGEYDAIVIAHNGKCANRLLSTSGLPLLTKQMKRLELSSVWALLAAFEDPLPIPHDDSHGAFEGAFVRDVDSLSWMGNNTLKLFPAQTGTPECWTFSALLLNRKRRNKSTR

SEQ ID NO: 66731 - protein, 205 aa, Setaria italica
  Transcript Sequence Number=SeqID_757
  Gene Ontology: Mol. function=hydrolase activity; Biological process =lipid catabolic process
  Homolog annotation: Hit_ID=Q653V2; Match level="QueryCoverage=100%, HitCoverage=45%, E-value=2e-51, Identity=54%"; Hit description =Patatin-like phospholipase domain containing protein-like
AACGVGPAEVASLDGRTRLRAAAGAGGGGGASAAVANPTAVAVTHVLHNKREFPFAAGAGDLVVLSLGGSAAASLLRPSSSSLLRIAGACQADMVDQAVSMAFGESRASNYVRIQGNGIAAGETAEAALTERGVESVLFRGRKLMAQTNGERLDGVAEQLVREHHRRLESKTPVVLVKPSATPRTSSSSASTLITVSTNSSSESP

SEQ ID NO: 66732 - protein, 141 aa, Setaria italica
  misc_feature (129)..(129): Xaa can be any naturally occurring amino acid
  Transcript Sequence Number=SeqID_758
  Gene Ontology: Mol. function=oxidoreductase activity
MLLMSRVVSRRLRGGVGGHGDERGRRGRRRPRRRGGLHEHHGRLALQPPVVLPHQLLGHTVEPLAVAQTGTPECWTFFSTAAYGKRNKVPQENIPKVTAEKVKEDMLEGVEHALGLSKGSLHQPIYTRXQLWGAALPMNTP

SEQ ID NO: 66733 - protein, 54 aa, Setaria italica
  Transcript Sequence Number=SeqID_759
  Gene Ontology: Mol. function=structural constituent of ribosome; Cellular component=intracellular; Biological process=translation
  Homolog annotation: Hit_ID=Q84L29; Match level="QueryCoverage=100%, HitCoverage=20%, E-value=1e-25, Identity=98%"; Hit description =Mitochondrial 60S ribosomal protein L5
ETEFCEFSPELEDHFEIFEHIRGFNVTIVTSADTKDETSLLWSGFMLNDEGETK

SEQ ID NO: 66734 - protein, 272 aa, Setaria italica
  misc_feature (118)..(118): Xaa can be any naturally occurring amino acid
  misc_feature (147)..(147): Xaa can be any naturally occurring amino acid
  Transcript Sequence Number=SeqID_760
  Gene Ontology: Mol. function=3-beta-hydroxy-delta5-steroid dehydrogenase activity; Cellular component=endoplasmic reticulum; Biological process=steroid biosynthetic process
  Homolog annotation: Hit_ID=B6TKP9; Match level="QueryCoverage=83%, HitCoverage=39%, E-value=1e-87, Identity=73%"; Hit description =Sterol-4-alpha-carboxylate 3-dehydrogenase, decarboxylating
  Pfam annotation: Domain name=Reticulon; Domain location=49-222; Score= 111.1; E_value=3.8e-30; Accession=PF02453.9; Description=Reticulon
SRAKDQLGYEPLVSLKDGLKRTVESYPHLQAQNQRSISKASIFLGNGNLAKTVLWEDTKQTVTVLLLLAVIYYHLFTCGYTFITAMAKLLSLTALFLFIHGMLPTNVFGHKIEKLEAXTNFHITQVVVPNVLLVPISYSSLRSIGNXSFSSSALRSLCRGNDWPLFFKVALSLLVVSILSSMSSQAAFKIGTVLVFTGFKAYEKWEDTIDSMAGDACSILLHFGSTKNLLARNKCRCGACRRSVASFSDIIFSSAVSCLHTPEVSLCILLLT

SEQ ID NO: 66735 - protein, 421 aa, Setaria italica
  Transcript Sequence Number=SeqID_761
  Gene Ontology: Mol. function=3-beta-hydroxy-delta5-steroid dehydrogenase activity; Cellular component=endoplasmic reticulum; Biological process=steroid biosynthetic process
  Homolog annotation: Hit_ID=B6TKP9; Match level="QueryCoverage=99%, HitCoverage=75%, E-value=0.0, Identity=89%"; Hit description=Sterol -4-alpha-carboxylate 3-dehydrogenase, decarboxylating
  Pfam annotation: Domain name=3Beta_HSD; Domain location=1-152; Score =49.9; E_value=1.4e-12; Accession=PF01073.11; Description=3-beta hydroxysteroid dehydrogenaseisomerase family
  Pfam annotation: Domain name=Reticulon; Domain location=244-408; Score=164.5; E_value=3.1e-46; Accession=PF02453.9; Description =Reticulon
  Pfam module annotation: Pfam domain module=3Beta_HSD::Reticulon; Domain location=1-152::244-408
VFDGVHGIFNADESMPYPDKFNDSYSETKADAEKLVMRANGREGLLTCCIRPSSIFGPGDKLLVPSLVAAARAGKSKYIIGDGNNYYDFTYVENVAYGHVCAEKTLSSEDGAKIAAGKTYFITNMEPIKFWEFMSLILEGLGYERPSVKIPVSVMMPVAHVVEWTYKKFAKYGMKVPQLTPSRIRLLSCNRTFSCSRAKDQLGYEPLVSLKDGLKRTVESYPHLQAQNQRSISKASIFLGNGNLAKTVLWEDTKQTVTVLLLLAVIYYHLFTCGYTFITAMAKLLSLTALFLFIHGMLPTNVFGHKIEKLEASNFHITQVEAHHVAHSISSSWNSLVAALRSLCRGNDWPLFFKVALSLLVVSILSSMSSQAAFKIGTALVFTGFKAYEKWEDTIDSMAGDACSILLHFGSTKKSSSEKQM

SEQ ID NO: 66736 - protein, 686 aa, Setaria italica
  Transcript Sequence Number=SeqID_762
  Gene Ontology: Mol. function=DNA binding; Cellular component =nucleosome; Biological process=regulation of transcription, DNA -dependent
  Homolog annotation: Hit_ID=B6UER7; Match level="QueryCoverage=85%, HitCoverage=97%, E-value=1e-66, Identity=53%"; Hit description=DNA -binding protein
  Pfam annotation: Domain name=AT_hook; Domain location=110-122; Score =20.6; E_value=0.0066; Accession=PF02178.11; Description=AT hook motif
  Pfam annotation: Domain name=AT_hook; Domain location=135-147; Score =6.4; E_value=2.1; Accession=PF02178.11; Description=AT hook motif
  Pfam annotation: Domain name=AT_hook; Domain location=169-181; Score =15.0; E_value=0.069; Accession=PF02178.11; Description=AT hook motif
  Pfam annotation: Domain name=AT_hook; Domain location=203-215; Score =15.2; E_value=0.062; Accession=PF02178.11; Description=AT hook motif
  Pfam annotation: Domain name=AT_hook; Domain location=237-249; Score =15.2; E_value=0.062; Accession=PF02178.11; Description=AT hook motif
  Pfam annotation: Domain name=AT_hook; Domain location=271-283; Score =15.2; E_value=0.062; Accession=PF02178.11; Description=AT hook motif
  Pfam annotation: Domain name=AT_hook; Domain location=296-308; Score =15.2; E_value=0.062; Accession=PF02178.11; Description=AT hook motif
  Pfam annotation: Domain name=AT_hook; Domain location=329-341; Score =5.4; E_value=3.1; Accession=PF02178.11; Description=AT hook motif
  Pfam annotation: Domain name=AT_hook; Domain location=363-375; Score =13.1; E_value=0.15; Accession=PF02178.11; Description=AT hook motif
  Pfam annotation: Domain name=AT_hook; Domain location=395-407; Score =19.2; E_value=0.013; Accession=PF02178.11; Description=AT hook motif
  Pfam annotation: Domain name=AT_hook; Domain location=409-421; Score =14.0; E_value=0.1; Accession=PF02178.11; Description=AT hook motif
  Pfam annotation: Domain name=AT_hook; Domain location=434-446; Score =8.4; E_value=0.92; Accession=PF02178.11; Description=AT hook motif
  Pfam annotation: Domain name=AT_hook; Domain location=494-506; Score =10.8; E_value=0.37; Accession=PF02178.11; Description=AT hook motif
  Pfam annotation: Domain name=AT_hook; Domain location=520-532; Score =11.8; E_value=0.25; Accession=PF02178.11; Description=AT hook motif
  Pfam annotation: Domain name=AT_hook; Domain location=548-560; Score =2.5; E_value=9.6; Accession=PF02178.11; Description=AT hook motif
  Pfam annotation: Domain name=AT_hook; Domain location=95-107; Score =12.8; E_value=0.17; Accession=PF02178.11; Description=AT hook motif
  Pfam annotation: Domain name=Linker_histone; Domain location=18-87; Score=58.9; E_value=2e-14; Accession=PF00538.11; Description=linker histone H1 and H5 family
  Pfam module annotation: Pfam domain module=AT_hook::AT_hook::AT _hook::AT_hook::AT_hook::AT_hook::AT_hook::AT_hook::AT_hook::AT _hook::AT_hook::AT_hook::AT_hook::AT_hook::AT_hook::AT_hook::Linker _histone; Domain location=...
  Pfam module annotation: Domain location=110-122::135-147::169 -181::203-215::237-249::271-283::296-308::329-341::363-375::395 -407::409-421::434-446::494-506::520-532::548-560::95-107::18-87
MVVAVASPSSAAPPPGRPHPAYKEMVVQALTELRDPGGSSRQAIGKYIADHFSGLHSSHEALLSAHLRRLKSQGQLRLVSGNYFLSTEAPPPQQRRGRGRPPKSAASGQKRGRGRPRKNADLAPSAPIPNSEGPKRGPGRPRKNALVPVASSASPLLGATASPPPSGVKRGRGRPRKNSLVPVASSASPLLGATASPLPSGVKRGRGRPRKNALVPVASSASPLLEAIAAPPSSGVKRGRGRPRKNALVPVASSASQLLGAIALPSPSGVKRGRGRPRKNALVLLASSAPPPSGDKRGRGRPRKNALVLLASSVPPQPGAIALPPSGVKRGRGRLRKNALVPVASSSLQLPRAIAMLPPSGVKRGRGRPRKNPYPVASPLLGVVSVSSNSVVGVKRGRGRPPKAVVAGKRKRGRPPKEKMQPESGQSTDAPLTKRGPGRPRKEKTLEGGQLNAAQTTGDQHEALPAQATGQAGAVQNEVEARSLQSFGTYLTEKRDRGRPRKRPLETETAETGVAASVEKRGRGRPRKKNRSAGTSTESGLTASMGIKRGPGRPRKVRPFETGVAETADEVSRHLIEERPEKDEDLASGKKAETQNVLLVEEIDAKPADAGCVLVSGEEAATAPMDAGGAMPRVVSVEEAATARMDSGGAMPRVVSGEEAAIAPNDAGAAMPGVDPMDSNVGTKSH

SEQ ID NO: 66737 - protein, 95 aa, Setaria italica
  Transcript Sequence Number=SeqID_763
  Gene Ontology: Mol. function=receptor activity; Biological process =protein amino acid phosphorylation
  Pfam annotation: Domain name=LRR_1; Domain location=12-33; Score=5.9; E_value=22; Accession=PF00560.25; Description=Leucine Rich Repeat
  Pfam annotation: Domain name=LRR_1; Domain location=35-57; Score =13.0; E_value=0.98; Accession=PF00560.25; Description=Leucine Rich Repeat
  Pfam annotation: Domain name=LRR_1; Domain location=59-81; Score =14.3; E_value=0.53; Accession=PF00560.25; Description=Leucine Rich Repeat
  Pfam module annotation: Pfam domain module=LRR_1::LRR_1::LRR_1; Domain location=12-33::35-57::59-81
GALPDEIFNMTLLKHLSFSKNQLEGSLGDISKHRNLAILDLGGNVIRGSIPDSIGGLKGLQELQLGHNNVSGELPSTLGNCTDLRSINLWCNNFE

SEQ ID NO: 66738 - protein, 116 aa, Setaria italica
  Transcript Sequence Number=SeqID_764
  Gene Ontology: Mol. function=glycerophosphodiester phosphodiesterase activity; Cellular component=vacuole; Biological process=glycerol metabolic process
  Homolog annotation: Hit_ID=A0ZHW5; Match level="QueryCoverage=88%, HitCoverage=18%, E-value=5e-15, Identity=39%"; Hit description =Phytase
SYDEITSGEYLDYMSKYVVGIGPWKDTVVPPTKANRLATPTDLVAMAHARGLQVHPYTYRNENKFLHFNFRQDPYAEYDYWINDVGVDGLFTDFPASLRRFQEWTAKRKTDRDFVA

SEQ ID NO: 66739 - protein, 408 aa, Setaria italica
  Transcript Sequence Number=SeqID_765
  Gene Ontology: Mol. function=hydrolase activity
  Homolog annotation: Hit_ID=B9RVA3; Match level="QueryCoverage=87%, HitCoverage=94%, E-value=1e-154, Identity=72%"; Hit description =Hydrolase, putative
  Pfam annotation: Domain name=Abhydrolase_1; Domain location=181-406; Score=51.6; E_value=3e-12; Accession=PF00561.12; Description =alphabeta hydrolase fold
  Subcellular localization annotation: CTP_CleavageSite=66; ConfidenceScore=5.96e-01
MSRCCPCATSSSPALFLLPSVPASSTSKTTSTSTTRVASSPCGGAFSCGSGRLRWGTGPRGRYATVAASGKDGSGTAEEEKGEGDPGFNPFGFVTDNPSSRSAIQLPAVPAEDGNVGQMLYRIEDKGRDYGSYVRSGEFKWFVRETGSSDARRGTIVFLHGAPTQSFSYRVVMAQMADAGYHCFAPDWLGFGFSEMPQPGYGFDYKEEEFHKAFDDLLGTLNITEPFFLVVQGFLVGSYGLTWALKNSSRVLKLAILNSPLTVSSPVPGLFQQLKWPLFGEFTCQNAVLAERFIEAGSAYVLKLEKADVYRLPYLSSGAPGFALLEAARKVNFQDVLSRISAGFSSNSWEKPILLAWGISDKYLPLSVAEEFKKANPDVVKLEAIEGAGHMPQEDWPEKVVKALISFL

SEQ ID NO: 66740 - protein, 135 aa, Setaria italica
  Transcript Sequence Number=SeqID_766
  Gene Ontology: Mol. function=protein disulfide oxidoreductase activity; Cellular component=extracellular region; Biological process=electron transport chain
  Homolog annotation: Hit_ID=B6T828; Match level="QueryCoverage=100%, HitCoverage=100%, E-value=7e-56, Identity=80%"; Hit description=Grx _C4-glutaredoxin subgroup I
  Pfam annotation: Domain name=Glutaredoxin; Domain location=44-108; Score=101.5; E_value=2.8e-27; Accession=PF00462.16; Description =Glutaredoxin
  Subcellular localization annotation: CTP_CleavageSite=21; ConfidenceScore=5.19e-01
MVAFLGRRIGVAAAAAAFIALAALGSASSTPKSFVKSTVSAHDVVIFSKSYCPYCKRAKAIFKELELKKEPYVVELDEREDGSEIQDALSEIVGRRTVPQVFVHGKHLGGSDDTLDAYESGKLAKLLNIGVKDDL

SEQ ID NO: 66741 - protein, 124 aa, Setaria italica
  Transcript Sequence Number=SeqID_767
  Gene Ontology: Mol. function=electron carrier activity; Biological process=oxidation reduction
  Homolog annotation: Hit_ID=B6SSX8; Match level="QueryCoverage=100%, HitCoverage=23%, E-value=1e-51, Identity=80%"; Hit description =Flavonoid 3-monooxygenase
MELPPWASFLGVVLATVMLLKAIVGRRRRRRAYNLPPGPKPWPIIGNLDLMGALPHRSIHELSRKYGPLMQLQFGSFPVVVGSSVDMAKFFLKTHDVVFTDRPKTAAGKYTTYNYRDITWSPYG

SEQ ID NO: 66742 - protein, 493 aa, Setaria italica
  Transcript Sequence Number=SeqID_768
  Gene Ontology: Mol. function=metal ion binding
  Homolog annotation: Hit_ID=Q2HUT4; Match level="QueryCoverage=66%, HitCoverage=63%, E-value=1e-49, Identity=40%"; Hit description =Putative RING zinc finger protein-related
GRCRCCCGGGTRAARLQCVAALVLGVAVLLSAVFWLPPFTGRGRGAEGPDPGDDFGAAIVASFRLQKTVPELSGNKSKLEFDIYEEIGIPNSTVVVNTLHPLDGSNWTNVIFSIVPFPEDLTISSTWLSILRSYFMSFVVRQSTLHLTESIFGNSSSFEVVKFPGGITIIPPQNASLLQPHATFNFTLNYPIYKIQDRTNELKDQMKAGLLLNPYENLYVKLTNSQGSTILPPTIVETSIVLEVGNHKTSEPSVPRMKQLARTITNSSSSSGNLGLNHTVFGKVKQISLSSYLRHSLHSGGGSDAPSPAPMHHHAHHGHHHHHHSPDNSRHLAPAPAPTHFPVPQPRYGAPPPSGCPYSKNKPKKRGPVTPAAEPAANNHHSASSAPPPHPWSPPPASHSPHDPTMHGGSPVPSPPILPEPPLPTVSFAHAHPPSEHGTRTSPAPSEQGTRAGPGGMSQVAPAPHSSHGTRMQGDSCLWVLFVFTLCILMSLL

SEQ ID NO: 66743 - protein, 51 aa, Setaria italica
  misc_feature (41)..(41): Xaa can be any naturally occurring amino acid
  Transcript Sequence Number=SeqID_769
  Gene Ontology: Mol. function=transposase activity; Biological process= transposition, DNA-mediated
MGDKADWGDTFLRHLIDACKEEIEAGNRPMAIFTTTGWKNXVVSKFAEKIR

SEQ ID NO: 66744 - protein, 120 aa, Setaria italica
  Transcript Sequence Number=SeqID_770
EEEEDEGEEEEDGEWLWGWERCRLAARRAWATGVGAVQERVLVHSACGCPSVRPAVWSAAAAVAVVGALLYARRRDRKERDLLVLLSKEKDKRIAQLLHQIALMSDIRSGSEAVKIIRNS

SEQ ID NO: 66745 - protein, 125 aa, Setaria italica
  Transcript Sequence Number=SeqID_771
  Gene Ontology: Mol. function=nucleotide binding; Cellular component =nucleus; Biological process=defense response
  Homolog annotation: Hit_ID=Q2QZJ7; Match level="QueryCoverage=92%, HitCoverage=9%, E-value=5e-38, Identity=64%"; Hit description=NB-ARC domain containing protein, expressed
STLADKVRRLSLHFGNAEDVIPPSSMRLSQVRTLVYFGVCRCMPYILQFHLLQVLILHFWGDKDNIILDLTRISELFRLRYLKVSSNVTLDLRTQMHGLQYLETLKIDARVRAVPSDIVHLSGLL

SEQ ID NO: 66746 - protein, 55 aa, Setaria italica
  Transcript Sequence Number=SeqID_772
FLKVSCNFMSISHLIFIWMSGISGKARKISEFLLRHFRCPAILLTMNYRKSRLLE

SEQ ID NO: 66747 - protein, 316 aa, Setaria italica
  Transcript Sequence Number=SeqID_773
TPSPPPLPVLALKDGTFYSMPRGEPLHFPGCDGGFVMASGNWLVYNRLHCLLLVDPFSGATMTLPALRSIYPLEESMDMVVVKLIECSPHLIAALFKGGRNFWIAVCRPGDSSWSAAQKLPMGILDIAFYQEKLYALSFLQDLFALDISVDDNTGNPQVALIGRVIKGGYIYLDHNFMRVLYLIESRGSLLMVRRSIFHEHGHGKGQIHTFAEQCEPELAVFEPDFGQSRWTNAMTVGDDQVLFLGMFSRAVCMPLCDSQDKRMWLLDDYRRDHCDGETCSGTGDMRIGKYSCPLPMISWRAHNLCAGAVWLFPSN

SEQ ID NO: 66748 - protein, 968 aa, Setaria italica
  misc_feature (83)..(83): Xaa can be any naturally occurring amino acid
  Transcript Sequence Number=SeqID_774
  Gene Ontology: Mol. function=ATP-dependent helicase activity; Cellular component=intracellular
  Homolog annotation: Hit_ID=Q9FW67; Match level="QueryCoverage=91%, HitCoverage=98%, E-value=0.0, Identity=81%"; Hit description =Putative ATP-dependent RNA helicase
  Pfam annotation: Domain name=DEAD; Domain location=206-364; Score= -2.9; E_value=6.9e-05; Accession=PF00270.21; Description=DEADDEAH box helicase
  Pfam annotation: Domain name=DUF1605; Domain location=783-896; Score =95.8; E_value=1.5e-25; Accession=PF07717.8; Description=Domain of unknown function (DUF1605)
  Pfam annotation: Domain name=HA2; Domain location=655-746; Score =121.8; E_value=2.3e-33; Accession=PF04408.15; Description=Helicase associated domain (HA2)
  Pfam annotation: Domain name=Helicase_C; Domain location=499-593; Score=68.8; E_value=2e-17; Accession=PF00271.23; Description =Helicase conserved C-terminal domain
  Pfam annotation: Domain name=NACHT; Domain location=217-395; Score= -30.9; E_value=0.02; Accession=PF05729.4; Description=NACHT domain
  Pfam module annotation: Pfam domain module=DEAD::DUF1605::HA2::Helicas e_C::NACHT; Domain location=206-364::783-896::655-746::499-593::217 -395
GGRGGGGGGGGRGEQRWWDPQWRAERLRQMHGEVEKVDENEWWNRIGQLREGTQQELVVKRNFGRDGQNILADMAQRQGIYLXSNAYNKGKTLVFSKVPLPDYRADLDERHGSTQKEIKMSNQTERRVEDLLSRSKLNTSDSASTSNVSIRQSLPSTSSSVVERATDVDKEKLSSQLRDLQNSRKMAASARSMQSFREKLPAFNMREGFLKAVAANQVLVISGETGCGKTTQLPQFILEEEIDNLCGADCSIICTQPRRISAISVAARVAAERGEELGETVGYQIRLESKRSAQTRLLFCTTGVLLRRLAQEPDLVGVSHLLIDEIHERGMNEDFLIIILRDLLPRRPDLRLVLMSATINAELFSKYFGDASIMHIPGFTFPVAEFFLEDVLEKTRYKIKSERDSSAGSSRRKRLSSVKSDPLSDLFEDIDIDKEYGNYSITTRQSLEAWSAAELDLSLVESTIEYICRYEAEGAILVFLTGWDEISKLLDKIKGNTFLGSSNRFLVLPLHGSMPTVNQREIFDRPPANMRKIVLATNIAESSITIDDVVYVIDCGKAKETSYDALNKLACLLPSWISKASAHQRRGRAGRVQPGFCYRLYPKVIHDAMPQFQLPEILRTPLQELCLTIKSLQLGAVSSFLAKSLQPPDPLSVNNAIELLKTIGALDDMEELTSLGRHLCTLPLDPNLGKMLLMGSVFQCLDPVLTIAAALAYRNPFVLPIDRKEEADAVKRSFAGNSCSDHIALLKAFVAWNEAKRSGRERSFCWENFLSPMTLKMMDDMRNQFFDLLSDIGFVSKTRGVKAYNQYGSDLEMVCAVLCAGLYPNVVQCKRRGKRTAFYTKDVGKVDIHPSSVNAFVNQFPLPYLVYSEKVKTASIYVRDSTNISDYALLLFGGSLSPSKTGEGIEMLGGYLHFSAPKRTIELIQRLRGELDKLLQRKIEEPGVDIFSEGMGVVAAAVELLHSQNEYH

SEQ ID NO: 66749 - protein, 101 aa, Setaria italica
  Transcript Sequence Number=SeqID_775
  Gene Ontology: Mol. function=protein serine/threonine kinase activity; Cellular component=integral to membrane; Biological process=protein amino acid phosphorylation
  Homolog annotation: Hit_ID=Q9FG43; Match level="QueryCoverage=96%, HitCoverage=8%, E-value=2e-12, Identity=44%"; Hit description =Receptor protein kinase-like protein
FSDENLIGRGGFVSVYKGVLHGGLVVAIKRFRNSVIFSQDHLYDELNLVSNLQHKNLVKLLGYGYEVIQTVVREEDINDQAEARLYFLVEEHMPNGNWRII

SEQ ID NO: 66750 - protein, 241 aa, Setaria italica
  Transcript Sequence Number=SeqID_776
  Gene Ontology: Mol. function=protein serine/threonine kinase activity; Cellular component=integral to membrane; Biological process=protein amino acid phosphorylation
  Homolog annotation: Hit_ID=Q2QUZ1; Match level="QueryCoverage=92%, HitCoverage=46%, E-value=4e-55, Identity=51%"; Hit description =Protein kinase domain containing protein
  Pfam annotation: Domain name=Pkinase; Domain location=1-215; Score =17.9; E_value=1.5e-09; Accession=PF00069.17; Description=Protein kinase domain
  Pfam annotation: Domain name=Pkinase_Tyr; Domain location=1-215; Score=-62.3; E_value=1.4e-09; Accession=PF07714.9; Description =Protein tyrosine kinase
  Pfam module annotation: Pfam domain module=Pkinase::Pkinase_Tyr; Domain location=1-215::1-215
MAMKSYKTVVREEDINDQAEARLYFLVEEHMPNGNLEDNLKFRLDWFNSFHIIQGIAHGLNYLHVQHIVHSDLKPSNILLDSNINPKIGDFGIARMLDHGNMTTRDVSCLAGTMGYMPPEYIVEGILSTKYDVYSFGVILLEIISSMCSSKPARRQASVEWAWEVRRIGLLIKEIKVRCNASEGDKIKRCMEVGLLCTQFNPADRPTMGIVLEMLNGKKELPTPRKPRYSKRRTGEGVRNF

SEQ ID NO: 66751 - protein, 52 aa, Setaria italica
  Transcript Sequence Number=SeqID_777
DTEIYFEIQVEMLYLFLIFGALHSLQFCLILIYIIGYINLENVCTIFFVHSF

SEQ ID NO: 66752 - protein, 53 aa, Setaria italica
  Transcript Sequence Number=SeqID_778
MQRVILLPLQVSAAGCKTCKGKGAVECPGCKGTGKNKKNGNIFERWKCFGKLR

SEQ ID NO: 66753 - protein, 148 aa, Setaria italica
  Transcript Sequence Number=SeqID_779
  Gene Ontology: Cellular component=chloroplast
  Subcellular localization annotation: CTP_CleavageSite=52; ConfidenceScore=5.57e-01
MELAIATASSSLVTGLRCRTTGSAAVAWPGRTSTARLCRRRAMPSKRGARLMVSAAGCKTCDPYRAVECPGCKGTGKNKKNGNIFERWKCFECQGFGLKSCPSCGKGGLTPEQRGEEMSEMLKMRAFRISDSALHIQTVNALPYSHLL

SEQ ID NO: 66754 - protein, 53 aa, Setaria italica
  Transcript Sequence Number=SeqID_780
  Gene Ontology: Cellular component=membrane; Biological process =intracellular protein transport
  Homolog annotation: Hit_ID=B9RD84; Match level="QueryCoverage=98%, HitCoverage=24%, E-value=1e-16, Identity=75%"; Hit description=Golgi snare 12 protein, putative
PPTTVSQKLARHRDILHEFTQEFRRTRGNLSSMREHADLLSSVRDDVTESKVH

SEQ ID NO: 66755 - protein, 242 aa, Setaria italica
  Transcript Sequence Number=SeqID_781
  Gene Ontology: Mol. function=SNAP receptor activity; Cellular component=membrane; Biological process=intracellular protein transport
  Homolog annotation: Hit_ID=O22151; Match level="QueryCoverage=96%, HitCoverage=98%, E-value=5e-92, Identity=70%"; Hit description=Golgi SNARE 12 protein
  Pfam annotation: Domain name=V-SNARE; Domain location=70-220; Score =152.2; E_value=1.6e-42; Accession=PF05008.7; Description=Vesicle transport v-SNARE protein
MMSASGDASALELQESGWEELRREARKLEGDLDVKLSSYARLAARSSSSASGAASPTADRSSWKSMEFEIQSLLGKLQDVNDAMSRCAASTAPTTTVSQKLARHRDILHEFTQEFRRTRGNLSSMREHADLLSSVRDDVTESKATGGMSPRVHLLRERASIHGSINQIDEVIGQAQSTRVALSNQRALFGDVQGKVKQLGEKFPIIRGLLGAIKRKKSKDTIILSAVIAACTMFLIIYWLSK

SEQ ID NO: 66756 - protein, 86 aa, Setaria italica
  misc_feature (19)..(19): Xaa can be any naturally occurring amino acid
  Transcript Sequence Number=SeqID_782
  Gene Ontology: Mol. function=transferase activity, transferring glycosyl groups; Biological process=metabolic process
  Homolog annotation: Hit_ID=Q2QNK9; Match level="QueryCoverage=70%, HitCoverage=12%, E-value=2e-13, Identity=59%"; Hit description=UDP -glucoronosyl and UDP-glucosyl transferase family protein, expressed
  Subcellular localization annotation: CTP_CleavageSite=49; ConfidenceScore=5.04e-01
QAAKARNNGGRQAAAAAAXASASAHPLHVVVFPWLAFGHLIPFLELSKRLAARGHFITFVTTPANAARLPTGLSDARVRIVELALP

SEQ ID NO: 66757 - protein, 98 aa, Setaria italica
  Transcript Sequence Number=SeqID_783
  Gene Ontology: Mol. function=transferase activity, transferring glycosyl groups; Biological process=metabolic process
  Homolog annotation: Hit_ID=Q8S342; Match level="QueryCoverage=68%, HitCoverage=14%, E-value=6e-18, Identity=59%"; Hit description =Putative anthocyanidine rhamnosyl-transferase
  Subcellular localization annotation: CTP_CleavageSite=58; ConfidenceScore=5.04e-01
MAGDEQQQQAPLHVVVFPWLAFGHLIPFLELSKRLAARGHAVTFVSTPRNVARLPPVPAAGLSGQVRMVALPLPAVERAAGGRRVDRRPRRRRRSSSS

SEQ ID NO: 66758 - protein, 50 aa, Setaria italica
  Transcript Sequence Number=SeqID_784
  Gene Ontology: Mol. function=metalloendopeptidase activity; Cellular component=chloroplast; Biological process=proteolysis
  Homolog annotation: Hit_ID=Q9FHN0; Match level="QueryCoverage=96%, HitCoverage=5%, E-value=6e-13, Identity=70%"; Hit description =Similarity to endopeptidase
TAALGFLPEEYDSFFVKYLYPSFTPTVVLFLAGTVGYGVLKYFESEKSKS

SEQ ID NO: 66759 - protein, 99 aa, Setaria italica
  Transcript Sequence Number=SeqID_785
  Gene Ontology: Mol. function=metalloendopeptidase activity; Cellular component=chloroplast; Biological process=proteolysis
  Homolog annotation: Hit_ID=Q9FHN0; Match level="QueryCoverage=75%, HitCoverage=8%, E-value=2e-16, Identity=58%"; Hit description =Similarity to endopeptidase
QQQEVASKAGGAGGKGPTEEELRQRQANENAFLLAWLGLGIIILVEGIALAASGFLPEEYDSFFVKYLYPSFTPTVVLFLAGTVGYGVLKYFESEKSKS

SEQ ID NO: 66760 - protein, 42 aa, Setaria italica
  Transcript Sequence Number=SeqID_786
APLNYSNCMTNVKLKLKLYMVDFKMEFPKYHPLKCRRNMKDG

SEQ ID NO: 66761 - protein, 75 aa, Setaria italica
  misc_feature (67)..(67): Xaa can be any naturally occurring amino acid
  Transcript Sequence Number=SeqID_787
RQGRMVLCSHAAEPIPSYYCRCSKQPLLLVCETAGSPWKMAAIYSPFCQIMLEKLPLSPPSKSLEKXFDLSFKSM

SEQ ID NO: 66762 - protein, 98 aa, Setaria italica
  Transcript Sequence Number=SeqID_788
PSLSVNAPTFTKDAVQDPRTTLPGRVPRMSNEIILGVFNIGFGINCTSGSSYPQNYLLQTDRVYKNITLILKTPLADRFSKARSRPGNLPWRGRCLTD

SEQ ID NO: 66763 - protein, 60 aa, Setaria italica
  Transcript Sequence Number=SeqID_789
  Gene Ontology: Mol. function=metal ion binding
  Homolog annotation: Hit_ID=B4FNS6; Match level="QueryCoverage=90%, HitCoverage=17%, E-value=3e-22, Identity=94%"; Hit description =Palmitoyltransferase ZDHHC20
YFWFCSLAMLLWSYFSVVFTDPGSVPPNWNLDFDAEMGETAPLASSEFSSQMNSQQSVAL

SEQ ID NO: 66764 - protein, 316 aa, Setaria italica
  Transcript Sequence Number=SeqID_790
  Gene Ontology: Mol. function=metal ion binding; Cellular component =integral to membrane; Biological process=protein palmitoylation
  Homolog annotation: Hit_ID=B4FNS6; Match level="QueryCoverage=100%, HitCoverage=100%, E-value=1e-142, Identity=78%"; Hit description =Palmitoyltransferase ZDHHC20
  Pfam annotation: Domain name=zf-DHHC; Domain location=125-189; Score =128.6; E_value=2e-35; Accession=PF01529.12; Description=DHHC zinc finger domain
MYRSAGVAMAWNVFRFCTALRGLGSIMILLVLVIVGVTYYAVVLCNYGPALLAGGATTLAALAVLLLFHFLLAMLLWSYFSVVFTDPGSVPPNWNLDFDAEMGETAPLASSEFSSQMNSQQSVALGSMGNPRVRYCRKCNQLKPPRCHHCSVCGRCVLKMDHHCVWVVNCVGALNYKYFLLFLFYTFLETTLVTLSLLPHFIAFFSDIDIPGSPAALATTFLTFVLNLAFSLSVLGFMIMHISLVSANTTTIEAYEKKTTPHWIYDLGRKRNFAQVFGNDRKYWFIPAYSEEDLRRIPALQGLDYPVRPDFDGQEL

SEQ ID NO: 66765 - protein, 66 aa, Setaria italica
  Transcript Sequence Number=SeqID_791
CMGKMLFMTGVLIIIKLLFNLWTIKHRSGKSIHNFSVLALLHHGIIISQSYTSAFSQPRGTLIHVC

SEQ ID NO: 66766 - protein, 77 aa, Setaria italica
  Transcript Sequence Number=SeqID_792
  Gene Ontology: Mol. function=oxidoreductase activity, acting on NADH or NADPH, quinone or similar compound as acceptor; Cellular component=integral to membrane; Biological process=ATP synthesis coupled electron transport
  Homolog annotation: Hit_ID=P12125; Match level="QueryCoverage=100%, HitCoverage=15%, E-value=2e-23, Identity=77%"; Hit description =NAD(P)H-quinone oxidoreductase chain 2, chloroplastic
LLLEILAILSMILGNLLAITQTSMKRMLAYSSIGQIGYVIIGIIVGDSNDGYASMITYMLFYISMNLGTFACIVLFG

SEQ ID NO: 66767 - protein, 62 aa, Setaria italica
  Transcript Sequence Number=SeqID_793
MFLRVSLITSLLHGQVQQSVQVLQEKQELAETPKEMSKLQIVHEDSAQKSEGTAPSVFMARE

SEQ ID NO: 66768 - protein, 160 aa, Setaria italica
  Transcript Sequence Number=SeqID_794
  Homolog annotation: Hit_ID=B9RVZ9; Match level="QueryCoverage=64%, HitCoverage=19%, E-value=5e-22, Identity=48%"; Hit description =Structural constituent of cell wall, putative
EAIENCMKKQADNLLNSLEVISGRLSQLELYCYKLERSIGELRSDVMDYHSEASLNYRCLEKHVKEVQQSVQVLQEKQELAETPKEMSKLQIVHEDSAQKSEGTAPSVFMARENELALVPLHQVNAVQSPAMQFRSCNGVILQQLVPVSLSTQQDPQRSN

SEQ ID NO: 66769 - protein, 393 aa, Setaria italica
  Transcript Sequence Number=SeqID_795
  Pfam annotation: Domain name=DUF1421; Domain location=17-376; Score =417.7; E_value=1.8e-122; Accession=PF07223.3; Description=Protein of unknown function (DUF1421)
LNLSSFLTFGCLRVYVLQIVHEDSAQKSEGTAPSVFMARENELALVPLHQVNAVQSPAMQFRSCNGVILQQLVPVSLSTQQDPQRSNQTTMYCMQGQSHLEHRQAQPFQAAAQSVQPLTQKPQPQTVVEVPQVTSQAQEFYLQPQQQWPHQTGQQVQPQARQPQPQVVQHQQYSNIQQVPAQMVQQQMSSPQAHSAPQVTLVYPPYGPHQPACANAGARTGGMVVQPSYSTISSSQRKHHEVAPIYVQSNTVSVPSAERRQQPQQLHSLGNGSFVPQPSKVGPCGVAPYTVQGSAQTYNTAYGSPSSNPATIVAVLNQQAHGNAPMVLHHLGPQSVQNHPDVAEKVARMGYSNDQVEGIALRMVAAGQPAEYNPLHDRLSSVSHGVAPQAWSG

SEQ ID NO: 66770 - protein, 394 aa, Setaria italica
  misc_feature (55)..(55): Xaa can be any naturally occurring amino acid
  misc_feature (66)..(66): Xaa can be any naturally occurring amino acid
  Transcript Sequence Number=SeqID_796
VRSPDDGENLGLGRMEADSPTDDSIASGQGSGAEDVKDGGHEIGGHSLSVSQKKXSLLQDPEHPKXKKPVASKSALDMYREQEHSPTSVRADRDEEVKNEKESCPPEGFVLDPNLEVVCALEVPKKSKANKLLRNAERKEKRADIGSSTGRTAPEAASDVLNMGADKESREFKKSKIMTKQSLATGSEKRDHNEIVHGKPDKQLSRKSSAGFSSNKKSLPGSGQRTTDCITDTRPAKKPRLMDRGGETDKTVAQSDTKLSIDCEKHNAMKYERSTTVETGKNTVPKTGISDGRARRSGSVLSPVSRLHSEVVEPTSGSATQSTVADSAKKGSIMKEDASRVDRQSAKPKRRACRFDDEEDEGQRTPLHRTSAKSISTHIVPADKAGTRGKISSH

SEQ ID NO: 66771 - protein, 145 aa, Setaria italica
  misc_feature (99)..(99): Xaa can be any naturally occurring amino acid
  Transcript Sequence Number=SeqID_797
  Gene Ontology: Mol. function=transferase activity; Biological process= amino acid biosynthetic process
  Homolog annotation: Hit_ID=Q9LQY8; Match level="QueryCoverage=92%, HitCoverage=40%, E-value=2e-26, Identity=50%"; Hit description =T24P13.2
MAEEAAQEQPSPTAPRPVRCIVKLGGAAITNKGELESINEESLRSACAQLRQAMSKSDGDGAPGKVLGMDWSRRHGDPADPAVDAERIAGMAGLGFDTXFIVVHGAGSFGHFQASRSGVHKGGLHSTLVKAGFVATRISVTSLNQ

SEQ ID NO: 66772 - protein, 88 aa, Setaria italica
  misc_feature (1)..(1): Xaa can be any naturally occurring amino acid
  Transcript Sequence Number=SeqID_798
  Subcellular localization annotation: CTP_CleavageSite=48; ConfidenceScore=5.94e-01
XPGGGGRAAPPRTPPPPPRASRPTGSSTASAPSSPSPPPASPCPRQCRCGSSQHRRPAPTEGPSGASRRQRTAWSPPRSPERRNVRIR

SEQ ID NO: 66773 - protein, 145 aa, Setaria italica
  misc_feature (9)..(9): Xaa can be any naturally occurring amino acid
  misc_feature (90)..(90): Xaa can be any naturally occurring amino acid
  Transcript Sequence Number=SeqID_799
GVLERLVYXRHRNQHRGAAYFQYLLKVRRDLKLLFGAGLAEVLNAVFPVLASRKPANTILVPTKQTKKKPGANHSHHERLLGVARLLSQXKNFSVQMAEPVMKAAIQITILLARSFFIDLCTAVFSLLAYLEFLIQQVRVIISFS

SEQ ID NO: 66774 - protein, 382 aa, Setaria italica
  Transcript Sequence Number=SeqID_800
MSQRPEAGSPPTAGDDEEQRLRAALRHLQAEAGVLERLVYKHRNQHRGAAYFQYLLKVRRDLKLLLGADLAQVLNAVFPVLASRKPANTILVLTEQTKKKPGANHSHHERLLGVARLLSQMAEPVMKAAIQITFLLARSFFIDLCTAVFSLLARIRVLIQQMLLDVVLLYNKVTDLTGRKQAVKISIGGVQAFREYYPSMNDACTILECVWVKDKFLLHEKMKDSCQETQVEDQKPCGPESSIQYETLPLVSEDTLNLEETNLPAKQADAALAEQPDKMNHCSGAGGSQSGRQLEKESGACSVPDTLNTCMHSVPHSNLKHETRKRVAFVAVGNPKVPGAASETKSSEVNKKQRLNMISHTSVESGLYNKLLDYENVEKSLL

SEQ ID NO: 66775 - protein, 71 aa, Setaria italica
  Transcript Sequence Number=SeqID_801
RGAWRGGRDEGSKERAKGSDTPTDGRTPFIRSPFQRRRSASISALFDVVAKLVLGHMFGSLSYLDPWTTIH

SEQ ID NO: 66776 - protein, 274 aa, Setaria italica
  misc_feature (256)..(256): Xaa can be any naturally occurring amino acid
  Transcript Sequence Number=SeqID_802
  Homolog annotation: Hit_ID=Q7XW73; Match level="QueryCoverage=73%, HitCoverage=21%, E-value=4e-31, Identity=47%"; Hit description =OSJNBa0019J05.21 protein
  Subcellular localization annotation: CTP_CleavageSite=32; ConfidenceScore=5.29e-01
SKLVQLRNNGDIQERTPPNLGRGRMSPNLRPSSSESSGYGYVGSSVRSVPSSPDRKFGSSASSVAASGSPDVQRPSLSSAGRSRTMGSSIHGSRAQPFPGAASKPTLSRAKSDNVSTSSQRPPALAVPPSNSFKDMAKTAPKASPSNLLRSKASPRPTADSCKAVASPKPSSQRVASPSTARGDRVQPVSTARSPGAAAKKRLDAVNGATASSKAKSVSQKAMGPSASRKEKDKDPSMQCKETEASSIEEHLHEEXPDPVDPKSMDVTVPDQHE

SEQ ID NO: 66777 - protein, 215 aa, Setaria italica
  misc_feature (45)..(45): Xaa can be any naturally occurring amino acid
  Transcript Sequence Number=SeqID_803
  Homolog annotation: Hit_ID=Q7XW73; Match level="QueryCoverage=89%, HitCoverage=20%, E-value=1e-31, Identity=46%"; Hit description =OSJNBa0019J05.21 protein
  Pfam annotation: Domain name=CaM_binding; Domain location=98-212; Score=-17.9; E_value=0.01; Accession=PF07839.3; Description=Plant calmodulin-binding domain
  Subcellular localization annotation: CTP_CleavageSite=55; ConfidenceScore=5.12e-01
FRYLKLTCLRGDRVQPVSTARSPGAAAKKRLDAVNGATASSKAKXSVSQKAMGPSASRKEKDKDPSMQCKETEASSIEEHLHEEHPDPVDPKSMDVTVPDQHEPSSNQPEQVKNAEDSKGHLSVEKAGANELHNGGQDANGSIKTIYECGLVEKVADQRADRAAPRTEVAQAWRKHDPRSNEVIEETKSKLLEERKSRVKASLLGAFETVLSFKE

SEQ ID NO: 66778 - protein, 281 aa, Setaria italica
  Transcript Sequence Number=SeqID_804
  Gene Ontology: Mol. function=hydrolase activity, hydrolyzing O -glycosyl compounds; Cellular component=cytoplasm; Biological process= protein transport
  Homolog annotation: Hit_ID=B6T4W1; Match level="QueryCoverage=92%, HitCoverage=52%, E-value=1e-131, Identity=89%"; Hit description =Autophagy-related 4 variant 1
  Pfam annotation: Domain name=Peptidase_C54; Domain location=1-223; Score=251.4; E_value=2.1e-72; Accession=PF03416.11; Description =Peptidase family C54
PLIFGRISCKSLLSFLLIHNLLQAGKGYGLAAGSWVGPYAMCRAWQTLIRTNREQADAVDGKENFPMALYVVSGDEDGERGGAPVVCIDVAAQLCSDFNKGQSTWSPILLLVPLVLGLDKINPRYIPLLKETFTFPQSLGILGGKPGTSTYIAGVQDDRALYLDPHEVQMAVNIAPDNLEADTSSYHCSVVRDLALDQIDPSLAIGFYCRDKDGFDDFCSRASELVEKANGAPLFTVVQSIVPSKQMYKQDDGLGCSGSSMANHDDLDGSGEAGEEEWQIL

SEQ ID NO: 66779 - protein, 81 aa, Setaria italica
  misc_feature (33)..(33): Xaa can be any naturally occurring amino acid
  misc_feature (59)..(59): Xaa can be any naturally occurring amino acid
  Transcript Sequence Number=SeqID_805
  Gene Ontology: Mol. function=oxidoreductase activity; Biological process=metabolic process
  Homolog annotation: Hit_ID=B4FP93; Match level="QueryCoverage=100%, HitCoverage=38%, E-value=2e-13, Identity=42%"; Hit description =Peroxisomal multifunctional enzyme type 2
LYALGVGACGDDAVDDKELHFVYHRDGQPHIKXDARLLLHGQQYIEIYRPIPSHASGKXTILEIETTTSLRESGEILCMNR

SEQ ID NO: 66780 - protein, 102 aa, Setaria italica
  misc_feature (63)..(63): Xaa can be any naturally occurring amino acid
  misc_feature (71)..(71): Xaa can be any naturally occurring amino acid
  Transcript Sequence Number=SeqID_806
  Gene Ontology: Mol. function=peptidyl-prolyl cis-trans isomerase activity; Cellular component=cytoplasm; Biological process=protein folding
  Homolog annotation: Hit_ID=A9NWJ0; Match level="QueryCoverage=100%, HitCoverage=83%, E-value=5e-31, Identity=53%"; Hit description =Peptidyl-prolyl cis-trans isomerase
  Pfam annotation: Domain name=Pro_isomerase; Domain location=5-102; Score=142.1; E_value=1.7e-39; Accession=PF00160.13; Description =Cyclophilin type peptidyl-prolyl cis-tr
MANPRVFFDMTVGGAPAGRIVMELYANEGGDFTRGNGTGGESIYGEKFADEKFVRKHTGPGIXLSMANAGXNTNGSQFFICTVATPWLDGKHVVFGQVVEGM

SEQ ID NO: 66781 - protein, 43 aa, Setaria italica
  Transcript Sequence Number=SeqID_807
  Gene Ontology: Mol. function=oxidoreductase activity; Biological process=metabolic process
  Homolog annotation: Hit_ID=B4FP93; Match level="QueryCoverage=95%, HitCoverage=13%, E-value=5e-13, Identity=90%"; Hit description =Peroxisomal multifunctional enzyme type 2
MATSSKPAAAVDPEVALAHKFPEVSFDYDERDVALYALGVGPA

SEQ ID NO: 66782 - protein, 100 aa, Setaria italica
  misc_feature (19)..(19): Xaa can be any naturally occurring amino acid
  misc_feature (79)..(79): Xaa can be any naturally occurring amino acid
  Transcript Sequence Number=SeqID_808
  Homolog annotation: Hit_ID=Q3T7E6; Match level="QueryCoverage=100%, HitCoverage=18%, E-value=1e-44, Identity=87%"; Hit description=X1 (Fragment)
FESHFAAGGYGKKDWIGKXNQGSELYGWFAWAEDYTSPGLIRDHLRKNGDLKSVNDLAKEGARKTDKLVANLANQIEVXRYSQELECKYSETTASPEKMM

SEQ ID NO: 66783 - protein, 48 aa, Setaria italica
  Transcript Sequence Number=SeqID_809
  Gene Ontology: Mol. function=peptidyl-prolyl cis-trans isomerase activity; Cellular component=cytoplasm; Biological process=protein folding
  Homolog annotation: Hit_ID=A7LM55; Match level="QueryCoverage=97%, HitCoverage=27%, E-value=2e-15, Identity=85%"; Hit description =Peptidyl-prolyl cis-trans isomerase
  Pfam annotation: Domain name=Pro_isomerase; Domain location=1-47; Score=-54.7; E_value=0.0023; Accession=PF00160.13; Description =Cyclophilin type peptidyl-prolyl cis-tr
PCPWLDGKHVVFGQVVDGLDVVKAIEKVGSRSGTTAKAVKIADCGQLV

SEQ ID NO: 66784 - protein, 87 aa, Setaria italica
  Transcript Sequence Number=SeqID_810
QRGRANPRVQRPCRIGRVNLRKSTYQTKSSQKNQSSMHGKLSPGKVGDLAALLSDHVNKQNRKISLGRSCHRIEHKQHGEIFSGASE

SEQ ID NO: 66785 - protein, 47 aa, Setaria italica
  Transcript Sequence Number=SeqID_811
  Gene Ontology: Mol. function=peptidyl-prolyl cis-trans isomerase activity; Cellular component=mitochondrial matrix; Biological process=protein folding
  Homolog annotation: Hit_ID=C4QVQ4; Match level="QueryCoverage=100%, HitCoverage=28%, E-value=2e-17, Identity=87%"; Hit description =Cytoplasmic peptidyl-prolyl cis-trans isomerase (Cyclophilin)
  Pfam annotation: Domain name=Pro_isomerase; Domain location=1-47; Score=-32.6; E_value=2.1e-05; Accession=PF00160.13; Description =Cyclophilin type peptidyl-prolyl cis-tr
GVLSMANAGPNTNGSQFFICTVPCPWLDGKHVVFGQVVDGLDDVEAI

SEQ ID NO: 66786 - protein, 57 aa, Setaria italica
  Transcript Sequence Number=SeqID_812
LRTLESMETLNCTMHETSRMNTLIHHNRPYRNCYHSVRHEMCLISNKDRLLQYCKSK

SEQ ID NO: 66787 - protein, 101 aa, Setaria italica
  Transcript Sequence Number=SeqID_813
  Subcellular localization annotation: CTP_CleavageSite=83; ConfidenceScore=5.51e-01
NNLLLLLSHESHPKPQGLFLPVVLCTGTANLPSVGFGSAPSSVSLALQCRRLDAPPPLPRSLRWIGLRRRPAGTWTDSLFLVRDPSSWHLDDWIDCSYNEF

SEQ ID NO: 66788 - protein, 154 aa, Setaria italica
  misc_feature (78)..(78): Xaa can be any naturally occurring amino acid
  misc_feature (129)..(129): Xaa can be any naturally occurring amino acid
  Transcript Sequence Number=SeqID_814
  Homolog annotation: Hit_ID=Q7FSP8; Match level="QueryCoverage=100%, HitCoverage=28%, E-value=4e-44, Identity=64%"; Hit description=X1 (Fragment)
KVMEHMPGDEDSASKNKINELSEALQEKIDELDGMESLNQTLVIKESKSNIELQEARNELEMYVTLHQLTGLVHSSLXDLCDVTYVGDEISFYSSFVLRHATQGLLDISGGRAHIGIKRMRELDLKAFXKACRKKCSEEDAEVTAAFLCSKWEA

SEQ ID NO: 66789 - protein, 146 aa, Setaria italica
  misc_feature (32)..(32): Xaa can be any naturally occurring amino acid
  Transcript Sequence Number=SeqID_815
  Homolog annotation: Hit_ID=O48878; Match level="QueryCoverage=80%, HitCoverage=13%, E-value=3e-50, Identity=78%"; Hit description=Gene X-like protein
  Pfam annotation: Domain name=XS; Domain location=112-146; Score= -36.6; E_value=0.017; Accession=PF03468.6; Description=XS domain
  Pfam annotation: Domain name=zf-XS; Domain location=43-84; Score =97.2; E_value=5.8e-26; Accession=PF03470.6; Description=XS zinc finger domain
  Pfam module annotation: Pfam domain module=XS::zf-XS; Domain location= 112-146::43-84
MDHSSHEDTEISDTEIDDYEGKIYARLMSGDXKVKKNGESYSCPFCSSKKKNNYSISNLVQHASGVSAAPNRQAKEKATHRALVKHLKNDLAKSSEPRPQVIPVEPEPLQNRDEKFVWPWMGILVNVPTEWKDGRQVGESGNRLKG

SEQ ID NO: 66790 - protein, 53 aa, Setaria italica
  Transcript Sequence Number=SeqID_816
CYEQKLGGDTIPSPIGFADPPPNKTLDTHHQHSTRLTTRHDAIQRSPSSYSSR

SEQ ID NO: 66791 - protein, 262 aa, Setaria italica
  Transcript Sequence Number=SeqID_817
  Gene Ontology: Mol. function=oxidoreductase activity; Cellular component=fatty acid synthase complex; Biological process=metabolic process
  Homolog annotation: Hit_ID=B4FP93; Match level="QueryCoverage=83%, HitCoverage=69%, E-value=1e-120, Identity=95%"; Hit description =Peroxisomal multifunctional enzyme type 2
  Pfam annotation: Domain name=MaoC_dehydratas; Domain location=88-210; Score=100.8; E_value=4.7e-27; Accession=PF01575.11; Description=MaoC like domain
RLLLHGQQYIEIYRPIPSHASVVNKVKVAGLHDKGKATILEIETTTSLRESGEILCMNRSTIYLRGAGGFSDSSRPYTYATYPANQVHRISIPNSAPSAVYDDQTKQSQALLYRLSGDYNPLHSDPDIAQVAGFTRPILHGLCTLGFAARAVIKSFCNGEPAAVKSIFGRFLLHVYPGETLSTEMWLDGQKVHYQTKVKERNRAVLSGYVLLQHIPSSLGETENQRGVHDEAGCGANDGETGVGDARMASTASRLVHGTPAA

SEQ ID NO: 66792 - protein, 176 aa, Setaria italica
  misc_feature (104)..(104): Xaa can be any naturally occurring amino acid
  Transcript Sequence Number=SeqID_818
  Gene Ontology: Mol. function=peptidyl-prolyl cis-trans isomerase activity; Cellular component=cytoplasm; Biological process=protein folding
  Homolog annotation: Hit_ID=B6SRE7; Match level="QueryCoverage=100%, HitCoverage=100%, E-value=2e-80, Identity=82%"; Hit description =Peptidyl-prolyl cis-trans isomerase
  Pfam annotation: Domain name=Pro_isomerase; Domain location=6-173; Score=396.1; E_value=6e-116; Accession=PF00160.13; Description =Cyclophilin type peptidyl-prolyl cis-tr
MAKNPKVFFDILIGKAKAGRVVMELFADKVPKTAENFRCLCTGEKGLGTSGKPLHYKGSVFHRIIPSFMCQGGDFTRGNGTGGESIYGAKFADENFKLHHTGPXGVLSMANAGPNTNGSQFFICTTQTPWLDGKHVVFGQVVDGYGVVEKMEAVGSGSGATAERVLIEDCGQLADE

SEQ ID NO: 66793 - protein, 327 aa, Setaria italica
  misc_feature (84)..(84): Xaa can be any naturally occurring amino acid
  misc_feature (107)..(107): Xaa can be any naturally occurring amino acid
  misc_feature (180)..(180): Xaa can be any naturally occurring amino acid
  Transcript Sequence Number=SeqID_819
  Homolog annotation: Hit_ID=Q7FSP8; Match level="QueryCoverage=99%, HitCoverage=81%, E-value=1e-162, Identity=88%"; Hit description=X1 (Fragment)
  Pfam annotation: Domain name=XH; Domain location=193-326; Score =267.5; E_value=3e-77; Accession=PF03469.6; Description=XH domain
QQLARQHSQKIIDENQKLRSELETKMNELDVRSKQLDELAAKSGYDRRNLEQEKQKNAISSHLKLAALEQQKADENVLKLVEEXKREKHAALKKILLLEQQLDAKQXLELEIQQLKGKLKVMEHMPGDEDSASKNKINELSEALQEKIDELDGMESLNQTLVIKESKSNIELQEARNELXNGLLDISGGRAHIGIKRMRELDLKAFSKACRKKCSEEDAEVTAAFLCSKWEAEIKNPDWHPFRIVMADGKEMEIIEDDAKLRGLREEHGEEIYTLVTKALCEINEYKSKGSYSVGELWNFKEDRKVTLKEAVQFVLKQWQTNRRKQR

SEQ ID NO: 66794 - protein, 174 aa, Setaria italica
  misc_feature (48)..(48): Xaa can be any naturally occurring amino acid
  Transcript Sequence Number=SeqID_820
  Gene Ontology: Mol. function=peptidyl-prolyl cis-trans isomerase activity; Cellular component=cytoplasm; Biological process=protein folding
  Homolog annotation: Hit_ID=P21569; Match level="QueryCoverage=97%, HitCoverage=98%, E-value=2e-70, Identity=75%"; Hit description =Peptidyl-prolyl cis-trans isomerase
  Pfam annotation: Domain name=Pro_isomerase; Domain location=7-173; Score=417.5; E_value=2.1e-122; Accession=PF00160.13; Description =Cyclophilin type peptidyl-prolyl cis-tr
MASANPRVFFDMTIGDAPAGRIVMELYAHEVPKTAENFRALCDGGEGXGKKGKPLHYKGSTFHRVIPDFMCQGGDFTDGNGTGGESIYGAKFADEKFVRKHTGPGVLSMANAGPNTNGSQFFICTVPCPWLDGKHVVFGQVVDGLDVVKAIEKVGSRSGTTAKAVKIADCGQLV

SEQ ID NO: 66795 - protein, 314 aa, Setaria italica
  Transcript Sequence Number=SeqID_821
  Gene Ontology: Mol. function=oxidoreductase activity; Cellular component=fatty acid synthase complex; Biological process=metabolic process
  Homolog annotation: Hit_ID=B4FP93; Match level="QueryCoverage=100%, HitCoverage=100%, E-value=1e-166, Identity=90%"; Hit description =Peroxisomal multifunctional enzyme type 2
  Pfam annotation: Domain name=MaoC_dehydratas; Domain location=183 -305; Score=100.8; E_value=4.7e-27; Accession=PF01575.11; Description= MaoC like domain
MATSSKPAAAVDPEVALAHKFPEVSFDYDERDVALYALGVGACGDDAVDDKELHFVYHRDGQPHIKVLPTFVSLFPNKNSNGLGFFDVPGLNIDARLLLHGQQYIEIYRPIPSHASVVNKVKVAGLHDKGKATILEIETTTSLRESGEILCMNRSTIYLRGAGGFSDSSRPYTYATYPANQVHRISIPNSAPSAVYDDQTKQSQALLYRLSGDYNPLHSDPDIAQVAGFTRPILHGLCTLGFAARAVIKSFCNGEPAAVKSIFGRFLLHVYPGETLSTEMWLDGQKVHYQTKVKERNRAVLSGYVLLQHIPSSL

SEQ ID NO: 66796 - protein, 202 aa, Setaria italica
  misc_feature (59)..(59): Xaa can be any naturally occurring amino acid
  misc_feature (131)..(131): Xaa can be any naturally occurring amino acid
  misc_feature (170)..(170): Xaa can be any naturally occurring amino acid
  misc_feature (185)..(185): Xaa can be any naturally occurring amino acid
  Transcript Sequence Number=SeqID_822
  Gene Ontology: Mol. function=peptidyl-prolyl cis-trans isomerase activity; Cellular component=cytoplasm; Biological process=protein folding
  Homolog annotation: Hit_ID=P21569; Match level="QueryCoverage=83%, HitCoverage=98%, E-value=2e-74, Identity=82%"; Hit description =Peptidyl-prolyl cis-trans isomerase
  Pfam annotation: Domain name=Pro_isomerase; Domain location=35-201; Score=419.5; E_value=5.2e-123; Accession=PF00160.13; Description =Cyclophilin type peptidyl-prolyl cis-tr
  Subcellular localization annotation: CTP_CleavageSite=55; ConfidenceScore=5.28e-01
PSRERGKIFSPSPQKTTQNPKASDLPPDSRWRTPAVFFDMTVGGAPAGRIVMELYANEXPRTAENFRALCTGEKGVGKSGKPLHYKGSTFHRVIPDFMCQGGDFTRGNGTGGESIYGEKFADEKFVRKHTXPGILSMANAGPNTNGSQFFICTVATPWLDGKHVVFGQVXGMNVVKAIEKVGSRXSGSTAKEVKIADCGQLS

SEQ ID NO: 66797 - protein, 633 aa, Setaria italica
  misc_feature (376)..(376): Xaa can be any naturally occurring amino acid
  Transcript Sequence Number=SeqID_823
  Homolog annotation: Hit_ID=O48878; Match level="QueryCoverage=93%, HitCoverage=63%, E-value=0.0, Identity=86%"; Hit description=Gene X -like protein
  Pfam annotation: Domain name=XH; Domain location=499-632; Score =275.8; E_value=1e-79; Accession=PF03469.6; Description=XH domain
  Pfam annotation: Domain name=XS; Domain location=112-226; Score =266.2; E_value=7.8e-77; Accession=PF03468.6; Description=XS domain
  Pfam annotation: Domain name=zf-XS; Domain location=43-84; Score =96.4; E_value=1e-25; Accession=PF03470.6; Description=XS zinc finger domain
  Pfam module annotation: Pfam domain module=XH::XS::zf-XS; Domain location=499-632::112-226::43-84
MDHSSDEDTEISDTEIDDYEGKIYARLMSGDLKVKKNGESYSCPFCSSKKKNNYSISSLVQHASGVSAAPNRQAKEKATHRALVKHLKNDLAKSSEPRPKVIPVEPEPLQNRDEKFVWPWMGILVNVPTEWKDGRQVGESGNRLKGQLSHFCPLKVIPLWTFRGHSGNAIVEFGKDWNGFRNARTFESHFAAGGYGKKDWIGKKNQGSELYGWFARAEDYNSPGLIGDHLRKNGDLKSVNCILAKEGARKTDKLVANLANQIEVKNRYLQELECKYSETTSSLEKMMGQREQLLQSYNEEIRKMQQLARQHSQKIIDENQKLRSELETKMNELDVRSKQLDELAAKSGYDRRNLEQEKQKNAIRSSHLKLATLEQXQKADENVLKLVEEQKREKHAALKKILLLEQQLDAKQKLELEIQQLKGKLKVMEHMPGDEDSASKNKINELSEALQEKIDELDGMESLNQTLVIKESKSNIELQEARNELENGLLDISGGRAHIGIKRMGELDLKAFSKACRKKCSEEDAEVTAAFLCSKWEAEIKNPDWHPFRIVMADGKEMEIIEDDAKLRGLREEHGEEIYTLVTKALCEINEYKSKGSYSVGELWNFKEDRKVTLKEAVQFVLKQWRTNRRKQR

SEQ ID NO: 66798 - protein, 205 aa, Setaria italica
  misc_feature (69)..(69): Xaa can be any naturally occurring amino acid
  misc_feature (79)..(79): Xaa can be any naturally occurring amino acid
  misc_feature (133)..(133): Xaa can be any naturally occurring amino acid
  misc_feature (143)..(143): Xaa can be any naturally occurring amino acid
  misc_feature (182)..(182): Xaa can be any naturally occurring amino acid
  misc_feature (191)..(191): Xaa can be any naturally occurring amino acid
  Transcript Sequence Number=SeqID_824
  Gene Ontology: Mol. function=peptidyl-prolyl cis-trans isomerase activity; Cellular component=cytoplasm; Biological process=protein folding
  Homolog annotation: Hit_ID=P21569; Match level="QueryCoverage=83%, HitCoverage=98%, E-value=3e-67, Identity=75%"; Hit description =Peptidyl-prolyl cis-trans isomerase
  Pfam annotation: Domain name=Pro_isomerase; Domain location=36-204; Score=391.8; E_value=1.2e-114; Accession=PF00160.13; Description =Cyclophilin type peptidyl-prolyl cis-tr
  Subcellular localization annotation: CTP_CleavageSite=30; ConfidenceScore=5.56e-01
HSINQSQRISFSPNKSLNPSSSIPTASPPMASANPRVFFDMTIGDAPAGRIVMELYAHEVPKTAENFRXALCTGEKGVXRRGKPLHYKGSTFHRVIPDFMCQGGDFTDGNGTGGESIYGAKFADEKFVRKHTXPGVLSMANAXGPNTNGSQFFICTVPCPWLDGKHVVFGQVVDGLDVVKAXEKVGSRSGXPPRPSRVADCGQLV

SEQ ID NO: 66799 - protein, 182 aa, Setaria italica
  misc_feature (40)..(40): Xaa can be any naturally occurring amino acid
  misc_feature (109)..(109): Xaa can be any naturally occurring amino acid
  misc_feature (121)..(121): Xaa can be any naturally occurring amino acid
  Transcript Sequence Number=SeqID_825
  Gene Ontology: Mol. function=peptidyl-prolyl cis-trans isomerase activity; Cellular component=cytoplasm; Biological process=protein folding
  Homolog annotation: Hit_ID=P21569; Match level="QueryCoverage=93%, HitCoverage=98%, E-value=8e-78, Identity=84%"; Hit description =Peptidyl-prolyl cis-trans isomerase
  Pfam annotation: Domain name=Pro_isomerase; Domain location=14-181; Score=429.5; E_value=5.1e-126; Accession=PF00160.13; Description =Cyclophilin type peptidyl-prolyl cis-tr
ASDLPPDSRWRTPAVFFDMTVGGAPAGRIVMELYANEVPXTAENFRALCTGEKGVGKSGKPLHYKGSTFHRVIPDFMCQGGDFTRGNGTGGESIYGEKFADEKFVRKHXAPGILSMANAGXPNTNGSQFFICTVATPWLDGKHVVFGQVVEGMNVVKAIEKVGSRSGSTAKEVKIADCGQLS

SEQ ID NO: 66800 - protein, 72 aa, Setaria italica
  Transcript Sequence Number=SeqID_826
MDSSVPPCPIPDSPCSEGIPWSPPSDLARRRPLQRIVPPPHPPHPFPTPSFLRIRRGRGAALLWSSAWPRED

SEQ ID NO: 66801 - protein, 96 aa, Setaria italica
  Transcript Sequence Number=SeqID_827
  Gene Ontology: Mol. function=protein serine/threonine phosphatase activity; Cellular component=protein serine/threonine phosphatase complex
  Homolog annotation: Hit_ID=Q2QWE3; Match level="QueryCoverage=70%, HitCoverage=16%, E-value=1e-15, Identity=69%"; Hit description =Probable protein phosphatase 2C 77
KDQLALQAVSSPPPAAVVVVPVLKQHGDRAAEKTAKAARGKPPRLSIPPPVACAPGVDPFGAAADRETDVATEVEVQGEGFCLASRRGVRHAMEDG

SEQ ID NO: 66802 - protein, 61 aa, Setaria italica
  misc_feature (15)..(15): Xaa can be any naturally occurring amino acid
  Transcript Sequence Number=SeqID_828
RVFKYTQSIPWIENXKEESKPTVFPKESYHVTYTLTLYCQSILIKSTAKHIVQNNLYSVAN

SEQ ID NO: 66803 - protein, 310 aa, Setaria italica
  Transcript Sequence Number=SeqID_829
  Homolog annotation: Hit_ID=Q9C824; Match level="QueryCoverage=93%, HitCoverage=36%, E-value=2e-97, Identity=58%"; Hit description=BZIP protein, putative; 48652-45869
  Pfam annotation: Domain name=DUF632; Domain location=20-310; Score =438.2; E_value=1.3e-128; Accession=PF04782.4; Description=Protein of unknown function (DUF632)
SRKAEGKKARIAMVAPQPVRLGDVLRKLDEHFLKASEGAHEVSKMLEAARMHYHSNFADTRGFVDHSARVMQVITWNRSFKGIPQPENVKNELDDDEWETHATVLDKLLAWEKKLCHEVKEFEVIKVTYQRKLAVLNRKKQRGVSSSSIEKTKSIVSHLHTKYIVDSQTIESTVAEINRLRDQQLYPKLLELVKGLSHMWDIMYAHHKAQLRIITELKSSDIMVAARETSEQHHERTVQLWSIVQEWHAQFDKFMTYQKEYVGSLYSWIKLNVIPIDADLKPNSSQPHETTPPIKRLLHAWHDILEKLPD

SEQ ID NO: 66804 - protein, 231 aa, Setaria italica
  Transcript Sequence Number=SeqID_830
  Homolog annotation: Hit_ID=Q9C824; Match level="QueryCoverage=90%, HitCoverage=26%, E-value=1e-42, Identity=43%"; Hit description=BZIP protein, putative; 48652-45869
  Pfam annotation: Domain name=DUF632; Domain location=1-104; Score= -82.9; E_value=0.00081; Accession=PF04782.4; Description=Protein of unknown function (DUF632)
NYLGTTAPQLHSPLMVLWSIVQEWHAQFDKFMTYQKEYVGSLYSWIKLNVIPIDADLKPNSSQPHETTPPIKRLLHAWHDILEKLPDNDAKKAIHTFAEVVHTILVQQEDELKLRIKIEETRRDLEKKRRQFDDWAQKNWDRGASIPDGNNPGRADPAGERKAVVDRVENALKDLEDQYKTQCKVVRDKSLNLLRSNLPELFRAVSDFSLQSAGYFKGLWSIAHTNDQLDD

SEQ ID NO: 66805 - protein, 131 aa, Setaria italica
  misc_feature (7)..(7): Xaa can be any naturally occurring amino acid
  Transcript Sequence Number=SeqID_831
  Gene Ontology: Mol. function=protein kinase activity; Cellular component=plasma membrane; Biological process=protein amino acid phosphorylation
  Homolog annotation: Hit_ID=B6ST24; Match level="QueryCoverage=82%, HitCoverage=22%, E-value=2e-28, Identity=58%"; Hit description =Protein kinase APK1B
SDVYSFXVVLLELLTGRRSVDKRRRGREQHLVDWARPYLRRPERLHRVMDPSLDGQYSGKAAHKAAMVAYHCLHSVPKSRPTMRDVVDTLEPLLAICGDVPAGPFVYTAPADDGKADEAAAAARKKCLASA

SEQ ID NO: 66806 - protein, 181 aa, Setaria italica
  Transcript Sequence Number=SeqID_832
  Gene Ontology: Mol. function=structural molecule activity; Cellular component=cytoskeleton; Biological process=multicellular organismal development
  Homolog annotation: Hit_ID=B6TWX2; Match level="QueryCoverage=99%, HitCoverage=39%, E-value=5e-92, Identity=90%"; Hit description=Actin- like protein arp6
  Pfam annotation: Domain name=Actin; Domain location=3-180; Score= -59.1; E_value=1.9e-11; Accession=PF00022.11; Description=Actin
DGITYKKGFVKDMDDALRYCSLPLNEESDRKDHGLETNKFEDRKKPELSQNEFVLTNERFLVPEMLFHPIDLGINQAGLAECIVRAVQACHPYLQPVLFESIILTGGSTLFPRFAERLERELRPLVPDDYQVKITRQENPILGVWRGGSILASSPDFESMCVTKSEYEEMGSARCRRRFFH

SEQ ID NO: 66807 - protein, 46 aa, Setaria italica
  Transcript Sequence Number=SeqID_833
GQKTLEDRPAFIQLSDSDSDSSTSSAYLGSPVTKKLCSTNTCLGSH

SEQ ID NO: 66808 - protein, 405 aa, Setaria italica
  Transcript Sequence Number=SeqID_834
  Gene Ontology: Cellular component=plasma membrane
  Homolog annotation: Hit_ID=B9T165; Match level="QueryCoverage=87%, HitCoverage=59%, E-value=3e-95, Identity=48%"; Hit description=RNA binding protein, putative
MPPLKKSKKGKRKSKDSGKLKVARTRSAPPPLPPELRGLDTEWWYTFLHKQAETGQKIPSDEGEAFRHFFRTSRKTFDYICSIVREDLISRPPSGLINIEGRLLSVEKQVAIAMRRLASGDSQVSVGAAFGVGQSTVSQVTWRFIESMEERARYHMAWPGQERIEEIKATLEAVYGLPNCCGAVDATHIIMTLPAVESSEDWCDPAKNYSMFLQGIVDDEMRFIDIVTGWPGSMTFSRLMKCSGFFKLCEAGNRLNGPVKVSAENAEIREYIAGDSCYPLLPWLMTPYEGKNLSVPMLNFNACQKAARLLGTNALTRLKGSWRILHKVMWRPDKNKLPSIILVCCLLHNILIDCKDELLSTVELPKHHDTGYSEENCEQVDPNGKAMRDNISAHLQSCEAPKLLC

SEQ ID NO: 66809 - protein, 86 aa, Setaria italica
  misc_feature (45)..(45): Xaa can be any naturally occurring amino acid
  Transcript Sequence Number=SeqID_835
  Gene Ontology: Mol. function=binding; Cellular component =mitochondrial inner membrane; Biological process=transport
  Homolog annotation: Hit_ID=B6T8M6; Match level="QueryCoverage=73%, HitCoverage=20%, E-value=4e-30, Identity=96%"; Hit description =Mitochondrial 2-oxoglutarate/malate carrier protein
  Pfam annotation: Domain name=Mito_carr; Domain location=4-86; Score =52.6; E_value=1.5e-12; Accession=PF00153.19; Description =Mitochondrial carrier protein
MQSSNLITGASAISGFFASACSLPFDYVKTQIQKMQPDANGKYPXYTGSLDCAAKTFKSGGPFKFYTGFPVYCVRIAPHVMMTWIS

SEQ ID NO: 66810 - protein, 305 aa, Setaria italica
  Transcript Sequence Number=SeqID_836
  Gene Ontology: Mol. function=binding; Cellular component =mitochondrial inner membrane; Biological process=transport
  Homolog annotation: Hit_ID=B6T8M6; Match level="QueryCoverage=95%, HitCoverage=93%, E-value=1e-156, Identity=92%"; Hit description =Mitochondrial 2-oxoglutarate/malate carrier protein
  Pfam annotation: Domain name=Mito_carr; Domain location=111-206; Score=107.6; E_value=4.1e-29; Accession=PF00153.19; Description =Mitochondrial carrier protein
  Pfam annotation: Domain name=Mito_carr; Domain location=20-105; Score= 70.9; E_value=4.8e-18; Accession=PF00153.19; Description =Mitochondrial carrier protein
  Pfam annotation: Domain name=Mito_carr; Domain location=210-304; Score=80.2; E_value=7.2e-21; Accession=PF00153.19; Description =Mitochondrial carrier protein
  Pfam module annotation: Pfam domain module=Mito_carr::Mito_carr::Mito_ carr; Domain location=111-206::20-105::210-304
  Subcellular localization annotation: CTP_CleavageSite=48; ConfidenceScore=5.07e-01
MADAKQQQQQAAVAATGVWKTIKPFVNGGASGMLATCVIQPIDMVKVRIQLGEGSAGQVTKNMLANEGLRSFYKGLSAGLLRQATYTTARLGSFRVLTNKAVEKNEGKPLPLIQKAFIGLTAGAIGACVGSPADLALIRMQADSTLPAAQRRNYKNAFHALYRISADEGVLALWKGAGPTVVRAMALNMGMLASYDQSVELFRDKFGAGEITTVIGASAISGFFASACSLPFDYVKTQIQKMQPDANGKYPYTGSLDCAAKTFKSGGPFKFYTGFPVYCVRIAPHVMMTWIFLNQIQKFEKKIGI

SEQ ID NO: 66811 - protein, 211 aa, Setaria italica
  Transcript Sequence Number=SeqID_837
  Gene Ontology: Cellular component=endoplasmic reticulum
  Homolog annotation: Hit_ID=B6TT65; Match level="QueryCoverage=91%, HitCoverage=88%, E-value=2e-64, Identity=61%"; Hit description=Seed maturation protein
  Pfam annotation: Domain name=Reticulon; Domain location=18-184; Score= 170.1; E_value=6.4e-48; Accession=PF02453.9; Description=Reticulon
MDARITSGGGTCVVGEFVWDVVLWRRGRADVSACLLAATAASWLLFYGAGRGYTALSVASDVLLLLLTVLFLWAKAARLLNRPAPPVPEMRVPQHAVDEAAALLRAALDAVLSGFHDIATGRDSVLFCQAFLCLWAVSIVGSLTDFPTFCYTSIVAALTLPALYQKYQECVDTYMKFAYLNLRMYEKVYERFSMKCFIRVRDWVMEILKDP

SEQ ID NO: 66812 - protein, 57 aa, Setaria italica
  Transcript Sequence Number=SeqID_838
  Homolog annotation: Hit_ID=Q6H5G7; Match level="QueryCoverage=100%, HitCoverage=10%, E-value=2e-15, Identity=70%"; Hit description=Leaf senescence protein-like
TALANLRPDGHPGPYMNKDPFGGGGAGDRRVQNDCVHWCMPGPVDTFNEILLQTVLR

SEQ ID NO: 66813 - protein, 426 aa, Setaria italica
  Transcript Sequence Number=SeqID_839
  Gene Ontology: Mol. function=transferase activity, transferring glycosyl groups; Cellular component=membrane; Biological process =cell wall biogenesis
  Homolog annotation: Hit_ID=B9S905; Match level="QueryCoverage=86%, HitCoverage=62%, E-value=1e-103, Identity=49%"; Hit description =Galactoside 2-alpha-L-fucosyltransferase, putative
  Pfam annotation: Domain name=XG_FTase; Domain location=17-426; Score =437.5; E_value=2.1e-128; Accession=PF03254.5; Description=Xyloglucan fucosyltransferase
  Subcellular localization annotation: CTP_CleavageSite=74; ConfidenceScore=5.71e-01
FGGRWGSSSSAFPSPSSSSTPVVSRHVAAGDRGATPQSQRPEAVTPKNLSASSPSPDKLLGGLLSSAFDESSCQSRYKSNLYRKPSPFPLSPYLAQKLRKYEAYHKKCGPRTKRYRRAIKQLKSGRNADDSECKYVVWFPCNGLGNRMLTIASTFLYALLTDRVLLTHVAPEQEGLFCEPFPGSSWVLPGDFPENNPHKLHIGAPESYANMLKSGAVRNDDPRSVPASSLPPYVYLHVEQFQLKLSDNVFCDEDQAMLSKFTWMILKSDSYFAPALFLTPMFEEELARMFPQKEAVFHHLGRYLFHPTNRVWGIIRRYYEAYLARVDEKIGFQIRIFPEKPIKFENMYDQLTRCIREQRLLPELGTVEPPANTTSGEAGKVKAVLIASLYSGYYEKIRGMYYESPTKTGEIVAVFQPSHEEQQQYT

SEQ ID NO: 66814 - protein, 65 aa, Setaria italica
  Transcript Sequence Number=SeqID_840
LVCTCCDCRICSINDLCGRLVQAWMSTILTFGSCICMDVCWSNMWVICVHGCVLDGIWMFISVFS

SEQ ID NO: 66815 - protein, 75 aa, Setaria italica
  Transcript Sequence Number=SeqID_841
GEEEEEERDREREIISRLIRPVSVGVPWEGFMGIKFYTTSAILTTWQDLYEEKEGRVLSYMRGVSSPWHSTGTVT

SEQ ID NO: 66816 - protein, 320 aa, Setaria italica
  Transcript Sequence Number=SeqID_842
  Gene Ontology: Mol. function=protein binding; Cellular component =nucleus; Biological process=sorocarp development
  Homolog annotation: Hit_ID=A9SRV1; Match level="QueryCoverage=96%, HitCoverage=93%, E-value=1e-125, Identity=68%"; Hit description =Histone H3 methyltransferase complex and RNA cleavage factor II complex, subunit SWD2
  Pfam annotation: Domain name=WD40; Domain location=107-145; Score =36.8; E_value=8.7e-08; Accession=PF00400.24; Description=WD domain, G-beta repeat
  Pfam annotation: Domain name=WD40; Domain location=18-56; Score=22.4; E_value=0.0018; Accession=PF00400.24; Description=WD domain, G-beta repeat
  Pfam annotation: Domain name=WD40; Domain location=193-231; Score =3.6; E_value=15; Accession=PF00400.24; Description=WD domain, G-beta repeat
  Pfam annotation: Domain name=WD40; Domain location=237-275; Score =24.0; E_value=0.00062; Accession=PF00400.24; Description=WD domain, G-beta repeat
  Pfam annotation: Domain name=WD40; Domain location=279-315; Score =6.1; E_value=7.6; Accession=PF00400.24; Description=WD domain, G -beta repeat
  Pfam module annotation: Pfam domain module=WD40::WD40::WD40::WD40::WD4 0; Domain location=107-145::18-56::193-231::237-275::279-315
MAAAASLSQLDDEIVHGMAIGAVFTDYAGKINCLDFHRKEDLLVTSSEDDSIRLYNITSATLLKTTYHRKHGADRVCFTHHPSSILCSSRYNLESAESLRYLSLYDNRCLRYFKGHKDRVVSLCMSPVNDSFMSGSLDHSVRIWDLRVNACQGILRLRGRPSVAYDQQGLVFAVAMEGGAIKLFDSRSYDKGPFDTFLVGGDTAEVSDIKFSNDGKSMLLTTTNNHIYVLDAYGGDKRCGFSLEPSPNVTNEAAFTPDGQYVISGSGDGTLHAWNINTVQEIACWNSHIGPITALKWAPRRAMFATASTALTFWIPSQSN

SEQ ID NO: 66817 - protein, 98 aa, Setaria italica
  misc_feature (29)..(29): Xaa can be any naturally occurring amino acid
  Transcript Sequence Number=SeqID_843
  Subcellular localization annotation: CTP_CleavageSite=91; ConfidenceScore=5.74e-01
PTARSSRESRKRSCRRLPPRRSSPESRNXSCSRPGSRRWRCCCRPPRRPWRSTPRQSSASRWGTSRWCNSCCRSSSWPTRWESSGSRNTTVVQHVAAY

SEQ ID NO: 66818 - protein, 114 aa, Setaria italica
  Transcript Sequence Number=SeqID_844
  Gene Ontology: Mol. function=transporter activity; Cellular component= membrane; Biological process=oligopeptide transport
  Homolog annotation: Hit_ID=Q7X619; Match level="QueryCoverage=78%, HitCoverage=14%, E-value=3e-25, Identity=63%"; Hit description =P0076O17.8 protein
IEFFYKQACAGGMQAFLTALTYCSYAFGFYLSSLLVSLVNRVTARQGGGGGWLGDNDLNKDRLDLFYWMLAALSVLNFFCFLLCARWYNAGVDGSDAAASGQVAAEGADGKEII

SEQ ID NO: 66819 - protein, 68 aa, Setaria italica
  Transcript Sequence Number=SeqID_845
  Gene Ontology: Mol. function=binding; Cellular component=mitochondrion
  Homolog annotation: Hit_ID=Q8LI18; Match level="QueryCoverage=85%, HitCoverage=9%, E-value=4e-20, Identity=70%"; Hit description =Selenium-binding protein-like
VFVLFAFRFFISTPEKTTLRIMKNLRVCNDCHMAIKFISKVVEREIIVRDATRFHHFRDGFCSCKDYW

SEQ ID NO: 66820 - protein, 53 aa, Setaria italica
  Transcript Sequence Number=SeqID_846
MELLDMVPADAIALRLYSLPAAVAAAASLYYAWLVAALAAAVGLWRIRAVSAG

SEQ ID NO: 66821 - protein, 92 aa, Setaria italica
  Transcript Sequence Number=SeqID_847
TIAERLSRGYGRNRDQNLKNHRDYRGFKPLLAGGEYIKHILTVALQNPLLKHKKEETSHSIHHEKVSGRGWPCRNDLTSTSDRSGCENGASW

SEQ ID NO: 66822 - protein, 153 aa, Setaria italica
  misc_feature (34)..(34): Xaa can be any naturally occurring amino acid
  Transcript Sequence Number=SeqID_848
  Gene Ontology: Mol. function=ribonuclease activity; Cellular component=chloroplast
  Homolog annotation: Hit_ID=Q9LZA0; Match level="QueryCoverage=94%, HitCoverage=18%, E-value=5e-49, Identity=65%"; Hit description =Ribonuclease II-like protein
KPVPHGVLGIPGYVQFTSPIRRYVDLLAHYQVKXAFLRGDSPPYSAGDLEGMTFIASMHVKVARRLHSNSLRYWLLEYLRRQPKGRQYKALILKFVKDRMAALLLVEVGMQVTTIVSRGKVGDEVSVAVETAHPRDDILSIREVIEDTDDTEE

SEQ ID NO: 66823 - protein, 62 aa, Setaria italica
  Transcript Sequence Number=SeqID_849
  Gene Ontology: Mol. function=nucleoside-triphosphatase activity; Cellular component=integral to membrane; Biological process =proteolysis
  Homolog annotation: Hit_ID=Q8GU89; Match level="QueryCoverage=53%, HitCoverage=2%, E-value=1e-09, Identity=87%"; Hit description =Pleiotropic drug resistance protein 4
LVFLFASVYQAIAATLCSIYSNALLVSWCSRRQQDLFNAMGSMYAAVLYIGVQNGGSVQPVV

SEQ ID NO: 66824 - protein, 187 aa, Setaria italica
  Transcript Sequence Number=SeqID_850
  Gene Ontology: Mol. function=electron carrier activity; Cellular component=mitochondrial matrix; Biological process=electron transport chain
  Homolog annotation: Hit_ID=Q7F9U3; Match level="QueryCoverage=100%, HitCoverage=73%, E-value=2e-78, Identity=79%"; Hit description =Electron transfer flavoprotein subunit beta, mitochondrial
  Pfam annotation: Domain name=ETF; Domain location=23-187; Score =112.8; E_value=1.2e-30; Accession=PF01012.13; Description=Electron transfer flavoprotein domain
MKILVAVKRVVDYAVKVRVRPDRTGIETANVKMSMNPFCEIAVEEALRLREAGAAAEVVAATIGPAHSADTLRTALAMGADRAVHVLHDPDPVRPLLPLAVAKILRAVALQEKPGLVILGKQAIDDDCNQTGTRIAGRQQWPQGTFASKVLLDKEKQKATVEREVDGGIETICLDLPAVITTDLRLN

SEQ ID NO: 66825 - protein, 124 aa, Setaria italica
  Transcript Sequence Number=SeqID_851
  Gene Ontology: Mol. function=electron carrier activity; Cellular component=mitochondrial matrix; Biological process=electron transport chain
  Homolog annotation: Hit_ID=Q7F9U3; Match level="QueryCoverage=93%, HitCoverage=45%, E-value=1e-53, Identity=88%"; Hit description =Electron transfer flavoprotein subunit beta, mitochondrial
PHVTESFLCKQAIDDDCNQTGQMLAGLLQWPQGTFASKVLLDKEKQKATVEREVDGGIETICLDLPAVITTDLRLNQPRYATLPNIMKAKSKVIKKVTPEELNVDIRSDMEVIEVNEPPKKKKT

SEQ ID NO: 66826 - protein, 112 aa, Setaria italica
  Transcript Sequence Number=SeqID_852
  Gene Ontology: Mol. function=electron carrier activity; Cellular component=mitochondrial matrix; Biological process=electron transport chain
  Homolog annotation: Hit_ID=Q7F9U3; Match level="QueryCoverage=100%, HitCoverage=43%, E-value=2e-49, Identity=89%"; Hit description =Electron transfer flavoprotein subunit beta, mitochondrial
GTFASKVLLDKEKQKATVEREVDGGIETICLDLPAVITTDLRLNQPRYATLPNIMKAKSKVIKKVTPEELNVDIRSDMEVIEVNEPPKRKAGIILSSVDELLDKLKNEARVL

SEQ ID NO: 66827 - protein, 531 aa, Setaria italica
  Transcript Sequence Number=SeqID_853
  Gene Ontology: Mol. function=GTP binding; Cellular component=viral envelope; Biological process=protein transport
  Homolog annotation: Hit_ID=B9SQL1; Match level="QueryCoverage=97%, HitCoverage=44%, E-value=0.0, Identity=63%"; Hit description=Protein translocase, putative
  Pfam annotation: Domain name=AIG1; Domain location=1-86; Score=-91.5; E_value=0.0082; Accession=PF04548.8; Description=AIG1 family
DVPLLQTITKVFGASVWFNAIVVLTHAASAPPDGLNGIPLSYEMFVTQRSHVVQQAIRQAAGDIRLMNPVSLVENHAACRTNRAGQRVLPNGQVWKPQLLLLCFASKVLAEANVLLKLQDSNPVGKLSRTRIPPLPFLLSSLLQSRAPLKLPEEQFGDDDDLEDDSADDCDSDDDSDYDDLPPFKRLTKAQLSKLNKAQQKAYLEELDYREKLFYRKQLKEERMRRKLMKKMAAEASTRANDFNNSNSEDDPNTPTNVAVPMPDMVLPSSFDSDNPSHRYRFLDTPSEWLVRPVLETQGWDHDVGYEGLNVERLFAVKGKVPLSISGQLTKDKKDCSMQMEVASSVKHAEGKTTSLGLDLQSVGKDMAYTIRGESRFKNFRRNNTAAGISATLLGDSVSAGVKIEDKLIVNKQLRVLVGGGAMSGRGDVAYGGRLEATLRDKDYPIGRMLSTLALSVVDWHGDLAIGCNIQSQIPAGRASNLVGHANLSNKGTGQVGIRLNSSEHLELALVALVPIFQNIRKLLQNYSEST

SEQ ID NO: 66828 - protein, 231 aa, Setaria italica
  Transcript Sequence Number=SeqID_854
  Gene Ontology: Mol. function=serine-type peptidase activity; Cellular component=integral to membrane; Biological process=proteolysis
  Homolog annotation: Hit_ID=B9RKP7; Match level="QueryCoverage=78%, HitCoverage=58%, E-value=1e-86, Identity=80%"; Hit description =Signal peptidase I, putative
  Pfam annotation: Domain name=Peptidase_S24; Domain location=63-140; Score=59.5; E_value=1.3e-14; Accession=PF00717.15; Description =Peptidase family S24
  Pfam annotation: Domain name=Peptidase_S26; Domain location=84-196; Score=4.5; E_value=2.5e-05; Accession=PF10502.1; Description=Signal peptidase I
  Pfam module annotation: Pfam domain module=Peptidase_S24::Peptidase _S26; Domain location=63-140::84-196
DGGSGGGGAGGGGEGEDEEEEGEKKEKGLLPEWMNVTTEDAKTVLVAVAISLAFRSFVAEPRFIPSLSMFPTFDVGDRIVAEKVTYYFRKPCVNDIVIFKSPPVLQEVGYTDNDVFIKRVVAKEGDVVEVHEGKLVVNGEARSEEFILEPPTYDMNPVQVPENSVFVMGDNRNNSYDSHVWGPLPAKNILGRSIFRYWPPERIGGTTKGCLNPELNPETKPGPLIDVKLTK

SEQ ID NO: 66829 - protein, 117 aa, Setaria italica
  Transcript Sequence Number=SeqID_855
  Gene Ontology: Mol. function=triacylglycerol lipase activity; Biological process=lipid metabolic process
  Homolog annotation: Hit_ID=B6SY41; Match level="QueryCoverage=100%, HitCoverage=22%, E-value=1e-49, Identity=82%"; Hit description =Triacylglycerol lipase like protein
KVLGKPPQVPRAAKQEPEQDGGEQEPLSVRHGLLNALNLSFFVPMPGMRARTAADEHMSPRSLMHMQQLLSADSPRASPRSTIAPRWRSLHGEGGWAGLLDPLDSDLRRELLRYGDF

SEQ ID NO: 66830 - protein, 106 aa, Setaria italica
  Transcript Sequence Number=SeqID_856
  Gene Ontology: Mol. function=extracellular-glutamate-gated ion channel activity; Cellular component=integral to membrane; Biological process=ion transport
  Homolog annotation: Hit_ID=Q653Y6; Match level="QueryCoverage=98%, HitCoverage=12%, E-value=3e-32, Identity=64%"; Hit description =Putative ionotropic glutamate receptor ortholog GLR6
FLVCALICLFALLVFFIRICWQYSKYSNSEAAGEPSAADADAAAATDAAADAAERQRRPSRLGSFKELMQFVDKKEEEVRRTMKRRSSEKDNQAAGSSDAQSMAAA

SEQ ID NO: 66831 - protein, 73 aa, Setaria italica
  Transcript Sequence Number=SeqID_857
MAARGHVLALLVLLALAAAAMASGGRHQQRHRHHGRKSARLRLIPSAPDASLADRARDDRHRNAYIRSTMASR

SEQ ID NO: 66832 - protein, 81 aa, Setaria italica
  Transcript Sequence Number=SeqID_858
  Gene Ontology: Mol. function=DNA binding; Biological process =regulation of transcription
  Homolog annotation: Hit_ID=B6T0L0; Match level="QueryCoverage=100%, HitCoverage=27%, E-value=1e-22, Identity=70%"; Hit description=MYB -like transcription factor DIVARICATA
  Subcellular localization annotation: CTP_CleavageSite=13; ConfidenceScore=5.01e-01
GNPSPSPPSVLTSASTPSSTGGPVISEQFGVLVDSKLPPSHHFMPHPYGNVKLEPGNSHHGGFLDDSVLMQMQCGQLQPLG

SEQ ID NO: 66833 - protein, 56 aa, Setaria italica
  Transcript Sequence Number=SeqID_859
ILACVTVLTSSSISCRMLIQTCRREAYLHVGFMDPSGCSLLQVTLFGFVLFFCLKF

SEQ ID NO: 66834 - protein, 95 aa, Setaria italica
  Transcript Sequence Number=SeqID_860
FDRGHGFGYTMFALFISFNFNQARHADLKLDSDIQVPSHPDVEVFSDFTVHVKKHGCSHTPSRWTPWRSTVLDSSPFRTLKLPHASRCCTVGLSA

SEQ ID NO: 66835 - protein, 80 aa, Setaria italica
  Transcript Sequence Number=SeqID_861
  Subcellular localization annotation: CTP_CleavageSite=51; ConfidenceScore=5.49e-01
MITHHPSLLRPPILTSRVGVLGRRLTPHAFLSATVASARPSTPPLRLRPVRAAAFGASQVGGDGGKGAVPPPARGGRAAR

SEQ ID NO: 66836 - protein, 135 aa, Setaria italica
  Transcript Sequence Number=SeqID_862
  Homolog annotation: Hit_ID=B6T4Q3; Match level="QueryCoverage=98%, HitCoverage=36%, E-value=5e-30, Identity=57%"; Hit description =Plasminogen activator inhibitor 1 RNA-binding protein
  Pfam annotation: Domain name=HABP4_PAI-RBP1; Domain location=1-70; Score=20.1; E_value=0.00023; Accession=PF04774.7; Description =Hyaluronan  mRNA binding family
SEETTAVAEDEKKPEDAPQSEVEKDKEGVENEEEEKEPEDKEMTLEEYEKVLEEKRKALLALKAEERKVEIDKELQSMQQLSIKKDADEVFIKLGSDKDLKKKENAERDERAKKSLSINEFLKPAEGERYYNPSG

SEQ ID NO: 66837 - protein, 373 aa, Setaria italica
  Transcript Sequence Number=SeqID_863
  Homolog annotation: Hit_ID=B6T4Q3; Match level="QueryCoverage=100%, HitCoverage=100%, E-value=7e-62, Identity=46%"; Hit description =Plasminogen activator inhibitor 1 RNA-binding protein
  Pfam annotation: Domain name=GRP; Domain location=1-140; Score=-29.3; E_value=0.088; Accession=PF07172.3; Description=Glycine rich protein family
  Pfam annotation: Domain name=HABP4_PAI-RBP1; Domain location=152-265; Score=160.0; E_value=7.1e-45; Accession=PF04774.7; Description =Hyaluronan  mRNA binding family
  Pfam module annotation: Pfam domain module=GRP::HABP4_PAI-RBP1; Domain location=1-140::152-265
MASRNQFDLLGDVDNDDPAHLLAAAEKKAAAAPKPAPVSAKLPTKPPPPAQTVREARNYGAPPRDGAGRGGPGRGRGGRGGRTGPRREFGDADANGFEGGYGGGFGDGGVARGENGEGRQAERGRGPRQPYRGGGRRGGYADGQAGDEFGHPRRAYERHSGTGRGYEMKREGAGRGNWGTVTDEVLAQDTVEAVNPEETTAVAEDEKKPEDAPQSEVEKDKEGVENEEEEKEPEDKEMTLEEYEKVLEEKRKALLALKAEERKVEIDKELQSMQQLSIKKDADEVFIKLGSDKDLKKKENAERDERAKKSLSINEFLKPAEGERYYNPSGRGRGRSRGRGERGGFYGGYNGGYRGPAAAAPAIEDQAQFPALA

SEQ ID NO: 66838 - protein, 141 aa, Setaria italica
  misc_feature (104)..(104): Xaa can be any naturally occurring amino acid
  misc_feature (115)..(115): Xaa can be any naturally occurring amino acid
  Transcript Sequence Number=SeqID_864
  Gene Ontology: Mol. function=binding; Cellular component=vacuole; Biological process=protein folding
  Homolog annotation: Hit_ID=B9RP02; Match level="QueryCoverage=87%, HitCoverage=16%, E-value=3e-37, Identity=60%"; Hit description=Heat shock protein 70 (HSP70)-interacting protein, putative
  Pfam annotation: Domain name=TPR_1; Domain location=23-56; Score=3.2; E_value=2.4; Accession=PF00515.20; Description=Tetratricopeptide repeat
  Pfam annotation: Domain name=TPR_1; Domain location=61-96; Score =15.6; E_value=0.079; Accession=PF00515.20; Description =Tetratricopeptide repeat
  Pfam annotation: Domain name=TPR_2; Domain location=23-56; Score =18.0; E_value=0.039; Accession=PF07719.9; Description=Tetratricopepti de repeat
  Pfam annotation: Domain name=TPR_2; Domain location=61-96; Score =10.4; E_value=1.7; Accession=PF07719.9; Description=Tetratricopeptide repeat
  Pfam module annotation: Pfam domain module=TPR_1::TPR_1::TPR_2::TPR _2; Domain location=23-56::61-96::23-56::61-96
IVVSNQVLVKYVRRYYVVFIRLASELKDEGTRLFQKRDYEGAAFKFDKAVKLLPEGHHDIAFLHCNIAACYMHMNPEEYHRAIDECNSALEASPTYTKALLKRXRCFEALDRTKXLDLACGDVEKVLNLEPNNVTALELHE

SEQ ID NO: 66839 - protein, 80 aa, Setaria italica
  Transcript Sequence Number=SeqID_865
KSGGAVCSFPSSFFLEYNVWYIRAVHLGCVLIWSCSPTGSRRTTNIYLIKMGCFMFGAYSDCSCRLYNALNPKSKKHDPV

SEQ ID NO: 66840 - protein, 394 aa, Setaria italica
  Transcript Sequence Number=SeqID_866
  Gene Ontology: Cellular component=chloroplast
  Homolog annotation: Hit_ID=B1WNJ9; Match level="QueryCoverage=78%, HitCoverage=92%, E-value=8e-38, Identity=32%"; Hit description =DUF1350-containing protein
  Pfam annotation: Domain name=DUF1350; Domain location=81-393; Score =102.5; E_value=1.4e-27; Accession=PF07082.3; Description=Protein of unknown function (DUF1350)
  Subcellular localization annotation: CTP_CleavageSite=41; ConfidenceScore=5.77e-01
AAAAAAAAHLLCPAPAASPAKSRQFPTRGRRAKPSRCFSCRASLGPDGSLAMLGVPTPRPAPPMMRPYLREHSCLIFPPPRGRRPLAVVKFLGGAFIGAVPEVTYGYLLELLAREGFLVVCVPYNVTFDHEAAAREVFGRFHACYDALLASGLPEAGLTAPDIAELPLYSVGHSNGALLQLLVGSYFSERIPKANAIVSFNNRPASEAVPYFEQIGPLFSQLMPMMEASPVYSVARNASGDAWKALFDLAGGFIREYDQEAMVSLSKFVDQLPSVMNQVTEGVSEFKPTPPENREFCKNSYSVPNTLLVKFSVDAIDDTDIVEDVLRPRVDSFGGQIKKIVLLGTHLTPCIQDVKWQVGSEYTPADALAQGLKSLALNETRVLSRTIADWFRSL

SEQ ID NO: 66841 - protein, 64 aa, Setaria italica
  misc_feature (33)..(33): Xaa can be any naturally occurring amino acid
  Transcript Sequence Number=SeqID_867
DSWEEEDEEKPKPPPVEKAAAKPSSKAPAKKGXQQASTSAEEPDEPPLSPTSEKIRQQRYVSFL

SEQ ID NO: 66842 - protein, 231 aa, Setaria italica
  Transcript Sequence Number=SeqID_868
  Gene Ontology: Mol. function=translation initiation factor activity
  Homolog annotation: Hit_ID=B6TMD7; Match level="QueryCoverage=100%, HitCoverage=100%, E-value=4e-76, Identity=65%"; Hit description =Eukaryotic translation initiation factor 3 subunit 1 alpha, 35kDa
  Pfam annotation: Domain name=eIF3_subunit; Domain location=1-231; Score=291.7; E_value=1.6e-84; Accession=PF08597.2; Description =Translation initiation factor eIF3 subun
MEDWDAEDFQPAAPVVIAEPLKNQWADEDVEEDDVKDSWEEEDEEKPKPPPVEKAAAKPSSKAPAKKGKQQASTSAEEPDEPPLSPTSEKIRQQRLVEEADFKSTTELFAKKGGDQKSLDTFIPKSESDFAEYAELIANKLRPYEKSFHYMGLLKNVMRLSMTSLKGADAKDISSSVTAIANEKIKAEKEAAAGKKKQGAKKKQLHIEKGDDDFIPGRGGGYDDPDEYDFM

SEQ ID NO: 66843 - protein, 78 aa, Setaria italica
  Transcript Sequence Number=SeqID_869
FFLFGSLRKWGRASSDWIWRRRRRAEGEDAAAGVNGRPNQRWSGDPVTKILLEKEQWMMECSNTHQGDIVEILMTRIQ

SEQ ID NO: 66844 - protein, 162 aa, Setaria italica
  Transcript Sequence Number=SeqID_870
  Gene Ontology: Mol. function=nucleic acid binding; Cellular component= chromatin; Biological process=chromatin assembly or disassembly
  Homolog annotation: Hit_ID=Q10PF2; Match level="QueryCoverage=100%, HitCoverage=17%, E-value=2e-61, Identity=68%"; Hit description =Retrotransposon protein, putative, unclassified
  Pfam annotation: Domain name=rve; Domain location=47-162; Score=23.0; E_value=0.00014; Accession=PF00665.18; Description=Integrase core domain
TYYRIKQLFYWKGLKTDVTNFVKKCLICQQDKHEHTHPTGLLQPLPITQGAWQDISLDFVEGLPLSEGCNVILVVVDRFTKYSHFIPLKHPFTAQGVAKAVLDNVIKLHGMPRTIVSDRDNIFTSAFWTALFKLVDTKLLRSSAYHPQTDGQTERVNQCLKM

SEQ ID NO: 66845 - protein, 80 aa, Setaria italica
  Transcript Sequence Number=SeqID_871
  Subcellular localization annotation: CTP_CleavageSite=38; ConfidenceScore=5.31e-01
AQHRRRASVPTRWPPVTSFRPCHVDPGCSEFPFSISPSSSVRSRCDEFQAPATSSLSIELHPQCPNLEHVHCLELQSMAL

SEQ ID NO: 66846 - protein, 101 aa, Setaria italica
  Transcript Sequence Number=SeqID_872
  Subcellular localization annotation: CTP_CleavageSite=74; ConfidenceScore=5.05e-01
RTHPRNEDMDLISHGKKATRQNRNQAHNNPSRCTRDPLPAKAKSIRETRHRKDRRRPRQRASIRRGGTRSVAVRVKRGKGSELLNNAWLINYFAIPKVVFG

SEQ ID NO: 66847 - protein, 151 aa, Setaria italica
  Transcript Sequence Number=SeqID_873
  Subcellular localization annotation: CTP_CleavageSite=51; ConfidenceScore=5.47e-01
MSQLGTCSLPRAAIYGTSARRFGGSQFQQPKVNRISFEQKVSAKTTLRSMRCKATQTQSVQKKSSSATVQRDKKGKVQGPKLDDGSGGFPPFRFGKGGGGGGGGGGGSNYFGGFLLFSCVLLLDYLKEFEKYLLTRKHRGGDDASNGLLQP

SEQ ID NO: 66848 - protein, 66 aa, Setaria italica
  misc_feature (12)..(12): Xaa can be any naturally occurring amino acid
  Transcript Sequence Number=SeqID_874
  Homolog annotation: Hit_ID=Q7XR84; Match level="QueryCoverage=89%, HitCoverage=18%, E-value=5e-18, Identity=76%"; Hit description =OSJNBa0043A12.1 protein
MSDLSRTVPPGXLPSEDLHPLPMPVINLGHLSLDSVTRSRVVNDIAKACRDLGYFQVCSFTSLHNR

SEQ ID NO: 66849 - protein, 236 aa, Setaria italica
  misc_feature (12)..(12): Xaa can be any naturally occurring amino acid
  Transcript Sequence Number=SeqID_875
  Gene Ontology: Mol. function=iron-sulfur cluster binding; Cellular component=mitochondrion; Biological process=lipoate biosynthetic process
  Homolog annotation: Hit_ID=B6TN12; Match level="QueryCoverage=100%, HitCoverage=65%, E-value=1e-123, Identity=91%"; Hit description =Lipoic acid synthetase
  Pfam annotation: Domain name=Radical_SAM; Domain location=1-158; Score=22.3; E_value=0.0014; Accession=PF04055.13; Description =Radical SAM superfamily
RGCRFCAVKTSXKPPPPDPLEPLNTALAVAFWGVDYVVLTSVDRDDLPDGGSSHFVQTVKALKELKPGILVECLTSDFRGDLEAVSSLANSGLDVYAHNIETVRSLQRIVRDPRAGYDQSLAVLKHAKSCREGMITKSSIMLGLGETDEEVRQTMMDLRAIGVDILTLGQYLQPTERHLTVREYVTPEKFQFWKEYGESVGFRYVASGPLVRSSYRAGELFVQNLVRNSKTLSSSS

SEQ ID NO: 66850 - protein, 54 aa, Setaria italica
  Transcript Sequence Number=SeqID_876
QSHFFVYFLWTASVGLVGGVGLIFKYNKVSYLIINVWRIERIGLITCGIIFQEP

SEQ ID NO: 66851 - protein, 103 aa, Setaria italica
  misc_feature (45)..(45): Xaa can be any naturally occurring amino acid
  Transcript Sequence Number=SeqID_877
  Gene Ontology: Mol. function=nuclease activity; Biological process =nucleotide-excision repair
  Homolog annotation: Hit_ID=B9RCX3; Match level="QueryCoverage=96%, HitCoverage=30%, E-value=5e-28, Identity=65%"; Hit description=DNA binding protein, putative
  Pfam annotation: Domain name=UVR; Domain location=36-72; Score=14.9; E_value=0.012; Accession=PF02151.11; Description=UvrBuvrC motif
QFDVAKQLREKLTEIETEIIRQREAKRGSSKTEAQDKALNLLRVXDLQKAIDSENYALAASLRDEIAKLEAESLAVSAKALAYQNVKYAFRLGQKVRHKDIEV

SEQ ID NO: 66852 - protein, 333 aa, Setaria italica
  Transcript Sequence Number=SeqID_878
  Gene Ontology: Mol. function=nuclease activity; Biological process =nucleotide-excision repair
  Homolog annotation: Hit_ID=B9RCX3; Match level="QueryCoverage=76%, HitCoverage=76%, E-value=4e-99, Identity=68%"; Hit description=DNA binding protein, putative
  Pfam annotation: Domain name=UVR; Domain location=151-186; Score =20.5; E_value=0.0027; Accession=PF02151.11; Description=UvrBuvrC motif
  Pfam annotation: Domain name=YccV-like; Domain location=201-305; Score=148.9; E_value=1.6e-41; Accession=PF08755.3; Description =Hemimethylated DNA-binding protein Yc
  Pfam module annotation: Pfam domain module=UVR::YccV-like; Domain location=151-186::201-305
MQGISICGSVASPHRTNCRRACVARNGLKLPCEINAVSHGAYSCHWHMNKLHIKTSGRRMNAAIRTNARWLFGGEGRSSDARLERSESANEDILIFYFQMDLQTRIQYALNIEQFDVAKQLREKLTEIETEIIRQREAKRGSSKTEAQDKALNLLRVRADLQKAIDSENYALAASLRDEIAKLEAESLAVSAKALAYQNVKYAFRLGQKVRHKVHGYRGVICGMDPVCCESKSWMETANVEKLSKGPNQPFYQVLVDVYVDPELLVAYVAEENLSAAEESEKGRFDHPYVEFLFYGEDTAGDFIPIKQLREKYDQPRYEASGDESDDDGDTNS

SEQ ID NO: 66853 - protein, 177 aa, Setaria italica
  Transcript Sequence Number=SeqID_879
  Homolog annotation: Hit_ID=B2ZX90; Match level="QueryCoverage=79%, HitCoverage=15%, E-value=2e-48, Identity=69%"; Hit description =Chromatin assembly factor-1
KENKTRKKQQEEAEKEQKRREKEAAQLKKQQAIQKQASMMERFFKSKKDSGKLQKSGENDSADDPIDNKGAVPATTSKIDSSLSQQESWVLEDLRRLQVIGWKKLSSYNRSSRWGIRSKPKVEAFKELKLQKSSDDMVDEILSTPNEDNCHNSSQENEHDKLESEIDMLPASEMQCH

SEQ ID NO: 66854 - protein, 461 aa, Setaria italica
  Transcript Sequence Number=SeqID_880
  Gene Ontology: Mol. function=nucleic acid binding; Cellular component= ribonucleoprotein complex
  Homolog annotation: Hit_ID=B9SSS5; Match level="QueryCoverage=99%, HitCoverage=96%, E-value=1e-140, Identity=58%"; Hit description =Heterogeneous nuclear ribonucleoprotein 27C, putative
  Pfam annotation: Domain name=RRM_1; Domain location=108-177; Score =81.5; E_value=2.9e-21; Accession=PF00076.14; Description=RNA recognition motif. (a.k.a. RRM, RBD, o
  Pfam annotation: Domain name=RRM_1; Domain location=8-76; Score=76.2; E_value=1.2e-19; Accession=PF00076.14; Description=RNA recognition motif. (a.k.a. RRM, RBD, o
  Pfam module annotation: Pfam domain module=RRM_1::RRM_1; Domain location=108-177::8-76
MEADAGKLFIGGISWDTNEDRLREYFDKYGEVVEAVIMRDRATGRARGFGFIVFADPAVAEQVIMEKHMIDGRMVEAKKAVPRDDQHALSKSSGSAHGSPGPSRTKKIFVGGLASTVTEADFRKYFEQFGTITDVVVMYDHNTQRPRGFGFITYDSEDAVDKALFKTFHELNGKMVEVKRAVPKELSPGPSMRSPVGGFNYVMGRANILNGYTQGYNPSPVGGYGMRMDARFGLLSGGRSGYPSFGGSYGIGMNFDPGMNPGIGGGSSFNNSVQYGRQLNPYYSGNSGRFNSSVGYGGVNDNNGSVFNSLARNLWGNSGLNYSSNSASSNTFVSSGNGGLSGIGNNNVNWGNPPVPAQGASGGSGYGTGNFGYGSSENNFGLGSSAYGRNAGSGGVNTFNQSTNGYARNFGDSSAPGGSIYGDTTWRSGSSELDGTSPFGYGLGNSASDVTAKSSAGYMGH

SEQ ID NO: 66855 - protein, 132 aa, Setaria italica
  Transcript Sequence Number=SeqID_881
  Gene Ontology: Mol. function=nucleic acid binding
  Homolog annotation: Hit_ID=Q7XNH0; Match level="QueryCoverage=67%, HitCoverage=7%, E-value=9e-31, Identity=70%"; Hit description =OSJNBa0096F01.3 protein
MYDAGPVLPAPPPPVDVEMYEPRARAPAPTLPRPLRAIAPAPVTDLRMVVAPPDAEFGDFPEERDFFLVGKSYVPGLSTNRGRRRMDAGEIVHFAFPSYERSYGGLKLSAKKVKALAGIVRFSTKRAGEIGK

SEQ ID NO: 66856 - protein, 405 aa, Setaria italica
  misc_feature (6)..(6): Xaa can be any naturally occurring amino acid
  misc_feature (8)..(8): Xaa can be any naturally occurring amino acid
  Transcript Sequence Number=SeqID_882
  Gene Ontology: Mol. function=glycerophosphodiester phosphodiesterase activity; Cellular component=anchored to membrane; Biological process=glycerol metabolic process
  Homolog annotation: Hit_ID=Q8GXJ8; Match level="QueryCoverage=73%, HitCoverage=83%, E-value=3e-76, Identity=45%"; Hit description=GPI -anchored protein
  Pfam annotation: Domain name=GDPD; Domain location=9-295; Score=18.3; E_value=6.8e-07; Accession=PF03009.9; Description=Glycerophosphoryl diester phosphodiesterase family
TRPLIXTXNGASGIFPGGTDLAYQQAVEDGADIIDCSVQMSKDAVLFCLDSPDLTKGTTAATMFTTKVATVNEIQNGSGIFSFDLSWSEIQTLKPDLVGPFSQAGLKRNPAAKNSGKLMTLAEFLAFSKSSNVSGILVDIRNAPYLATRGIGIVDAISSALVNASYDKETRQQVLIASDDTAVLGSFNNFPAFKRVLQIGNVISDVSRASVEEVAKFADAVSITRGSVVQAQGSFLVRFTDVIDKMHAANLSVYVGLLKDEFMNLGFDFWANPMVEIVTYSSLMADGIVTEFPATAAEYFRSPCSDFSKNLTYTIMPAKPGTLINLTDHSALPPAQGPAPVLEPADVVDPPLPAVTVGGHGAASSSSNDSSTTSSAMASGASSGLCLLVAGLAVLWQCALGDPEA

SEQ ID NO: 66857 - protein, 53 aa, Setaria italica
  Transcript Sequence Number=SeqID_883
PKNSRGSMKCTGTIMPSLFFSSIKVNGQLLLIQNCIQTELKTHCQISSKYSAC

SEQ ID NO: 66858 - protein, 59 aa, Setaria italica
  Transcript Sequence Number=SeqID_884
RKWSVNKSGFAIPSPMAGLKQGLASSNCIQCPVQGLDVAACPTGYYKVNTWKREQQRIG

SEQ ID NO: 66859 - protein, 170 aa, Setaria italica
  Transcript Sequence Number=SeqID_885
  Homolog annotation: Hit_ID=Q9ZVA8; Match level="QueryCoverage=58%, HitCoverage=62%, E-value=2e-13, Identity=44%"; Hit description =F9K20.6 protein
  Subcellular localization annotation: CTP_CleavageSite=16; ConfidenceScore=5.08e-01
MALARLLAARTLTLPRAAAGLSSALRHRTSRALSAKVEFVEIDLSEESPSSSSGGGGAGDSAKVQAQMGMRRLEDAIHGVLVRRAAPDWLPFVPGASYWVPPMPRPLGVADLLGAAVHTARGATAMTAEEAMSFTTVRGWPSAAYFVEGKFSHPVKRPRNDATQTDDEES

SEQ ID NO: 66860 - protein, 49 aa, Setaria italica
  Transcript Sequence Number=SeqID_886
RAAKFQWLAFEPASMAQYIGADADGHLAVRLCGLTRGLGENQRRHGLNR

SEQ ID NO: 66861 - protein, 52 aa, Setaria italica
  Transcript Sequence Number=SeqID_887
HFSLQDACVISLTRARGRCLVLNYDEIFLFFSPLFCVKSKRFLSEDVESKAL

SEQ ID NO: 66862 - protein, 135 aa, Setaria italica
  Transcript Sequence Number=SeqID_888
  Homolog annotation: Hit_ID=B6UEB3; Match level="QueryCoverage=81%, HitCoverage=30%, E-value=1e-52, Identity=90%"; Hit description=SF16 protein
MGKKGSWFTALKKAFTPSPKEKPTNVHQLVAQYPPAHGHAREKKRWGSFGRPRPHAEPASPAAGALINIPLYREPSSIEKILGDAEMDQQRQYYATTRAQYQITPARPTTLAVGSSAAAPLPQPVAAARERERER

SEQ ID NO: 66863 - protein, 76 aa, Setaria italica
  Transcript Sequence Number=SeqID_889
  Subcellular localization annotation: CTP_CleavageSite=35; ConfidenceScore=5.65e-01
RTRRARSWTPSCAATSSRWRAPPSSSLPPWRSDARVNGRRPGSGLFAGRCFLTSSCSFALLGWGRWIHGFVVHQLD

SEQ ID NO: 66864 - protein, 124 aa, Setaria italica
  Transcript Sequence Number=SeqID_890
GRGGLGMPPPEKFRSGHMPRGAGVPLPRSSLRSDDGSAASGSDMDESSDNEEIEVCSGRYSVDSSPRRDDVTRRTAAPLYRYATMPGQQHYYSTDDGYSDLSSSRDTALPRAKAQPLRRPQARG

SEQ ID NO: 66865 - protein, 330 aa, Setaria italica
  Transcript Sequence Number=SeqID_891
  Gene Ontology: Cellular component=nucleus; Biological process=rRNA processing
  Homolog annotation: Hit_ID=Q3TZX8; Match level="QueryCoverage=98%, HitCoverage=51%, E-value=3e-27, Identity=28%"; Hit description =Nucleolar protein 9
  Pfam annotation: Domain name=NUC156; Domain location=176-302; Score =139.4; E_value=1.1e-38; Accession=PF08160.4; Description=NUC156 domain
RILLNALLPRYGKVGYLDTDVGQPEFAPPGCLSFHVVEEAIADLLNPTLREAEMCCFFGDISSKRDPEAYLNCLFHLYDCFVGKYRCNENEMVPLIVNTPGWVKGAGFDMLVEMLRYICPTIVVQIRITMESKNLPDGMFWLDGEQTGPKMININAAFRDASNRSLLIMKDSCATRERQLVEYLKRCFPSNISLSTNKELAYALASLPPYQVPFSDVTVMHLHHEVPAGEIWRCLNATIVGLAVSSASEATRSTPYCVGLGIIRGVDVQKGLLYVITPVPLERLQSVDLLQQGFIEIPTSLLQVRGYVSPYMSTNVLHKISERDLYAGDG

SEQ ID NO: 66866 - protein, 60 aa, Setaria italica
  Transcript Sequence Number=SeqID_892
  Gene Ontology: Mol. function=protein dimerization activity; Cellular component=nucleus; Biological process=regulation of transcription, DNA-dependent
  Homolog annotation: Hit_ID=Q5IRE8; Match level="QueryCoverage=70%, HitCoverage=20%, E-value=1e-13, Identity=85%"; Hit description=ABRE -binding factor Embp-2 (Fragment)
DQLKKACEDMKAENSQLMGEMEQSEAPSVVTTLSIQIDTSKAHHGNNDQHHNKNNNDNKG

SEQ ID NO: 66867 - protein, 88 aa, Setaria italica
  Transcript Sequence Number=SeqID_893
SSRSSQEPLKTHRDQRQDRIFQPPKLRINSESTDTHSQKKNCLFCRTARTGQSNPSWLVSFLILPSFESFKYYGSRTMPGTGNNACTA

SEQ ID NO: 66868 - protein, 211 aa, Setaria italica
  misc_feature (118)..(118): Xaa can be any naturally occurring amino acid
  Transcript Sequence Number=SeqID_894
  Gene Ontology: Cellular component=ribosome
  Homolog annotation: Hit_ID=Q8H957; Match level="QueryCoverage=65%, HitCoverage=37%, E-value=8e-12, Identity=34%"; Hit description=A protein
RPYLVGVVRFIPLKKTNAQIPGEVLLISYNHHHLLHRNKIFILLDLLRTLHQSLRHRHHWHKDNPQLLPKWCAYVAQLEKENNQSQLPIHVDDDIGTEHPIGRDAAKASARRKRLFKXFAILEDNIDKIVVVTQERKQACEKTTEAHLEISRMRLKAAQEEKEAKLLQVKAAVYDSLLQQDTSQMIEESKARRDKTLTVMEKKLFSNNDEV

SEQ ID NO: 66869 - protein, 509 aa, Setaria italica
  misc_feature (220)..(220): Xaa can be any naturally occurring amino acid
  Transcript Sequence Number=SeqID_895
  Gene Ontology: Mol. function=catalytic activity; Cellular component =chloroplast envelope; Biological process=metabolic process
MAPALTSNPPSFRPISSPLRRRAATVLCRAGKPGKDSGADDDAAPKKIPGLFADFGKLTDAKSLIPALASPAAGSLFAGGGRGRKDPQTVFVAGATGQAGVRIAQTLLRQGFAVRAGVPDLASAQELARLAAAYRLISPAEARRLNAVESGFDDPEAIAKSIGPAAKVVVTVGPAEKGPEGGAVTTEDALRVVQAADLASAAHVVVVYDKGSDGSFGGGXGSTYNVLDGFTTFFNYIFSRVQTLTLSQFLAKVVETDVSYTLVKASLTDDYSPESSYALVLAKEGASSSTTSTTDTGKVSKSQIAALVADVFSNVAVAENKVVEVSTNSSATSKPTAEAFVAIPEDSRRKEYQEAAAKAQAEEEALASQRASEAEAAASKLEAKAKKAPTEEEAPSEEAAASPVNGAQASLENLLSRAKGISTDFSWEKFSTQLAEATTPRTSTEKEPKAEIATVRGQAKAKKLAPQRAVVKPAAQKVKQQPKQPESKPEVRPVFGGLFKQETVYVDDD

SEQ ID NO: 66870 - protein, 122 aa, Setaria italica
  Transcript Sequence Number=SeqID_896
  Gene Ontology: Cellular component=cell wall
  Homolog annotation: Hit_ID=B6TWE7; Match level="QueryCoverage=95%, HitCoverage=35%, E-value=8e-26, Identity=54%"; Hit description=PHI-1
  Pfam annotation: Domain name=Phi_1; Domain location=1-122; Score =24.6; E_value=2e-11; Accession=PF04674.4; Description=Phosphate -induced protein 1 conserved region
RRRVRNNSGGRCADVCAYPFALPSYMSRSGMAALRPPNGDAGVDGMVSVIAHELAELATNPLINAWYAGEDPTAPTEIADLCEGVYGTGGGGGYAGKVAVDKQGRSWNVNGRKGRKFLVQWL

SEQ ID NO: 66871 - protein, 107 aa, Setaria italica
  misc_feature (98)..(98): Xaa can be any naturally occurring amino acid
  Transcript Sequence Number=SeqID_897
  Homolog annotation: Hit_ID=Q67UW7; Match level="QueryCoverage=96%, HitCoverage=11%, E-value=1e-16, Identity=39%"; Hit description =Putative pentatricopeptide (PPR) repeat-containing protein
NGCMVDLLGRGGLLEEAEALIADMNVEPDIVIWRSLLSACLVHRNDRLAEIAGKEILKREPGDDGVYVLLWNMFASSNKWREAREMRKEMLSRKVFKXPGCSWTAPS

SEQ ID NO: 66872 - protein, 183 aa, Setaria italica
  Transcript Sequence Number=SeqID_898
  Homolog annotation: Hit_ID=B9RFY8; Match level="QueryCoverage=86%, HitCoverage=19%, E-value=1e-30, Identity=45%"; Hit description =Pentatricopeptide repeat-containing protein, putative
MGQTEASALGNKPLVESNSFLSVLGIGSTVPKQESRREIEICETKGSSTKHLCNISMPLTGSHRHHKWMGPAIRMSLPSFSGQTEDHPDLLKYSCQVECRVRPVKPARIWNPTTTELQECSDGKINSAGSNTLADSYAQSQSISVLLSKPIFALEFSSLRMHVDAPKIVVPHCKKEEVGYSST

SEQ ID NO: 66873 - protein, 45 aa, Setaria italica
  Transcript Sequence Number=SeqID_899
HLSAAQVKCTRETYPDKEVQFWSWKLITSIDKSCLLLLTHKSLEA

SEQ ID NO: 66874 - protein, 240 aa, Setaria italica
  Transcript Sequence Number=SeqID_900
  Gene Ontology: Cellular component=membrane
  Homolog annotation: Hit_ID=Q39075; Match level="QueryCoverage=85%, HitCoverage=43%, E-value=5e-55, Identity=49%"; Hit description=HYP1 protein
  Pfam annotation: Domain name=DUF221; Domain location=2-149; Score= -81.2; E_value=4.7e-06; Accession=PF02714.7; Description=Domain of unknown function DUF221
YGSLYQLYTITKLVFVFCCVGLFFIAYVVTSWTSITSELTQTAALFCHLLGKCAKCCRRDDSKAPSMPYHSEIPRVLLFGLLGLTYFIVAPLILPFVLVYFCLGYFIFRNQLFNVYAPKYDTGGKFWPIVHNTTIFTLVVMHILAIGVFGIKKLPLASSLLLPLPVLTFLFNEFCRNRFLPIFEAYSTESLIKKDREEQNKPEMPEFFSNLVTAYRDPALKPTQRSSNSDERTAPLLATM

SEQ ID NO: 66875 - protein, 645 aa, Setaria italica
  misc_feature (509)..(509): Xaa can be any naturally occurring amino acid
  Transcript Sequence Number=SeqID_901
  Gene Ontology: Cellular component=membrane
  Homolog annotation: Hit_ID=Q39075; Match level="QueryCoverage=73%, HitCoverage=99%, E-value=1e-123, Identity=47%"; Hit description=HYP1 protein
  Pfam annotation: Domain name=DUF221; Domain location=228-554; Score =369.8; E_value=5.1e-108; Accession=PF02714.7; Description=Domain of unknown function DUF221
HAAAGLDGVVFIRIFVFSIRVFAAAAVLGVGVLLPVNFLGDQLREIDFSDLPYKSIDLFSVSNVQDGSKKLWLHFSAVYIMTAITCYLLYHEYKYISCKRLEYFMTSKPLPQHFTVLVRAIPVSDGVSVSDAVDKFFREYHSSTYLSHTVVHQTGKLRRLLNDAENICTKLTNLKYVHRSSGDAPRKFLGLFGRNDLLGQYQKRLEDVEENVRLEQSDATRRQEIPAAFVSFRSRYGAANAIYIRQSDKPTEWQTEHAPDPHDVYWPFFSTSFMERWIAKFVVFVASILLILVFLLVVAFVQGLTYLEQLKQWLPFLRNILEIAVVSQLVTGYLPSVILLFISSYVPSIMKLFSTMQGFVSVSGIERSACNKMLRFTIWTVFFANVLTGTALSKAEIFLNPKEIPSKLAVLVPAQASFFIAYVVTSWTSITSELTQTAALFCHLLGKCAKCCRRDDSKAPSMPYHSEIPRVLLFGLLGLTYFIVAPLILPFVLVYFCLGYFIFRNQNLXLQMVQMQLFNVYAPKYDTGGKFWPIVHNTTIFTLVVMHILAIGVFGIKKLPLASSLLLPLPVLTFLFNEFCRNRFLPIFEAYSTESLIKKDREEQNKPEMPEFFSNLVTAYRDPALKPTQRSSNSDERTAPLLATM

SEQ ID NO: 66876 - protein, 162 aa, Setaria italica
  misc_feature (23)..(23): Xaa can be any naturally occurring amino acid
  Transcript Sequence Number=SeqID_902
  Gene Ontology: Mol. function=protein serine/threonine kinase activity; Cellular component=plasma membrane; Biological process =protein amino acid phosphorylation
  Homolog annotation: Hit_ID=B6SWH3; Match level="QueryCoverage=98%, HitCoverage=22%, E-value=1e-64, Identity=76%"; Hit description =Lectin-like receptor kinase 7
  Pfam annotation: Domain name=Lectin_legB; Domain location=1-141; Score=60.0; E_value=8.7e-15; Accession=PF00139.11; Description =Legume lectin domain
SLPSQYLGLFSAADDGNANQTNXFAVEFDTVQDFEFEDINGNHVGVDLNSLISNKSASAEPVNLKAGDTVAWIDYDGAARLLNVSIANGTSPSGVVNKPAKPLISFPVDLSGVLRDQMYVGFSASTGVLASSHYVRGWSFRLGGGAAPRLDVSSLPALPRPD

SEQ ID NO: 66877 - protein, 313 aa, Setaria italica
  misc_feature (27)..(27): Xaa can be any naturally occurring amino acid
  misc_feature (125)..(125): Xaa can be any naturally occurring amino acid
  misc_feature (150)..(150): Xaa can be any naturally occurring amino acid
  misc_feature (296)..(296): Xaa can be any naturally occurring amino acid
  Transcript Sequence Number=SeqID_903
  Gene Ontology: Mol. function=protein tyrosine kinase activity; Biological process=protein amino acid phosphorylation
  Homolog annotation: Hit_ID=Q8VZG8; Match level="QueryCoverage=100%, HitCoverage=52%, E-value=8e-50, Identity=31%"; Hit description =Leucine-rich repeat receptor-like protein kinase
  Pfam annotation: Domain name=LRR_1; Domain location=10-32; Score=9.0; E_value=5.7; Accession=PF00560.25; Description=Leucine Rich Repeat
  Pfam annotation: Domain name=LRR_1; Domain location=106-128; Score =9.4; E_value=4.9; Accession=PF00560.25; Description=Leucine Rich Repeat
  Pfam annotation: Domain name=LRR_1; Domain location=130-152; Score =15.7; E_value=0.19; Accession=PF00560.25; Description=Leucine Rich Repeat
  Pfam annotation: Domain name=LRR_1; Domain location=154-177; Score =14.2; E_value=0.55; Accession=PF00560.25; Description=Leucine Rich Repeat
  Pfam annotation: Domain name=LRR_1; Domain location=178-200; Score =6.4; E_value=18; Accession=PF00560.25; Description=Leucine Rich Repeat
  Pfam annotation: Domain name=LRR_1; Domain location=202-223; Score =8.8; E_value=6.2; Accession=PF00560.25; Description=Leucine Rich Repeat
  Pfam annotation: Domain name=LRR_1; Domain location=249-271; Score =13.2; E_value=0.92; Accession=PF00560.25; Description=Leucine Rich Repeat
  Pfam annotation: Domain name=LRR_1; Domain location=273-295; Score =16.6; E_value=0.11; Accession=PF00560.25; Description=Leucine Rich Repeat
  Pfam annotation: Domain name=LRR_1; Domain location=34-56; Score =10.0; E_value=3.7; Accession=PF00560.25; Description=Leucine Rich Repeat
  Pfam annotation: Domain name=LRR_1; Domain location=58-80; Score=4.8; E_value=36; Accession=PF00560.25; Description=Leucine Rich Repeat
  Pfam annotation: Domain name=LRR_1; Domain location=82-104; Score =9.9; E_value=3.9; Accession=PF00560.25; Description=Leucine Rich Repeat
  Pfam module annotation: Pfam domain module=LRR_1::LRR_1::LRR_1::LRR _1::LRR_1::LRR_1::LRR_1::LRR_1::LRR_1::LRR_1::LRR_1; Domain location =10-32::106-128::130-152::154-177::178-200::202-223::249-271::273 -295::34-56::58-80::82-104
IPPSLGNLRGLGDLQLSNNRLSGGIPXTLANLTKLNTLYLNENELSGLVPQEIGMLRNLSKLVLSTNQQSGTIPSSLGNLTRLNLLELSENQFVGSIPREVGDMLNLYILSIDDTQISGSIPATXGNLTSLRKLSLFDNVLSGPLPPEFXNLTGLVELNLMNNSLSGELPSDVCKGMNLQDFNVANNMFRGPIPRSLKTCRSLKMLFIAYNQITGDISDFGPYPYLIDANLEANNLHGHLSKAWGFSTNLTSLAMAENMITGSLPSELSNLVKLERLVLHSNNLTGNIPPGLSTLXQLYQLILARNQLSGHIP

SEQ ID NO: 66878 - protein, 51 aa, Setaria italica
  Transcript Sequence Number=SeqID_904
MMSINHTHPSYIFGLFASKTIKPSPDNQKQIKHWISTLITLLSISCCLPPP

SEQ ID NO: 66879 - protein, 441 aa, Setaria italica
  misc_feature (423)..(423): Xaa can be any naturally occurring amino acid
  Transcript Sequence Number=SeqID_905
  Gene Ontology: Mol. function=binding; Cellular component=chloroplast; Biological process=regulation of transcription, DNA-dependent
  Homolog annotation: Hit_ID=Q53NS3; Match level="QueryCoverage=97%, HitCoverage=64%, E-value=1e-176, Identity=74%"; Hit description =Pentatricopeptide, putative, expressed
  Pfam annotation: Domain name=PPR; Domain location=134-168; Score =40.8; E_value=5.4e-09; Accession=PF01535.12; Description=PPR repeat
  Pfam annotation: Domain name=PPR; Domain location=169-203; Score =42.8; E_value=1.3e-09; Accession=PF01535.12; Description=PPR repeat
  Pfam annotation: Domain name=PPR; Domain location=19-53; Score=1.3; E_ value=6.3; Accession=PF01535.12; Description=PPR repeat
  Pfam annotation: Domain name=PPR; Domain location=204-238; Score =30.8; E_value=5.7e-06; Accession=PF01535.12; Description=PPR repeat
  Pfam annotation: Domain name=PPR; Domain location=239-273; Score =28.0; E_value=3.9e-05; Accession=PF01535.12; Description=PPR repeat
  Pfam annotation: Domain name=PPR; Domain location=57-91; Score=18.8; E_value=0.023; Accession=PF01535.12; Description=PPR repeat
  Pfam annotation: Domain name=PPR; Domain location=94-128; Score=34.5; E_value=4.3e-07; Accession=PF01535.12; Description=PPR repeat
  Pfam module annotation: Pfam domain module=PPR::PPR::PPR::PPR::PPR::PP R::PPR; Domain location=134-168::169-203::19-53::204-238::239-273::57- 91::94-128
AIELKDGMLERGLVAPDTQVYAFIMGGFVNAGDGYRAISLYEELKEKLGGGPILDGVVYGNLMKGYFLKGMEKEAMDCYEEVLGEGSNVRFGAVSYNMVLDALGRNGRLEDALKLFDRMCMEHDPPKTIAVNLGSFNVMVDAYCRAERFQDAIEVFGKMAEKRCAPDALSYNNLIDWLGKNELVGEAEGLYEEMAERGVKPDEYTYVLLIESCFKVDRVDDAVGYFNKMFDAGLRPNANAFNKIMGGLVKVDRLDEAQRFFDMMPEKEVKPNIASYELLLKAYVDAARLDDAIKIAKGTLLDENVVFSDEMKALLEGALEKEGRDGDMTKLYEDVEREKAEAAERAAEEKARAEALAKEEEERKKAEAKAKEEAAARASRAAIEAVLGRKREAENEESADGPNVEEAEVVGSNSDTIGVSGEXSEGDEQKKQESVEASSGP

SEQ ID NO: 66880 - protein, 243 aa, Setaria italica
  misc_feature (47)..(47): Xaa can be any naturally occurring amino acid
  Transcript Sequence Number=SeqID_906
  Gene Ontology: Mol. function=transcription regulator activity; Cellular component=nucleus; Biological process=regulation of transcription
  Homolog annotation: Hit_ID=B6UFP4; Match level="QueryCoverage=100%, HitCoverage=57%, E-value=2e-84, Identity=69%"; Hit description=DNA binding protein
  Pfam annotation: Domain name=HLH; Domain location=68-118; Score=37.5; E_value=5.3e-08; Accession=PF00010.18; Description=Helix-loop-helix DNA-binding domain
PNEVMGGDQVQSSNLPADSANESVHSKDKGEESSPATTTGKSKGKGXKETSESQKEDYIHVRARRGQATNSHSLAERLRREKISERMKLLQDLVPGCSKVTGKAVMLDEIINYVQSLQRQVEFLSMKLATVNPRLDLNIEGLLSKDLLRFPGVSSSSLGFSPEMIHPQLQLSQPGLIQGGAAGMANPDVFRRIIQAQLSAKDGSQMPHALNGPFSDVAQMGYPSLGSSAQDLSIRPSQDGFQM

SEQ ID NO: 66881 - protein, 167 aa, Setaria italica
  Transcript Sequence Number=SeqID_907
  Gene Ontology: Mol. function=protein serine/threonine kinase activity; Biological process=protein amino acid phosphorylation
  Homolog annotation: Hit_ID=Q75V57; Match level="QueryCoverage=97%, HitCoverage=45%, E-value=5e-84, Identity=87%"; Hit description =Serine/threonine-protein kinase SAPK9
  Pfam annotation: Domain name=Pkinase; Domain location=1-166; Score =45.3; E_value=3.5e-11; Accession=PF00069.17; Description=Protein kinase domain
  Pfam annotation: Domain name=Pkinase_Tyr; Domain location=1-154; Score=-171.1; E_value=0.024; Accession=PF07714.9; Description =Protein tyrosine kinase
  Pfam module annotation: Pfam domain module=Pkinase::Pkinase_Tyr; Domain location=1-166::1-154
TRISNAGRFSENEARFFFQQLISGVSYCHSMQIVHRDLKLENTLLDGSTAPRLKICDFGYSKSALLHSQPKSTVGTPAYIAPELLMKKEYNGKIADVWSCGVTLYVMLVGGYPFEDPEDPKNFRKTVQKIMGAQYAIPDYVHVSPECRDLLSRIFVVNPDHRITYWS

SEQ ID NO: 66882 - protein, 74 aa, Setaria italica
  Transcript Sequence Number=SeqID_908
DKFELVTSSIYKISTGKHLWHGINKKVMKFSMSMSTPPRNYPQISFVDLKVHNGKQDKLQQQVYDTFQLMFLRR

SEQ ID NO: 66883 - protein, 49 aa, Setaria italica
  Transcript Sequence Number=SeqID_909
MISGNLTNEELAASRCTKAEGPAAGAVAVAAKSPAVPSSRHWPPSTESR

SEQ ID NO: 66884 - protein, 60 aa, Setaria italica
  Transcript Sequence Number=SeqID_910
MISGNLTNEELAASRCTKAEGPAAGAVAVAAKSPAVPSSRHWPPSTESRIVRVSRVFGGK

SEQ ID NO: 66885 - protein, 85 aa, Setaria italica
  Transcript Sequence Number=SeqID_911
EPLTSITKEFTLPPSESAQIASTMASSSAESDGKATLALSELANAPDATHRNSAGGVAKEVAQEQENGAVIDRRLPVLVLYITVV

SEQ ID NO: 66886 - protein, 191 aa, Setaria italica
  misc_feature (186)..(186): Xaa can be any naturally occurring amino acid
  Transcript Sequence Number=SeqID_912
  Gene Ontology: Mol. function=nucleoside-triphosphatase activity; Cellular component=membrane
  Homolog annotation: Hit_ID=B9P510; Match level="QueryCoverage=95%, HitCoverage=29%, E-value=1e-64, Identity=64%"; Hit description=White- brown-complex ABC transporter family (Fragment)
  Pfam annotation: Domain name=ABC2_membrane; Domain location=25-190; Score=20.6; E_value=0.00052; Accession=PF01061.16; Description=ABC-2 type transporter
YSYITFEIIQQGAPLTKKRQATFFTKCAVLTKRSCTNMHRDLGYYWLRFGIYIGICVSIGTIFCNVGYSFASIQARASMIMFTSTLLTMMSIGGFPSFVEDMKIFRKEQLSGHYDATAFVISNTLSSTPYLGIISIIPGAIAYYLTGLQRSFDHFVYFAAVLWACTMLVEGLMMIVAAIVPDFLLXIITGS

SEQ ID NO: 66887 - protein, 294 aa, Setaria italica
  Transcript Sequence Number=SeqID_913
  Gene Ontology: Mol. function=DNA binding; Cellular component=nucleus; Biological process=regulation of transcription, DNA-dependent
  Homolog annotation: Hit_ID=B6SUE3; Match level="QueryCoverage=100%, HitCoverage=100%, E-value=1e-111, Identity=73%"; Hit description=TCP family transcription factor containing protein
  Pfam annotation: Domain name=TCP; Domain location=56-172; Score =135.2; E_value=2e-37; Accession=PF03634.5; Description=TCP family transcription factor
MISGNLTNEELAASRCTKAEGPAAGAVAVAAKSPAVPSSRHWPPSTESRIVRVSRVFGGKDRHSKVRTVKGLRDRRVRLSVPTAIQLYDLQDRLGLSQPSKVVDWLLDAAQHEIDKLPPLQFPPHAQDLVAHLPSSMMAPFANGGGADRASAAANATTGAASAAMVDGDKRHCHGAGIKGLMGLNNPVGLVNGAMPLAHGLYYTAGEPWANGNSVHDQVSHHGTSPQTVAHHSPFSSLLSLAPGPQLVFYSPEGGGFAMKEAADHQFPVDNLDHSQGQLSLSSARSFLHPGSQG

SEQ ID NO: 66888 - protein, 348 aa, Setaria italica
  misc_feature (181)..(181): Xaa can be any naturally occurring amino acid
  misc_feature (337)..(337): Xaa can be any naturally occurring amino acid
  Transcript Sequence Number=SeqID_914
  Gene Ontology: Mol. function=nucleoside-triphosphatase activity; Cellular component=membrane
  Homolog annotation: Hit_ID=B9T0A5; Match level="QueryCoverage=97%, HitCoverage=50%, E-value=1e-100, Identity=53%"; Hit description=ATP -binding cassette transporter, putative
  Pfam annotation: Domain name=ABC2_membrane; Domain location=88-287; Score=82.7; E_value=1.4e-21; Accession=PF01061.16; Description=ABC-2 type transporter
LVWFVQFFDANGYPCPLRRNPSDHFLTMINKDFEEFDEGSTLMLPCADEVIQTLVDSLISRGSLGMKNEAFTMEGAPLTKKRQATFFTKCAVLTKRSCTNMHRDLGYYWLRFGIYIGICVSIGTIFCNVGYSFASIQARASMIMFTSTLLTMMSIGGFPSFVEDMKVQMSIPMEICLSFRXGIISIIPGAIAYYLTGLQRSFDHFVYFAAVLWACTMLVEGLMMIVAAIVPDFLLGIITGSGIQGLLMLNAGFFRLPSDLPKPIWKYPTYYISYHKYATQGLYKNEFLGLAFENLGGEGLTISGEYILKTYLQVEMGYSKWVDLAILFAMVLIYRVXFLVIIKVGEGK

SEQ ID NO: 66889 - protein, 403 aa, Setaria italica
  misc_feature (381)..(381): Xaa can be any naturally occurring amino acid
  Transcript Sequence Number=SeqID_915
  Gene Ontology: Mol. function=nucleoside-triphosphatase activity; Cellular component=membrane
  Homolog annotation: Hit_ID=B9T0A5; Match level="QueryCoverage=93%, HitCoverage=53%, E-value=1e-128, Identity=59%"; Hit description=ATP -binding cassette transporter, putative
  Pfam annotation: Domain name=ABC2_membrane; Domain location=119-331; Score=138.0; E_value=2.9e-38; Accession=PF01061.16; Description=ABC -2 type transporter
PAPWQWRLSPSTIAADAAPVVAYGRMVYFGPAAEAIEFFDANGYPCPLRRNPSDHFLTMINKDFEEFDEGSTLMLPCADEVIQTLVDSLISRGSLGMKNEAFTMEGAPLTKKRQATFFTKCAVLTKRSCTNMHRDLGYYWLRFGIYIGICVSIGTIFCNVGYSFASIQARASMIMFTSTLLTMMSIGGFPSFVEDMKIFRKEQLSGHYDATAFVISNTLSSTPYLGIISIIPGAIAYYLTGLQRSFDHFVYFAAVLWACTMLVEGLMMIVAAIVPDFLLGIITGSGIQGLLMLNAGFFRLPSDLPKPIWKYPTYYISYHKYATQGLYKNEFLGLAFENLGGEGLTISGEYILKTYLQVEMGYSKWVDLAILFAMVLIYRVXFLVIIKVGEAVRPMIKCISLKV

SEQ ID NO: 66890 - protein, 102 aa, Setaria italica
  misc_feature (81)..(81): Xaa can be any naturally occurring amino acid
  Transcript Sequence Number=SeqID_916
YQTKQLEQTKISLEEAKLEIATLRQANKGLEASAAAAASRRCGVAEQRSVRDLMFGGADEEIRVLRGELRTAMQGEERSRXADDLSVALSDVTMGRPKQVKV

SEQ ID NO: 66891 - protein, 768 aa, Setaria italica
  Transcript Sequence Number=SeqID_917
  Gene Ontology: Mol. function=phosphatidylinositol phosphate kinase activity; Biological process=phosphatidylinositol metabolic process
  Homolog annotation: Hit_ID=Q6ZLF2; Match level="QueryCoverage=95%, HitCoverage=40%, E-value=1e-137, Identity=39%"; Hit description=1 -phosphatidylinositol-3-phosphate 5-kinase-like
  Pfam annotation: Domain name=Cpn60_TCP1; Domain location=22-525; Score=-238.5; E_value=0.00089; Accession=PF00118.16; Description=TCP- 1cpn60 chaperonin family
WMPPEAADKEDEAESFDDDDYSDGIKWGHSSFPSPGKEHDASPSNPREEREKAMLEAMNGQLKILVSRFLASAGISSSKEEGSDSWLDIVTSLSWEAALLIKPDGTMGKDMDPGSYIKVKCIASGTRRQSEVIKGLVFKKNAAHKHMPTSYHSPRLLLLKGVLGHSDVGLSSFNSMDQERTFLERAIGKMMEMCSPNVVMVEKTVSRNIQELLLKEGVTLILDMKLNRLERIARCTGSPIISFSEFLNKPKLKQCDYFHIEKFTEEHNTTSEGGKVPSKTLMFLEGFPCPLGCTILLKGANSEELKKVKQVMHFTVFAAYHLILETSFFEDQRVFLNDKNIPKENSVSSMEGLSTTAFDLAALGGAIPNFPSHDDSPALRLFHPTSNSYVDVNKTLRSPRNLDAPSSITSSSDLQEGASIRYDSSPSTNSERIASGVPGPLRKLFADNLCHQNIYLPVTSLQETNDKQKEVRVQSSQETLSNGFHTPKVEESAVSSENEESTNGTQKQEITQAIMRTGSSASDKSGESPATVENGAHSGTSIVIKERDVDDDQADEALDSHSILILMSSQCTEKQIICEQSHLTRIKYYGNFDVSLGRYLQDILQNQKLSCSSCGEPPESHMYSYTHRNGNLTVLVKRLEPQHHLPGESEGKIWMWTRCSRCDHEHGISKSTPRVLISAEARNLSFGKFLELSFSSHSAARRLSICGHLVNRDCLRFFGLGSRVAMFRYSSVKIYTTCKPQPTLQFINPIRQDWFEGQRRHVHARGVT

SEQ ID NO: 66892 - protein, 98 aa, Setaria italica
  Transcript Sequence Number=SeqID_918
QLPRPLKRNDTRTEGLEFHPDAAAEISRGTRASSADLPRRAAFPAGLPTIPSNIPVIYGFHCSLASLLPSNLASLPRYSKSCRPAALLACCGVTSSPA

SEQ ID NO: 66893 - protein, 73 aa, Setaria italica
  Transcript Sequence Number=SeqID_919
  Gene Ontology: Mol. function=endoribonuclease activity; Cellular component=extracellular region; Biological process=response to stress
  Homolog annotation: Hit_ID=B6TYW3; Match level="QueryCoverage=72%, HitCoverage=20%, E-value=3e-20, Identity=85%"; Hit description =Ribonuclease 1
MKTAIAFVLLFSLLAVSSTAEKFDFFYLVQQWPGSFCDTRQSCCFPDTGKPAADFGIHGLWPNYAKCRGSQLQ

SEQ ID NO: 66894 - protein, 124 aa, Setaria italica
  Transcript Sequence Number=SeqID_920
  Gene Ontology: Mol. function=endoribonuclease activity; Cellular component=extracellular region; Biological process=response to stress
  Homolog annotation: Hit_ID=B6TYW3; Match level="QueryCoverage=99%, HitCoverage=50%, E-value=2e-42, Identity=69%"; Hit description =Ribonuclease 1
  Pfam annotation: Domain name=Ribonuclease_T2; Domain location=7-124; Score=-72.0; E_value=0.008; Accession=PF00445.10; Description =Ribonuclease T2 family
KFIAPGQWPGSYCDTWRGCCFPDSGKPAADFGIHGLWPNYAKCRGSQLQGLARAVLVEDAAALFSAVGRRGRCWPEYCDDGNTLSPWEIRDLVASLDRNWPTLSCKSGRSFEFWSYEWKKHGTC

SEQ ID NO: 66895 - protein, 250 aa, Setaria italica
  Transcript Sequence Number=SeqID_921
  Gene Ontology: Mol. function=endoribonuclease activity; Cellular component=cytoplasm; Biological process=response to stress
  Homolog annotation: Hit_ID=B6TYW3; Match level="QueryCoverage=92%, HitCoverage=91%, E-value=7e-94, Identity=71%"; Hit description =Ribonuclease 1
  Pfam annotation: Domain name=Ribonuclease_T2; Domain location=23-239; Score=227.6; E_value=3.2e-65; Accession=PF00445.10; Description =Ribonuclease T2 family
MKLAIAFGLLLSLLAVSAAAERFDFFYFVQQWPGSYCDTWRGCCFPDSGKPAADFGIHGLWPNYAQCHGRYGLARAVLGDDAFFSIVGRRGRCWPQYCGGDYDDNALRPWEIRDLIASLERSWPTLSCKSGRSFEFWSYEWKKHGTCSNLEPHDYFARALALKAAHNLTAILAGAGIVPSATETYSVSSVSDAITQGTGFTANLDCNRDADGESQLYQVFMCVDREAKRLIDCPLHKRSKCSDQVKLPLF

SEQ ID NO: 66896 - protein, 64 aa, Setaria italica
  Transcript Sequence Number=SeqID_922
  Homolog annotation: Hit_ID=B6SR01; Match level="QueryCoverage=70%, HitCoverage=19%, E-value=9e-16, Identity=93%"; Hit description=Heme -binding protein 2
  Subcellular localization annotation: CTP_CleavageSite=37; ConfidenceScore=5.22e-01
IQQALNLFMLLLAARLFQYLMGANLNSSRIRMTAPVLTSVVPGAGPLHSSAYFVRLYLPAKFQK

SEQ ID NO: 66897 - protein, 209 aa, Setaria italica
  Transcript Sequence Number=SeqID_923
  Gene Ontology: Cellular component=plasma membrane
  Homolog annotation: Hit_ID=B6SR01; Match level="QueryCoverage=90%, HitCoverage=84%, E-value=9e-96, Identity=88%"; Hit description=Heme -binding protein 2
  Pfam annotation: Domain name=SOUL; Domain location=19-200; Score =290.3; E_value=4.2e-84; Accession=PF04832.4; Description=SOUL heme -binding protein
MALSLPLLLVALLLPAAGGAETPQYTKVHAESDFEVRLYHDTVWMSAPTPDIPSFHVATKLGFHRLFQYLMGANLNSSRIRMTAPVLTSVVPGAGPLHSSAYFVRLYLPAKFQASPPVPLPELNLHPDRWPSHCIAVRSFSGYARDKNVVEEAEKLAMSLSRSPWVNSTNYPSKNAYSIAQYSSPFRFIGRVNEVWFDVDCKSTGVETY

SEQ ID NO: 66898 - protein, 51 aa, Setaria italica
  Transcript Sequence Number=SeqID_924
FIFSIRECISSEFNKMLFITDQPGESTSKASYNTLGQQYTEATNLTCLFNS

SEQ ID NO: 66899 - protein, 64 aa, Setaria italica
  Transcript Sequence Number=SeqID_925
MLILELGIWVLPFTLLLAPARRMVRLVAELQRIFLAVACRRAPPPTLGEVWSRLDRLDSAIVVP

SEQ ID NO: 66900 - protein, 50 aa, Setaria italica
  Transcript Sequence Number=SeqID_926
LLIPLSLLQVALDLPNFLLIGRSSGVPPRTVRTGIIDIMISFFMISCNDI

SEQ ID NO: 66901 - protein, 69 aa, Setaria italica
  Transcript Sequence Number=SeqID_927
TICFKKNSRILVGLKKICIQMSIFLHSPFSVQYWCQGNRLCYCFFLVFRNCEISFIYNKHHQVSVPLGL

SEQ ID NO: 66902 - protein, 183 aa, Setaria italica
  Transcript Sequence Number=SeqID_928
  Gene Ontology: Cellular component=chloroplast
MLNSTVLRRLTKFAKDADSEFDLIGQNAMKELEAVGDQILERLDSKMQAFEETAEVQRQEIEMNDKVLEDFEDWIEKEKNEGMFFKSLGKVKPRNKKEIKVKAKVEAQKVKEIAKESAGSKTRMNIYLGLMAILGLTIANAVFATPEVEWRKVAALGLIFIGLVAQVIYEQDMSPPKAEKKEK

SEQ ID NO: 66903 - protein, 171 aa, Setaria italica
  Transcript Sequence Number=SeqID_929
  Gene Ontology: Cellular component=chloroplast
  Subcellular localization annotation: CTP_CleavageSite=53; ConfidenceScore=5.52e-01
QWRLVGLDIFTNLRTNKKGGVHSSPSIQSSLPSLRRSSPFRRALLGRKRSFICAGGSEDAEFDSSPPPGGDKRQQEVLAKIAMLQAQKVRISDFLDERSAYLTKFAKDADSEFDLIGQNAMKELEAVGDQVSISGNEKLSSCLFTWADGNTWAYNRECCLCYTRGGVEEGW

SEQ ID NO: 66904 - protein, 261 aa, Setaria italica
  Transcript Sequence Number=SeqID_930
  Gene Ontology: Mol. function=nucleic acid binding; Cellular component= chloroplast; Biological process=mRNA processing
  Homolog annotation: Hit_ID=B6SUJ3; Match level="QueryCoverage=67%, HitCoverage=64%, E-value=5e-82, Identity=91%"; Hit description =Plastid-specific 30S ribosomal protein 2
  Pfam annotation: Domain name=RRM_1; Domain location=151-218; Score =76.0; E_value=1.4e-19; Accession=PF00076.14; Description=RNA recognition motif. (a.k.a. RRM, RBD, o
  Pfam annotation: Domain name=RRM_1; Domain location=57-126; Score =83.8; E_value=6e-22; Accession=PF00076.14; Description=RNA recognition motif. (a.k.a. RRM, RBD, o
  Pfam module annotation: Pfam domain module=RRM_1::RRM_1; Domain location=151-218::57-126
SGLPYFCAPPLPPLRSPRRHHRVGLRLRFPAAAVAASEAQAAPAAAEELQGEKRRKLYVANLPWSVPAPEVEKLFAQCGTVKDVELIKGKDGRNRGFAFVTMSTAEEAAAAVEKLNSHEVMGRKIKVEFSKSFRKPAPTPPPGTIIERHKLYVSNLPWKARAPNVKEFFSKFNPLSANVIFDNGKAAGYGFVSFGTKEEAEAALSELDGKELMGRPVRLNWKESGDDKVEVVKADAEVETVNTEGASADDASDDGGEDKQE

SEQ ID NO: 66905 - protein, 328 aa, Setaria italica
  Transcript Sequence Number=SeqID_931
  Gene Ontology: Mol. function=phosphotransferase activity, alcohol group as acceptor; Biological process=oxidation reduction
  Homolog annotation: Hit_ID=B6TCV6; Match level="QueryCoverage=94%, HitCoverage=94%, E-value=1e-157, Identity=88%"; Hit description=ATP binding protein
  Pfam annotation: Domain name=PRK; Domain location=123-327; Score= -15.2; E_value=3.9e-06; Accession=PF00485.10; Description =Phosphoribulokinase  Uridine kinase family
  Subcellular localization annotation: CTP_CleavageSite=46; ConfidenceScore=5.60e-01
MELLSSSMASTAAQAQVQQRLLRPPSCCRPGPGAAGFVTCRSYVVRSKLKMRAVPPIRASFQPAFLQQPSFQDANMKKRYVPCYQRQKAPQIEARSMEEVYDTLAEHLLSVLKNIEHLDSKYIVGLAGPPGAGKSTVASEVVRRVNMLWSHAKGSGALLPTEEIAAMLPMDGFHLYRAQLDAMENPKEAHARRGAPWTFNPSLFLKCLQTLRTEGSVYAPSFDHGVGDPVENDIFVKPQHKIVIVEGNYLLLEEDVWREIRGLFDEKWFIDIDIDISMQRVLKRHIATGKEPDVAAWRISYNDRPNAELIMESRKDADLVIRSVDFSS

SEQ ID NO: 66906 - protein, 126 aa, Setaria italica
  Transcript Sequence Number=SeqID_932
  Gene Ontology: Cellular component=plasma membrane
  Homolog annotation: Hit_ID=Q9C6N3; Match level="QueryCoverage=49%, HitCoverage=5%, E-value=8e-10, Identity=58%"; Hit description =Transposon protein, putative
RGGNHDLLNADGERNDYDWLLTPPETPLFHSLDDDEDHRIGTAHRGRTQIKPISISRSSTMENTRRSNRSSASPNRLSPSPRSYSSTVLTRTRSSNSSSRCSPPLALQPTTPPRRSSSPASKTLTP

SEQ ID NO: 66907 - protein, 70 aa, Setaria italica
  Transcript Sequence Number=SeqID_933
GVRVTTADLQWLRRRGLVSKLLQLQGNTHRLSGTGVGALAGFFSAAAAASASDGGSNNNACPAYPWPQDG

SEQ ID NO: 66908 - protein, 59 aa, Setaria italica
  Transcript Sequence Number=SeqID_934
AFCSHSSSSTLLIYVALSMQNQMLEGLRLSNLYTADELKKRMALPTPVWLQLLQPYMRN

SEQ ID NO: 66909 - protein, 194 aa, Setaria italica
  Transcript Sequence Number=SeqID_935
  Pfam annotation: Domain name=Cytochrom_C1; Domain location=73-192; Score=-145.8; E_value=0.005; Accession=PF02167.7; Description =Cytochrome C1 family
  Subcellular localization annotation: CTP_CleavageSite=57; ConfidenceScore=5.11e-01
ACLIAGSQRPAISGVRVTTADLQWLRRGGLVSKLLQLQGNTHRLSGTGVGALAGFFSAAAAASASDGGSNNNACPAYPWPQDGARGGPKVFMQHDCAACHSMLPYAGLAEAAAAGGGEVEARAAEIVVVHEEAQPEPAAATALHGGACPPDLSVIAKMLEGLRLSNLYTADELKKRMALPTPVWLQLLQPYMRN

SEQ ID NO: 66910 - protein, 164 aa, Setaria italica
  misc_feature (6)..(6): Xaa can be any naturally occurring amino acid
  Transcript Sequence Number=SeqID_936
  Gene Ontology: Mol. function=DNA binding; Cellular component=nucleus; Biological process=regulation of transcription
AAAAGXPQPQTGTADTPLSSSWQHGADDGLYASPGDACWPAEYYSAAGDHQLLNNPAVPELSSTTAGSSSPSSDSGAGAQTWLAPVGEAEWFTTACDASSAAVAMHDTVLAGHQQQQQPCLLGETWTSSELPELGVADFEIGSFDVESIWSMDDNLWYTQTQGV

SEQ ID NO: 66911 - protein, 79 aa, Setaria italica
  Transcript Sequence Number=SeqID_937
TVIQCVTRVSNYNLGNLVYATQAFYMKSKANFIWFASFYILVYHFWHMHAFYMSILHMQVKWFHAFNFSCSIGNYMIMW

SEQ ID NO: 66912 - protein, 76 aa, Setaria italica
  Transcript Sequence Number=SeqID_938
PPGVGLGRLASDAGRCHMTRGELNRQLKVRLGKLHGHQKWRPWMLVGKLRSLKRERKPPLAPSCFCIIFGSSGMSN

SEQ ID NO: 66913 - protein, 107 aa, Setaria italica
  Transcript Sequence Number=SeqID_939
  Pfam annotation: Domain name=F-box; Domain location=4-51; Score=34.6; E_value=4e-07; Accession=PF00646.25; Description=F-box domain
MEDTPIRRLPEDTIADILLRLPAKSILRSGATCKAWRRITTAQHFLVARARRRQPASILAHTYLDAAPWACSSDLLAGFSSEDVALDALPVSSPRTTDSASSATPPR

SEQ ID NO: 66914 - protein, 142 aa, Setaria italica
  Transcript Sequence Number=SeqID_940
  Gene Ontology: Mol. function=transferase activity, transferring glycosyl groups; Biological process=metabolic process
  Homolog annotation: Hit_ID=Q6Z381; Match level="QueryCoverage=98%, HitCoverage=28%, E-value=2e-30, Identity=47%"; Hit description =Putative UDP-glucosyltransferase
GAEATSDVPPEKVDLLKIAFDGLAAPFAGFLTAACGEEAGEGHGRRPDWVVVDFAHHWLPPIADEHRVPCALFFIFPAAFVAFIGPKELNDAHPRTAAEHFMVPPPWIPPPSPIAYRRQEAEWMAGAFQPNASGVADGARQL

SEQ ID NO: 66915 - protein, 136 aa, Setaria italica
  Transcript Sequence Number=SeqID_941
  Gene Ontology: Mol. function=acyltransferase activity; Cellular component=integral to membrane; Biological process=metabolic process
  Homolog annotation: Hit_ID=B9S2F2; Match level="QueryCoverage=99%, HitCoverage=26%, E-value=4e-53, Identity=71%"; Hit description=ER glycerol-phosphate acyltransferase
DRKADALRNAFGDVAPDVGLGDRRTDYPFMRLCKEGYVVPAAPRLKPVPREDLPRPVVFHDGRLVQKPSPALALLTVLWIPIGFLLACLRIAAGALLPMRVVYHAFRALGVRVTIKGNPPPPASRETGQTGVLFIC

SEQ ID NO: 66916 - protein, 168 aa, Setaria italica
  Transcript Sequence Number=SeqID_942
  Gene Ontology: Mol. function=protein serine/threonine kinase activity; Cellular component=plasma membrane; Biological process =protein amino acid phosphorylation
  Homolog annotation: Hit_ID=Q53ME4; Match level="QueryCoverage=99%, HitCoverage=47%, E-value=8e-75, Identity=52%"; Hit description =Leucine Rich Repeat family protein, expressed
  Pfam annotation: Domain name=LRR_1; Domain location=112-135; Score =0.6; E_value=2.4e+02; Accession=PF00560.25; Description=Leucine Rich Repeat
  Pfam annotation: Domain name=LRR_1; Domain location=137-159; Score =19.1; E_value=0.018; Accession=PF00560.25; Description=Leucine Rich Repeat
  Pfam annotation: Domain name=LRR_1; Domain location=15-38; Score=8.2; E_value=8.3; Accession=PF00560.25; Description=Leucine Rich Repeat
  Pfam annotation: Domain name=LRR_1; Domain location=40-62; Score=3.5; E_value=67; Accession=PF00560.25; Description=Leucine Rich Repeat
  Pfam annotation: Domain name=LRR_1; Domain location=64-86; Score =14.6; E_value=0.41; Accession=PF00560.25; Description=Leucine Rich Repeat
  Pfam annotation: Domain name=LRR_1; Domain location=88-110; Score =15.3; E_value=0.26; Accession=PF00560.25; Description=Leucine Rich Repeat
  Pfam module annotation: Pfam domain module=LRR_1::LRR_1::LRR_1::LRR _1::LRR_1::LRR_1; Domain location=112-135::137-159::15-38::40-62::64 -86::88-110
RLFVGSLVAASSLPALRHVNVSGNQFGGGLDGWDFASLPALEVFDAYDNNFSAPLPLGVAALPRLRYLDLGGNYFTGEIPAAYGGMLAVEYLSLNGNNLNGRIPPELGNLTTLRELYLGYYNAFDGGVPPELGRLRNLTVLDISNCGLTGRIPGELGALSSLETLFLH

SEQ ID NO: 66917 - protein, 129 aa, Setaria italica
  Transcript Sequence Number=SeqID_943
  Gene Ontology: Mol. function=amino acid transmembrane transporter activity; Cellular component=integral to membrane; Biological process=amino acid transport
  Homolog annotation: Hit_ID=B9HJ65; Match level="QueryCoverage=76%, HitCoverage=90%, E-value=3e-24, Identity=54%"; Hit description=Amino acid transporter (Fragment)
MEEAQHGYSPLAGDDGAAAIRGAAGEGDDVKLRLLGYKPQLRRGLSVVSNFAVTFSIVSVVTGVTTLFGTGLQFGGPATMVYGWPIAGAFTLAVGLAMAEICSAYPTSGGLYFWSAKLCARRRWGPFAA

SEQ ID NO: 66918 - protein, 67 aa, Setaria italica
  Transcript Sequence Number=SeqID_944
  Gene Ontology: Mol. function=nucleic acid binding
VSQQDSTSKTIEPYKPGIVKETHALSSLDIDFSTIPSAWNDDDIVVSDGMSKGSKEIQADERKWKAN

SEQ ID NO: 66919 - protein, 161 aa, Setaria italica
  misc_feature (125)..(125): Xaa can be any naturally occurring amino acid
  Transcript Sequence Number=SeqID_945
  Gene Ontology: Mol. function=nucleic acid binding
ELRTKNKPKETILESSLRNTGSEQNFSLLPQISQGNAYRNGPAFQSLENDFSSSNSLAVSDMATTGTSWSKISAPPDFQHQQELASPFSSGFSSLDRPKSPSRFPTAFSSGFSSLDGSNQVYGSXYPETLLRDNVLGAISNHYQAPFGRHASDVEFNDPAI

SEQ ID NO: 66920 - protein, 146 aa, Setaria italica
  misc_feature (137)..(137): Xaa can be any naturally occurring amino acid
  Transcript Sequence Number=SeqID_946
  Gene Ontology: Mol. function=nucleic acid binding
  Subcellular localization annotation: CTP_CleavageSite=30; ConfidenceScore=5.12e-01
PQSNSFSSSSTTSSTRIPSAWNDDTSTAPTMSEGWQVPEQDGTSKTVQPYKPGIAKETQAVSSLESSVDIDFSTIPSAWNDDDIVVSDGMSKGSDEIQAGNENGKLTHLASKSPISPKKDTTVNITSKSPSDSVSSXRISKSDVKT

SEQ ID NO: 66921 - protein, 108 aa, Setaria italica
  Transcript Sequence Number=SeqID_947
  Subcellular localization annotation: CTP_CleavageSite=62; ConfidenceScore=5.04e-01
KLYQRIITKNLIQPACLWNTTKTRGEPSKMLIHSISLVNLCLLSFFLNSFPSQVTPQLQTTNHMYKRCLSTSPSVALLFYMHLYFQLASHINEQNEPGNRATNQMVRL

SEQ ID NO: 66922 - protein, 63 aa, Setaria italica
  Transcript Sequence Number=SeqID_948
VEEGYKSGMLTRRINLLPVCMYQLDWVNEKVIIKHTVPPQHPQASFSCFVLFETSSFHSLRIS

SEQ ID NO: 66923 - protein, 621 aa, Setaria italica
  misc_feature (34)..(34): Xaa can be any naturally occurring amino acid
  Transcript Sequence Number=SeqID_949
  Gene Ontology: Mol. function=nucleic acid binding; Cellular component= cytoplasm; Biological process=ubiquitin-dependent protein catabolic process
  Homolog annotation: Hit_ID=Q9LSS9; Match level="QueryCoverage=47%, HitCoverage=29%, E-value=3e-75, Identity=51%"; Hit description =General negative transcription regulator-like
  Pfam annotation: Domain name=RRM_1; Domain location=81-160; Score =26.2; E_value=0.00014; Accession=PF00076.14; Description=RNA recognition motif. (a.k.a. RRM, RBD, o
AEKEETEGRCPACRTRYDKDRIVKMTATCERTVXKKNAEKKHKTQKVKPKAALAAAASTTTSTVEAKKHLIGVRVIQKNLVYITGLPAHLCNEIVLERREYFGQYGKVLKVSVSRPTGPPSQQASANNNISVYITYAKEEEAIRCIQTVHNFVLEGKVLRACFGTTKYCHAWLRNMTCGNPDCLYLHDVGSQEDSFTKDEIISAYTRTRVPQMASSVSQRRAGTVLPPPADDFSYSAVVSAKHTVKNGTLNTTNQPRLSPPNSSSGRSTLPPAASWGHRDLNARTTANGVTPSQSHTKSKSEPQINSFSSSLTISSTIMPSSWNDDTNTSTAPKISEGRQVSQQDSTSKTIEPYKPGIVKETHALSSLDIDFSTIPSAWNDDDIVVSDGMSKGSKEIQAAKENGKLTHLASKSPMSPKKDTTVNITSKSPSDSVSSLAISKSDVKTGDSDCSINNIAPESPTSNDVNCQSTCHAASEKILEDTVHRDAGIDSLSVQISSVTLDGKDEVHSMVGNHQPDAVPCTSVAVPMGQNFDKDQSHLKLDGFLPSENKDTLSCQYSSDNHLDWSSELQSSSATALSDIVNSLMITEKLNSRLMDGSDQPSYSSFARIPNTFDTSLWND

SEQ ID NO: 66924 - protein, 90 aa, Setaria italica
  Transcript Sequence Number=SeqID_950
  Gene Ontology: Mol. function=nucleic acid binding
VLSFLTLIVIDNYLASKFLQQNHGPVSPYAQMTQQPRNSQLTNGHLDGWSDLRQGNNALMSDMSRMLYPSEVNSLHMLGSNDIYTRAFGM

SEQ ID NO: 66925 - protein, 609 aa, Setaria italica
  Transcript Sequence Number=SeqID_951
  Gene Ontology: Mol. function=nucleic acid binding
  Homolog annotation: Hit_ID=Q9LSS9; Match level="QueryCoverage=69%, HitCoverage=36%, E-value=3e-11, Identity=25%"; Hit description =General negative transcription regulator-like
MAGNHQPDALPRTSVTVPIGQNFDRDRSYMKLDGLLSLENKDTLLSCQYGSDKHLDWTSEQQSCSASPLNDMVNSTAITDKLHGRLMDGSDQPSYSSFARFPNTVATSLWNDTESNPTLMIGTKPSEMQTGFSSINKTHALLSGCQDGLGTVCTPGNVSGHPGMGSHQPGAMGSVRTDSVGSFDKTASVNKDESRIISDMLSSEFNLWDDSFSSANSFVRMLRESENNDVPFTLPSWKSGSGSRESRFSFARQDNQGNLDSSLRNCGSDQNFSLLPQISRGNFYQNGHAFQSLENDVHNSNSLAVSDMATTGSSRSKISAPPGFSAPARVPPPGFSSGFPSQDGLNPPPGFSSGISSQEVSKNPPRLPSPFSSGFSSQDGPNPSYRSFSAFASGLPSQDGPNPPSRFPSAFTSGFSSHDGSNQVYRSTYPETLLRDNVLGGNSNHYQAPFGRHTSDIEFNDPAILAVGKGRMPGIGDSGLEMKNTPAFPAQLQTPNNDPRFQLRMQPNVQSHQNLRFADHMQDAFNPMNDNHLASRFLAQNHGPISPYEQMPQQPGNSQLTNGHLDGWSDLRQGNNALMSDMSRMLYPSEVNSLHMLGSNDIYTRAFGM

SEQ ID NO: 66926 - protein, 118 aa, Setaria italica
  misc_feature (15)..(15): Xaa can be any naturally occurring amino acid
  Transcript Sequence Number=SeqID_952
  Gene Ontology: Mol. function=nucleoside-triphosphatase activity; Cellular component=membrane; Biological process=transport
  Homolog annotation: Hit_ID=B6U195; Match level="QueryCoverage=100%, HitCoverage=17%, E-value=3e-49, Identity=93%"; Hit description=ABC transporter-like protein
ENVEYRVKMTLKNPXTAARVAFTSQARVDQGSSCKHILKGIAGSVDPGEILALMGPSGSGKTTLLKILGGRLSGGIKGQITYNDTPYSPSLKRRIGFVTQDDVLFPQLTVEETLVFAA

SEQ ID NO: 66927 - protein, 76 aa, Setaria italica
  Transcript Sequence Number=SeqID_953
  Gene Ontology: Mol. function=molecular_function; Cellular component =cytoplasm; Biological process=ubiquitin-dependent protein catabolic process
  Homolog annotation: Hit_ID=Q9FGZ9; Match level="QueryCoverage=96%, HitCoverage=100%, E-value=4e-33, Identity=94%"; Hit description =Ubiquitin-like protein 5
RAKMIEVVLNDRLGKKVRVKCNEDDTIGDLKRLVAAQTGTRAEKIRIQKWYTIYKDHITLADYEIHDGMGLELYYN

SEQ ID NO: 66928 - protein, 120 aa, Setaria italica
  Transcript Sequence Number=SeqID_954
  Gene Ontology: Mol. function=molecular_function; Cellular component =cytoplasm; Biological process=ubiquitin-dependent protein catabolic process
  Homolog annotation: Hit_ID=Q9FGZ9; Match level="QueryCoverage=60%, HitCoverage=100%, E-value=8e-35, Identity=97%"; Hit description =Ubiquitin-like protein 5
EAVVGLSPRTAVSCLRSRSREVSAGVKDLGFEDSSEGAQGEEREEGKMIEVVLNDRLGKKVRVKCNEDDTIGDLKKLVAAQTGTRPEKIRIQKWYNIYKDHITLKDYEIHDGMGLELYYN

SEQ ID NO: 66929 - protein, 135 aa, Setaria italica
  Transcript Sequence Number=SeqID_955
  Gene Ontology: Mol. function=molecular_function; Cellular component =cytoplasm; Biological process=ubiquitin-dependent protein catabolic process
  Homolog annotation: Hit_ID=Q9FGZ9; Match level="QueryCoverage=54%, HitCoverage=100%, E-value=3e-35, Identity=97%"; Hit description =Ubiquitin-like protein 5
MNGKSPVSLEKAEAAVGLRSSSSPVLPEARLPFQFAIEERVSRGFKELGFEDHRKRSGEEGKMIEVVLNDRLGKKVRVKCNEDDTIGDLKKLVAAQTGTRPEKIRIQKWYNIYKDHITLKDYEIHDGMGLELYYN

SEQ ID NO: 66930 - protein, 104 aa, Setaria italica
  Transcript Sequence Number=SeqID_956
MSGETLNNAETAVEVVEHVAEVTEKLAANAAESLPENGSLQKFAVEIEYIAEVVDKDAHKVEVVIKKIEEVSDKIDAAVEPVIEALEKDFKPNPTSSTGSDAQK

SEQ ID NO: 66931 - protein, 200 aa, Setaria italica
  Transcript Sequence Number=SeqID_957
MAALTLPPTNAAGQTATQEGSAGKPTDGSADSAAMDSGWVVLGKSDIVPADLAAAASAVGHQRLNFSPLPMIPIWVQMVLGGVVYTAVPFYKRARKIEGETLNNAETAVEVVEHVAEVTEKLAANAAESLPENGSLQKFAVEIEYIAEVVDKDAHKVEVVIKKIEEVSDKIDAAVEPVIEALEKDFKPNPTSSTGSDAQK

SEQ ID NO: 66932 - protein, 233 aa, Setaria italica
  Transcript Sequence Number=SeqID_958
  Gene Ontology: Mol. function=nucleotide binding; Cellular component =membrane; Biological process=transport
  Homolog annotation: Hit_ID=B6UFL9; Match level="QueryCoverage=100%, HitCoverage=37%, E-value=1e-95, Identity=77%"; Hit description =ATPase, coupled to transmembrane movement of substances
  Pfam annotation: Domain name=ABC2_membrane; Domain location=4-168; Score=89.0; E_value=1.7e-23; Accession=PF01061.16; Description=ABC-2 type transporter
YGEAGAHKRLGLFAFTLTFLLTSTTETLPTFVSERPIVLAETAAGLYRLSSHAAAATLVFLPYLLAVALLYSICVYFLVGLCASPGAFAAFVLVVWAVVLTANSFVLFVSSFAPDYIAGMSLVSVSLAGFFLFSGYFLSRGSMPSYWVFMHYASPYKYALDALLANEYSCAANRCFGVMGGGECSETGRDVLAEKGLTPEERWTGVQVLFGFFLLYRVLYWVVLSRRASRAKR

SEQ ID NO: 66933 - protein, 131 aa, Setaria italica
  Transcript Sequence Number=SeqID_959
  Gene Ontology: Mol. function=protein serine/threonine kinase activity; Biological process=protein amino acid phosphorylation
  Homolog annotation: Hit_ID=B6SV77; Match level="QueryCoverage=99%, HitCoverage=20%, E-value=4e-58, Identity=81%"; Hit description =Protein kinase/ transmembrane receptor protein serine/threonine kinase
  Pfam annotation: Domain name=Pkinase; Domain location=2-131; Score= -90.9; E_value=0.0044; Accession=PF00069.17; Description=Protein kinase domain
  Pfam annotation: Domain name=Pkinase_Tyr; Domain location=1-131; Score=-124.5; E_value=1.9e-05; Accession=PF07714.9; Description =Protein tyrosine kinase
  Pfam module annotation: Pfam domain module=Pkinase::Pkinase_Tyr; Domain location=2-131::1-131
GQYGEERIAVKRLDRAGQGKREFLAEVQTIGSIHHIHLVRLIGFCAEKLDRLLVYEYMPKGSLDRWIFNSHDNDAPSLDWQTRRKVITHIAKGLCYLHEECMKRIAHLDVKPQNILLDENFNAKLSDFGLK

SEQ ID NO: 66934 - protein, 197 aa, Setaria italica
  Transcript Sequence Number=SeqID_960
  Gene Ontology: Mol. function=protein binding; Cellular component =nucleus
  Homolog annotation: Hit_ID=B6SGL8; Match level="QueryCoverage=89%, HitCoverage=82%, E-value=2e-63, Identity=68%"; Hit description=Fb2
  Pfam annotation: Domain name=Di19; Domain location=1-196; Score =149.4; E_value=1.1e-41; Accession=PF05605.4; Description=Drought induced 19 protein (Di19)
LPADRGRHQPPPPPPHPADGELWEYFPCPFCYIEVEVPFICNHLQEEHCFDTRNAVCPICANNLGRDMAAHFRVQHSHLLKRRKPSKPCAWPEAATNSASGKGTATYEVNPYFEEPQHYRMSIGRPYQEPAPDPLLSQFICSVEQTHDAENGAVKTPDDQSRCRRKAASDDASSKLGLQERLQRIDFLTEILMSTIL

SEQ ID NO: 66935 - protein, 172 aa, Setaria italica
  misc_feature (11)..(11): Xaa can be any naturally occurring amino acid
  Transcript Sequence Number=SeqID_961
  Gene Ontology: Mol. function=protein binding; Biological process =protein amino acid phosphorylation
  Homolog annotation: Hit_ID=B6U7B7; Match level="QueryCoverage=91%, HitCoverage=46%, E-value=8e-58, Identity=49%"; Hit description=Too many mouths protein
  Pfam annotation: Domain name=LRR_1; Domain location=114-136; Score =7.8; E_value=10; Accession=PF00560.25; Description=Leucine Rich Repeat
  Pfam annotation: Domain name=LRR_1; Domain location=138-160; Score =13.8; E_value=0.69; Accession=PF00560.25; Description=Leucine Rich Repeat
  Pfam annotation: Domain name=LRR_1; Domain location=18-40; Score =19.8; E_value=0.011; Accession=PF00560.25; Description=Leucine Rich Repeat
  Pfam annotation: Domain name=LRR_1; Domain location=42-64; Score =12.9; E_value=1.1; Accession=PF00560.25; Description=Leucine Rich Repeat
  Pfam annotation: Domain name=LRR_1; Domain location=66-88; Score =13.8; E_value=0.69; Accession=PF00560.25; Description=Leucine Rich Repeat
  Pfam annotation: Domain name=LRR_1; Domain location=90-112; Score =9.5; E_value=4.7; Accession=PF00560.25; Description=Leucine Rich Repeat
  Pfam module annotation: Pfam domain module=LRR_1::LRR_1::LRR_1::LRR _1::LRR_1::LRR_1; Domain location=114-136::138-160::18-40::42-64::66 -88::90-112
TNALIRGEVPXGLGELKNLVHLDLSYNSLTGPIPSRLGELRGLVGLDLSYNSFSGPIPSRLGELTQLQKLDLSSNNLTGGVPGTVTRLKALTFLALSNNGLRGRLPAGLSDLRDLQYLIMENNPIGVPLPSEVGNIARLQELRLANSGLSGSIPETFGLLSSLTTLSLVGRS

SEQ ID NO: 66936 - protein, 74 aa, Setaria italica
  Transcript Sequence Number=SeqID_962
  Subcellular localization annotation: CTP_CleavageSite=23; ConfidenceScore=5.59e-01
MESASLTPLGNPFPCTSQSPRCRCPSESKKIRLACRRRASSLKATCDLSRRRAVSGMVVLGAAASCIDPLAVAS

SEQ ID NO: 66937 - protein, 412 aa, Setaria italica
  Transcript Sequence Number=SeqID_963
  Gene Ontology: Mol. function=glyceraldehyde-3-phosphate dehydrogenase (phosphorylating) activity; Cellular component=chloroplast; Biological process=glucose metabolic process
  Homolog annotation: Hit_ID=Q37264; Match level="QueryCoverage=89%, HitCoverage=84%, E-value=1e-176, Identity=79%"; Hit description =Glyceraldehyde-3-phosphate dehydrogenase
  Pfam annotation: Domain name=Gp_dh_C; Domain location=231-388; Score =387.9; E_value=1.8e-113; Accession=PF02800.12; Description =Glyceraldehyde 3-phosphate dehydrogenas
  Pfam annotation: Domain name=Gp_dh_N; Domain location=77-226; Score =344.3; E_value=2.3e-100; Accession=PF00044.16; Description =Glyceraldehyde 3-phosphate dehydrogenas
  Pfam module annotation: Pfam domain module=Gp_dh_C::Gp_dh_N; Domain location=231-388::77-226
  Subcellular localization annotation: CTP_CleavageSite=45; ConfidenceScore=5.74e-01
MAALSVPLRAAAAAAGSRAAVDPIKVSSVRSTGSAHFGCRFPSIAASSSSARNVEPLRAIATQAPPAVPQYSSGEKTKIGINGFGRIGRLVLRIATSRDDIEVVAVNDPFIDAKYMAYMFKYDSTHGPFKGSIHVVDESTLEINGKKITITSKRDPAEIPWGNYGAEYVVESSGVFTTTDKASAHLKGGAKKVVISAPSADAPMFVVGVNENSYDPKMNVVSNASCTTNCLAPLAKVVHEEFGIVEGLMTTVHATTATQKTVDGPSMKDWRGGRGAGQNIIPSSTGAAKAVGKVLPELNGKLTGMAFRVPTPNVSVVDLTCRIEKSASYDDVKAVIKAASEGALKGILGYTDEDVVSNDFVGDSRSSIFDAKAGIGLSSSFMKLVSWYDNEWGYSNRVLDLIAHIALVSAKH

SEQ ID NO: 66938 - protein, 363 aa, Setaria italica
  Transcript Sequence Number=SeqID_964
  Gene Ontology: Mol. function=electron carrier activity; Cellular component=chloroplast; Biological process=oxidation reduction
  Homolog annotation: Hit_ID=B6SVI8; Match level="QueryCoverage=100%, HitCoverage=57%, E-value=0.0, Identity=95%"; Hit description =Cytochrome P450 CYP97A16
  Pfam annotation: Domain name=p450; Domain location=1-322; Score=18.4; E_value=1.5e-12; Accession=PF00067.14; Description=Cytochrome P450
SLFSRLTLDVIGKAVFNYDFDSLSYDNGIVEAVYVTLREAEMRSTSPIPTWEIPIWKDISPRQKKVNEALKLINTTLDELIAICKRLVEQEDLQFHEEYMNEQDPSILHFLLASGDDVSSKQLRDDLMTMLIAGHETSAAVLTWTFYLLTKYPKVMAKLQDEVDSVLGDGLPTIEDVKKLKYTTRVINESLRLYPQPPVLIRRSLEDDVLGGYPIGRGEDIFISVWNLHHCPKHWDDAEVFNPERWPLDGPNPNEINQNFSYLPFGGGPRKCVGDMFATFENVVATAMLVKRFDFQMAPGAPPVDMTTGATIHTTEGLKMTVTRRTKPPVIPNLEMKVVSDSQKPTRSTPMVVSAATVASGED

SEQ ID NO: 66939 - protein, 118 aa, Setaria italica
  Transcript Sequence Number=SeqID_965
  Gene Ontology: Mol. function=oxidoreductase activity, acting on the CH-OH group of donors, NAD or NADP as acceptor; Cellular component =cytoplasm; Biological process=cellular carbohydrate metabolic process
  Homolog annotation: Hit_ID=B6T5Z1; Match level="QueryCoverage=92%, HitCoverage=29%, E-value=1e-44, Identity=81%"; Hit description=L -lactate dehydrogenase
  Pfam annotation: Domain name=Ldh_1_C; Domain location=5-118; Score= -43.1; E_value=0.0089; Accession=PF02866.10; Description =lactatemalate dehydrogenase, alphabeta C-t
MKLTAWLLKLQAYMVGEHGDSSVAVWSSVSVAGMPVLKSLQASHRCFDEEALEGIRRSVVDSAYEVISLKGYTSWAIGYSVASLAASLLRDQRRIHPVSVLARGFHGIAPENDVFLSL

SEQ ID NO: 66940 - protein, 364 aa, Setaria italica
  Transcript Sequence Number=SeqID_966
  Gene Ontology: Mol. function=oxidoreductase activity, acting on the CH-OH group of donors, NAD or NADP as acceptor; Cellular component =cytoplasm; Biological process=cellular carbohydrate metabolic process
  Homolog annotation: Hit_ID=Q0E4Q5; Match level="QueryCoverage=98%, HitCoverage=90%, E-value=1e-177, Identity=87%"; Hit description=L -lactate dehydrogenase
  Pfam annotation: Domain name=F420_oxidored; Domain location=52-247; Score=-52.2; E_value=0.026; Accession=PF03807.9; Description=NADP oxidoreductase coenzyme F420-dependent
  Pfam annotation: Domain name=Ldh_1_C; Domain location=193-363; Score =114.0; E_value=4.9e-31; Accession=PF02866.10; Description =lactatemalate dehydrogenase, alphabeta C-t
  Pfam annotation: Domain name=Ldh_1_N; Domain location=51-191; Score =253.6; E_value=4.6e-73; Accession=PF00056.15; Description =lactatemalate dehydrogenase, NAD bin
  Pfam module annotation: Pfam domain module=F420_oxidored::Ldh_1 _C::Ldh_1_N; Domain location=52-247::193-363::51-191
  Subcellular localization annotation: CTP_CleavageSite=36; ConfidenceScore=5.06e-01
SDPKNQAARAMKKASSLSELGFDAGDASSGFFRPVSDDATATPTAHRRRLTKVSVIGAGNVGMAIAQTILTRDLADEIALVDAVPDKLRGEMLDLQHAAAFLPRTRLVSDTDLAVTRGSDLAIVTAGARQIPGETRLNLLQRNVALFRKIVPALAEHSPEALLLVVSNPVDVLTYVAWKLSGFPASRVIGSGTNLDSSRFRFLLAEHLDVNAQDVQAYMVGEHGDSSVAVWSSVSVAGMPVLKSLQASHRCFDEEALEGIRRSVVDSAYEVISLKGYTSWAIGYSVASLAASLLRDQRRIHPVSVLARGFHGIAPENDVFLSLPARLGRGGVLGVAEMELTEEEAKKLRRSAKTLWENCQQLGL

SEQ ID NO: 66941 - protein, 94 aa, Setaria italica
  Transcript Sequence Number=SeqID_967
GRADLLSARQVYGGPSRPRHVTPTSPPSPTPHEIAPEISLPPGKRCRWDALRGGERERANPVQVVESAVERARRASAEVGDEEEWADGVMRRWL

SEQ ID NO: 66942 - protein, 133 aa, Setaria italica
  Transcript Sequence Number=SeqID_968
  Gene Ontology: Mol. function=iron ion binding; Cellular component =integral to membrane; Biological process=transport
  Homolog annotation: Hit_ID=Q7X660; Match level="QueryCoverage=98%, HitCoverage=18%, E-value=1e-57, Identity=80%"; Hit description =Probable metal-nicotianamine transporter YSL11
LTQFLWAFFQWFYTAGDDCGFSSFPTLGLEAYKNKFYFDFSATYVGVGMICPYIVNVSLLLGGIISWGVMWPLISTKKGSWYSESLPDSSLHGLNGYKVFITIAVILGDGLYNFLKVFIRSVCAIISVYKNKN

SEQ ID NO: 66943 - protein, 71 aa, Setaria italica
  misc_feature (29)..(29): Xaa can be any naturally occurring amino acid
  Transcript Sequence Number=SeqID_969
  Gene Ontology: Mol. function=aspartic-type endopeptidase activity; Biological process=DNA integration
  Homolog annotation: Hit_ID=Q8S805; Match level="QueryCoverage=71%, HitCoverage=2%, E-value=2e-09, Identity=56%"; Hit description =Putative copia-type polyprotein
MTSHPIHHKPTKHIELDIHLIREKVALGXFRMTQVPKKSSDVITKGLCCSLKHFEPTFTLYVLLVTNLVFV

SEQ ID NO: 66944 - protein, 140 aa, Setaria italica
  Transcript Sequence Number=SeqID_970
  Gene Ontology: Mol. function=binding; Cellular component=ubiquitin ligase complex; Biological process=ubiquitin-dependent protein catabolic process
  Homolog annotation: Hit_ID=B6TAZ5; Match level="QueryCoverage=81%, HitCoverage=31%, E-value=3e-53, Identity=86%"; Hit description =Suppressor of G2 allele of SKP1
  Pfam annotation: Domain name=CS; Domain location=12-80; Score=70.3; E_ value=7e-18; Accession=PF04969.8; Description=CS domain
KSCLYLGLLGGSTEVVLTIFAKGVPADCVVVDFGEQMLSVSIEVPGEEPYHFQPRLFSKIIPEKCKYLVLSTKVEIRLAKAEQVTWTTLDYSGRPKALPQKISTPAETAPRPSYPSSKSKKDWDKLEAEVKKEEKDEKLD

SEQ ID NO: 66945 - protein, 1228 aa, Setaria italica
  Transcript Sequence Number=SeqID_971
  Gene Ontology: Mol. function=ATPase activity, coupled to transmembrane movement of substances; Cellular component=integral to membrane; Biological process=transport
  Homolog annotation: Hit_ID=Q8GU74; Match level="QueryCoverage=100%, HitCoverage=91%, E-value=0.0, Identity=65%"; Hit description=MDR -like ABC transporter
  Pfam annotation: Domain name=ABC_membrane; Domain location=656-932; Score=110.2; E_value=6.9e-30; Accession=PF00664.15; Description=ABC transporter transmembrane region
  Pfam annotation: Domain name=ABC_tran; Domain location=1007-1192; Score=201.7; E_value=1.9e-57; Accession=PF00005.19; Description=ABC transporter
  Pfam annotation: Domain name=ABC_tran; Domain location=258-441; Score= 147.4; E_value=4.4e-41; Accession=PF00005.19; Description=ABC transporter
  Pfam module annotation: Pfam domain module=ABC_membrane::ABC _tran::ABC_tran; Domain location=656-932::1007-1192::258-441
FFDTYGNNGDIVSQVLSDVLLIQSAISEKVGNYIHNMATFVGGLIVGLLNCWQIALLTLATGPLIVAAGGISNIFLHRLAENIQDAYAEAASIAEQAISYIRTLYSFTNETLAKYSYATSLQATLRYGILISLVQGIGLGFTYGLAICSCALQLWVGRHLIVRGKADGGEVVVALFSVILSGLGLNQAATNFYSFEQGRIAAYRLYEMISRSTSSVNQEGITLTQVQGNIEFRNVYFSYLSRPEIPILSGFFLTVPARKTVALVGRNGSGKSSIIPLMERFYDPTLGEVLLDGENIKNLKVEWLRSQIGLVTQEPALLSLSIRENIAYGRSATFDQIEEATKTAHAHGFISSLEKGYETQVGRAGIALTDEQKIKISIARAVLSNPSILLLDEVTGGLDFEAEKAVQEALDVLMLGRSTIIIARRLSLIKNADYIAVMEEGHLVEMGTHDELLNLDGLYAELLRCEEATKLPKRMPTKNSRERKSLQIEDASVSQYFQESSSPKMTKSPSLQKTHGMLQFWRSDTNRNSHDSPKDRSPPSEQTVDNGIPMVATETERTPSIKRQDSFEMKLPDLPKVDVHPIQRQSSKNSEPDSPISPLLTSDPKNERSHSQTFSRPQSERDDTSSEHSELDEVQHQKPPSFWRLATLSIAEWPYALLGTIGAAIFGSFNPLLAYTIALIVSAYYRIEVHDMHHEVNRWCLFIVGMGVITVLVNWLQHFYFGIMGEKMTERIRRMMFSAILRNEVGWFDKDENNADTLSMRLANDATYVRAAFSNRLSIFIQDTAAVSVALLIGMLLGWRVALVALATLPVLVISAIAQKLWLAGFSRGIQEMHRKASLVLEDAVRNIYTVVAFCAGNKIMELYRLHLGKILKQSLVQGLAIGFGFGLSQFLLFACNALLLWYTAISVDQQRLTIATGLKEYILFSFASFALVEPFGLAPYILKRRKSLTSVFEIIDREPKIDPDDTTGLKPPNVYGSIEFKNVDFSYPARPEILVLSNFNLKVSGGQTVAVVGVSGSGKSTIISLIERFYDPVSGQVLLDGRDLKSFNLRWLRSHMGLIQQEPVIFSTTIRENIIYARHNATEAEIKEAARIANAHHFISSLPHGYDTHVGMRGVDLTPGQKQRIAIARVVLKNAPILLLDEASSAIESESSRVVQEALDTLVMGNKTTILIAHRAAMMKHVDNIVVLNGGKIVEQGTHDSLMDQNGLYVRLMQPHFGKGLRQHRLM

SEQ ID NO: 66946 - protein, 223 aa, Setaria italica
  misc_feature (27)..(27): Xaa can be any naturally occurring amino acid
  misc_feature (121)..(121): Xaa can be any naturally occurring amino acid
  Transcript Sequence Number=SeqID_972
  Homolog annotation: Hit_ID=B6TED6; Match level="QueryCoverage=32%, HitCoverage=28%, E-value=1e-09, Identity=54%"; Hit description =Alginate regulatory protein AlgP
  Subcellular localization annotation: CTP_CleavageSite=55; ConfidenceScore=5.65e-01
MATAVLRSHDVLNNRMHLDAFTPSPTXPRRRRSPKPAGASSPPPRPAAVASPPPKAAAVASPAPKTAALASPPVKGAASGRRSPPARPAARKQPSPTKEKPKQRLVMEEVRILKRGEEPPXAPAPTPAPAPVVAAPVAKAAAAVDKRVPCSTGRIGPQAPTVVPTKKIVSAASAPDAARYAGPAFSAAAPEPSSLPMPAFFLRRAESEATRGLRCLLRIGELA

SEQ ID NO: 66947 - protein, 106 aa, Setaria italica
  misc_feature (47)..(47): Xaa can be any naturally occurring amino acid
  Transcript Sequence Number=SeqID_973
  Gene Ontology: Mol. function=acyl-CoA binding
  Homolog annotation: Hit_ID=Q2R069; Match level="QueryCoverage=95%, HitCoverage=15%, E-value=3e-54, Identity=94%"; Hit description=Kelch motif family protein, expressed
  Pfam annotation: Domain name=Kelch_1; Domain location=11-57; Score =18.4; E_value=0.021; Accession=PF01344.17; Description=Kelch motif
  Pfam annotation: Domain name=Kelch_1; Domain location=62-106; Score =10.0; E_value=0.21; Accession=PF01344.17; Description=Kelch motif
  Pfam annotation: Domain name=Kelch_2; Domain location=11-57; Score =22.6; E_value=0.0016; Accession=PF07646.7; Description=Kelch motif
  Pfam module annotation: Pfam domain module=Kelch_1::Kelch_1::Kelch_2; Domain location=11-57::62-106::11-57
VCCFRGAGPSPRSNHVAALYDDRILLIFGGQSKSKTLNDIHALDFEXMVWSRIKTHGHHPSPRAGCCGALCGTKWYIAGGGSKKKRHPETWVFDVLESKWSVCVSS

SEQ ID NO: 66948 - protein, 188 aa, Setaria italica
  misc_feature (155)..(155): Xaa can be any naturally occurring amino acid
  misc_feature (175)..(175): Xaa can be any naturally occurring amino acid
  Transcript Sequence Number=SeqID_974
  Gene Ontology: Mol. function=DNA binding
  Homolog annotation: Hit_ID=B9S516; Match level="QueryCoverage=69%, HitCoverage=6%, E-value=4e-15, Identity=37%"; Hit description=DNA binding protein, putative
  Subcellular localization annotation: CTP_CleavageSite=16; ConfidenceScore=5.40e-01
LGAFPAGVDRGAHMMPAAHGMGTVAGLNRGMPAAKPGFPRINSPAMLNTVSSGNMLPNSGQGVPNAVSVHTGAISGPGNSILRVRDPMQTLRPVQGMEEHRQMPEFDMQVAQGSSQATVQFSSMNPSFSSVAASPVQLPQQPHQMSQSLHMFGNXHPSQIQGTTSSPQHQAYALXRRQMQQRMAPQQT

SEQ ID NO: 66949 - protein, 193 aa, Setaria italica
  Transcript Sequence Number=SeqID_975
  Gene Ontology: Mol. function=DNA binding
  Homolog annotation: Hit_ID=B9S516; Match level="QueryCoverage=95%, HitCoverage=9%, E-value=1e-23, Identity=36%"; Hit description=DNA binding protein, putative
  Subcellular localization annotation: CTP_CleavageSite=20; ConfidenceScore=5.03e-01
NGKDYFFLAIPPKRIRTAVRQRVVSPFHAGATGPTQVTSKTDASSGDTNSYQDDQSSLHGPWRNTDVISTVDSDRQLPYDASEVCTKANKKKKFKKPGYKIAQNTINSSVPTSVKFQGRMYDPRLQVDLTNKYEQKEYLKKRSDVHRYDSNGNSVAYGGQHAPKKLKMVKQGIDISQEASPARFINFIANRDR

SEQ ID NO: 66950 - protein, 261 aa, Setaria italica
  Transcript Sequence Number=SeqID_976
  Gene Ontology: Mol. function=DNA binding
  Homolog annotation: Hit_ID=UPI0001A7B064; Match level="QueryCoverage =63%, HitCoverage=8%, E-value=4e-16, Identity=37%"; Hit description =DNA binding
  Subcellular localization annotation: CTP_CleavageSite=60; ConfidenceScore=5.33e-01
IQQPGGPVPGAFPAGVDRGAHMMPAAHGMGTVAGLNRGMPAAKPGFPRINSPRLLNTVSSGNMLPNSGQGVPNAVSVHTGAISGPGNSILRPVQGMEEHRQMPEFDMQVAQGSSQATVQFSSMNPSFSSVAASPVQLPQQPHQMSQSLHMFGNSHPSQIQGTTSSPQHQAYALAKERQMQQRMAPQQHSDVFGATAVPNVQNSTQILQQNQASAADSVPCSQPQHQRRQTAQKVPDSSSSPNQPASTTQQKQKKQQGQQQS

SEQ ID NO: 66951 - protein, 520 aa, Setaria italica
  misc_feature (316)..(316): Xaa can be any naturally occurring amino acid
  Transcript Sequence Number=SeqID_977
  Gene Ontology: Mol. function=DNA binding
  Homolog annotation: Hit_ID=B9S516; Match level="QueryCoverage=84%, HitCoverage=22%, E-value=2e-95, Identity=43%"; Hit description=DNA binding protein, putative
  Pfam annotation: Domain name=Myb_DNA-binding; Domain location=122 -175; Score=15.8; E_value=0.079; Accession=PF00249.23; Description =Myb-like DNA-binding domain
TTKRRNKERKKFKERPRNNKIAQNTINSSVPTSVKGRMYDPRLQVDLTNKYEQKEYLKKRSDVHRYDSNGNSVAYGGQHAPKKLKMVKQGIDISQEASPARFINFIANRDRGRKCKSLKMTSGGWSSFEDQALVVLVHDMGQNWELVSDAINSIVQFKSVHRKPKECKERHKVLVDRSSGDGADSAEDSGSSQYYHNALPGIPKGSARQLFERLQGPNDEENLKAHFEKIILLMQQVHARRRQGNRQELKQIMQPHSSQVIALSQACPNRVSGGTLMPLDLCDVTSPNLDSITPGSVYPGSHTNGITLPNHHHQGXVGPSIPTSNLNSRLPGSPGLVLGSNSPSPSTLNTPRDAQKYGVPRPTLQGDEQLKIQFNQMVNGRNIQQPGGPVPGAFPAGVDRGAHMMPAAHGMGTVAGLNRGMPAAKPGFPRINSPAMLNTVSSGNMLPNSGQGVPNAVSVHTGAISGPGNSILRVRDPMQTLRVSSYFTFRMLIDCLKWTELASLFTISKPHTPLFYVQVY

SEQ ID NO: 66952 - protein, 134 aa, Setaria italica
  misc_feature (59)..(59): Xaa can be any naturally occurring amino acid
  Transcript Sequence Number=SeqID_978
VFGCSLYWYLVLFTVLTIYLINSDGNESLWTLSIHEKDAMQSTNLEMDFGMQQDKQKNXIETTEGQIPDVTLRNHSQIEFISKLDAELLAVNEGQGGRCQEQHLVYRETERSPSDESKEKLAMMLLFAALLHRY

SEQ ID NO: 66953 - protein, 587 aa, Setaria italica
  misc_feature (151)..(151): Xaa can be any naturally occurring amino acid
  misc_feature (169)..(169): Xaa can be any naturally occurring amino acid
  Transcript Sequence Number=SeqID_979
  Homolog annotation: Hit_ID=Q9SLN1; Match level="QueryCoverage=72%, HitCoverage=51%, E-value=5e-11, Identity=24%"; Hit description =Filament-like plant protein 7
  Pfam annotation: Domain name=DUF869; Domain location=1-477; Score =52.7; E_value=4.2e-14; Accession=PF05911.3; Description=Plant protein of unknown function (DUF869)
VKRQGTSSAENGTRRPRAVVQPQLGARHSVSEGYQVKLKEFGDENRHLRQLLAQKESDMQFVRWKYVDEACKLSMLQKQHEELSDSHGLTENNHPERMVIALAKLDHSRSGKQQVFQMRSRGRRITGSDIQLLVDPVEIEKLERASRPSSXPHECMDTPNADSKMVVSXTVHRDIVPDDGFSDKYPELIQDVLKVIIHKHQVSKISVASIIDEVTHALRSEISAKGNDDASLSYDREELNKMVATLRERVSSMVERSTKSNVMRFQSFFHEKSELTLRLAHLVHVCSDVLDGKANLEKLADEVCLILEWIVSQCFWCLDGLDVTDYITNNSDGNESLWTLSIHEKDAMQSTNLEMDFGMQQDKQKELIETTEGQIPDVTLRNHSQIEFISKLDAELLAVNEGQGGRCQEQHLVYRETESAASDESKEKIAEEGKKLKTTSAISAAAKKLAECQETIANLSKQLHALENPANADASYKEKCGTLPPPVANLVAEADPKPEGLSPPTSEEATRIKEHSEPDATEKSHEHGESGTGAKARKNGSAPIVIRPMVPKSPRASVSADARKKKRRASLLSLLSSHGCKGYVKEA

SEQ ID NO: 66954 - protein, 45 aa, Setaria italica
  Transcript Sequence Number=SeqID_980
YNDTQLSCVFEKKKVIELNHPMHNKILTLQTTVIELLKTWNIKIK

SEQ ID NO: 66955 - protein, 318 aa, Setaria italica
  Transcript Sequence Number=SeqID_981
  Homolog annotation: Hit_ID=Q9XIC8; Match level="QueryCoverage=63%, HitCoverage=32%, E-value=1e-69, Identity=60%"; Hit description =F23M19.10
  Pfam annotation: Domain name=DUF292; Domain location=23-141; Score =234.8; E_value=2.2e-67; Accession=PF03398.6; Description=Eukaryotic protein of unknown function, DUF292
  Subcellular localization annotation: CTP_CleavageSite=43; ConfidenceScore=5.04e-01
MSSLNSLFNRSTFGTKCKTCLNLVISRIKLLRNRRELQLINMRKEMVQYLQTGQESIARIRVEHIIREQNILAAYEIVELFCEFVLARVPIVEVQKECPLELREAISSIIFASGRCSDLPELMHLRNLFTTKYGKEFVAGAMELRPDSGVNRTIIEKLSVKAPSGESKLKVLKAIAQEYNVEWDSSNTEAEFNKKYEDLLDGSASSVHQVQAPVIESSLVASASRDKPPVLISPVEDAGKPHVHGSPSSPAGSARAYAATKSNPSAQEHHSPAEEISCSSPSSSDALEKARVAIASATRASAAARAAAELAKVKITSQ

SEQ ID NO: 66956 - protein, 140 aa, Setaria italica
  Transcript Sequence Number=SeqID_982
  Gene Ontology: Mol. function=protein serine/threonine kinase activity; Biological process=protein amino acid phosphorylation
  Homolog annotation: Hit_ID=B6SVN5; Match level="QueryCoverage=80%, HitCoverage=22%, E-value=6e-28, Identity=60%"; Hit description =BRASSINOSTEROID INSENSITIVE 1-associated receptor kinase 1
MAASAWRRLLAEAPPAPGHHRKQGDAPSDWSAGYLNGWLSQQTPVFGLRLWVLIGIAVGAAIVLVLLLIFVCLSRRRRRRDEVLAANLYPADTKLLKQHLQQATPTKDIQEIVRRQQQQPQTPPPAPQPAVQLAKAEPPV

SEQ ID NO: 66957 - protein, 75 aa, Setaria italica
  Transcript Sequence Number=SeqID_983
FNKVSTKLRIMVGGCLEFHICISEIHDVFSALWCVFTLLFVESAFGVSNKVLDNFLNFTESLGSPLLDAYISSYG

SEQ ID NO: 66958 - protein, 101 aa, Setaria italica
  Transcript Sequence Number=SeqID_984
  Homolog annotation: Hit_ID=Q8S4P3; Match level="QueryCoverage=63%, HitCoverage=13%, E-value=4e-15, Identity=65%"; Hit description =Enhancer of polycomb-like protein
CGDDDYADSDDTTTEQQYIRPAVFHPRFRSNKLSVIPPLRIKRERELKRRPQQNGWVFKRDPEEPVFLFTRPLESNLLEVCWKADKVVPSSTSWASCLYFI

SEQ ID NO: 66959 - protein, 203 aa, Setaria italica
  Transcript Sequence Number=SeqID_985
  Homolog annotation: Hit_ID=Q8S4P3; Match level="QueryCoverage=100%, HitCoverage=43%, E-value=5e-94, Identity=84%"; Hit description =Enhancer of polycomb-like protein
  Pfam annotation: Domain name=EPL1; Domain location=6-153; Score =135.8; E_value=1.4e-37; Accession=PF10513.1; Description=Enhancer of polycomb-like
MSRLSFRPRPLDIHKKLPILKSVREFEDEEPGVAPLASARAGVLLRHSGAELTASAANNATEGEGNQAPSKKNIQEIPTPQFDIVDTYERDYTRTFAQPTSYIRGRGARAEIGEFVEYDLDNEDEDWLEDFNNERKNINPEKLEVLLFKLEILDHKARERAGAITPTFIGPVPVLLQLDTAMEALQYLSVRYAVFQAVYNYWK

SEQ ID NO: 66960 - protein, 366 aa, Setaria italica
  misc_feature (40)..(40): Xaa can be any naturally occurring amino acid
  Transcript Sequence Number=SeqID_986
  Homolog annotation: Hit_ID=Q8S4P3; Match level="QueryCoverage=99%, HitCoverage=77%, E-value=1e-145, Identity=74%"; Hit description =Enhancer of polycomb-like protein
SISAARAEIGEFVEYDLDNEDEDWLEDFNNERKNINPEKXLEVLLFKLEILDHKARERAGAITPTFIGPVPVLLQLDTAMEALQYLSVRYAVFQAVYNYWKEKRERWQKPILRRLQPPPPVNDTNPYNVFRPREKAHRLHTRRMQRRENNIQSFEKLRLVRRNLEQAKALMDALIKREETKREAMECHVNLQRIQMKYKHEAQLVDDGTTLSAFQQTSSRFDSSDDDYADSDDTTTEQQYIRPAVFHPRFRSNKLSVIPPLRIKRERELKRRPQQNGWVFKRDPEEPVFLFTRPLDPEKLVAAGIKPPPDPPIENGATTPPFRCRGRIGRGGRIIFDRWNPLLRTPIGQETSYYVPYGHRPPSPEG

SEQ ID NO: 66961 - protein, 49 aa, Setaria italica
  Transcript Sequence Number=SeqID_987
QISTKKKILLLQGVPYLSLPKKEKPRRVELYFSSWRIRAVQSPKQPGQQ

SEQ ID NO: 66962 - protein, 77 aa, Setaria italica
  Transcript Sequence Number=SeqID_988
  Gene Ontology: Cellular component=plasma membrane
  Homolog annotation: Hit_ID=Q9SGV0; Match level="QueryCoverage=72%, HitCoverage=11%, E-value=1e-23, Identity=89%"; Hit description =F1N19.22
GSGRKRACVTYCITYILSCFTKHSPEYKILMIGRVLGGIATSLLFSAFESWLVAEHNKVAAQIPLSTVALIHWRWPG

SEQ ID NO: 66963 - protein, 199 aa, Setaria italica
  misc_feature (157)..(157): Xaa can be any naturally occurring amino acid
  Transcript Sequence Number=SeqID_989
  Gene Ontology: Cellular component=plasma membrane
  Homolog annotation: Hit_ID=Q9SGV0; Match level="QueryCoverage=100%, HitCoverage=37%, E-value=2e-67, Identity=65%"; Hit description =F1N19.22
  Subcellular localization annotation: CTP_CleavageSite=39; ConfidenceScore=5.39e-01
GFIFATFMLSSMLGSSIASRLLARKLKVEGYMQIVFAVSAFTLFLPVVTNVSLLITMFSFSLKIFDVMLPVYILQFLVPPSSAKGGSISLGGCLQLLGFCTFESCVGIFWPSIMKMRSQYIPEEARSTIMNFFRIPLNLFVCVVLYNVNAFPITVMXFGMCSIFLFMAAILQRRLMVVSDLHKSTKAVEMTAEDEPLNP

SEQ ID NO: 66964 - protein, 56 aa, Setaria italica
  Transcript Sequence Number=SeqID_990
  Homolog annotation: Hit_ID=Q9SGV0; Match level="QueryCoverage=82%, HitCoverage=10%, E-value=5e-10, Identity=60%"; Hit description =F1N19.22
IVYFPYSTCSITVMFGMCSIFLFMAAILQRRLMVVSDLHKSTKAVEMTAEDEPLNP

SEQ ID NO: 66965 - protein, 263 aa, Setaria italica
  Transcript Sequence Number=SeqID_991
  Gene Ontology: Cellular component=plasma membrane
  Homolog annotation: Hit_ID=Q9SGV0; Match level="QueryCoverage=99%, HitCoverage=58%, E-value=1e-121, Identity=78%"; Hit description =F1N19.22
  Pfam annotation: Domain name=DUF791; Domain location=1-163; Score =143.2; E_value=8.1e-40; Accession=PF05631.6; Description=Protein of unknown function (DUF791)
FGPVAPFDAAACFLAIGMAIIMSSWSENYGDPSESKDLMAQFKVAAKAIASDEKIALLGAIQSLFEGSMYTFVFLWTPALSPNEEDIPHGFIFATFMLSSMLGSSIASRLLARKLKVEGYMQIVFAISAVTLVLPVVTNFLVPPSSVKGGSISFGGSLQLLGFCTFEACVGIFWPSIMKMRSQYIPEEARSTIMNFFRIPLNLFVCVVLYNVNAFPITVMFGMCSIFLFMASILQRRLMVVSDLHKSSTKAQEMIGEDEPLNP

SEQ ID NO: 66966 - protein, 321 aa, Setaria italica
  Transcript Sequence Number=SeqID_992
  Gene Ontology: Cellular component=plasma membrane; Biological process= transport
  Homolog annotation: Hit_ID=Q9SGV0; Match level="QueryCoverage=92%, HitCoverage=65%, E-value=1e-144, Identity=81%"; Hit description =F1N19.22
  Pfam annotation: Domain name=DUF791; Domain location=4-320; Score =818.1; E_value=5.4e-243; Accession=PF05631.6; Description=Protein of unknown function (DUF791)
  Pfam annotation: Domain name=MFS_1; Domain location=42-302; Score =11.2; E_value=0.013; Accession=PF07690.8; Description=Major Facilitator Superfamily
  Pfam module annotation: Pfam domain module=DUF791::MFS_1; Domain location=4-320::42-302
MEVFYYVVFGALAAVVAGLELGKSGKDRVATTSAFNSFKNNYVLVYSLMMSGDWLQGPYVYYLYRQYGFDKGDIGRLFIAGFGSSMLFGTIVGSLADKQGRKRACITYCISYILSCITKHSPEYKILMIGRILGGIATSLLFSAFESWLVAEHNKRGFDPQWLSITFSKAIFLGNGLIAIVSGLFANLLAENLGFGPVAPFDAAACFLAIGMAIIMSSWSENYGDPSESKDLMAQFKVAAKAIASDEKIALLGAIQSLFEGSMYTFVFLWTPALSPNEEDIPHGFIFATFMLSSMLGSSIASRLLARKLKVEGYMRNNYLQ

SEQ ID NO: 66967 - protein, 74 aa, Setaria italica
  Transcript Sequence Number=SeqID_993
LKPDRTSIDRTCSINSCSTRVGVVHSGDWRDMGAVLEPALPEQHALVDRQQLGTGSRGHAHAYGIHVARARAMS

SEQ ID NO: 66968 - protein, 96 aa, Setaria italica
  misc_feature (10)..(10): Xaa can be any naturally occurring amino acid
  Transcript Sequence Number=SeqID_994
  Gene Ontology: Mol. function=catalytic activity; Cellular component =plasma membrane
  Homolog annotation: Hit_ID=B6UED8; Match level="QueryCoverage=100%, HitCoverage=21%, E-value=2e-46, Identity=89%"; Hit description =Ca2+/calmodulin-dependent protein kinase phosphatase
PDVVEEIYEXGSAMLARRLNINYPAGNMFKLHDCAVCQLEMKPGEGISVHGNMPKHSRVDPWGGPFLCSSCQVKKEAMEGKLHSRNSQSAAQLVPK

SEQ ID NO: 66969 - protein, 283 aa, Setaria italica
  Transcript Sequence Number=SeqID_995
  Gene Ontology: Mol. function=catalytic activity; Cellular component =plasma membrane
  Homolog annotation: Hit_ID=B6UED8; Match level="QueryCoverage=82%, HitCoverage=52%, E-value=1e-126, Identity=93%"; Hit description =Ca2+/calmodulin-dependent protein kinase phosphatase
ERVTASGGEVGRINIAGGAGIGPLRCWPGGLCLSRSIGDIDVGEFIVPVPHVKQVKLSNAGGRLVIASDGVWDALCFQEALNYTRGLPAEAAANRIVKEAVTSKGLRDDTTCIVVDILPPEKLSPPLKRPGKGGIKALFRRRPSDEMSEYQMDRGCFEPDVVEEIYEEGSAMLARRLNINYPAGNMFKLHDCAVCQLEMKPGEGISVHGNMPKHSRVDPWGGPFLCSSCQVKKEPWKEAAFEKYGCLYSEAITFFTVETNILNPNLLSLFPPDSQSAAQLVPK

SEQ ID NO: 66970 - protein, 40 aa, Setaria italica
  Transcript Sequence Number=SeqID_996
SELLMGSPTPFLSPYHVQPTITLDNVLMLDCWRASLLCYL

SEQ ID NO: 66971 - protein, 95 aa, Setaria italica
  Transcript Sequence Number=SeqID_997
KFKISSSRLNITLEEFHTKLFSTNNTLWMSNQISHGFLLVVSMVHFFGAIMGNLICIIHLCEHMSFSQPIFPEYWHAAHCFGLYKTYSWQLSCPR

SEQ ID NO: 66972 - protein, 58 aa, Setaria italica
  misc_feature (34)..(34): Xaa can be any naturally occurring amino acid
  Transcript Sequence Number=SeqID_998
  Gene Ontology: Cellular component=chloroplast
WIGRAKECELYKFTIPFDQMKERAPVYREGLAVXKGTIETMEPTVFLISLEFVIPMRN

SEQ ID NO: 66973 - protein, 71 aa, Setaria italica
  Transcript Sequence Number=SeqID_999
MSADEISNLATQVSLLSEDMPARILEFLKKECTGHEDRNSGEMEIDIGSMRHSALFELRKLLDEFAEEKHR

SEQ ID NO: 66974 - protein, 208 aa, Setaria italica
  Transcript Sequence Number=SeqID_1000
  Homolog annotation: Hit_ID=B6TM52; Match level="QueryCoverage=91%, HitCoverage=90%, E-value=2e-45, Identity=54%"; Hit description =Hsp20/alpha crystallin family protein
  Pfam annotation: Domain name=HSP20; Domain location=86-206; Score =12.8; E_value=0.0002; Accession=PF00011.13; Description=Hsp20alpha crystallin family
  Subcellular localization annotation: CTP_CleavageSite=49; ConfidenceScore=5.52e-01
MSMVTSCTLLRNVTAVRPAVSSGKQLQSGRPAAVASLSSQWRSRPLSVCCAINPKGEHNPKTDLHPFNIPAFVLVHPVSPLEERWQVKEEPGKVNLWFEVPGQSKEDLAVEIDEDVLVIKKNVDDAGGDVGQRNGAAAPQGNRRGPAATGEEAGKEAAQDGEVIYARLLLPAGYNKEGVEAEIKSGELRVSIAKIKKQARRRIKIDVK

SEQ ID NO: 66975 - protein, 131 aa, Setaria italica
  Transcript Sequence Number=SeqID_1001
CGCSKVNERHVTRNHVLMLPMTATPRASDARSGGPAWEEENGAEETGRHASASNLPHSCEAEISSAPQQIPLHMFDSPVQCQARTARARILILISEWFVEKSCALIDIIIIIIIIIIIIIIIIIIIIIIST

SEQ ID NO: 66976 - protein, 107 aa, Setaria italica
  Transcript Sequence Number=SeqID_1002
  Homolog annotation: Hit_ID=B6TZ02; Match level="QueryCoverage=99%, HitCoverage=37%, E-value=5e-15, Identity=58%"; Hit description=TCP family transcription factor containing protein
AGGYHRFMGLNSAFGMVSSAMAPYSNYTAGEARNNSNVHDGGGGGSPQVAAAAAAHHSSFPSLLSLAPGPHQLVFYSPEADQQFQVDNLGSQSLSLSSARAYHDQAS

SEQ ID NO: 66977 - protein, 152 aa, Setaria italica
  Transcript Sequence Number=SeqID_1003
RRRGRPAGGDRRRTNGFYLLLGGGAGKGTKKDGGVKTPWLMEEFTTAEDEAAAVDGWKGQRIIKVFCKLYVSPRATNDEKRDIFGEDGVPVDLHGHVKTVMAKLSHEYFDAVAENLNGDQGQGPAPPRALGHQQGQPAVYRLSCPSSFPGTI

SEQ ID NO: 66978 - protein, 367 aa, Setaria italica
  Transcript Sequence Number=SeqID_1004
  Gene Ontology: Mol. function=24-methylenesterol C-methyltransferase activity; Cellular component=integral to membrane; Biological process=steroid biosynthetic process
  Homolog annotation: Hit_ID=O24154; Match level="QueryCoverage=97%, HitCoverage=99%, E-value=1e-160, Identity=72%"; Hit description=S -adenosyl-methionine-sterol-C-methyltransferase
  Pfam annotation: Domain name=CMAS; Domain location=72-319; Score= -123.8; E_value=2.3e-06; Accession=PF02353.12; Description =Cyclopropane-fatty-acyl-phospholipid synthase
  Pfam annotation: Domain name=MTS; Domain location=116-232; Score= -89.1; E_value=0.048; Accession=PF05175.6; Description=Methyltransfera se small domain
  Pfam annotation: Domain name=Methyltransf_11; Domain location=133 -231; Score=110.8; E_value=4.7e-30; Accession=PF08241.4; Description =Methyltransferase domain
  Pfam annotation: Domain name=Methyltransf_12; Domain location=133 -229; Score=66.0; E_value=1.4e-16; Accession=PF08242.4; Description =Methyltransferase domain
  Pfam annotation: Domain name=Sterol_MT_C; Domain location=240-359; Score=218.4; E_value=1.9e-62; Accession=PF08498.2; Description =Sterol methyltransferase C-terminal
  Pfam annotation: Domain name=TPMT; Domain location=107-267; Score= -82.3; E_value=0.083; Accession=PF05724.3; Description=Thiopurine S -methyltransferase (TPMT)
  Pfam annotation: Domain name=Ubie_methyltran; Domain location=112 -293; Score=-105.0; E_value=0.00012; Accession=PF01209.10; Description=ubiECOQ5 methyltransferase family
  Pfam module annotation: Pfam domain module=CMAS::MTS::Methyltransf _11::Methyltransf_12::Sterol_MT_C::TPMT::Ubie_methyltran; Domain location=72-319::116-232::133-231::133-229::240-359::107-267::112-293
MEPATMAWTAAVVGVGLVYWFVWVMGAAEVKGKRAVDLKMGSITRDKVQDKYTQYWSFFRRPKETATTAASAEKVPAFVDTFYNLVTDIYEWGWGQSFHFSPSLPGRSHRDATRVHEERVADLLGAKPGHRVLDVGCGVGGPMRAIAAHSGSNVVGITINEYQVNRARAHNRKAGLDSRCEVVCGNFLSMPFPDASFDGAYSIEATCHAPKLQDVYGEVFRVLKPGGLYVSYEWVTTSLYRAEDPDHVECIHGIERGDALPGLRRQDEIASIAKEVGFEVLKEQDLALPPALPWWTRLKMGRVAYWRNSLVVRVLTLLRIAPKGVSEVHEMLYETAQHLTRGGETGIFTPMHMVLLRKPAAASEEAK

SEQ ID NO: 66979 - protein, 60 aa, Setaria italica
  misc_feature (5)..(5): Xaa can be any naturally occurring amino acid
  misc_feature (9)..(9): Xaa can be any naturally occurring amino acid
  misc_feature (13)..(13): Xaa can be any naturally occurring amino acid
  Transcript Sequence Number=SeqID_1005
  Homolog annotation: Hit_ID=Q9FRS9; Match level="QueryCoverage=86%, HitCoverage=41%, E-value=5e-13, Identity=71%"; Hit description =F22O13.1
TMLAXRRAXNSFXMLADAALEELPSTMAAVRLSGMEISDLTLELSDLSHEIADGVSYCIN

SEQ ID NO: 66980 - protein, 64 aa, Setaria italica
  Transcript Sequence Number=SeqID_1006
FYEIADGVNKSAKVAQAVEAGIGQMQNIARQQAKSMVEERANLRTIPTVGQDKESHKSSSRLRQ

SEQ ID NO: 66981 - protein, 249 aa, Setaria italica
  Transcript Sequence Number=SeqID_1007
  Gene Ontology: Mol. function=NAD+ ADP-ribosyltransferase activity; Cellular component=nucleus
  Homolog annotation: Hit_ID=Q336N4; Match level="QueryCoverage=70%, HitCoverage=34%, E-value=1e-30, Identity=37%"; Hit description=Poly polymerase catalytic domain containing protein, expressed
  Pfam annotation: Domain name=PARP; Domain location=57-249; Score= -7.6; E_value=5.6e-06; Accession=PF00644.12; Description=Poly(ADP -ribose) polymerase catalytic domain
PSLFFDEESNGMVKGDAANVQGTAQGIMLDKAVNSPPEVVKQVVVESSQKPSVADILRKKIIYVERGSKDFLFVQDLFLSGMGPFAKPDNLLHAYRYSPNDITAQCRLQAFEKQIMSTKEERGDANVRYGWLGSRKNDIVRILINGLGTTGKPADKSDLSSGVYLSPEDRTFTSVGLCDVDEKGVQHVLLCQVILGNMEAVEPGSQEFFPSSDVYDSGVDDCLNPKCYVMWPSHLSTHMRLEYLVSFKL

SEQ ID NO: 66982 - protein, 92 aa, Setaria italica
  Transcript Sequence Number=SeqID_1008
  Gene Ontology: Mol. function=S-formylglutathione hydrolase activity
  Homolog annotation: Hit_ID=Q8LAS8; Match level="QueryCoverage=97%, HitCoverage=31%, E-value=6e-17, Identity=50%"; Hit description=S -formylglutathione hydrolase
ASKIPVLYWLSGLTCTDENFIIKAGAQRAAAAHGIALVAPDTSPRGLNIEGESDSYDFGVGKEQRIVTKITMLKHCILYKYMVCGLASFIQG

SEQ ID NO: 66983 - protein, 55 aa, Setaria italica
  Transcript Sequence Number=SeqID_1009
  Gene Ontology: Mol. function=S-formylglutathione hydrolase activity
  Homolog annotation: Hit_ID=Q8LAS8; Match level="QueryCoverage=89%, HitCoverage=17%, E-value=9e-18, Identity=83%"; Hit description=S -formylglutathione hydrolase
HFIVASAGFYLNATNEKWKNWRMYDYVVKELPKVLSDHFEQLNTTQASIFGHSMG

SEQ ID NO: 66984 - protein, 82 aa, Setaria italica
  Transcript Sequence Number=SeqID_1010
  Gene Ontology: Mol. function=ATP binding
  Homolog annotation: Hit_ID=B6TEA3; Match level="QueryCoverage=82%, HitCoverage=19%, E-value=9e-21, Identity=72%"; Hit description =Nucleotide-binding protein 1
VACSEVLTAARAGQRNVHRNGSPFLGKVPMDPQLCKAAEEGRSCFADQKCSASAPALQSIVKKFIKPECKIVLACWGSGGEQ

SEQ ID NO: 66985 - protein, 108 aa, Setaria italica
  misc_feature (61)..(61): Xaa can be any naturally occurring amino acid
  Transcript Sequence Number=SeqID_1011
  Gene Ontology: Mol. function=transcription factor binding; Cellular component=intracellular; Biological process=ER to Golgi vesicle -mediated transport
  Homolog annotation: Hit_ID=B6SHR1; Match level="QueryCoverage=92%, HitCoverage=73%, E-value=1e-45, Identity=90%"; Hit description =Trafficking protein particle complex protein 2
  Pfam annotation: Domain name=Sedlin_N; Domain location=1-108; Score =134.0; E_value=4.6e-37; Accession=PF04628.5; Description=Sedlin, N -terminal conserved region
LLTASFLLQKEDLAYHHQFILHAALDVVQDLAWTTNAMFLKSVDRFNDLVVSVYVTAGHIXQFMLLHDSRSDDGIKSFFQEVHELYIKIFLNPLYLPGSRIASSHFDT

SEQ ID NO: 66986 - protein, 135 aa, Setaria italica
  misc_feature (25)..(25): Xaa can be any naturally occurring amino acid
  Transcript Sequence Number=SeqID_1012
  Gene Ontology: Mol. function=transcription factor binding; Cellular component=intracellular; Biological process=ER to Golgi vesicle -mediated transport
  Homolog annotation: Hit_ID=B6SHR1; Match level="QueryCoverage=100%, HitCoverage=100%, E-value=8e-70, Identity=94%"; Hit description =Trafficking protein particle complex protein 2
  Pfam annotation: Domain name=Sedlin_N; Domain location=9-133; Score =235.7; E_value=1.1e-67; Accession=PF04628.5; Description=Sedlin, N -terminal conserved region
MASTACFVIVSKNDIPIYEAEVGSXPKKEDLAYHHQFILHAALDVVQDLAWTTNAMFLKSVDRFNDLVVSVYVTAGHTRFMLLHDSRSDDGIKSFFQEVHELYIKIFLNPLYLPGSRIASSHFDTKVRALARKYL

SEQ ID NO: 66987 - protein, 156 aa, Setaria italica
  Transcript Sequence Number=SeqID_1013
  Gene Ontology: Mol. function=aspartic-type endopeptidase activity; Cellular component=chromatin; Biological process=chromatin assembly or disassembly
  Homolog annotation: Hit_ID=Q2QU46; Match level="QueryCoverage=100%, HitCoverage=8%, E-value=8e-45, Identity=54%"; Hit description =Retrotransposon protein, putative, Ty3-gypsy subclass
ELVKDYNLEIHYHPGKANVVADALSRKSYGQIGPKDPHLQGEMARLNVHIIPQNTRRKLSVQPTLEERIREAQGSDPDLVRISRQTGENKAPDFRVDEKGTLWYKDRICVPKEGEFRQTIMDEAHNSAYSIHPGSTKMYMDLKQKYWWNGMKADIA

SEQ ID NO: 66988 - protein, 113 aa, Setaria italica
  Transcript Sequence Number=SeqID_1014
  Gene Ontology: Mol. function=protein binding; Cellular component =nucleus; Biological process=ribosome biogenesis
  Homolog annotation: Hit_ID=B6UCL1; Match level="QueryCoverage=100%, HitCoverage=15%, E-value=3e-59, Identity=93%"; Hit description =Nucleolar protein 10
VKVYELKELSMKFERHLISEIIDFQILGDDYSKLAFLCADRSVNLHAKYGSHYSLRIPRMGRGMAYDCWSCDLLCAASSPDLYRINLEQGRFLASLSSQSPAINAVTRSMVHG

SEQ ID NO: 66989 - protein, 96 aa, Setaria italica
  Transcript Sequence Number=SeqID_1015
KRSKMTATPLLQQSNHLSIYPSHLFDPSADSITSSDDSPALQGREVDHRLHLQQQRRRVMVPGGGRRGPDRALVLRHRRRLRREAVEEERGRVQRR

SEQ ID NO: 66990 - protein, 87 aa, Setaria italica
  misc_feature (68)..(68): Xaa can be any naturally occurring amino acid
  Transcript Sequence Number=SeqID_1016
  Subcellular localization annotation: CTP_CleavageSite=46; ConfidenceScore=5.79e-01
SPSPPPASSRPPPPSVTPPPGQPSSPQSTKPTQSPTRTPPPAPPPTAAAAAAEAAGSGKDGGGGGACXPPGHGAEPARQPRGVHVLA

SEQ ID NO: 66991 - protein, 82 aa, Setaria italica
  Transcript Sequence Number=SeqID_1017
  Gene Ontology: Mol. function=structural constituent of ribosome; Cellular component=intracellular; Biological process=translation
  Homolog annotation: Hit_ID=B6TJY8; Match level="QueryCoverage=85%, HitCoverage=36%, E-value=3e-15, Identity=64%"; Hit description=60S ribosomal protein L7/L12
  Pfam annotation: Domain name=Ribosomal_L12; Domain location=15-82; Score=58.2; E_value=3e-14; Accession=PF00542.11; Description =Ribosomal protein L7L12 C-terminal domain
GAAKAEEKKAEKTVFDVKLEKFDAAAKIKIIKEIRTFTDLGLKEAKELVEKAPVILKQSLTKEEAEAIIAKIKAAGGVAVME

SEQ ID NO: 66992 - protein, 164 aa, Setaria italica
  Transcript Sequence Number=SeqID_1018
  Gene Ontology: Mol. function=transcription coactivator activity; Biological process=transcription from RNA polymerase II promoter
  Homolog annotation: Hit_ID=Q949K3; Match level="QueryCoverage=93%, HitCoverage=23%, E-value=7e-49, Identity=63%"; Hit description =Suppressor-like protein
  Pfam annotation: Domain name=SGT1; Domain location=1-162; Score= -172.1; E_value=5.8e-06; Accession=PF07093.3; Description=SGT1 protein
LAAVHDDSIDTRAPDAVQAAIQRRIAGLPERAAENLHTARINVPAPVAKVLKEEPCLIARAVEGFYDRDIDTMKHAARMEKFLKGPSGEGVEMVRTSVRMTRAMYAQLVQQNFQAPRGYPMPRREEGPEKWMEAELGMKIACGFEMMYQERRRQGEEGKGSTWE

SEQ ID NO: 66993 - protein, 52 aa, Setaria italica
  Transcript Sequence Number=SeqID_1019
FPLAFSPLLSSCFIHRDLNLLHQNLLRHPEGGISKEELTSTIIARNILQSLG

SEQ ID NO: 66994 - protein, 70 aa, Setaria italica
  misc_feature (13)..(13): Xaa can be any naturally occurring amino acid
  Transcript Sequence Number=SeqID_1020
PGCDRRLTWQLIXLELRNYLQKLDLLTCEIYVSSATPCEIYLFDQLRSRVTCAAERLAIDWHCSVHMMIR

SEQ ID NO: 66995 - protein, 229 aa, Setaria italica
  misc_feature (103)..(103): Xaa can be any naturally occurring amino acid
  Transcript Sequence Number=SeqID_1021
  Gene Ontology: Mol. function=protein kinase activity; Cellular component=plasma membrane; Biological process=protein amino acid phosphorylation
  Homolog annotation: Hit_ID=B6SV61; Match level="QueryCoverage=84%, HitCoverage=23%, E-value=8e-85, Identity=79%"; Hit description =Brassinosteroid LRR receptor kinase
  Pfam annotation: Domain name=LRRNT_2; Domain location=49-91; Score =30.1; E_value=8.8e-06; Accession=PF08263.4; Description=Leucine rich repeat N-terminal domain
  Pfam annotation: Domain name=LRR_1; Domain location=120-142; Score =13.5; E_value=0.79; Accession=PF00560.25; Description=Leucine Rich Repeat
  Pfam annotation: Domain name=LRR_1; Domain location=144-166; Score =6.5; E_value=17; Accession=PF00560.25; Description=Leucine Rich Repeat
  Pfam annotation: Domain name=LRR_1; Domain location=168-190; Score =9.2; E_value=5.3; Accession=PF00560.25; Description=Leucine Rich Repeat
  Pfam annotation: Domain name=LRR_1; Domain location=192-215; Score =6.5; E_value=17; Accession=PF00560.25; Description=Leucine Rich Repeat
  Pfam module annotation: Pfam domain module=LRRNT_2::LRR_1::LRR_1::LRR_ 1::LRR_1; Domain location=49-91::120-142::144-166::168-190::192-215
MLPPRRRPTRLPFLLRCCCAALLLLLTPPPAAAQGHHRHHPAGDGVVISQADYQGLQAIRHDLADPYGILRSWNDSGLTACSGAWAGIKCVLGSVVAITLPWXRGLGGTLSQRGLGQLTRLRRLSLHDNAIAGPIPASLGFLPDLRGVYLFNNRFSGAVPASIGGCVALQSFDASNNRLTGAVPPAIANSTKLIRLNLSRNALSAQIPAEVVASASLLFLDLSYNNLSG

SEQ ID NO: 66996 - protein, 73 aa, Setaria italica
  Transcript Sequence Number=SeqID_1022
  Gene Ontology: Mol. function=electron carrier activity; Biological process=oxidation reduction
  Homolog annotation: Hit_ID=B9T5M5; Match level="QueryCoverage=75%, HitCoverage=10%, E-value=9e-12, Identity=58%"; Hit description =Cytochrome P450, putative
VFQAGARVCIGKELALVEMKAVIFAVVRSFDIEAIDRSSRRPKFAPGLTATFASGVPVRVRRRARVSGHSPPI

SEQ ID NO: 66997 - protein, 373 aa, Setaria italica
  misc_feature (45)..(45): Xaa can be any naturally occurring amino acid
  Transcript Sequence Number=SeqID_1023
  Pfam annotation: Domain name=DUF863; Domain location=1-372; Score= -167.7; E_value=1.5e-06; Accession=PF05904.3; Description=Plant protein of unknown function (DUF863)
FPLFKKSETESRHSLIDLNVPQEESLPVSSALFHSSSTYPGKTSXSPTEVSEAECGSGIGSMRGSSITVITPNSVADSSRDVVAESSVQRKGLFDLNVSLESIDMPSETISGYRDKVVNNDVSKGTASNHSFSRKNSLQAETSSKYLVHGNDHMLASKDDNNVLLPTSTNNGINKAQMPESGIVNKELLIPESPLADNNVPRLSISHNRASNLQEVSMLQAKAHDDDTTASIAARTLLSIFQHNSADTAYCPGSSSQTAAQNGNNEPQPSLDSFEKIVLSLDEIKDDGQSVYLAPSDKEGPACGIKLKRGRGMRNFQREIMPGLVSLARQEICEDLEAIGYEPKKTRSRKTRKRQGASSTRSRPRKRGSAARN

SEQ ID NO: 66998 - protein, 68 aa, Setaria italica
  Transcript Sequence Number=SeqID_1024
  Gene Ontology: Cellular component=integral to membrane
  Homolog annotation: Hit_ID=Q5JLY8; Match level="QueryCoverage=47%, HitCoverage=4%, E-value=2e-09, Identity=100%"; Hit description =Golgin-84
VIQALREELATTERRAEEERIAHNATKMAAVEREVELEHRAVEASNALARIQVMLQGIPIIIVYVGRI

SEQ ID NO: 66999 - protein, 496 aa, Setaria italica
  Transcript Sequence Number=SeqID_1025
  Gene Ontology: Cellular component=integral to membrane
  Homolog annotation: Hit_ID=Q5JLY8; Match level="QueryCoverage=99%, HitCoverage=70%, E-value=1e-174, Identity=67%"; Hit description =Golgin-84
  Pfam annotation: Domain name=DUF593; Domain location=356-426; Score= -35.1; E_value=0.037; Accession=PF04576.7; Description=Protein of unknown function, DUF593
GKPREKGPLKLTSAAQRERKSRQPPRERMKIEKIRPSAPADSSSVDASASEPVIAPIDVKEMNIEGTLEKGEKVTNDLKTDGAGTVADTVVEVQPMEVNSEDAAPAADVVAHSRNSEIAVESSSSVLDEKSESSSSNQTAEIGPVVNLEERDSDVAVVQDRNVSELSNTEGTVKLQESKKENVSDSPESIENQQGQKSDSVSVKEQDQLEEAQGLLKSAVKTGQSKEARLARVCAGLSSRLQEYKSENAQLEELLVQEREKSSSYEAHIKQLQQEISMSRVEGSRAESNMFDALTAKNAEIESLVKSLDSWKKRAAASEEKLASLEEDMDGLKRNRELTETRVIQALREELATTERRAEEERIAHNATKMAAVEREVELEHRAVEASNALARIQRAADQSSSRALELEHKVAVLEVECASLQQELQEMEARNRRAQKKPSEEANQVLQMQAWQEEVERARQSQREAEAKISSLEAELQKMRVEMAGMNRGCACFGF

SEQ ID NO: 67000 - protein, 121 aa, Setaria italica
  misc_feature (113)..(113): Xaa can be any naturally occurring amino acid
  Transcript Sequence Number=SeqID_1026
  Gene Ontology: Mol. function=protein binding; Cellular component =cytoplasm; Biological process=multicellular organismal development
  Homolog annotation: Hit_ID=Q3V810; Match level="QueryCoverage=100%, HitCoverage=32%, E-value=3e-49, Identity=83%"; Hit description =Anthocyanin biosynthetic gene regulator PAC1
  Pfam annotation: Domain name=WD40; Domain location=31-70; Score=28.3; E_value=3.2e-05; Accession=PF00400.24; Description=WD domain, G-beta repeat
RKPWNRFDDRYMAALLMDSSAVVVLDIRAPGVPVAELHRHRACANAVAWAPQASRHLCSAGDDGQAMIWELPETAPAPAPAAAVPAEGIDPVLVYDAGAEINQLQWSAAHPDXWMAIAFEN

SEQ ID NO: 67001 - protein, 43 aa, Setaria italica
  Transcript Sequence Number=SeqID_1027
TTALPMIEFGPVSGIWLSVTWMLATPENREIKSVTKNGTFSHT

SEQ ID NO: 67002 - protein, 77 aa, Setaria italica
  Transcript Sequence Number=SeqID_1028
  Gene Ontology: Mol. function=cytochrome-c oxidase activity; Cellular component=mitochondrion
  Homolog annotation: Hit_ID=B6STB2; Match level="QueryCoverage=100%, HitCoverage=100%, E-value=7e-38, Identity=94%"; Hit description =Cytochrome c oxidase polypeptide VIb
  Pfam annotation: Domain name=COX6B; Domain location=4-76; Score =135.9; E_value=1.2e-37; Accession=PF02297.9; Description=Cytochrome oxidase c subunit VIb
MAEIEIKTAPADFRFPTTNQTRHCFTRYVEYHRCVNAKGDDAGDCDKFAKYYRSLCPGEWVEKWNEQRENGTFPGPL

SEQ ID NO: 67003 - protein, 250 aa, Setaria italica
  Transcript Sequence Number=SeqID_1029
  Homolog annotation: Hit_ID=B6TQ15; Match level="QueryCoverage=100%, HitCoverage=96%, E-value=1e-106, Identity=79%"; Hit description =Protein CCC1
  Pfam annotation: Domain name=DUF125; Domain location=33-246; Score =272.1; E_value=1.3e-78; Accession=PF01988.11; Description=Integral membrane protein DUF125
MALNGGKTYVQDEEKQRLLLEEHTEKHFTAGEVVRDIIIGVSDGLTVPFALAAGLSGANASSALVLTAGLAEVAAGAISMGLGGYLAAKSEADHYNRELQREQDEIDTVPDVEAAEIADILSQYGLGPEEYGPVVTSLRNNPKAWLEFMMKFELGLEKPEPRRALVSAATIALSYVAGGLVPLLPYVFVPRAERAMAVSVAVTLAALLFFGFVKGRFTGDRPFLSAVQTTVVGALASAAAYAMARAVQSI

SEQ ID NO: 67004 - protein, 98 aa, Setaria italica
  misc_feature (46)..(46): Xaa can be any naturally occurring amino acid
  Transcript Sequence Number=SeqID_1030
DVDKFFKLCDPGECARSLRVARPGWGSVAEELCVGLLLGCGCFGGXWKLNLEKFPLSLSHLSSLSTLLGFRIIDGLVAFINAVLDCSCWILVTDYGPI

SEQ ID NO: 67005 - protein, 169 aa, Setaria italica
  misc_feature (81)..(81): Xaa can be any naturally occurring amino acid
  misc_feature (120)..(120): Xaa can be any naturally occurring amino acid
  Transcript Sequence Number=SeqID_1031
  Gene Ontology: Mol. function=catalytic activity; Cellular component =mitochondrion; Biological process=cellular metabolic process
  Homolog annotation: Hit_ID=B6TAE1; Match level="QueryCoverage=95%, HitCoverage=44%, E-value=1e-71, Identity=75%"; Hit description=NADH -ubiquinone oxidoreductase 39 kDa subunit
LVTYRNFSVSSGNLQMIAKEHGGIMRFIQVSCLGASPSSESKMLRAKAAGEESILKEHPEATIMRPATMIGTEDRILNRWXNSRSQPVYVIDVAAAIVNSLKDDGTSMGKIYELGDREIXTVHELAELMYETIREWPRYVNVPLPVARAIASPREMLLNKVPFPLPPFR

SEQ ID NO: 67006 - protein, 243 aa, Setaria italica
  misc_feature (158)..(158): Xaa can be any naturally occurring amino acid
  Transcript Sequence Number=SeqID_1032
  Gene Ontology: Mol. function=catalytic activity; Cellular component =mitochondrion; Biological process=cellular metabolic process
  Homolog annotation: Hit_ID=B6TAE1; Match level="QueryCoverage=97%, HitCoverage=50%, E-value=1e-109, Identity=83%"; Hit description=NADH- ubiquinone oxidoreductase 39 kDa subunit
ILGTNLDAMIAKEHGGIMRFIQVSCLGASPSSESKMLRAKAAGEESILKEFPEATIMRPATMIGTEDRILNRWAQFAKNWGFLPLVGGGSSKIQPVYVIDVAAAIVNSLKDDGTSMGKIYELGGPEIYTVHELAELMYETIREWPRYVNVPLPVARVXFSYQQMLNQKTGHLVHSPLDLCGSEMQAIASPREMLLNKVPFPLPTPSIFNLDQINAFSVDNLVSEDALTFEDLGIMPQKLKGYP

SEQ ID NO: 67007 - protein, 408 aa, Setaria italica
  Transcript Sequence Number=SeqID_1033
  Gene Ontology: Mol. function=catalytic activity; Cellular component =mitochondrion; Biological process=cellular metabolic process
  Homolog annotation: Hit_ID=B6TAE1; Match level="QueryCoverage=100%, HitCoverage=100%, E-value=0.0, Identity=94%"; Hit description=NADH -ubiquinone oxidoreductase 39 kDa subunit
  Pfam annotation: Domain name=3Beta_HSD; Domain location=79-321; Score= -102.4; E_value=0.00089; Accession=PF01073.11; Description=3-beta hydroxysteroid dehydrogenaseisomerase family
  Pfam annotation: Domain name=Epimerase; Domain location=78-290; Score= 19.2; E_value=1.5e-08; Accession=PF01370.13; Description=NAD dependent epimerasedehydratase family
  Pfam annotation: Domain name=NAD_binding_4; Domain location=80-273; Score=-84.8; E_value=0.0017; Accession=PF07993.4; Description=Male sterility protein
  Pfam annotation: Domain name=NmrA; Domain location=78-316; Score= -66.3; E_value=0.00018; Accession=PF05368.5; Description=NmrA-like family
  Pfam annotation: Domain name=RmlD_sub_bind; Domain location=78-351; Score=-164.6; E_value=0.0044; Accession=PF04321.9; Description=RmlD substrate binding domain
  Pfam module annotation: Pfam domain module=3Beta_HSD::Epimerase::NAD _binding_4::NmrA::RmlD_sub_bind; Domain location=79-321::78-290::80 -273::78-316::78-351
  Subcellular localization annotation: CTP_CleavageSite=46; ConfidenceScore=5.38e-01
MQSAAWRRHLLDHHLSPSTSAAIAAFRSASQPGLTPQGLCGADGARCMSSARAPAVEGSGYLVRKGTGGRSSVSGIVATVFGATGFLGRYLVQQLAKMGSQVLVPFRGSEDSHRHLKIMGDLGQIVPMKYNPRDVDSIKAVMAKSNVVVNLIGREYETRNYSFEEVNHHMAGQLAMIAKEHGGIMRFIQVSCLGASPSSESKMLRAKAAGEESILKEFPEATIMRPATMIGTEDRILNRWAQFAKNWGFLPLVGGGSSKIQPVYVIDVAAAIVNSLKDDGTSMGKIYELGGPEIYTVHELAELMYETIREWPRYVNVPLPVARAIASPREMLLNKVPFPLPTPSIFNLDQINAFSVDNLVSEDALTFEDLGIMPQKLKGYPVEYLLSYRKGGPAFGSTVSEKMRSSEM

SEQ ID NO: 67008 - protein, 70 aa, Setaria italica
  Transcript Sequence Number=SeqID_1034
ENAQYSNFIFICMTTNNCTETCRLKNKFHNHGSCEGTILETNCKCKLGWTIKNIFLFVCTNKEVKEHVTF

SEQ ID NO: 67009 - protein, 317 aa, Setaria italica
  Transcript Sequence Number=SeqID_1035
  Homolog annotation: Hit_ID=B9SSH8; Match level="QueryCoverage=96%, HitCoverage=95%, E-value=4e-94, Identity=56%"; Hit description=DNA binding protein, putative
  Pfam annotation: Domain name=DUF1664; Domain location=89-213; Score =224.0; E_value=3.7e-64; Accession=PF07889.4; Description=Protein of unknown function (DUF1664)
MATQTGVAASKVLILVSAGMTGSILLRNGKLSDVLGELQEIMKGVNQGAASGPYDIALIQAQIRNLAQEVRDLTLSRPITILNGKSDSGGGLSSYILPAAAVGAMGYCYMWWKGLSLSDVMFVTKRNMANAVQSMSKQLEQVSSALAATKRHLTQRLENLDGKMDEQVEVSKAIRNEVNDVKDDLSQIGFDIEAIQQMVAGLEGKIELLENKQDVANTGIWYLCQVAGGIKDGINTKFFQEATEKLKLSHPAQPETKPVKGLELFSESAKEHKVADSKPIMFKSDTENEKPTKTTAVKGAAVHRSIRFSFHKEGLAL

SEQ ID NO: 67010 - protein, 249 aa, Setaria italica
  misc_feature (211)..(211): Xaa can be any naturally occurring amino acid
  misc_feature (232)..(232): Xaa can be any naturally occurring amino acid
  Transcript Sequence Number=SeqID_1036
  Gene Ontology: Mol. function=drug transporter activity; Cellular component=membrane; Biological process=multidrug transport
  Homolog annotation: Hit_ID=B6TNR6; Match level="QueryCoverage=94%, HitCoverage=43%, E-value=1e-109, Identity=81%"; Hit description =Antiporter/ drug transporter/ transporter
PPNADNPASAADEAFELVATMREKHGLAPRLRSYSPVLAAFRRAGDASKAYAVEAHMAASGVSPEEPELAALLDISSTAGDADKVYEYMHKLRQTVDCVTEETAQVVEGWFSSDNAGVAGKAEWDAAQVKDAIVLNGGGCHRLGWLGTGPWTVQRVRAGADCQCAGCKCQLACVDIDMEETQRFADAVAALALERETKANFSQFQEWLEEXEYEAIVDGANIALYQQNFAEXFSLTQLDAVITELRGRY

SEQ ID NO: 67011 - protein, 181 aa, Setaria italica
  Transcript Sequence Number=SeqID_1037
  Gene Ontology: Mol. function=transporter activity; Cellular component= mitochondrial inner membrane; Biological process=transport
  Homolog annotation: Hit_ID=Q8VWY1; Match level="QueryCoverage=90%, HitCoverage=46%, E-value=2e-83, Identity=90%"; Hit description =Mitochondrial phosphate transporter
  Pfam annotation: Domain name=Mito_carr; Domain location=1-72; Score =46.4; E_value=1.1e-10; Accession=PF00153.19; Description =Mitochondrial carrier protein
  Pfam annotation: Domain name=Mito_carr; Domain location=85-168; Score= 1.1; E_value=0.0026; Accession=PF00153.19; Description=Mitochondrial carrier protein
  Pfam module annotation: Pfam domain module=Mito_carr::Mito_carr; Domain location=1-72::85-168
VALCPMEAVKVRVQTQPGFARGLSDGLPKFVKSEGYSGLYKGIVPLWGRQIPYTMMKFASFETVVEMIYKYAIPSPKSECSKNLQLGVSFAGGYIAGVFCAIVSHPADNLVSFLNNAKGATVGDAVKKIGLVGLFTRGLPLRIVMIGTLTGAQWGIYDAFKVMVGLPTTGGVAPTPAAAKA

SEQ ID NO: 67012 - protein, 104 aa, Setaria italica
  misc_feature (63)..(63): Xaa can be any naturally occurring amino acid
  Transcript Sequence Number=SeqID_1038
  Gene Ontology: Mol. function=nucleotide binding; Biological process =defense response
  Homolog annotation: Hit_ID=Q6EST1; Match level="QueryCoverage=74%, HitCoverage=8%, E-value=2e-12, Identity=45%"; Hit description =Putative MLA1
LKSALKVCGGNPLAVVVTAGLLATKQDSTWVFENTVLSTMKQDYGPQDYVTKILVMSYSDLPXHLKSCFLYLSTFPENYTILILQGDHGEEKAAPELGAPEIRA

SEQ ID NO: 67013 - protein, 186 aa, Setaria italica
  misc_feature (47)..(47): Xaa can be any naturally occurring amino acid
  misc_feature (111)..(111): Xaa can be any naturally occurring amino acid
  misc_feature (140)..(140): Xaa can be any naturally occurring amino acid
  Transcript Sequence Number=SeqID_1039
  Gene Ontology: Mol. function=nucleotide binding; Cellular component =membrane; Biological process=defense response
  Homolog annotation: Hit_ID=Q53LZ6; Match level="QueryCoverage=95%, HitCoverage=19%, E-value=6e-35, Identity=43%"; Hit description=NB -ARC domain containing protein, expressed
  Pfam annotation: Domain name=NB-ARC; Domain location=2-186; Score= -58.6; E_value=1.1e-05; Accession=PF00931.14; Description=NB-ARC domain
AKVFPVLGPGGLGKTTLAREVFKKQRSQFDCGAIVYVGRYPSIDDTXMNVARQVMPNSLVPCDKKVITKKLREFLYTKRYLIVIDDIWTISSWNSTTCAFPENNLGSRILXTTEAEKLAKFCCVKQIDYIFVLKPLVAQXMSFSDEDCQNYRNILKSALKVCGGNPLAVVVTAGLLATKAGQHLGV

SEQ ID NO: 67014 - protein, 397 aa, Setaria italica
  Transcript Sequence Number=SeqID_1040
  Homolog annotation: Hit_ID=A0SHI8; Match level="QueryCoverage=94%, HitCoverage=99%, E-value=0.0, Identity=89%"; Hit description=Kelch -motif containing protein (Fragment)
  Pfam annotation: Domain name=F-box; Domain location=36-83; Score =35.0; E_value=3e-07; Accession=PF00646.25; Description=F-box domain
  Pfam annotation: Domain name=Kelch_1; Domain location=127-173; Score =31.6; E_value=3.1e-06; Accession=PF01344.17; Description=Kelch motif
  Pfam annotation: Domain name=Kelch_1; Domain location=175-222; Score =50.7; E_value=5.6e-12; Accession=PF01344.17; Description=Kelch motif
  Pfam annotation: Domain name=Kelch_2; Domain location=127-173; Score =6.4; E_value=6.1; Accession=PF07646.7; Description=Kelch motif
  Pfam annotation: Domain name=Kelch_2; Domain location=175-222; Score =14.2; E_value=0.57; Accession=PF07646.7; Description=Kelch motif
  Pfam annotation: Domain name=Kelch_2; Domain location=269-308; Score =0.3; E_value=40; Accession=PF07646.7; Description=Kelch motif
  Pfam module annotation: Pfam domain module=F-box::Kelch_1::Kelch _1::Kelch_2::Kelch_2::Kelch_2; Domain location=36-83::127-173::175 -222::127-173::175-222::269-308
ARKFVPGAKMCIQPEVKQTKRKSRGSRKERCRTQAPLLPGLPDDLAIACLIRVPRVEHPNLRMVCKRWNRLLSGNYFYSLRKKIGVAEEWVYVFKRDREGKISWHAFDPLHQLWKSLPPVPSEYSEALGFGCAVLSGCYLYLFGGKDPLRGSMRRVVFYNARTNKWHRAPDMLRKRHFFGSCVINNCLYVAGGECEGIQRTLQSAEVYDPNRNRWACITEMNNGMVPFIGVVYDGKWFLKGLDSHRQVTSEVYLPSSNAWSTIDDEMVTGWRNPSISFNGRLYSADCRDGCKLRVYDDSTGTWTRFMDSKHHLGSSRAFEAAALVSLNGKLCIIRNNMSITLVDVSDPTMSVETDSARMWETVARKGQHRSFVANLWSTIAGRNLKSHIIHCQVLQV

SEQ ID NO: 67015 - protein, 85 aa, Setaria italica
  Transcript Sequence Number=SeqID_1041
  Gene Ontology: Mol. function=transcription factor activity; Cellular component=transcription factor complex; Biological process =regulation of transcription, DNA-dependent
  Homolog annotation: Hit_ID=B6U263; Match level="QueryCoverage=97%, HitCoverage=17%, E-value=3e-34, Identity=81%"; Hit description =Transcription factor E2F3
TPQDPNASHDFGAMTRIIPSDVDTDADYWLLTEGDVSITDMWKTAPEVQWDQMDFLSEEVVTPRAQNQQPVAVGGPHMQVPSMDK

SEQ ID NO: 67016 - protein, 206 aa, Setaria italica
  Transcript Sequence Number=SeqID_1042
  Gene Ontology: Mol. function=transcription factor activity; Cellular component=transcription factor complex; Biological process =regulation of transcription, DNA-dependent
  Homolog annotation: Hit_ID=B6U263; Match level="QueryCoverage=99%, HitCoverage=43%, E-value=2e-96, Identity=82%"; Hit description =Transcription factor E2F3
RGLTEDENNQRWLYVTEDDIKGLPCFQNETLIAIKAPHGTTLEVPDPDEAGDYLQRRYRIVLRSTMGPIDVYLVSQFDEKFEELGGVETPARHANMSRHHTVEDFNATNAGQCSTSMDVVHNVQQNQRTPQDPNASHDFGGMTRIIPSDVDTDADYWLLTEGDVSITDMWKTAPEVQWDQMDFLSEEVVTPRAQNQQPVRLGRPGP

SEQ ID NO: 67017 - protein, 175 aa, Setaria italica
  Transcript Sequence Number=SeqID_1043
  Homolog annotation: Hit_ID=B6TSR4; Match level="QueryCoverage=88%, HitCoverage=89%, E-value=6e-77, Identity=91%"; Hit description=Acid phosphatase/vanadium-dependent haloperoxidase related
  Pfam annotation: Domain name=DUF212; Domain location=27-164; Score =294.7; E_value=2.1e-85; Accession=PF02681.6; Description=Divergent PAP2 family
  Subcellular localization annotation: CTP_CleavageSite=38; ConfidenceScore=5.32e-01
MDVTAAAAAAVPPPPSPGAPQFSYLAVFSNCPLVAAVLAFAIAQSIKVFTTWYKENRWDAKQLIGSGGMPSSHSATVTALAVAVGLQEGFASSLFATAAVFASVVMYDAFGVRLHAGKQAEVLNQIVYELPSEHPLAETRPLRELLGHTPPQVFAGGVLGFAVATFTAMIAGLGS

SEQ ID NO: 67018 - protein, 141 aa, Setaria italica
  Transcript Sequence Number=SeqID_1044
  Gene Ontology: Mol. function=microtubule motor activity; Cellular component=microtubule associated complex; Biological process =microtubule-based movement
  Homolog annotation: Hit_ID=Q93XF4; Match level="QueryCoverage=94%, HitCoverage=15%, E-value=9e-65, Identity=89%"; Hit description =Kinesin heavy chain (Fragment)
LSETPESHKDDFPYDQSRLTYVLKDTLGGNSRVTFLCSISSEHRCRSGTLSTLRFGERAKLLPNKAVINEISEDDVNGLSDQIRQLKDELIRTKSGGTTTCKAGYFSAQNARESLHNLRVSLNRSLILPHIEVDSEEEMDV

SEQ ID NO: 67019 - protein, 226 aa, Setaria italica
  Transcript Sequence Number=SeqID_1045
  Gene Ontology: Mol. function=metal ion binding
  Homolog annotation: Hit_ID=B6SL08; Match level="QueryCoverage=90%, HitCoverage=59%, E-value=2e-63, Identity=53%"; Hit description =Ubiquitin-protein ligase/ zinc ion binding protein
  Pfam annotation: Domain name=IBR; Domain location=91-152; Score=46.7; E_value=9.2e-11; Accession=PF01485.13; Description=IBR domain
  Pfam annotation: Domain name=zf-C3HC4; Domain location=182-224; Score= 7.3; E_value=0.015; Accession=PF00097.17; Description=Zinc finger, C3HC4 type (RING finger)
  Pfam annotation: Domain name=zf-C3HC4; Domain location=22-71; Score =14.7; E_value=0.0021; Accession=PF00097.17; Description=Zinc finger, C3HC4 type (RING finger)
  Pfam module annotation: Pfam domain module=IBR::zf-C3HC4::zf-C3HC4; Domain location=91-152::182-224::22-71
RNVEDGSGDRKKKRSKRGRFNCAICFEMVEVSEKFAVSHCAHAFCNSCVGRYVAGKIAENVAVVGCPDPECEDGVVEMDLCRDIVPPELFDRWNVALCENLLGDDKMYCPFKDCSALLINDGLVKIRETECPHCHRLFCARCRVAWHDGIKCKEFRKLGDDEKGEDDLTLKKLANKKKWQRCPKCKMYVSRTSGCLLIKCRCKQYFCYHCAAPMDKTTHYCENCKR

SEQ ID NO: 67020 - protein, 110 aa, Setaria italica
  Transcript Sequence Number=SeqID_1046
  Gene Ontology: Mol. function=cation transmembrane transporter activity; Cellular component=integral to membrane; Biological process=cation transport
  Homolog annotation: Hit_ID=Q01KD5; Match level="QueryCoverage=70%, HitCoverage=26%, E-value=4e-22, Identity=67%"; Hit description =OSIGBa0113I13.12 protein
  Subcellular localization annotation: CTP_CleavageSite=79; ConfidenceScore=5.29e-01
SGRRPKRRSNGIPHGPPKKSLVSSPYMVLQRNPLLVHLIYFMSISSTGFLALKSLTPQHKPTPRSLDLAFTSVSTLTVSSMATVEMEDFSDQQLWVLILLMLLGGKSVHF

SEQ ID NO: 67021 - protein, 76 aa, Setaria italica
  Transcript Sequence Number=SeqID_1047
VVDDRIPPLLVWPWCPRRRRARQARRLRGHQGRHQVHLILDRLPCLVTALVPSETACLASSPRRRRAWRAPRGERR

SEQ ID NO: 67022 - protein, 118 aa, Setaria italica
  Transcript Sequence Number=SeqID_1048
  Gene Ontology: Mol. function=DNA binding; Cellular component =chromosome; Biological process=nucleosome assembly
  Homolog annotation: Hit_ID=P05621; Match level="QueryCoverage=100%, HitCoverage=83%, E-value=1e-39, Identity=69%"; Hit description =Histone H2B.2
  Pfam annotation: Domain name=Histone; Domain location=25-95; Score =107.4; E_value=5e-29; Accession=PF00125.16; Description=Core histone H2AH2BH3H4
KAEKRLPAGKSAGKDGEKKGKKKAKKSVETYKIYIFKVLKQVHPDIGISSKAMSIMNSFINDIFEKLAAEAAKLARYNKKPTITSREIQTSVRLVLPGELAKHAVSEGTKAVTKFTSS

SEQ ID NO: 67023 - protein, 137 aa, Setaria italica
  Transcript Sequence Number=SeqID_1049
  Gene Ontology: Mol. function=DNA binding; Cellular component =chromosome; Biological process=nucleosome assembly
  Homolog annotation: Hit_ID=P05621; Match level="QueryCoverage=67%, HitCoverage=61%, E-value=5e-39, Identity=86%"; Hit description =Histone H2B.2
  Pfam annotation: Domain name=Histone; Domain location=44-114; Score =107.4; E_value=5e-29; Accession=PF00125.16; Description=Core histone H2AH2BH3H4
AEEEPAAEKAEKTPAGKKPKAEKRLPAGKSAGKDGEKKGKKKAKKSVETYKIYIFKVLKQVHPDIGISSKAMSIMNSFINDIFEKLAAEAAKLARYNKKPTITSREIQTSVRLVLPGELAKHAVSEGTKAVTKFTSS

SEQ ID NO: 67024 - protein, 108 aa, Setaria italica
  misc_feature (78)..(78): Xaa can be any naturally occurring amino acid
  Transcript Sequence Number=SeqID_1050
  Gene Ontology: Mol. function=DNA binding; Cellular component =chromosome; Biological process=nucleosome assembly
  Homolog annotation: Hit_ID=P05621; Match level="QueryCoverage=86%, HitCoverage=61%, E-value=2e-44, Identity=96%"; Hit description =Histone H2B.2
  Pfam annotation: Domain name=Histone; Domain location=14-85; Score =95.6; E_value=1.8e-25; Accession=PF00125.16; Description=Core histone H2AH2BH3H4
RRTKGHRKGKKKAKKSVETYKIYIFKVLKQVHPDIGISSKAMSIMNSFINDIFEKLAGEAAKLARYNKKPTITSREIXQTSVRLVLPGELAKHAVSEGTKAVTKFTSS

SEQ ID NO: 67025 - protein, 115 aa, Setaria italica
  Transcript Sequence Number=SeqID_1051
  Gene Ontology: Mol. function=DNA binding; Cellular component =chromosome; Biological process=nucleosome assembly
  Homolog annotation: Hit_ID=P05621; Match level="QueryCoverage=80%, HitCoverage=61%, E-value=5e-46, Identity=97%"; Hit description =Histone H2B.2
  Pfam annotation: Domain name=Histone; Domain location=22-92; Score =107.1; E_value=6e-29; Accession=PF00125.16; Description=Core histone H2AH2BH3H4
SRGQVRRQGGRRRGKKGKKKAKKSVETYKIYIFKVLKQVHPDIGISSKAMSIMNSFINDIFEKLAGEAAKLARYNKKPTITSREIQTSVRLVLPGELAKHAVSEGTKAVTKFTSS

SEQ ID NO: 67026 - protein, 138 aa, Setaria italica
  Transcript Sequence Number=SeqID_1052
  Gene Ontology: Mol. function=DNA binding; Cellular component =chromosome; Biological process=nucleosome assembly
  Homolog annotation: Hit_ID=P05621; Match level="QueryCoverage=65%, HitCoverage=60%, E-value=9e-46, Identity=98%"; Hit description =Histone H2B.2
  Pfam annotation: Domain name=Histone; Domain location=45-115; Score =107.1; E_value=6e-29; Accession=PF00125.16; Description=Core histone H2AH2BH3H4
KPAEEEPAAEKAPAGKKPKAEKRLPAGKSSAGKDGEGKKGKKKAKKSVETYKIYIFKVLKQVHPDIGISSKAMSIMNSFINDIFEKLAGEAAKLARYNKKPTITSREIQTSVRLVLPGELAKHAVSEGTKAVTKFTSS

SEQ ID NO: 67027 - protein, 139 aa, Setaria italica
  Transcript Sequence Number=SeqID_1053
  Gene Ontology: Mol. function=DNA binding; Cellular component =chromosome; Biological process=nucleosome assembly
  Homolog annotation: Hit_ID=Q943L2; Match level="QueryCoverage=80%, HitCoverage=80%, E-value=9e-47, Identity=83%"; Hit description =Histone H2B.11
  Pfam annotation: Domain name=Histone; Domain location=46-116; Score =108.9; E_value=1.8e-29; Accession=PF00125.16; Description=Core histone H2AH2BH3H4
MAPKAEKKPAEKKPAEEKADKKPKAEKRVPGSGKEGGEKKGKKKAKKSVETYKIYIFKVLKQVHPDIGISSKAMSIMNSFINDIFEKLAQEAARLARYNKKPTITSREIQTSVRLVLPGELAKHAVSEGTKAVTKFTSS

SEQ ID NO: 67028 - protein, 151 aa, Setaria italica
  Transcript Sequence Number=SeqID_1054
  Gene Ontology: Mol. function=DNA binding; Cellular component =chromosome; Biological process=nucleosome assembly
  Homolog annotation: Hit_ID=P05621; Match level="QueryCoverage=60%, HitCoverage=61%, E-value=4e-39, Identity=86%"; Hit description =Histone H2B.2
  Pfam annotation: Domain name=Histone; Domain location=58-128; Score =107.4; E_value=5e-29; Accession=PF00125.16; Description=Core histone H2AH2BH3H4
MAPKAEKKPAAKKPAEEEPAAEKAEKAPAGKKPKAEKRLPAGKSAGKDGEKKGKKKAKKSVETYKIYIFKVLKQVHPDIGISSKAMSIMNSFINDIFEKLAAEAAKLARYNKKPTITSREIQTSVRLVLPGELAKHAVSEGTKAVTKFTSS

SEQ ID NO: 67029 - protein, 623 aa, Setaria italica
  misc_feature (178)..(178): Xaa can be any naturally occurring amino acid
  Transcript Sequence Number=SeqID_1055
  Gene Ontology: Mol. function=protein serine/threonine kinase activity; Biological process=protein amino acid phosphorylation
  Homolog annotation: Hit_ID=B9S2T6; Match level="QueryCoverage=97%, HitCoverage=61%, E-value=8e-34, Identity=45%"; Hit description=ATP binding protein, putative
  Pfam annotation: Domain name=Usp; Domain location=7-134; Score=44.6; E_value=3.8e-10; Accession=PF00582.18; Description=Universal stress protein family
GRRRREGRTVVVGVRADIESRALLTWVLVNAAAPGDRVVAVHVVVASGAEAAAAVDFDAMLGVYEGFCNLKQINLKVKICKDSSVRKALVREARLFEASALVLGLAKKRRAMLSPHSVAKYCAKKLPAKCAVFAVNNGKIEFSRESNVHSGKVSAEVPPCGDDEMYCVVPFRARQAKXDTVSLEEPKDDFEGDTTQDVSTEGCKPEDPITEAQPVSCVDPVDLSRDQVQTDTDPSIKAEKSTAEQKDGTAELPGQGASVLYCVLPERSSDSVASTSSRQDHDSIDLPAEGAGELYCILPPRNGHSSRSIGDSKRSTASRKDDKSANLALEGDSDLYCRLPRNERSGRSSGGSKRCVGIKSMIRRSSSFSSDIHLNSETSPSKRDGSVSMAATERSSSTVSTEAEDSPNYTARNAETPSSSPMSLRRMIEGRSDRCHLRRRIFSHHRSSSFEWAKMSMVQWAMRLPSRYTSVHPDSKLLKSGASPRLNCDSETESTSAVEPESMFSFAFYDVAWPPSELESLREKYSSVCRLFSYEELKLATGNYSPDMLIGKGGTSQVYKAQLYDGTYSAIKILKPSVDAIHEFITEIEIVTSLQHENIVALRGFSFENYNLVLVYDHMPQGS

SEQ ID NO: 67030 - protein, 172 aa, Setaria italica
  Transcript Sequence Number=SeqID_1056
ASDKYVKYQDHVTPNGKHYITWMDIRDAEYVPTLTKLIVCSPNLVAAFVGTGQISQILMCQPGASSWSVRAYDPCHMFEDMAFYQGKLYALADDENLLVINISQDPSTGDPQVSRIGQVIKGDPDPLFDAWFPDDTTGSKKLYLVESRGALLMVRRKVCCRMVDGHDCCWTD

SEQ ID NO: 67031 - protein, 159 aa, Setaria italica
  Transcript Sequence Number=SeqID_1057
  Gene Ontology: Mol. function=protein binding; Biological process =ethylene mediated signaling pathway
  Homolog annotation: Hit_ID=Q0QW06; Match level="QueryCoverage=100%, HitCoverage=17%, E-value=1e-45, Identity=56%"; Hit description =Ethylene-overproducer1-like protein
MRSSFLSESPCDEQHIHGYGFNPQSWLQVERGKLPKSSYSPSSIESLIKIAEPPVVPLYKPLDYVEVLSRIHEELEQCMPSERPGLYLVQSQVFRGLGEAKLRQRSLHSAWRCATTVHEKVIFGAWLRYEKRGEEIISDVLASCRKCCREFGPLDIASE

SEQ ID NO: 67032 - protein, 125 aa, Setaria italica
  Transcript Sequence Number=SeqID_1058
MISTTKSGASTHVSNHARTPPPAADSYIHTPTDIPQHAPRTGDSTHAKTNHIIISRPDRPGSTTASPDDGSSRRGSRRRRRRRTPPRGAPRPRRRRWALAEISLGEFKALERCAQAGGRGEAAGW

SEQ ID NO: 67033 - protein, 82 aa, Setaria italica
  Transcript Sequence Number=SeqID_1059
KTSVTHCSRSSAKKDDYLSPQQLISMTQSQPESNPPHLIEIEDEDYNNVNVDVGLSIPMIRNTPLGSTPYLPQLQQMGVSFH

SEQ ID NO: 67034 - protein, 110 aa, Setaria italica
  Transcript Sequence Number=SeqID_1060
  Gene Ontology: Cellular component=cytoplasm; Biological process =response to stress
  Homolog annotation: Hit_ID=B6TD78; Match level="QueryCoverage=95%, HitCoverage=71%, E-value=3e-23, Identity=57%"; Hit description=16.9 kDa class I heat shock protein 3
  Pfam annotation: Domain name=HSP20; Domain location=25-110; Score =80.9; E_value=4.4e-21; Accession=PF00011.13; Description=Hsp20alpha crystallin family
RRPTLWGVVRPLAEQCPVLTNVRVDWKETPDAHVFRADLPGVKKDAARVEVEDGGVLVISGERAREEAGEGEAWRLVERSSGGFRRRFRLPRGARLDQVRASMEDGVLTV

SEQ ID NO: 67035 - protein, 61 aa, Setaria italica
  Transcript Sequence Number=SeqID_1061
  Subcellular localization annotation: CTP_CleavageSite=42; ConfidenceScore=5.25e-01
KGNHSVQSSLFLTFAAPTSLKLTAQRTKHILDRLFTLTTAIRAKDRQARSDSEAPRRHERS

SEQ ID NO: 67036 - protein, 37 aa, Setaria italica
  misc_feature (14)..(14): Xaa can be any naturally occurring amino acid
  Transcript Sequence Number=SeqID_1062
LLRDTDEDLGGAVXGHVDDMTKQTYLNEPVLCNLKKR

SEQ ID NO: 67037 - protein, 85 aa, Setaria italica
  Transcript Sequence Number=SeqID_1063
  Gene Ontology: Cellular component=integral to membrane
  Homolog annotation: Hit_ID=B6T3V4; Match level="QueryCoverage=83%, HitCoverage=24%, E-value=2e-32, Identity=88%"; Hit description =Senescence-associated protein
NRRFLEYQLSDYSGWLRERVADPQYWATISACLRDGHACSGMRRFARDPNTGMRVPETPDMFYGRNLSPIQVSFLVLSISSPNSS

SEQ ID NO: 67038 - protein, 57 aa, Setaria italica
  Transcript Sequence Number=SeqID_1064
  Gene Ontology: Cellular component=integral to membrane
  Homolog annotation: Hit_ID=B6T3V4; Match level="QueryCoverage=85%, HitCoverage=16%, E-value=1e-16, Identity=81%"; Hit description =Senescence-associated protein
PNSSRLISACLRDGHACSGMRRFARDPNTGMRVPETPDMFYGRNLSPIQFLPALLSM

SEQ ID NO: 67039 - protein, 293 aa, Setaria italica
  Transcript Sequence Number=SeqID_1065
  Gene Ontology: Cellular component=integral to membrane
  Homolog annotation: Hit_ID=B6T3V4; Match level="QueryCoverage=100%, HitCoverage=100%, E-value=1e-131, Identity=78%"; Hit description =Senescence-associated protein
  Pfam annotation: Domain name=Tetraspannin; Domain location=5-269; Score=119.0; E_value=1.5e-32; Accession=PF00335.12; Description =Tetraspanin family
MLRGGTSVLGIVNFITFLISIPILGGGIWLASRANSTDCIRFLQWPIIVVGLVLMVISLMGFAGACYRQTWLLRLYLFAMFFVVLALLFFIVFAFAVTDRGDGQVVMNRRFLEYQLSDYSGWLRERVADPQYWATISACLRDGHACSGMRRFARDPNTGMRVPETPDMFYGRNLSPIQSGCCKPPSSCAFTYNNETYWTPNPGVPVISDPDCNRWNNDQQTLCFQCDSCKAGVLAGIKKSWRKVAILNIVVLIILVIVYVAGCAAFRNAKRIENDEPIGMARMTKSQPSRFQF

SEQ ID NO: 67040 - protein, 62 aa, Setaria italica
  Transcript Sequence Number=SeqID_1066
  Gene Ontology: Mol. function=binding
  Homolog annotation: Hit_ID=B9SSL4; Match level="QueryCoverage=95%, HitCoverage=2%, E-value=5e-19, Identity=76%"; Hit description =Ubiquitin-protein ligase, putative
YLLDPQTQSQQGRLLAALALGDLFQNEGLARSTDAVAACRALVNLLEDQPTEEMKVVDLRED

SEQ ID NO: 67041 - protein, 84 aa, Setaria italica
  Transcript Sequence Number=SeqID_1067
  Gene Ontology: Mol. function=protein serine/threonine kinase activity; Biological process=protein amino acid phosphorylation
  Homolog annotation: Hit_ID=Q5ZAL3; Match level="QueryCoverage=100%, HitCoverage=10%, E-value=3e-36, Identity=86%"; Hit description =Putative serine/threonine kinase
HRDLKASNILLDKDLNPKISDFGMARIFGSNMTEANTKRVVGTYGYMAPEYASEGIFSVKSDVYSFGVLLLEIVSGKRNSGPHR

SEQ ID NO: 67042 - protein, 103 aa, Setaria italica
  Transcript Sequence Number=SeqID_1068
  Gene Ontology: Mol. function=protein serine/threonine kinase activity; Biological process=protein amino acid phosphorylation
  Homolog annotation: Hit_ID=Q5ZAL3; Match level="QueryCoverage=83%, HitCoverage=10%, E-value=3e-40, Identity=90%"; Hit description =Putative serine/threonine kinase
  Pfam annotation: Domain name=Pkinase_Tyr; Domain location=1-102; Score=-172.5; E_value=0.029; Accession=PF07714.9; Description =Protein tyrosine kinase
GIAQGLLYLHKHSRVRIIHRDLKASNILLDKDLNPKISDFGMARIFGSNMTEANTKRVVGTYGYMAPEYASEGIFSVKSDVYSFGVATYFVVFVLVRFLSRLT

SEQ ID NO: 67043 - protein, 102 aa, Setaria italica
  Transcript Sequence Number=SeqID_1069
  Subcellular localization annotation: CTP_CleavageSite=72; ConfidenceScore=5.38e-01
LHCIARATRRHKIHRRRRNPPTTANSSKVATPRTTTHRRPPPPSPCVHSDSCRPYTLPELDNTRELRRRNPTSDNSWNKGKMLASACTHAAPGLPARGVLAS

SEQ ID NO: 67044 - protein, 94 aa, Setaria italica
  misc_feature (65)..(94): Xaa can be any naturally occurring amino acid
  Transcript Sequence Number=SeqID_1070
SGLSLKILFRGLFDLNAKPLPTTDIPDVGVVGQDEIDEVPEALLFKFVPPQDATLLQLISLSMNXXXXXXXXXXXXXXXXXXXXXXXXXXXXXX

SEQ ID NO: 67045 - protein, 70 aa, Setaria italica
  misc_feature (37)..(37): Xaa can be any naturally occurring amino acid
  Transcript Sequence Number=SeqID_1071
  Gene Ontology: Cellular component=chloroplast envelope
VIVGGGHAATIAVRAAGKGLIRPSAVAAVAPTWAGPXPIVFGRGSDMETRSEGWEAIENFGLFELVCLVV

SEQ ID NO: 67046 - protein, 104 aa, Setaria italica
  misc_feature (97)..(97): Xaa can be any naturally occurring amino acid
  Transcript Sequence Number=SeqID_1072
  Gene Ontology: Mol. function=hydrolase activity; Cellular component =chloroplast envelope
  Homolog annotation: Hit_ID=Q8YRD4; Match level="QueryCoverage=79%, HitCoverage=27%, E-value=2e-09, Identity=34%"; Hit description =Alr3514 protein
MLKVPFDFAEYQFFFNRYGLLRGTLRAPAIGWMMYNVLVSNEKSIQSQYKSHVYANPENVTPDIIESRYELTKRKGARYVPAAFLTGLLDPVQSREXFLQLFAK

SEQ ID NO: 67047 - protein, 332 aa, Setaria italica
  Transcript Sequence Number=SeqID_1073
  Gene Ontology: Mol. function=hydrolase activity; Cellular component =chloroplast envelope
  Homolog annotation: Hit_ID=Q8YRD4; Match level="QueryCoverage=84%, HitCoverage=85%, E-value=1e-32, Identity=31%"; Hit description =Alr3514 protein
  Subcellular localization annotation: CTP_CleavageSite=28; ConfidenceScore=5.23e-01
AAVAFLSPAVAVSSRALPLRRARHLAVRAVASPPASKAKPAPPPSKTGKWEWRFEDKPINIYYEEHEQDTYENVKNILMIPTISDVSTVEEWRVVAKDIVGRKGELGYRATIVDWPGLGYSDRPSLNYNADVMENFLVQLVNSPNSPVANADDELVIVGGGHAATIAVRAAGKGLIRPSAVAAVAPTWAGPLPIVFGRGSDMETRYGLLRGTLRAPAIGWMMYNVLVSNEKSIQSQYKSHVYANPENVTPDIIESRYELTKRKGARYVPAAFLTGLLDPVQSREEFLQLFAKLDGDTHVLIVSTLNAPKRSKAEMEALKGAKGVTKFVEVPR

SEQ ID NO: 67048 - protein, 56 aa, Setaria italica
  Transcript Sequence Number=SeqID_1074
SFVKFLELTLYSSLRVGAPARGKPPLVDSAFELLPRQQEYVQNRHFPLSTEKYHGS

SEQ ID NO: 67049 - protein, 141 aa, Setaria italica
  Transcript Sequence Number=SeqID_1075
  Gene Ontology: Cellular component=integral to membrane; Biological process=transport
  Homolog annotation: Hit_ID=Q9LZM7; Match level="QueryCoverage=50%, HitCoverage=33%, E-value=1e-25, Identity=76%"; Hit description=PRA1 family protein A1
  Subcellular localization annotation: CTP_CleavageSite=77; ConfidenceScore=5.46e-01
HSSSPRSPSYPAIPNPEGSDARARPDRTAPSHGAEPSRSVAAVPARPPPRRPARAVARCPRVPRGGGSPEMDWSAVTAEDLVDALREVDWSTPPRPVPEFFSRFTVPRSYSKWTSRLKCNLYYYRTNYFILIMFILGMGFL

SEQ ID NO: 67050 - protein, 74 aa, Setaria italica
  Transcript Sequence Number=SeqID_1076
  Gene Ontology: Cellular component=integral to membrane; Biological process=transport
  Homolog annotation: Hit_ID=Q8W115; Match level="QueryCoverage=83%, HitCoverage=29%, E-value=3e-12, Identity=58%"; Hit description=PRA1 family protein A3
LSHDRQEKIKYQLHVSVSCMLWLTSCSLLTVLWALLIGLLATLLHASFRTPNLKARLNTFREEFRAVWRNYSEL

SEQ ID NO: 67051 - protein, 97 aa, Setaria italica
  misc_feature (18)..(18): Xaa can be any naturally occurring amino acid
  misc_feature (33)..(33): Xaa can be any naturally occurring amino acid
  Transcript Sequence Number=SeqID_1077
  Gene Ontology: Cellular component=integral to membrane; Biological process=transport
  Homolog annotation: Hit_ID=Q8GWC3; Match level="QueryCoverage=89%, HitCoverage=41%, E-value=9e-20, Identity=52%"; Hit description=PRA1 family protein A2
EGPNPKLNDLVIRGRPSXRRSIHICGRPRWVLXVCWFSAVSCMLWLTSCSLLTVLWALLIGLLATLLHASFRTPNLKARLNTFREEFRAVWRNYSEL

SEQ ID NO: 67052 - protein, 133 aa, Setaria italica
  Transcript Sequence Number=SeqID_1078
  Gene Ontology: Cellular component=integral to membrane; Biological process=transport
  Homolog annotation: Hit_ID=Q8GWC3; Match level="QueryCoverage=93%, HitCoverage=59%, E-value=2e-39, Identity=59%"; Hit description=PRA1 family protein A2
  Pfam annotation: Domain name=PRA1; Domain location=5-102; Score= -37.7; E_value=0.024; Accession=PF03208.11; Description=PRA1 family protein
  Subcellular localization annotation: CTP_CleavageSite=72; ConfidenceScore=5.31e-01
NALITENNDNIAFLNDSFAVTFNEKVTRSVRQFSPHLAAKMRPPTTPVIRGRPSKRRSIHICGRPRWVLVLLFSAVSCMLWLTSCSLLTVLWALLIGLLATLLHASFRTPNLKARLNTFREEFRAVWRNYSEL

SEQ ID NO: 67053 - protein, 219 aa, Setaria italica
  Transcript Sequence Number=SeqID_1079
  Gene Ontology: Cellular component=integral to membrane; Biological process=transport
  Homolog annotation: Hit_ID=Q8GWC3; Match level="QueryCoverage=95%, HitCoverage=100%, E-value=7e-77, Identity=62%"; Hit description=PRA1 family protein A2
  Pfam annotation: Domain name=PRA1; Domain location=26-188; Score =164.5; E_value=3.1e-46; Accession=PF03208.11; Description=PRA1 family protein
AAAAAAEAPEMDWSAVTAEDLVDALREVDWSTPPRPVPEFFSRFTVPRSYSKWTSRLKCNLYYYRTNYFILIMFILGMGFLWKPVAILAAFMTGLSIAFLNDSFAVTFNEKVTRTVRQFSPHLAAKMRPPITPVLRGRPSSKRSIHICGRPRWVFVLFFSAVSCILWLTSCSLLTVLWALLIALFATVLHASFRTPNLKARLNTFREEFRAVWRNYSEL

SEQ ID NO: 67054 - protein, 111 aa, Setaria italica
  Transcript Sequence Number=SeqID_1080
  Subcellular localization annotation: CTP_CleavageSite=74; ConfidenceScore=5.35e-01
PCFVKTLVLWPWPPARIGSCLRLCPLLSTLGSRAAASPARPIRNFESSLLSLHPNSVPLSSRQLQFLAGVAVLKDSSFPGLDCGQPHRFQQLPNLPSPPVLAAELPTKKIH

SEQ ID NO: 67055 - protein, 164 aa, Setaria italica
  Transcript Sequence Number=SeqID_1081
  Subcellular localization annotation: CTP_CleavageSite=19; ConfidenceScore=5.09e-01
QAPLILAHQGRTGGLGEVTSGRVKAGRSRVGRTERSSHGRARRRSGATARLYDDGGGRPLPRVGSSGATARPGRKASSSTRRASLVARILGGKSLPKVCRRGQSALMEEAELKFLVRFMWLGIGAPSCHGACFVLVEYFCLLGRIAHIKFRFSCLRRWSEKLVG

SEQ ID NO: 67056 - protein, 49 aa, Setaria italica
  Transcript Sequence Number=SeqID_1082
LVKIPGTATIDIYITTSACRFPFLKIVSKLCNQNILAEFPACRLSLYTL

SEQ ID NO: 67057 - protein, 727 aa, Setaria italica
  Transcript Sequence Number=SeqID_1083
  Gene Ontology: Mol. function=nucleoside-triphosphatase activity; Cellular component=integral to membrane; Biological process=protein catabolic process
  Homolog annotation: Hit_ID=Q6H6R9; Match level="QueryCoverage=93%, HitCoverage=82%, E-value=0.0, Identity=86%"; Hit description=Cell division protease ftsH homolog 7, chloroplastic
  Pfam annotation: Domain name=AAA; Domain location=284-474; Score =295.3; E_value=1.3e-85; Accession=PF00004.21; Description=ATPase family associated with various cellular activities (AAA)
  Pfam annotation: Domain name=AAA_2; Domain location=280-414; Score= -20.1; E_value=0.00042; Accession=PF07724.6; Description=ATPase family associated with various
  Pfam annotation: Domain name=AAA_5; Domain location=284-419; Score =19.9; E_value=2.1e-05; Accession=PF07728.6; Description=ATPase family associated with various
  Pfam annotation: Domain name=FtsH_ext; Domain location=98-258; Score =54.0; E_value=5.9e-13; Accession=PF06480.7; Description=FtsH Extracellular
  Pfam annotation: Domain name=Peptidase_M41; Domain location=481-697; Score=114.6; E_value=3.3e-31; Accession=PF01434.10; Description =Peptidase family M41
  Pfam module annotation: Pfam domain module=AAA::AAA_2::AAA_5::FtsH _ext::Peptidase_M41; Domain location=284-474::280-414::284-419::98 -258::481-697
  Subcellular localization annotation: CTP_CleavageSite=34; ConfidenceScore=5.14e-01
RVDRDASAEPGGDSTSTSTTSAAATPPPQPSSKRGENKWRRKLHKGGGVGRWLWEPIVQGREMGFLLLQLGFAIFALRMLRPEIALPGSEPRPQTTYLSVPYSDFLASIDKDQVKKVEVDGVHIMFRLRPEVEARAVKQIPAQRGTDAVADNAGVSRRIVFTTTRPVDIKTPYEKMVENMVEFGSPDKRSGGMLNSALVALIYVVLIAVVLQRLPISFSQHSAGQLRNRKNSNSSGAKVSESTDIVTFADVAGVDEAKEELEEIVEFLRNPERYIRLGARPPRGVLLVGLPGTGKTLLAKAVAGEAEVPFISCSASEFVELYVGMGAARVRDLFARAKKESPSIIFIDEIDAVAKSRDGRYRIVSNDEREQTLNQLLTEMDGFDTNSAVIVLGATNRADVLDPALRRPGRFDRVVMVEAPDRFGRESILKVHVNRRELPLSKDVDLADIAAMTTGFTGADLANLVNEAALLAGRLNKEIVEKVDFIRAVERSIAGIEKKHAKLKGNEKAVVARHEVGHALVGTAVANLLPGQPRVEKLSILPRSGGALGFTYTPPTTEDRYLLFVDELRGRLVTLLGGRAAEEIVLAGRVSTGALDDIRRATDMAYKAVAEYGLNQRIGPISVATLSNGGLDDSGGSPWGRDQGHLVDLVQREVKSLLQSALEVALSVIRANPAVLEGLGAYLEENEKVEGEELQEWLKSVVAPKELTSFIRGQQEQVLQLELEAGS

SEQ ID NO: 67058 - protein, 194 aa, Setaria italica
  Transcript Sequence Number=SeqID_1084
  Gene Ontology: Mol. function=small conjugating protein ligase activity; Cellular component=multivesicular body; Biological process= protein modification process
  Homolog annotation: Hit_ID=Q9LHG8; Match level="QueryCoverage=78%, HitCoverage=37%, E-value=5e-47, Identity=61%"; Hit description =Protein ELC
  Pfam annotation: Domain name=UEV; Domain location=43-165; Score =214.2; E_value=3.3e-61; Accession=PF05743.5; Description=UEV domain
MARSPPPPPSAGGAQYAQQFLNTALSQRGPSALPYAEDVKWLIRNHLVALAEAYPSLHPKAALFTHNDGRAAHLLQADGTIPIHHAGASYNLPAVIWLPEPYPRSPPLVFLSPTRDMVIKPHHPLVDRSGLVANAPYLRSWVFPSSNLVDLVRSLSHLFGLDPPLFTRNPPPPAPNPSPPAPPQRVTPSPSPLP

SEQ ID NO: 67059 - protein, 75 aa, Setaria italica
  Transcript Sequence Number=SeqID_1085
MKNSASPAVDWGDDSAGEMDSEDTAAAASMGMVGIASMMEVDADDRHPPSAAPSLPIDADFFNAFPDDFDDQDLD

SEQ ID NO: 67060 - protein, 93 aa, Setaria italica
  Transcript Sequence Number=SeqID_1086
QAQHLPKHVISLGDKVMYLRSDQNGSLQDAKRPLDLHDVLQQFHSKEASNSAALCLNSVPCCIKQQSKRSIMTAPIQFVEAVLRQIPNKTVKH

SEQ ID NO: 67061 - protein, 243 aa, Setaria italica
  misc_feature (17)..(17): Xaa can be any naturally occurring amino acid
  Transcript Sequence Number=SeqID_1087
  Gene Ontology: Mol. function=ATP-dependent helicase activity
  Homolog annotation: Hit_ID=B6SRZ5; Match level="QueryCoverage=100%, HitCoverage=42%, E-value=1e-134, Identity=95%"; Hit description =EMB1586
  Pfam annotation: Domain name=Helicase_C; Domain location=120-196; Score=95.7; E_value=1.6e-25; Accession=PF00271.23; Description =Helicase conserved C-terminal domain
RRSERQTILVSATIPFXVIRAARSWGHDPVLIRAKSVLPLDSITVPRPALSQTDANSSSPSNSVNQAAVGSLPPSLEHYYCTAKVQHKVDTLRRCIHALEAQTVIAFMNNTKPLKDVVFKLEARGIKATELHGDLGKLARSTVLKKFKDGEFRVLVTNELSARGLDVPECDLVVNLDLPTDSTHYAHRAGRTGRLGRKGIVVTICEENEAFVVRKMRKQLAVAIKPCEFTEGELVVHKEEDVE

SEQ ID NO: 67062 - protein, 80 aa, Setaria italica
  Transcript Sequence Number=SeqID_1088
  Gene Ontology: Mol. function=sequence-specific DNA binding; Cellular component=nucleus; Biological process=regulation of transcription, DNA-dependent
  Homolog annotation: Hit_ID=Q20DP7; Match level="QueryCoverage=56%, HitCoverage=15%, E-value=4e-13, Identity=74%"; Hit description=WRKY transcription factor 64
  Pfam annotation: Domain name=WRKY; Domain location=3-51; Score=10.1; E_value=4.8e-05; Accession=PF03106.7; Description=WRKY DNA -binding domain
TWFSRSYYRCTYRQEQDCKATKTVQQKDDSTGTDHPVMYTVVYHGQHTCKDNNGVESGTDDSETNTRSSSDSRSRTATNL

SEQ ID NO: 67063 - protein, 218 aa, Setaria italica
  misc_feature (17)..(17): Xaa can be any naturally occurring amino acid
  Transcript Sequence Number=SeqID_1089
  Gene Ontology: Mol. function=RNA-directed RNA polymerase activity
  Homolog annotation: Hit_ID=B5M060; Match level="QueryCoverage=93%, HitCoverage=18%, E-value=1e-78, Identity=72%"; Hit description=RNA -directed RNA polymerase 1b
YKLELSYESIWEMQLHXPPAYLSQTSPLFQVQAAPKIYELLPRRSGLMYEDPFFNWFRDDTDEQWTRTIDFTPSASIGQSSILCLEVPQQCELPNIADYFVYYKEHNLDFECQKGYSYSCGNSFVPIVKSPDYIEVPYEILFKINHLVQNGTLSGPTLDDNFFCLVSPKHVPIDHIKRALLKMSYLKSTCLNPTNWLALQYSKFGNRAMHCKGHLTIL

SEQ ID NO: 67064 - protein, 211 aa, Setaria italica
  Transcript Sequence Number=SeqID_1090
  Gene Ontology: Mol. function=oxidoreductase activity; Cellular component=cytoplasm; Biological process=oxidation reduction
  Homolog annotation: Hit_ID=B6TD57; Match level="QueryCoverage=100%, HitCoverage=55%, E-value=4e-79, Identity=67%"; Hit description =Alcohol dehydrogenase 1
  Pfam annotation: Domain name=ADH_zinc_N; Domain location=36-179; Score=121.3; E_value=3.2e-33; Accession=PF00107.18; Description=Zinc- binding dehydrogenase
QVIKIDPAVPPKLACLLSCGASTGVGAAWKVAKVEPGSSVVIFGLGSIGLAVAQGAKMCGASKIIGVDLNPDKEEVGKSFGVTHFVNPTQLGNSSVSEEIGKLTGGGADYGFECIGVSSVMTDAFTSTKPGKGKTIILGFEKNNEPISLPSLDLLSGKCVMGSYFGGMKPKTDVPILAQKCMNKELELEGLVTHEVGLQEINQAFNLLLQG

SEQ ID NO: 67065 - protein, 86 aa, Setaria italica
  Transcript Sequence Number=SeqID_1091
  Subcellular localization annotation: CTP_CleavageSite=54; ConfidenceScore=5.64e-01
SWLWKAPNCTISSTTNQTYQLERAFGRRRFPTARSTSSSTYLTSLVPARSWKPRAPHELHPHRCGMHYSFLNKAGELPIILKKDEV

SEQ ID NO: 67066 - protein, 69 aa, Setaria italica
  Transcript Sequence Number=SeqID_1092
LEVSESLCKQYTRNPLIVAGQLHYNMQHNMLFNLTSLQSTLDQLFRGRIRSKDCRNADSVSNTTGLKVT

SEQ ID NO: 67067 - protein, 65 aa, Setaria italica
  Transcript Sequence Number=SeqID_1093
  Subcellular localization annotation: CTP_CleavageSite=35; ConfidenceScore=5.15e-01
SPTSPKSTFSSSRRQHPHPPPTMSIPGDRAPEVVPRMTFEAICGPSYLQELCGATLHGASRCEDP

SEQ ID NO: 67068 - protein, 69 aa, Setaria italica
  Transcript Sequence Number=SeqID_1094
GGRSHAANLLGRPRVCPGDCGCGCRAQEQAPTATRAGPWTSIKYAMERVSAAEKVVIGSKGEKKGHRSK

SEQ ID NO: 67069 - protein, 554 aa, Setaria italica
  Transcript Sequence Number=SeqID_1095
  Gene Ontology: Mol. function=DNA binding; Cellular component=nucleus; Biological process=regulation of transcription
  Homolog annotation: Hit_ID=B6TAG8; Match level="QueryCoverage=61%, HitCoverage=95%, E-value=1e-134, Identity=69%"; Hit description=Myb -like DNA-binding domain containing protein
  Pfam annotation: Domain name=Myb_DNA-binding; Domain location=265 -333; Score=2.2; E_value=2.8; Accession=PF00249.23; Description=Myb -like DNA-binding domain
  Pfam annotation: Domain name=Myb_DNA-binding; Domain location=338 -382; Score=30.9; E_value=5.1e-06; Accession=PF00249.23; Description =Myb-like DNA-binding domain
  Pfam annotation: Domain name=Myb_DNA-binding; Domain location=388 -451; Score=8.9; E_value=0.48; Accession=PF00249.23; Description=Myb -like DNA-binding domain
  Pfam module annotation: Pfam domain module=Myb_DNA-binding::Myb_DNA -binding::Myb_DNA-binding; Domain location=265-333::338-382::388-451
MERVSAAEKVVIGSKGDKKGHRSKKDKGKRKGKKDKAQGHGGDGDGSIQSDDMNHSVEIEQAEVLAEMAEKPCLEHAEDIMSKSDVKEDRKKKKKDKEADTISQKQILDASDVSVGSGYVERNMGKGEHDSMSKKGKRKHRDGETSLNGSCDDQIVSRGDKKKKRNERSITLEEGNEADMSMMGQKTKGKKKRGNERDNVGVDLSQNIPAGNGNSCNKEKKVNVAHGKDKGKRVSFTDDVEVFKIDGGGGDEEGDGSGDSELVHGQRFTHEEDVKLMEAIQKYSEINQLGDKGLEMIRECKKYPETRGCWAEIAKSLPHRPVMAVYKRARILLYRSDERKWTPEEYEIIRRFVEKNGTGWKELATELGKSEIHVKDTWRRMKPKNLKKGTWTQDEYQNLFDLVNLDLRVKAHQKIAPTHRQLRDNISWEAISEKLTTRNNKDCCLKWYQQLASPLVKEGIWADIDDYLLMEALQKGDAVCFEDVDWERLLDHRSGELCRQRWNQMVRMIGGHREKPFIEQVEVLARRYCPEMLDYRKPEASDLSPDELAGESDS

SEQ ID NO: 67070 - protein, 302 aa, Setaria italica
  misc_feature (13)..(13): Xaa can be any naturally occurring amino acid
  Transcript Sequence Number=SeqID_1096
  Gene Ontology: Mol. function=binding; Cellular component=plasma membrane
  Homolog annotation: Hit_ID=B6ST20; Match level="QueryCoverage=99%, HitCoverage=46%, E-value=1e-116, Identity=74%"; Hit description =Armadillo/beta-catenin-like repeat family protein
  Pfam annotation: Domain name=Arm; Domain location=130-170; Score =23.9; E_value=0.00068; Accession=PF00514.15; Description =Armadillobeta-catenin-like repeat
  Pfam annotation: Domain name=Arm; Domain location=89-129; Score=29.2; E_value=1.6e-05; Accession=PF00514.15; Description=Armadillobeta -catenin-like repeat
  Pfam annotation: Domain name=HEAT; Domain location=136-172; Score =10.6; E_value=2.5; Accession=PF02985.14; Description=HEAT repeat
  Pfam annotation: Domain name=HEAT; Domain location=95-131; Score=7.1; E_value=6.5; Accession=PF02985.14; Description=HEAT repeat
  Pfam annotation: Domain name=HEAT_PBS; Domain location=116-143; Score= 9.4; E_value=4.5; Accession=PF03130.8; Description=PBS lyase HEAT -like repeat
  Pfam annotation: Domain name=HEAT_PBS; Domain location=157-194; Score= 1.0; E_value=81; Accession=PF03130.8; Description=PBS lyase HEAT-like repeat
  Pfam annotation: Domain name=HEAT_PBS; Domain location=74-111; Score =7.3; E_value=9.2; Accession=PF03130.8; Description=PBS lyase HEAT -like repeat
  Pfam module annotation: Pfam domain module=Arm::Arm::HEAT::HEAT::HEAT_ PBS::HEAT_PBS::HEAT_PBS; Domain location=130-170::89-129::136-172::95- 131::116-143::157-194::74-111
DSLLGPAAGFPRXVAALDTALEDVAWLLRISSPGAAGDGDDDSLLGLPNIAQNEPILFFIWDHVARLHTGSPAARADSAANLASLARDSQHFAKLIIEEDGVPPLLKLLKDGTDEGQEAAARALGLLGCDAESVDKLVQAGVCSSFAAALKDPPMRVQAAVAEAIANLADRSSTCQDLFAQNNTVRYLVGHLASGTIQEHSRYSVGSNSSKKSTAAPQQPMKSLHSVVLAKTHSMRHTGDRDAASLTDEPPLMSNSSPGGEQDTKRNPHMQSVVHSAMSAKTNTNGSLVPPFRPQLGTSGSS

SEQ ID NO: 67071 - protein, 90 aa, Setaria italica
  Transcript Sequence Number=SeqID_1097
  Subcellular localization annotation: CTP_CleavageSite=59; ConfidenceScore=5.35e-01
MAALMDLRSGFERNPSRPPRHASQSPVPRPYLSPFFRAEYLPASGHRAPPPPPVSPVPRASSRPSSPRPESRRRRPPSSPSPPPPPISTA

SEQ ID NO: 67072 - protein, 153 aa, Setaria italica
  misc_feature (138)..(138): Xaa can be any naturally occurring amino acid
  Transcript Sequence Number=SeqID_1098
  Gene Ontology: Mol. function=Rab GTPase activator activity; Cellular component=intracellular; Biological process=regulation of Rab GTPase activity
  Homolog annotation: Hit_ID=Q9FJC7; Match level="QueryCoverage=63%, HitCoverage=19%, E-value=2e-31, Identity=68%"; Hit description =GTPase activator protein of Rab-like small GTPases-like protein
  Subcellular localization annotation: CTP_CleavageSite=55; ConfidenceScore=5.78e-01
RTYLRTSSSAAAAGSAVAVVSAAAAVSSSSSPASSSPHSDRGGIKSPWSRRKRKRALSREQWDSLFSANGKLRDGGKKFLKKVRSGGIEPGLRAEVWPFLLGVYDLNSSEEERNTVKIKKRKEYEKLRRQCQQILNGXQGNALKAITEVSNEE

SEQ ID NO: 67073 - protein, 136 aa, Setaria italica
  misc_feature (17)..(17): Xaa can be any naturally occurring amino acid
  Transcript Sequence Number=SeqID_1099
  Gene Ontology: Mol. function=flavin-containing monooxygenase activity; Cellular component=vacuole; Biological process=oxidation reduction
  Homolog annotation: Hit_ID=B4FZ60; Match level="QueryCoverage=99%, HitCoverage=30%, E-value=4e-57, Identity=77%"; Hit description =Disulfide oxidoreductase/ monooxygenase
RVPEPFLDQVVIIIGAXASADDISRDIASTTKEVHIADRSAPICTCVKQPGYDNLWLHSMIDRAEEDGSVVFQDGSSIKADVIMHCTGYLYDFPFLGDDSTITVDDNCVDPLYKHVFPPEVAPQLSFIGLPWKVIT

SEQ ID NO: 67074 - protein, 227 aa, Setaria italica
  misc_feature (148)..(148): Xaa can be any naturally occurring amino acid
  Transcript Sequence Number=SeqID_1100
  Gene Ontology: Mol. function=flavin-containing monooxygenase activity; Cellular component=vacuole; Biological process=oxidation reduction
  Homolog annotation: Hit_ID=B4FZ60; Match level="QueryCoverage=99%, HitCoverage=49%, E-value=1e-100, Identity=79%"; Hit description =Disulfide oxidoreductase/ monooxygenase
  Pfam annotation: Domain name=FMO-like; Domain location=1-226; Score= -386.6; E_value=5.8e-07; Accession=PF00743.11; Description=Flavin -binding monooxygenase-like
  Pfam annotation: Domain name=Pyr_redox; Domain location=96-181; Score= -14.0; E_value=0.1; Accession=PF00070.19; Description=Pyridine nucleotide-disulphide oxidore
  Pfam module annotation: Pfam domain module=FMO-like::Pyr_redox; Domain location=1-226::96-181
LRYLEAFARRFDLLRLVRFETEVLRVRREGRGKWEVTSRKLGDKGSGQEEVYDAVVVCNGHYTEPRIAVIPGVDAWPGKQMHSHNYRVPEPFLDQVVIIIGAAASADDISRDIASTTKEVHIADRSAPICTCVKQPGYDNLWLHSMIXRLHSMIDRAEEDGSVVFQDGSSIKADVIMHCTGYLYDFPFLGDDSTITVDDNCVDPLYKHVFPPEVAPQLSFIGLPCQG

SEQ ID NO: 67075 - protein, 166 aa, Setaria italica
  Transcript Sequence Number=SeqID_1101
  Gene Ontology: Mol. function=flavin-containing monooxygenase activity; Cellular component=vacuole; Biological process=oxidation reduction
  Homolog annotation: Hit_ID=Q9AV08; Match level="QueryCoverage=100%, HitCoverage=38%, E-value=3e-82, Identity=86%"; Hit description =Putative flavin-containing monooxygenase
MLASYLYDFPFLGDDSTITVDDNCVDPLYKHVFPPEVAPQLSFIGLPWKVIPFPLFELQSKWVAGVLSGRIVLPSKEEMMEDVKAFYSKLEARGWPKRYTHNFSNYQFEYDDWLAEQCSHPPIEEWRKQMYAINGINKAIRPESYRDEWDDDHLVAEANEDFKKYL

SEQ ID NO: 67076 - protein, 59 aa, Setaria italica
  misc_feature (56)..(56): Xaa can be any naturally occurring amino acid
  Transcript Sequence Number=SeqID_1102
CSTEVTLAAELKRKLMTIVNSDTYHPSMKLVFRPGPLARPRRGDAAPCCSESTVGXLMD

SEQ ID NO: 67077 - protein, 105 aa, Setaria italica
  misc_feature (27)..(27): Xaa can be any naturally occurring amino acid
  Transcript Sequence Number=SeqID_1103
HHDPDVAVGEPERRRLPWFWGVRDGDXAPTAAFELFQHPSPPRVQERQDEREKEDQRDRARRDRVDDHPDFHDVFGGNGHNEDEDRDRWPRESRGRARRHGNGYG

SEQ ID NO: 67078 - protein, 79 aa, Setaria italica
  misc_feature (4)..(4): Xaa can be any naturally occurring amino acid
  misc_feature (18)..(18): Xaa can be any naturally occurring amino acid
  misc_feature (29)..(29): Xaa can be any naturally occurring amino acid
  Transcript Sequence Number=SeqID_1104
VETXVKNNKAWSGSKEPXPKPKVEDGVEXYPKKPKKDMQSKKRAKLAAKRIRKMQEEEKRLQEKEFEMAFFREFWPDNV

SEQ ID NO: 67079 - protein, 124 aa, Setaria italica
  misc_feature (115)..(115): Xaa can be any naturally occurring amino acid
  Transcript Sequence Number=SeqID_1105
  Homolog annotation: Hit_ID=B6T8L2; Match level="QueryCoverage=97%, HitCoverage=21%, E-value=2e-47, Identity=85%"; Hit description=F-box domain containing protein
GPVHSLAFEYPWLVSASSDGRIALIDSRKLLTPKKSSKGPFSVKSFDVSTIEPPQRMLHGFRCDLFSIAIGADRIVCAGEDGAVRVWNFSEALEIERRAQALRSLRQENRMRRRXAQAEMNDKV

SEQ ID NO: 67080 - protein, 38 aa, Setaria italica
  Transcript Sequence Number=SeqID_1106
INFNKCFLKLFSLFLGILKLFSSIYMMKPLCLCYYELG

SEQ ID NO: 67081 - protein, 110 aa, Setaria italica
  Transcript Sequence Number=SeqID_1107
FVFLIFSLVHALIMRMAIFLFFPRILPCLLLMLGNNCNQKQSWIRSPELSVPMSFFFERISSYVLNMWKIAHLYFWQLAQSALMPQPKLLSVILNFQIVLLLHHVILFQI

SEQ ID NO: 67082 - protein, 55 aa, Setaria italica
  Transcript Sequence Number=SeqID_1108
  Subcellular localization annotation: CTP_CleavageSite=45; ConfidenceScore=5.67e-01
MGNCWGAKISSDSPSRSAFSPSGATSKFASRNGVALSSSSSHASSASMLPTPRSE

SEQ ID NO: 67083 - protein, 118 aa, Setaria italica
  Transcript Sequence Number=SeqID_1109
  Gene Ontology: Mol. function=zinc ion binding; Cellular component =intracellular
GVAPLFHQKEVSAEASASGSGCGGTGRHVCTVCRRGFETGQALGGHKRFHYLHGPSVSASLPGAAEPSAGGGFDLNLAPLVAPEIGFPGVRRRSEDEEVQSPLPLPAKKPRRRPSNSA

SEQ ID NO: 67084 - protein, 249 aa, Setaria italica
  Transcript Sequence Number=SeqID_1110
  Gene Ontology: Mol. function=oxidoreductase activity, acting on paired donors, with incorporation or reduction of molecular oxygen, 2-oxoglutarate as one donor, and incorporation of one atom each of oxygen into both ...
  Gene Ontology: Mol. function=donors; Biological process=protein metabolic process
  Homolog annotation: Hit_ID=B9R9J0; Match level="QueryCoverage=83%, HitCoverage=90%, E-value=5e-79, Identity=64%"; Hit description =Oxidoreductase, putative
  Pfam annotation: Domain name=2OG-FeII_Oxy; Domain location=139-248; Score=1.8; E_value=0.1; Accession=PF03171.12; Description=2OG-Fe(II) oxygenase superfamily
MPPNRKRRAPAMEPAAGGAGQQRQSKASASKKAKKGGGSGGRWPAVKPKKDLQINRLKGTQLLTIPDFFTSTEAKAFIDITESMGFTHQGSLGPLKGEAYRDNDRISVTDPLLAQAIWESGINRIFTDINISGKVATGLNSNIRFYRYTEGQRFGRHIDESVDLGDGSKTYYTLLVYLSGKGSAKDSSGQGLVGGETVFYDQRGGVVAEVAPVQGMALLHLHGAKCMLHEARVVKKNAKYVLRSDVVFS

SEQ ID NO: 67085 - protein, 105 aa, Setaria italica
  Transcript Sequence Number=SeqID_1111
  Subcellular localization annotation: CTP_CleavageSite=43; ConfidenceScore=5.46e-01
PRRLPPPSSSTYRTRRLTRQTALPARGSPTLTRRREGRCPRARAGAAAGCGRAPQAPWMRQGRAAGGDTAGVTPWSTMPRVGVERARWRLDKTRLERCLYWSLPA

SEQ ID NO: 67086 - protein, 158 aa, Setaria italica
  Transcript Sequence Number=SeqID_1112
  Gene Ontology: Mol. function=DNA binding; Biological process =regulation of transcription
  Homolog annotation: Hit_ID=B6STH2; Match level="QueryCoverage=97%, HitCoverage=57%, E-value=8e-31, Identity=62%"; Hit description=Myb -like DNA-binding domain, SHAQKYF class family protein
VDITSDSKRVFLNREDHCIYASPDGNTPASDRNIYAMFRGCSHSSPYQIPSLQEVFRSWEQSRGRVPWDSNVLTIEQAVRPRSHTTCNMMKPEKQTGCDLTLSIGLWEDASSDADGSSTISEELPAPAAGARCVATVKEEESKPALNLDLTISSSWLA

SEQ ID NO: 67087 - protein, 222 aa, Setaria italica
  Transcript Sequence Number=SeqID_1113
  Gene Ontology: Mol. function=DNA binding; Cellular component=nucleus; Biological process=regulation of transcription
  Homolog annotation: Hit_ID=B6STH2; Match level="QueryCoverage=91%, HitCoverage=77%, E-value=5e-60, Identity=63%"; Hit description=Myb -like DNA-binding domain, SHAQKYF class family protein
  Pfam annotation: Domain name=Myb_DNA-binding; Domain location=19-70; Score=42.6; E_value=1.5e-09; Accession=PF00249.23; Description=Myb -like DNA-binding domain
MRGFERKGVRQYNRSEVPRMRWTEELHRQFVEAVECLGGQDEATPKRILQLMGVKGVSISHIKSHLQMYRSSSNSSTHQSSLHKSTSTSDSKRVFLNREDHCIYASPDGNTPASDRNIYAMFRGCSHSSPYQIPSLQEVFRSWEQSRGRVPWDSNVLTIEQAVRPRSHTTCNMMKPEKQTGCDLTLSIGLWEDASSDADGSSTILVVRLSYFTRTTGQDRTN

SEQ ID NO: 67088 - protein, 87 aa, Setaria italica
  misc_feature (40)..(40): Xaa can be any naturally occurring amino acid
  Transcript Sequence Number=SeqID_1114
  Gene Ontology: Mol. function=protein binding; Biological process =ubiquitin-dependent protein catabolic process
  Homolog annotation: Hit_ID=B6TJQ1; Match level="QueryCoverage=100%, HitCoverage=27%, E-value=4e-39, Identity=89%"; Hit description=ATPP2- A13
EFWLDKSRGMICMALSSKALVITGIDDRRYWQHMPTSESXDISSWFQSVAYLQQIWWFEVVGEVDFCFPVGTYSLYFRVHLGKFYKR

SEQ ID NO: 67089 - protein, 83 aa, Setaria italica
  misc_feature (41)..(41): Xaa can be any naturally occurring amino acid
  Transcript Sequence Number=SeqID_1115
  Gene Ontology: Mol. function=protein binding; Biological process =ubiquitin-dependent protein catabolic process
  Homolog annotation: Hit_ID=B6TJQ1; Match level="QueryCoverage=100%, HitCoverage=27%, E-value=1e-27, Identity=74%"; Hit description=ATPP2- A13
YLMEFVGSGEEGRRRRRRAGKKEIYARLSKPVPFGDGQKVXFLHPFFARGMICMALSSKALVITGIDDRRYWQHMPTSESRFQ

SEQ ID NO: 67090 - protein, 104 aa, Setaria italica
  Transcript Sequence Number=SeqID_1116
  Gene Ontology: Mol. function=nucleic acid binding; Cellular component= ribonucleoprotein complex; Biological process=nuclear mRNA splicing, via spliceosome
  Homolog annotation: Hit_ID=Q8L3W7; Match level="QueryCoverage=87%, HitCoverage=86%, E-value=2e-45, Identity=97%"; Hit description=Small nuclear ribonucleoprotein-like protein
  Pfam annotation: Domain name=LSM; Domain location=22-101; Score=68.5; E_value=2.5e-17; Accession=PF01423.14; Description=LSM domain
MAEETNGKKEEEEFSTGPLSVLMMSVKNNTQVLINCRNNRKLLGRVRAFDRHCNMVLENVREMWTEVPKTGKGKKKALPVNKDRFISKMFLRGDSVIIVLRNPK

SEQ ID NO: 67091 - protein, 294 aa, Setaria italica
  misc_feature (213)..(213): Xaa can be any naturally occurring amino acid
  Transcript Sequence Number=SeqID_1117
  Gene Ontology: Mol. function=protein binding; Cellular component =nucleus; Biological process=regulation of transcription from RNA polymerase II promoter
  Homolog annotation: Hit_ID=B9SRX4; Match level="QueryCoverage=97%, HitCoverage=81%, E-value=1e-121, Identity=73%"; Hit description=WD -repeat protein, putative
  Pfam annotation: Domain name=WD40; Domain location=142-180; Score =39.7; E_value=1.2e-08; Accession=PF00400.24; Description=WD domain, G-beta repeat
  Pfam annotation: Domain name=WD40; Domain location=197-235; Score =7.1; E_value=5.8; Accession=PF00400.24; Description=WD domain, G -beta repeat
  Pfam annotation: Domain name=WD40; Domain location=2-41; Score=43.9; E_value=6.2e-10; Accession=PF00400.24; Description=WD domain, G-beta repeat
  Pfam annotation: Domain name=WD40; Domain location=248-287; Score =44.4; E_value=4.6e-10; Accession=PF00400.24; Description=WD domain, G-beta repeat
  Pfam annotation: Domain name=WD40; Domain location=47-85; Score=55.8; E_value=1.6e-13; Accession=PF00400.24; Description=WD domain, G-beta repeat
  Pfam annotation: Domain name=WD40; Domain location=92-130; Score =38.6; E_value=2.4e-08; Accession=PF00400.24; Description=WD domain, G-beta repeat
  Pfam module annotation: Pfam domain module=WD40::WD40::WD40::WD40::WD4 0::WD40; Domain location=142-180::197-235::2-41::248-287::47-85::92 -130
LGNCSDVLEDTHNRTVRSCAWSPDGKLLATASFDATTAVWEYNGGDFECVATLEGHENEVKSVSWSPSGSLLATCSRDKTAWIWEVQPGNEYECVSVMQGHTQDVKMVQWHPLLDILVSVSYDNTIKVWADDGDDEWHCVQTLTEANNCGHSSTVWAVSFNHKGDRMVTCSDDRTLKIWDTSADLSQPKTGEGHESWRHLCTLTGYHDRTIFXAHWSSEDIIASGAGDDAICLFAEERSSMAEGPLYKLILKKEKAHDMDINCVRWCPQDPRLLASASDDGTVKLWELRGSVLD

SEQ ID NO: 67092 - protein, 95 aa, Setaria italica
  Transcript Sequence Number=SeqID_1118
  Gene Ontology: Mol. function=protein binding; Cellular component =nucleus; Biological process=regulation of transcription from RNA polymerase II promoter
  Homolog annotation: Hit_ID=B9SRX4; Match level="QueryCoverage=73%, HitCoverage=20%, E-value=4e-20, Identity=65%"; Hit description=WD -repeat protein, putative
  Pfam annotation: Domain name=WD40; Domain location=49-88; Score=44.4; E_value=4.6e-10; Accession=PF00400.24; Description=WD domain, G-beta repeat
WHCILYYSLVFLCSLYAWCEDIIASGAGDDAICLFAEERSSMAEGPLYKLILKKEKAHDMDINCVRWCPQDPRLLASASDDGTVKLWELRGSVLD

SEQ ID NO: 67093 - protein, 335 aa, Setaria italica
  Transcript Sequence Number=SeqID_1119
  Gene Ontology: Mol. function=transcription regulator activity; Cellular component=nucleus; Biological process=transcription
  Pfam annotation: Domain name=TFIIS; Domain location=31-117; Score =101.8; E_value=2.4e-27; Accession=PF08711.3; Description =Transcription factor S-II (TFIIS)
LRFSTLSTVPSLCSSDRAEAITDDGAPRCDDPVLAETERIKAILLNDQEKSEAELLELLRRLQELDLAFDTLDVTAIGKAVANFRKHSSKQIRNLVRSLIEGWKHTVDVWIARRREAVVDQTPQSMGPSSLEQEDRGVASTPMDERDLFATPSTTIRLSEENQGSKFSDGMDDDGSVMNNSGRDCGQQYPINQEPARRPPSMGQLYDPEPYWRQEQPAMKQSRPQELSNGQKKEQFVAEMLARPSNAELGPGRPQARPRQHQESSPAQGRPQSASSEKPPAHHDTNSVRAKLELAKNAKLEATKRKLQEGYQEFDNAKKQRTIQMVDPQNLPKQG

SEQ ID NO: 67094 - protein, 137 aa, Setaria italica
  Transcript Sequence Number=SeqID_1120
  Gene Ontology: Mol. function=transcription regulator activity; Cellular component=nucleus; Biological process=transcription
PQELSNGQKKEQFVAEMLARPSNAELGPGRPQARPRQHQESSPAQGRPQSASSEKPPAHHDTNSVRAKLELAKNAKLEATKRKLQEGYQEFDNAKKQRTIQMVDPQNLPKQGNNRNFQPSGKPRNNSNINSNRNWSR

SEQ ID NO: 67095 - protein, 68 aa, Setaria italica
  Transcript Sequence Number=SeqID_1121
PPLSSTFLGCLRLVSQVLVNGFDYSESKIISYIIIIILKKYVSDTNNTSMHAAMCKFSLSNQAPACFP

SEQ ID NO: 67096 - protein, 130 aa, Setaria italica
  Transcript Sequence Number=SeqID_1122
  Gene Ontology: Mol. function=DNA binding; Cellular component=nucleus; Biological process=regulation of transcription
  Homolog annotation: Hit_ID=B6U2D4; Match level="QueryCoverage=98%, HitCoverage=33%, E-value=5e-69, Identity=95%"; Hit description=NAC domain transcription factor
  Pfam annotation: Domain name=NAM; Domain location=6-130; Score=267.7; E_value=2.7e-77; Accession=PF02365.7; Description=No apical meristem (NAM) protein
PATSQLPPGFRFHPTDEELILHYLRNRAASAPCPVPIIADVDIYKFNPWDLPSKALYGDGEYYFFSPRDRKYPNGIRPNRAAGSGYWKATGTDKPIHDATTGESVGVKKALVFYEGRPPRGTKTNWIMHE

SEQ ID NO: 67097 - protein, 244 aa, Setaria italica
  misc_feature (37)..(37): Xaa can be any naturally occurring amino acid
  Transcript Sequence Number=SeqID_1123
  Gene Ontology: Mol. function=DNA binding; Cellular component=nucleus; Biological process=regulation of transcription
  Homolog annotation: Hit_ID=A0JBY8; Match level="QueryCoverage=72%, HitCoverage=47%, E-value=7e-22, Identity=36%"; Hit description=NAC domain protein
  Pfam annotation: Domain name=NAM; Domain location=2-54; Score=-33.8; E_value=0.00028; Accession=PF02365.7; Description=No apical meristem (NAM) protein
GTDKPITLSDGGGAAADSSESRAMIGVKKALVFYKGXPPKGMKTSWIMHEYRLAEALAAAATYRPMRFKNSSMRLDDWVLCRIYKKTTPQLYSSPLQDEPSSMDGGLDLGRQHDDSVSVDDIAATYAPAGRLPRPASISDYLVDYTAVSELFESMPAPETTALLGTDAGSRLYVTDNGQAASSSSAQQQSSHKRRFMEDYSNGDLDMLHASSNKRVMSDQASMAAINNLFSLFEPGQTSLPDRI

SEQ ID NO: 67098 - protein, 64 aa, Setaria italica
  Transcript Sequence Number=SeqID_1124
MERLKGAPLFKGRIRSSRAAPVRMVRGAHFAGAGRALLLLAAAAASFLPVAEPFCPRDDSLVKD

SEQ ID NO: 67099 - protein, 309 aa, Setaria italica
  Transcript Sequence Number=SeqID_1125
  Gene Ontology: Mol. function=inositol or phosphatidylinositol phosphatase activity
  Homolog annotation: Hit_ID=Q9SIS4; Match level="QueryCoverage=83%, HitCoverage=60%, E-value=2e-96, Identity=63%"; Hit description =Putative inositol polyphosphate-5-phosphatase
  Pfam annotation: Domain name=Exo_endo_phos; Domain location=3-260; Score=95.1; E_value=2.5e-25; Accession=PF03372.15; Description =EndonucleaseExonucleasephosphatase family
GGGGDRGRQKVHPVRDGGAGAGEELAREYRCVVSKQMVGILLTVWVRADLRRFVRRASVSCVGCGVMGCLGNKGAVSVRFWLHDTSFCAVCCHLASGGRDGDEAHRNADATEILARTTFPRGHALNLPHKILDHDRVILLGDLNYRISLPEAKTRLLVERRDWKTLLENDQLRAEVSRAGGAFRGWSEGDIAFSPTYKYYPNSDTYYGCGAGGGGRNKSEKRRAPAWCDRILWHGAGLWQTRYDRCESRLSDHRPVRAVFAVEVDAPRNLNSLRSFFMSERFDTARTSPAADRLLRKDHASSARFAETL

SEQ ID NO: 67100 - protein, 77 aa, Setaria italica
  Transcript Sequence Number=SeqID_1126
  Subcellular localization annotation: CTP_CleavageSite=45; ConfidenceScore=5.14e-01
RAGKRGPAIVVPIRLEPRNPKGRTYRSLKSSGRAHAGCSGSRRARAGSMQRTERGSWDAPKVTLSQLRACLFEFPSI

SEQ ID NO: 67101 - protein, 104 aa, Setaria italica
  misc_feature (96)..(96): Xaa can be any naturally occurring amino acid
  Transcript Sequence Number=SeqID_1127
  Gene Ontology: Mol. function=binding; Cellular component =mitochondrial inner membrane; Biological process=transport
  Homolog annotation: Hit_ID=Q4A3R4; Match level="QueryCoverage=99%, HitCoverage=34%, E-value=4e-34, Identity=70%"; Hit description =Folate transporter
  Pfam annotation: Domain name=Mito_carr; Domain location=1-78; Score =49.0; E_value=1.9e-11; Accession=PF00153.19; Description =Mitochondrial carrier protein
PVHPLDVVRTRFQVSGGRGWSEVPPYRNTGNALYTIARSEGLRGLYAGFYPAVLGSTVSWGLYFFFYNRSKQRYLERKDGQLHPIEHLISAAEAGXLFTNPIWL

SEQ ID NO: 67102 - protein, 59 aa, Setaria italica
  Transcript Sequence Number=SeqID_1128
  Gene Ontology: Mol. function=binding; Cellular component =mitochondrial inner membrane; Biological process=transport
  Homolog annotation: Hit_ID=Q4A3R4; Match level="QueryCoverage=64%, HitCoverage=12%, E-value=5e-11, Identity=73%"; Hit description =Folate transporter
  Pfam annotation: Domain name=Mito_carr; Domain location=11-56; Score=- 8.4; E_value=0.019; Accession=PF00153.19; Description=Mitochondrial carrier protein
GIGVLICSLDNYPCHRYEGVRGFYRGITSNLLKNLPAASLTFVVYENVIRLFKAAKEKT

SEQ ID NO: 67103 - protein, 290 aa, Setaria italica
  misc_feature (71)..(71): Xaa can be any naturally occurring amino acid
  misc_feature (101)..(101): Xaa can be any naturally occurring amino acid
  misc_feature (130)..(130): Xaa can be any naturally occurring amino acid
  Transcript Sequence Number=SeqID_1129
  Gene Ontology: Mol. function=binding; Cellular component =mitochondrial inner membrane; Biological process=transport
  Homolog annotation: Hit_ID=B9S690; Match level="QueryCoverage=86%, HitCoverage=88%, E-value=3e-83, Identity=58%"; Hit description =Folate carrier protein, putative
  Pfam annotation: Domain name=Mito_carr; Domain location=13-178; Score= 85.1; E_value=2.6e-22; Accession=PF00153.19; Description =Mitochondrial carrier protein
  Pfam annotation: Domain name=Mito_carr; Domain location=194-287; Score=93.1; E_value=1e-24; Accession=PF00153.19; Description =Mitochondrial carrier protein
  Pfam module annotation: Pfam domain module=Mito_carr::Mito_carr; Domain location=13-178::194-287
MPLGTSLAAAEAWTWENAAAGAAAGFTTVAALHPLDVVRTRFQVSGGRGWSEVPPYRNTGNALYTIARSEXYNRAKQRYLERKDGQLHPIEHLISAAEAGXLFTNPIWLVKTRLQLQTPKHHASGYSGFXPDALRTILKEEGFLALYRGIGPGLLLVTHGAIQFTAYEELRKAMIYIKSTQTRTDNRGGEESLNSIDFAALGAGSKLAAILLTYPYQVIRARLQQRPGSDGTPKYSNSWHVVKETAKYEGVRGFYRGITSNLLKNLPAASLTFVVYENVIRLFKAAKEKT

SEQ ID NO: 67104 - protein, 96 aa, Setaria italica
  misc_feature (54)..(54): Xaa can be any naturally occurring amino acid
  Transcript Sequence Number=SeqID_1130
  Gene Ontology: Mol. function=aspartic-type endopeptidase activity; Cellular component=extracellular region; Biological process =proteolysis
  Homolog annotation: Hit_ID=Q10M97; Match level="QueryCoverage=92%, HitCoverage=27%, E-value=3e-14, Identity=49%"; Hit description =Eukaryotic aspartyl protease family protein
LEKPGWSAPLIQSSVIPTFYYLLMKGITVGSTKLPVPESAFALKGNGSGGTIIXTTGTSVTLLPPLVYGLLHDVFVSQVNLPVTNDEPLCFAVPSS

SEQ ID NO: 67105 - protein, 215 aa, Setaria italica
  misc_feature (83)..(83): Xaa can be any naturally occurring amino acid
  misc_feature (97)..(97): Xaa can be any naturally occurring amino acid
  misc_feature (192)..(192): Xaa can be any naturally occurring amino acid
  Transcript Sequence Number=SeqID_1131
  Gene Ontology: Mol. function=oxidoreductase activity; Biological process=oxidation reduction
  Homolog annotation: Hit_ID=B1Q482; Match level="QueryCoverage=92%, HitCoverage=31%, E-value=7e-56, Identity=54%"; Hit description =Putative NADPH oxidoreductase
VTTTIASQIMRSQKKPGVIINIGSAAGLYPMFLDPIYSATKGGVVMFTRSLVPLKRHGVRVNVLCPEVLRTCITECKYLSFVXIICIYAFVVVLCMXSLLLIQRESKAGACLWITKRRGMEYWPTPEERRKYMVLPMSKRMLTKNIYPSIRTPEFFEKIVVHTLSHNFRNATRLEHVRLRLPVEPHSALVKXIYVGVNCLSCIVKLSSLLGTFIF

SEQ ID NO: 67106 - protein, 85 aa, Setaria italica
  Transcript Sequence Number=SeqID_1132
  Gene Ontology: Mol. function=oxidoreductase activity; Biological process=oxidation reduction
  Homolog annotation: Hit_ID=B9RYJ6; Match level="QueryCoverage=81%, HitCoverage=10%, E-value=2e-32, Identity=91%"; Hit description =Alcohol dehydrogenase, putative
MCLLYIRIQVLKKEFPRGVDIIYESVGGEMFDLCLNALAVHGHLIVIGMISQYQGEDGWKPRNYTGLCEKILAKSQTVVCVTQLL

SEQ ID NO: 67107 - protein, 128 aa, Setaria italica
  Transcript Sequence Number=SeqID_1133
  Gene Ontology: Mol. function=oxidoreductase activity; Biological process=oxidation reduction
  Homolog annotation: Hit_ID=B9RYJ6; Match level="QueryCoverage=97%, HitCoverage=19%, E-value=1e-57, Identity=82%"; Hit description =Alcohol dehydrogenase, putative
ICSGEMFDLCLNALAVHGHLIVIGMISQYQGEDGWKPRNYTGLCEKILAKSQTVAGFFLVQYAHLWQDHLDKLFDLYASGKLKVSLDPKKFLGVASVPDAVEYLHSGKSVGKVVVCIDPSYSQIIAKL

SEQ ID NO: 67108 - protein, 633 aa, Setaria italica
  misc_feature (53)..(53): Xaa can be any naturally occurring amino acid
  Transcript Sequence Number=SeqID_1134
  Gene Ontology: Mol. function=oxidoreductase activity; Biological process=oxidation reduction
  Homolog annotation: Hit_ID=B9RYJ6; Match level="QueryCoverage=100%, HitCoverage=100%, E-value=0.0, Identity=68%"; Hit description =Alcohol dehydrogenase, putative
  Pfam annotation: Domain name=ADH_N; Domain location=316-402; Score =74.3; E_value=4.5e-19; Accession=PF08240.4; Description=Alcohol dehydrogenase GroES-like doma
  Pfam annotation: Domain name=ADH_zinc_N; Domain location=431-580; Score=138.0; E_value=2.9e-38; Accession=PF00107.18; Description=Zinc- binding dehydrogenase
  Pfam annotation: Domain name=Epimerase; Domain location=9-240; Score=- 60.0; E_value=0.012; Accession=PF01370.13; Description=NAD dependent epimerasedehydratase family
  Pfam annotation: Domain name=KR; Domain location=7-159; Score=-89.1; E_value=0.064; Accession=PF08659.2; Description=KR domain
  Pfam annotation: Domain name=adh_short; Domain location=7-187; Score =30.7; E_value=1.3e-07; Accession=PF00106.17; Description=short chain dehydrogenase
  Pfam module annotation: Pfam domain module=ADH_N::ADH_zinc _N::Epimerase::KR::adh_short; Domain location=316-402::431-580::9 -240::7-159::7-187
MELKPGMSALVTGGASGIGKALCIAFAQKGLFVTVVDFSEENGREVATLVQKXNSKFHRDLRVPSSIFIKCDVSNADNLAASFEKHVRMYGGLDICINCAGIANRTLVYDDISDGARTWRHAVNVNLVAVIDGTRIASQIMRSQKKPGVIINIGSAAGLYPMFLDPIYSATKGGVVMFTRSLVPLKRHGVRVNVLCPEFVQTNMAEQLNRKIIDSTGGYMKMEDVVNGAFELIQDESKAGACLWITKRRGMEYWPTPEERRKYMVNPMSKRMLTKNIYPSIRTPEFFEKIVVHTLSHNFRNATRLERVRLRLPVEPHSALVKIIYAGVNASDVNFSSGRYFSGNPKETASRLPFDAGFEGVGIVASVGDSVNHIKVGTPVALMTFGSYAEFTQVPAKHLLPVPRPDPEVVAMLTSGLTASIGLEKAGQMTSGQVVLVTAAAGGTGQFAVQLAKLAGNKVVATCGGESKAELLASLGVDRVINYRNESIKDVLKKEFPRGVDIIYESVGGEMFDLCLNALAVHGHLIVIGMISQYQGEDGWKPRNYTGLCEKILAKSQTVAGFFLVQYAHLWQDHLDKVFDLYASRKLKVSLDPKMFLGVASVPDAVEYLHSGKSVGKVVVCIDPSYSQVVSKL

SEQ ID NO: 67109 - protein, 240 aa, Setaria italica
  Transcript Sequence Number=SeqID_1135
  Gene Ontology: Mol. function=transferase activity, transferring phosphorus-containing groups; Cellular component=TORC2 complex; Biological process=protein catabolic process
  Homolog annotation: Hit_ID=Q5EFI5; Match level="QueryCoverage=57%, HitCoverage=5%, E-value=3e-76, Identity=97%"; Hit description=Target of rapamycin
  Pfam annotation: Domain name=FAT; Domain location=3-235; Score=46.3; E_value=1.2e-10; Accession=PF02259.15; Description=FAT domain
SVLFVCSRSLRSVVLVLLELAALVLESYERAYNNMVRVQQLSELEEVIDYCTLPVESPIADGRRELIRNMWNERIKGTKRNVEVWQALLAVRELVLPPNEDRDTWIKFAKLCWKNGRISQARSTLVKLLQFDPESSPELTLYHAHPQVALAYLKYQYAVGDELKKEGCRPWSISEGSGSEAHTTSDFTRKLVPKLCRVVPVLVSSRASSSSLACKYCKYLVHTCLVACCLYVSCAAVYCK

SEQ ID NO: 67110 - protein, 152 aa, Setaria italica
  misc_feature (97)..(97): Xaa can be any naturally occurring amino acid
  Transcript Sequence Number=SeqID_1136
  Gene Ontology: Mol. function=transferase activity, transferring phosphorus-containing groups; Cellular component=Tor2-Mei2-Ste11 complex; Biological process=negative regulation of cell cycle arrest in response to nitrogen starvation
  Homolog annotation: Hit_ID=Q5EFI5; Match level="QueryCoverage=89%, HitCoverage=5%, E-value=3e-60, Identity=86%"; Hit description=Target of rapamycin
PITDLELRMLVEKTNRKVKWYRGTFRTTCENVMHVLRTNRHSVMAMMEAFVHDPLINWRLFNFNEVPQVSNYGNAHAQTVVSSEEAPANRELVQPQXGARERELLQAVNQLGDANEVLNERAVAVMARMSHKLTGRDFSSGSASGAWLVFVP

SEQ ID NO: 67111 - protein, 1104 aa, Setaria italica
  misc_feature (13)..(13): Xaa can be any naturally occurring amino acid
  Transcript Sequence Number=SeqID_1137
  Gene Ontology: Mol. function=transferase activity, transferring phosphorus-containing groups; Cellular component=Tor2-Mei2-Ste11 complex; Biological process=negative regulation of cell cycle arrest in response to nitrogen starvation
  Homolog annotation: Hit_ID=Q5EFI5; Match level="QueryCoverage=100%, HitCoverage=44%, E-value=0.0, Identity=95%"; Hit description=Target of rapamycin
  Pfam annotation: Domain name=FAT; Domain location=76-442; Score =488.7; E_value=8e-144; Accession=PF02259.15; Description=FAT domain
  Pfam annotation: Domain name=FATC; Domain location=1072-1104; Score =65.9; E_value=1.6e-16; Accession=PF02260.12; Description=FATC domain
  Pfam annotation: Domain name=PI3_PI4_kinase; Domain location=715-965; Score=366.4; E_value=5.2e-107; Accession=PF00454.19; Description =Phosphatidylinositol 3- and 4-kinase
  Pfam annotation: Domain name=Rapamycin_bind; Domain location=549-648; Score=232.4; E_value=1.2e-66; Accession=PF08771.3; Description =Rapamycin binding domain
  Pfam annotation: Domain name=TPR_2; Domain location=121-154; Score =7.5; E_value=4; Accession=PF07719.9; Description=Tetratricopeptide repeat
  Pfam annotation: Domain name=TPR_2; Domain location=237-270; Score =11.4; E_value=1.3; Accession=PF07719.9; Description=Tetratricopeptide repeat
  Pfam module annotation: Pfam domain module=FAT::FATC::PI3_PI4 _kinase::Rapamycin_bind::TPR_2::TPR_2; Domain location=76-442::1072 -1104::715-965::549-648::121-154::237-270
EVQLKESWYEKLXHRWDEALRAYTMKSSQASGPLQNLDATLGRMRCLAALARWEDLSALCREQWTGAEPSARLEMAPMAANAAWHMGEWDHMAEYVSRLDDGDENKLRMLGNTTASGDGSSNGAFFRAVLSVRSKKYDEARIFVERARRCLATELAALVLESYERAYNNMVRVQQLSELEEVIDYCTLPVESPIADGRRELIRNMWNERIKGTKRNVEVWQALLAVRELVLPPNEDRDTWIKFAKLCWKNGRISQARSTLVKLLQFDPESSPELTLYHAHPQVALAYLKYQYAVGDELKRRDAFSRLQELSVQIATTMDSFPGTSANHGTMSNAGVPLIARVYLTLGSWKRALSPALDDDSIQEILISYNNATLSAKDWGKAWHLWALFNTEVMSRYTLRGRPDIAGKYVVAAVTGYFYSIACASTTKGVDDSLQDILRLLTLWFNYGATSEVQMALQKGFSLVKIEMWLVVLPQIIARIHSNNRVVRELIQSLLVRIGKGHPQALMYPLLVACKSISILRQRAAQEVVDKIRQHSGGLVDQAQLVSKELIRVAILWHEMWHEALEEASRMYFGEHNIEGMLAVLEPLHAMLERGAETIKENAFIQAYGHELLEAHECCLKYRETGEDAELTKAWDLYYHVFRRIDKQLPSLTTLDLHSVSPELLKCRTLELAVPGTYAADLPLVTIEYFVPQLIVITSKQRPRKLTIHGSDGKDYAFLLKGHEDLRQDERVMQLFGLVNTLLENSRKTSEKDLSIQRYAVIPLSPNSGLIGWVPNCDTLHALIREYRDARKIFLNQEHRLMLAFAPDYDHLPLIAKVEVFQHALQNTEGNDLAKVLWLKSRTSEVWLERRTNYTRSLAVMSMVGYLLGLGDRHPSNLMLDRYSGKILHIDFGDCFEASMNREKFPEKVPFRLTRMLVKAMEVSGIEGTFRTTCENVMHVLRTNRHSVMAMMEAFVHDPLINWRLFNFNEVPQVSNYGNAHAQTVVSSEEAPANRELVQPQRGARERELLQAVNQLGDANEVLNERAVAVMARMSHKLTGRDFSSGSASGAGSSTQYGSEHWASGDARDADPGLSVKVQVQKLILQATSHENLCQNYVGWCPFW

SEQ ID NO: 67112 - protein, 121 aa, Setaria italica
  misc_feature (101)..(101): Xaa can be any naturally occurring amino acid
  Transcript Sequence Number=SeqID_1138
  Gene Ontology: Mol. function=electron carrier activity; Cellular component=cytoplasmic vesicle membrane; Biological process=oxidation reduction
  Homolog annotation: Hit_ID=B6TAZ6; Match level="QueryCoverage=94%, HitCoverage=23%, E-value=5e-59, Identity=93%"; Hit description =Cytochrome P450 CYP87A15
KPGRESDGITWMEYKSMTFTSQVINETVRLANIAPGIFRKALKDIQFKGYTIPAGWGVMVCPPAVHLNPDIYPDPLTFNPSRFKDKPEINRGSRHFMAFGXGLRFCVGADFSKLQMSIFPS

SEQ ID NO: 67113 - protein, 64 aa, Setaria italica
  misc_feature (45)..(45): Xaa can be any naturally occurring amino acid
  misc_feature (54)..(54): Xaa can be any naturally occurring amino acid
  Transcript Sequence Number=SeqID_1139
ADCSSHCWLEQFQVLYFEDFVPCPISQSSFDVLVSIDWQSYGFKXKGGFIDDEXNAVLEWDGHG

SEQ ID NO: 67114 - protein, 122 aa, Setaria italica
  Transcript Sequence Number=SeqID_1140
  Homolog annotation: Hit_ID=O22692; Match level="QueryCoverage=90%, HitCoverage=29%, E-value=1e-12, Identity=37%"; Hit description =F8A5.1 protein
LVSFTLLPLNRDLLKIGTGAANNVDRRKAKGLHVEVVILIARTASDLSCWTVNCSSTKVLYFEDFVPCPISQSSFDVLVSIDWQSYGFKLKGGFIDDEGNAVLEWDDMAFARVDIAIHTYLE

SEQ ID NO: 67115 - protein, 143 aa, Setaria italica
  Transcript Sequence Number=SeqID_1141
TEPVLTSNSEGEDEERSCYSTDNSSTNNEDYANAGGAMHSQGGGVIPTQVVSSTEVTGELQDFIFDEGASSLHGVVRHGGNLKRRLKEEYMETNQDAGEILQQSIRVPREPSLRRRQRISSVVRVLCLALVVILVFVGLWKCI

SEQ ID NO: 67116 - protein, 259 aa, Setaria italica
  misc_feature (221)..(221): Xaa can be any naturally occurring amino acid
  Transcript Sequence Number=SeqID_1142
  Gene Ontology: Mol. function=ATP-dependent helicase activity; Cellular component=nucleus; Biological process=mRNA processing
  Homolog annotation: Hit_ID=Q6K4U8; Match level="QueryCoverage=67%, HitCoverage=14%, E-value=1e-45, Identity=55%"; Hit description =Putative RNA helicase
  Pfam annotation: Domain name=S1; Domain location=97-165; Score=24.5; E_value=0.00045; Accession=PF00575.15; Description=S1 RNA binding domain
LVSKVCSELEAHLGVADRVLAEFVVDLGRASASAADFAAALRDHGAELPDYLVRSLHAVITAIPDHAPAPAPAAQNPTSRGAGKGRRGDKEAESDGDPELYQVHRGRVTRVADAGCFVRLDGARGREGLVHVSQIPGRRVSATRGQEVFVKVVSVDGSKLGLSMRDVDQDSGRDLLPLRRGSGEDDAPRANPPADRARAAGKRKGVSGIFVPDDDEAGLCXRRPTRRMSSPERWEMKQLIASGVLDAKDYPGIDEDDDG

SEQ ID NO: 67117 - protein, 48 aa, Setaria italica
  Transcript Sequence Number=SeqID_1143
AHAASIRAYRSKIDGGDDPPRGPAGAAESKVFYLKMKGDYHSFLPLRT

SEQ ID NO: 67118 - protein, 170 aa, Setaria italica
  misc_feature (14)..(14): Xaa can be any naturally occurring amino acid
  misc_feature (58)..(58): Xaa can be any naturally occurring amino acid
  Transcript Sequence Number=SeqID_1144
  Homolog annotation: Hit_ID=Q9M9G1; Match level="QueryCoverage=93%, HitCoverage=35%, E-value=6e-39, Identity=46%"; Hit description =F14O23.23 protein
  Pfam annotation: Domain name=Peptidase_C12; Domain location=9-165; Score=-32.2; E_value=0.00035; Accession=PF01088.13; Description =Ubiquitin carboxyl-terminal hydrolase, family 1
GRCSPTYPDYFALXPDGTLLELVCYRKDLAVSAMQSYAQRTGGYKVGDAVAFPLSFPXGFELDKKVRMWLDEWQRLPYISPYEDGSHLAPRSDITEKRTVAVLHEVLSLTVGKKMEKEVLVKLGEALRLPPGFRKVVARHPGIFYMSHKLRTQTTVVRESYRRHYCLCWY

SEQ ID NO: 67119 - protein, 83 aa, Setaria italica
  misc_feature (41)..(41): Xaa can be any naturally occurring amino acid
  Transcript Sequence Number=SeqID_1145
  Gene Ontology: Mol. function=peptide-methionine-(S)-S-oxide reductase activity; Cellular component=chloroplast; Biological process =oxidation reduction
  Homolog annotation: Hit_ID=B6T2N3; Match level="QueryCoverage=90%, HitCoverage=34%, E-value=3e-32, Identity=88%"; Hit description =Peptide methionine sulfoxide reductase msrB
  Pfam annotation: Domain name=SelR; Domain location=12-83; Score=50.9; E_value=2.5e-14; Accession=PF01641.10; Description=SelR domain
MQTEKANTSLTEEEWKKRLTKEQYYVTRQKGTERAITTWGXYWNTKTPGIYHCVCCDTPLFESSTKFDSGTGWPSYYKPIGDN

SEQ ID NO: 67120 - protein, 212 aa, Setaria italica
  Transcript Sequence Number=SeqID_1146
  Gene Ontology: Mol. function=peptide-methionine-(S)-S-oxide reductase activity; Cellular component=chloroplast; Biological process =oxidation reduction
  Homolog annotation: Hit_ID=B6T2N3; Match level="QueryCoverage=100%, HitCoverage=100%, E-value=9e-74, Identity=67%"; Hit description =Peptide methionine sulfoxide reductase msrB
  Pfam annotation: Domain name=SelR; Domain location=90-212; Score =273.0; E_value=6.8e-79; Accession=PF01641.10; Description=SelR domain
  Subcellular localization annotation: CTP_CleavageSite=61; ConfidenceScore=5.20e-01
MAARCYTAATVVFSSRAGAPDLSLSLPAAAAAAVPSARPGPRGAWTYGGGYSHRPATGRAMGSAPSSSSFPSPQTPPGQAQEKANTSLTEEEWKKRLTKEQYYVTRQKGTERAFTGEYWNTKTPGIYHCVCCDTPLFESSTKFDSGTGWPSYYKPIGDNVKSKLDMSIIFMPRTEVLCAACDAHLGHVFDDGPPPTGKRYCINSASLKLKPQ

SEQ ID NO: 67121 - protein, 114 aa, Setaria italica
  Transcript Sequence Number=SeqID_1147
  Pfam annotation: Domain name=Ctr; Domain location=1-98; Score=-22.5; E_value=0.0015; Accession=PF04145.7; Description=Ctr copper transporter family
YALALVAVFALAFVLEFMGSRRLDSLLPSAAAGTGNVGKRAAAGAARAAVYAVRVGGAYLLMLALMSFNGGVLLVAVAGHAAGFLAFKAGLFGDGRAQVEDRCNKEEVAPAACC

SEQ ID NO: 67122 - protein, 89 aa, Setaria italica
  Transcript Sequence Number=SeqID_1148
  Gene Ontology: Mol. function=protein tyrosine kinase activity; Biological process=protein amino acid phosphorylation
  Homolog annotation: Hit_ID=Q7XPE8; Match level="QueryCoverage=97%, HitCoverage=18%, E-value=1e-27, Identity=68%"; Hit description =OSJNBa0060N03.13 protein
LEHIPALIPLSVTPSGELGFEEDAVKLVEEYGAEAYPFSVKRRGELEAIDDARRQGGKLQELLGCKDRDYVVSAYGTKVSIADLTGKLS

SEQ ID NO: 67123 - protein, 50 aa, Setaria italica
  Transcript Sequence Number=SeqID_1149
  Gene Ontology: Mol. function=protein serine/threonine kinase activity
  Homolog annotation: Hit_ID=Q6K3F5; Match level="QueryCoverage=86%, HitCoverage=8%, E-value=4e-13, Identity=76%"; Hit description=F-box family protein-like
VQSMWLDRDTGAKCYMLSARALCIIWGDTPRYWRWIPLADSRFAKSTAPH

SEQ ID NO: 67124 - protein, 202 aa, Setaria italica
  Transcript Sequence Number=SeqID_1150
  Homolog annotation: Hit_ID=B6TVP3; Match level="QueryCoverage=99%, HitCoverage=67%, E-value=3e-61, Identity=64%"; Hit description =Phloem-specific lectin
MSMWLDRDTGAKCYMLSARALCIIWGDTPRYWRWIPLADSRFSEGAELQDVCWLEIRGKIHCKMLSRNSTYAAYMVFKISDESYGLDYPPQEAAVTIGESKFTRQVCLQGHENEGEGIEEVPQNYRSLMVPAITRRLRRNRPLPHGVTVPKKRADGWMEMEMGEFNNEEGEDGEVSISLMETIQGHWKKGLIVQGIEVRAKK

SEQ ID NO: 67125 - protein, 53 aa, Setaria italica
  Transcript Sequence Number=SeqID_1151
FGRRPAPWLDPRRVVFLFATLSSVGTLILLYFTLSMSRADSSGSGGGGASDAR

SEQ ID NO: 67126 - protein, 130 aa, Setaria italica
  Transcript Sequence Number=SeqID_1152
KPSKRGDPSVRCDGSLTGQCQEQHQEHCIRQPLEHVHLLGRYESDDDGDARNRRELQACSVVFVGRVCVAELALGVAFATATAEKKTATDGQPPWRTRRCRAERGVLACKNLTLSCYGGSVYFGLAVLES

SEQ ID NO: 67127 - protein, 662 aa, Setaria italica
  Transcript Sequence Number=SeqID_1153
  Gene Ontology: Mol. function=acyl-CoA binding
  Homolog annotation: Hit_ID=B6U8G5; Match level="QueryCoverage=99%, HitCoverage=99%, E-value=0.0, Identity=80%"; Hit description=Acyl -CoA binding protein
  Pfam annotation: Domain name=ACBP; Domain location=8-102; Score=41.1; E_value=4.5e-09; Accession=PF00887.11; Description=Acyl CoA binding protein
  Pfam annotation: Domain name=Kelch_1; Domain location=182-227; Score =36.0; E_value=1.5e-07; Accession=PF01344.17; Description=Kelch motif
  Pfam annotation: Domain name=Kelch_1; Domain location=242-288; Score =7.5; E_value=0.42; Accession=PF01344.17; Description=Kelch motif
  Pfam annotation: Domain name=Kelch_1; Domain location=293-339; Score =17.4; E_value=0.028; Accession=PF01344.17; Description=Kelch motif
  Pfam annotation: Domain name=Kelch_1; Domain location=345-390; Score =18.7; E_value=0.02; Accession=PF01344.17; Description=Kelch motif
  Pfam annotation: Domain name=Kelch_1; Domain location=395-440; Score =23.9; E_value=0.00065; Accession=PF01344.17; Description=Kelch motif
  Pfam annotation: Domain name=Kelch_2; Domain location=182-227; Score =36.4; E_value=1.1e-07; Accession=PF07646.7; Description=Kelch motif
  Pfam annotation: Domain name=Kelch_2; Domain location=242-288; Score =13.6; E_value=0.68; Accession=PF07646.7; Description=Kelch motif
  Pfam annotation: Domain name=Kelch_2; Domain location=293-339; Score =31.7; E_value=2.9e-06; Accession=PF07646.7; Description=Kelch motif
  Pfam annotation: Domain name=Kelch_2; Domain location=344-390; Score =25.2; E_value=0.00027; Accession=PF07646.7; Description=Kelch motif
  Pfam annotation: Domain name=Kelch_2; Domain location=395-440; Score =13.8; E_value=0.64; Accession=PF07646.7; Description=Kelch motif
  Pfam module annotation: Pfam domain module=ACBP::Kelch_1::Kelch _1::Kelch_1::Kelch_1::Kelch_1::Kelch_2::Kelch_2::Kelch_2::Kelch _2::Kelch_2; Domain location=8-102::182-227::242-288::293-339::345 -390::395-440::182-227::...
  Pfam module annotation: Domain location=242-288::293-339::344 -390::395-440
MASSGLAYPDRFYAAAAYAGFGAGGATSSAAISRFQNDVALLLYGLHQQATVGPCNVPKPRAWNPVEQSKWTSWHGLGSMPSAEAMRLFVKILEEEDPGWYSRVPEFNSEPVVDIQMHKPKEEPQIVPASTNGTSISEPKIISENGSSVETQDKDVILEGLSTVSSLDEWTPLSISGHHPKPRYEHGATVLQDKMYIFGGNHNGRYLSDLQALDLKSLTWSKIDAKLQAESSDSAKTSQIAPCAGHSLITWGHKFFSIAGHTKDPSEGITVKEFDPHTCTWSIVRTYGKSPVSRGGQTVTLVGTTLVLFGGEDAKRCLLNDLHILDLETMTWDDVDAIGTPPSPRSDHAAACHADRYLLIFGGGSHATCFNDLHVLDLQTMEWSRPKQQGLTPSPRAGHAGATVGENWYIVGGGNNKSGVSETLVLNMSTLTWSVVSTVEGRVPLASEGMTLVHSSYNGYDYLISFGGYNGRYSNEVYTLKLSLKSDSKSTTKEETVSDTTSRVAEPEVETSQDGKIREIAMDSADSDLKNSTDEASEQLLAALKAEKDELEATLNREQLQTVQLKEDIAQAESRNVELTKELQAVRGQLAAEQSRCFKLEVDVAELRQKLQSMDALEKEVELLRRQRAASEQAALDAKQRQSSGGMWGWLVGTPPDDKSES

SEQ ID NO: 67128 - protein, 158 aa, Setaria italica
  Transcript Sequence Number=SeqID_1154
  Gene Ontology: Mol. function=protein serine/threonine kinase activity; Biological process=protein amino acid phosphorylation
  Subcellular localization annotation: CTP_CleavageSite=53; ConfidenceScore=5.39e-01
ASAAALSPILASSLGLNRIKTRSGPLPQEGQRMAAALGSSNLSRGQGQAEPPAASAGVGGRKGVSSWADSSSSGSNSRGKGKTAEPPSRSAAGTSLGAEGKSAVKAKPSALRNHSGDLRTPTHIPEAACAYDPCETPKESESPRFKAIMQATSAPRKS

SEQ ID NO: 67129 - protein, 139 aa, Setaria italica
  misc_feature (100)..(100): Xaa can be any naturally occurring amino acid
  Transcript Sequence Number=SeqID_1155
  Gene Ontology: Cellular component=endoplasmic reticulum
  Homolog annotation: Hit_ID=B6TG01; Match level="QueryCoverage=88%, HitCoverage=48%, E-value=3e-47, Identity=81%"; Hit description =Reticulon
  Pfam annotation: Domain name=Reticulon; Domain location=6-137; Score =49.6; E_value=1.2e-11; Accession=PF02453.9; Description=Reticulon
MENFAAADVLLWKDKKTSAVAIGGATVIWVLFEVLGYHLLTLISHVLIGVLAILFLLSKATTFIKKSPPNIPLVEIPEDLVVNVSQALRNDINRALHLFXIAMGHDLKKFLGVCLFGPLLLMLSFSSCSGYCFKIIQLF

SEQ ID NO: 67130 - protein, 123 aa, Setaria italica
  Transcript Sequence Number=SeqID_1156
  Gene Ontology: Cellular component=endoplasmic reticulum
  Homolog annotation: Hit_ID=Q306I3; Match level="QueryCoverage=84%, HitCoverage=49%, E-value=3e-38, Identity=74%"; Hit description =Reticulon
  Pfam annotation: Domain name=Reticulon; Domain location=1-81; Score =7.4; E_value=2.8e-05; Accession=PF02453.9; Description=Reticulon
LRKYKQEALHLFREIAMGHDLKKFLGVIVGLWILSSVGSCCDFLTLIYIAVLMLHTVPILYDKYQDKVDHFAGRAHTEARKQYEVLERPKVPTRQRIPRNREPTYLLTTRRPKLLDLLTVLRT

SEQ ID NO: 67131 - protein, 73 aa, Setaria italica
  Transcript Sequence Number=SeqID_1157
LVILGSPSRGSAICFPSLPLDLIKSWKGNPVSPVLEVEIGICFFRICDFYLSKLQSPCELVLIFYFLITIRDL

SEQ ID NO: 67132 - protein, 72 aa, Setaria italica
  Transcript Sequence Number=SeqID_1158
  Subcellular localization annotation: CTP_CleavageSite=55; ConfidenceScore=5.33e-01
GTGAIPAAAPSDLRRLILDTQPPSATSTHGSRPPPLARLQLVRRYAPTRSCNHDRAELLSSTSSPSCINPAA

SEQ ID NO: 67133 - protein, 152 aa, Setaria italica
  Transcript Sequence Number=SeqID_1159
  Gene Ontology: Mol. function=protein binding; Cellular component =cytoskeleton; Biological process=multicellular organismal development
  Homolog annotation: Hit_ID=B6T728; Match level="QueryCoverage=75%, HitCoverage=38%, E-value=4e-58, Identity=93%"; Hit description =Nuclear migration protein nudC
  Pfam annotation: Domain name=CS; Domain location=2-58; Score=37.6; E _value=5e-08; Accession=PF04969.8; Description=CS domain
GNVNSKYFVVCDIKKNHLKVGLKGQPLIIDGELYKPVKVDDCFWSIEDGKSLNILLTKHNQMEWWKSVIKGDPEVDTQKVEPESSKLSDLDPETRQTVEKMMFDQRQKQMGLPTSDEMQKQDHCQHLVVSRCPSSFLSHLHAVLLRRRRSAR

SEQ ID NO: 67134 - protein, 149 aa, Setaria italica
  Transcript Sequence Number=SeqID_1160
  Gene Ontology: Mol. function=damaged DNA binding; Cellular component =nucleus; Biological process=nucleotide-excision repair
  Homolog annotation: Hit_ID=Q9FMD4; Match level="QueryCoverage=82%, HitCoverage=14%, E-value=5e-38, Identity=60%"; Hit description =Similarity to DNA repair protein
  Pfam annotation: Domain name=BHD_3; Domain location=12-86; Score =152.8; E_value=1.1e-42; Accession=PF10405.1; Description=Rad4 beta -hairpin domain 3
SFYCLVSTVYLVPKNERGQVDVWSEKCLPPGTVHLRLPRLFQVAKRLGIDYAPAMVGFDYRSGRCLPVFDGIVVCTEFKHAILEAYAEEEEKRRAEERKQEEAQALSRWYQLLCSIVTTQRLKESYKTPSHGLGHEGPPRNDNNIQKNS

SEQ ID NO: 67135 - protein, 117 aa, Setaria italica
  Transcript Sequence Number=SeqID_1161
  Gene Ontology: Cellular component=plasma membrane
  Homolog annotation: Hit_ID=B9T190; Match level="QueryCoverage=76%, HitCoverage=22%, E-value=1e-23, Identity=51%"; Hit description =Dopamine beta-monooxygenase, putative
MSWQQRGLLLMAMAVAALLPDGAVAVAAGRCTTSTPVKTYDKCIALPTQGATLAWTYDARNATLDAAFTGSFISPSGWVAWGVNAGAPAMTGARVLAAFSDPSTGALLALPFVLSPE

SEQ ID NO: 67136 - protein, 58 aa, Setaria italica
  Transcript Sequence Number=SeqID_1162
ICSVSVIWPETACVGLFNGSCGAVVQAYLFPWISLNYLSKQASCHGFLLYGIGYTNCR

SEQ ID NO: 67137 - protein, 86 aa, Setaria italica
  Transcript Sequence Number=SeqID_1163
  Gene Ontology: Mol. function=sulfotransferase activity
  Homolog annotation: Hit_ID=Q6ZF61; Match level="QueryCoverage=100%, HitCoverage=15%, E-value=1e-30, Identity=74%"; Hit description =Putative flavonol 3-sulfotransferase
DVVLASIPKSGTTWLKALAFATMARAAHPPADNPGHPLLRLNPHQCVPYMERMFAAGDEAVMDTLPSPRLMSTHLHHSILPTSITN

SEQ ID NO: 67138 - protein, 155 aa, Setaria italica
  Transcript Sequence Number=SeqID_1164
  Homolog annotation: Hit_ID=Q67UH7; Match level="QueryCoverage=71%, HitCoverage=28%, E-value=1e-20, Identity=45%"; Hit description =Mitochondrial transcription termination factor-like
MMLRLRSHLLPAVRAAWPLHAASSLHHLVLYSTAAAATAAEAAAPFVAEEYLVTTCGLTPEQALRSAKPLAHLKSSSKPDAVLAFFAEIGIHEADLAAAITRNPRLLCLKVDETLTPGIGMLRDIGLSTPQISRLITVAPLIFSNPTKISRLPFY

SEQ ID NO: 67139 - protein, 69 aa, Setaria italica
  Transcript Sequence Number=SeqID_1165
TGYTTLNIRKLATYALSIQLYHISLWHVIYELTICSFSSNMPRASQNAQKDSRLRIMQTNLQSYLPHVI

SEQ ID NO: 67140 - protein, 125 aa, Setaria italica
  misc_feature (49)..(49): Xaa can be any naturally occurring amino acid
  misc_feature (67)..(67): Xaa can be any naturally occurring amino acid
  misc_feature (109)..(109): Xaa can be any naturally occurring amino acid
  misc_feature (116)..(116): Xaa can be any naturally occurring amino acid
  Transcript Sequence Number=SeqID_1166
  Gene Ontology: Cellular component=extracellular region; Biological process=defense response
  Homolog annotation: Hit_ID=Q5Z4W6; Match level="QueryCoverage=85%, HitCoverage=77%, E-value=2e-24, Identity=57%"; Hit description =Putative thionin Osthi1
  Pfam annotation: Domain name=Thionin; Domain location=23-70; Score =74.2; E_value=4.9e-19; Accession=PF00321.9; Description=Plant thionin
MKKLILAVLLLCLVIGQIQVEAKSCCPSTTARNVYNTCRLTGASRNQCXAKLSGCQIISGNKCKPPXTTHLTLDPDIEEVNVLNFCKLGCASSVCNNINAALGNEEANXAVESCDXACSSFCSVH

SEQ ID NO: 67141 - protein, 550 aa, Setaria italica
  Transcript Sequence Number=SeqID_1167
  Gene Ontology: Mol. function=protein phosphatase type 2A regulator activity; Cellular component=protein phosphatase type 2A complex; Biological process=signal transduction
  Homolog annotation: Hit_ID=B6SWG5; Match level="QueryCoverage=91%, HitCoverage=67%, E-value=0.0, Identity=76%"; Hit description=Signal transducer
  Pfam annotation: Domain name=WD40; Domain location=172-209; Score =38.8; E_value=2.1e-08; Accession=PF00400.24; Description=WD domain, G-beta repeat
  Pfam annotation: Domain name=WD40; Domain location=213-251; Score =38.9; E_value=2.1e-08; Accession=PF00400.24; Description=WD domain, G-beta repeat
  Pfam annotation: Domain name=WD40; Domain location=254-292; Score =3.5; E_value=15; Accession=PF00400.24; Description=WD domain, G-beta repeat
  Pfam annotation: Domain name=WD40; Domain location=346-384; Score =14.7; E_value=0.38; Accession=PF00400.24; Description=WD domain, G -beta repeat
  Pfam annotation: Domain name=WD40; Domain location=460-542; Score =7.9; E_value=4.5; Accession=PF00400.24; Description=WD domain, G -beta repeat
  Pfam annotation: Domain name=WD40; Domain location=67-105; Score =42.1; E_value=2.1e-09; Accession=PF00400.24; Description=WD domain, G-beta repeat
  Pfam module annotation: Pfam domain module=WD40::WD40::WD40::WD40::WD4 0::WD40; Domain location=172-209::213-251::254-292::346-384::460 -542::67-105
RKTLMRRKWRRRLGWLRRLGIGACVVDAEEDDEINSTSSSSCRSCSGKVDRVKVRPYKKRSKELSAVYKGQVIKAHEGAIVTMKFSPDGQYLATGGEDGVVRVWRVVEGERPDDRDFVEDDPSCVFFTVNENSELAPISSCEGGKSKHSKSSKGAADPACVLIPHRTFALSEDPVHEFHGHDDVILDLSWSKNRELLSASMDKTVRLWKVGCNSCLKVFSHNNYVTCIQFKPTNDDYFISGCIDGMVRIWDVPRCQVVDWADSKEIVTAVCYRPDGKGAVVGTLTGNCRYYDVSENHLELESQVPLHGRKKSPLKRIIGFQYCPSDPKKLMVTSGDSQVRILDGVHVVSNYKGLRSSSQVAASFTPDGDHIISASDDSSIYMWNYANQIAPITSRVKTIWSYERFFCNDVSVAIPWNASPAKSSISLACNIPSSRQEVSDEFRNLQDSTSHCHAEDSLGGDNLYQLPSGNFTLSSAFFAESVPRGTATWPEEQLPSNSVTPSSTLRKSQYKFLKTSCQSAASHAWGQVIVTAGWDGHIRSFQNYGLPVQV

SEQ ID NO: 67142 - protein, 206 aa, Setaria italica
  Transcript Sequence Number=SeqID_1168
  Gene Ontology: Mol. function=transferase activity; Cellular component= integral to membrane; Biological process=vesicle-mediated transport
  Homolog annotation: Hit_ID=B6TVP5; Match level="QueryCoverage=100%, HitCoverage=97%, E-value=8e-88, Identity=77%"; Hit description=VAMP -like protein YKT62
  Pfam annotation: Domain name=Synaptobrevin; Domain location=109-196; Score=39.6; E_value=1.3e-08; Accession=PF00957.13; Description =Synaptobrevin
  Subcellular localization annotation: CTP_CleavageSite=61; ConfidenceScore=5.24e-01
LLVLKSPGDSSASSSSASGGGEQQAVVLANASDVSHFGYFQRPAAREFILFVARTVALRTPAGRRQSVQHEEYKVHCYNQNGLCAIAFTDDHYPVRSAFSLLNMVLEEYQKTFGESWRTTKDDSTQPWQFLNDALTKYQDPAEADKLLKIQRDLDETKIILHKTIDSVLARGERLDSLVEKSSDLSAASQMFYKQAKKTNSCCTIL

SEQ ID NO: 67143 - protein, 75 aa, Setaria italica
  Transcript Sequence Number=SeqID_1169
FAMKPFKQEFTFDERVQESAAMIANYPARIPVCEASLFLFLFDLMRRRGDFPFLLCSRLPAQTLGKQGLPLRVHN

SEQ ID NO: 67144 - protein, 118 aa, Setaria italica
  Transcript Sequence Number=SeqID_1170
  Gene Ontology: Mol. function=protein binding; Cellular component =cytoplasmic vesicle; Biological process=ubiquitin-dependent protein catabolic process
  Homolog annotation: Hit_ID=Q2RBS4; Match level="QueryCoverage=96%, HitCoverage=97%, E-value=6e-53, Identity=85%"; Hit description =Autophagy-related protein 8D
  Pfam annotation: Domain name=APG12; Domain location=20-115; Score= -21.1; E_value=0.016; Accession=PF04110.5; Description=Autophagy protein Apg12
  Pfam annotation: Domain name=MAP1_LC3; Domain location=12-115; Score =216.4; E_value=7.7e-62; Accession=PF02991.8; Description=Microtubule associated protein 1A1B, light chain 3
  Pfam module annotation: Pfam domain module=APG12::MAP1_LC3; Domain location=20-115::12-115
MKPFKQEFTFDERVQESAAMIANYPARIPVIVERFSRSNLPQMEKRKYLVPCDMPVGQFIFILRSRLHLSPGTALFVFVNNTLPQTASLMGSVYDAYKDKDGFLYMCYSSEKTFGCLA

SEQ ID NO: 67145 - protein, 105 aa, Setaria italica
  Transcript Sequence Number=SeqID_1171
  Gene Ontology: Mol. function=oxidoreductase activity; Cellular component=cellular_component; Biological process=oxidation reduction
  Homolog annotation: Hit_ID=O24479; Match level="QueryCoverage=76%, HitCoverage=24%, E-value=2e-20, Identity=63%"; Hit description=B -keto acyl reductase
HRAFLRPGRDLARRYGTWAVVTGATDGIGRAVALDLARRGLHLVLVGRSPDKLARVGKEVLAAAPSCKVRSVAFDLASTGDDARHGVARVAAAVEGRDVGVLVNN

SEQ ID NO: 67146 - protein, 114 aa, Setaria italica
  Transcript Sequence Number=SeqID_1172
  Subcellular localization annotation: CTP_CleavageSite=26; ConfidenceScore=5.05e-01
RRTLTPTYSPMYSPLMTSTPAPRHTIAARRGALPLYINTTPLGAPVVFDEPELAPPPPPPTNSSCPGRATATVAANRRLGLRWNMIPTGHVPAPVGTNASGGSRCPPPPGEGEA

SEQ ID NO: 67147 - protein, 61 aa, Setaria italica
  misc_feature (52)..(52): Xaa can be any naturally occurring amino acid
  Transcript Sequence Number=SeqID_1173
QTKSQVISLVLDCGAGYDTDEHYIAIELFVKKDQKDMFMTLPTNDIRFNWLXRKYNVKYGN

SEQ ID NO: 67148 - protein, 111 aa, Setaria italica
  misc_feature (79)..(79): Xaa can be any naturally occurring amino acid
  Transcript Sequence Number=SeqID_1174
  Homolog annotation: Hit_ID=P93826; Match level="QueryCoverage=85%, HitCoverage=9%, E-value=4e-22, Identity=56%"; Hit description =F19P19.26
FCCEQHWLGSKDLGASGDSLSEWRSCEQVDNGIPSTSPPFWDTDGDDDDPGPRPLDLFGQYTWRIENFSKEKKREMKSXTIEAGGYKWYILVYPQGCDVSNHLSLFLCVAK

SEQ ID NO: 67149 - protein, 127 aa, Setaria italica
  Transcript Sequence Number=SeqID_1175
VLMLMGLSSMLQFGKNCGVEVTAPALLVVHLTTVPGSRAGPGRGEELPFCLRLLFPHRRLDTKGHEGAHGGADPGGEGAYNGRREVREVKPPDRIFLLAAASISRSLAEDDGHRGRCGEERRRGRGM

SEQ ID NO: 67150 - protein, 285 aa, Setaria italica
  Transcript Sequence Number=SeqID_1176
  Gene Ontology: Mol. function=nucleoside-triphosphatase activity; Cellular component=membrane; Biological process=transport
  Homolog annotation: Hit_ID=Q0JLC5; Match level="QueryCoverage=98%, HitCoverage=19%, E-value=1e-119, Identity=73%"; Hit description =Pleiotropic drug resistance protein 3
  Pfam annotation: Domain name=ABC2_membrane; Domain location=13-227; Score=246.0; E_value=9.2e-71; Accession=PF01061.16; Description=ABC -2 type transporter
PASLSKYAQSSITQCMACLWKQNLSYWRNPPYNTVRFFFTTIIALLLGTIFWDLGGKVKTSQDLLNAMGSMYSAVLFIGVMNCTSVQPVVAVERTVFYRERAAGMYSAFPYAFGQVVIELPYALAQDILYGVIVYSMIGFEWTAAKFFWYLFFGYFTLLYFTFYGMMAVGLTPNYHIASIVSSAFYAIWNLFSGFIIPRPRVPIWWRWYCWICPVAWTLYGLVVSQFGDMMTEMDNGKTVKVFIEDYFDFKHSWLGWVAAVVVAFAVLFAALFGFAIMKLNFQKR

SEQ ID NO: 67151 - protein, 62 aa, Setaria italica
  Transcript Sequence Number=SeqID_1177
VFKSTLQPAGSWQWASTNFIIFSHNWHVLCSISADCVLMMIFLCYDPINLKRDNQKKLKKTW

SEQ ID NO: 67152 - protein, 151 aa, Setaria italica
  misc_feature (74)..(74): Xaa can be any naturally occurring amino acid
  Transcript Sequence Number=SeqID_1178
  Gene Ontology: Mol. function=DNA binding; Biological process=DNA repair
  Homolog annotation: Hit_ID=Q9SX69; Match level="QueryCoverage=82%, HitCoverage=13%, E-value=7e-46, Identity=65%"; Hit description =F11A17.9 protein
DPWVRAGSKFALQRRVLRLSKPPRRWKVPSYADYVKRNIKEVNIEGRPLNCETGAKNLFYGYDGELCGVEQLAXLQYYADEGGGWRSTHSEGGIWMTIFGLLMWDVMFSDIQDVFQSKFQVYDLNNAFLCWRCTTIFPAKSSEPCSGFFHL

SEQ ID NO: 67153 - protein, 350 aa, Setaria italica
  Transcript Sequence Number=SeqID_1179
  Gene Ontology: Mol. function=DNA binding; Cellular component=nucleus; Biological process=DNA repair
  Homolog annotation: Hit_ID=Q9SX69; Match level="QueryCoverage=97%, HitCoverage=39%, E-value=1e-125, Identity=59%"; Hit description =F11A17.9 protein
  Pfam annotation: Domain name=VRR_NUC; Domain location=227-345; Score =134.2; E_value=4.1e-37; Accession=PF08774.3; Description=VRR-NUC domain
TFPIVLFHTFSASWVYSKILTLGVSVYERDRRYEDAIRILKILLSKVACDRRRGYWTLRLSVDLEHMGRPNESLSVAEGGAIDPWVRAGSKFALQRRVLRLSKPPRRWKVPSYADYVKRNIKEVNIEGRPLNCETGAKNLFYGYDGELCGVEQLALQYYADEGGGWRSTHSEGGIWMTIFGLLMWDVMFSDIQDVFQSKFQTAPLDLETDYFYKSRKDLAESQLKKIQEGMAEEMLISSWELHQGTSCRGVNWDRHSLTDLRAVVACIGGHRLALLLRHLAVDYRSWSSGMPDLLLWRFLDERGGGEAKLVEVKGPRDQLSEQQRAWILVLMDFGFDVEVCKVSPVTKRR

SEQ ID NO: 67154 - protein, 108 aa, Setaria italica
  Transcript Sequence Number=SeqID_1180
CLSSTSHAISSSCLMFEDIKILISILGNIGVTLYNIRQFDEAPKVLELCCQTVWVHVRRSYCRLSEMGERNGISEVLPKDTLKDIIVDAFTGLRRWSMFFIDVAQKGY

SEQ ID NO: 67155 - protein, 68 aa, Setaria italica
  Transcript Sequence Number=SeqID_1181
SKVKVTVRVEDNFEMILPPFLRIWIHTKTMHAHQHMLSCYCFPAGLVLSRLKDISSRAVGWVETAFDD

SEQ ID NO: 67156 - protein, 202 aa, Setaria italica
  misc_feature (16)..(16): Xaa can be any naturally occurring amino acid
  misc_feature (53)..(53): Xaa can be any naturally occurring amino acid
  misc_feature (109)..(109): Xaa can be any naturally occurring amino acid
  misc_feature (173)..(173): Xaa can be any naturally occurring amino acid
  Transcript Sequence Number=SeqID_1182
  Gene Ontology: Mol. function=transporter activity; Cellular component= membrane; Biological process=oligopeptide transport
  Homolog annotation: Hit_ID=B6SWU5; Match level="QueryCoverage=100%, HitCoverage=32%, E-value=3e-50, Identity=53%"; Hit description =Peptide transporter PTR2
FSTTVLVYLQDSVSWXGYGVPTLALAASVAVFLAGTPLYRHKLPQGSPILRGXWVKVVAAAVWKCRVTVPNDLSELHEADPEYYTGKKRFRVDATSSMRFLNRAAVKTXRTPPGWALCTVTEVEETKQIGKLVPLLATMFVPCALMAQVGTLFVRQGVTLDRRLGRGASPFQXPPASLGACVTLTMLVCVAVYDRALVPFLR

SEQ ID NO: 67157 - protein, 138 aa, Setaria italica
  Transcript Sequence Number=SeqID_1183
  Gene Ontology: Mol. function=transporter activity; Cellular component= integral to membrane; Biological process=auxin mediated signaling pathway
  Homolog annotation: Hit_ID=Q5VP70; Match level="QueryCoverage=100%, HitCoverage=22%, E-value=2e-43, Identity=68%"; Hit description =Probable auxin efflux carrier component 3a
LFLFEFRAARMLIADQFPDSAAAIASLRVEPDVVSLEGGRAETEAEVAEDGRLHVTVRRSSVSRRSMLGVTPRPSNLTGAEIYSMSSSRQHSPRGSNFNHADFFAMVDGAPPPPTPAGGRGSSFGAAEVFSMHSSRGP

SEQ ID NO: 67158 - protein, 135 aa, Setaria italica
  misc_feature (95)..(95): Xaa can be any naturally occurring amino acid
  Transcript Sequence Number=SeqID_1184
  Gene Ontology: Mol. function=electron carrier activity; Biological process=oxidation reduction
  Homolog annotation: Hit_ID=B6SSX8; Match level="QueryCoverage=92%, HitCoverage=21%, E-value=3e-53, Identity=83%"; Hit description =Flavonoid 3-monooxygenase
RKQNKPRTGTAGTRVLVSVWSIGRDPTLWDTPEQFMPERFLGSKLDVKGQDYELLPFGSGRRMCPGYSLGLKVIQVSLANLLHGFAWSLPDGLTXKEELNMEEIFGLSKEELNMEEIFGPSTPRKFPLEAVVEPK

SEQ ID NO: 67159 - protein, 392 aa, Setaria italica
  Transcript Sequence Number=SeqID_1185
  Gene Ontology: Mol. function=electron carrier activity; Biological process=oxidation reduction
  Homolog annotation: Hit_ID=B6SSX8; Match level="QueryCoverage=99%, HitCoverage=75%, E-value=0.0, Identity=94%"; Hit description =Flavonoid 3-monooxygenase
  Pfam annotation: Domain name=p450; Domain location=1-378; Score =143.2; E_value=7.8e-40; Accession=PF00067.14; Description=Cytochrome P450
RQARKMCLTELFSAKRLESYEYIRAAEVRALLRDLHAVSGSGCAVMLKDYLSTVSLNVITRMVLGKKYLDKEVAAGGSSVTTPEEFKWMLDELFLLNGVLNIGDSIPWLDWMDLQGYIKRMKKLGKMFDRFLEHVVEEHNQRRLREGKSFVAKDMVDVLLQIADDPTLEVELNRESVKAFTQDLIAGGTESSAVTVEWAISELLKKPEVFAKATEELDRVIGRGRWVTEKDIPQLPYVDAIVKETMRLHPVAPMLVPRLSREDTTVAGYDIPAGTRVLVSVWSIGRDPTLWDAPEEFMPERFLGSKLDVKGQDYELLPFGSGRRMCPGYSLGLKVIQVSLANLLHGFAWSLPDGLTKEELNMEEIFGLSTPRKFPLEAVVEPKLPAHLYAEA

SEQ ID NO: 67160 - protein, 91 aa, Setaria italica
  Transcript Sequence Number=SeqID_1186
RPFYLGCPVACGAVLGRRGRHAWVTGCGCELGGDNAPRASLACAAVSAGGGGRQKGGGEEKKHSSFKFLVGCSEAKRRPGRHPCRVRASSH

SEQ ID NO: 67161 - protein, 60 aa, Setaria italica
  Transcript Sequence Number=SeqID_1187
  Gene Ontology: Mol. function=transcription factor activity; Cellular component=nucleus; Biological process=regulation of transcription, DNA-dependent
  Homolog annotation: Hit_ID=B6U166; Match level="QueryCoverage=98%, HitCoverage=26%, E-value=3e-15, Identity=74%"; Hit description=DNA binding protein
REDFLAVTRNTITSKKQKKVGLLRRSKADLFMGQSDGDTEMANGGGSSNSDNGDAETSAS

SEQ ID NO: 67162 - protein, 66 aa, Setaria italica
  Transcript Sequence Number=SeqID_1188
NKIQYLHLHQQLNPIVKQLQNTILSILLQFFRGEELKQELNNVDNLSEERLDELSELFLKDFKDGV

SEQ ID NO: 67163 - protein, 159 aa, Setaria italica
  Transcript Sequence Number=SeqID_1189
  Gene Ontology: Mol. function=oxidoreductase activity; Biological process=oxidation reduction
  Homolog annotation: Hit_ID=B4FSX7; Match level="QueryCoverage=85%, HitCoverage=43%, E-value=3e-39, Identity=58%"; Hit description =Carbonyl reductase 1
  Pfam annotation: Domain name=adh_short; Domain location=25-156; Score= -8.3; E_value=4.8e-05; Accession=PF00106.17; Description=short chain dehydrogenase
FLLYFILVTGYFVLNGIAQSLPGKEIALVTGGNKGIGLEICKQLASSGVTVVLTARDERRGIEAVGALGALGLSNVVFHQLEVSDPSSAARSADFIKEKFGKLDILVNNAGTVGTTTEIGNPETFWHELASIDPVERLEWIRKRTTEPHEKAEECLRTN

SEQ ID NO: 67164 - protein, 328 aa, Setaria italica
  Transcript Sequence Number=SeqID_1190
  Gene Ontology: Mol. function=oxidoreductase activity; Biological process=oxidation reduction
  Homolog annotation: Hit_ID=B4FSX7; Match level="QueryCoverage=86%, HitCoverage=100%, E-value=3e-79, Identity=50%"; Hit description =Carbonyl reductase 1
  Pfam annotation: Domain name=Shikimate_DH; Domain location=44-145; Score=-28.1; E_value=0.071; Accession=PF01488.12; Description =Shikimate  quinate 5-dehydrogenase
  Pfam annotation: Domain name=adh_short; Domain location=56-207; Score= -20.7; E_value=0.00031; Accession=PF00106.17; Description=short chain dehydrogenase
  Pfam module annotation: Pfam domain module=Shikimate_DH::adh_short; Domain location=44-145::56-207
MLPKLKSKYFLLSVDQLSRGWSRNRAREVLTKRVNFSRGSCSLHMDGIAQSLPGKEIALVTGGNKGIGLEICKQLASSGVTVVLTARDERRGIEAVGALGALGLSNVVFHQLEVNNAGTVGTTTEIGNPETFWHELASIDPVERLEWIRKRTTEPHEKAEECLRTNYHGIKFVTKALLPLLLSSSHGRIINMSSRYGLLRFFRGEELKQELNNVDNLSEERLDELSELFLKDFKDGQLKPRGWPTDGGYSAYRVSKALMNAYSRILAKEHPSLCINCVHPGYVQTDMNFQDGDLTVEEGARGPLMMALLPKGGMTGAYIYCTEVASFM

SEQ ID NO: 67165 - protein, 70 aa, Setaria italica
  Transcript Sequence Number=SeqID_1191
PSGLEHIESNPKWTGPQNIKLGPVPHASLMPMHGNPWSCMPLMSPHAGRHPVYLLPDSIHGPRTCALDPA

SEQ ID NO: 67166 - protein, 304 aa, Setaria italica
  misc_feature (258)..(258): Xaa can be any naturally occurring amino acid
  Transcript Sequence Number=SeqID_1192
  Gene Ontology: Mol. function=nucleic acid binding; Cellular component= nucleus; Biological process=regulation of transcription, DNA-dependent
  Homolog annotation: Hit_ID=A8I426; Match level="QueryCoverage=100%, HitCoverage=21%, E-value=1e-173, Identity=97%"; Hit description =Required to maintain repression 1
  Pfam annotation: Domain name=SNF2_N; Domain location=2-218; Score= -89.9; E_value=0.0014; Accession=PF00176.15; Description=SNF2 family N-terminal domain
TRLVKLLSWNKGHGILGISYGLYTKLTSEKPGCTEENKVRSILLDNPGLLVLDEGHTPRNERSVMWKTLGKVKTEKRIILSGTPFQNNFLELYNILCLVRPRFGEMFLTKARVGRRHYVSKKQKDKFSDKYEKGVWASLTSNVTDDNAEKVRSILKPFVHIHNGNILRTLPGLRESVIILKPLPLQKSIIRKVENIGSGNNFEHEYVISLASTHPSLVTAINMSEEEASLIDKPMLERLRSNPYEGVKTRFVIEVVRXCEALREKVLIFSQFIQPLELIKEHLRKFFKWREGKEILQMDGKILP

SEQ ID NO: 67167 - protein, 152 aa, Setaria italica
  misc_feature (141)..(141): Xaa can be any naturally occurring amino acid
  Transcript Sequence Number=SeqID_1193
  Gene Ontology: Cellular component=nucleus
  Homolog annotation: Hit_ID=B6SV05; Match level="QueryCoverage=100%, HitCoverage=33%, E-value=2e-54, Identity=73%"; Hit description=GRAS family transcription factor containing protein
  Pfam annotation: Domain name=GRAS; Domain location=6-150; Score= -178.3; E_value=0.004; Accession=PF03514.6; Description=GRAS family transcription factor
VKTGEALAITSSLQLHCLLASDDDSAAGAGKDNNSSNKTERRSPESGLSPSTSRADAFLGALWGLSPKLMVLTEQEASHNAAALTERFVEALNYYAALFDCLEVVAARGSVERARVERWLLGEEIKNIVACDGVERRERHXERLDRWAARME

SEQ ID NO: 67168 - protein, 141 aa, Setaria italica
  Transcript Sequence Number=SeqID_1194
ICLLSADVDVDGSSSHEAQVHGGSSHHEEVHSGSLHGAHFDGGSSHHENVDGSSSDELHLGSSHHGNVDGGSSHEVHLDGDSPHHENVDNISALRGIARELSHYIMYLIADCGAMAGSEGHYVVIRGKREMSRWLLEKSAR

SEQ ID NO: 67169 - protein, 53 aa, Setaria italica
  Transcript Sequence Number=SeqID_1195
SMDLYVSQPDQGISSSKGCKTGTVLGFQLCAEVLSLQIVLYSCRLSIRHVISN

SEQ ID NO: 67170 - protein, 82 aa, Setaria italica
  Transcript Sequence Number=SeqID_1196
  Gene Ontology: Mol. function=nucleotide binding; Biological process =defense response
  Homolog annotation: Hit_ID=Q06AJ9; Match level="QueryCoverage=97%, HitCoverage=6%, E-value=3e-14, Identity=51%"; Hit description=Blast resistance protein Pi37
MLLLRTFLVLNLSTNISGTLEQEKDEVYDKETVIKAWFCCHEQRIKLLYGTNIGQQLLLPSTLGNLYLSSCSITNGALGVCL

SEQ ID NO: 67171 - protein, 63 aa, Setaria italica
  Transcript Sequence Number=SeqID_1197
  Gene Ontology: Mol. function=binding
  Homolog annotation: Hit_ID=Q53LZ5; Match level="QueryCoverage=84%, HitCoverage=5%, E-value=6e-19, Identity=81%"; Hit description=TPR Domain, putative
  Pfam annotation: Domain name=TPR_1; Domain location=11-44; Score =19.4; E_value=0.015; Accession=PF00515.20; Description =Tetratricopeptide repeat
  Pfam annotation: Domain name=TPR_2; Domain location=11-44; Score =18.0; E_value=0.039; Accession=PF07719.9; Description=Tetratricopepti de repeat
  Pfam module annotation: Pfam domain module=TPR_1::TPR_2; Domain location=11-44::11-44
VTQPGYVLALQEALYNIARAYHHIGLNTLAAVYYEKALAVEEEDHPIPKLPYEAGSCAQEDLR

SEQ ID NO: 67172 - protein, 910 aa, Setaria italica
  Transcript Sequence Number=SeqID_1198
  Gene Ontology: Mol. function=binding; Cellular component =transcription factor TFIIIC complex; Biological process=tRNA transcription from RNA polymerase III promoter
  Homolog annotation: Hit_ID=Q53LZ5; Match level="QueryCoverage=95%, HitCoverage=94%, E-value=0.0, Identity=68%"; Hit description=TPR Domain, putative
  Pfam annotation: Domain name=TPR_1; Domain location=140-173; Score =0.8; E_value=4.8; Accession=PF00515.20; Description=Tetratricopeptide repeat
  Pfam annotation: Domain name=TPR_1; Domain location=174-207; Score =23.4; E_value=0.00096; Accession=PF00515.20; Description =Tetratricopeptide repeat
  Pfam annotation: Domain name=TPR_1; Domain location=242-275; Score =19.4; E_value=0.015; Accession=PF00515.20; Description =Tetratricopeptide repeat
  Pfam annotation: Domain name=TPR_1; Domain location=430-463; Score =17.6; E_value=0.045; Accession=PF00515.20; Description =Tetratricopeptide repeat
  Pfam annotation: Domain name=TPR_1; Domain location=821-854; Score =19.4; E_value=0.015; Accession=PF00515.20; Description =Tetratricopeptide repeat
  Pfam annotation: Domain name=TPR_2; Domain location=138-173; Score =3.5; E_value=13; Accession=PF07719.9; Description=Tetratricopeptide repeat
  Pfam annotation: Domain name=TPR_2; Domain location=174-207; Score =19.1; E_value=0.019; Accession=PF07719.9; Description=Tetratricopepti de repeat
  Pfam annotation: Domain name=TPR_2; Domain location=242-275; Score =26.3; E_value=0.00012; Accession=PF07719.9; Description =Tetratricopeptide repeat
  Pfam annotation: Domain name=TPR_2; Domain location=276-309; Score =5.0; E_value=8; Accession=PF07719.9; Description=Tetratricopeptide repeat
  Pfam annotation: Domain name=TPR_2; Domain location=430-463; Score =15.0; E_value=0.31; Accession=PF07719.9; Description=Tetratricopeptid e repeat
  Pfam annotation: Domain name=TPR_2; Domain location=743-776; Score =3.9; E_value=11; Accession=PF07719.9; Description=Tetratricopeptide repeat
  Pfam annotation: Domain name=TPR_2; Domain location=821-854; Score =18.0; E_value=0.039; Accession=PF07719.9; Description=Tetratricopepti de repeat
  Pfam module annotation: Pfam domain module=TPR_1::TPR_1::TPR_1::TPR _1::TPR_1::TPR_2::TPR_2::TPR_2::TPR_2::TPR_2::TPR_2::TPR_2; Domain location=140-173::174-207::242-275::430-463::821-854::138-173::174 -207::242-275::...
  Pfam module annotation: Domain location=276-309::430-463::743 -776::821-854
MSAVTEDGVQRASAAEVGDGGRDGDEDFEEDEEDGFEFGDAEEAMQCVEMAGRSTGAGAMRAQAHDYEALAERKRKALAEEQPQREGSKRPRPDDLSEAEAATMFDQLMEGFGLRRKRRSKDGKKRGRKKGTKNKGSPEVIKKLGDATLLFAEEKFNEAIPILHEIVRIAPNLPDSYYLLGSIYSETGELDKAINFLMLAAYVSPKDASLWKKLIPLAKKKEDASLARHCILKAMRADPEDVDLKYLCGDMYRNLRDYQKAAEIYEQIVRIYPANVAVRKVAAQMYRECGQIDKAINLLEDYVSTQTTNIDWSVLDLLISLYLRNNALSEALKQIEKARLQLRSQQKLPIQLLAKEVICHAYLGDMKHAEIFLRDVHLEPSKDNTDVIKELATNLETMGLYEYAVKFYLMIGDVANHNAGSLYVDHKEMGNSYVKVAQCYMVLGDKRNAIPYFYKALQSMKDNIDIRLTLSSLLIDEGKTDEAVTLLSPPKNQELHSANTPDQHKPWWCDGKVKMKLANIYYNKGNLEDFVDTIFHPILETLNVEYANRKIKPMRKLPNTVLHERVKVLGEPRPDSIFQGLRPIASPGELQKANRAKKLIEKRAASNEELKPNDLRRTKQVPPVPDLLTNMEHHQLVLNLCRTLALLQRYWDALQIINRTLKLGNDVLTNDNKEELRSLGAQIAYRAPDPSHGFKYVRYVVQQHPYSLSAWNSYYKVISRIEDRFPHHFKYILRTREEKPDCVPPIIISGHRFTAISQHQSAARDYLEAYKLDPENPLINLCVGTALISLALGFRLQNKNQCIVQAFAFLYRYLRLCGESQEALYNIARAYHHIGLNTLAAVYYEKALAVEEEDHPIPKLPYEAGSCAQEDLRPGYCDVRREAAFNLHLIYKKSGATDLARQILKTYCTV

SEQ ID NO: 67173 - protein, 138 aa, Setaria italica
  Transcript Sequence Number=SeqID_1199
  Gene Ontology: Mol. function=catalytic activity; Biological process =metabolic process
  Homolog annotation: Hit_ID=B6SQF2; Match level="QueryCoverage=100%, HitCoverage=52%, E-value=6e-73, Identity=92%"; Hit description =Catalytic/ hydrolase
MESYAAGAKFDCLLFDMDDTLYPLSLGINLACRKNIQDYMLNKLQIEESQVPKMCLDLYKEYGTTMAGLKVLGYDFDYDDFHACVHGTLPYEKLKPDPVLRQLLLSLPQRKIIFTNSDKAHAARVLEKLGLEDCFEGI

SEQ ID NO: 67174 - protein, 270 aa, Setaria italica
  Transcript Sequence Number=SeqID_1200
  Gene Ontology: Mol. function=catalytic activity; Biological process =metabolic process
  Homolog annotation: Hit_ID=B6SQF2; Match level="QueryCoverage=97%, HitCoverage=94%, E-value=1e-112, Identity=76%"; Hit description =Catalytic/ hydrolase
  Pfam annotation: Domain name=Hydrolase; Domain location=8-224; Score =9.9; E_value=0.0061; Accession=PF00702.18; Description=haloacid dehalogenase-like hydrolase
KCCPIYADMDDTLYPLSLGINLACRKNIQDYMLNKLQIEESQVPKMCLDLYKEYGTTMAGLKVLGYDFDYDDFHACVHGTLPYEKLKPDPVLRQLLLSLPQRKIIFTNSDKAHAARVLEKLGLEDCFEGIICFETLNPSTQQDANDQNQKNAGEADTDGGSRAGSDDPAPPRRGILCKPSLESMEAVIEIAKLDAKRTVFFDDSARNIASGKAAGFHTVVVGTSALVPGADVALESIHNIKEALPELWDAAGEHVEAVLRPAAVETTVLA

SEQ ID NO: 67175 - protein, 122 aa, Setaria italica
  Transcript Sequence Number=SeqID_1201
  Gene Ontology: Mol. function=orotidine-5'-phosphate decarboxylase activity; Cellular component=cytoplasm; Biological process='de novo' pyrimidine base biosynthetic process
  Homolog annotation: Hit_ID=Q7FZ76; Match level="QueryCoverage=99%, HitCoverage=25%, E-value=3e-53, Identity=85%"; Hit description=UMP synthase
  Pfam annotation: Domain name=OMPdecase; Domain location=1-109; Score=- 47.2; E_value=0.017; Accession=PF00215.16; Description=Orotidine 5' -phosphate decarboxylase  HUMPS family
RGLLLLAEMSSAGNLAYGDYTAAAVKIAEQHSDFVIGFISVNPASWSAAPLSPAFIHATPGVQMSAGGDALGQQYNTPYSVINDRGSDIIIVGRGIIKASNPAETAREYRIQGWQAYQSSLS

SEQ ID NO: 67176 - protein, 187 aa, Setaria italica
  Transcript Sequence Number=SeqID_1202
  Gene Ontology: Mol. function=orotidine-5'-phosphate decarboxylase activity; Cellular component=cytoplasm; Biological process='de novo' pyrimidine base biosynthetic process
  Homolog annotation: Hit_ID=Q7FZ76; Match level="QueryCoverage=99%, HitCoverage=38%, E-value=4e-87, Identity=84%"; Hit description=UMP synthase
  Pfam annotation: Domain name=OMPdecase; Domain location=79-186; Score= 13.5; E_value=3.5e-06; Accession=PF00215.16; Description=Orotidine 5'- phosphate decarboxylase  HUMPS family
HALVTLTEMLAVLLRHGKVSEEKVGEVRRFLDANRKVAVPGVPVLQPKAAARKSFAERAGLATNPMGRKLLETMEAKQSNLCVAADVGTAKELLDLAAKVGPEICMLKTHVDILSDFTPDFGPKLRSIAEKHNFLIFEDRKFADIGNTVTMQYEGGIFRILDWADIVNAHIVPGPGIVDGLKLKGFA

SEQ ID NO: 67177 - protein, 498 aa, Setaria italica
  Transcript Sequence Number=SeqID_1203
  Gene Ontology: Mol. function=orotidine-5'-phosphate decarboxylase activity; Cellular component=cytoplasm; Biological process='de novo' pyrimidine base biosynthetic process
  Homolog annotation: Hit_ID=Q9LKI4; Match level="QueryCoverage=94%, HitCoverage=98%, E-value=0.0, Identity=83%"; Hit description=UMP synthase
  Pfam annotation: Domain name=OMPdecase; Domain location=266-485; Score=278.7; E_value=1.3e-80; Accession=PF00215.16; Description =Orotidine 5'-phosphate decarboxylase  HUMPS family
  Pfam annotation: Domain name=Pribosyltran; Domain location=62-172; Score=78.4; E_value=2.5e-20; Accession=PF00156.19; Description =Phosphoribosyl transferase domain
  Pfam module annotation: Pfam domain module=OMPdecase::Pribosyltran; Domain location=266-485::62-172
PPVSVSFRPPPQAQTPAAAKTLAMDAAALESLILDLHAIEAVKLGSFVLKSGITSPIYLDLRALVSHPRLLSAIASLLHALPATRPYGLVCGVPYTALPIAAVLSVDRNIPMLMRRKEVKAHGTAKSIEGSYSAGDTVLIIEDLVTSGASVLETAAPLRAEGLVVTDAVVVVDREQGGRENLAANGITLHSLMTLTEVLAVLLKHGKVTQEKAEEVRQFLDANRKVAVPGVPAKPVVLRKPFEERAKLATNPVARRLFEVMVAKQSNLCVAADVGTAKELLDLAEKIGSQICMLKTHVDILSDFTPDFGSKLRSIAEKYNFLIFEDRKFADIGNTVTMQYEGGIFRILDWADIVNAHIVPGPGIVDGLKLKGLPKGRALLLLAEMSSAGNLAQGAYTAAAVKIAEQHPDFVIGFISVNPASWSVAPSNPALIHATPGVQMVAGGDALGQQYNTPLAVINNRGSDIIIVGRGIIKASDPGKAALEYRVQGWQAYRTSLL

SEQ ID NO: 67178 - protein, 213 aa, Setaria italica
  Transcript Sequence Number=SeqID_1204
  Gene Ontology: Mol. function=hydrolase activity; Biological process =metabolic process
  Homolog annotation: Hit_ID=B6UC04; Match level="QueryCoverage=93%, HitCoverage=56%, E-value=1e-90, Identity=86%"; Hit description =Gibberellin receptor GID1L2
  Pfam annotation: Domain name=Abhydrolase_3; Domain location=109-213; Score=13.8; E_value=2.5e-08; Accession=PF07859.5; Description =alphabeta hydrolase fold
MAARILLPLLLFLLGSHCWTGAAAAARRQLLQARRAGDPNSQVKFDFSPFLIEYKSGRVKRLMGTDVVAASSDALTGVTSRDVDIDPSTGVTARLYLPSFRASARVPVLVYFHGGAFVVESAFTPIYHAYLNTLAARAGVVAVSVNYRLAPENPLPAAYDDSWAALKWVLASAAGSDPWLSQYGDLSRLFLAGDSAGGNIAHNLALRAGEEGL

SEQ ID NO: 67179 - protein, 369 aa, Setaria italica
  Transcript Sequence Number=SeqID_1205
  Gene Ontology: Mol. function=protein binding; Cellular component =endoplasmic reticulum membrane; Biological process=G2/M transition DNA damage checkpoint
  Homolog annotation: Hit_ID=Q9SJF2; Match level="QueryCoverage=93%, HitCoverage=45%, E-value=1e-40, Identity=29%"; Hit description =T27G7.8
  Pfam annotation: Domain name=RINT1_TIP1; Domain location=1-369; Score= 82.3; E_value=1.7e-21; Accession=PF04437.5; Description=RINT-1  TIP-1 family
QDLISGTGLLLTVKDDDNWQRISVLSVFCDRPDWLEVWAEIERQEALDKLKSAMESEKNWSARIEGTMLEYGSDDYKSPAITTAVQQSLSLLIDRARPIPSITLKAGFIRMSASPIISEFHGYMLRRCQEAEGLTALADDNALLKVSHSINAARYFESTLTEWGEDVFFLEMENLSVNGEGGCIFQQEINHLKEFRVEWVDKITTVLLRAFDSRSRDYLKNKRQWLEKSEGPAVSRAFIESLDYMQGQLSKLEGGLNALDFVTVWRSVACGVDQLLFAGIFTGGTKISNGGVERLQGDLSVLFAVFSAWCLRPESFFPRLSEGLRLLKVDEQQLRDGVFTDKNWLREYGIRHLTAADSERIIKNRVYEA

SEQ ID NO: 67180 - protein, 77 aa, Setaria italica
  Transcript Sequence Number=SeqID_1206
ETLGKLGIQDPPPVPQKLPSDHQILSDTNRKKKKETPNATQLHLIENGKSFGRFFEQKMTGFSYWINTTLCLRLWPS

SEQ ID NO: 67181 - protein, 59 aa, Setaria italica
  Transcript Sequence Number=SeqID_1207
YQLMQSIQHVMVSSSRWNCFCFYMQWRIQFCCIKTRLHHFISITMKLNSPLWPALLLQD

SEQ ID NO: 67182 - protein, 156 aa, Setaria italica
  Transcript Sequence Number=SeqID_1208
  Gene Ontology: Mol. function=structural constituent of ribosome; Cellular component=ribonucleoprotein complex; Biological process =translation
  Homolog annotation: Hit_ID=P35684; Match level="QueryCoverage=78%, HitCoverage=31%, E-value=2e-63, Identity=95%"; Hit description=60S ribosomal protein L3
  Pfam annotation: Domain name=Ribosomal_L3; Domain location=1-153; Score=91.0; E_value=4.2e-24; Accession=PF00297.14; Description =Ribosomal protein L3
TKYALKFDSDAGKKEIQLQLEKMKKYASVIRVIAHTQIRKMKGLKQKKAHLMEIQVNGGTIADKVDYGYKFFEKEVPVDAVFQKDEMIDIIGVTKGKGYEGVVTRWGVTRLPRKTHRGLRKVANLVNLLVHLSTVVVSVLTSTGNGVGDPSRMPGT

SEQ ID NO: 67183 - protein, 123 aa, Setaria italica
  Transcript Sequence Number=SeqID_1209
  Gene Ontology: Mol. function=structural constituent of ribosome; Cellular component=ribonucleoprotein complex; Biological process =translation
  Homolog annotation: Hit_ID=P35684; Match level="QueryCoverage=57%, HitCoverage=18%, E-value=9e-36, Identity=97%"; Hit description=60S ribosomal protein L3
  Pfam annotation: Domain name=Ribosomal_L3; Domain location=1-121; Score=-46.5; E_value=1.6e-06; Accession=PF00297.14; Description =Ribosomal protein L3
THIVREVEKPGSKLHKKETCEAVTIIETPPLVVVGLVAYVKTPRGLRTLNSVWAQHLSEEVRRRFYKNWCKLHLDFLLACITVIFEGILGESLLLALAPVLVEPSPHFFAQVLGPDRVECTTP

SEQ ID NO: 67184 - protein, 163 aa, Setaria italica
  misc_feature (23)..(23): Xaa can be any naturally occurring amino acid
  Transcript Sequence Number=SeqID_1210
  Gene Ontology: Mol. function=structural constituent of ribosome; Cellular component=ribonucleoprotein complex; Biological process =translation
  Homolog annotation: Hit_ID=Q08G39; Match level="QueryCoverage=98%, HitCoverage=41%, E-value=4e-84, Identity=93%"; Hit description =Ribosomal protein L3
  Pfam annotation: Domain name=Ribosomal_L3; Domain location=1-117; Score=57.4; E_value=5.5e-14; Accession=PF00297.14; Description =Ribosomal protein L3
VTKGVVTRWGVTRPYQRKTHRGXRKVACIGAWHPARVSYTVARAGQNGYHHRTEMNKKVYKIGKSGQESHDASTEFDRTEKDITPMGGFPHYGIVKGDYLMIKGCCVGPKKRVVTLRQSLLKQTSRLALEEIKLKFVDTSSKFGHGRFQTTEEKQRFYGKLKA

SEQ ID NO: 67185 - protein, 138 aa, Setaria italica
  misc_feature (61)..(61): Xaa can be any naturally occurring amino acid
  Transcript Sequence Number=SeqID_1211
  Gene Ontology: Mol. function=structural constituent of ribosome; Cellular component=ribonucleoprotein complex; Biological process =translation
  Homolog annotation: Hit_ID=Q08G39; Match level="QueryCoverage=100%, HitCoverage=35%, E-value=3e-68, Identity=91%"; Hit description =Ribosomal protein L3
  Pfam annotation: Domain name=Ribosomal_L3; Domain location=1-90; Score=-27.1; E_value=6.5e-08; Accession=PF00297.14; Description =Ribosomal protein L3
LGAWHPARVSYTVARAGQNGYHHRTEMNKKVYKIGKSGQESHDASTEFDRTEKDITPMGGXFPHYGIVKGDYLMIKGCCVGPKKRVVTLRQSLLKQTSRLALGRKNTKLKFVDTSSKFGHGRFQTTEEKQRFYGKLKA

SEQ ID NO: 67186 - protein, 421 aa, Setaria italica
  misc_feature (345)..(345): Xaa can be any naturally occurring amino acid
  misc_feature (367)..(367): Xaa can be any naturally occurring amino acid
  Transcript Sequence Number=SeqID_1212
  Gene Ontology: Mol. function=structural constituent of ribosome; Cellular component=ribonucleoprotein complex; Biological process =translation
  Homolog annotation: Hit_ID=P35684; Match level="QueryCoverage=92%, HitCoverage=100%, E-value=0.0, Identity=94%"; Hit description=60S ribosomal protein L3
  Pfam annotation: Domain name=Ribosomal_L3; Domain location=80-375; Score=647.3; E_value=1.5e-191; Accession=PF00297.14; Description =Ribosomal protein L3
  Subcellular localization annotation: CTP_CleavageSite=51; ConfidenceScore=5.59e-01
SRLPSSRRVPISPPLPATSSYQVSRRRSARMSHRKFEHPRHGSLGFLPRKRASRHRGKVKSFPRDNPTKPCHLTAFLGYKAGMTHIVREVEKPGSKLHKKETCEAVTIIETPPLVVVGLVAYVKTPRGLRTLNSVWAQHLSEEVRRRFYKNWCKSKKKAFTKYALKYDSDAGKQEIQVQLEKMKKYASVVRVIAHTQIRKMKGLKQKKAHLMEIQVNGGTIADKVDYGYKFFEKEVPVDAVFQKDEMIDIIGVTKGKGYEGVVTRWGVTRLPRKTHRGLRKVACIGAWHPARVSYTVARAGQNGYHHRTEMNKKVYKIGKAGQESHDASTEFDRTEKDITPMGGXFPHYGIIKGDYLMIKGCCVGPXKKRVVTLRQSLLKQTSRLALEEIKLKFIDTSSKFGHGRFQTTDEKQRFYGKTKA

SEQ ID NO: 67187 - protein, 392 aa, Setaria italica
  misc_feature (148)..(148): Xaa can be any naturally occurring amino acid
  misc_feature (238)..(238): Xaa can be any naturally occurring amino acid
  misc_feature (250)..(250): Xaa can be any naturally occurring amino acid
  misc_feature (260)..(260): Xaa can be any naturally occurring amino acid
  misc_feature (270)..(270): Xaa can be any naturally occurring amino acid
  misc_feature (278)..(278): Xaa can be any naturally occurring amino acid
  misc_feature (318)..(318): Xaa can be any naturally occurring amino acid
  Transcript Sequence Number=SeqID_1213
  Gene Ontology: Mol. function=structural constituent of ribosome; Cellular component=ribonucleoprotein complex; Biological process =translation
  Homolog annotation: Hit_ID=P35684; Match level="QueryCoverage=100%, HitCoverage=100%, E-value=0.0, Identity=93%"; Hit description=60S ribosomal protein L3
  Pfam annotation: Domain name=Ribosomal_L3; Domain location=50-346; Score=622.3; E_value=4.8e-184; Accession=PF00297.14; Description =Ribosomal protein L3
MSHRKFEHPRHGSLGFLPRKRCSRHRGKVKSFPRDNPTKPCHLTAFLGYKAGMTHIVREVEKPGSKLHKKETCEAVTIIETPPLVIVGLVAYVKTPRGLRTLNSVWAQHLSEEVRRRFYKNWCKSKKKAFTKYALKFDSDAGKKEIQXQLEKMKKYASVIRVIAHTQIRKMKGLKQKKAHLMEIQVNGGTIADKVDYGYKFFEKEVPVDAVFQKDEMIDIIGVTKGKGYEGVVTRWGXVTRLPRKTHRGXRKVACIGAWXHPARVSYTVXRAGQNGYXHRTEMNKKVYKIGKSGQESHDASTEFDRTEKDITPMGGFXPHYGIVKGDYLMIKGCCVGPKKRVVTLRQSLLKQTSRLALEEIKLKFVDTSSKFGHGRFQTTEEKQRFYGKLKA

SEQ ID NO: 67188 - protein, 107 aa, Setaria italica
  Transcript Sequence Number=SeqID_1214
  Homolog annotation: Hit_ID=B6SVD7; Match level="QueryCoverage=66%, HitCoverage=12%, E-value=3e-20, Identity=72%"; Hit description =Aspartic-type endopeptidase/ pepsin A
MAQSHHYRQELFVAVAVAVAVAALVAVGEASCVGFDLHHRSSPVVRRWAEARGHPALAAEWPAKGSPEYYSELSRHDRGLLARRNLAGADGFLTFADGNATIQSLGF

SEQ ID NO: 67189 - protein, 349 aa, Setaria italica
  Transcript Sequence Number=SeqID_1215
  Gene Ontology: Mol. function=protein binding; Biological process =plant-type hypersensitive response
  Homolog annotation: Hit_ID=B6ST19; Match level="QueryCoverage=83%, HitCoverage=47%, E-value=1e-124, Identity=77%"; Hit description =Regulatory protein NPR1
  Pfam annotation: Domain name=BTB; Domain location=74-194; Score=-6.0; E_value=0.044; Accession=PF00651.23; Description=BTBPOZ domain
  Subcellular localization annotation: CTP_CleavageSite=39; ConfidenceScore=5.62e-01
MEPSSSITFASSSSYLSNGSSPCSVALPPPGPPQAPPLTAGDGWGSGGAAGGSSSNVEAVSLNRLSKNLERLLIDEDLDCSDADIEVPDGGPPVPVHRCILAVRSPFFYDIFAARGRGGAARGDAAAGARGAGEGAASGRPRYKMEELVPGGRVGREAFQAFLGYLYTGKLRPAPLDVVSCADPVCPHDSCPPAIRFAVELMYAAWTFKIPELISLFQRRLLNFVDKTLVEDVIPILQVASHSELTQVLDKCIQRIARSNLDDISLDKELSPEVVEEIKKIRKKSQTADDDASISDPVHEKRVRRIHRALDSDDVELVKLLLNESEITLDDANALHYAASYCDSKVVLR

SEQ ID NO: 67190 - protein, 369 aa, Setaria italica
  Transcript Sequence Number=SeqID_1216
  Gene Ontology: Mol. function=protein binding
  Homolog annotation: Hit_ID=B6ST19; Match level="QueryCoverage=100%, HitCoverage=58%, E-value=1e-158, Identity=78%"; Hit description =Regulatory protein NPR1
  Pfam annotation: Domain name=Ank; Domain location=104-136; Score =30.4; E_value=7.4e-06; Accession=PF00023.22; Description=Ankyrin repeat
  Pfam annotation: Domain name=Ank; Domain location=70-103; Score=23.7; E_value=0.00076; Accession=PF00023.22; Description=Ankyrin repeat
  Pfam module annotation: Pfam domain module=Ank::Ank; Domain location =104-136::70-103
LDDISLDKELSPEVVEEIKKIRKKSQTADDDASISDPVHEKRVRRIHRALDSDDVELVKLLLNESEITLDDANALHYAASYCDSKVVSELLELGLANLNLKNSRGYTALHLAAMRREPAIIMCLLNKGATVSQLTADGRSAIGICRRLTRAKDYNTKMEQGQESNKDRLCIDILEREMMRNPMSVEDAVTSPLLADDLHMKLLYLENRVALAILFFPAEAKVAMQIAQADTTEEFGGITAPGTTAPSTSGKLREVDLNETPAIQNKRLRSRVDALMKTVELGRRYFPNCSQVLDKYLEYKYLEYDLPDGLDQFYLQRGTPDEQKVKRMRFCELKEDVRKAFTKDKADNSMFSGLSSSSSCSPPQKIAKK

SEQ ID NO: 67191 - protein, 117 aa, Setaria italica
  Transcript Sequence Number=SeqID_1217
PNWHNTTVPLVNETKEAGELPNILIKKMKFRSDENKKKRKNDAGTDRLDWILNACRTMPSHATQLYNTSAGWIGTSTVAELHSSQHLDDRTEALPQPVPPYTWSRSRKTLQRNLVST

SEQ ID NO: 67192 - protein, 289 aa, Setaria italica
  Transcript Sequence Number=SeqID_1218
  Gene Ontology: Mol. function=binding; Cellular component =mitochondrial inner membrane; Biological process=transport
  Homolog annotation: Hit_ID=A0ZVU2; Match level="QueryCoverage=97%, HitCoverage=86%, E-value=1e-130, Identity=80%"; Hit description=S -adenosylmethionine transporter
  Pfam annotation: Domain name=Mito_carr; Domain location=17-93; Score =58.4; E_value=2.8e-14; Accession=PF00153.19; Description =Mitochondrial carrier protein
  Pfam annotation: Domain name=Mito_carr; Domain location=189-279; Score=108.8; E_value=1.8e-29; Accession=PF00153.19; Description =Mitochondrial carrier protein
  Pfam annotation: Domain name=Mito_carr; Domain location=98-184; Score= 92.7; E_value=1.3e-24; Accession=PF00153.19; Description =Mitochondrial carrier protein
  Pfam module annotation: Pfam domain module=Mito_carr::Mito_carr::Mito_ carr; Domain location=17-93::189-279::98-184
MGGGEGGQEKSFNFLQVLLEGSIAGGTAGVVVETALYPIDTIKTRLQAARGGSRIEWKGLYSGLAGNLAGVLPASAIFVGVYEPTKRKLLETLPENLSAVAHFTAGAIGGIAASLVRVPTEVVKQRMQTRQFKSAPDAVRLIVAKEGFKGLYAGYGSFLLRDLPFDAIQFCIYEQIRIGYKLVAKRELNDPENALIGAFAGAITGAVTTPLDVMKTRLMVQGQGNQYSGIVSCAQTILREEGPMAFLKGIEPRVLWIGIGGSIFFGVLEKTKSMLAERRNREVGTLKDE

SEQ ID NO: 67193 - protein, 75 aa, Setaria italica
  Transcript Sequence Number=SeqID_1219
  Subcellular localization annotation: CTP_CleavageSite=62; ConfidenceScore=5.22e-01
MAATPAAAVFLPRVLAARPAAAYPLHCAPVPRGPASISVAPPRRRRWRCLLRSLPPEGAPAELMEEDSKFVPLKA

SEQ ID NO: 67194 - protein, 125 aa, Setaria italica
  Transcript Sequence Number=SeqID_1220
  Homolog annotation: Hit_ID=Q8SAW5; Match level="QueryCoverage=96%, HitCoverage=9%, E-value=3e-32, Identity=63%"; Hit description =Putative myosin-like protein
NLEVELAKCNKIIEETNVRLSDMEKSLEDLTAKLVDSEKSNSLSETQLKCMAESYKSLESRKVKVELENEIQVLRSKIDTLTDELTDERQSHQEDLAKYKDLEEKMERYELERSSMFVDEDPDTN

SEQ ID NO: 67195 - protein, 80 aa, Setaria italica
  Transcript Sequence Number=SeqID_1221
WGKPACVFSQVMPWVAAIILSLRSSRLWRECVWECKPSVSSARASPGCCVFETSLKPHCTCAYLPEEEHGCWFVLNPLVK

SEQ ID NO: 67196 - protein, 1033 aa, Setaria italica
  Transcript Sequence Number=SeqID_1222
  Homolog annotation: Hit_ID=Q8SAW5; Match level="QueryCoverage=95%, HitCoverage=82%, E-value=0.0, Identity=57%"; Hit description =Putative myosin-like protein
  Pfam annotation: Domain name=Cast; Domain location=192-980; Score= -304.1; E_value=0.073; Accession=PF10174.1; Description=RIM-binding protein of the cytomatrix
  Pfam annotation: Domain name=DUF869; Domain location=78-929; Score =1502.4; E_value=0; Accession=PF05911.3; Description=Plant protein of unknown function (DUF869)
  Pfam module annotation: Pfam domain module=Cast::DUF869; Domain location=192-980::78-929
MDRRSWPWKKKSSDKSSNADALQNSNQEQEDKAPKFVQISPETYAHLTESEEKVKGLEENVKVLNEQLSGAQSEITTKDALVKQHAKVAEEAVSGWEKAEAEASALKLQLETVTLSKLAAEERAAHLDGALKECMKQVRTVKEEGEQKLHDVVFAKTKQWEKIKAEFEAKLLEFEQEFIRAGAENDALTRSLQERAELLMKIDEEKAQAEAEIEVLKSTIQSGEREINSLKYELHVVSKELEIRNEEKNMSVRSADVATKQHQEDVKKISKLEAECQRLRGLVRKKLPGPAALAQMKMEVESLGREYGDHRVRRSPTKNSGFHRPMSPMSPVPDYAIENLQHMQRENEFLTARLLTMEEETKMLKEALTKRNSELQASRSMYAKTAGKLRSLEVQMLTGNQHKSPSTPNMDIHFDGALSQNGSNPPSMTSMSEDGVDDEGSCTESWANALVSELSHFKKEKAAKSSATEGSNRLELMDDFLEMERLACLTSEANGNGSTIDKMKIDEVGATLSSVTERDGVKDLQSASPMSETPSSKQQLSEKSSLLKLQSRISSLLDSESLENNSGKMLDSIRNILKDIEDEADSMNTNGNHHLDATLNSGSKCTMDQELKSAILKIQDFVKLLDQELSKFQGQSSDYDGLCEKTQHFSALVDKVLSNDNGLNDLVMALSVILSETGQIKFAMSRDNSNEAESNNLDCVDKVTLLENKVQPEPVKDNVSGLCTLLPRSSSDPEFEGPADSGFDAKTTLKICSPEEYEQLKSEKINLEVELAKCNKIIEETNVRLSDMEKSLEDLTAKLVDSEKSNSLSETQLKCMAESYKSLESRKVELENEIQVLRSKIDTLTDELTDERQSHQEDLAKYKDLEEKMERYELERSSMFVDEDPDTNSKQEKEIAAAAEKLAECQETMLILGRQLQAMRPPAESLGSSPNRQRMEDFLQDAVGTTAGEFSQKPGGQPDTDQEMLGTGNESPINGFKTHMTPSDVDGSPFPSPNSSKRPKHRSRSSSSSSFTNQQLAEKQSRGFSRFFTKGKE

SEQ ID NO: 67197 - protein, 115 aa, Setaria italica
  Transcript Sequence Number=SeqID_1223
  Homolog annotation: Hit_ID=B6UHJ5; Match level="QueryCoverage=94%, HitCoverage=57%, E-value=8e-40, Identity=77%"; Hit description=Mal d 1-associated protein
IPKTRRNTEEDVTEEMKSGSLSLGFPTNEPFAFPGLRSDIEALEKGLFGSLGSVLNEAERMTNDFFKSFGFPSTHDRESSPFPRQPAERHIEEGTTTKKAKEGDYSEFSSQISDV

SEQ ID NO: 67198 - protein, 196 aa, Setaria italica
  misc_feature (100)..(100): Xaa can be any naturally occurring amino acid
  Transcript Sequence Number=SeqID_1224
  Subcellular localization annotation: CTP_CleavageSite=50; ConfidenceScore=5.00e-01
RPDHAGERPDCVGEHPNRNVECPTARASTPTTPPAPPRPVTRSVTGAIQQCSSLRQLRRLRRPGCIDFGINPLPSTIASTCHHLRLWCLPLRATILTAPXLCARSFMCGSLVFGNLDSYVDHGYSMHGILDHGYSSSCSATSTSAQRAIICMSYSPVFSSVAASAPHRRYNCGGTSVRRLLSSASPPVSPSAVLLL

SEQ ID NO: 67199 - protein, 72 aa, Setaria italica
  Transcript Sequence Number=SeqID_1225
FQPRRMVKSPPAGRGRLVHVHLTGTDGQDPSSHSPVLASTDVIGNGIQQAAAETSSLALRSTTAKPIKSSRE

SEQ ID NO: 67200 - protein, 48 aa, Setaria italica
  Transcript Sequence Number=SeqID_1226
  Gene Ontology: Cellular component=plasma membrane
  Homolog annotation: Hit_ID=B6U8U8; Match level="QueryCoverage=100%, HitCoverage=8%, E-value=7e-20, Identity=95%"; Hit description =Nodulin-like protein
MVEVGSRVRGFLRNRWLVFVAAMWMQSCAGVGYLFGSLSPVIKSSLGY

SEQ ID NO: 67201 - protein, 97 aa, Setaria italica
  Transcript Sequence Number=SeqID_1227
  Pfam annotation: Domain name=WRC; Domain location=4-48; Score=70.5; E_ value=6.4e-18; Accession=PF08879.2; Description=WRC
AAAAAAGARCSRNDGKRWRCKGAAVPGYLFCDRHIAWSSRKRKPRPRKHEQQQHGSGGLGPPTAKGDVASAEEDTPELGHDGGFQKRAKGGETWPAA

SEQ ID NO: 67202 - protein, 43 aa, Setaria italica
  Transcript Sequence Number=SeqID_1228
  Gene Ontology: Mol. function=transferase activity, transferring glycosyl groups; Cellular component=endoplasmic reticulum membrane; Biological process=protein amino acid O-linked mannosylation
  Homolog annotation: Hit_ID=B9R8M8; Match level="QueryCoverage=100%, HitCoverage=18%, E-value=8e-14, Identity=83%"; Hit description =Dolichol-phosphate mannosyltransferase, putative
SGEFVVIMDADLSHHPKYLPSFIRKQKETGADVVTGTRYVKNG

SEQ ID NO: 67203 - protein, 154 aa, Setaria italica
  misc_feature (147)..(147): Xaa can be any naturally occurring amino acid
  Transcript Sequence Number=SeqID_1229
  Gene Ontology: Mol. function=transferase activity, transferring glycosyl groups; Cellular component=dolichol-phosphate-mannose synthase complex; Biological process=protein amino acid C-linked glycosylation via 2'-alpha-mannosyl-L-tryptophan
  Homolog annotation: Hit_ID=B9R8M8; Match level="QueryCoverage=100%, HitCoverage=64%, E-value=3e-73, Identity=86%"; Hit description =Dolichol-phosphate mannosyltransferase, putative
DIVKQLQQVYGEDRVLLRARPRKLGLGTAYLHGLKHASGEFVVIMDADLSHHPKYLPSFIRKQKETGADVVTGTRYVKNGGVHGWNLMRKLTSRGANVLAQTLLQPGASDLTGSFRLYKRDVLEDLISSCVSKGYVFQMEMIVRATXRKGYHIE

SEQ ID NO: 67204 - protein, 156 aa, Setaria italica
  misc_feature (11)..(11): Xaa can be any naturally occurring amino acid
  misc_feature (18)..(18): Xaa can be any naturally occurring amino acid
  Transcript Sequence Number=SeqID_1230
  Gene Ontology: Mol. function=transferase activity, transferring glycosyl groups; Cellular component=endoplasmic reticulum membrane; Biological process=protein amino acid O-linked mannosylation
  Homolog annotation: Hit_ID=B9R8M8; Match level="QueryCoverage=100%, HitCoverage=65%, E-value=9e-71, Identity=83%"; Hit description =Dolichol-phosphate mannosyltransferase, putative
GLKHASGEFVXIHDNNKXHHTQYLPSFIRKQKETGADVVTGTRYVKNGGVHGWNLMRKLTSRGANVLAQTLLQPGASDLTGSFRLYKRDVLEDLISSCVSKGYVFQMEMIVRATRKGYHIEEVPITFVDRVFGISKLGGSEIVEYLKGLVYLLLTT

SEQ ID NO: 67205 - protein, 107 aa, Setaria italica
  Transcript Sequence Number=SeqID_1231
MNADRLESDEHLVMLMLQATVPFVRPGSCWDLKLSGKGASILHSKLGCSAVYNSVEGHHVQKPHIVHSYKVNFTRVSHHLCKSLNERTTRHWLHSYFLLFNCLSSDD

SEQ ID NO: 67206 - protein, 209 aa, Setaria italica
  misc_feature (171)..(171): Xaa can be any naturally occurring amino acid
  Transcript Sequence Number=SeqID_1232
  Homolog annotation: Hit_ID=O04589; Match level="QueryCoverage=82%, HitCoverage=66%, E-value=3e-62, Identity=66%"; Hit description =F19K23.17 protein
MSGSRHHVQKPHIVHSYKVNFTRVSHHLCKSLNERTTRHWLHRFHVNASSDDDFRSSRNIAITLFKRYKNVIDRGGGENLEEFVSAGVNAYALGCTDEGLRKELMDIEDSGLEIEGLGEISLKFKVHSFEIRECILWLSIVFITILCTPQPTVIRWSPNPPVSADVLHQWXKGFCALIANAYYVQGMAWLPVKTLQLEQMAVTGNSEEP

SEQ ID NO: 67207 - protein, 316 aa, Setaria italica
  Transcript Sequence Number=SeqID_1233
  Homolog annotation: Hit_ID=O04589; Match level="QueryCoverage=61%, HitCoverage=75%, E-value=2e-76, Identity=69%"; Hit description =F19K23.17 protein
VITIHTFPFLPSPCRFRQLPAAAPREVELPATSDADRLESDEHLVMLMLQATVPFVRPGSCWDLKLSGKGASILHSKLGCSAVYNSVEGHHVQKPHIVHSYKVNFTRVSHHLCKSLNERTTRHWLHRFHVNASSDDDFRSSRNIAITLFKRYKNVIDRGGGENLEEFVSAGVNAYALGCTDEGLRKELMDIEDSGLEIEGLGEISLKFKVHSFEIRECILWLSIVFITILCTPQPTVIRWSPNPPVSADVLHQWKGFCALIANAYYVKGMAWLPVKTLQLEQMAVTGNSEEPSLVASRMQLVFSTLEVVSPQWPRV

SEQ ID NO: 67208 - protein, 87 aa, Setaria italica
  Transcript Sequence Number=SeqID_1234
  Gene Ontology: Mol. function=catalytic activity; Biological process =cellular metabolic process
  Homolog annotation: Hit_ID=Q2HRK0; Match level="QueryCoverage=96%, HitCoverage=19%, E-value=2e-16, Identity=53%"; Hit description=VEP1 , putative
SVALVEAMAGKEALWAEIVEENELVATHVSEVANWWVVDKSLDRYGLEWDILDSMNKSKEHGFLGFRNTFRSFNTCIDRLKAHKIVP

SEQ ID NO: 67209 - protein, 111 aa, Setaria italica
  Transcript Sequence Number=SeqID_1235
  Homolog annotation: Hit_ID=B6TP05; Match level="QueryCoverage=100%, HitCoverage=100%, E-value=1e-41, Identity=76%"; Hit description=FLP1
MSGVWVFRNGVVRLVENPTSGAAAAASGKRKALLHTPSGEVVASYASLERKLAALGWERYYGGGDGGSMLQYHKRTSVDLISLPKDFAHFGSVHMYDIVIKNRDAFRVIDA

SEQ ID NO: 67210 - protein, 134 aa, Setaria italica
  Transcript Sequence Number=SeqID_1236
  Homolog annotation: Hit_ID=B9SGR5; Match level="QueryCoverage=61%, HitCoverage=11%, E-value=4e-13, Identity=42%"; Hit description =Pentatricopeptide repeat-containing protein, putative
PDAFSRTARLLQSLRARGALDLLDANSLSLAAAAAARSRDARLAHSLLLYLLRQGFLPDRRAYTAAVARLTPPTKALRLFDTVLRHLRRSPPELVSPSCLPDTAAFNAALSACADAGDCRRFRQLFDAMSEWSA

SEQ ID NO: 67211 - protein, 115 aa, Setaria italica
  Transcript Sequence Number=SeqID_1237
KKDQRDNHVLPQSNQHLLDGGKVGLLELDAMKEDFPPMTSSPKSDKSVTSTVMNSMTSKMKQEFVHRPNDAKMSSSQPMNLKAMQGLVLNQKGRFTVDQGQATWMGKEGKDGWLQ

SEQ ID NO: 67212 - protein, 94 aa, Setaria italica
  Transcript Sequence Number=SeqID_1238
KSNDKLVASASLLGESVLAAAAAVAEEEITDQPSKLQAFPSSRRGQSPKASEATFMESSLEEERRQSLLVRATEPEVLAEYTGDGSVDFRGSPI

SEQ ID NO: 67213 - protein, 70 aa, Setaria italica
  Transcript Sequence Number=SeqID_1239
PKTELINREPNRINRNRKDRLPVRFLVHTNRTNLGLFGSHPRLTEKNRITEPAAQHNFSLGRPISPCTKP

SEQ ID NO: 67214 - protein, 135 aa, Setaria italica
  Transcript Sequence Number=SeqID_1240
CGGLRESDVGSVVFPNSGELFRHHCSSLAEGEHTILFVSSISFHFAVHARDRDSFLAFHLPPYFTPVSVRSHAAACRAPPVRPMPLAPSPATAASTTRPGLRRAGPPAGRRPGAAPCSWREEEDEAPLFNLAPDL

SEQ ID NO: 67215 - protein, 127 aa, Setaria italica
  Transcript Sequence Number=SeqID_1241
LRRSEVKVRSSSNSGELFRRNRGLPVKTDTTMEFLSSSSTPWCGGLHESDVGSVVFPNSGELFRRHCSSLAEGTVTAPVSVRAHAAVRHHRPCAWLLARPPPPAPPTRSPAAPEPRQADGQELHHAP

SEQ ID NO: 67216 - protein, 155 aa, Setaria italica
  misc_feature (84)..(84): Xaa can be any naturally occurring amino acid
  Transcript Sequence Number=SeqID_1242
  Gene Ontology: Mol. function=actin binding; Cellular component =integral to membrane; Biological process=actin cytoskeleton organization and biogenesis
  Homolog annotation: Hit_ID=Q0D5P3; Match level="QueryCoverage=98%, HitCoverage=16%, E-value=7e-65, Identity=81%"; Hit description =Formin-like protein 11
KLDTLLKLSDVKGTDGKTTLLHFVVQEIIRSEGVRATRAAKEQSTSVSSMDTNDVTDGNDQQTEDDYKQLGLKVVSNLGDELQXVRKAAILDADQLAMSVASLGHKLVKTKEFLNTGMKSLDEDSGFHHKLKHFTEQSQTDVTFLLEEEKKIRSM

SEQ ID NO: 67217 - protein, 327 aa, Setaria italica
  Transcript Sequence Number=SeqID_1243
  Homolog annotation: Hit_ID=Q10B79; Match level="QueryCoverage=100%, HitCoverage=100%, E-value=1e-124, Identity=71%"; Hit description =BLYIDS4G, putative, expressed
  Pfam annotation: Domain name=SPX; Domain location=1-176; Score=103.4; E_value=7.5e-28; Accession=PF03105.11; Description=SPX domain
MKFGKDFRNHLEETLPAWRDKYLAYKALKKLIKNLRPAEPAAFPLPPPPPAAEGLGGGAGQGNVALGNWFASILDMELHKLNEFYMEREEWYVIRLQVLKERIERVKAKKNDAFTSRSEFTEEMLEIRKDFVIIHGEMILLQTYSSLNFAGLVKILKKYDKRTGGLLSLPFTQRVRHQPFFTTEPLTRLVRECEANLELLFPVEAEVLEPSSSSNLEPHAGAKRDPTSSGDVETSDVYRSTLAAMKAIQGLRKASSTYNPLSLSRFFNGEDGEACSGAITSESSLSDSSTDSQIQDAGKDDKEVQSNSREHNAAQREHNVEGEPRDE

SEQ ID NO: 67218 - protein, 51 aa, Setaria italica
  Transcript Sequence Number=SeqID_1244
  Gene Ontology: Mol. function=protein binding; Biological process=RNA metabolic process
  Homolog annotation: Hit_ID=B9SD55; Match level="QueryCoverage=88%, HitCoverage=5%, E-value=3e-20, Identity=97%"; Hit description =Regulator of nonsense transcripts, putative
HTWNIFHNIDVACNLLETCGRFLYRSPETTIRMANMLEILMRLKNVKNLDP

SEQ ID NO: 67219 - protein, 674 aa, Setaria italica
  misc_feature (33)..(33): Xaa can be any naturally occurring amino acid
  misc_feature (410)..(410): Xaa can be any naturally occurring amino acid
  misc_feature (419)..(419): Xaa can be any naturally occurring amino acid
  Transcript Sequence Number=SeqID_1245
  Gene Ontology: Mol. function=protein binding; Cellular component =cytoplasm; Biological process=RNA metabolic process
  Homolog annotation: Hit_ID=B9SD55; Match level="QueryCoverage=98%, HitCoverage=80%, E-value=0.0, Identity=74%"; Hit description =Regulator of nonsense transcripts, putative
  Pfam annotation: Domain name=MIF4G; Domain location=26-248; Score =7.9; E_value=0.0045; Accession=PF02854.11; Description=MIF4G domain
  Pfam annotation: Domain name=MIF4G; Domain location=435-623; Score =166.4; E_value=8.3e-47; Accession=PF02854.11; Description=MIF4G domain
  Pfam module annotation: Pfam domain module=MIF4G::MIF4G; Domain location=26-248::435-623
FPQVEFCYLNPERPDANYLRTLDSSIKRNTTVXKKLKTINDEQKDGLMDELKSVNLSKFVSEAVSYICEAKLRSADIQAAVQVCSLLHQRYKDFSPCLIQGLLKVFFPGKSGDDLDADKNSRAMKKRSTLKLLIELYFVGIVEDASIFVNIIKDLTSAEHLKDREATQTNLSLLSTFARQGRFLVGLQSHGQEAYDEFFKDLNVTADQKKFFKKALNSYYDAVAELLQSEHASLRLMEAENAKVLSAKGELSDENTASYEKLRKSFDQLLRGVSSLAEALDMQPPVMPDDGNTTRVTTGTDVSPSSGKESSALEPIWDDDDTKAFYESLPDLRAFVPAVLLGEVEPKSNEQHAKGREQSSESTSEQEIELHDNAQTSANEHQLEVKVDDGAKDNKDKDKERGKDGERENXKEKDLDKKXEREKEKVRGLDGASLDNLLQRLPGCVSRDLIDQLTVEFCYLNSKANRKKLVRALFNVNRTSLELLPYYSRLVATLSTCMKDVPSMLLSMLEEEFNFLINKKDQINIETKIKNIRFIGELCKFKMAPPALVFSCLKACLDDFSHHNIDVACNLLETCGRFLYRSPETTIRMANMLEILMRLKNVKNLDPRHSTLVENAYYLCKPPERSARISKVRPPLHQYIRKLLFSDLDKSSVEHVLRQLRKLPWAECQQYLLK

SEQ ID NO: 67220 - protein, 70 aa, Setaria italica
  Transcript Sequence Number=SeqID_1246
LCIVYKLCESKREFCEACGQTVHVCLLDFSLFLCLIYFGGWFCLSWKHVDNWIQSNTFASIGTIRILPLE

SEQ ID NO: 67221 - protein, 424 aa, Setaria italica
  Transcript Sequence Number=SeqID_1247
  Gene Ontology: Mol. function=binding
  Subcellular localization annotation: CTP_CleavageSite=42; ConfidenceScore=5.41e-01
LSRTSSSFSSAQAASTPSTSFQTNLFSQPKEEGRNFIDENISKSTYSEANSNQGCGRSSFVFGRGSNAAAPSEGAAQYTLHDEIKKLNINREGPPLGCTKLNDSAAPEFLFQSKADASTGYGVVPRPKQESHPFANLNCSSSFSTFENTVPAFSFGTMNAEGETAPDDPCVVKQDLPGCSRETLFGLDSIKSAYRDKKEVHKSKRKNKRPTRLKQHAQVHHAASKEPCTNGDLAGEYSPMDCSPYPAETERVSTEAYVASDQSVHIGDSGISNWNSSCADDLISATEHLVIDADPPVFANEGREPNVDASESNFGSIFSSFEGDLSNASQHSFTNVNICLNGEHKTGTTEACADGYGYNVNGQACDENAYRTQHNFGEAVALQSSSSNFSGLNFSFGASSSPQISASAQRRNTRRKLRTKGTPA

SEQ ID NO: 67222 - protein, 96 aa, Setaria italica
  Transcript Sequence Number=SeqID_1248
  Pfam annotation: Domain name=DUF751; Domain location=28-88; Score =99.0; E_value=1.7e-26; Accession=PF05421.3; Description=Protein of unknown function (DUF751)
GVGVALALSAGAGPALALGPEGPLVEEFWDNMRRYALYALTVSTGVAYTVLQPIVELLKNPVTALLIVVVIAGSGFLVSQVLNAMVGNSDFIYRYE

SEQ ID NO: 67223 - protein, 73 aa, Setaria italica
  Transcript Sequence Number=SeqID_1249
FWIIFCFVFCSLIWIVCSRRSDPVVVPCGAVLFPKFCWGISAAGGAGAGGEDDPSSDVRGVQPAGDGVGGVLR

SEQ ID NO: 67224 - protein, 52 aa, Setaria italica
  Transcript Sequence Number=SeqID_1250
  Gene Ontology: Mol. function=metal ion binding
  Homolog annotation: Hit_ID=B9S201; Match level="QueryCoverage=100%, HitCoverage=9%, E-value=4e-11, Identity=63%"; Hit description =Protein binding protein, putative
MIRLQTYTAFSLLAMASAVYYAFSSQEQFYPAMVYLSTSKICFVLLLNTGLV

SEQ ID NO: 67225 - protein, 505 aa, Setaria italica
  misc_feature (445)..(445): Xaa can be any naturally occurring amino acid
  Transcript Sequence Number=SeqID_1251
  Gene Ontology: Mol. function=metal ion binding; Cellular component =endoplasmic reticulum membrane; Biological process=ubiquitin -dependent protein catabolic process
  Homolog annotation: Hit_ID=B9S201; Match level="QueryCoverage=94%, HitCoverage=92%, E-value=1e-159, Identity=59%"; Hit description =Protein binding protein, putative
  Pfam annotation: Domain name=PHD; Domain location=291-332; Score= -0.0; E_value=0.027; Accession=PF00628.21; Description=PHD-finger
  Pfam annotation: Domain name=zf-C3HC4; Domain location=292-329; Score= 41.3; E_value=3.8e-09; Accession=PF00097.17; Description=Zinc finger, C3HC4 type (RING finger)
  Pfam module annotation: Pfam domain module=PHD::zf-C3HC4; Domain location=291-332::292-329
  Subcellular localization annotation: CTP_CleavageSite=52; ConfidenceScore=5.09e-01
MIRLQTYAAFSLLATASAVYYAFSSRDQFYPAMVYLSTSKICFVLLLNTGLVAMCVAWQLVKRIFLGSLREAEVERLNEQSWREVVEILFAVTIFRQDFSVSFLAMVAALLLVKALHWLAGKRVEYIETTPSVPTLSHIRIVSFMAFLLIVDCLFLSNSLRSLIQKREASVAIFFSFEYMILATSTVSTFVKYVFYVSDMLMEGQWEKKAVYTFYLELISDLVHLSLYMLFFIAIFLNYGVPLHLIRELYETFRNFKIRIADYVRYRKITSNMNERFPDATTEELNASDATCIICREEMTTAKKLLCGHLFHVHCLRSWLERQHTCPTCRAPIIPPDNGRAAAARQHGAQPGVQPAAGTGTPASEGASGENMSRRQAKLEAAAAAASLYGRSFAYPPANNLNRSGPPQSTSSTPQAEASSSNQSQKDQELQFQNTSNGLAPLPFXAHGAIGSGASTRDLENSLQKAQENFIKSQIEMLQIQLQMVQRGAAALANNNENAEHTKND

SEQ ID NO: 67226 - protein, 101 aa, Setaria italica
  misc_feature (46)..(46): Xaa can be any naturally occurring amino acid
  Transcript Sequence Number=SeqID_1252
DRLQLMCYKYLWDNLIAEKFPTENFFSYFDLDPNYLLSNHVKWYIXSLGFNAKVLCLTFKLCIFPPNSSQAIYCDFDRLVCSWEIIQFHVLRNCMNPESLC

SEQ ID NO: 67227 - protein, 121 aa, Setaria italica
  misc_feature (84)..(84): Xaa can be any naturally occurring amino acid
  Transcript Sequence Number=SeqID_1253
  Homolog annotation: Hit_ID=B6T237; Match level="QueryCoverage=93%, HitCoverage=26%, E-value=7e-47, Identity=82%"; Hit description=CP5
RRAPPQGPSRLEAAAVVPRNDGGVMWRPEEEQLAVNTGDLMHLWRLVEEKDGGPSWIHMMDHTLPTMRYQAWRRDPPNGPPQYXRSSTIFEDASPEVVRDFFWDDEFRIKNSWDDMLLQHE

SEQ ID NO: 67228 - protein, 107 aa, Setaria italica
  misc_feature (50)..(50): Xaa can be any naturally occurring amino acid
  Transcript Sequence Number=SeqID_1254
  Homolog annotation: Hit_ID=B6T237; Match level="QueryCoverage=96%, HitCoverage=17%, E-value=2e-32, Identity=67%"; Hit description=CP5
  Subcellular localization annotation: CTP_CleavageSite=14; ConfidenceScore=5.01e-01
MSFFQGVPRPSVPRQNKPRRVDLYYSSWCIRPGTTVFRNSYLQHLQDTKXVERINSTFFFLSVESRNGDGAMTACEVLLFHHEDMGIPWEIAKLGVRQGMWGCVKRI

SEQ ID NO: 67229 - protein, 507 aa, Setaria italica
  misc_feature (7)..(7): Xaa can be any naturally occurring amino acid
  misc_feature (24)..(24): Xaa can be any naturally occurring amino acid
  Transcript Sequence Number=SeqID_1255
  Gene Ontology: Mol. function=glycine hydroxymethyltransferase activity; Cellular component=phagocytic vesicle; Biological process =one-carbon compound metabolic process
  Homolog annotation: Hit_ID=B6UF38; Match level="QueryCoverage=96%, HitCoverage=83%, E-value=0.0, Identity=93%"; Hit description=Serine hydroxymethyltransferase
  Pfam annotation: Domain name=SHMT; Domain location=51-455; Score =787.6; E_value=8.4e-234; Accession=PF00464.11; Description=Serine hydroxymethyltransferase
GGGGGGXGETSSCSSSSAALRKSXHQAMGEGSGPDLETRRAAVRAWGNQSLAEADPDVHALMERELDRQVRGIELIASENFVCRAVLDALGSHLTNKYSEGLPGARYYGGNQHIDAIERLCHERALTAFGLDPACWGVNVQPYSCTSANLGVYTGLLQPKDRIMGLEPPSGGHVSHGYYTPSGKKVSGASIFFESLSYKVNPQTGYIDYDKVEERAMDFHPKILICGGSSYPREWDFARMRLIADKCGAVLMCDMAHISGLVAAKECRSPFDYCDVVTSTTHKNLRGPRGGIIFFRKGKKLWKRGGSFSQGDEGEYDLEDKINFGVFPSMQGGPHNNHIAALAITLKQVATPEYKAYIQQVKKNAQALASALLRRKCRLVTGGTDNHLVLWDLRTLGLTGKIFEKVCEACHISINKTPIYGDNGSISPGGVRIGTPAMTTRGCLEDDFEAIAEFLIRATQIASNVLREHGKQQKEFLRGLQNSKDVLELRNQVEVFASQFAMPGFDI

SEQ ID NO: 67230 - protein, 105 aa, Setaria italica
  Transcript Sequence Number=SeqID_1256
  Gene Ontology: Mol. function=metal ion binding; Cellular component =nucleus
  Homolog annotation: Hit_ID=Q9SGH2; Match level="QueryCoverage=88%, HitCoverage=4%, E-value=9e-31, Identity=66%"; Hit description =T13O15.10 protein
SANEGNKVFTMDYKDSDIVHSPEQPACDATLPDWVKSLEPVRKLPTNVGTRIRKCVYEALERKPPEWARKILDHSISKEVYKGNASGPTKKLVLSVLVGPDALPL

SEQ ID NO: 67231 - protein, 53 aa, Setaria italica
  Transcript Sequence Number=SeqID_1257
  Subcellular localization annotation: CTP_CleavageSite=34; ConfidenceScore=5.04e-01
SSCLLSHSHHRTSNDSNLSPHSFPLITPRIRAIDCQGSSSPFSSRPGGTVSDY

SEQ ID NO: 67232 - protein, 51 aa, Setaria italica
  Transcript Sequence Number=SeqID_1258
MWPGCGGRFYWAPESAPPGQARGVAVVFAWVWSDEAQLRPFVELYASLGWR

SEQ ID NO: 67233 - protein, 545 aa, Setaria italica
  Transcript Sequence Number=SeqID_1259
  Gene Ontology: Mol. function=DNA binding; Cellular component=nucleus; Biological process=regulation of transcription, DNA-dependent
  Homolog annotation: Hit_ID=Q7X5W7; Match level="QueryCoverage=94%, HitCoverage=73%, E-value=0.0, Identity=75%"; Hit description =Homeobox transcription factor Hox7-like protein
MVIELLERRSKKNAHGSPNKCSEIDESYPGERWLLGLMEGEYSDLSIDEKLDCLVALIDIASGAGSVPRLEEPQRVLHNMPRAQPHQSGGKIKKSTKNLYRSSDESLNGPGNSYSLDCSRQGRSASRRNQDYITDSERNDLSGVAHEPQVVLLGSDRRYNSYWLFLGPCRADDPGHRRVYFESSEDGHWEVVDSPQELLSLLSVLDSRGTREAHLLASMEKRQACLFEAMKKHVEGGNAIGLPASSDSFRSETSTGDGASPKTSSVSGASPVSDVENASVPPDLEDSNLDSSSAIVIENGKRGDERILMWDRLQAFDKWIWTSFYSVLTTVKCGKKSFKESLVRCESCHDLYWRDEKHCRICHSTFEVGFDLEEKYAVHAATCREPEDAHEVPNHKVLPSQLQALKAAIHAIEASMPEVAFTGSWMKSAHKLWVKRLRRTSSLPELLQVLVDFVGAMDEDWLYKSSSSVSFSSYLDDIIVYFQTMPQTTSAVALWVVKLDALIAPYLDKPDTSRAFMKELAQDHRLVQGSLEDGFFHVMLQQAPS

SEQ ID NO: 67234 - protein, 64 aa, Setaria italica
  Transcript Sequence Number=SeqID_1260
  Gene Ontology: Mol. function=protein transporter activity; Cellular component=nuclear pore; Biological process=protein import into nucleus, docking
  Homolog annotation: Hit_ID=Q84NP8; Match level="QueryCoverage=100%, HitCoverage=6%, E-value=5e-20, Identity=76%"; Hit description =Putative Ran binding protein 11-like
MALSAGDVPTMYTVLVNSLSADEAARRPAEAALAQCEARPGFCSCLLEIISARGLACRQDVRLL

SEQ ID NO: 67235 - protein, 114 aa, Setaria italica
  Transcript Sequence Number=SeqID_1261
  Gene Ontology: Mol. function=transferase activity; Cellular component= plasma membrane
  Homolog annotation: Hit_ID=Q9FJG3; Match level="QueryCoverage=98%, HitCoverage=10%, E-value=8e-31, Identity=58%"; Hit description =Phosphoribosylanthranilate transferase-like protein
  Pfam annotation: Domain name=C2; Domain location=8-96; Score=87.7; E _value=4.2e-23; Accession=PF00168.22; Description=C2 domain
MAATARKLIVEVVEARDLLPKDGTGTSSPYARADFDGQRRKTRTVARDLNPAWNEALEFDFPAAGVGAEGEPLEVAVLHDVRVGPSRRSNFLGRVRLDARQFVRKGEEALIYFP

SEQ ID NO: 67236 - protein, 109 aa, Setaria italica
  Transcript Sequence Number=SeqID_1262
GLCSCVLHEQVMKLQRQISVKSLVNPNQLSEDIVRCMRNIFISLSDSCRDSSRNSSMENQWSIPSPSGNYSISAFWSLSEPSSISSWVQSPQVDLNYNNNLLASETVLT

SEQ ID NO: 67237 - protein, 69 aa, Setaria italica
  Transcript Sequence Number=SeqID_1263
EYPTPKSWIHHYAPCLLPSSFHKEVACQRFMIKSSKFALDYSFVNLIIKYKFPICFLKCNVHIMYHYNY

SEQ ID NO: 67238 - protein, 313 aa, Setaria italica
  misc_feature (286)..(286): Xaa can be any naturally occurring amino acid
  Transcript Sequence Number=SeqID_1264
  Gene Ontology: Mol. function=oxidoreductase activity; Cellular component=extracellular region; Biological process=oxidation reduction
  Homolog annotation: Hit_ID=Q2PAJ1; Match level="QueryCoverage=79%, HitCoverage=42%, E-value=1e-121, Identity=79%"; Hit description =Putative laccase
  Pfam annotation: Domain name=Cu-oxidase; Domain location=166-313; Score=118.1; E_value=2.8e-32; Accession=PF00394.14; Description =Multicopper oxidase
  Pfam annotation: Domain name=Cu-oxidase_3; Domain location=40-156; Score=208.9; E_value=1.3e-59; Accession=PF07732.7; Description =Multicopper oxidase
  Pfam module annotation: Pfam domain module=Cu-oxidase::Cu-oxidase_3; Domain location=166-313::40-156
MGGVAKVPPALWLLLGVVAVAFGVAATPAQASGTNHYDFFIKETNVTRLCHEKAVLAVNGQFPGPTIYARRGDVVVVNVHNQGHKNITLHWHGVDQPRNPWFDGPEYITQCPIRPGANFTYTIILSDEEGTLWWHAHSDFDRATVHGAIVVHPKLGSTYPYPKPHKEIPIILGEWWNVDVEQLLEEMKRTGGDVNISDANTINGQPGDMFPCSRNGTFRAVVEHGKTYLLRIINAGLTNDMFFAVAGHRLTVVGTDGRYLKPFAADHVMIASGQTVDALLHAGRAXNGGGRYYMAARTFQTNRQLSINNSTAT

SEQ ID NO: 67239 - protein, 115 aa, Setaria italica
  Transcript Sequence Number=SeqID_1265
AWLSASQEEEDVTQLPAARRRGGDGEREEEEDRHPDSTAETSSESSVAAGDPRLWSSERTSYARCSTDCRYLPCASILSCRCLWTSICSCSFLCTSLCIRAMLLEESQRPSLAPA

SEQ ID NO: 67240 - protein, 119 aa, Setaria italica
  Transcript Sequence Number=SeqID_1266
  Gene Ontology: Mol. function=protein serine/threonine kinase activity; Cellular component=cell surface; Biological process =protein amino acid phosphorylation
  Homolog annotation: Hit_ID=Q5N835; Match level="QueryCoverage=96%, HitCoverage=14%, E-value=2e-50, Identity=80%"; Hit description =Putative S-receptor kinase
  Pfam annotation: Domain name=Pkinase_Tyr; Domain location=1-118; Score=-95.2; E_value=2.1e-07; Accession=PF07714.9; Description =Protein tyrosine kinase
AFGSVFKGVVSDTTAVAVKKLEGFHQGEKQFRAEVSTLGNIHHINLIRLLGFCSEGAKRLLVYEYMPNGSLDKHLFGSSSTTLSWKIRYQIAAGIAKGLAYLHEECRDCIIHCDIIFIS

SEQ ID NO: 67241 - protein, 202 aa, Setaria italica
  misc_feature (65)..(65): Xaa can be any naturally occurring amino acid
  Transcript Sequence Number=SeqID_1267
  Gene Ontology: Mol. function=nucleotide binding; Biological process =defense response
  Homolog annotation: Hit_ID=Q5Z5Z4; Match level="QueryCoverage=97%, HitCoverage=16%, E-value=3e-33, Identity=41%"; Hit description =Putative Pib
RQTAVGILIEAREAKKKQSSPRDLIELINRIDVFPLQVISLWGAVGDLGVASIIKKTCEDPEICXKFRFRAWVKLMHPFNPHEFSRSLMAQFYTNDLRTFRRSCQQQGSSVDLLKFADVMMAMEGKRFTDEFVKQVTDQRYLVFLEDVSSTVDWEAVRVCLPDTNKGSFIVVHTQQLEVASLCVGQSHRVLELEQFSEDHSV

SEQ ID NO: 67242 - protein, 74 aa, Setaria italica
  Transcript Sequence Number=SeqID_1268
  Gene Ontology: Mol. function=microtubule motor activity; Cellular component=nucleus; Biological process=microtubule-based movement
  Homolog annotation: Hit_ID=Q9SEE4; Match level="QueryCoverage=100%, HitCoverage=25%, E-value=1e-32, Identity=85%"; Hit description=Pirin- like protein
  Pfam annotation: Domain name=Pirin; Domain location=1-66; Score =106.8; E_value=7.3e-29; Accession=PF02678.8; Description=Pirin
GFPDHPHRGFETVTYMLEGAVTHEDFEGHRGTIKAGDVQWMTAGRGIVHSEMPAGPGTSKGLQLWVNLSSGNKM

SEQ ID NO: 67243 - protein, 250 aa, Setaria italica
  misc_feature (27)..(27): Xaa can be any naturally occurring amino acid
  Transcript Sequence Number=SeqID_1269
  Gene Ontology: Mol. function=hydrolase activity, acting on acid anhydrides, catalyzing transmembrane movement of substances; Cellular component=integral to endoplasmic reticulum membrane; Biological process=calcium ion transport
  Homolog annotation: Hit_ID=Q4PKC7; Match level="QueryCoverage=100%, HitCoverage=29%, E-value=1e-117, Identity=77%"; Hit description=Ca2+- ATPase (Fragment)
  Pfam annotation: Domain name=Cation_ATPase_C; Domain location=37-250; Score=154.4; E_value=3.4e-43; Accession=PF00689.13; Description =Cation transporting ATPase, C-terminus
GEGRSIYNNMKAFIRYMISSNIGEVAXIFLTAALGIPEWLIPVQLLWVNLVTDGPPATALGFNPPDKDTMEKPPRQSEDSLISAWVLFRYMLVHLSSGTHGSFLGINLGADGHTLVTYSQLSNWGQCSFWEDFNAEPFTAGDRVFSFDANPCDYFTEGKAKATTISLSVLVTIEMFNSLNALSEDASLLTMPPWVNPWLLLAMAVSFDLHFLTLYVPFFASAFGIVPLSFNEWMLVLVVAFPVIIIDEAL

SEQ ID NO: 67244 - protein, 73 aa, Setaria italica
  Transcript Sequence Number=SeqID_1270
NLCLFSLKCAMCRMVCHVGIKFCCSEPSAPSSFPCNWEYLDSHCQNMVTFSHWSSHTGTQYYFCYLCIGLLLK

SEQ ID NO: 67245 - protein, 202 aa, Setaria italica
  Transcript Sequence Number=SeqID_1271
SEFFASIRKLEEAQLQVDECKKALQEAQKRVDAANRGKIAVEEALRRCRSATGYKRRSFHDHPKFKHAAPRCRDSQNLDIVDLSKGPLKPTLSIGQILSRKLKTPDGYDKSVWENTSEASNVSLGQILNRRRAVVYSSDATAHASGQWDKSKHAKKFAGKRKKFAFTGLSVFLARQAKSKKNKNHISTTNVNLARKKKLLCT

SEQ ID NO: 67246 - protein, 165 aa, Setaria italica
  Transcript Sequence Number=SeqID_1272
  Gene Ontology: Mol. function=cysteine-type endopeptidase activity; Cellular component=extracellular region; Biological process =proteolysis
  Homolog annotation: Hit_ID=Q2RAW9; Match level="QueryCoverage=95%, HitCoverage=48%, E-value=1e-60, Identity=76%"; Hit description=Latex- abundant protein, putative, expressed
  Pfam annotation: Domain name=Peptidase_C14; Domain location=1-151; Score=-16.8; E_value=0.00047; Accession=PF00656.14; Description =Caspase domain
RGSSPSAVLPTGTNIKRALSEMVARAAPGDVLFFHYSGHGTLVPRRHGHGYDEAIVPCDFNLITDVDFRQLVDRVPQGATFTMVSDSCHSGGLIDQEKEQIGPSVADLAVDSSAPPAASARARFLPYATVVGHLSGASGVNASHHVADHLLALFGADASAKFRHH

SEQ ID NO: 67247 - protein, 140 aa, Setaria italica
  Transcript Sequence Number=SeqID_1273
  Gene Ontology: Mol. function=transferase activity, transferring glycosyl groups; Cellular component=integral to membrane; Biological process=cellulose biosynthetic process
  Homolog annotation: Hit_ID=C3U576; Match level="QueryCoverage=100%, HitCoverage=18%, E-value=4e-52, Identity=76%"; Hit description =Cellulose synthase-like protein H1
VVTNAPIMLNMDCDMFANNPQVALHAMCLLLGFDDELQSGFVQAPQKFYGTLKDDPFGNQMEVLFEKIGFGIAGLQGMIYGGTGCFHRRKVIYGVPPESTADVQPTRMRGSPSYKELQKLFGSSRELIESARSAISGELF

SEQ ID NO: 67248 - protein, 82 aa, Setaria italica
  Transcript Sequence Number=SeqID_1274
  Gene Ontology: Mol. function=aspartic-type endopeptidase activity; Biological process=DNA integration
  Homolog annotation: Hit_ID=Q2QYG3; Match level="QueryCoverage=56%, HitCoverage=11%, E-value=8e-16, Identity=80%"; Hit description =Retrotransposon protein, putative, Ty1-copia subclass
MLSGVESRPLESQSGHLAPAPLPRAVLLPLRFPTSLQVRVLHVLSSHQFVDIMMKGLPAQMFIDFRSSLCVRDPPAATAGGY

SEQ ID NO: 67249 - protein, 324 aa, Setaria italica
  Transcript Sequence Number=SeqID_1275
MEAAAAAEAEAGAGAYEEMLRVVEACAMRIRWRLRPGSKRRLLNDILFLCTGLRPVVLMDYGGTMPQLQENLCSLLHHARQETSILSPLRVMVINDMLYLIHIKGLAEHASPKERSQHQLAFMDLEKSCCKLLTNIEANDTVLEMLSIQDRFSAKYPVDKAVDAPVIRPGITKQMSGLPERTIDGECTDNHNDNRTLLLVGLMAFLETTQIALPSLNGWLLGYPVTYLFRNGSAEAAIQNLSMHSLHIYRVYVCGSCQSGGKQSEEELMSFSVPCGLSMRREEEPWAKSFIARMSEKLSRCNQVWASMRLEVEVFQSQSQVIVL

SEQ ID NO: 67250 - protein, 87 aa, Setaria italica
  Transcript Sequence Number=SeqID_1276
PTTKAPSRNSRANKRRSSSGSAPLPMGLAHDTTNLEMEPSLAEDPEHRKKEQEAAATAPPKPKSLLAIPVGIKNKAVVDKLVSKFPA

SEQ ID NO: 67251 - protein, 111 aa, Setaria italica
  Transcript Sequence Number=SeqID_1277
  Homolog annotation: Hit_ID=Q7X9B0; Match level="QueryCoverage=97%, HitCoverage=75%, E-value=3e-34, Identity=66%"; Hit description=Auxin induced protein
  Pfam annotation: Domain name=Auxin_inducible; Domain location=10-71; Score=98.9; E_value=1.8e-26; Accession=PF02519.6; Description=Auxin responsive protein
DECCTSVAGKGHCVVYTVDGRRFEVPLAYLTKTVFTELLQMSHEEFGRTSDGRITIPCDAAAMEYVMCLLRRSASADIERAFLSTMAVPCHFAYCAAPSAGLSQPVVVCSS

SEQ ID NO: 67252 - protein, 96 aa, Setaria italica
  Transcript Sequence Number=SeqID_1278
RLRLAPGWDHRRSNSLLGSIDRSVARSVDMDRPDHHQHQFYMPLPVQQQQQQLCAPMMDEQASFLAARGGGGRGGSGGTVAGKGERKRRFTEEQIR

SEQ ID NO: 67253 - protein, 378 aa, Setaria italica
  misc_feature (14)..(14): Xaa can be any naturally occurring amino acid
  Transcript Sequence Number=SeqID_1279
  Gene Ontology: Mol. function=double-stranded RNA binding; Cellular component=intracellular
  Homolog annotation: Hit_ID=Q5N889; Match level="QueryCoverage=44%, HitCoverage=31%, E-value=3e-71, Identity=77%"; Hit description=C -terminal domain phosphatase-like protein
  Pfam annotation: Domain name=dsrm; Domain location=200-263; Score =52.5; E_value=1.6e-12; Accession=PF00035.17; Description=Double -stranded RNA binding motif
SERVNCVKSGSKSXLQNVFRDRGCHPKMAMVIDDRLNVWDDKDQHRVHVVPAYAPYYAPQAEMANAVPVLCVARNVACNIRGGFFREFDENLLKKVFELHYENGLLDLPYAPDVGDYLVCEDTNFVPNNKDQAPIPEGMRGAEVEKRLNGQSFRGEQREGQQISSLTRSPDDEGMSNRGTGGGRNIQLNGGALAIAPSVFVTVLQEIGRLCDSKVEFRSTVSNVKSMQFSVEVLFSNEKIGIGTGKTRDEAQVQAAEKALQNLESSYLSFVAPIAGVPNKDSRKSPGSGNGFLEDVTSSDIDISMQEPSGSTLKQDHSKNLDKLSSVMSLIREYCLEDQHVVFRDQVRNSSPARNEEYHFQVELAGQVLGRGIGSDRD

SEQ ID NO: 67254 - protein, 145 aa, Setaria italica
  misc_feature (106)..(106): Xaa can be any naturally occurring amino acid
  Transcript Sequence Number=SeqID_1280
  Gene Ontology: Mol. function=acid-amino acid ligase activity; Cellular component=intracellular; Biological process=ubiquitin -dependent protein catabolic process
  Homolog annotation: Hit_ID=B9S9V5; Match level="QueryCoverage=95%, HitCoverage=3%, E-value=3e-66, Identity=85%"; Hit description=E3 ubiquitin protein ligase upl2, putative
  Pfam annotation: Domain name=HECT; Domain location=1-144; Score=39.8; E_value=3.8e-12; Accession=PF00632.17; Description=HECT-domain (ubiquitin-transferase)
KTKNRVGKKQSRVTEETKQEYVDLVAEHILTTAIRPQINAFLEGFTELVPRDLISLFNDKELELLISGLPEIDLDDLKANAEYIGFSAASPVIQWFWEVVKAFSKXDMARLLQFVTGTSKVPLEGFKALQGISGPQRFQIHKAYW

SEQ ID NO: 67255 - protein, 139 aa, Setaria italica
  Transcript Sequence Number=SeqID_1281
  Gene Ontology: Mol. function=acid-amino acid ligase activity; Cellular component=intracellular; Biological process=ubiquitin -dependent protein catabolic process
  Homolog annotation: Hit_ID=UPI0000163167; Match level="QueryCoverage =88%, HitCoverage=3%, E-value=4e-56, Identity=82%"; Hit description =UPL1 (UBIQUITIN-PROTEIN LIGASE 1); ubiquitin-protein ligase
  Pfam annotation: Domain name=HECT; Domain location=1-138; Score=4.1; E_value=2.8e-10; Accession=PF00632.17; Description=HECT-domain (ubiquitin-transferase)
TIRVTEETKQEYVDLVAEHILTTAIRPQINAFLEGFTELVPRDLISLFNDKELELLISGLPEIDLDDLKANAEYIGFSAASPVIQWFWEVVKAFSKEDMARLLQFVTGTSKVPLEGFKALTKVIYRTPKKNLQEYQQRT

SEQ ID NO: 67256 - protein, 988 aa, Setaria italica
  Transcript Sequence Number=SeqID_1282
  Gene Ontology: Mol. function=acid-amino acid ligase activity; Cellular component=intracellular; Biological process=ubiquitin -dependent protein catabolic process
  Homolog annotation: Hit_ID=B9S9V5; Match level="QueryCoverage=98%, HitCoverage=26%, E-value=0.0, Identity=65%"; Hit description=E3 ubiquitin protein ligase upl2, putative
  Pfam annotation: Domain name=HECT; Domain location=676-988; Score =589.8; E_value=2.9e-174; Accession=PF00632.17; Description=HECT -domain (ubiquitin-transferase)
PYLVLSALPSALLAEAQMLRDRELSRYRARGSLFGGSYRLGGRRLPADNQTVIDRAVGVTMGRRVISATPGSSKGKDVEGTPLLDSDALRALIRLLQLAPPLSKGLLQRLMFNLCAHSVTRVTLVGHLLNMIKPESEGLSISNCMATYRLHGCQWNIVYTQPYSANGLPPLVTRRLLEILTYLASNHPSVADLLVHFNPSASSNCLMLQRSKEISQESASLDTKQPSSQGYTPILLFLKLLNKPLFLRSRVYLEQVMCLLEVVVNNAASQIDYPPRSAQIANSSDVELVDGAPSQTQAEPSTLEQGHIQDNSQSKDVEVPASCARQDVNVHAILTQLPDAELHNLCNILALEGLPDKVYSLASEVVKKLASVAASHRKFFSIELAGVAQSLSSSAVDELVTLKNTQMLGLSTCSMAGAAILRVLQVLSTLTSDVIDSRHEQDMGQEEQSILWDLNVGLEPLWQELSDCISATEAKLVHNSTFTSPAPLVDTLEVGASSSVSPPLPPGTQRLLPFIESFFVLCEKLQTNQPVTQSDYNVTAPEVKDLAGSSSSPSLKTGGICNVTFIKVAEKHRRLLNVFIRQNPSLLEKSLSMMLKVPRLIDFDNKRAYFRSRIRQQHDQHLSAPLRISVRRAYVLEDSYNQLRLRRTQDLKGRLTVQFQGEEGIDAGGLTREWYQLLSRVIFDKGALLFTTVGNNATFQPNPNSVYQTEHLSYFKFVGRVVAKALFDGQLLDVHFTRSFYKHILGAKVTYHDIEAIDPDYYKNLKWMLENDVSDLPDLTFSMDPDEEKHILYEKTEVTDYELKPGGRNIRVTEETKQEYVDLVAEHILTTAIRPQINAFLEGFTELVPRDLISLFNDKELELLISGLPEIDLDDLKANAEYIGFSAASPVIQWFWEVVKAFSKEDMARLLQFVTGTSKVPLEGFKALQGISGPQRFQIHKAYGAPDRLPSAHTCFNQLDLPEYTSKEQLEERLLLAIHEASEGFGFG

SEQ ID NO: 67257 - protein, 46 aa, Setaria italica
  Transcript Sequence Number=SeqID_1283
QHHQSGYNHTSGELHVAFKPLYREERNHPPELVMDASYKRNKYKPY

SEQ ID NO: 67258 - protein, 91 aa, Setaria italica
  misc_feature (78)..(78): Xaa can be any naturally occurring amino acid
  Transcript Sequence Number=SeqID_1284
YGHTALAPQQEAVAVLPQYYYGGGGTAADHHHGFQRDDAGALPGFGFGAREVVAGGDEYGFAAGYFDMGAALRTWRAXGVGGGMEFPQAWS

SEQ ID NO: 67259 - protein, 86 aa, Setaria italica
  Transcript Sequence Number=SeqID_1285
RREPSPLQQEYNYQEEYVPPPARPQAPAPAPAPAPLARTSSVMYRLRSLGLYGFLAPEQPAAASIPATDSFLAPAAAAAEKKQAHA

SEQ ID NO: 67260 - protein, 983 aa, Setaria italica
  Transcript Sequence Number=SeqID_1286
  Gene Ontology: Mol. function=protein serine/threonine kinase activity; Cellular component=integral to membrane; Biological process=protein amino acid phosphorylation
  Homolog annotation: Hit_ID=Q9M7A8; Match level="QueryCoverage=93%, HitCoverage=96%, E-value=0.0, Identity=58%"; Hit description=LRR receptor-like protein kinase
  Pfam annotation: Domain name=APH; Domain location=630-819; Score= -12.0; E_value=0.015; Accession=PF01636.15; Description =Phosphotransferase enzyme family
  Pfam annotation: Domain name=LRRNT_2; Domain location=363-401; Score =4.1; E_value=0.36; Accession=PF08263.4; Description=Leucine rich repeat N-terminal domain
  Pfam annotation: Domain name=LRRNT_2; Domain location=61-101; Score =25.7; E_value=0.00019; Accession=PF08263.4; Description=Leucine rich repeat N-terminal domain
  Pfam annotation: Domain name=LRR_1; Domain location=105-127; Score =0.3; E_value=2.7e+02; Accession=PF00560.25; Description=Leucine Rich Repeat
  Pfam annotation: Domain name=LRR_1; Domain location=129-150; Score =7.9; E_value=9.4; Accession=PF00560.25; Description=Leucine Rich Repeat
  Pfam annotation: Domain name=LRR_1; Domain location=152-174; Score =14.9; E_value=0.34; Accession=PF00560.25; Description=Leucine Rich Repeat
  Pfam annotation: Domain name=LRR_1; Domain location=176-199; Score =2.4; E_value=1.1e+02; Accession=PF00560.25; Description=Leucine Rich Repeat
  Pfam annotation: Domain name=LRR_1; Domain location=225-247; Score =10.1; E_value=3.6; Accession=PF00560.25; Description=Leucine Rich Repeat
  Pfam annotation: Domain name=LRR_1; Domain location=274-295; Score =12.0; E_value=1.5; Accession=PF00560.25; Description=Leucine Rich Repeat
  Pfam annotation: Domain name=LRR_1; Domain location=297-319; Score =12.9; E_value=1; Accession=PF00560.25; Description=Leucine Rich Repeat
  Pfam annotation: Domain name=LRR_1; Domain location=321-343; Score =7.9; E_value=9.2; Accession=PF00560.25; Description=Leucine Rich Repeat
  Pfam annotation: Domain name=LRR_1; Domain location=404-426; Score =3.2; E_value=76; Accession=PF00560.25; Description=Leucine Rich Repeat
  Pfam annotation: Domain name=LRR_1; Domain location=428-450; Score =15.8; E_value=0.18; Accession=PF00560.25; Description=Leucine Rich Repeat
  Pfam annotation: Domain name=LRR_1; Domain location=452-473; Score =11.3; E_value=2.1; Accession=PF00560.25; Description=Leucine Rich Repeat
  Pfam annotation: Domain name=Pkinase; Domain location=628-906; Score =160.3; E_value=5.9e-45; Accession=PF00069.17; Description=Protein kinase domain
  Pfam annotation: Domain name=Pkinase_Tyr; Domain location=628-906; Score=113.0; E_value=1e-30; Accession=PF07714.9; Description=Protein tyrosine kinase
  Pfam module annotation: Pfam domain module=APH::LRRNT_2::LRRNT_2::LRR_ 1::LRR_1::LRR_1::LRR_1::LRR_1::LRR_1::LRR_1::LRR_1::LRR_1::LRR_1::LRR_ 1::Pkinase::Pkinase_Tyr; Domain location=630-819::363-401::61 -101::105-127::...
  Pfam module annotation: Domain location=129-150::152-174::176 -199::225-247::274-295::297-319::321-343::404-426::428-450::452 -473::628-906::628-906
  Subcellular localization annotation: CTP_CleavageSite=53; ConfidenceScore=5.30e-01
LLLFLSLLPLLSSPTLSLWRNAVSHRLHRAAAAARGRRRLWCASVLLALMALSAGAAAETLASDVEAMRAVAKALGADKTLGWDIAGDPCSPKPWDRVSCDSSGRVTAIQVGGRGLTGTLAPEVRNLTALTRLEVFGNFLAGPLPSLAGLSSLQVLLARDCNFTSIPADFFKGLTELAAVDIDDNPFAAWTLPDDLAACTALTNFSANTANITGTLPDFFGAIPGLQRLSLAFNQLSGPVPASLADAPLVQLWLNGQNGVRFNGSISFVSNMTSLEQLWLQSNAFTGPLPDFTGFDSLSDLQLRDNRLTGPVPDSLVKLKSLKKLTLTNNLLQGPMPKFSGDLKPDLIATTERFCLQEPGMPCDPRVSLLLDVAAGFMYPESLADVWKGNDPCSFPDVTCIQGNITRLNLANKGLSGSISPAIGKIRSLQILNLANNNITGTVPEEVASLPKLTEVNLSNNNLYGKLPTFAKNVVLNTAGNPNIGKDAPAPTAGSGDTGNDSPMGGGGSKSSGSNGGSSSSSAGVIAGSVVGAVAGLGLVAALGFYCYKRKQKPFGRVQSPHAMVIHPRHSGSDDMVKITVAGGNANGGARASETYSQASSGPRDIHVVESGNMVISIQVLRNVTNNFSEDNILGRGGFGTVYKGELHDGTKIAVKRMEAGVMGNKGLNEFKSEIAVLTKVRHRNLVSLLGYCLDGNERILVYEYMPQGTLSQHLFEWSENNLRPLEWKKRLSIALDVARGVEYLHSLAQQTFIHRDLKPSNILLGDDMKAKVADFGLVRLAPADGKCVSVETRLAGTFGYLAPEYAVTGRVTTKADVFSFGVILMELITGRKALDETQPEDSMHLVTWFRRMQLNKDTFRKAIDPVIDLDEETFASVSTVSELAGHCCAREPHQRPDMGHAVNVLSTLSDVWKPTDPDSDDSYGIDLDMTLPQALKKWQAFEDSSHFDGATSSFVASLDNTQTSIPTRPPGFAESFTSADGR

SEQ ID NO: 67261 - protein, 94 aa, Setaria italica
  Transcript Sequence Number=SeqID_1287
DKSAGDKEKKKWSKKPPRPPRPPTASPLDPADQKLISELSELAVLKRARIERMKALKKMKNSKPASSIGNLVALIITVIFCFFILWQGIPTGNL

SEQ ID NO: 67262 - protein, 255 aa, Setaria italica
  Transcript Sequence Number=SeqID_1288
MEINEVRDQDLLVDLEKGNCLPPREDNNGMKINSMAGHAKTMLHGSWDDLVALKEDKSHHISGCSSHCRDSIVKSGESMTSEGEIKVGLLDKSAGDKEKKKWSKKPPRPPRPPTASPLDPADQKLISELSELAVLKRARIERMKALKKMKNSKPASSIGNLVALIITVIFCFFILWQGVFSRHGASISFHRPFVSSAGTRGGLISIQFYKKNVTVISTHISSAALKCDIPFYVILHAILLTVIPCCKLSRVDMMV

SEQ ID NO: 67263 - protein, 102 aa, Setaria italica
  misc_feature (59)..(59): Xaa can be any naturally occurring amino acid
  Transcript Sequence Number=SeqID_1289
  Homolog annotation: Hit_ID=A1Y2A1; Match level="QueryCoverage=100%, HitCoverage=33%, E-value=1e-14, Identity=45%"; Hit description =Ubiquitin-protein ligase (Fragment)
AYASSHERARILSGSSIISAGGNRMVLLSVLQKAISSLNSPNDTSAPLIVDALLQFFLXLHVLSSSSSGTTVRGSGMVPPLLPLLQDNDPSHMHLVCLAVKT

SEQ ID NO: 67264 - protein, 47 aa, Setaria italica
  Transcript Sequence Number=SeqID_1290
MDPCAFVRLTVDQLLLKLPAVQRPSSGAGVHPSTSPCFCTLSLQDHP

SEQ ID NO: 67265 - protein, 76 aa, Setaria italica
  Transcript Sequence Number=SeqID_1291
CSHMIHDGCVRAVDNLLLLHLALRKHQCSRFVNISSVETELPQVVHFWFEYRRCPDTQIVLCVFVDCCRNCASAVC

SEQ ID NO: 67266 - protein, 114 aa, Setaria italica
  misc_feature (107)..(107): Xaa can be any naturally occurring amino acid
  Transcript Sequence Number=SeqID_1292
  Homolog annotation: Hit_ID=Q7XD69; Match level="QueryCoverage=99%, HitCoverage=16%, E-value=1e-50, Identity=82%"; Hit description =Pentatricopeptide, putative, expressed
PPQQEQIYKKLEDLSGRIKEEGYVPDTTSLPLNLEDSAKERLLRYHSERIAVAFALISMPATKPIIVKKNLRICADCHSALKFISKVESRDIIVRDNSRFHHFVKGXCFCGDYW

SEQ ID NO: 67267 - protein, 140 aa, Setaria italica
  Transcript Sequence Number=SeqID_1293
  Gene Ontology: Mol. function=protein binding; Cellular component =extracellular region; Biological process=response to biotic stimulus
  Homolog annotation: Hit_ID=Q00RM5; Match level="QueryCoverage=100%, HitCoverage=54%, E-value=3e-48, Identity=67%"; Hit description =H0814G11.15 protein
  Pfam annotation: Domain name=Thaumatin; Domain location=1-136; Score =98.1; E_value=3e-26; Accession=PF00314.9; Description=Thaumatin family
  Subcellular localization annotation: CTP_CleavageSite=41; ConfidenceScore=5.33e-01
QSMVFTAPVGWSGRIWGRTDCSFDASGNGSCSTGSCGSSLRCGASGAPPASLAEFTLAAVDYYDVSLVDGFNLPMVIKPVNGQGNCSAAGCDGDLRQTCPSELAVRANGRTVACRSACDVFNTDQYCWPGAGSGNPATCQ

SEQ ID NO: 67268 - protein, 202 aa, Setaria italica
  misc_feature (10)..(10): Xaa can be any naturally occurring amino acid
  Transcript Sequence Number=SeqID_1294
  Gene Ontology: Mol. function=transcription regulator activity; Cellular component=nucleus; Biological process=regulation of transcription
  Homolog annotation: Hit_ID=Q8GY61; Match level="QueryCoverage=72%, HitCoverage=49%, E-value=2e-31, Identity=47%"; Hit description =Transcription factor bHLH63
  Pfam annotation: Domain name=HLH; Domain location=24-74; Score=32.7; E_value=1.5e-06; Accession=PF00010.18; Description=Helix-loop-helix DNA-binding domain
RSTAAAAGHXKTDYIHVRARRGQATDSHSLAERVRRERISERMRYLQELVPGCSKVTGKAGMLDEIINYVQSLQKQVEFLSMKIAASNPVVSFDIVEDLFGRQLKQACNPAALPTMALPAGQLEPACLPMNPMQQVHPSAAAGSTCFGLDMVVNNMYPPPAAARCPVSAATPVTAAAGPSIEPCLNVNGAAAAAWDVGSQNL

SEQ ID NO: 67269 - protein, 82 aa, Setaria italica
  Transcript Sequence Number=SeqID_1295
VPLYFRKNFTRIYKPHLKYIYIVVLKRLSQSLAVKHLQSSIFKLTITLISLHILDEKTHLVKKKNGHPFLKHRKLKEGRHAR

SEQ ID NO: 67270 - protein, 103 aa, Setaria italica
  misc_feature (55)..(55): Xaa can be any naturally occurring amino acid
  Transcript Sequence Number=SeqID_1296
  Gene Ontology: Biological process=cell redox homeostasis
  Homolog annotation: Hit_ID=UPI0001A7B134; Match level="QueryCoverage =82%, HitCoverage=43%, E-value=2e-10, Identity=49%"; Hit description =aminoacyl-tRNA hydrolase
  Pfam annotation: Domain name=PTH2; Domain location=36-103; Score= -28.9; E_value=5.4e-05; Accession=PF01981.8; Description=Peptidyl -tRNA hydrolase PTH2
ETQIKPRASSGSGSGDRARLQLQAGVGGFFASGGEELKMVLVVLAHDLKMGLGKXASQCAHAATGLMQNCVKQSRSLRQWSNLDKLRCLTCKNQQEMNRLKEW

SEQ ID NO: 67271 - protein, 102 aa, Setaria italica
  Transcript Sequence Number=SeqID_1297
  Gene Ontology: Mol. function=hydrolase activity; Cellular component =mitochondrion; Biological process=cell redox homeostasis
  Homolog annotation: Hit_ID=UPI0001A7B134; Match level="QueryCoverage =58%, HitCoverage=31%, E-value=9e-21, Identity=78%"; Hit description =aminoacyl-tRNA hydrolase
  Pfam annotation: Domain name=PTH2; Domain location=40-102; Score =42.8; E_value=3e-11; Accession=PF01981.8; Description=Peptidyl-tRNA hydrolase PTH2
  Subcellular localization annotation: CTP_CleavageSite=48; ConfidenceScore=5.46e-01
SSSWRPKSNPAPAPAPAAATARGSSSKRASGGSFASGGEELKMVLVVRQDLKMGAGKIASQCAHAATGLYAELLSSNRGLLRQWEQLGQAKIVLTCKNTTRK

SEQ ID NO: 67272 - protein, 46 aa, Setaria italica
  Transcript Sequence Number=SeqID_1298
YIICSNRGLLRQWEQLGQAKIVLTCKNQQEMSVLVLLLPTSRLSIF

SEQ ID NO: 67273 - protein, 114 aa, Setaria italica
  Transcript Sequence Number=SeqID_1299
  Gene Ontology: Mol. function=aminoacyl-tRNA hydrolase activity; Cellular component=cellular_component; Biological process=cell redox homeostasis
  Homolog annotation: Hit_ID=B9RRZ0; Match level="QueryCoverage=98%, HitCoverage=57%, E-value=8e-35, Identity=65%"; Hit description =Peptidyl-tRNA hydrolase, putative
  Pfam annotation: Domain name=PTH2; Domain location=15-114; Score =140.2; E_value=6.6e-39; Accession=PF01981.8; Description=Peptidyl -tRNA hydrolase PTH2
GEVAVVGGAAETCGGKAAVECGEAATGLYAELLSSNRGLLRQWEQLGQAKIVLTCKNQQEMNRLKEMAQNRGIPTFIVADAGRTQVLAGSKTVLAIGPGRKADIDSVTGKLRLL

SEQ ID NO: 67274 - protein, 90 aa, Setaria italica
  Transcript Sequence Number=SeqID_1300
  Gene Ontology: Mol. function=strictosidine synthase activity; Cellular component=plasma membrane; Biological process=biosynthetic process
  Homolog annotation: Hit_ID=B6TMY2; Match level="QueryCoverage=96%, HitCoverage=21%, E-value=9e-28, Identity=70%"; Hit description =Strictosidine synthase 1
  Pfam annotation: Domain name=Str_synth; Domain location=32-90; Score =24.0; E_value=6.6e-06; Accession=PF03088.8; Description =Strictosidine synthase
RVLWGSMIIGRSGGVATSLAREAGGDPIRFANDLDVHKNGSVFFTDTSMRYSRKDHLNILLEGEGTGRLLRYDPGTGAVSVVLQGLVFPN

SEQ ID NO: 67275 - protein, 99 aa, Setaria italica
  Transcript Sequence Number=SeqID_1301
MGCYPPLEKIVSKALGKCNGRDRWRSDRWRKERLDYALAYPPGAPTEIHYVRPVVSNNSIYVIPPSPPPQPQQKQSPPEPPQQPQPPPQQEPEPEQHHD

SEQ ID NO: 67276 - protein, 66 aa, Setaria italica
  Transcript Sequence Number=SeqID_1302
AFKPKNKLSFWPWLACLVDNYLGKQAYSFFKCSLKNIIMSSRRYCTKIDHWYSVSEFFPVESRSCI

SEQ ID NO: 67277 - protein, 295 aa, Setaria italica
  misc_feature (259)..(259): Xaa can be any naturally occurring amino acid
  Transcript Sequence Number=SeqID_1303
  Gene Ontology: Mol. function=protein binding
AYPSDMSVGNGAATYATFGMACGSAQVTQDAYTYTAPVASHDSMDIDPLYLAKYGEDLLQRLNLLQRLHGSNEGIELLRREIGIRISDCNALSSYGSSLLPLWLHAEVHLKQLDSSVSKLEMNYRAETEPIDSKTEVAEHKTPEADMIALSNGEALKSELSAGITIDENVKIDKPASTSAQSSQDKDAAAVTSKFESDNDEDMDVEMEVDEDGVEEQVHCSSEPNKEHPPPEQVSSPDLPPLEGPSPPEDNDVPPPPPXEEWIPPPPPDNEPAPPAPPRSPRTSQLHHTFHADTV

SEQ ID NO: 67278 - protein, 417 aa, Setaria italica
  misc_feature (36)..(36): Xaa can be any naturally occurring amino acid
  Transcript Sequence Number=SeqID_1304
  Gene Ontology: Mol. function=protein binding
  Homolog annotation: Hit_ID=UPI000052D19B; Match level="QueryCoverage =35%, HitCoverage=17%, E-value=7e-29, Identity=48%"; Hit description =protein binding
  Pfam annotation: Domain name=WW; Domain location=385-415; Score=38.6; E_value=2.5e-08; Accession=PF00397.18; Description=WW domain
VLVVEEQVHCSSEPNKEHPPPEQVSSPDLITFRRTXPSKGGSPPEDNDVPPPPPEEEWIPPPPPDNEPAPPAPPAPPEEPVASYIHADTVAQPYVAQANVGYTLSGMEYYATVGTEGTTANYYMQVSEPHALQAQQHSYYAPVSGSGLSVPVDGTSIAPESYYTYPSVTMAASGVAAEHSGYYASSTSAISSSAADIKTSSASLVSANSNLDPKGPDKVISKDASIAPLSQAVVATSAAGTTSLVGSSTQSSTSSTQAKVIRSKKRAVAVTSSLRSNKKVSSLVDKWKAAKEELRDEEEEEPESALEALERKRQKEIEEWRKQQIASGEAQENANFVPVRGDWRDRVKRRRAEVKKESKESAAASLHSAEQHNGSPDLAELSKGLPSGWQAYLDESTKQVYYGNSLTSETSWERPTK

SEQ ID NO: 67279 - protein, 135 aa, Setaria italica
  Transcript Sequence Number=SeqID_1305
  Gene Ontology: Mol. function=hydrolase activity; Cellular component =extracellular region
  Homolog annotation: Hit_ID=B6TMW5; Match level="QueryCoverage=98%, HitCoverage=48%, E-value=1e-33, Identity=51%"; Hit description =Retrotransposon protein Ty1-copia subclass
HEHSQCIDNPPDLSLRGVEAGKVMDGLPRGFRAYVTGPSHSKQAIVLASDVYGFESPILRKIADEVAMTGHYYVVVPDFFHGDPYNDSRILSEWLKSHSPVEAAQDAKALFAALKKDRKSIGVGGYCWGGKVAAE

SEQ ID NO: 67280 - protein, 192 aa, Setaria italica
  Transcript Sequence Number=SeqID_1306
  Gene Ontology: Mol. function=DNA binding; Cellular component=nucleus; Biological process=regulation of transcription, DNA-dependent
  Homolog annotation: Hit_ID=Q0JKI9; Match level="QueryCoverage=95%, HitCoverage=25%, E-value=8e-80, Identity=77%"; Hit description=Auxin response factor 2
  Pfam annotation: Domain name=Auxin_resp; Domain location=16-97; Score= 168.7; E_value=1.7e-47; Accession=PF06507.5; Description=Auxin response factor
PAPHNQCSNHRNLGNVTEAVATRTVFHIYYNPRLSQSEFIIPYWKFMRSFNQPFSVGMRCRMRYESDDASERRCTGIIIGSREAEPMWHGSKWKSLVVRWDDDIECRRSNMVSPWDIELTGSVSGSQAHLCAPNSKRLKPCLPQVNPEIVLPYGSVSSDFAGSARFHKVLQGQEFLGFKTHDVTAISVFARN

SEQ ID NO: 67281 - protein, 129 aa, Setaria italica
  Transcript Sequence Number=SeqID_1307
  Gene Ontology: Mol. function=transferase activity, transferring hexosyl groups; Cellular component=endoplasmic reticulum; Biological process=carbohydrate metabolic process
  Homolog annotation: Hit_ID=B9RF27; Match level="QueryCoverage=96%, HitCoverage=70%, E-value=7e-49, Identity=76%"; Hit description=UDP-N- acetylglucosamine transferase subunit alg13, putative
  Pfam annotation: Domain name=Glyco_tran_28_C; Domain location=8-128; Score=38.9; E_value=6.2e-09; Accession=PF04101.8; Description =Glycosyltransferase family 28 C-terminal domain
MAGGERRTVFVTVGTTCFDALVMAVDSPEVKKALLQKGYTDLLIQMGRGTYVPSKVSGDATLQVDHFTFSPSIADNMRTASLVISHAGSGSIFETLRLGKPLIVVVNEDLMDNHQSELAEELAERKHLF

SEQ ID NO: 67282 - protein, 47 aa, Setaria italica
  Transcript Sequence Number=SeqID_1308
LKENKTRRREKMSPFVLREQSMECFMEVFTRPASTWVASLSIGGYTN

SEQ ID NO: 67283 - protein, 71 aa, Setaria italica
  Transcript Sequence Number=SeqID_1309
IFERVCCAAGHSASTAQASVCDKMHPPTLNQQGAGLRHAHTHRHQIAGRLFRGKRSGLLSPSHVNASGCSL

SEQ ID NO: 67284 - protein, 135 aa, Setaria italica
  Transcript Sequence Number=SeqID_1310
  Gene Ontology: Mol. function=hydrolase activity; Cellular component =extracellular region
  Homolog annotation: Hit_ID=B6TMW5; Match level="QueryCoverage=96%, HitCoverage=47%, E-value=4e-54, Identity=74%"; Hit description =Retrotransposon protein Ty1-copia subclass
MVPDFFNGDFYDTSKNISEWIKFHSPVKAAEDAKPLFAALKKEGKSIAVGGYCWGGKFGAEVAKTDDIKVVCLSHPSTVTADDMKEVKCPIEILGAQNDTSTPPKLVYQFVEVLRQRTQIPYFAKIFPGVATIGI

SEQ ID NO: 67285 - protein, 234 aa, Setaria italica
  Transcript Sequence Number=SeqID_1311
  Gene Ontology: Mol. function=hydrolase activity; Cellular component =extracellular region
  Homolog annotation: Hit_ID=B6TMW5; Match level="QueryCoverage=92%, HitCoverage=79%, E-value=2e-92, Identity=74%"; Hit description =Retrotransposon protein Ty1-copia subclass
  Pfam annotation: Domain name=DLH; Domain location=27-233; Score=49.1; E_value=1.7e-11; Accession=PF01738.10; Description=Dienelactone hydrolase family
QCLDNPPDLSLRGGEAGKVVSDLPGGFRAYVTGKAKSRHAVVLASDVFGFEAPILRKIADKVGEAGYFVMVPDFFNGDFYDTSKNISEWIKFHSPVKAAEDAKPLFAALKKEGKSIAVGGYCWGGKFSVEMGKTSDVKVVSISHPYIVTTDDMKEVKCPIEILGAQYDEVAPPKLVYQYVSVLRHRTEIPYYAKVFPGVAHGFACRYNTTDPFAVKTAEQALGLMIDWFDKYLK

SEQ ID NO: 67286 - protein, 261 aa, Setaria italica
  misc_feature (113)..(113): Xaa can be any naturally occurring amino acid
  Transcript Sequence Number=SeqID_1312
  Gene Ontology: Mol. function=hydrolase activity; Cellular component =extracellular region
  Homolog annotation: Hit_ID=B6TMW5; Match level="QueryCoverage=83%, HitCoverage=80%, E-value=1e-95, Identity=75%"; Hit description =Retrotransposon protein Ty1-copia subclass
  Pfam annotation: Domain name=DLH; Domain location=54-260; Score=60.2; E_value=8e-15; Accession=PF01738.10; Description=Dienelactone hydrolase family
MGSAQAFLCLAVVLATAAAAAAQAKHSQCLDNPPDLSLRGGEAGKVVSDLPGGFRAYVTGKAKSRHAVVLASDVFGFEAPILRKIADKVGEAGYFVMVPDFFNGDFYDTSKNXSEWIKFHSPVKAAEDAKPLFAALKKEGKSIAVGGYCWGGKFGAEVAKTDDIKVVCLSHPSTVTADDMKEVKCPIEILGAQNDTSTPPKLVYQFVEVLRQRTQIPYFAKIFPGVAHGFACRYNTTDPFAVRTAEEALAYMLDWFNKYLK

SEQ ID NO: 67287 - protein, 74 aa, Setaria italica
  Transcript Sequence Number=SeqID_1313
PLFLVHASLAAGQVMHQLYFPSDWWRRYLEDHSHPRAVGTVGDVLMKLNSHDRLRNCGAMKHLCCAPDVSSCHW

SEQ ID NO: 67288 - protein, 108 aa, Setaria italica
  Transcript Sequence Number=SeqID_1314
  Gene Ontology: Mol. function=oxidoreductase activity; Biological process=cellular aromatic compound metabolic process
  Homolog annotation: Hit_ID=O48701; Match level="QueryCoverage=96%, HitCoverage=14%, E-value=9e-28, Identity=56%"; Hit description =F3I6.28 protein
TMEIFRKLDGLAGDIERSQPPVDLWRKFVYCSSLSGSVLGSVDHMKQEVFDKVISPISVAHFSQYKLVDLLLKKLEGIGFQTCFPSEIGDSAQDLGLESKILMGHECT

SEQ ID NO: 67289 - protein, 98 aa, Setaria italica
  Transcript Sequence Number=SeqID_1315
  Gene Ontology: Mol. function=oxidoreductase activity; Biological process=cellular aromatic compound metabolic process
  Homolog annotation: Hit_ID=Q7F1X3; Match level="QueryCoverage=91%, HitCoverage=16%, E-value=1e-33, Identity=74%"; Hit description =B1065G12.11 protein
YKTKSNSVMWPQGSADAEVEESRSELVPWTNYVDVEEVPRVSGNSWWDMCQISRKNVILVRPDEHIAWRTESDVVSDADSEVTGVFSQILCLNNSHQV

SEQ ID NO: 67290 - protein, 203 aa, Setaria italica
  Transcript Sequence Number=SeqID_1316
  Gene Ontology: Mol. function=oxidoreductase activity; Biological process=cellular aromatic compound metabolic process
  Homolog annotation: Hit_ID=O48701; Match level="QueryCoverage=69%, HitCoverage=13%, E-value=5e-22, Identity=43%"; Hit description =F3I6.28 protein
MPSIAGGGRGRLFAAHRGAIWWLRGRQHPPFSSLAGGGSRGDAPHLPVLIVGAGPVGLVLSFLLTKFGIKCAVIEKNVEFTRHPRAHFINNRTMEIFRKLDGLAGDIERSQPPVDLWRKFVYCSSLSGSVLGSVDHMKQEGQFSSSHVELFDKVISPISVAHFSQYKLVDLLLKKLEGIGFQTCFPSEIGDSAQDLGLESKIL

SEQ ID NO: 67291 - protein, 198 aa, Setaria italica
  Transcript Sequence Number=SeqID_1317
  Gene Ontology: Mol. function=oxidoreductase activity; Biological process=cellular aromatic compound metabolic process
  Homolog annotation: Hit_ID=Q7F1X3; Match level="QueryCoverage=99%, HitCoverage=33%, E-value=2e-88, Identity=79%"; Hit description =B1065G12.11 protein
  Pfam annotation: Domain name=FAD_binding_3; Domain location=1-197; Score=-45.5; E_value=3.2e-09; Accession=PF01494.11; Description=FAD binding domain
IREKKLHCGLLIGTDGARSTVRELAGISMEGERDLQKLVSVHFLSRDLGRYLSSQRPGMLFFIFNPGAIGVLVAHDLENGEFVLQIPFYPPQQMFEDFSAKVCEQIIVKLVGWEPADVQVLDIKPWAMHAEVAEKYIGCNNRVILVGDAAHRFPPAGGFGMNTGVQDAHNLAWKLGLILTGVASPSIVQTYESERRPN

SEQ ID NO: 67292 - protein, 525 aa, Setaria italica
  misc_feature (54)..(54): Xaa can be any naturally occurring amino acid
  misc_feature (163)..(163): Xaa can be any naturally occurring amino acid
  Transcript Sequence Number=SeqID_1318
  Gene Ontology: Mol. function=oxidoreductase activity; Biological process=cellular aromatic compound metabolic process
  Homolog annotation: Hit_ID=Q7F1X3; Match level="QueryCoverage=97%, HitCoverage=97%, E-value=0.0, Identity=78%"; Hit description =B1065G12.11 protein
  Pfam annotation: Domain name=FAD_binding_3; Domain location=4-238; Score=1.9; E_value=3.4e-12; Accession=PF01494.11; Description=FAD binding domain
VVDLLLKKLEGIGFQTCFPSEIGDSAQDLGLESKILMGHECTSFQQTDEGILVXASVNNGGKIRNRKLHCGLLIGTDGARSTVRELAGISMEGERDLQKLVSVHFLSRDLGRYLSSQRPGMLFFIFNPGAIGVLVAHDLENGEFVLQIPFYPPQQMFEDFSAXVAEKYIGCNNRVILVGDAAHRFPPAGGFGMNTGVQDAHNLAWKLCLLLNGVASPSIMQTYESERRPVAIFNTGLSVENFKAAMSIPAALGLDPTVANSVHQVINRSLGSVIPRNLQKAVLEGLFSIGRAQVSDYILNERNPLGSSRLARLRSILDEGKSLQLQFPAEDLGFCYEGGALVTEYCAENTQKAEKVKHFKRSSEYVPSAKVGSRLPHMLVRARSASSEDVFSTLDLVSGDNLEFVLIIAPMKESYEIARATLKIADEFKLKAKVCVMWPQGSADVEMEESRSELAPWTNCVDVEEVPRAPVNSWWEMCQISRKSVILVRPDEHITWRTESDMVRDADSEVRRVFSHILCLNSHLV

SEQ ID NO: 67293 - protein, 46 aa, Setaria italica
  Transcript Sequence Number=SeqID_1319
  Homolog annotation: Hit_ID=B6UI33; Match level="QueryCoverage=95%, HitCoverage=13%, E-value=6e-10, Identity=75%"; Hit description =Gibberellin receptor GID1L2
MPPTTSPASGVSGEMPPPHVVENCLGHVQLLSDGTVKRAQAPLVLP

SEQ ID NO: 67294 - protein, 96 aa, Setaria italica
  Transcript Sequence Number=SeqID_1320
  Subcellular localization annotation: CTP_CleavageSite=66; ConfidenceScore=5.51e-01
PGPIGTSFVHLRDYSTSVAQLSNFSSLEPYWLIKNINSRGVSSPTFLLSSTSVSRSESNALMRPSRQATYSSNILSTQLLVLKGKPISEAPRCRRR

SEQ ID NO: 67295 - protein, 117 aa, Setaria italica
  Transcript Sequence Number=SeqID_1321
FRSGDTCRGKQEGRGRHTTKFLWGLEDKSWELLCAVYGESEPQPQPLLAFEEGLQLDKWVSQVADYSDAWHAGFLAYKSLSLSKQERIELMVKMNALPGLKYVISLKDLKPGQWVPE

SEQ ID NO: 67296 - protein, 670 aa, Setaria italica
  Transcript Sequence Number=SeqID_1322
  Gene Ontology: Mol. function=triacylglycerol lipase activity; Cellular component=integral to membrane; Biological process=lipid metabolic process
  Homolog annotation: Hit_ID=Q9MA47; Match level="QueryCoverage=99%, HitCoverage=68%, E-value=1e-172, Identity=47%"; Hit description =T20M3.5 protein
  Pfam annotation: Domain name=Lipase_3; Domain location=274-431; Score= 23.1; E_value=9e-06; Accession=PF01764.17; Description=Lipase (class 3)
RWLWWTRFGMAVGALQLIAAIYLMFVIVKDLSKERRSKSCFFGHEADRNSGRALIALFLVLSWVVVIVQCFTGSDILRWRSFYATHDMAWKAHYREVFDHGIREALCCLGRAKYLTVLEEDEVYSVARLLGDLVAYRASGTGHLEFLAGLALLQKHGNLPESQTDLMEASHELMQEAAFLHPFAEACYTGPLLDFGRNPILFPCAWVYRQGVLTPWARGRRPALDGDNWWRGHAAAFLRFVNIPPKALLRGRVCQSKREAAYFVVVLHDKRTVVIGVRGTETPEDLITDGLCRECAFTMEDLDGLINSEKLPATTRERVISTFPHYGHGGIVESARELFMQLNECTGENTSSGRIGFLSTLLGEGSECHGYKVRLVGHSLGGAVATVLGMMLFGKYPDVHVYAYGPLPCVDFVIAEACSHFVTTIICNDEFSSRLSINSILRLRSAAISALSDNSPADTAMIQKLARRILHVNRYHDNGTHGPGDDIIEGYSDRTRAAGTAIPSERPISHQDPLCNSEPGLQNMQNGFVGCSGSNASTDEHLSYEGLNNDHDVQIIPIDGPDSGFKEHPASYREIPVEPPEMFLPGLIVHIVRQRRGLFPLWQCWNIQQTEPPYKAVLAKRENFKDIVVTPSMFTDHLPWRCHLAMQEILEAQTPKISKNSGSPIQHIDA

SEQ ID NO: 67297 - protein, 79 aa, Setaria italica
  Transcript Sequence Number=SeqID_1323
  Gene Ontology: Mol. function=triacylglycerol lipase activity; Biological process=lipid metabolic process
  Homolog annotation: Hit_ID=Q9MA47; Match level="QueryCoverage=84%, HitCoverage=6%, E-value=7e-13, Identity=49%"; Hit description =T20M3.5 protein
VEGQRRGLFPLWQCWNIQQTEPPYKAVLAKRENFKDIVVTPSMFTDHLPWRCHLAMQKILEAQTPKISKNSGSPIQHLV

SEQ ID NO: 67298 - protein, 70 aa, Setaria italica
  Transcript Sequence Number=SeqID_1324
FTLKNGQQITEDSDTRDQSEDDVWHNALSSTEELSVAAKSAKTDTIADGKKAEFTDTTRRKESFKVHEDL

SEQ ID NO: 67299 - protein, 132 aa, Setaria italica
  Transcript Sequence Number=SeqID_1325
SLSFKEHGSIISRSKSLSGFEDEKTYISKRLRKLRQKLHEFSNNSKHVPLPKLSDDKEGSFDDRDREHAYEDADEDGKTDDSVFNKHLGRDGNRFMDSKHGKGHDPKGQYHAMVSENVLASFEEEISEVSGG

SEQ ID NO: 67300 - protein, 407 aa, Setaria italica
  Transcript Sequence Number=SeqID_1326
  Homolog annotation: Hit_ID=A6MGY3; Match level="QueryCoverage=68%, HitCoverage=38%, E-value=8e-45, Identity=40%"; Hit description=IFA binding protein
  Pfam annotation: Domain name=DUF593; Domain location=138-231; Score =152.1; E_value=1.7e-42; Accession=PF04576.7; Description=Protein of unknown function, DUF593
MSKCLSAFMTLPFSYADNALSFSLDQSEDDVWHNALSSTEELSVAAKSAKTDTIADGKKAEFTDTTRRKESFKVHEDLKSLLSQLSNASQAPDCDSPTVQNQHEHAILQNITRALSLDRNYSGIPESMVNEAEGECTIDQLKQQIELDRKSISRLWKDLEEERNASAVAANQTMAMITRLQEEKASMQMEALQYQRMMEEQSEYDREDLQKVAQTVQDLQAEIEGYKMKLKDQLLVDEIRDHMCLSCSKEHGSIISRSKSLSGFEDEKTYISKRLRKLRQKLHEFSNNSKHVPLPKLSDDKEGSFDDRDREHAYEDADEDGKTDDSVFNKHLGRDGNRFMDSKHGKGHDPKGQYHAMVSENVLASFEEEISEVSGRLIALEADRSFLEHSVNSLRNGKAGEELIRDI

SEQ ID NO: 67301 - protein, 160 aa, Setaria italica
  Transcript Sequence Number=SeqID_1327
  Gene Ontology: Mol. function=hydrolase activity, acting on ester bonds; Cellular component=RNA-induced silencing complex; Biological process=RNA interference
  Homolog annotation: Hit_ID=B9RA39; Match level="QueryCoverage=78%, HitCoverage=12%, E-value=6e-38, Identity=61%"; Hit description=Ebna2 binding protein P100, putative
IEIEAVDRTGTFLGSLWESKNNMAYVLLEAGLAKLSSFGLDRISDAQTLIRAEKSAQQKKLKVWENYNEAKVIPHGSLMGQNGKESFKIVVTEVIGGGKFYAHIVGDRRLDSIQQQLASMKFNDIPETLMVAKDFPDTLSNTLEVQDQPRHCPSNTSEVQ

SEQ ID NO: 67302 - protein, 157 aa, Setaria italica
  Transcript Sequence Number=SeqID_1328
  Gene Ontology: Mol. function=kinase activity; Cellular component =protein complex; Biological process=response to unfolded protein
  Homolog annotation: Hit_ID=B6TW02; Match level="QueryCoverage=100%, HitCoverage=57%, E-value=4e-80, Identity=91%"; Hit description =Serine/threonine-protein kinase 19
  Pfam annotation: Domain name=Stk19; Domain location=1-154; Score =115.6; E_value=1.6e-31; Accession=PF10494.1; Description=Serine -threonine protein kinase 19
YLKQVAFAIKRSGGKDQDGSEVFKWFERYVIPSKLDVSINQIELCSLLSRGGGVTDKHITLLMNAGLLTRQLIDPNIYWFAIPRIGPILKGLSQGRKEILSLLNRKKYKEMLLSSLEKTKLRLSPLDTRFLLRDLIGSGHIKTVQTPTGLLARITRD

SEQ ID NO: 67303 - protein, 277 aa, Setaria italica
  misc_feature (41)..(41): Xaa can be any naturally occurring amino acid
  Transcript Sequence Number=SeqID_1329
  Gene Ontology: Mol. function=kinase activity; Cellular component =nucleus; Biological process=response to unfolded protein
  Homolog annotation: Hit_ID=B6TW02; Match level="QueryCoverage=92%, HitCoverage=92%, E-value=1e-127, Identity=87%"; Hit description =Serine/threonine-protein kinase 19
  Pfam annotation: Domain name=Stk19; Domain location=12-274; Score =397.5; E_value=2.2e-116; Accession=PF10494.1; Description=Serine -threonine protein kinase 19
MTEPSSSYSLSSKKRPRSPNNNDEHPQGRDQICSSLVLMMXEDNLTFNDTMIALQLMRTQFPKLEKVVVQPFILQSQLYSSVKDRTQVDRDLESFKKDKLLRIFKLSSGQDDHAIMFMDDYLKQVAFAIKRSGGKDQDGSEVFKWFERYVIPSKLDVSINQIELCSLLSRGGGVTDKHITLLMNAGLLTRQLIDPNIYWFAIPRIGPILKGLSQGRKEILSLLNRKKYKEMLLSSLEKTKLRLSPLDTRFLLRDLIGSGHIKTVQTPTGLLARITRD

SEQ ID NO: 67304 - protein, 53 aa, Setaria italica
  Transcript Sequence Number=SeqID_1330
KSKMNVTSASNATIDLMMTWTIEFASGSSASFLTWRTSCRCLDPATYQRGCLR

SEQ ID NO: 67305 - protein, 82 aa, Setaria italica
  misc_feature (39)..(39): Xaa can be any naturally occurring amino acid
  Transcript Sequence Number=SeqID_1331
  Gene Ontology: Mol. function=sedoheptulose-bisphosphatase activity; Cellular component=chloroplast; Biological process=reductive pentose- phosphate cycle
  Homolog annotation: Hit_ID=B6T2L2; Match level="QueryCoverage=100%, HitCoverage=35%, E-value=1e-30, Identity=56%"; Hit description =Sedoheptulose-1,7-bisphosphatase
  Subcellular localization annotation: CTP_CleavageSite=26; ConfidenceScore=5.52e-01
AAMSFSQSYRPKASRPPTTFYGESVRVSTARPLSARQSXGGTACVNSFGDEQLAVDMLANKLLFDSLEYSHVCKYACSEEVP

SEQ ID NO: 67306 - protein, 45 aa, Setaria italica
  Transcript Sequence Number=SeqID_1332
VRDLHVQSYLPQLPVALPGVAVDRIVHAGLCILHQVSGRRQTLRH

SEQ ID NO: 67307 - protein, 78 aa, Setaria italica
  Transcript Sequence Number=SeqID_1333
  Gene Ontology: Mol. function=sedoheptulose-bisphosphatase activity; Cellular component=chloroplast; Biological process=reductive pentose- phosphate cycle
  Homolog annotation: Hit_ID=B6T2L2; Match level="QueryCoverage=91%, HitCoverage=20%, E-value=8e-25, Identity=76%"; Hit description =Sedoheptulose-1,7-bisphosphatase
GGTACVNSFGDEQLAVDMLANKLLFDALEYSHVCKYACSEEVPELQDMGGPVEDGSDGEVRVDNAGTVKGIERNAETT

SEQ ID NO: 67308 - protein, 87 aa, Setaria italica
  misc_feature (15)..(15): Xaa can be any naturally occurring amino acid
  Transcript Sequence Number=SeqID_1334
  Gene Ontology: Mol. function=sedoheptulose-bisphosphatase activity; Cellular component=chloroplast; Biological process=reductive pentose- phosphate cycle
  Homolog annotation: Hit_ID=P46285; Match level="QueryCoverage=100%, HitCoverage=21%, E-value=7e-37, Identity=90%"; Hit description =Sedoheptulose-1,7-bisphosphatase, chloroplastic
IFTNVTSPSAKAKLXRLLFEVAPLGFLMEKAGGHSSDGKQSVLDKVINELDERTQVAYGSKNEIIRFEETLYGSSRLTAGATVGAAA

SEQ ID NO: 67309 - protein, 73 aa, Setaria italica
  Transcript Sequence Number=SeqID_1335
SSHCTLMCFILYHQQTLSCLYRKHPTKSHKTVTSSHLRLGSYFFSYRQKGIHFPLLRGVESGKQLLILIPTPV

SEQ ID NO: 67310 - protein, 95 aa, Setaria italica
  misc_feature (21)..(21): Xaa can be any naturally occurring amino acid
  Transcript Sequence Number=SeqID_1336
  Gene Ontology: Mol. function=heat shock protein binding; Cellular component=membrane; Biological process=protein folding
  Homolog annotation: Hit_ID=Q84PD0; Match level="QueryCoverage=95%, HitCoverage=20%, E-value=2e-34, Identity=81%"; Hit description=DnaJ protein
PMYQRPFMKGQRLLTITTYNXVEFPDSLAPEQCKALEAVLPPKPTSKLTDMEIDECEETTMHDVNNIEEEMRRKQAHAAQEAYEEDDDMPGRCYK

SEQ ID NO: 67311 - protein, 187 aa, Setaria italica
  misc_feature (123)..(123): Xaa can be any naturally occurring amino acid
  Transcript Sequence Number=SeqID_1337
  Gene Ontology: Mol. function=heat shock protein binding; Cellular component=membrane; Biological process=protein folding
  Homolog annotation: Hit_ID=B6TJQ8; Match level="QueryCoverage=96%, HitCoverage=53%, E-value=3e-85, Identity=86%"; Hit description=DnaJ protein
  Pfam annotation: Domain name=DnaJ_C; Domain location=108-185; Score= -45.2; E_value=0.01; Accession=PF01556.10; Description=DnaJ C terminal region
  Pfam annotation: Domain name=DnaJ_CXXCXGXG; Domain location=10-95; Score=142.4; E_value=1.5e-39; Accession=PF00684.11; Description=DnaJ central domain (4 repeats)
  Pfam module annotation: Pfam domain module=DnaJ_C::DnaJ_CXXCXGXG; Domain location=108-185::10-95
  Subcellular localization annotation: CTP_CleavageSite=24; ConfidenceScore=5.27e-01
LVNLLTNGHLQKKLSLSRNVLCSKCNGKGSKSGASSRCAGCQGSGYKVQIRQLGPGMIQQMQHPCNECKGTGETINDKDRCPQCKGEKVVQEKKVLEVVVEKGMQNGQKITFPGEADEAPDTXTGDIIFVLQQKEHPKFKRKGDDLFYEHTLTLTESLCGFQFVLTHLDNRQLLIKSNPGEVVKPGR

SEQ ID NO: 67312 - protein, 49 aa, Setaria italica
  Transcript Sequence Number=SeqID_1338
TGTMSTSNKGGSSGDNGQQNRQQHCSILHRLGFYYCKIDPGSATGSCGR

SEQ ID NO: 67313 - protein, 235 aa, Setaria italica
  misc_feature (109)..(109): Xaa can be any naturally occurring amino acid
  Transcript Sequence Number=SeqID_1339
  Gene Ontology: Mol. function=heat shock protein binding; Cellular component=membrane; Biological process=protein folding
  Homolog annotation: Hit_ID=Q84PD0; Match level="QueryCoverage=86%, HitCoverage=47%, E-value=3e-97, Identity=88%"; Hit description=DnaJ protein
  Pfam annotation: Domain name=DnaJ_C; Domain location=15-142; Score =17.1; E_value=8.8e-08; Accession=PF01556.10; Description=DnaJ C terminal region
EVHVEERGIDKQRTKKITFPGEADEANLRNKLTTGDIVFVLQQKDHSKFKRKGDDLFYEHTLSLTEALCGFQFVLTHLDNRQLLIKSNPGEVVKPDQFKAINDEGMPMXQRPFMKGKLYIHFTVEFPDSLAPEQCKALEAVLPPKPTSKLTDMEIDECEETTMHDVNNIEEEMRRKQAHAAQEAYEEDDDMPGGAQRVQCAQQQGACRVCANFWTQCYLSGFGFVVGVMKQGSSC

SEQ ID NO: 67314 - protein, 110 aa, Setaria italica
  Transcript Sequence Number=SeqID_1340
  Gene Ontology: Mol. function=heat shock protein binding; Cellular component=membrane; Biological process=protein folding
  Homolog annotation: Hit_ID=Q84PD0; Match level="QueryCoverage=90%, HitCoverage=23%, E-value=2e-48, Identity=93%"; Hit description=DnaJ protein
PNYKGRIKRIEGMPMYQRPFMKGKLYIHFTVEFPDSLAPEQCKALEAVLPPKPTSKLTDMEIDECEETTMHDVNNIEEEMRRKQAHAAQEAYEEDDDMPGGAQRVQCAQQ

SEQ ID NO: 67315 - protein, 274 aa, Setaria italica
  Transcript Sequence Number=SeqID_1341
  Gene Ontology: Mol. function=heat shock protein binding; Cellular component=membrane; Biological process=protein folding
  Homolog annotation: Hit_ID=Q84PD0; Match level="QueryCoverage=98%, HitCoverage=64%, E-value=1e-127, Identity=82%"; Hit description=DnaJ protein
  Pfam annotation: Domain name=DnaJ_C; Domain location=103-227; Score =29.7; E_value=8.4e-09; Accession=PF01556.10; Description=DnaJ C terminal region
  Pfam annotation: Domain name=DnaJ_CXXCXGXG; Domain location=4-90; Score=140.9; E_value=3.9e-39; Accession=PF00684.11; Description=DnaJ central domain (4 repeats)
  Pfam module annotation: Pfam domain module=DnaJ_C::DnaJ_CXXCXGXG; Domain location=103-227::4-90
  Subcellular localization annotation: CTP_CleavageSite=54; ConfidenceScore=5.41e-01
LYNGTSKKLSLSRNVICSKCKGKGSKSGASMRCPGCQGSGMKVTIRQLGPSMIQQMQTACNECKGTGESINEKDRCPGCKGEKVVQEKKVLEVHVEKGMQHGQKITFPGEADEAPDTTTGDIVFVLQQKDHSKFKRKGDDLFYEHTLSLTEALCGFQFVLTHLDNRQLLIKSNPGEVVKPDQFKAINDEGMPMYQRPFMKGKLYIHFTVEFPDSLAPEQCKALEAVLPPKPTSKLTDMEIDECEETTMHDVNNIEEEMRRQQEACPHGHGWLQP

SEQ ID NO: 67316 - protein, 419 aa, Setaria italica
  misc_feature (325)..(325): Xaa can be any naturally occurring amino acid
  misc_feature (331)..(331): Xaa can be any naturally occurring amino acid
  Transcript Sequence Number=SeqID_1342
  Gene Ontology: Mol. function=heat shock protein binding; Cellular component=plasma membrane; Biological process=response to stress
  Homolog annotation: Hit_ID=Q84PD0; Match level="QueryCoverage=100%, HitCoverage=100%, E-value=1e-180, Identity=75%"; Hit description =DnaJ protein
  Pfam annotation: Domain name=DnaJ; Domain location=13-71; Score =125.7; E_value=1.5e-34; Accession=PF00226.23; Description=DnaJ domain
  Pfam annotation: Domain name=DnaJ_C; Domain location=235-360; Score =28.9; E_value=9.7e-09; Accession=PF01556.10; Description=DnaJ C terminal region
  Pfam annotation: Domain name=DnaJ_CXXCXGXG; Domain location=136-222; Score=152.8; E_value=1e-42; Accession=PF00684.11; Description=DnaJ central domain (4 repeats)
  Pfam module annotation: Pfam domain module=DnaJ::DnaJ_C::DnaJ _CXXCXGXG; Domain location=13-71::235-360::136-222
MFGRAPKKSDNTRYYEILGVPKDASQDDLKKAYRKAAIKNHPDKGGDPEKFKELAQAYEVLSDPEKREIYDQYGEDALKEGMGGGGGMHDPFDIFQSFFGGGSPFGGGGSSRGRRQRKGEDVVHPLKVSLDELYNGTSKKLSLSRNVLCSKCNGKGSKSGASSRCAGCQGSGYKVQIRQLGPGMIQQMQHPCNECKGTGETINDKDRCPQCKGEKVVQEKKVLEVVVEKGMQNGQKITFPGEADEAPDTVTGDIIFVLQQKEHPKFKRKGDDLFYEHTLTLTESLCGFQFVLTHLDNRQLLIKSNPGEVVKPDSFKAINDEGMPXYQRPFXMKGKLYIHFSVEFPDSLNPEQCKALEAVLPPKPTSQYTDMELDECEETMPYDVNIEEELRRRQQQHQEAYDEDEDMPGGAQRVQCAQQ

SEQ ID NO: 67317 - protein, 244 aa, Setaria italica
  misc_feature (171)..(171): Xaa can be any naturally occurring amino acid
  Transcript Sequence Number=SeqID_1343
  Gene Ontology: Mol. function=oxidoreductase activity, acting on the CH-OH group of donors, NAD or NADP as acceptor; Cellular component =chloroplast; Biological process=malate metabolic process
  Homolog annotation: Hit_ID=P43279; Match level="QueryCoverage=100%, HitCoverage=38%, E-value=1e-116, Identity=79%"; Hit description=NADP- dependent malic enzyme, chloroplastic
  Pfam annotation: Domain name=Malic_M; Domain location=3-213; Score =310.9; E_value=2.6e-90; Accession=PF03949.7; Description=Malic enzyme, NAD binding domain
LIALQISKQTKAPIEECRQKVWLVDSKGLIVSSRKESLPSFKQPWAHEHEPVSTLFDAVQSIKPTVLIGTSGVGRAFTKEVVEAMASFNERPVIFSLSNPTSHSECTAEQAYNWTKGRAVFASGSPFNPVEYDGKTFVPGQANNAYIFPGLGLGLIMAGATRVHEDMLLAXASEALADQANQENFEKGSIFPPFSSIRKISAHIAAAVAAKAYELGLATRLPAPRDLVQYAETCMYNPIYRNYR

SEQ ID NO: 67318 - protein, 437 aa, Setaria italica
  misc_feature (136)..(136): Xaa can be any naturally occurring amino acid
  misc_feature (151)..(151): Xaa can be any naturally occurring amino acid
  Transcript Sequence Number=SeqID_1344
  Gene Ontology: Mol. function=sedoheptulose-bisphosphatase activity; Cellular component=chloroplast; Biological process=reductive pentose- phosphate cycle
  Homolog annotation: Hit_ID=P46285; Match level="QueryCoverage=80%, HitCoverage=89%, E-value=0.0, Identity=90%"; Hit description =Sedoheptulose-1,7-bisphosphatase, chloroplastic
  Pfam annotation: Domain name=FBPase; Domain location=104-418; Score =546.1; E_value=4.1e-161; Accession=PF00316.12; Description=Fructose -1-6-bisphosphatase
  Subcellular localization annotation: CTP_CleavageSite=23; ConfidenceScore=5.02e-01
PPNVSARRQFNSFRVPRRIRPCSLASGPSQTTPARSDGDRRGGELRRQGHQRHPLPDHAARPCPSRSLTGLRRPGRRPRFYGESVRVSTARPLSARQSKAASRAALNTRCEIGDSLEEFLTKATPDKNLIRLLTCXGEAMRTIAFKVRTAXSCGGTACVNSFGDEQLAVDMLANKLLFDALEYSHVCKYACSEEVPELQDMGGPVEGGFSVAFDPLDGSSIVDTNFTVGTIFGVWPGDKLTGVTGGDQVAAAMGIYGPRTTYVIALKDCPGTHEFLLLDEGKWQHVKDTTSIGEGKMFSPGNLRATFDNPDYDKLINYYVKEKYTLRYTGGMVPDVNQIIVKEKGIFTNVTSPSAKAKLRLLFEVAPLGFLMEKAGGHSSDGKQSVLDKVINELDERTQVAYGSKNEIIRFEETLYGSSRLTAGATVGADRLSFAAI

SEQ ID NO: 67319 - protein, 119 aa, Setaria italica
  Transcript Sequence Number=SeqID_1345
  Gene Ontology: Cellular component=chloroplast
  Homolog annotation: Hit_ID=B6TG66; Match level="QueryCoverage=64%, HitCoverage=71%, E-value=4e-32, Identity=84%"; Hit description=Pop3 peptide
  Pfam annotation: Domain name=Dabb; Domain location=4-98; Score=93.0; E_value=1e-24; Accession=PF07876.4; Description=Stress responsive AB Barrel Domain
MAEVKHLCLVKFKEGVVVEDILKGMADLAAQMDMVKSFEWGKDVLNQEMLTQGFTHVFSLTFASADDLTAYMAHEKHAAFAATFMAALEKVVVIDFPVVIAKPPPPRSISVLLARVTEQ

SEQ ID NO: 67320 - protein, 107 aa, Setaria italica
  Transcript Sequence Number=SeqID_1346
  Gene Ontology: Cellular component=chloroplast
  Homolog annotation: Hit_ID=B6TG66; Match level="QueryCoverage=71%, HitCoverage=71%, E-value=1e-31, Identity=84%"; Hit description=Pop3 peptide
  Pfam annotation: Domain name=Dabb; Domain location=4-98; Score=93.0; E_value=1e-24; Accession=PF07876.4; Description=Stress responsive AB Barrel Domain
MAEVKHLCLVKFKEGVVVEDILKGMADLAAQMDMVKSFEWGKDVLNQEMLTQGFTHVFSLTFASADDLTAYMAHEKHAAFAATFMAALEKVVVIDFPVVIAKPPPQA

SEQ ID NO: 67321 - protein, 377 aa, Setaria italica
  Transcript Sequence Number=SeqID_1347
  Gene Ontology: Mol. function=nucleic acid binding
  Homolog annotation: Hit_ID=Q656N0; Match level="QueryCoverage=100%, HitCoverage=11%, E-value=1e-106, Identity=58%"; Hit description =Putative STH1 protein
FFDNNTSVQDRSKYLESLLRECKKEEAAPVLDDDALNDILARSEAEIDVFESIDKQRREEETEAWQKVVQDGSTSGLDPAVLPSRLVTDDDLKPFCHAMKLYEPSNVKSVKVNVRKKGELGGLDTQHYGRGKRAREVRSYEDQWTEEEFEKLCQVDSPDSPQPGGMPKDSDIPKALKPEILAESSKEPEQMRKEASPTVDDSPPAKRRRGRPKRSDVFLSPTTAPTDAVKQETGTTHDGSSATPATIINSDAPATPIHSAASDVNVHSISPADNINNQDFGTETKTSSSVIVPEGPIAKDTGSSLQSVHNVAAPAVPHQPARGRRAQAGETPRRRGRKPKSLTSSGVDDVGLNPPVSAGSGVADTSCVSSYTQVNTS

SEQ ID NO: 67322 - protein, 182 aa, Setaria italica
  misc_feature (82)..(82): Xaa can be any naturally occurring amino acid
  Transcript Sequence Number=SeqID_1348
SKSVDVHHRESDDACSRGPDENLKLLYGRTEGHAKLFECQVGVHDGTNAPDVVFDHEKGQYILSDSLLACLEEEFVGKKVPXPANCNQYNGIVEQLQFNDFVNGTKNGSSESMDVLYHKSIGNKLIDVCSQAITRHGSAVSKNGERLANVLHAPVHSNAHNDAAEWDKHGVSSTLTEPPSCE

SEQ ID NO: 67323 - protein, 62 aa, Setaria italica
  misc_feature (45)..(45): Xaa can be any naturally occurring amino acid
  Transcript Sequence Number=SeqID_1349
  Homolog annotation: Hit_ID=B9S0A4; Match level="QueryCoverage=100%, HitCoverage=4%, E-value=2e-12, Identity=53%"; Hit description=ATSMC2, putative
MFKLHRHRSSDRAGERYDFRFSNFRAVQVPSVSDRLFLSIVSVDXGKTIAKSSKAASRSGIC

SEQ ID NO: 67324 - protein, 126 aa, Setaria italica
  misc_feature (114)..(114): Xaa can be any naturally occurring amino acid
  Transcript Sequence Number=SeqID_1350
  Homolog annotation: Hit_ID=Q7XKX4; Match level="QueryCoverage=92%, HitCoverage=33%, E-value=1e-16, Identity=47%"; Hit description =OSJNBa0035I04.1 protein
IFLLGRQLISSGECCFFVEHLKRASPNYVTEGTSDLRAALRLLYALEMHGLVSSDQINRFSRIGGLSASGIEEALEEGEQIAERILGGSLLMSSARKSRAETYVSFSDGLKVEXMALWGSDYNSVE

SEQ ID NO: 67325 - protein, 293 aa, Setaria italica
  Transcript Sequence Number=SeqID_1351
  Gene Ontology: Mol. function=transcription regulator activity; Cellular component=nucleus; Biological process=regulation of transcription
  Homolog annotation: Hit_ID=Q2HVX8; Match level="QueryCoverage=69%, HitCoverage=26%, E-value=7e-19, Identity=30%"; Hit description=Helix- loop-helix DNA-binding
MAVGDALRRLCEEVGWSYAVFWKAIGAADPVHLVWEDGFCGHASCSAGSEAAEAGCEPGSGVCTLVRKVMALQIHVVGEGTIGRAAFTGNHQWIIHDPANEHTLRSEVSAEMNYQFVAGIQTIAIIPVLPRGVLQLGSTNVVVEDTNLVLQYKKLCSQLNNRSSVASSSSVKNDLNQKVQSRPLNGPPSIYPADVRPKIFNGSPLTYQQCYGLDATTVSSSTLANTGSNASMLMVAQRNGQMVKEHILYAPDMRFRTQNPYCDRTGESNTQSSVVSSGFVSSISTSMERHPLL

SEQ ID NO: 67326 - protein, 49 aa, Setaria italica
  Transcript Sequence Number=SeqID_1352
ISDGLLLRSLYSSPKTCQQSSICAGTIGKDQGLIITVKLDQNENWKHDS

SEQ ID NO: 67327 - protein, 48 aa, Setaria italica
  Transcript Sequence Number=SeqID_1353
TSKMHLRSLNYLKGPSRSETRHVSFRCRRGIPHGAMLSIYTKAPLIPT

SEQ ID NO: 67328 - protein, 64 aa, Setaria italica
  Transcript Sequence Number=SeqID_1354
ICEVELYLCLCLFNQLQIYLIKDLEIYSTLCRFSDQEVFNMWLNYLTISWALILQEPKSFCKSV

SEQ ID NO: 67329 - protein, 109 aa, Setaria italica
  Transcript Sequence Number=SeqID_1355
  Homolog annotation: Hit_ID=Q9S7Q5; Match level="QueryCoverage=70%, HitCoverage=13%, E-value=2e-16, Identity=54%"; Hit description =F1C9.34 protein
  Pfam annotation: Domain name=DUF946; Domain location=5-109; Score= -429.3; E_value=0.0049; Accession=PF06101.3; Description=Plant protein of unknown function (DUF946)
TAALPIEKQFVPPAALPSWPASAAVSDGGFAKGSIDLGGLEVRQITTFAKVWSTTQGGEDGVGATFFEPSPVPAGFSVLGHYAQPNSRPLFGHVLVARDTSGTGALLAA

SEQ ID NO: 67330 - protein, 115 aa, Setaria italica
  Transcript Sequence Number=SeqID_1356
  Homolog annotation: Hit_ID=Q7XSV3; Match level="QueryCoverage=80%, HitCoverage=22%, E-value=2e-16, Identity=47%"; Hit description =OSJNBa0039K24.3 protein
  Pfam annotation: Domain name=DUF793; Domain location=1-110; Score= -224.3; E_value=0.025; Accession=PF05633.3; Description=Protein of unknown function (DUF793)
PPRAAFPWAPPLLALQERLAEEGKRKDRRNSCGLLREIHALEKSVQKLAEAIDAAPAPLTGEREAEVREAAAELAAVCAAMKDGLDPLERQVREVFHRIVRCRMEGLDSPMLNAD

SEQ ID NO: 67331 - protein, 132 aa, Setaria italica
  misc_feature (119)..(119): Xaa can be any naturally occurring amino acid
  Transcript Sequence Number=SeqID_1357
  Subcellular localization annotation: CTP_CleavageSite=44; ConfidenceScore=5.37e-01
PVSKGTYLTSRRSRLRVPHILSDSSVASPAQSSFRKQPPVGTPSSSSAWEWENFYPPSPPDSEFFDRRKAELEEANRLREFEEEEKGPGTYLHHHHPYNLKEEDEVDDDDDGEVDHEPXGMHCGGWEDGRRA

SEQ ID NO: 67332 - protein, 88 aa, Setaria italica
  Transcript Sequence Number=SeqID_1358
  Subcellular localization annotation: CTP_CleavageSite=27; ConfidenceScore=5.04e-01
MSSGQSSPMDSSGGSPCPHGDGARAVSAKKLWRAMQAAYLVVVRKHQPKLAALGVHLHHLLSSSSRRDRGRSLAAAREPHPVLTYLSS

SEQ ID NO: 67333 - protein, 91 aa, Setaria italica
  Transcript Sequence Number=SeqID_1359
  Gene Ontology: Mol. function=ubiquitin-protein ligase activity; Cellular component=ubiquitin ligase complex
  Homolog annotation: Hit_ID=Q6ZKH8; Match level="QueryCoverage=89%, HitCoverage=22%, E-value=2e-23, Identity=79%"; Hit description =Putative armadillo repeat containing protein
GPPRQSAAEGRQELCKIPGIVAVLSGVAGSGNSRAIEQAVLVLNWICSESNELLLEAIKLGAFQLCETLVNDDNCKIAKNALELARTLETA

SEQ ID NO: 67334 - protein, 194 aa, Setaria italica
  Transcript Sequence Number=SeqID_1360
  Gene Ontology: Mol. function=transferase activity, transferring groups other than amino-acyl groups; Cellular component=cytoplasm; Biological process=biosynthetic process
  Homolog annotation: Hit_ID=Q2R3A5; Match level="QueryCoverage=98%, HitCoverage=48%, E-value=4e-43, Identity=53%"; Hit description =Chalcone and stilbene synthases, N-terminal domain containing protein
  Pfam annotation: Domain name=ACP_syn_III_C; Domain location=92-189; Score=-26.2; E_value=0.0086; Accession=PF08541.2; Description=3 -Oxoacyl-[acyl-carrier-protein (ACP)
  Pfam annotation: Domain name=Chal_sti_synt_C; Domain location=37-191; Score=169.0; E_value=1.4e-47; Accession=PF02797.7; Description =Chalcone and stilbene synthases, C-te
  Pfam module annotation: Pfam domain module=ACP_syn_III_C::Chal_sti _synt_C; Domain location=92-189::37-191
ENSLDTLVAKARFGDGAGAAIVGADPTTDPIERPVFHVVSSSQATLPGTEHAVAINLGESGVDYRMSVEVPALVRGGLERCLAESLAPLGLANASGTGWNGLLWAVHPGSRPLLDSYEAAMGLETGKLAASRCVLSEYGNMFGATVIFVLDEIRRRRQHGEEEGGGIGQWGIMSGLGPGLTVETIVMHATAGRR

SEQ ID NO: 67335 - protein, 50 aa, Setaria italica
  Transcript Sequence Number=SeqID_1361
IHHENFLHIISNLLVLNSILFHRYCLSNFTLCRHCRHCKQLIFVSDKVLR

SEQ ID NO: 67336 - protein, 86 aa, Setaria italica
  Transcript Sequence Number=SeqID_1362
  Subcellular localization annotation: CTP_CleavageSite=42; ConfidenceScore=5.51e-01
THHPVTSSHSTTTSSLPLLDKTRQVRVRYICSFYSPLSPLSTAQLESSVFCVFVQTTDGGRGEGSGARAQWWRQIGHIQRQRRSTG

SEQ ID NO: 67337 - protein, 194 aa, Setaria italica
  Transcript Sequence Number=SeqID_1363
  Homolog annotation: Hit_ID=Q6J9W0; Match level="QueryCoverage=61%, HitCoverage=28%, E-value=1e-14, Identity=42%"; Hit description =Putative RNA-binding protein
LKRHNVNPEWWMCPAIPVKDIAPPPPPPPLVAKPTVLEKKKSKKKLLDSLYKDVATEHCKKEEEWTPDFANGGTGVLALPKTGLGLRLNTERVLKAWCGRGSVFADRNASDLPLSSAHVVVKHEGSDMFPKNGTSAVIREGNILKMQRKQKMCTPLPSNKNSRYYRPRVNGRFVSKAHFLQLQHQQQQASEKES

SEQ ID NO: 67338 - protein, 82 aa, Setaria italica
  Transcript Sequence Number=SeqID_1364
  Gene Ontology: Biological process=response to oxidative stress
  Homolog annotation: Hit_ID=B6TVM7; Match level="QueryCoverage=100%, HitCoverage=67%, E-value=5e-41, Identity=73%"; Hit description=4 -methyl-5-thiazole monophosphate biosynthesis protein
ICASPAHVLEPHGLLKGKKATAFPPMSHLLTDQSACEHRVVVDGNLITSRAPGTATEFSLAIVEKLFGRDKAVSIAKELIFM

SEQ ID NO: 67339 - protein, 426 aa, Setaria italica
  Transcript Sequence Number=SeqID_1365
  Gene Ontology: Cellular component=chloroplast
  Homolog annotation: Hit_ID=B6TVM7; Match level="QueryCoverage=93%, HitCoverage=92%, E-value=0.0, Identity=92%"; Hit description=4 -methyl-5-thiazole monophosphate biosynthesis protein
  Pfam annotation: Domain name=DJ-1_PfpI; Domain location=272-411; Score=119.9; E_value=8.4e-33; Accession=PF01965.16; Description=DJ -1PfpI family
  Pfam annotation: Domain name=DJ-1_PfpI; Domain location=62-206; Score= 128.7; E_value=1.8e-35; Accession=PF01965.16; Description=DJ-1PfpI family
  Pfam module annotation: Pfam domain module=DJ-1_PfpI::DJ-1_PfpI; Domain location=272-411::62-206
  Subcellular localization annotation: CTP_CleavageSite=11; ConfidenceScore=5.02e-01
MAAAASSLVRRAAAAASSRLLYARAFASGGGEKAKRVLVPVAAGTEPIEAAATADVLNRAGARVTIATTDPAGDDGLVVEAACGVKLVADGRVADLEGEAFDLIALPGGMPGSVNLRDCKALEKMVKNHAENGGLYGAICAAPAVTLAYWGMLKGLKATCYPSFMEKFTAEVIPVNSRVVVDRNAVTSQGPGTAIEFALALVEQLYGKEKMEEVAGPLYVRPQHGVEYTIEELNSVEWKCSGTPQVLVPVANGSEEMEAINLIDVLRRAGADVTVASVEEKLQIVTRRHKFNLIADMMLDEATEMQFDLIALPGGLQGAQKFASTKKLVDLLKKQAESNKPYGAICASPAHVLEPHGLLKGKKATAFPPMSHLLTDQSACEHRVVVDGNLITSRAPGTATEFSLAIVEKLFGRDKAVSIAKELIFM

SEQ ID NO: 67340 - protein, 117 aa, Setaria italica
  Transcript Sequence Number=SeqID_1366
  Gene Ontology: Mol. function=transferase activity, transferring nitrogenous groups; Cellular component=cytoplasm; Biological process= biosynthetic process
  Homolog annotation: Hit_ID=Q9LTB2; Match level="QueryCoverage=100%, HitCoverage=9%, E-value=1e-24, Identity=50%"; Hit description =Methionine S-methyltransferase
VEAFLERCAPSGDAAYGELRALLARLHDPATRRQARVFLAELRRRQQSSSDDDDSGGFFRRFGFRIQELFLHGNPFLSASSSPGFQQRKKLTMMEIPSIFIPEDWSFTFYEGLNRHP

SEQ ID NO: 67341 - protein, 477 aa, Setaria italica
  Transcript Sequence Number=SeqID_1367
  Gene Ontology: Mol. function=transferase activity, transferring nitrogenous groups; Cellular component=cytoplasm; Biological process= biosynthetic process
  Homolog annotation: Hit_ID=Q8W519; Match level="QueryCoverage=99%, HitCoverage=43%, E-value=0.0, Identity=88%"; Hit description =Methionine S-methyltransferase
  Pfam annotation: Domain name=Aminotran_1_2; Domain location=87-458; Score=-53.1; E_value=0.00015; Accession=PF00155.13; Description =Aminotransferase class I and II
ISEDAAVYKALSQTIELLEGHTSLISQHYYGCLFHELLAFQIADRHPQQERQPAEVIPQQMIGFSDPAMSTLKAAEFFIPDSNESSVIHMDLDRSFLPVPSAVNASVFESFVRQNITDSETDVHSSIQQLVKDSYGLSVDGCSEIIYGNASLALFNKLVLCCMQEQGTLLFPLGTNGHYISAAKFVNASTLTIPTTFSSGFKIEPKVLADTLKNVSRPWVYISGPTINPTGFLYSDSDIQELLSVCAEYGARVVIDTSFSGLEYQTDGWSRWNLEGCLSSLKCSKPSFSVVLLGELSFELIAAGHDFGFVILNDPSLVDAFHSFPSLSRPHSTLKYTFKKLLGLKNQKDQHFSDLMAEQKDELKNRANQLIKTLQSCGWDVASGCAGISMLAKPTAYIGKPFKADGFEGKLDASNIREAILRATGLCINSSSWTGIPDYCRFSFALESGEFERAMGCITRFKELVLGGNAQTQMNGN

SEQ ID NO: 67342 - protein, 642 aa, Setaria italica
  Transcript Sequence Number=SeqID_1368
  Gene Ontology: Mol. function=transferase activity, transferring nitrogenous groups; Cellular component=cytoplasm; Biological process= biosynthetic process
  Homolog annotation: Hit_ID=Q8W519; Match level="QueryCoverage=96%, HitCoverage=57%, E-value=0.0, Identity=92%"; Hit description =Methionine S-methyltransferase
  Pfam annotation: Domain name=MTS; Domain location=51-249; Score= -62.1; E_value=0.00042; Accession=PF05175.6; Description =Methyltransferase small domain
  Pfam annotation: Domain name=Methyltransf_11; Domain location=72-172; Score=6.8; E_value=0.021; Accession=PF08241.4; Description =Methyltransferase domain
  Pfam module annotation: Pfam domain module=MTS::Methyltransf_11; Domain location=51-249::72-172
AADPAAGEDCFRTFHFRIHDVVLDPHVQGFQQRKKLTMMEIPSIFIPEDWSFTFYEGLNRHPDSIFRDKTVAELGCGNGWISIALAEKWSPLKVYGLDINPRAVKIAWINLYLNALDDDGLPIYDGEGKTLLDRVEFYESDLLSYCRDNKIELDRIVGCIPQILNPNPEAMSKIITENSSEEFLYSLSNYCALQGFVEDQFGLGLIARAVEEGIAVIKPSGIMVFNMGGRPGQGVCQRLFERRGFRITKLWQTKIMQAADTDISALVEIEKNSRHRFEFFMDLVGDQPICARTAWAYMKSGGRISHALSVYSCQLRQPNQVKKIFEFLKDGFHEVSSSLDLSFDDDSVADEKIPFLAYLASFLKENKSNPCEPPAGCLNFRKLVAGFMKSYHHIPLTPDNVVVFPSRAVAIENALQLFSPALAIVDEHLTRHLPKQWLTSLAIEGRADCNHAEGTVTVIEAPRQSDLLIELIRKLKPQVVVTGMAQFEAITSAAFENLLNATKDVGSRLFLDISEHLELSSLPSSNGVLKYLAGKTLPSHAAILCGLVKNQVYSDLEVAFAISEDAAVYKALSQTIELLEGHTSLISQHYYGCLFHELLAFQIADRHPQQERQPAEVIPQQMIGFSDPVVLLFLPLKVLSLC

SEQ ID NO: 67343 - protein, 108 aa, Setaria italica
  Transcript Sequence Number=SeqID_1369
  Subcellular localization annotation: CTP_CleavageSite=38; ConfidenceScore=5.23e-01
PPAASNRLRSAEQSQLVPLGSAPASAGSLLREAPSGIRSSEGRSGAVLNGLRGGGATGDTTASVSFSASTSSCPISLPSSSSASLVGTWQSADGTATSLICLIYFSIP

SEQ ID NO: 67344 - protein, 59 aa, Setaria italica
  Transcript Sequence Number=SeqID_1370
FSTTLLICYPVLVVEIQNLCSIHPSYHNPQQSFQSTLCPCWKETTERFLKQILKRKQSM

SEQ ID NO: 67345 - protein, 64 aa, Setaria italica
  Transcript Sequence Number=SeqID_1371
LAVGCSFRLQSVCIVLRFQTNHKTSMVHCYGINVLTFYMESFRKFSNYSCAGIGIFKFLGNPRY

SEQ ID NO: 67346 - protein, 222 aa, Setaria italica
  Transcript Sequence Number=SeqID_1372
  Gene Ontology: Mol. function=nucleotide binding; Cellular component =plasma membrane; Biological process=small GTPase mediated signal transduction
  Homolog annotation: Hit_ID=Q40200; Match level="QueryCoverage=100%, HitCoverage=100%, E-value=1e-101, Identity=80%"; Hit description =RAB11J
  Pfam annotation: Domain name=ATP_bind_1; Domain location=19-181; Score=-72.9; E_value=0.075; Accession=PF03029.9; Description =Conserved hypothetical ATP binding protein
  Pfam annotation: Domain name=Arf; Domain location=1-175; Score=-49.2; E_value=9.9e-06; Accession=PF00025.13; Description=ADP-ribosylation factor family
  Pfam annotation: Domain name=GTP_EFTU; Domain location=17-177; Score=- 95.4; E_value=0.076; Accession=PF00009.19; Description=Elongation factor Tu GTP binding domain
  Pfam annotation: Domain name=MMR_HSR1; Domain location=15-130; Score =0.9; E_value=0.00082; Accession=PF01926.15; Description=GTPase of unknown function
  Pfam annotation: Domain name=Miro; Domain location=16-130; Score =78.6; E_value=2.3e-20; Accession=PF08477.5; Description=Miro-like protein
  Pfam annotation: Domain name=Ras; Domain location=16-177; Score =312.1; E_value=1.2e-90; Accession=PF00071.14; Description=Ras family
  Pfam module annotation: Pfam domain module=ATP_bind_1::Arf::GTP _EFTU::MMR_HSR1::Miro::Ras; Domain location=19-181::1-175::17-177::15- 130::16-130::16-177
MAYDGDGEQSQDYLFKIVLIGDSSVGKSNLLARFARNEFYPNSKSTIGVEFQTQKLVIDGKEIKAQIWDTAGQERFRAVTSAYYRGAVGALLVYDISRRQTFDSVGRWLNELHTHSDMNVVTILVGNKTDLKHAREVSTAEGQALAEAQGLFFMETSALDSSNVAAAFQTVVKEIYSILSRKVFQSQEQKRSELQSLSNGKAVVLQGETNETSSGGRWCCSS

SEQ ID NO: 67347 - protein, 151 aa, Setaria italica
  Transcript Sequence Number=SeqID_1373
  Gene Ontology: Mol. function=transcription factor activity; Cellular component=nucleus; Biological process=regulation of transcription, DNA-dependent
  Homolog annotation: Hit_ID=P82280; Match level="QueryCoverage=72%, HitCoverage=26%, E-value=4e-25, Identity=55%"; Hit description =AP2/ERF and B3 domain-containing transcription repressor RAV2
  Pfam annotation: Domain name=B3; Domain location=3-77; Score=61.0; E _value=4.5e-15; Accession=PF02362.13; Description=B3 DNA binding domain
RAPEATTGEGVLLNFEDGEGKVWRFRYSYWNSSQSYVLTKGWSRFVREKGLRAGDTIVFSHSTYGQEKQLFIDCRKTKTATTDAAPAPAAAPAEKPKEARVVVRLFGVDITGDGCQKRARPVEMAFEQGQEFLKKQCVAHHRSPALGAFLL

SEQ ID NO: 67348 - protein, 94 aa, Setaria italica
  misc_feature (67)..(67): Xaa can be any naturally occurring amino acid
  Transcript Sequence Number=SeqID_1374
  Gene Ontology: Mol. function=nuclease activity; Cellular component =intracellular; Biological process=DNA repair
  Homolog annotation: Hit_ID=B6TQL5; Match level="QueryCoverage=77%, HitCoverage=45%, E-value=5e-29, Identity=84%"; Hit description =Holiday junction resolvase, S1x1p, URI domain nuclease
ENETTKRRLGAARFKVPSLHSLRQHNGELKGGAKAASAGRPWNLACLVEGFVSRSEACEFESKWKNXSRKMARKRTEHSVESVLQHRQAALSKV

SEQ ID NO: 67349 - protein, 155 aa, Setaria italica
  Transcript Sequence Number=SeqID_1375
  Gene Ontology: Mol. function=nuclease activity; Cellular component =intracellular; Biological process=DNA repair
  Homolog annotation: Hit_ID=B6TQL5; Match level="QueryCoverage=100%, HitCoverage=100%, E-value=2e-56, Identity=69%"; Hit description =Holiday junction resolvase, S1x1p, URI domain nuclease
  Pfam annotation: Domain name=GIY-YIG; Domain location=41-123; Score =48.0; E_value=3.6e-11; Accession=PF01541.16; Description=GIY-YIG catalytic domain
MTLTAAFRAAKIPRALPPKRGEAAASGDPSAGAAKGKAPPPWCVYLISSSRIPRTYVGVTTDFPRRLRQHNGELKGGAKAASAGRPWNLACLVEGFVSKSEACEFESKWKNISRKMSRKRTEPSVESVLQHRQAALSKVETSMDCIHLQIKWHSS

SEQ ID NO: 67350 - protein, 139 aa, Setaria italica
  Transcript Sequence Number=SeqID_1376
  Gene Ontology: Mol. function=ATP-dependent helicase activity; Cellular component=cytoplasm; Biological process=metabolic process
  Homolog annotation: Hit_ID=B9HNT7; Match level="QueryCoverage=70%, HitCoverage=76%, E-value=4e-26, Identity=45%"; Hit description =Silencing group B protein
MVCIRQATIDDLLAMQACNLMCLPENYQMKYYLYHMLSWPQLLFGAEYVSLHVRRSNRAAFNLYTSTLGYQIHDIEAKYYADGEDAFDMRKPLRQPQPKKHHHHHHHHGPGGCCSHDAPAAAAGSSPQSSNSPDKKANT

SEQ ID NO: 67351 - protein, 81 aa, Setaria italica
  Transcript Sequence Number=SeqID_1377
PMRGRSQHTTKNKLNFRIGRQSVDAKIVNKAIFCEMPQIYLVDVMLFAASSSRFSLKQGLESTGHPFCRQNHHWQPNQTKY

SEQ ID NO: 67352 - protein, 71 aa, Setaria italica
  Transcript Sequence Number=SeqID_1378
TTPSAHNGAGGAVGYGMYGAGAGGGSGMIMMMGQPMYGSPPGASGYPQPPHHQMVMGAKGGSYGGGGGFGS

SEQ ID NO: 67353 - protein, 59 aa, Setaria italica
  Transcript Sequence Number=SeqID_1379
LSSQVKIGSDNVFDHSLVLVVLLHGSDEPLRLVEEAAALFSVAGAAVAFSSCSSFLASS

SEQ ID NO: 67354 - protein, 146 aa, Setaria italica
  misc_feature (128)..(128): Xaa can be any naturally occurring amino acid
  Transcript Sequence Number=SeqID_1380
MEVAAEFKMEDANGAVDLEVDIIGPGGAAACSKLNTVEDPDATECSSSFGDTLSGSQDDGRPSEISDIEVDSPFCRYPHNGDAAALLDAAASDNLDRLFKKKKVTDHWRKYISPLRWRCQWLELRMKXLQSQVSKYDKELAALKHE

SEQ ID NO: 67355 - protein, 289 aa, Setaria italica
  Transcript Sequence Number=SeqID_1381
VFLFGVTTTYSGILQDDGRPSEISDIEVDSPFCRYPHNGDAAALLDAAASDNLDRLFKKKKVTDHWRKYISPLMWRCQWLELRMKDLQSQVSKYDKELAALKHEKELQTKMIELDCSSSRSVPFSSLCCRKTMKRRRRKRNEDKMDASSYISNHTILSYFEKTEADGHSIEDNANLADDNTKGNNDADWLLGIEGGGTTVEHILLSIQAAQDRIFSLRSNLKQAMPKNKGITLKVNTWVNGTQSSNCSPGKGKVAGLHERSPQDTSDCDIDDSAMPDSALSSYGEASNM

SEQ ID NO: 67356 - protein, 236 aa, Setaria italica
  Transcript Sequence Number=SeqID_1382
  Gene Ontology: Cellular component=integral to membrane
  Homolog annotation: Hit_ID=Q2TBP5; Match level="QueryCoverage=94%, HitCoverage=65%, E-value=6e-13, Identity=26%"; Hit description =Transmembrane protein 53
  Pfam annotation: Domain name=DUF829; Domain location=1-221; Score =152.2; E_value=1.6e-42; Accession=PF05705.6; Description=Eukaryotic protein of unknown function (DUF829)
ITLEGRAEKNVEMLSEHLAGWVREESGKKIIFHTFSNTGWLCYGVILENLQQQDPSAVEKIQACVVDSAPVAAPDPQVWASGFSAALMKKHSVTTKGLGSNDSRSDVLVVESNMEPKPAATEAVLLSALETFFDVVLNSPRINRRLSDVMELLSSKQPKCPQLYIYSSADRVIPAKSVESFIEGQRRAGREVRACDFVSSPHVDHYRSNPGLYTSQLSHFLEECVLSTCREDKCPS

SEQ ID NO: 67357 - protein, 78 aa, Setaria italica
  Transcript Sequence Number=SeqID_1383
MSMQQPTMEEAAASSLSLLQLAFTAAVATAALAAAVAVARYNRRYRGLRLPPGPPGWPVVGNLFQVAFSGKLFIHYIR

SEQ ID NO: 67358 - protein, 86 aa, Setaria italica
  Transcript Sequence Number=SeqID_1384
  Subcellular localization annotation: CTP_CleavageSite=48; ConfidenceScore=5.66e-01
IIFLPQLNSPPHLLWLIPTRAATVGTQFTPIFLSSRPLDLSSFSKNPQASKTATLSILFSLLQYSKELLFESNRSTFTSYPFSSIP

SEQ ID NO: 67359 - protein, 131 aa, Setaria italica
  Transcript Sequence Number=SeqID_1385
  Homolog annotation: Hit_ID=B9SVG1; Match level="QueryCoverage=53%, HitCoverage=12%, E-value=2e-12, Identity=51%"; Hit description =Calmodulin binding protein, putative
RRAAAAGAAPCGSSKSSYSVDTSTFWDSKYTHDYADRRSVERSRDGSSFAADDWDDRPRTIEEIQALLQTRKDAALKRERALSYAFSHQLWRNPAPAAEEMDVDGQPRWAAPRMVLRLVSKDARPWTTVSP

SEQ ID NO: 67360 - protein, 324 aa, Setaria italica
  Transcript Sequence Number=SeqID_1386
  Gene Ontology: Mol. function=hydrolase activity; Cellular component =cytoplasm
  Homolog annotation: Hit_ID=B6TBF0; Match level="QueryCoverage=94%, HitCoverage=82%, E-value=1e-101, Identity=63%"; Hit description=Dcp1- like decapping family protein
  Pfam annotation: Domain name=DCP1; Domain location=5-95; Score=78.2; E_value=3e-20; Accession=PF06058.5; Description=Dcp1-like decapping family
QVPLDDEQRTLHILAAPLIEVDVEVVKRNVQPRFQFIVMNRRNTDNLVEDLLSDFEYELQPPYLLYRNAAQEVNGIWFYNQHDCEAVASLFGRILNAYAKVPPKPKVPSTKSEFEELEAVPTSAAIDGPLEPPPSSSALVSDAPDESLVNYFNGAATIGSVSSAQMAGRVHPSTEAVASAHVPLIVPSTAPAHQIPHPLGGSSAPPLPLHDANAHVSHSANLLTPAFFAPPSPSSTSVAPAPPAASMMPTAPPLHPTSASAQRPQYGTPLLQPFPPPTPPPSLTPAQNDGAVISRDKVKDALQRLVQSDEFIDLIYRELQNAHM

SEQ ID NO: 67361 - protein, 136 aa, Setaria italica
  Transcript Sequence Number=SeqID_1387
  Gene Ontology: Mol. function=hydrolase activity
  Homolog annotation: Hit_ID=B6TBF0; Match level="QueryCoverage=94%, HitCoverage=35%, E-value=9e-71, Identity=96%"; Hit description=Dcp1 -like decapping family protein
  Pfam annotation: Domain name=DCP1; Domain location=21-136; Score =199.5; E_value=9.3e-57; Accession=PF06058.5; Description=Dcp1-like decapping family
MPPPPPPQANGGKVTPNLAMDAEATRMLNLTVLQRLDPAVEDILITAAHVTLYDFNIDLNQWSRKDVEGSLFVVKRNLQPRFQFIVMNRRNTDNLVEDLLSDFEYELQPPYLLYRNAAQEVNGIWFYNQHDCEAVA

SEQ ID NO: 67362 - protein, 40 aa, Setaria italica
  Transcript Sequence Number=SeqID_1388
RKGEYRQNAAKWMDKAKAAMQEGGSSDKNIAEFAAKYLSA

SEQ ID NO: 67363 - protein, 153 aa, Setaria italica
  Transcript Sequence Number=SeqID_1389
  Gene Ontology: Mol. function=transferase activity, transferring acyl groups; Cellular component=endoplasmic reticulum membrane; Biological process=GPI anchor biosynthetic process
  Homolog annotation: Hit_ID=UPI0001A7B105; Match level="QueryCoverage =97%, HitCoverage=33%, E-value=1e-52, Identity=66%"; Hit description =transferase, transferring acyl groups
FKRSQSHLKAGLSQLPSLRADISSYRVSVVLVTCLCILAVDFKIFPRRYAKAETYGSGIMDLGVGSFVVANALVSRQARNITTMSFRTALSSISPLVFLGFARILSTSGVDYQVHVGEYGVHWNFFFTLAAVSILTSIVRIHPKHCGLVGLLY

SEQ ID NO: 67364 - protein, 285 aa, Setaria italica
  misc_feature (131)..(131): Xaa can be any naturally occurring amino acid
  misc_feature (149)..(149): Xaa can be any naturally occurring amino acid
  misc_feature (188)..(188): Xaa can be any naturally occurring amino acid
  misc_feature (275)..(275): Xaa can be any naturally occurring amino acid
  Transcript Sequence Number=SeqID_1390
  Gene Ontology: Mol. function=transferase activity, transferring acyl groups; Cellular component=endoplasmic reticulum membrane; Biological process=GPI anchor biosynthetic process
  Homolog annotation: Hit_ID=B9S6K9; Match level="QueryCoverage=87%, HitCoverage=60%, E-value=3e-64, Identity=52%"; Hit description=GPI -anchored wall transfer protein, putative
  Pfam annotation: Domain name=GWT1; Domain location=139-244; Score =10.9; E_value=5.9e-06; Accession=PF06423.4; Description=GWT1
  Subcellular localization annotation: CTP_CleavageSite=62; ConfidenceScore=5.33e-01
CLNLLILLYKYSSFCLIGLPVNNSLPHSYNVSCNFLLVFLRSFRTALSSISPLVFLGFARILSTSGVDYQVHVGEYGVHWNFFFTLAAVSILTSIVRIHPKHCGLVGLLILAGYQIGLILGLNEYLISDKXRSADLISQNKEGIYSILXLKGKNRNTQVVKVWVLAASFWILAIILDSYIERVSRRMXNFAYVMLVFGQNFQVLSILTLAGFISYEMNLVLEDAFNQNMLGSFLLANILTGLVNLSVDTLSASSLTAFMILSVYTFTLCMVTGLXYFFGVRMKFW

SEQ ID NO: 67365 - protein, 401 aa, Setaria italica
  misc_feature (178)..(178): Xaa can be any naturally occurring amino acid
  Transcript Sequence Number=SeqID_1391
  Gene Ontology: Mol. function=transferase activity, transferring acyl groups; Cellular component=endoplasmic reticulum membrane; Biological process=GPI anchor biosynthetic process
  Homolog annotation: Hit_ID=UPI0001A7B105; Match level="QueryCoverage =61%, HitCoverage=61%, E-value=3e-76, Identity=52%"; Hit description =transferase, transferring acyl groups
  Pfam annotation: Domain name=GWT1; Domain location=274-395; Score= -10.1; E_value=0.00025; Accession=PF06423.4; Description=GWT1
MESRLLDKSLNPNKLLKEQFVSNLTGSSLTEIAALSTIVPALVVLRKWSSGDNTRRDAAKKNGDRVLPVRKDWMQYFCTLVVDYLTVVLPVLLVFTVLDEWAYMCSISLVILIAVYIMFKRSQSHLKAGLSQLPSLRADISSYRVSVVLVTCLCILAVDFKIFPRRYAKAETYGSGIXFRTALSSISPLVFLGFARILSTSGVDYQVHVGEYGVHWNFFFTLAAVSILTSIVRIHPKHCGLVGLLILAGYQIWLSSGLNEYLISDKRSADLISQNKEGIYSILGYWGMFLIGVSLGYYLFVDTSLKGKNRNTQVVKVWVLAASFWILAIILDSYIERVSRRMCNFAYVMLVFGQNFQVLSILILAYNIHSLSHWNSQVKFVFSFTAMSLCTSNIEQSRTTS

SEQ ID NO: 67366 - protein, 86 aa, Setaria italica
  misc_feature (7)..(7): Xaa can be any naturally occurring amino acid
  Transcript Sequence Number=SeqID_1392
  Subcellular localization annotation: CTP_CleavageSite=12; ConfidenceScore=5.17e-01
PQSQLSXPPMAKVSKTRSPLRPSSDTLLQCWFEDLHVTLVLPSRSPCPALQPRQPPSGELRQRRLHRVPDIEPITMPSPIGIIMGV

SEQ ID NO: 67367 - protein, 95 aa, Setaria italica
  misc_feature (75)..(75): Xaa can be any naturally occurring amino acid
  Transcript Sequence Number=SeqID_1393
  Homolog annotation: Hit_ID=B6T5C1; Match level="QueryCoverage=98%, HitCoverage=54%, E-value=9e-17, Identity=54%"; Hit description =Cofactor required for Sp1 transcriptional activation subunit 9
  Pfam annotation: Domain name=MED7; Domain location=4-95; Score=-6.1; E_value=5.5e-06; Accession=PF05983.3; Description=MED7 protein
MVAMATSAYPPPPPFYRLYKDYEQDPSSAPEPPPPPPIDQIYTTFGTDRKTNELLPSLEKYNNLRQLYPNSPNIXELRTLNRELQLHILELADIL

SEQ ID NO: 67368 - protein, 93 aa, Setaria italica
  Transcript Sequence Number=SeqID_1394
  Gene Ontology: Mol. function=transcription coactivator activity; Cellular component=nucleus; Biological process=positive regulation of transcription
  Homolog annotation: Hit_ID=B6T5C1; Match level="QueryCoverage=97%, HitCoverage=52%, E-value=1e-35, Identity=83%"; Hit description =Cofactor required for Sp1 transcriptional activation subunit 9
  Pfam annotation: Domain name=MED7; Domain location=2-92; Score=38.2; E_value=1.7e-09; Accession=PF05983.3; Description=MED7 protein
LRFNRELQLHILELADILVERPSQYARRVEDISLIFSNLHHLLNSLRPHQARATLIHMLESQIQRRKQAIEDIKQRREEVQKLLWGSSTCLNS

SEQ ID NO: 67369 - protein, 100 aa, Setaria italica
  Transcript Sequence Number=SeqID_1395
  Homolog annotation: Hit_ID=B6T5C1; Match level="QueryCoverage=73%, HitCoverage=41%, E-value=2e-09, Identity=47%"; Hit description =Cofactor required for Sp1 transcriptional activation subunit 9
  Pfam annotation: Domain name=MED7; Domain location=4-99; Score=-33.8; E_value=0.00087; Accession=PF05983.3; Description=MED7 protein
MVAMATSAYPPPPPFYRLYKDYEQDPSSAPEPPPPPPIDQIYTTFGTDRKTNELLPSLESHNLRQLYPNSPNIGIFLSAYAYLYQMFVIFINIRLQGITK

SEQ ID NO: 67370 - protein, 103 aa, Setaria italica
  Transcript Sequence Number=SeqID_1396
  Gene Ontology: Mol. function=transcription coactivator activity; Cellular component=nucleus; Biological process=positive regulation of transcription
  Homolog annotation: Hit_ID=B6T5C1; Match level="QueryCoverage=100%, HitCoverage=59%, E-value=3e-48, Identity=93%"; Hit description =Cofactor required for Sp1 transcriptional activation subunit 9
  Pfam annotation: Domain name=MED7; Domain location=1-98; Score=70.6; E_value=5.7e-18; Accession=PF05983.3; Description=MED7 protein
DFKKELRTLNRELQLHILELADILVERPSQYARRVEDISLIFSNLHHLLNSLRPHQARATLIHMLESQIQRRKQAIEDIKQRREEVQKLLGESLLILDGSQTN

SEQ ID NO: 67371 - protein, 174 aa, Setaria italica
  Transcript Sequence Number=SeqID_1397
  Gene Ontology: Mol. function=transcription coactivator activity; Cellular component=nucleus; Biological process=positive regulation of transcription
  Homolog annotation: Hit_ID=B6T5C1; Match level="QueryCoverage=100%, HitCoverage=100%, E-value=2e-67, Identity=72%"; Hit description =Cofactor required for Sp1 transcriptional activation subunit 9
  Pfam annotation: Domain name=MED7; Domain location=4-169; Score =266.0; E_value=8.9e-77; Accession=PF05983.3; Description=MED7 protein
MAMATSSAYPPPPPFYRLYKDYEQDPSSAPEPPPPIDQIYTVFGVERKVNELLQSLESLGLRQLYPKGPNIDFKKELRTLNRELQLHILELADILVERPSQYARRVEDISLIFQNLHHLLNSLRPHQARATLIHMLESQIQRRKQAIEDIKQRRQEAQTLLGESLLVLDGSQAN

SEQ ID NO: 67372 - protein, 91 aa, Setaria italica
  Transcript Sequence Number=SeqID_1398
  Gene Ontology: Mol. function=tRNA-intron endonuclease activity; Cellular component=tRNA-intron endonuclease complex; Biological process=tRNA processing
  Homolog annotation: Hit_ID=Q5Z6B1; Match level="QueryCoverage=35%, HitCoverage=10%, E-value=2e-09, Identity=90%"; Hit description =Probable tRNA-splicing endonuclease subunit Sen2
  Subcellular localization annotation: CTP_CleavageSite=41; ConfidenceScore=5.05e-01
LIISDSNRQPSSPRPCFGPWRWPAGRCWSGEPLVFGWKPCSSARRRSHSISLCTSGLQLMDLPGPRWKKGKDGKDFAALAAANPMSRIVAE

SEQ ID NO: 67373 - protein, 48 aa, Setaria italica
  Transcript Sequence Number=SeqID_1399
LAFYYLMRIIYREPTQTEGNRHFFNRKKLILMWSLVLKNNRKVPAPGS

SEQ ID NO: 67374 - protein, 49 aa, Setaria italica
  Transcript Sequence Number=SeqID_1400
ENSYCIAHLDIIMNTCRKKIKPDRYQRQALQVLDIQKEKESTASPIFLR

SEQ ID NO: 67375 - protein, 61 aa, Setaria italica
  Transcript Sequence Number=SeqID_1401
YILVVSVVPVSTSVCGWFVTTYTLSLIMLSFLLDLGGGMLDKSNSYISFFLFYPYLISICT

SEQ ID NO: 67376 - protein, 104 aa, Setaria italica
  Transcript Sequence Number=SeqID_1402
  Gene Ontology: Mol. function=transporter activity; Cellular component= integral to membrane; Biological process=transport
  Homolog annotation: Hit_ID=B6SYQ6; Match level="QueryCoverage=99%, HitCoverage=21%, E-value=5e-29, Identity=58%"; Hit description =Carbohydrate transporter/ sugar porter/ transporter
MANGGEGEAAAVPLLEKKPAAVYFDGCPGCAVDRRKAESRGIPFKLFFLIWFINLVSSLPILSIYPFLYFMIRDLHIAKKVEDIGFYAGLVGASYMLGRALTSI

SEQ ID NO: 67377 - protein, 163 aa, Setaria italica
  misc_feature (41)..(41): Xaa can be any naturally occurring amino acid
  Transcript Sequence Number=SeqID_1403
  Gene Ontology: Mol. function=extracellular-glutamate-gated ion channel activity; Cellular component=integral to membrane; Biological process=ion transport
  Homolog annotation: Hit_ID=B9ILC3; Match level="QueryCoverage=92%, HitCoverage=16%, E-value=3e-40, Identity=52%"; Hit description =Glutamate-gated kainate-type ion channel receptor subunit GluR5 (Fragment)
  Pfam annotation: Domain name=Lig_chan; Domain location=1-129; Score= -80.1; E_value=1.4e-05; Accession=PF00060.18; Description=Ligand -gated ion channel
YADALSRGPANGGVAAVFDEIPYLKLFLSQYCDGYAMVGPXYKTDGFGFVFPLGSPLTPDVSRVVLTLAEGEEMAQIEKKWFGEPGACPSQGSGAAAVGSSNLSFRSFGGLFLITGVVSGLTLLIYLATFVYHERGEVRAAEDEGSGSSSVRRLRAWLRHFRT

SEQ ID NO: 67378 - protein, 60 aa, Setaria italica
  Transcript Sequence Number=SeqID_1404
  Gene Ontology: Mol. function=N-acetyltransferase activity; Biological process=metabolic process
  Homolog annotation: Hit_ID=B4FQJ3; Match level="QueryCoverage=100%, HitCoverage=31%, E-value=8e-23, Identity=88%"; Hit description=N -acetyltransferase
EVPGLERVEALVDVNNTASQRVLEKAGFTREAVLRKYGVVKGVVRDMVIFSFINTDPVPE

SEQ ID NO: 67379 - protein, 121 aa, Setaria italica
  Transcript Sequence Number=SeqID_1405
  Homolog annotation: Hit_ID=Q7XQP7; Match level="QueryCoverage=72%, HitCoverage=90%, E-value=1e-25, Identity=57%"; Hit description =OSIGBa0160I14.8 protein
MAKEGGAGKREVEGSPPPEAESIVWREDKERFETPDGEAFLEYRLPSPAVMDMVHTYVPRSKRGQGLAARLCDAAFAHARGRGMRVVPTCSYISDTYLPRNPALEELVYKDQDPHPKPSSM

SEQ ID NO: 67380 - protein, 383 aa, Setaria italica
  Transcript Sequence Number=SeqID_1406
  Gene Ontology: Mol. function=hydrolase activity, acting on ester bonds; Cellular component=extracellular region; Biological process =lipid metabolic process
  Homolog annotation: Hit_ID=B9RF19; Match level="QueryCoverage=93%, HitCoverage=94%, E-value=1e-148, Identity=68%"; Hit description =Alpha-L-fucosidase 2, putative
  Pfam annotation: Domain name=Lipase_GDSL; Domain location=34-361; Score=317.4; E_value=2.9e-92; Accession=PF00657.14; Description=GDSL- like LipaseAcylhydrolase
MRFSVVLLVVALLCLGGGGGGRVAASTDFNFPAVFNFGDSNSDTGGRVAAGFESILPPYGSTFFGGPAGRFCDGRLILDFLMEAMDMPLLNAYLDSLGTPSFRTGVNFAQAGCSITPANPTSVSPFSFGLQVKQFFAFKDKVAKLLSKGDLYRQYIPQDDYFSEGLYMFDIGQNDLAGQFYSKTEDQVIASIPTILLEFETGLKKLYDQGARKFWIHNTGPLGCLPQNIALFGKDPSQLDELHCVAKHNRAAKLFNLQLHALCTKLRGEFAGASITYVDIHTIKYNLIANYSRYGFEHATQTCCGYGGPPLNYDGRVPCGQTVSLNGKPVTAKGCSDSTEFVNWDGIHYTEAANFHIASQILTGKYSDPPFVDKMPFVIKPRF

SEQ ID NO: 67381 - protein, 382 aa, Setaria italica
  Transcript Sequence Number=SeqID_1407
  Gene Ontology: Mol. function=carboxylesterase activity; Cellular component=plasma membrane
  Homolog annotation: Hit_ID=Q940H7; Match level="QueryCoverage=94%, HitCoverage=99%, E-value=1e-129, Identity=64%"; Hit description =Putative host response protein
  Pfam annotation: Domain name=Abhydrolase_1; Domain location=138-358; Score=49.1; E_value=1.7e-11; Accession=PF00561.12; Description =alphabeta hydrolase fold
MGNAFACMPRKEQRAAAAVSRSKRMGSARSARGGPKLTPAEEELLHRQALAMAIHQHLDAGGSMSRRIDAGASLSRRMGPGSTSSRRRGDLLDSVTNAKPAQIVLENLETKKIVLVHGEGFGAWCWYKTISHLEEAGLEPVALDLTGSGIDHTDTNSIATLADYSKPLIDYLDKLPEDEKVILVGHSCGGASVSYALEHCPQKISKAVFLTATMVKDGQRPFDVFSEELRSADVFLQESQFLVYGNGKDKPPTGLMFDKQQIKGLYFNQTPSKDMALAAVSMRPIPLAPIMEKLSLTPENYGTARRYFIQTLDDHMLSPDAQEKLVRENPPDGIFKIKGSDHCPFFSKPQSLNKILLEIAQIQAPAALLPGKASAEETAVKS

SEQ ID NO: 67382 - protein, 135 aa, Setaria italica
  misc_feature (96)..(96): Xaa can be any naturally occurring amino acid
  Transcript Sequence Number=SeqID_1408
  Gene Ontology: Mol. function=transporter activity; Cellular component= integral to membrane; Biological process=transport
  Homolog annotation: Hit_ID=O64964; Match level="QueryCoverage=94%, HitCoverage=50%, E-value=2e-47, Identity=79%"; Hit description =Aquaporin TIP1-1
  Pfam annotation: Domain name=MIP; Domain location=13-135; Score=15.9; E_value=8.2e-11; Accession=PF00230.12; Description=Major intrinsic protein
MPINRIAVGSHEEVYHPGALKAAFAEFISTLIFVFAGQGSGMAFSKLSPGGSTPTGLIAAAIAHAFALFVAVSVGANISGGHVNPAVTFGAFVGGXNITLFRGILYWIAQLLGSTVACFLLRFSTGGLPHRAPSA

SEQ ID NO: 67383 - protein, 133 aa, Setaria italica
  Transcript Sequence Number=SeqID_1409
  Gene Ontology: Mol. function=DNA binding; Cellular component =chromosome; Biological process=nucleosome assembly
  Homolog annotation: Hit_ID=Q94JJ7; Match level="QueryCoverage=74%, HitCoverage=64%, E-value=2e-36, Identity=76%"; Hit description =Histone H2B.3
  Pfam annotation: Domain name=Histone; Domain location=57-127; Score =107.1; E_value=6e-29; Accession=PF00125.16; Description=Core histone H2AH2BH3H4
MAPKAEKKPAAKKPAEEEPAAEKAPAGKKPKAEKRLPAGKSAGKEGGEGKKGKKKAKKSVETYKIYIFKVLKQVHPDIGISSKAMSIMNSFINDIFEKLAGEAAKLARYNKKPTITSREIQTSVRLVLPGELV

SEQ ID NO: 67384 - protein, 49 aa, Setaria italica
  misc_feature (15)..(15): Xaa can be any naturally occurring amino acid
  Transcript Sequence Number=SeqID_1410
PLNSKAVNVILHSTXTSPSPFSLCMIYNYFDMLSYYNLTGVRFYVRSFT

SEQ ID NO: 67385 - protein, 310 aa, Setaria italica
  misc_feature (8)..(8): Xaa can be any naturally occurring amino acid
  misc_feature (25)..(25): Xaa can be any naturally occurring amino acid
  misc_feature (92)..(92): Xaa can be any naturally occurring amino acid
  Transcript Sequence Number=SeqID_1411
  Gene Ontology: Mol. function=holo-[acyl-carrier-protein] synthase activity; Biological process=macromolecule biosynthetic process
  Homolog annotation: Hit_ID=B6TPH1; Match level="QueryCoverage=95%, HitCoverage=95%, E-value=1e-123, Identity=72%"; Hit description=4 -phosphopantetheinyl transferase sfp
  Pfam annotation: Domain name=ACPS; Domain location=148-215; Score =65.1; E_value=2.5e-16; Accession=PF01648.12; Description=4' -phosphopantetheinyl transferase superfamily
  Subcellular localization annotation: CTP_CleavageSite=33; ConfidenceScore=5.16e-01
LLRRAMPXPPPPPPRTPGVTGGRLXSSLSPPPRLQSRREVHIWYLSPDELNDASQLKMYMELLSPSERKNALSMNGENLQKVAVLSRALTRXTDCKIDPRLFEFKKNKFGKPEILWRADDDRIEWPLHFNISHTSSLIACGVTMDAPIGIDIEEKKRNTAKNVLSLADRYFTPSEFDHLVNLPDPDAQQKEFIKLWTLKEAYVKALGRGFSGAPFNKFSIILAANNGIQISVEPKALNDSNSSCDCLSENWKFALAELYGSYYMAACMEDDSRSSGSEDDRSPLGLKVWKTIPFLEDILVSGTEAVKFIS

SEQ ID NO: 67386 - protein, 401 aa, Setaria italica
  Transcript Sequence Number=SeqID_1412
  Gene Ontology: Cellular component=anchored to membrane
  Homolog annotation: Hit_ID=B6SZA0; Match level="QueryCoverage=89%, HitCoverage=87%, E-value=1e-158, Identity=77%"; Hit description =Fasciclin-like arabinogalactan protein 8
  Pfam annotation: Domain name=Fasciclin; Domain location=202-334; Score=71.3; E_value=3.5e-18; Accession=PF02469.14; Description =Fasciclin domain
MARSRPAILLSLAVLAVAAMALAPAPAAATKYNITKLLEPYKQYSRFNEMLSRTRLAYDINRRQTITVLAVDNAAMSALDHYSLQTIRHILSLHVLVDYYGDKKLKKLARGSTTSSSMYQATGAASGMSGYVNITRKDGKVSFTTDDADDTAKPTRYVKSIKEYPYDIAVLEVSSIISSADAEAPVPPPAPVDLVELLSKKYCKSFASLLSANADVFRAFNETKDNGLTLFCPVDSAVAAFAATYKNLTAKAKTAILLYHGVPDYFSLQLLKSNNGMVTTLATASENKKDYSYDVQNKGETVTLQTRVVTSIVTATVGDMEPLAVYAVNKFLKPKELFKVVEAPAPAPELSKKKRSKAADGGDDDSSDDSGDETADKGDAAQAMLARWVTAATTAVAAFAL

SEQ ID NO: 67387 - protein, 41 aa, Setaria italica
  Transcript Sequence Number=SeqID_1413
HLASPNHMHSLPRMPNFCGSGFGPLNGMHPEVCLLKLLYFH

SEQ ID NO: 67388 - protein, 94 aa, Setaria italica
  misc_feature (11)..(11): Xaa can be any naturally occurring amino acid
  misc_feature (56)..(56): Xaa can be any naturally occurring amino acid
  misc_feature (85)..(85): Xaa can be any naturally occurring amino acid
  Transcript Sequence Number=SeqID_1414
VYTAENPFHVXLIGPNRRPEMEARFARKRAKSPLQNPDKGVESSLAQQESHKKPSXKNGKIPVKTAIRLTPDGKRRRRSAAHLMXSPINLESSG

SEQ ID NO: 67389 - protein, 169 aa, Setaria italica
  Transcript Sequence Number=SeqID_1415
  Gene Ontology: Mol. function=cysteine-type peptidase activity; Cellular component=integral to membrane; Biological process =proteolysis
  Homolog annotation: Hit_ID=Q67VB7; Match level="QueryCoverage=98%, HitCoverage=34%, E-value=2e-34, Identity=49%"; Hit description =Ankyrin repeat protein-like
  Pfam annotation: Domain name=Ank; Domain location=109-141; Score =12.7; E_value=0.54; Accession=PF00023.22; Description=Ankyrin repeat
  Pfam annotation: Domain name=Ank; Domain location=2-32; Score=14.4; E_ value=0.31; Accession=PF00023.22; Description=Ankyrin repeat
  Pfam annotation: Domain name=Ank; Domain location=40-107; Score=9.8; E_value=1.4; Accession=PF00023.22; Description=Ankyrin repeat
  Pfam module annotation: Pfam domain module=Ank::Ank::Ank; Domain location=109-141::2-32::40-107
GDGVSPLYLAVASNRADMVRVLIRESPDGVKSSASFSGPDGQTALHAAVYVSRVEFCESLQRWEQTLASKVYNYGRTARHHGTLLAQKLEPVELLLSNNSSLAYIQDNEGLFPIHIAAIMGNVNIVRKFIEICLDYDELLDNKRRNILHCAVEHGRVMLVRHICGNPKF

SEQ ID NO: 67390 - protein, 214 aa, Setaria italica
  misc_feature (193)..(193): Xaa can be any naturally occurring amino acid
  Transcript Sequence Number=SeqID_1416
  Gene Ontology: Mol. function=transporter activity; Cellular component= integral to membrane; Biological process=transport
  Homolog annotation: Hit_ID=Q67VB7; Match level="QueryCoverage=98%, HitCoverage=42%, E-value=1e-39, Identity=44%"; Hit description =Ankyrin repeat protein-like
  Pfam annotation: Domain name=Ank; Domain location=107-140; Score =12.5; E_value=0.57; Accession=PF00023.22; Description=Ankyrin repeat
  Pfam annotation: Domain name=Ank; Domain location=2-34; Score=11.0; E_ value=0.94; Accession=PF00023.22; Description=Ankyrin repeat
  Pfam annotation: Domain name=Ank; Domain location=36-68; Score=17.8; E_value=0.047; Accession=PF00023.22; Description=Ankyrin repeat
  Pfam annotation: Domain name=Ank; Domain location=71-106; Score=0.6; E_value=30; Accession=PF00023.22; Description=Ankyrin repeat
  Pfam module annotation: Pfam domain module=Ank::Ank::Ank::Ank; Domain location=107-140::2-34::36-68::71-106
LGGETAMHEAVRNGHALVLEKLMSRDSGLAGVVDGDGVSPLYLAVASNRADMVRLLGARWADCIACCGLRQQRNILHCAVEHGRVMLVRHICGNPKFLRMMNARDGEGNTPLHLSVKHGQAMIFFFLMVDPRVNLAIMNNEGSTPLDVASNKIQSDDTLLSSLTDTSIIICLNLCGAYGSPCHLAKKLKDNRXLERKKESSIYANVSRNMSTTL

SEQ ID NO: 67391 - protein, 51 aa, Setaria italica
  Transcript Sequence Number=SeqID_1417
NHRIFRTRKEISMLTITSNCSFLSISPYYTCKCSYNVSVLCQNQLGSLELA

SEQ ID NO: 67392 - protein, 63 aa, Setaria italica
  Transcript Sequence Number=SeqID_1418
LLLLLPPQLTDAIEEQVMVTGSDYDKRKWSSRDLDHLRNDLSRDDISAQFRRIFGGWGLDWGS

SEQ ID NO: 67393 - protein, 446 aa, Setaria italica
  misc_feature (144)..(144): Xaa can be any naturally occurring amino acid
  Transcript Sequence Number=SeqID_1419
  Gene Ontology: Mol. function=sugar:hydrogen symporter activity; Cellular component=integral to membrane; Biological process =carbohydrate transport
  Homolog annotation: Hit_ID=B6SX01; Match level="QueryCoverage=99%, HitCoverage=86%, E-value=0.0, Identity=92%"; Hit description=Sialin
  Pfam annotation: Domain name=MFS_1; Domain location=41-405; Score =195.4; E_value=1.6e-55; Accession=PF07690.8; Description=Major Facilitator Superfamily
  Pfam annotation: Domain name=Sugar_tr; Domain location=37-445; Score=- 144.2; E_value=0.0026; Accession=PF00083.16; Description=Sugar (and other) transporter
  Pfam module annotation: Pfam domain module=MFS_1::Sugar_tr; Domain location=41-405::37-445
AALLETVQRLLLAKEEADAEGGEEEEDEQGQFPKRWAIVFLCFSAFLICNMDRVNMSIAILPMSAEFGWNPQTVGLIQSSFFWGYLLTQIAGGIWADTVGGKTVLGFGVVWWSIATVLTPIAAKLGLPFLLVVRAFMGIGEGVXAMPAMNNILSKWVPVSERSRSLSLVYSGMYLGSVTGLAFSPLLIHKFGWPSVFYSFGSLGAVWFTTWATKAYSSPLEDPGISAAEKKLITSQSTAGEPVKTIPWKLILSKPPVWALIVSHFCHNWGTFILLTWMPTYYNQVLKFNLMESGLVCVLPWFTMAVSANVGGWIADTLVSRGVSVTRVRKIMQSIGFLGPAFFLTQLSHVNSPAMAVLCMACSQGTDAFSQSGLYSNHQDIGPRYAGVLLGLSNTAGVLAGVFGTAATGYILQHGSWDNVFEVSVVLYLVGTLVWNVFSTGEKILD

SEQ ID NO: 67394 - protein, 210 aa, Setaria italica
  misc_feature (9)..(9): Xaa can be any naturally occurring amino acid
  misc_feature (200)..(200): Xaa can be any naturally occurring amino acid
  Transcript Sequence Number=SeqID_1420
  Gene Ontology: Mol. function=zinc ion binding; Cellular component =intracellular; Biological process=meiosis
  Homolog annotation: Hit_ID=Q28IN1; Match level="QueryCoverage=48%, HitCoverage=16%, E-value=3e-15, Identity=44%"; Hit description=Novel zinc finger protein
  Pfam annotation: Domain name=Peptidase_C78; Domain location=96-210; Score=40.6; E_value=1.1e-09; Accession=PF07910.5; Description =Peptidase family C78
FEDDDQLQXDMELAHQMALAESNTDIMDGPEHCAGSFTSDSNAQGASSSHSEYLHHYGKLLDEQISCLVGAQIRSKVQEVEGGIMSLLRSCLESEGGSSTCMISGYIEHHQSLPSEDKGWGCGWRNIQMLSSHLLKQRPEAREVLFGGSGFVPDIPSLQRWLEIAWDKNFDIIGSNHFDNKVYGAKKWIGTTECATLFRXFGLHARIIDF

SEQ ID NO: 67395 - protein, 149 aa, Setaria italica
  misc_feature (75)..(75): Xaa can be any naturally occurring amino acid
  Transcript Sequence Number=SeqID_1421
  Gene Ontology: Mol. function=oxidoreductase activity, acting on the CH-CH group of donors; Cellular component=integral to membrane; Biological process=lipid metabolic process
  Homolog annotation: Hit_ID=B9SZU7; Match level="QueryCoverage=91%, HitCoverage=28%, E-value=7e-23, Identity=41%"; Hit description=Dfg10 protein, putative
  Pfam annotation: Domain name=Steroid_dh; Domain location=1-149; Score= -22.7; E_value=0.00013; Accession=PF02544.8; Description=3-oxo-5 -alpha-steroid 4-dehydrogenase
TCIPLQHYSLDAHHGISHGSFGSLREHKNSDEYVIPCGDWFSCVSCPHYLAELVIYFGMLIARGGSDILVWFLYXFVVCFSDIFCFWCSESKQLLNMVPFSVFRYSRFTETPFVQVTNLSFAAVQTHKRYLEKFEDYPRSRYAIIPFVC

SEQ ID NO: 67396 - protein, 294 aa, Setaria italica
  Transcript Sequence Number=SeqID_1422
  Gene Ontology: Mol. function=oxidoreductase activity, acting on the CH-CH group of donors; Cellular component=integral to membrane; Biological process=lipid metabolic process
  Homolog annotation: Hit_ID=B9RG55; Match level="QueryCoverage=99%, HitCoverage=85%, E-value=1e-86, Identity=52%"; Hit description=Dfg10 protein, putative
  Pfam annotation: Domain name=Steroid_dh; Domain location=160-294; Score=67.3; E_value=5.8e-17; Accession=PF02544.8; Description=3-oxo -5-alpha-steroid 4-dehydrogenase
  Subcellular localization annotation: CTP_CleavageSite=67; ConfidenceScore=5.13e-01
SSSSSKARFTVPQKFFLHFYVVGVVVTTTLLLAIWFYAYMKMTPLVPEPSSYSTIASHLVGSSNSFSLASFWSSRPREHKYRVWRTVFVLILMEIQVLRRLYETEHVFHYSPSARMHIMGYLTGLFYYVAAPLSLASSCLPEAIQYLRYQIAEFIVKGRARMPDLVIDPSHLLKPLLKLGWTQWIGAVIFIWGSLHQIRCHAILGSLREHKDSDEYVIPCGDWFSRVSCPHYLAELVIYLGMLIASGGSDISVWFLYLFVITNLSFAAVQTHKWYLQKFEDYPRSRYAIIPFVC

SEQ ID NO: 67397 - protein, 94 aa, Setaria italica
  misc_feature (65)..(65): Xaa can be any naturally occurring amino acid
  Transcript Sequence Number=SeqID_1423
  Homolog annotation: Hit_ID=B6SVU6; Match level="QueryCoverage=62%, HitCoverage=13%, E-value=2e-21, Identity=91%"; Hit description=ATA15 protein
MVFKPSAQRLPICTIDALQVFPLLLPTRVKERAARLNHFARAFKERAESDLKKAAYKHWSDGALXDLRRADLVVKRRAMEDAFMALKVALTTCI

SEQ ID NO: 67398 - protein, 218 aa, Setaria italica
  Transcript Sequence Number=SeqID_1424
LKTGCAITGNEGNKRMQPWFQRCGELVDDEGINAGEPGKALEQPQLVDWVAPAQIRRSDERIGRHLLGSDRQSCVSRHRASCHLIPAAYRRRPALADAAVPCVTRSHRSRLRSALTSAIAFQPLNHSSPTAGSQRCRRRSATTTAAHIGRESEPPPPPPWRGVDTRLTASSVVSGSRDSRAHETLVPSELDDRIGGGQAADIRACDACGEEMVNEERK

SEQ ID NO: 67399 - protein, 94 aa, Setaria italica
  Transcript Sequence Number=SeqID_1425
PVKPTHGTLNSQALHDLVVGIVTWFQRCGELVDDEGINAGEPGKALEQPQLVDWVAPAQIRRSDERIGRHLLGSDRQSCVSRHRASCHLIPAAY

SEQ ID NO: 67400 - protein, 445 aa, Setaria italica
  Transcript Sequence Number=SeqID_1426
  Homolog annotation: Hit_ID=B6SVU6; Match level="QueryCoverage=96%, HitCoverage=96%, E-value=0.0, Identity=80%"; Hit description=ATA15 protein
MATNMCGGATVACRLCYGDQHGTLRELSCTPQRKWMNGYHLMFRLCQWKPNGGRSDGSLLRRGCNVRCRSCGSCNGSCETKECESSEDGASPYRDFKQHSRGNTQFSDDQVASKKKSAYASQGLAEAFKFVYNDAKFVNERAQNDILLLSRGITKLNKRACEDAAVLGLGFLKLDARARKDTQKIDHGVKERAARLNHFARAFKERAESDLKKAAYKHWSDGALEADLRRADLVVKRRAMEDAFMALKFVRDIHDMMVNRLYEQLPRDGASSRTSSTGFITLEKNGKTLELFPGEVSADQISAIEEAYRSMASAFSEADGIDYTDPEELELLVATLIDLDAMDGKRSVSLIAECSSSPDVNTRKALANALATAPSMWTLGNAGMGALQRLAQDPNYAVASAASRAIDELKKQWELEEGDSLRFVMNQNLASEATDDGSSAADDTT

SEQ ID NO: 67401 - protein, 287 aa, Setaria italica
  Transcript Sequence Number=SeqID_1427
  Gene Ontology: Mol. function=nucleotide binding; Biological process =defense response
  Homolog annotation: Hit_ID=C3RVU4; Match level="QueryCoverage=65%, HitCoverage=13%, E-value=2e-12, Identity=32%"; Hit description=NBS -type resistance protein RGC5
  Pfam annotation: Domain name=LRR_1; Domain location=128-151; Score =10.8; E_value=2.6; Accession=PF00560.25; Description=Leucine Rich Repeat
  Pfam annotation: Domain name=LRR_1; Domain location=153-180; Score =2.4; E_value=1.1e+02; Accession=PF00560.25; Description=Leucine Rich Repeat
  Pfam annotation: Domain name=LRR_1; Domain location=201-224; Score =5.2; E_value=31; Accession=PF00560.25; Description=Leucine Rich Repeat
  Pfam annotation: Domain name=LRR_1; Domain location=225-246; Score =6.2; E_value=20; Accession=PF00560.25; Description=Leucine Rich Repeat
  Pfam annotation: Domain name=LRR_1; Domain location=248-270; Score =3.3; E_value=72; Accession=PF00560.25; Description=Leucine Rich Repeat
  Pfam module annotation: Pfam domain module=LRR_1::LRR_1::LRR_1::LRR _1::LRR_1; Domain location=128-151::153-180::201-224::225-246::248-270
RPYYAILARSDNGVLEGLRPHSRIECLKVHGFCGDRFPSWFKPEDLPNLRSLDLAYFGDIESLSIPCFADGTQVGLRGDDGTQHAAGSISRSNGMAPFAFSRLTGFRVYNLRKLTNLDQFLTPEKLPSIKSIEICYCPSLTSIPFHSFVGFVCLRDLKIRYCDKLKCPQEMVLPPSLQRLCIVDCGELDRSFPACLENLTSLTLLQLGSCHSIKCISLNSIGSNMLKCLVIRNCRELSSIGGLQGLVSIQHVELRHCPKLTEVQLPFEKKELRTKEGEELLDFLWHY

SEQ ID NO: 67402 - protein, 76 aa, Setaria italica
  Transcript Sequence Number=SeqID_1428
VELNRIKHAQCLVIHDCPELSSVGGLHGLVSIQHVELRYCPKLTEVQLPFEKKELRTKEGKELIKFLWDYYTAASN

SEQ ID NO: 67403 - protein, 414 aa, Setaria italica
  Transcript Sequence Number=SeqID_1429
  Gene Ontology: Mol. function=protein serine/threonine kinase activity; Cellular component=plasma membrane; Biological process =protein amino acid phosphorylation
  Homolog annotation: Hit_ID=Q1SMZ9; Match level="QueryCoverage=78%, HitCoverage=31%, E-value=1e-143, Identity=73%"; Hit description =Protein kinase
  Pfam annotation: Domain name=Pkinase; Domain location=140-392; Score =254.9; E_value=2e-73; Accession=PF00069.17; Description=Protein kinase domain
  Pfam annotation: Domain name=Pkinase_Tyr; Domain location=140-392; Score=257.2; E_value=3.8e-74; Accession=PF07714.9; Description =Protein tyrosine kinase
  Pfam module annotation: Pfam domain module=Pkinase::Pkinase_Tyr; Domain location=140-392::140-392
LAAAVEPAAVVASSMVVAAAKSNSDIKLDVPVAAAATAAAVVATTAAVNKQYEYLDPGCQLLCLPSSSNKSIQKGKHDLLDNDQLETNHGQDNALKHEKDSVQEPHEAERVSDRSTGTESARSEITLDDVAEFEIQWEDLTLGERVGLGSFGEVYRGEWHGTEVAVKKFLQQDISSDALEEFRTEFGIMRRLRHPNVVLFMGAVTRVPHLSIVTEFLPRGSLFRLIHRPNNQLDERRRLRMALDVARGMNYLHNCTPVIVHRDLKSPNLLVDKNWVVKVCDFGLSRIKHSTFLSSRSTAGTAEWMAPEVLRNEPSDEKCDVFSYGVILWELCTLLQPWEGMNPMQVVGAVGFQQRRLDIPGSVDPAVAEIIKKCWQTDPRMRPSFSDIMAALRPLLKNMPANQPTRKRTQQIDD

SEQ ID NO: 67404 - protein, 135 aa, Setaria italica
  misc_feature (41)..(41): Xaa can be any naturally occurring amino acid
  Transcript Sequence Number=SeqID_1430
  Homolog annotation: Hit_ID=Q259K5; Match level="QueryCoverage=39%, HitCoverage=7%, E-value=1e-11, Identity=83%"; Hit description =H0402C08.8 protein
SIGAFEITTPPPRRTVEQLLALQEAISQLEAHVQAGNYFFXLKLRSLMFAAFPQSTNKVAVALVVAATAFTFMPLRTIVLLILLEVYTRQMPVRKKSSEKLVRRLREWWLRIPAAPVQLLKPQETRRWRSRLRSR

SEQ ID NO: 67405 - protein, 177 aa, Setaria italica
  misc_feature (31)..(31): Xaa can be any naturally occurring amino acid
  misc_feature (172)..(172): Xaa can be any naturally occurring amino acid
  Transcript Sequence Number=SeqID_1431
  Gene Ontology: Mol. function=sequence-specific DNA binding; Cellular component=nucleus; Biological process=regulation of transcription, DNA-dependent
  Homolog annotation: Hit_ID=A7LHH3; Match level="QueryCoverage=55%, HitCoverage=33%, E-value=6e-43, Identity=83%"; Hit description=WRKY32
  Pfam annotation: Domain name=WRKY; Domain location=69-128; Score =143.1; E_value=8.4e-40; Accession=PF03106.7; Description=WRKY DNA -binding domain
  Subcellular localization annotation: CTP_CleavageSite=59; ConfidenceScore=5.46e-01
SVDGGASSSSTDDGKPAAAATEAASKPAPGXTMTTTSNSNNNKSSTGQNKKRARQPRFAFMTKSDVDHLEDGYRWRKYGQKAVKNSPFPRSYYRCTNSKCAVKKRVERSSDDPSVVITTYEGQHCHHTVTFPRAALAAGHMAAFEFSTAAAAHHHLYDHRLPPLQLPTPPFXITTMT

SEQ ID NO: 67406 - protein, 143 aa, Setaria italica
  Transcript Sequence Number=SeqID_1432
  Gene Ontology: Mol. function=sequence-specific DNA binding; Cellular component=nucleus; Biological process=regulation of transcription, DNA-dependent
  Homolog annotation: Hit_ID=B2KJ56; Match level="QueryCoverage=66%, HitCoverage=88%, E-value=1e-48, Identity=92%"; Hit description=WRKY transcription factor 13 (Fragment)
  Pfam annotation: Domain name=WRKY; Domain location=64-123; Score =149.0; E_value=1.5e-41; Accession=PF03106.7; Description=WRKY DNA -binding domain
  Subcellular localization annotation: CTP_CleavageSite=32; ConfidenceScore=5.09e-01
EVESGGGGAVVVAGGCGGSSSSTSGDGDKATRAGGGKGGGRGRGRKKASRPRFAFQTRSANDILDDGYRWRKYGQKAVKNSAYPRSYYRCTHHTCNVKKQVQRLAKDTSIVVTTYEGVHNHPCEKLMEALSPILKQLQFLSQF

SEQ ID NO: 67407 - protein, 189 aa, Setaria italica
  Transcript Sequence Number=SeqID_1433
  Gene Ontology: Mol. function=sequence-specific DNA binding; Cellular component=nucleus; Biological process=regulation of transcription, DNA-dependent
  Homolog annotation: Hit_ID=Q5FZU0; Match level="QueryCoverage=88%, HitCoverage=48%, E-value=1e-37, Identity=54%"; Hit description=WRKY8
  Pfam annotation: Domain name=WRKY; Domain location=107-166; Score =141.4; E_value=2.7e-39; Accession=PF03106.7; Description=WRKY DNA -binding domain
DDDAVKQEMEVRLIRHDGPAASAPVTPNSSSVLSSSSCEAGGADEETQRRCKNMLEGEEEEQEMDAEGSAADRNCKRSKAAEKKARGEKKPREPRVAFMTKSEVDHLEDGYRWRKYGQKAVKNSSYPRSYYRCTAARCGVKKRVERSHQDPSTVVTTYEGQHTHPRPASLLVRGGAGGGAYAAPPPQLG

SEQ ID NO: 67408 - protein, 170 aa, Setaria italica
  Transcript Sequence Number=SeqID_1434
  Gene Ontology: Mol. function=protein kinase activity; Cellular component=integral to membrane; Biological process=protein amino acid phosphorylation
  Homolog annotation: Hit_ID=B9SYE5; Match level="QueryCoverage=82%, HitCoverage=21%, E-value=2e-30, Identity=51%"; Hit description=ATP binding protein, putative
  Pfam annotation: Domain name=LRR_1; Domain location=101-123; Score =15.5; E_value=0.22; Accession=PF00560.25; Description=Leucine Rich Repeat
  Pfam annotation: Domain name=LRR_1; Domain location=31-53; Score=9.8; E_value=4.1; Accession=PF00560.25; Description=Leucine Rich Repeat
  Pfam annotation: Domain name=LRR_1; Domain location=55-77; Score =10.2; E_value=3.4; Accession=PF00560.25; Description=Leucine Rich Repeat
  Pfam annotation: Domain name=LRR_1; Domain location=7-29; Score=13.2; E_value=0.89; Accession=PF00560.25; Description=Leucine Rich Repeat
  Pfam annotation: Domain name=LRR_1; Domain location=79-100; Score =11.9; E_value=1.6; Accession=PF00560.25; Description=Leucine Rich Repeat
  Pfam module annotation: Pfam domain module=LRR_1::LRR_1::LRR_1::LRR _1::LRR_1; Domain location=101-123::31-53::55-77::7-29::79-100
VLAGVTKLAVLSLRYNALSGPLPPDLASCVELRVINLQSNLLSGELPAAVLALPALTQLNLAENRFSGRIPPSIAKNGRLQVLYLDGNRLTGVLPNVSMPSLTMLNVSFNNLTGEVPKGLSGMPATFFLGMPLCGKPLPPCRVPSTPESPTRPPALAPEAPAASPDNRGR

SEQ ID NO: 67409 - protein, 50 aa, Setaria italica
  Transcript Sequence Number=SeqID_1435
  Subcellular localization annotation: CTP_CleavageSite=36; ConfidenceScore=5.33e-01
ASASAQDFTTAPSSAPAPSPIAGAASAPAASAVAVVSSALVSLLVATIMQ

SEQ ID NO: 67410 - protein, 105 aa, Setaria italica
  Transcript Sequence Number=SeqID_1436
  Subcellular localization annotation: CTP_CleavageSite=86; ConfidenceScore=5.35e-01
RVPVHTVLPCPFSHAPDATASPHVYPPLRPLLTSPASQPDPIQRRREPPSFSSSPDVPHRQVQLAPPAPPPPLGRRAAQGQQPAPPAAAAANGQGCLLRRGARRA

SEQ ID NO: 67411 - protein, 73 aa, Setaria italica
  Transcript Sequence Number=SeqID_1437
YLTSVLLPVNGIKYRSVNLLLELINLRIIDLFLSPSIKACNSVAYLDHNFLIKLEEKIHFTPLIYSLYPSHSL

SEQ ID NO: 67412 - protein, 59 aa, Setaria italica
  Transcript Sequence Number=SeqID_1438
  Homolog annotation: Hit_ID=B6SXW9; Match level="QueryCoverage=100%, HitCoverage=12%, E-value=5e-22, Identity=74%"; Hit description =Carboxyl-terminal proteinase
  Pfam annotation: Domain name=DUF239; Domain location=1-59; Score= -50.5; E_value=9.1e-05; Accession=PF03080.7; Description=Arabidopsis proteins of unknown function
TDAYQETGCYNHNCRGFVQTTSKIAIGAAITPESVYNGRQFDITLMLWKDPKHGHWWLE

SEQ ID NO: 67413 - protein, 66 aa, Setaria italica
  Transcript Sequence Number=SeqID_1439
NEAVCAVHYSCKKVYALNNPSGQRRTRFCALIRVSKMIKQEGKHQIFTWSSGARSLQPFFKTLLHS

SEQ ID NO: 67414 - protein, 84 aa, Setaria italica
  Transcript Sequence Number=SeqID_1440
  Subcellular localization annotation: CTP_CleavageSite=41; ConfidenceScore=5.23e-01
RPGGAHRYTTAAAAPVGVPQHQQQAHAQALGLGSHSASLIDAAAFSRPLLPPNSSLVTQPQLPSPRLHYVPAPSLSSNTEGRRR

SEQ ID NO: 67415 - protein, 80 aa, Setaria italica
  Transcript Sequence Number=SeqID_1441
RLPKRHMLRGRGITLDYGNQECAWMGLGLGVVGNSSWMDEAAMITQRHPTSTVRPPCAVRRVEDDESSVATQGTSEITGS

SEQ ID NO: 67416 - protein, 328 aa, Setaria italica
  Transcript Sequence Number=SeqID_1442
  Gene Ontology: Mol. function=transporter activity; Cellular component= mitochondrial inner membrane; Biological process=transport
  Homolog annotation: Hit_ID=B6TPN5; Match level="QueryCoverage=99%, HitCoverage=81%, E-value=1e-161, Identity=86%"; Hit description =Mitochondrial carrier protein CGI-69
  Pfam annotation: Domain name=Mito_carr; Domain location=1-116; Score =27.7; E_value=8.6e-06; Accession=PF00153.19; Description =Mitochondrial carrier protein
  Pfam annotation: Domain name=Mito_carr; Domain location=124-225; Score=50.3; E_value=7.2e-12; Accession=PF00153.19; Description =Mitochondrial carrier protein
  Pfam annotation: Domain name=Mito_carr; Domain location=234-326; Score=79.5; E_value=1.2e-20; Accession=PF00153.19; Description =Mitochondrial carrier protein
  Pfam module annotation: Pfam domain module=Mito_carr::Mito_carr::Mito_ carr; Domain location=1-116::124-225::234-326
PHRNPLDVAKTRLQAQARGACITTLPRMAALGPDAILSEFKCSPSCTRGLILGEPVCPPDCFQYKGTLDVFLKVVRQEGFGRLWRGTNAGLALAVPTVGIYLPCYDIFRNKIEDFTRSNAPGLTPYAPLVAGSVARSLACIACSPIELARTRMQAYKEFRPGVKPPGMYKTLVGVLSPLASSSQNVQNYRALWTGVGAQLARDVPFSGICWSTLEPIRRKLLGLVGEEGNAASVLGANFAAGFVAGSFAAGATCPLDVAKTRRQIEKDTEKAMRMTTRQTLTEIWRSGGVKGLFTGVGPRVARAGPSVGIVVSFYEVVKYALHQSHTS

SEQ ID NO: 67417 - protein, 357 aa, Setaria italica
  Transcript Sequence Number=SeqID_1443
  Gene Ontology: Mol. function=hydrolase activity; Cellular component =chloroplast
  Homolog annotation: Hit_ID=C3TX72; Match level="QueryCoverage=79%, HitCoverage=75%, E-value=7e-87, Identity=60%"; Hit description=Zn -dependent hydrolases of the beta-lactamase fold
  Subcellular localization annotation: CTP_CleavageSite=46; ConfidenceScore=5.73e-01
MMAMAGRLQVLSSPTAAPVAASSPCHHHRRLAWSRRPDPTRSSSIVAASSSSSSSSSTISKGNKVVTLKLTYLEINSWVWEVQQQGQGQSSPMRILVDPLVVGNLDFGAPWLFDGAKKNPKVKALGVDDLLALEPGLLLITQSLDDHCHVRTLTQLSARAPELPVVTTPNAQPVLASLPTPFRRVTYLEPGQSTAFNAQLRVVATAGPVLGPPWQRPENGYVLIAGADDGGHGLLYYEPHCVYDDSSFFLPDKRRRLQADVVITPVVKQLLPANFTLVSGQEDAVRLASLLRARYVVPMSNGDVDAGGLLAAVISKQGTTQSFEAKLSAALPGQVQVLQPTPGVPLQLELDIIPQNQ

SEQ ID NO: 67418 - protein, 175 aa, Setaria italica
  Transcript Sequence Number=SeqID_1444
  Gene Ontology: Mol. function=oxidoreductase activity; Biological process=oxidation reduction
  Homolog annotation: Hit_ID=B6SGV6; Match level="QueryCoverage=67%, HitCoverage=35%, E-value=7e-46, Identity=78%"; Hit description =Gibberellin 2-beta-dioxygenase
  Pfam annotation: Domain name=2OG-FeII_Oxy; Domain location=68-161; Score=54.1; E_value=5.5e-13; Accession=PF03171.12; Description=2OG -Fe(II) oxygenase superfamily
AAAAPVASPGAPPPSAPAEASPCCFRDLLDEYVAAVRRMTCTVLELMAEGLGLEDRGVFTRLVLDGDSDSMLRVNHYPPKQQQQQGSRLTGFGEHTDPQIISVLRSNATAGLEIELRDGTWVAVPSDTDSFFVNVGDALQVPCLILLLLHALISIFFFFFFMKLAIRCRVLQLGY

SEQ ID NO: 67419 - protein, 219 aa, Setaria italica
  Transcript Sequence Number=SeqID_1445
  Gene Ontology: Mol. function=oxidoreductase activity; Biological process=oxidation reduction
  Homolog annotation: Hit_ID=B6SGV6; Match level="QueryCoverage=90%, HitCoverage=58%, E-value=7e-82, Identity=84%"; Hit description =Gibberellin 2-beta-dioxygenase
  Pfam annotation: Domain name=2OG-FeII_Oxy; Domain location=55-158; Score=122.2; E_value=1.6e-33; Accession=PF03171.12; Description=2OG -Fe(II) oxygenase superfamily
RTPTPDCCFSLISDLLDEYVAAVRRMTCTVLELMAEGLGLEDRGVFTRLVLDGDSDSMLRVNHYPPKQQQQQGSRLTGFGEHTDPQIISVLRSNATAGLEIELRDGTWVAVPSDTDSFFVNVGDALQVLTNGRFRSVRHRVMVSSARPRVSVIFFGGPPPRERLAPLPGLVDREGGRRRYREFTWREYKTSAYRTKLADNRLGYFETATAAAAAAAATS

SEQ ID NO: 67420 - protein, 95 aa, Setaria italica
  Transcript Sequence Number=SeqID_1446
  Subcellular localization annotation: CTP_CleavageSite=60; ConfidenceScore=5.53e-01
GRKPPAPLGGSEPSSLTPPGTHRLSPPVRRCILSPTRTLAGRPPQPHPHPRRPSWVLLGRGEKAQYIRFSFSNGDGDGGLAVRVPIDRFQRRGEE

SEQ ID NO: 67421 - protein, 145 aa, Setaria italica
  misc_feature (1)..(8): Xaa can be any naturally occurring amino acid
  Transcript Sequence Number=SeqID_1447
XXXXXXXXKRKRKLNKMTVIDGISSMLIKTEGTEVQAQHTHQGTTTPRALYTETHTLDLKTCTLRPCGICISHARPPGSQAHVRAHYYKHTRIHPCKYAEIDADTPRALAMQHAHDSRDAAGTATAASTEAAASTEAAASSEPAE

SEQ ID NO: 67422 - protein, 626 aa, Setaria italica
  Transcript Sequence Number=SeqID_1448
  Gene Ontology: Cellular component=plasma membrane
  Homolog annotation: Hit_ID=B6T972; Match level="QueryCoverage=99%, HitCoverage=97%, E-value=0.0, Identity=91%"; Hit description=Ankyrin protein kinase-like
  Pfam annotation: Domain name=DUF248; Domain location=104-614; Score =1237.8; E_value=0; Accession=PF03141.8; Description=Putative methyltransferase
  Pfam annotation: Domain name=Methyltransf_11; Domain location=221 -316; Score=23.6; E_value=0.00058; Accession=PF08241.4; Description =Methyltransferase domain
  Pfam module annotation: Pfam domain module=DUF248::Methyltransf_11; Domain location=104-614::221-316
NPQESKKQRLTYILVVSALCIAFYVLGAWQNTTLPKPVGNSAAITRVGCDPATSTASSSASVPSFGPGSGEVLDFDAHHRLAINDTDAGAGLQQFPACPLNFSEYTPCEDRTRGRRFDRTMLVYRERHCPGKDEQVRCLIPAPPGYRTPFKWPKSRDYAYFNNIPHKELSIEKAVQNWIQVEGDKFRFPGGGTMFPRGADAYIDDINKLISLSDGQIRTAVDTGCGVASWGAYLLKRNIIAMSFAPRDTHEAQVQFALERGVPAIIGVMGKHRLPYPSRAFDMAHCSRCLIPWYAHDGLYLAEVDRILRPGGYWILSGPPINWKTHHKGWERTKDDLKQEQDKIEDVARSLCWNKVVEKGDLSIWQKPKNHLECANIKKTYKTPHICKSDNPDAAWYRQMEACVTPLPEVSNQGEVAGGAVERWPERAFIVPPRIRRGMIPGLDAKKFDEDKKLWEKRIAYYKRTIPIAENRYRNVMDMNANMGGFAASLVKYPVWVMNVVPVNSDRDTLGAIYERGFIGTYQDWCEAFSTYPRTYDLLHADNLFSIYQDRCDITDILLEMDRILRPEGTAIIRDTVDVLTKVQAITKRMRWESRIMDHEDGPFNPEKVLMAVKTYWTAKAPEDQN

SEQ ID NO: 67423 - protein, 345 aa, Setaria italica
  misc_feature (14)..(14): Xaa can be any naturally occurring amino acid
  misc_feature (324)..(324): Xaa can be any naturally occurring amino acid
  Transcript Sequence Number=SeqID_1449
  Gene Ontology: Cellular component=membrane
  Homolog annotation: Hit_ID=Q9LPG3; Match level="QueryCoverage=54%, HitCoverage=21%, E-value=1e-62, Identity=62%"; Hit description =T3F20.21 protein
  Subcellular localization annotation: CTP_CleavageSite=70; ConfidenceScore=5.23e-01
EVVRCTSSSTAAGXGPLLRAKTRSRLMDPPPQPQPPPASAQAPAATPVIDEERRSSGLRTPTKSGQLFSRLMSGKKSGPMGKSGPIEEEEDDPFADEDIPDDFKRGKLDALTVLQWLGLFLVIAALVCSLTIKILSEKKVVGLHLWKWELLVFVLICGRLVSGWVIRIAVFGVERNFLLRKRVLYFVYGVRSAVQNALWLGLVLASWHFLFDKNVQQETNSPVLPYVTKVLFCFLVATLIRLVKTLLLKVLASSFHVSTYFDRIQEALFNQYVIETLSGPPLVDENHVLQEVHELQRAGATIPKELRDAVPTKNVSLRSNIQLXGVMPKGEGSKQLSKEKGEGNR

SEQ ID NO: 67424 - protein, 375 aa, Setaria italica
  Transcript Sequence Number=SeqID_1450
  Gene Ontology: Mol. function=protein serine/threonine kinase activity; Biological process=protein amino acid phosphorylation
  Homolog annotation: Hit_ID=Q10D24; Match level="QueryCoverage=100%, HitCoverage=49%, E-value=0.0, Identity=84%"; Hit description=Protein kinase domain containing protein, expressed
  Pfam annotation: Domain name=Pkinase; Domain location=51-365; Score =84.8; E_value=3.1e-22; Accession=PF00069.17; Description=Protein kinase domain
  Pfam annotation: Domain name=Pkinase_Tyr; Domain location=45-365; Score=-27.4; E_value=6.7e-12; Accession=PF07714.9; Description =Protein tyrosine kinase
  Pfam module annotation: Pfam domain module=Pkinase::Pkinase_Tyr; Domain location=51-365::45-365
VDACYPTNIKEETDPEYFCRYVPLSRLQIALDDEGYTPRCSFPSVSSCKEIEVTASSTVYHCKIGAVDAAAKIRYLDTRNASNDEVKLFEYKLLGEVRMLGALRKHRSIVGIYGHQLSSKWVQVDGDKEYRILQSIILMEYVNGGSLKGYLTKLLKEGKKCVPIDLAFYIAREVSCALLEMHKKLIIHRDIKSENVLVDLDSKRNAGTPIVKLSDFDRSVPLHSLSHTCCISHLGTHPPNVCVGTPCWMAPEVLKAMHEKHHYGLEVDIWSFGCFLLEMLTLRIPYHGLPDSEIYDLIMRKKQRPRLSQELEAFWTMDEPVTRLKLGITSDAHADKLRHLIDLFYQCTRGNASKRPKAEQIYNSLCSLPTCYDMR

SEQ ID NO: 67425 - protein, 154 aa, Setaria italica
  Transcript Sequence Number=SeqID_1451
  Gene Ontology: Mol. function=heat shock protein binding; Biological process=protein folding
  Homolog annotation: Hit_ID=Q9LR08; Match level="QueryCoverage=66%, HitCoverage=52%, E-value=3e-31, Identity=64%"; Hit description =F10A5.12
  Subcellular localization annotation: CTP_CleavageSite=52; ConfidenceScore=5.68e-01
GQPTSSSPLTTLHSSFLSPTPPPSPCSVAALPRRRRRCARIRAIDLDQNTIVAISVGVVSIAVGIGVPVFYETQIDNASKRENTQPCFPCSGSGAQVCRFCTGKGIVTVVLGAGETEESKCVNCDGIGSLTCTTCQGSGIQPRYLDRREFKDDD

SEQ ID NO: 67426 - protein, 69 aa, Setaria italica
  Transcript Sequence Number=SeqID_1452
MGCFNSKPNDAGAIRRRPGNIGEVAVFIPGLRVPESLELSQPLSDGLPRRLTERLSALRSRIVVMAAHE

SEQ ID NO: 67427 - protein, 201 aa, Setaria italica
  Transcript Sequence Number=SeqID_1453
LPVDLSEGVLKAICMQALGQAIDVQLGLAIDSPKATLAVKRRLACEMVKCWQQAHESMADLPLIDSWGEKHRLFVKWKYIEAKAAAYYYHGLILDEGNTEKSHRMAVAALQSAEELLKESKDVAEAFHAAPPVSRSPPVCGSMKYLHDKIQKDSSCKVRINKDLYSNDSIHEAVPALPDFAVALKPEEYRLPAVTVDAANG

SEQ ID NO: 67428 - protein, 327 aa, Setaria italica
  Transcript Sequence Number=SeqID_1454
MGCFNSKPNDAGAIRRRPGNIGEVAVFIPGLRVPESLELSQPLSDGLPRRLTERLSALRSRIVVMAAHEALSVTRPRKRTFTQHGGSTSADLLQALEEYLPVLLGLVKEGSNLEDKIQFSWMNQEDDAEETALPSSWYEVLSVLHMMAMLRLSQANSLLLPKTSLEGYHAKVSEDNKRASVEIFLKASGFLECAIQHVLPRISPENRKGLPVDLSEGVLKAICMQALGQAIDVQLGLAIDSPKATLAVKRRLACEMVKCWQQAHESMADLPLIDSWGEKHRLFVKWKYIEAKAAANTEKSHRMAVAALQSAEELLKESKDVAEVLSY

SEQ ID NO: 67429 - protein, 57 aa, Setaria italica
  misc_feature (35)..(35): Xaa can be any naturally occurring amino acid
  Transcript Sequence Number=SeqID_1455
MGGSPSRSSPRDGSGHGRYGHSRSFPQPVGGAAAXGGYYGQDRNAGYYGAPAPQQGG

SEQ ID NO: 67430 - protein, 94 aa, Setaria italica
  Transcript Sequence Number=SeqID_1456
GCLVLTIAATVPMPFVSPVHAAEEMSVSLRRALMKTGKLISCLARSPVTNVPCKDPAYLGAISCSNNQGQHIQSDRSYKYDGNDTPEREHCSRS

SEQ ID NO: 67431 - protein, 142 aa, Setaria italica
  Transcript Sequence Number=SeqID_1457
QNHERAQSATTSIEKPAGRAQCTCFMQWHSFLIYSSSFTWAGYQHCDRFRFALLTVAGQANQQLNHGTYTSSECCPLSDRWSRLRNTGSIVACYSRTLRLEGGMSMLHTLQIQWCLHLDKPGYRPAERKHLFLTRQYCHKPT

SEQ ID NO: 67432 - protein, 272 aa, Setaria italica
  misc_feature (262)..(262): Xaa can be any naturally occurring amino acid
  Transcript Sequence Number=SeqID_1458
  Gene Ontology: Mol. function=nucleotide binding; Cellular component =mitochondrion
  Homolog annotation: Hit_ID=B6U6Q3; Match level="QueryCoverage=98%, HitCoverage=43%, E-value=1e-148, Identity=93%"; Hit description =ATPase
  Pfam annotation: Domain name=AFG1_ATPase; Domain location=9-271; Score=-155.7; E_value=0.00023; Accession=PF03969.8; Description=AFG1- like ATPase
  Pfam annotation: Domain name=NACHT; Domain location=56-247; Score= -36.5; E_value=0.053; Accession=PF05729.4; Description=NACHT domain
  Pfam module annotation: Pfam domain module=AFG1_ATPase::NACHT; Domain location=9-271::56-247
DGVWIDEERGFLDKLVTRRRRGSIEPGVGKWVSYLNREKKLDKLVGQRPIAPVAPKGLYLYGNVGSGKTMLMDMFYGATEGVIKHRRRFHFHEAMLEIHDHMHDVWKRRDDDKSVQTSAFSWISSLPFDAKIKEWLIGEEKYKQGTQQKHILLAVADKFLVDRQANKTGASILCFDEIQTIDVFAVVALSGILSRLLSTGTVLVATSNKAPEDLNQDGMQRDIFLELLSKLDENCNKILVGTEKDYRRLIPTEGSTQVHYFXWPVTSDTCRI

SEQ ID NO: 67433 - protein, 283 aa, Setaria italica
  misc_feature (23)..(23): Xaa can be any naturally occurring amino acid
  Transcript Sequence Number=SeqID_1459
  Gene Ontology: Mol. function=nucleotide binding; Biological process =embryonic development ending in birth or egg hatching
  Homolog annotation: Hit_ID=B6U6Q3; Match level="QueryCoverage=95%, HitCoverage=43%, E-value=1e-139, Identity=87%"; Hit description =ATPase
  Pfam annotation: Domain name=AFG1_ATPase; Domain location=9-254; Score=-155.8; E_value=0.00023; Accession=PF03969.8; Description=AFG1- like ATPase
KKKNKLKKITRNRELQRDIFLEXQSTLDENCNKILVGTEKDYRRLIPTEGSTQVHYFWPVTSDTCRMYEAMWHDITNQTGGNIISVTIPVMFGRSIEIPQSCNGVARFDFEYLCGRPVGAADYIAIARNYHTIFISEIPAMSMKIRDKARRFITLIDELYNHHCRLVCLAASSIDDLFQGTEEGPLFDLESFQFETEAEGTKLRRDVLAEGNVGMRPSTSGLVAILSGQEEMFAFRRAISRLIEMQTPLYLERVQHAHPSFQPQGPAVASNNRARVSQSAPSV

SEQ ID NO: 67434 - protein, 103 aa, Setaria italica
  Transcript Sequence Number=SeqID_1460
  Gene Ontology: Mol. function=protein binding; Cellular component =signal recognition particle, endoplasmic reticulum targeting; Biological process=SRP-dependent cotranslational protein targeting to membrane
  Homolog annotation: Hit_ID=O04438; Match level="QueryCoverage=88%, HitCoverage=88%, E-value=2e-45, Identity=94%"; Hit description =Signal recognition particle 9 kDa protein
  Pfam annotation: Domain name=SRP9; Domain location=2-76; Score=184.8; E_value=2.5e-52; Accession=PF05486.4; Description=Signal recognition particle 9 kDa protein (SRP9)
MVYVDSWDEFVERSVQLFRADPSATRYVVKYRHCEGKLVLKVTDDRECLKFKTDQAQDAKKMEKLNNIFFALMTRGPDADISEVSGKEQAEQQQSKKGRGRRQ

SEQ ID NO: 67435 - protein, 112 aa, Setaria italica
  misc_feature (38)..(38): Xaa can be any naturally occurring amino acid
  Transcript Sequence Number=SeqID_1461
  Gene Ontology: Mol. function=translation elongation factor activity
  Homolog annotation: Hit_ID=B9RPP6; Match level="QueryCoverage=99%, HitCoverage=10%, E-value=1e-28, Identity=52%"; Hit description =Translation elongation factor, putative
PMFVEFVLSALWKMYELVLNDGGESKRVKKLVENFQLXIPERELKNKDPKVVLQSIMSQWLPLSDAVMDMVVECTPDPVAAQGFRVTRLMPKREVTPEDAAGCPEVVAEAER

SEQ ID NO: 67436 - protein, 128 aa, Setaria italica
  Transcript Sequence Number=SeqID_1462
  Subcellular localization annotation: CTP_CleavageSite=69; ConfidenceScore=5.36e-01
PVGLHRTPTNPHLDLHHLQSTASASSPPTPSSIPPSRLPGRSEVRCNSPPIEPPSPHRRPPYKGWRCPVADAQDGQSSSSRTHPSPSNSVLPELRPSSSACYCNNSPTSRPLCGRSSSPAPSAPPPSP

SEQ ID NO: 67437 - protein, 70 aa, Setaria italica
  Transcript Sequence Number=SeqID_1463
  Gene Ontology: Mol. function=hydrolase activity, acting on ester bonds
  Homolog annotation: Hit_ID=Q7F2F1; Match level="QueryCoverage=91%, HitCoverage=10%, E-value=7e-14, Identity=52%"; Hit description =P0402A09.15 protein
MSDWGPVVIAVVLFVLLSPGLLFQLPGRCHFVDFGNLQTSAVSILVHSIIYFALIAIFVIVIGVHITTAD

SEQ ID NO: 67438 - protein, 67 aa, Setaria italica
  Transcript Sequence Number=SeqID_1464
LRFQKYIHAGFIITYIKKTRPRGGDPLGFVLRKVPYFEPWSKQEFNALTGPPREAWLITCMTVGFYC

SEQ ID NO: 67439 - protein, 137 aa, Setaria italica
  Transcript Sequence Number=SeqID_1465
  Gene Ontology: Mol. function=protein dimerization activity; Cellular component=nucleus; Biological process=regulation of transcription, DNA-dependent
  Homolog annotation: Hit_ID=Q39237; Match level="QueryCoverage=70%, HitCoverage=26%, E-value=1e-15, Identity=41%"; Hit description =Transcription factor TGA1
ASRYSYESFRRASILLELRRDGPSLTAAAIAGTPPLQGHGAAGAGFLAPPVDPRVTAFELEYARWAEEQKRQAAELRAVLQSGAPELQLRLLVDAAVAHYDALFDARSRAARADAVFVLSGVWRAPAERFFLWSRAG

SEQ ID NO: 67440 - protein, 56 aa, Setaria italica
  misc_feature (3)..(3): Xaa can be any naturally occurring amino acid
  Transcript Sequence Number=SeqID_1466
SRXGRAGGGAIGPAEHEFGAGARRWQDCPGESAGIKRMRTRAQAASAARVFVGRLR

SEQ ID NO: 67441 - protein, 208 aa, Setaria italica
  Transcript Sequence Number=SeqID_1467
HGRVGRGGHERRARFLFACDAPTGGHALVETEEESGGFGAVHGRGGVGCGHPRTGAGRVGGRRQKVPYGRWERARDGGMCLGQDSGVWTRPGGGYTRRRSGAGTPDAGRGLFFGCQATPSHDAMIPSRRRNTVCLKTPRPIRENHSLELGWGSLCYDEAAVPVRVLPHVRPNDTATMSGRILCPAEVRLPTPSSCTPARAQPQRGRRW

SEQ ID NO: 67442 - protein, 87 aa, Setaria italica
  misc_feature (28)..(28): Xaa can be any naturally occurring amino acid
  Transcript Sequence Number=SeqID_1468
  Gene Ontology: Mol. function=ATPase activity, coupled to transmembrane movement of substances; Cellular component=integral to membrane; Biological process=transport
  Homolog annotation: Hit_ID=B9R9H4; Match level="QueryCoverage=100%, HitCoverage=12%, E-value=2e-35, Identity=83%"; Hit description =ATNAP8, putative
NAPILILDEATSALDATSERLVQEALNXLMKGRTSLVIAHRLSTVQNAHRIAVCSEGKITELGTHAELVAKGGSYASLVGTQRLAFE

SEQ ID NO: 67443 - protein, 81 aa, Setaria italica
  Transcript Sequence Number=SeqID_1469
HVNPKAWCATAVKHDGISLCAVGSLWLQHMVFEARNICFTDRDVKFVGTIPVIIQQLNEERNYSGSFLYPLSCYVFTMTGV

SEQ ID NO: 67444 - protein, 192 aa, Setaria italica
  Transcript Sequence Number=SeqID_1470
  Gene Ontology: Mol. function=protein serine/threonine kinase activity; Biological process=protein amino acid phosphorylation
  Homolog annotation: Hit_ID=Q4U400; Match level="QueryCoverage=100%, HitCoverage=24%, E-value=2e-35, Identity=46%"; Hit description=Wall -associated kinase-like 1
  Subcellular localization annotation: CTP_CleavageSite=41; ConfidenceScore=5.30e-01
STVRAMDTAGAVNISNFVGPGPEGNGTWRGLGSASNSPFILSERRNQFVVTGCNVQGTLLGDSGNIITGCSSFCSIRDTWINPVVSSPASGGGCSGIGCCETPIPIGRPSYAVKLKALDPNHENDGMLPMAVRVAEQGWFDGVAAQMLNGSVASSSVLQTAVPVMLEWAVASIMIVPPHANGIGNSSCPVDA

SEQ ID NO: 67445 - protein, 77 aa, Setaria italica
  Transcript Sequence Number=SeqID_1471
CGEYGAGCCASLYVDSLFLLSCAVFHPYGKFSEWIEKPHINSRNIQRHILHIKTCIQGMYRQGGLQLAPKATMYNIM

SEQ ID NO: 67446 - protein, 631 aa, Setaria italica
  Transcript Sequence Number=SeqID_1472
  Gene Ontology: Cellular component=chloroplast
  Homolog annotation: Hit_ID=B9T3E6; Match level="QueryCoverage=87%, HitCoverage=82%, E-value=1e-116, Identity=42%"; Hit description =EXECUTER1 protein, chloroplast, putative
SGGERRRRGWDAMLHDAFQGAVRRWSEYVRNYWPPPPAVKEAGKGKRAGSSHEGEAMSGDEEEEGKWSWEMWKRHFALIEESERLVDELQLQLRAAVCREDYRSAHKLKLAIAATAKNDTVGRAISDLNRAIEEERYRDATYIRDHAGAGLLGWWSGISGNLSDPYGLIIRISAEHGRYVARSYETRQLASDGPGFPIFEIFFAEEDGGYKLQAVHLKPDDSGSDQLPNMLREKLGIDSINISSSSVGSKHEEFDGNINMDDQDTDDSNITAGGPAGLKNLSSDSTAVPRIKILKVVPMENVNQDYIINIFDQISEEDDDHDDPEIENESSHDIGDEDNNVGAETVSAEENGDESSDENDIEALISIDFVSEDNNDYASHSSAEAFERMPARLEKTDRFSFSFYTEQYSKKLDAGKAQETLKKTVGSHTDQQDDDGFVQLDRIKLSGSNKKLSILQLGIKQHDNKAQQKLHGVTHFSRIQTPISSDPLNGLYLTASGFDSEILSLQRKFGQWREDNSSEEHSDLLFYEYVEAVKLTGDNLVPAGQVVFRAKVGERYQLPHKGIIPRELGVVARYKGQRKIADPGFQNPRWVDGELLILDGKFIRDGPVIAFFYWTSNFHLFEFFRRLRLPD

SEQ ID NO: 67447 - protein, 256 aa, Setaria italica
  Transcript Sequence Number=SeqID_1473
  Gene Ontology: Mol. function=nucleic acid binding
  Homolog annotation: Hit_ID=B6SZV0; Match level="QueryCoverage=90%, HitCoverage=87%, E-value=4e-82, Identity=63%"; Hit description =Nucleic acid binding protein
  Pfam annotation: Domain name=RRM_1; Domain location=155-228; Score =34.5; E_value=4.2e-07; Accession=PF00076.14; Description=RNA recognition motif. (a.k.a. RRM, RBD, o
MADRYRGYAAPYAHDRDPRGGYPEYFPSDGSIASYYASRPSVLPGGPDVLRNNVVLQPRAYALDGPGGVINPTLPGMNGLPAAARAHGPSPLEDPSFAGMSGLAPARALGPSLLEEPAIVGRSSSLGKGAGIPNVEHHSPLPNLDGPSEDESNILFVDGLPTDCTRREVAHLFRLFDGFKDIRVVHKEPRHSGDKAYVLCFVEFDDAKRARTAMEKLRAYRFDDRKPDSPLLEIQFARFPFRLPAAHDDRERLIGR

SEQ ID NO: 67448 - protein, 334 aa, Setaria italica
  Transcript Sequence Number=SeqID_1474
  Subcellular localization annotation: CTP_CleavageSite=36; ConfidenceScore=5.24e-01
MADKPSRALVLYAAGHAALLTPPAGSAAAGSSLDALASRASCGFLTLRSPPASPPTTGTEEKSSTILELAQLLDVYDHLYPGKNAETDQEIAQVDRQELAVPKLSERFTGLRAAMVTNCPRVSSFAANLGFHVFQTNDFAALSGSSSVTKEVGVVNRAFGLLGFSDGNVQEASEFDLVFMHVAMENTSSKLGKLGMKTDLNRLEKLVAAVMEAAPIGSAISSRIHVSVILSYGSSSGNKDGFSISTSLPEADSDLNLLRPHQSYTMKAGHTLDDVRLHHPILLAQWQEGVTRVDLAKGFSFEEFMKHGGNLAMLAERFLHEVAFKLWKAPKYGA

SEQ ID NO: 67449 - protein, 49 aa, Setaria italica
  Transcript Sequence Number=SeqID_1475
EHLPIHSVPLATPLLMSSFIFPNPIPESIWRVNMLTRKINMLGHLLLQF

SEQ ID NO: 67450 - protein, 57 aa, Setaria italica
  Transcript Sequence Number=SeqID_1476
  Subcellular localization annotation: CTP_CleavageSite=19; ConfidenceScore=5.71e-01
MVTAAAAAAVSSPAAPVAGAAAATSRRGFVTFGGGAARSSPALRSGRGLSGVRTHVA

SEQ ID NO: 67451 - protein, 63 aa, Setaria italica
  Transcript Sequence Number=SeqID_1477
SKPLHFLAKHAYKLCNILGTNTCQKGTMRIWSSVSAAAKATISYFELVTDRNEILWSRWYIMI

SEQ ID NO: 67452 - protein, 349 aa, Setaria italica
  misc_feature (337)..(337): Xaa can be any naturally occurring amino acid
  misc_feature (341)..(341): Xaa can be any naturally occurring amino acid
  Transcript Sequence Number=SeqID_1478
  Gene Ontology: Mol. function=kinase activity
  Homolog annotation: Hit_ID=B6SHI8; Match level="QueryCoverage=100%, HitCoverage=56%, E-value=1e-132, Identity=72%"; Hit description=CENP- E like kinetochore protein
  Pfam annotation: Domain name=Cenp-F_leu_zip; Domain location=215-347; Score=-4.8; E_value=0.018; Accession=PF10473.1; Description=Leucine -rich repeats of kinetochore p
  Pfam annotation: Domain name=M; Domain location=139-159; Score=7.7; E_ value=14; Accession=PF02370.8; Description=M protein repeat
  Pfam annotation: Domain name=M; Domain location=266-286; Score=0.1; E_ value=1.4e+02; Accession=PF02370.8; Description=M protein repeat
  Pfam annotation: Domain name=M; Domain location=63-83; Score=4.4; E _value=38; Accession=PF02370.8; Description=M protein repeat
  Pfam annotation: Domain name=M; Domain location=94-114; Score=5.0; E _value=32; Accession=PF02370.8; Description=M protein repeat
  Pfam module annotation: Pfam domain module=Cenp-F_leu_zip::M::M::M::M; Domain location=215-347::139-159::266-286::63-83::94-114
MASAAKQFEVELAHRDLEIDKCKRELGVVSEKCLHDKSTLEDEHRRLQGVIKNMEGDLAKMSQEKLQLESRIEELEQAAHSLERSASEIVKLQEVIRNTQAELEKVTEEKEVLKERANEFEQLCRALKISGTEVAMLPETIKNLEAQLERALEENSILQDRIKELEQVMSDSLEKHSREQSCLTSDLLKLSEANTSLEDKLSSVAAELMQVYADKEEESLNSENQISVLNQDIADFRSKLELLSSEKAKVDDKLANLLAHITTRDEKMKQMDAHLNQLQSEHAKLMAESDSARKSLSEVRARVSELEEEVEKQKLVISESAEGKREAIRQLCFSIEXYRSXYQQLRQLL

SEQ ID NO: 67453 - protein, 48 aa, Setaria italica
  Transcript Sequence Number=SeqID_1479
  Gene Ontology: Mol. function=metal ion binding
  Homolog annotation: Hit_ID=B6STH0; Match level="QueryCoverage=89%, HitCoverage=17%, E-value=2e-14, Identity=79%"; Hit description=RNA -binding protein
MVVCSMRKSFKDSLKVLEADIQHANTLAADFSRDYDGACLQMRMSYTP

SEQ ID NO: 67454 - protein, 509 aa, Setaria italica
  Transcript Sequence Number=SeqID_1480
  Gene Ontology: Mol. function=ubiquitin-protein ligase activity; Cellular component=ubiquitin ligase complex; Biological process =ubiquitin-dependent protein catabolic process
  Homolog annotation: Hit_ID=Q84VE7; Match level="QueryCoverage=96%, HitCoverage=72%, E-value=1e-167, Identity=63%"; Hit description=Arm repeat protein
  Pfam annotation: Domain name=Arm; Domain location=332-372; Score =34.1; E_value=5.5e-07; Accession=PF00514.15; Description =Armadillobeta-catenin-like repeat
  Pfam annotation: Domain name=Arm; Domain location=373-415; Score=4.3; E_value=3.4; Accession=PF00514.15; Description=Armadillobeta-catenin -like repeat
  Pfam annotation: Domain name=Arm; Domain location=417-457; Score=9.6; E_value=0.74; Accession=PF00514.15; Description=Armadillobeta-catenin- like repeat
  Pfam annotation: Domain name=U-box; Domain location=204-273; Score =85.4; E_value=2e-22; Accession=PF04564.7; Description=U-box domain
  Pfam module annotation: Pfam domain module=Arm::Arm::Arm::U-box; Domain location=332-372::373-415::417-457::204-273
GAAAGPLLLLPRSASLCLREVLLVLQRFKALVADCAARSRMRLLLQSDEVASRARELQQDLATLLDLLPVADLGLADDVADLLALASRQCRRVAAAELELKAGVLALIQEVEREIVPERERLEGILEEVGINDPASCSDEIETLEREIGERVAERWTSSMIALVGLLRYAKCVLFSAATPRPVDFKVDLDDDDGAEPPSPPLDFRCPVSLELMSDPVVASSGQTYDRDSIARWFGSGKSTCPKTGQVLTNLELVPNKALKNLIARWCRENGIAVEVSEAGKADPAPVVAANKAALKAARMTASFLVKKLSASFSPESTKRVVHEIRQLAKSGSDNRAFIGEAGAAALLVPLLRSEDSALQLHAVTALLNLSILEANKKRIMHAEGAVDALCHVMCSGASWRAKENAAATVLSLATIHTYRRRLGRNPRVVDSVVQLARTGPSSTKKDALAALLSLSGERENIGRLVEAGAAEAAVAAIGEAEAAAAVLASLAKRGGAEAIVGIDGAVAR

SEQ ID NO: 67455 - protein, 112 aa, Setaria italica
  Transcript Sequence Number=SeqID_1481
  Gene Ontology: Mol. function=catalytic activity; Cellular component =peroxisome; Biological process=metabolic process
  Homolog annotation: Hit_ID=B6ST13; Match level="QueryCoverage=100%, HitCoverage=18%, E-value=2e-35, Identity=71%"; Hit description=AMP binding protein
EAALFAHPAVAEAAVVGRPDEYWGETPCAFVTLKDGAAAAGVGAEEVMAFCRARLPRYMAPRTVVFVAELPKTATGKVQKFTLREQAKAMGSIPRSSSSSKKGGGSGTRSKL

SEQ ID NO: 67456 - protein, 111 aa, Setaria italica
  misc_feature (4)..(4): Xaa can be any naturally occurring amino acid
  misc_feature (9)..(9): Xaa can be any naturally occurring amino acid
  Transcript Sequence Number=SeqID_1482
FFFXFFFFXFFFFFFVKRNKVQAYDLPWNLATAYVPMPERFLPHRNHPYAHSTGGHTHETTTTVVHDFQITMAAGDNLVIASTVSITSHRTGSPGKSHHREQRGPWSKDGP

SEQ ID NO: 67457 - protein, 102 aa, Setaria italica
  Transcript Sequence Number=SeqID_1483
  Homolog annotation: Hit_ID=B4G213; Match level="QueryCoverage=51%, HitCoverage=50%, E-value=2e-20, Identity=92%"; Hit description =NAP16kDa protein
MSRGGSAGGGSSQLGYLFGNDEAPKPAVAPAAPAACAPPAGKPAPPKPDVTKQVAAGVTSQTNNYHRADGQNTGNFLTDRPSTKVHAAPGGGSSLDYLFGGK

SEQ ID NO: 67458 - protein, 105 aa, Setaria italica
  misc_feature (34)..(34): Xaa can be any naturally occurring amino acid
  Transcript Sequence Number=SeqID_1484
MMFAGPSFDQGPRCSRWWLFPGLPVRWEVMLTVXRSPSYPPPPSLSEPSYPPPPSLSENREQPLLSFHVCAPPCCVRTDGFYAAKTFPAWAYDLPWNLATALRCH

SEQ ID NO: 67459 - protein, 102 aa, Setaria italica; identical to SEQ ID NO: 67457
  Transcript Sequence Number=SeqID_1485
  Homolog annotation: Hit_ID=B4G213; Match level="QueryCoverage=51%, HitCoverage=50%, E-value=2e-20, Identity=92%"; Hit description =NAP16kDa protein

SEQ ID NO: 67460 - protein, 40 aa, Setaria italica
  Transcript Sequence Number=SeqID_1486
LNNYFALPLRRHEYDLPSYVEFLVSSAINFTKVIAIVLVF

SEQ ID NO: 67461 - protein, 376 aa, Setaria italica
  Transcript Sequence Number=SeqID_1487
  Gene Ontology: Mol. function=hydrolase activity, acting on ester bonds; Biological process=lipid metabolic process
  Homolog annotation: Hit_ID=B6TRC2; Match level="QueryCoverage=86%, HitCoverage=84%, E-value=1e-148, Identity=77%"; Hit description =Anther-specific proline-rich protein APG
  Pfam annotation: Domain name=Lipase_GDSL; Domain location=55-367; Score=148.7; E_value=1.8e-41; Accession=PF00657.14; Description=GDSL- like LipaseAcylhydrolase
MASLTTCLGGHGSWRRFARPLLLHLVVVVAAAAVFQPGVVVHGASSAGDQKISSIFIFGDSIVDPGNNNNRFTEAKANFPPYGQDFPGGVATGRFSNGLVPGDLLASKLGIKELLPPFLSDDLDLQDLLTGVAFACGGSGYDPLTSKLATTLSSTDQLELFREYKEKLRGLVGEEEMARVISEGVFLTVMGANDILNNYFALPLRRHEYDLPSYVEFLVSSAINFTKTLNNMGAKRIGFVGVPPLGCCPSQITLGGSPSRQCEPLRNQASRLFNSRISQEIEILNAERSVSGSKIAYFDIYYNLLDLIQNPALYGFKDVSEGCCGSTVLNAAIFIAYHSACPNVIDYIFWDGFHPTEKAYNIVVDKLIQQNMKYLM

SEQ ID NO: 67462 - protein, 145 aa, Setaria italica
  Transcript Sequence Number=SeqID_1488
  Pfam annotation: Domain name=IQ; Domain location=13-33; Score=34.3; E_ value=4.9e-07; Accession=PF00612.19; Description=IQ calmodulin -binding motif
  Pfam annotation: Domain name=IQ; Domain location=35-55; Score=8.4; E _value=3.6; Accession=PF00612.19; Description=IQ calmodulin-binding motif
  Pfam module annotation: Pfam domain module=IQ::IQ; Domain location=13- 33::35-55
GQQPAPPPLEQEEHAAVLIQSAYRGYLARRALRALKGLVRLQALIRGQAVRRQTAATLRGLESLIRIQARHRSKAGGPDHLNALDGADDDDDALLLRRSRELYAAAVHEQQQAGSEGVDSSIFSKEEMSAMSRSREEAALKRVRA

SEQ ID NO: 67463 - protein, 221 aa, Setaria italica
  misc_feature (215)..(215): Xaa can be any naturally occurring amino acid
  Transcript Sequence Number=SeqID_1489
  Gene Ontology: Mol. function=transferase activity, transferring glycosyl groups; Cellular component=integral to membrane; Biological process=cellulose biosynthetic process
  Homolog annotation: Hit_ID=Q84S18; Match level="QueryCoverage=100%, HitCoverage=25%, E-value=1e-106, Identity=81%"; Hit description =Probable mixed-linked glucan synthase 8
DDGGSIIHYEGLLETANFALLWVPFCRKHCIEPRAPESYFAVKSRPYTGNVPDEFVDDHRRMSREYDEFKVRLDALFTKIPERSDAYNAEAKEGAKATWMADGTQWPGTWFDPAENHKKGQHAGIVKVMLNHPGDEPQFGAPASAANPLDFSAVDVRLPMLVYISREKSPDYDHQKKAGAMNVQLRVSALLTNAPFIINFDGDHYVNNSLAFRAXMCFMLD

SEQ ID NO: 67464 - protein, 127 aa, Setaria italica
  misc_feature (116)..(116): Xaa can be any naturally occurring amino acid
  Transcript Sequence Number=SeqID_1490
  Gene Ontology: Mol. function=sequence-specific DNA binding; Cellular component=nucleus; Biological process=regulation of transcription, DNA-dependent
  Homolog annotation: Hit_ID=Q2L3E1; Match level="QueryCoverage=100%, HitCoverage=18%, E-value=1e-42, Identity=67%"; Hit description =Putative WRKY DNA-binding protein
MAGTGNHGSLMEDWLPPPTPSPRTLMSSFLNEEFGSGPFSNLFSEHGTNKPHDQCEKSRELVSLSEEVPAQAVKDRFQKGFSLEPSLFGANQKSNSHGGLAERRAARAGFSVPKFXTSRVGSSAVIR

SEQ ID NO: 67465 - protein, 164 aa, Setaria italica
  misc_feature (151)..(151): Xaa can be any naturally occurring amino acid
  Transcript Sequence Number=SeqID_1491
  Gene Ontology: Cellular component=plasma membrane
  Homolog annotation: Hit_ID=Q6H7H8; Match level="QueryCoverage=100%, HitCoverage=32%, E-value=1e-61, Identity=65%"; Hit description =Putative bZIP protein
  Pfam annotation: Domain name=DUF632; Domain location=1-164; Score =26.1; E_value=5.6e-10; Accession=PF04782.4; Description=Protein of unknown function (DUF632)
AGDVVSSLLETSTTEYKGGSHSFLGALCCVSAPAVDRVDSMGGRQRHSSTLQQLLAWEKKLYKDVKARERLQIRHDKKLAVLRDQEYSRKIGVDIQKLKSAWDRARAQLDTATQSVDATASAIAELRDTHLARQLLCLFHATLDMWRTMRXHHEAQGRIAQQLR

SEQ ID NO: 67466 - protein, 43 aa, Setaria italica
  Transcript Sequence Number=SeqID_1492
LYLENISNFYLRYFGTCGVILYLTRSLIIVFATFHGKNVYTDM

SEQ ID NO: 67467 - protein, 129 aa, Setaria italica
  Transcript Sequence Number=SeqID_1493
  Gene Ontology: Mol. function=heat shock protein binding; Cellular component=chloroplast; Biological process=protein folding
  Homolog annotation: Hit_ID=Q9XF14; Match level="QueryCoverage=78%, HitCoverage=78%, E-value=5e-45, Identity=85%"; Hit description =Bundle sheath defective protein 2
  Pfam annotation: Domain name=DnaJ_CXXCXGXG; Domain location=51-117; Score=-30.0; E_value=0.01; Accession=PF00684.11; Description=DnaJ central domain (4 repeats)
  Subcellular localization annotation: CTP_CleavageSite=43; ConfidenceScore=5.65e-01
MAATASLTAIAPSPPALLKASPPALISLRPVSRRCKSLSVKTKATENDQSAKKPQKVRSILCKDCEGNGAIVCTQCEGRGVNSVDHFNGRFKAGALCWLCRGKREILCGSCNGAGFLGGFLSTFDETSD

SEQ ID NO: 67468 - protein, 86 aa, Setaria italica
  Transcript Sequence Number=SeqID_1494
  Gene Ontology: Mol. function=protein tyrosine kinase activity; Cellular component=chloroplast; Biological process=protein amino acid phosphorylation
  Homolog annotation: Hit_ID=Q10S84; Match level="QueryCoverage=98%, HitCoverage=21%, E-value=1e-37, Identity=88%"; Hit description =Serine/threonine-protein kinase Cx32, chloroplast, putative, expressed
EAPRLREFTLAELRAATKGFKPEMVLGEGGFGRVYKGWVDERTLNPAKSSAGVIVAVKKLNPESVQGLQEWQSEVNFLGRLSHPNW

SEQ ID NO: 67469 - protein, 141 aa, Setaria italica
  Transcript Sequence Number=SeqID_1495
  Gene Ontology: Mol. function=protein binding; Cellular component =chromatin remodeling complex; Biological process=regulation of transcription, DNA-dependent
  Homolog annotation: Hit_ID=A2ZP58; Match level="QueryCoverage=100%, HitCoverage=24%, E-value=4e-65, Identity=82%"; Hit description=Actin- related protein 5
LTAEDYRIAIGIERFRCPEVLFQPGMIGIDQAGIDEMVSISLRRLMEDESVKQRLCQSILVTGGSSLFPGMIPRLESGIRQYRPYLSPLKIVRAADPILDAWRGAAAFAASSKFGKQTFSLADYREHGENLFHRYNIVYSL

SEQ ID NO: 67470 - protein, 272 aa, Setaria italica
  Transcript Sequence Number=SeqID_1496
  Gene Ontology: Mol. function=transcription regulator activity; Cellular component=chromatin remodeling complex; Biological process =regulation of transcription, DNA-dependent
  Homolog annotation: Hit_ID=A2ZP58; Match level="QueryCoverage=78%, HitCoverage=38%, E-value=4e-88, Identity=73%"; Hit description=Actin- related protein 5
EELTPEQLKEKKKQILLKTTTEGKLRAKQRRAEEEALREKQEEQRRAENPELYLEELRTRYSELSEKFEQRKRQKVNGGQTNGNHGSSGGVGRGERLNAAQKERMRLLASAAFDRGKGEDTFGMRDEDWLVYNKMSKDNDDDGNDDDESELVRIASKLQEIDPTFVSKSEAVQLTPEPPKVRPLTAEDYRIAIGIERFRCPEVLFQPGMIGIDQAGIDEMVSISLRRLMEDESVKQRLCQSILVTGGSSLFPGMIPARRPYLDQVTNLLTLL

SEQ ID NO: 67471 - protein, 69 aa, Setaria italica
  Transcript Sequence Number=SeqID_1497
  Subcellular localization annotation: CTP_CleavageSite=40; ConfidenceScore=5.07e-01
NETLKNNRTFGQFMAIVSVYHRQCKQRPKALLPSYFRSMQALNKQGTCYLSIDFFFRSVSSQIQLMPLY

SEQ ID NO: 67472 - protein, 19 aa, Setaria italica
  Transcript Sequence Number=SeqID_1498
SPTWGNHKNIFNDARVPWS

SEQ ID NO: 67473 - protein, 91 aa, Setaria italica
  misc_feature (10)..(10): Xaa can be any naturally occurring amino acid
  Transcript Sequence Number=SeqID_1499
  Gene Ontology: Mol. function=transferase activity, transferring nitrogenous groups; Cellular component=chloroplast; Biological process=amino acid metabolic process
  Homolog annotation: Hit_ID=Q6KAJ2; Match level="QueryCoverage=95%, HitCoverage=18%, E-value=3e-33, Identity=87%"; Hit description =Aspartate aminotransferase
KKLQPYVLNXVVKKGLKILMLEKGEYKEYLPIEGLAAFNKATAELLLGADNPVIKQGLVATLQSLSGTGSLRLAAAFIQRYFPEAKVPLHH

SEQ ID NO: 67474 - protein, 141 aa, Setaria italica
  misc_feature (11)..(11): Xaa can be any naturally occurring amino acid
  misc_feature (30)..(30): Xaa can be any naturally occurring amino acid
  Transcript Sequence Number=SeqID_1500
  Gene Ontology: Mol. function=transferase activity, transferring nitrogenous groups; Cellular component=mitochondrial matrix; Biological process=amino acid metabolic process
  Homolog annotation: Hit_ID=B5B1F8; Match level="QueryCoverage=94%, HitCoverage=36%, E-value=1e-55, Identity=79%"; Hit description =Aspartate aminotransferase (Fragment)
IADIEAAPEGXFVLLHGCAHNPTGIDPTPXQWEKIADVIQEKKHMPFFDVAYQGFASGSLDEDAFSVRLFVKRGMEVFVAQSYSKNLGLYSERIGAINVVCSAPGVADRVKSRQHLLPQSFLSIDQGFCCKIVQQTLPCHA

SEQ ID NO: 67475 - protein, 459 aa, Setaria italica
  misc_feature (141)..(141): Xaa can be any naturally occurring amino acid
  misc_feature (284)..(284): Xaa can be any naturally occurring amino acid
  Transcript Sequence Number=SeqID_1501
  Gene Ontology: Mol. function=transferase activity, transferring nitrogenous groups; Cellular component=chloroplast; Biological process=amino acid metabolic process
  Homolog annotation: Hit_ID=Q6KAJ2; Match level="QueryCoverage=95%, HitCoverage=95%, E-value=0.0, Identity=92%"; Hit description =Aspartate aminotransferase
  Pfam annotation: Domain name=Aminotran_1_2; Domain location=82-451; Score=469.6; E_value=4.5e-138; Accession=PF00155.13; Description =Aminotransferase class I and II
  Subcellular localization annotation: CTP_CleavageSite=48; ConfidenceScore=5.61e-01
MASTAAFAVSSPAASAVAARSKVHGGGKNAGRIGCRVGITRKNFGRVMMALAVDVSRFEGVPMAPPDPILGVSEAFKADKSDLKLNLGVGAYRTEELQPYVLNVVKKAENLMLEKGEYKEYLPIEGLAAFNKATAELLLGXADNPVIKQGLVATLQSLSGTGSLRLAAAFIQRYFPEAKVLISSPTWGNHKNIFNDARVPWSEYRYYDPKTVGLDFEGMIADIEAAPEGSFVLLHGCAHNPTGIDPTPEQWEKIADVIQEKKHMPFFDVAYQGFASGSLDEDAXSVRLFVKRGMEVFVAQSYSKNLGLYSERIGAINVVCSAPGVADRVKSQLKRLARPMYSNPPIHGARIVANVVGDPTMFGEWKQEMEQMAGRIKNVRQKLYDSLSAKDKSGKDWSFILRQIGMFSYTGLNKAQSDNMTDKWHVYMTKDGRISLAGLSLAKCDYLADAIIDSFHNVN

SEQ ID NO: 67476 - protein, 70 aa, Setaria italica
  Transcript Sequence Number=SeqID_1502
CSAWLPPPILTVLAAAAAAGFPFPGVDLLLAAPTSHGGGVQPGGQGMLAPPAAALGRERQQMEESNREKE

SEQ ID NO: 67477 - protein, 208 aa, Setaria italica
  Transcript Sequence Number=SeqID_1503
  Gene Ontology: Mol. function=amino acid binding; Biological process =nitrogen compound metabolic process
  Homolog annotation: Hit_ID=B9S2P0; Match level="QueryCoverage=94%, HitCoverage=43%, E-value=1e-70, Identity=66%"; Hit description=Amino acid binding protein, putative
  Pfam annotation: Domain name=ACT; Domain location=126-198; Score =37.7; E_value=4.8e-08; Accession=PF01842.17; Description=ACT domain
  Pfam annotation: Domain name=ACT; Domain location=32-95; Score=22.1; E_value=0.0024; Accession=PF01842.17; Description=ACT domain
  Pfam module annotation: Pfam domain module=ACT::ACT; Domain location =126-198::32-95
MLPYFDPEYENFNQRINPPRVCIDNTTCSDCTLVKVDSMNKNGILLEVLQVLSDLDLHIFKAYITSDGGWFMDVFHVVDKQGQKITDDKTIKYIEKALGPESNLLGAKGSNSPGRSVGLHSIGDHTTIELKGPDRTGLLSEIFAVLADLQCNVLAAEVWTHRMRVACVVYVNDVATGLAIDDPCRVSQIETRLRHVLRGYGDGGGGGG

SEQ ID NO: 67478 - protein, 960 aa, Setaria italica
  Transcript Sequence Number=SeqID_1504
  Homolog annotation: Hit_ID=B9RMQ4; Match level="QueryCoverage=94%, HitCoverage=60%, E-value=3e-91, Identity=30%"; Hit description=ATP binding protein, putative
SVGWETSEIERLKHTLDESCMETENLNQALIEKTSEADMIKQELDAKNIGIENLRHEIESRESAMTDLKEHVEHLSLQAAHFEKLQFDIVTLNDEKGKVESMLEEARASFGTLADSISSLTLPVDQPFEDPMEKISQIAQYIQESLVAKGSLDNELHKANEQITLHASRLSDALSTINMLEDELRKVKDHISSISDEKRQIQLHTAAVEEELEKTNEELAINANKLEDANATINTLQDELSQARSNISVLDAEKKEAEVKHETEINALNAKLAKCLEDLDRTHGNLQSHSTEHHGYLEKLSMLVVDDSLLSLMAEEFGKTISSLRDMGLIVKNMHEQLAAKGFHTDAVVEDPELLTLLSLSDYDNFVTERLGNSKTKKGNIDDTSSFSTIVEQLNNQTEYFSSFLKDLSAYMNGNIMSVLRALQLASNDFAHTLEEHGTLKIELGNKDAHNRAQESEVLSLQKELRAMSSKCIYCIQQIKIVFDDVVDLGYAIELATGRSSTGSELEVIVSDLKDEDADDYNKVADALLSTITILKSKSEKLSAIKGCVVTSLDEFKMRLKQAESAAETVSHDHQLLLERASMLEKELKMLQDECNRMELKMQEYQEREGTLKARELELLSLERTQITADRGITDDAISKDQMEALVEKINKLNMMSGESHLQREEAALPSPFDKLSAVIDGFSALQHEVETLRYENEDLQLNVESCTREIEQLREEVSRNSDLNNRELESKSSELLEVTVSMERMIQQLGYLGVKDVVEDNKPTTTQALLSKLEKLIVASSTEAGNAKSIIQEQGAKLQSREKAVDELSTKVKMLEDLYHARLAQPDSSKDRSFEASSSAIVSDMSEIEDVGPMGKASISSVSTAAHARTMRKGSSDHLVLNIGSESERLIAAQDSDDKGRIKSLHTSGLIPAQGKHIADRVDAIWVSGSQILMNRPRARLGLMVYWLFLHLWLLGGIL

SEQ ID NO: 67479 - protein, 352 aa, Setaria italica
  Transcript Sequence Number=SeqID_1505
  Gene Ontology: Mol. function=electron carrier activity; Cellular component=plasma membrane; Biological process=oxidation reduction
  Homolog annotation: Hit_ID=B6SSR6; Match level="QueryCoverage=95%, HitCoverage=64%, E-value=1e-137, Identity=72%"; Hit description =Cytochrome P450 CYP81N4
  Pfam annotation: Domain name=p450; Domain location=2-337; Score=88.1; E_value=3.2e-23; Accession=PF00067.14; Description=Cytochrome P450
APTAASLVGGLLRHAAGGDAAAVTLRPRLFELVLNVMLRALTGAPGRGGDVRRIQEMIEESFKLAGAHSVGDFYPALRWVDRLRGFDAALIRLQARRDAFVAGLVDDKRRSREAGARDTETKSAIDELLSLQEIYPEFYTDTVIKGIVMVLLSAGTDTSALTTEWAMALLLTRPEAMQKVRAELDGNVGRSRLVEESDITNLPYLQCVVKETLRLCPVGPVIPAHEAMEDCTVGGYHVRRGTMILVNAWLIHRDPKLWEEPEEFRPERFLDASTTPMLPFGLGRRRCPGEGLAMRLVSLTIAALVQCFEWDVGEGSVVDMAEGGGLSMPMAKPLAAVCRPREFVKGMLSAST

SEQ ID NO: 67480 - protein, 164 aa, Setaria italica
  Transcript Sequence Number=SeqID_1506
CRPSTAERRPIARDLARKHGSPYRPSTAEKRTVVRDTEPKHAPPHRPSTPDRRPVNRETTLKQTNVATSRWPLTPDRCLTRKGDISTPQRPSTGERRPIANRSTMKPNPKTPIESRAMASYSKGAMAKEGTPEKAMTPSIVKSRKLENISYAKERVEFQVDWTS

SEQ ID NO: 67481 - protein, 587 aa, Setaria italica
  Transcript Sequence Number=SeqID_1507
MATEVNQNFFAWSQEETSVQDISQGTSQVFGHGSISFGRFDLESLEWEKWSVFTNDRRHEEFGKFNGLVAKKKAYFEEYFKRIRELKALQQQNQQTELHLEYSGDGSNSSQTGEYEPAADHGAPTESGTPVDDSMEQTTTATTFENEMESYGYHENESLVNETPVSTHSSPVGGLQQIGKQMRGDVSGKDANSSQDNPGMAHEIMISPKRITEKDSRIGQASKIIPKTIKMTSSNVSDHTIVTKGLGSGKPSVINQMVKPESIHSLRRPREATSNLIGTTARSGITGLRRPSSAASQRPSTRDQRPVTRDASRKPTEVITPCRPSTSERRPATRESALKHAGNATPRRPSTADRRPMTKESAPKQCNIATPRRPSTANKRPVTKESTPKLSNTATPHRPSTAGRRPITKESAPKHFSVASPHRPSTGERHTSNRDMATKHVGISTSCQPSAVKQHPITREGAQKHADIVILCRPSTAERRPIVRDIASKHATVAPPCRPSTAERRPIARDVALKHGSPYRPSTAEKRTVVRDTEPKHAPPHRPSTPDRRPVNRETTLKQTNVATSRWPLTPDRCLTRKGDISTLSFA

SEQ ID NO: 67482 - protein, 156 aa, Setaria italica
  Transcript Sequence Number=SeqID_1508
  Gene Ontology: Mol. function=transcription factor activity; Cellular component=nucleus; Biological process=regulation of transcription, DNA-dependent
  Homolog annotation: Hit_ID=C3UZ68; Match level="QueryCoverage=100%, HitCoverage=65%, E-value=9e-32, Identity=54%"; Hit description=DRE -binding protein 3
CRLWLGTFDTAEGAARAHDAAMLAIAGAGACLNFADSAWLLAVPASYASLAEVRHAVAEAVEDFLRREAAPEDDALSASTSTPSSPASDDGSATDGEESSDSSPAAGVSAFELDVFNDMSWDLYYASLAQGMLMEPPPAVMEFGDANIVDAPLWSY

SEQ ID NO: 67483 - protein, 394 aa, Setaria italica
  Transcript Sequence Number=SeqID_1509
  Homolog annotation: Hit_ID=Q7X8Q0; Match level="QueryCoverage=63%, HitCoverage=71%, E-value=1e-47, Identity=40%"; Hit description =P0041A24.7 protein
  Subcellular localization annotation: CTP_CleavageSite=50; ConfidenceScore=5.22e-01
MPLTRVAADAFGVLTIALFALFAALGLFCIFQSVYFRRRIRRGSSFFRLVLERPWVTRIVLILITIWWGVGEIVRLSFLKKKLFSSLVWQRNICDVYILSNLGFAEPGILFAFALLLHGSLQKRELGTLNQRWNWKTMAYMLVFCIPVFFVQAILVFLGPKFVKDENSEHGRRKIAKYFIRTSMAVGDTSVCTYPLFGTIFLGLVDAILMSYVSYVGSRVLSLVINKALRRRVSLLMLSVLCFLPIRVLLLGFSVLPKPGDVAFEGIIFLSFLMMLSCTTVGILLLVYYPVADSLALRDIGHREIAEMVPYDDYYYEGASLVTNQSFREIERNSDTSTKRGSISFRTMIREDQLQQDGADEMGFSSRSGVQIGSPSGSSPSAAMPMLPLKEVHR

SEQ ID NO: 67484 - protein, 423 aa, Setaria italica
  Transcript Sequence Number=SeqID_1510
  Gene Ontology: Mol. function=sequence-specific DNA binding; Cellular component=nucleus; Biological process=regulation of transcription, DNA-dependent
  Homolog annotation: Hit_ID=B6SXN6; Match level="QueryCoverage=83%, HitCoverage=45%, E-value=1e-151, Identity=77%"; Hit description =Homeodomain protein JUBEL1
  Pfam annotation: Domain name=Homeobox; Domain location=311-369; Score= 4.2; E_value=0.0047; Accession=PF00046.21; Description=Homeobox domain
  Pfam annotation: Domain name=POX; Domain location=116-258; Score =281.7; E_value=1.6e-81; Accession=PF07526.3; Description=Associated with HOX
  Pfam module annotation: Pfam domain module=Homeobox::POX; Domain location=311-369::116-258
  Subcellular localization annotation: CTP_CleavageSite=60; ConfidenceScore=5.22e-01
PQQQQQQQSRSSPTSPQPSDVQHHEAFQAFGGGGAGGVVEGQGLSLSLSSSLQQLEMAKQAEELRVRDGVLYFNRQQPQGPAVQQQQLLPMALHGGQVGALGQQLHVGYGPAGVAGVLRNSKYTRAAQELLEEFCSVGRGQIKGGARGGRGASASNPNASKGGGASSSGAAQSPSSASKQEPPQLSPADRFEHQRKKAKLISMLDEVDRRYNHYCDQMQMVVNFFDSVMGFGAATPYTALAQKAMSRHFRCLKDAIASQLRHTCELLGEKDAGTSSGLTKGETPRLRAIDQSLRQQRAFHHMGMMEQEAWRPQRGLPERSVNILRSWLFEHFLHPYPSDADKHLLARQTGLSRNQVSNWFINARVRLWKPMIEEMYQQECRELEGSSAGGGGPESGNDPSGADDTHSPTTTGAAQLQQQQHGT

SEQ ID NO: 67485 - protein, 48 aa, Setaria italica
  Transcript Sequence Number=SeqID_1511
IVSISNDKNCTASRPKITATNLQSTHTNTRRHSLDVVTYGTCVICSEL

SEQ ID NO: 67486 - protein, 51 aa, Setaria italica
  Transcript Sequence Number=SeqID_1512
CMIPYHATTQITLFHLELTFSCNVYVLVGSPSTSERLEQQYEIASIYGVLF

SEQ ID NO: 67487 - protein, 336 aa, Setaria italica
  Transcript Sequence Number=SeqID_1513
  Gene Ontology: Mol. function=phosphatidylserine decarboxylase activity; Cellular component=mitochondrial inner membrane; Biological process=phospholipid biosynthetic process
  Homolog annotation: Hit_ID=Q6RYF3; Match level="QueryCoverage=100%, HitCoverage=79%, E-value=1e-153, Identity=76%"; Hit description =Phosphatidylserine decarboxylase
  Pfam annotation: Domain name=PS_Dcarbxylase; Domain location=66-336; Score=70.2; E_value=7.7e-18; Accession=PF02666.7; Description =Phosphatidylserine decarboxylase
EPEFSPDFKASFVRLLPLRSMSRFWGSLMEVDVPVFMRPTIYKTWARAFHSDLQEVALPLEEYPSLQAFFIRSLKEGARPVDPDPNCLVSPVDGKVLRLGELRGPGTMIEQVKGFSYSVSSLLGTSSSLHDAAEEELSRERIEQSTPENSNAKSWWRVSVASPKLRDQTVLSPKKGIFYCVIYLHPGDYHRVHSPVDWNILKRRHFSGHLFPQNERAVRTIRNLYVENERVVLEGRWKEGFVALAAIGATNVGSIRVNLEPELRTNRAVSMMVHSLAAEERVYEPEGTGVVVKKGEEIAGFKMGSTVVLVFEAPSREVSSASADFSFCVRAGDKVR

SEQ ID NO: 67488 - protein, 79 aa, Setaria italica
  Transcript Sequence Number=SeqID_1514
  Gene Ontology: Mol. function=protein kinase activity; Biological process=protein amino acid phosphorylation
  Homolog annotation: Hit_ID=B9SY61; Match level="QueryCoverage=97%, HitCoverage=18%, E-value=3e-21, Identity=57%"; Hit description =Protein kinase APK1A, chloroplast, putative
EGGGEGMRRWVDRRLRDSFPVDAAESLTALALRCVAKDPLARPDMSWVAAKVSKLFLEAQEWAAKFRVPTDISISIAPR

SEQ ID NO: 67489 - protein, 81 aa, Setaria italica
  Transcript Sequence Number=SeqID_1515
  Homolog annotation: Hit_ID=B6SJT6; Match level="QueryCoverage=61%, HitCoverage=27%, E-value=7e-16, Identity=78%"; Hit description=Long cell-linked locus protein
SSYGADQLGSERAGGDEEEEEELSCYCAYGGGDDEQLLERAVAESCRASTAAEEDAGVDVKADEFIARFYAQMKLQRQISW

SEQ ID NO: 67490 - protein, 416 aa, Setaria italica
  Transcript Sequence Number=SeqID_1516
  Gene Ontology: Mol. function=protein serine/threonine kinase activity; Cellular component=plasma membrane; Biological process =protein amino acid phosphorylation
  Homolog annotation: Hit_ID=P93520; Match level="QueryCoverage=99%, HitCoverage=65%, E-value=0.0, Identity=78%"; Hit description =Calcium/calmodulin-dependent protein kinase homolog|CaM kinase homolog|MCK1 protein
  Pfam annotation: Domain name=Pkinase; Domain location=2-224; Score =230.1; E_value=5.4e-66; Accession=PF00069.17; Description=Protein kinase domain
  Pfam annotation: Domain name=Pkinase_Tyr; Domain location=1-240; Score=-83.4; E_value=3.5e-08; Accession=PF07714.9; Description =Protein tyrosine kinase
  Pfam module annotation: Pfam domain module=Pkinase::Pkinase_Tyr; Domain location=2-224::1-240
QTRQISIEDVRREVKILKALSGHSNLVKFYDACEDALNVYIIMELCEGGELLDRILSRGGRYNEGDAKIIVDQILNVVAFCHLQGVVHRDLKPENFLFSTKDEHSPMKIIDFGLSDFIRPDERLNDIVGSAYYVAPEVLHRSYSTEADMWSIGVITYILLCGSRPFWARTESGIFRSVLRADPNFDDTPWQSVSPEAKDFVKRLLNKDYRKRMTAAQALSHPWLRDEHRQIPLDMLVFKLVKAYLRSTPLKRAALKALSRAVTEDELIYIRAQYNLLEPNSRDGRICIDNFRMALLQNSTDAMKESRTLEILNALEPLAYRRMDFEEFRAATISPYQLEAVSRWEEIASTAFEYFEQEGNRAITIEELAQEMNLSSAAYSIVRDWIRPSDGKLSFLGYTKFLHGLTMRSGNARRHN

SEQ ID NO: 67491 - protein, 138 aa, Setaria italica
  Transcript Sequence Number=SeqID_1517
  Gene Ontology: Cellular component=plasma membrane; Biological process= protein modification process
  Homolog annotation: Hit_ID=B6T867; Match level="QueryCoverage=80%, HitCoverage=80%, E-value=2e-43, Identity=79%"; Hit description=ATGP4
MAEKEGAKVGAEEMEEREREGEAEEVEVKFRLFDGSDIGPVRCNAAATTVAALKDRVVADWPKDKSVSPKTANDVKLISGGKILENDKSVAQCRAPFGDLPSSAITMHVVVQPSSAKSKPDKKANKLPKTTRCSCTIL

SEQ ID NO: 67492 - protein, 85 aa, Setaria italica
  Transcript Sequence Number=SeqID_1518
  Gene Ontology: Mol. function=transferase activity, transferring glycosyl groups; Biological process=metabolic process
  Homolog annotation: Hit_ID=Q6VAA8; Match level="QueryCoverage=96%, HitCoverage=16%, E-value=8e-23, Identity=53%"; Hit description=UDP -glycosyltransferase 91D1
AGGRGLVRVGWVPQVRVLAHAAVGGFFTHAGLSSLVESFLFGHPLVMLPLFGDQGLTARLMAERRVGLEVPRDDRDGSVRREDVA

SEQ ID NO: 67493 - protein, 241 aa, Setaria italica
  Transcript Sequence Number=SeqID_1519
LELEALSRKFEQDISLYKERLCIGSSKEAEISDLNVERVPNFGTTPDFSNNKTGISGFVTADDGKSCPAVSILTSPAHHETPRFSEARAINTSVTEVTYAMDEISSGMDDACNGLGSCNASAMECSDNSDSESEIFRVKRRSTSSDKPTSDAKISNLSEQQVLRRLKKVHPEVQRASKRLEEPDTCSVRSVRMSQKSSNPASSDDEREDMVPISWRIKRRQLETQHNDASHGAKPQSCPPS

SEQ ID NO: 67494 - protein, 79 aa, Setaria italica
  Transcript Sequence Number=SeqID_1520
  Gene Ontology: Mol. function=zinc ion binding
  Homolog annotation: Hit_ID=Q8H2A7; Match level="QueryCoverage=59%, HitCoverage=15%, E-value=1e-12, Identity=70%"; Hit description=PFE18 protein (Fragment)
VAAPVSMPVVAAAPAAPLAEEVVNHLLEEKMMSELEVLGFMQADLNKQILRQNNYDLEQSVVDLCGFNEWDPLEVFSEL

SEQ ID NO: 67495 - protein, 863 aa, Setaria italica
  Transcript Sequence Number=SeqID_1521
  Gene Ontology: Mol. function=zinc ion binding; Cellular component =centrosome
  Homolog annotation: Hit_ID=B8K1X5; Match level="QueryCoverage=97%, HitCoverage=98%, E-value=2e-67, Identity=45%"; Hit description =Ubiquitin-associated protein
  Pfam annotation: Domain name=PB1; Domain location=23-108; Score=35.1; E_value=2.8e-07; Accession=PF00564.16; Description=PB1 domain
  Pfam annotation: Domain name=ZZ; Domain location=450-493; Score=35.7; E_value=1.8e-07; Accession=PF00569.9; Description=Zinc finger, ZZ type
  Pfam module annotation: Pfam domain module=PB1::ZZ; Domain location =23-108::450-493
MDAFGTAPMGYGRAWPLVDDSRDLVVKVKYGDTLKRFNARVNGSHFDHDLPALRLKIASAFKFSPDAEFILTYTDEDGDVVMLDDDNDLRDAAINQKLNPLRINVQLKSSNVGAAQTKQQATNSKSSRSISLEDQLAQVKSAIDEALKFVPEQVPAVLAKLSHDLRFRAASSAPSLAELLDRFAKLITRGSNMHPSCGFADSSQKLRSAKVKLESALVTGSASETSNGQNSGISEAGLRGVLSEDPNAKIEQVPSCPSVRDSLVFTSSGGMKGDHKRSLDSEIKIKSDAHSKGKSVLSSWPPVSTTSHGAPAQGSVPVPFKSLGSIGMANGDIMPLFPPPPVYQPPTPVLYPPTPFLTPLNPISGANGKTTVDLHSTFPPPPNIYSPIKLNTPSSVGTCCPNLYSTGTSHRDGTGPLSSYVPNPEGINSFGSSYRGLGTNYRGNPLKYAQHRWIQCDGCGVTPIDGPRYKSNVKEDYDLCDACFSHMGNEVEYTRLDGPASKSNMKILGKVPAVKTDSRFIKDVTVPDGTPMAPSTLFTKIWRMRNNGFSKWPYGTQLLWVGGDRLTCLSSFRLAISANGGLNPCEDTDVTVDFLAPAKPGRYISYWRLALPSGLTFGQQIWVHIEVEQPIQTSGGKQAAARNRNQLPEANSTRPSAFNINSAPVNFLSGWHGRLECETMEPKESEPVPSDMSSAPAAVEPAQIPVTDAPASSAEAALASMPAAVPAPEAILLPKPVPVPAPVSASAPAPVAAPVSMPVVAAAPAAPLAEEVVNHLLEEKMMSELEVLGFMQADLNKQILRQNNYDLEQSVVDLCGFNEWDPLEVFSELGSDDTVMSEEVVVDNSDDEGFIVADLMTKAKKDQ

SEQ ID NO: 67496 - protein, 54 aa, Setaria italica
  Transcript Sequence Number=SeqID_1522
LLLILTVADPISISVSMTLPSPPFNSIYRLLHHFGRINLSIVFYSSLFLYLRFL

SEQ ID NO: 67497 - protein, 121 aa, Setaria italica
  Transcript Sequence Number=SeqID_1523
QIDPLDLIKPIITVPNFFRKLKEKQTYISTAYTVYIFINQHELTIPENMCRIRERGFFNYSIVDDDLTEIQPTGCTSLPGRNKETNLAFSYHNQHPRQDPQANRKHLLAAIINLILPHPRG

SEQ ID NO: 67498 - protein, 72 aa, Setaria italica
  Transcript Sequence Number=SeqID_1524
KLVAATANSARSKSNTKDSSTGRWTAELGSMASSASDLTLDYKPNGNSNGGGAYAVIPKQQQETLVDGHHLT

SEQ ID NO: 67499 - protein, 108 aa, Setaria italica
  Transcript Sequence Number=SeqID_1525
MQALARASRGIAAAVRPSAVEAAHGGQLQQARGIVVQVRDGNLDRALSVMERKIRSSGMERLIRARTHHHVKDSEKRVLARKALMQRVKSQELGKKLREILIKKIRGQ

SEQ ID NO: 67500 - protein, 109 aa, Setaria italica
  Transcript Sequence Number=SeqID_1526
  Gene Ontology: Mol. function=DNA binding; Biological process =regulation of transcription
  Homolog annotation: Hit_ID=B6SU47; Match level="QueryCoverage=86%, HitCoverage=26%, E-value=4e-43, Identity=84%"; Hit description=No apical meristem protein
  Pfam annotation: Domain name=NAM; Domain location=14-103; Score= -25.2; E_value=4.4e-05; Accession=PF02365.7; Description=No apical meristem (NAM) protein
MVRSPSAASKPPCAAFQSHPTDLELVNSYLRPWVETGLKAGPFIHEADVYAADPADLTRRFAPAVAQDGERAWYFFTPLRHKSVRGKRKARTVASGGGCWHNEAKSKPV

SEQ ID NO: 67501 - protein, 84 aa, Setaria italica
  misc_feature (71)..(71): Xaa can be any naturally occurring amino acid
  Transcript Sequence Number=SeqID_1527
  Gene Ontology: Mol. function=cysteine-type endopeptidase activity; Cellular component=vacuole; Biological process=proteolysis
  Homolog annotation: Hit_ID=B4ESE4; Match level="QueryCoverage=100%, HitCoverage=21%, E-value=1e-40, Identity=89%"; Hit description =Papain-like cysteine proteinase
NAIFMQTYIGGVSCPYICGRHLDHGVLLVGYGSAGYAPIRFKEKPYWIIKNSWGENWGENGYYKLCRGPFXRKNKCGVDSMVST

SEQ ID NO: 67502 - protein, 162 aa, Setaria italica
  misc_feature (41)..(41): Xaa can be any naturally occurring amino acid
  Transcript Sequence Number=SeqID_1528
  Gene Ontology: Mol. function=cysteine-type endopeptidase activity; Biological process=proteolysis
  Homolog annotation: Hit_ID=B4ESE4; Match level="QueryCoverage=68%, HitCoverage=28%, E-value=1e-50, Identity=85%"; Hit description =Papain-like cysteine proteinase
  Pfam annotation: Domain name=Peptidase_C1; Domain location=21-162; Score=15.0; E_value=1.2e-12; Accession=PF00112.15; Description =Papain family cysteine protease
  Subcellular localization annotation: CTP_CleavageSite=25; ConfidenceScore=5.11e-01
STVVRSVPVLSNLGSSLSGSLSWFLSSRRSGVVLEGAHYLXATGKLEVLSEQQMVDCDHECDPSEPRSCDAGCNGGLMTTAFSYLQKSGGLESEKDYPYTGTGGTCKFDKSKIVAQVKNFSVVSVDEDQIAANLVKHGPLAIGYSNCLIFLLSSTYYYWLVV

SEQ ID NO: 67503 - protein, 388 aa, Setaria italica
  Transcript Sequence Number=SeqID_1529
  Gene Ontology: Mol. function=cysteine-type endopeptidase activity; Cellular component=vacuole; Biological process=proteolysis
  Homolog annotation: Hit_ID=B4ESE4; Match level="QueryCoverage=89%, HitCoverage=90%, E-value=1e-176, Identity=84%"; Hit description =Papain-like cysteine proteinase
  Pfam annotation: Domain name=Inhibitor_I29; Domain location=65-121; Score=90.1; E_value=7.7e-24; Accession=PF08246.4; Description =Cathepsin propeptide inhibitor domain (
  Pfam annotation: Domain name=Peptidase_C1; Domain location=153-380; Score=386.0; E_value=6.6e-113; Accession=PF00112.15; Description =Papain family cysteine protease
  Pfam module annotation: Pfam domain module=Inhibitor_I29::Peptidase _C1; Domain location=65-121::153-380
MARRRLRLLAGAALLLVAVFSAAALCSAEPDDASAAAEDPLIEQVVGDGAADDELEMELNAEAHFASFVRRFGKSYRDDGERAHRMSVFKANLRRARRHQRLDPTAVHGVTQFSDLTPDEFRRQFLGLRRSSARDLLKGSSAHQAPILPTDGLPTDFDWREHGAVGPVKNQGSCGSCWSFSASGALEGAHYLATGKLEVLSEQQMVDCDHECDPSEPRSCDAGCNGGLMTTAFSYLQKSGGLESEKDYPYTGTGGTCKFDKSKIVAQVKNFSVVSVDEDQIAANLVKHGPLAIGINAIFMQTYIGGVSCPYICGRHLDHGVLLVGYGSAGYAPIRFKEKPYWIIKNSWGENWGENGYYKLCRGPFVKNKCGVDSMVSTVTAIHPSKKE

SEQ ID NO: 67504 - protein, 244 aa, Setaria italica
  Transcript Sequence Number=SeqID_1530
  Gene Ontology: Mol. function=cysteine-type endopeptidase activity; Cellular component=vacuole; Biological process=proteolysis
  Homolog annotation: Hit_ID=B4ESE4; Match level="QueryCoverage=98%, HitCoverage=62%, E-value=1e-127, Identity=88%"; Hit description =Papain-like cysteine proteinase
  Pfam annotation: Domain name=Peptidase_C1; Domain location=9-236; Score=386.0; E_value=6.6e-113; Accession=PF00112.15; Description =Papain family cysteine protease
PHSSPPNGLPTDFDWREHGAVGPVKNQGSCGSCWSFSASGALEGAHYLATGKLEVLSEQQMVDCDHECDPSEPRSCDAGCNGGLMTTAFSYLQKSGGLESEKDYPYTGTGGTCKFDKSKIVAQVKNFSVVSVDEDQIAANLVKHGPLAIGINAIFMQTYIGGVSCPYICGRHLDHGVLLVGYGSAGYAPIRFKEKPYWIIKNSWGENWGENGYYKLCRGPFVKNKCGVDSMVSTVTAIHPSKKE

SEQ ID NO: 67505 - protein, 89 aa, Setaria italica
  Transcript Sequence Number=SeqID_1531
  Subcellular localization annotation: CTP_CleavageSite=67; ConfidenceScore=5.87e-01
PSGLPSCSPAAQLRRPRRSIPFGRHPSPVFVSASPRLQAPVRSSLAVVLSRYPASSSQPCRSPTGPRASPRRTPVQAPAAAALAWTPGS

SEQ ID NO: 67506 - protein, 96 aa, Setaria italica
  Transcript Sequence Number=SeqID_1532
  Gene Ontology: Mol. function=zinc ion binding
  Homolog annotation: Hit_ID=B6SKV4; Match level="QueryCoverage=34%, HitCoverage=4%, E-value=1e-11, Identity=96%"; Hit description =CONSTANS interacting protein 6
SPPNPAAAAASAAEDAAAAAASAKLCVERDFLHLSAPKRGDPPGDDSSVVGGKKPRLDSLQLSLSLSNDARQLRWELEELSGGPGWPGYLVATTVT

SEQ ID NO: 67507 - protein, 178 aa, Setaria italica
  Transcript Sequence Number=SeqID_1533
  Gene Ontology: Cellular component=small-subunit processome; Biological process=rRNA processing
  Homolog annotation: Hit_ID=B9SX55; Match level="QueryCoverage=98%, HitCoverage=30%, E-value=7e-23, Identity=40%"; Hit description =Something about silencing protein sas10, putative
  Pfam annotation: Domain name=Sas10_Utp3; Domain location=1-41; Score =9.8; E_value=0.053; Accession=PF04000.7; Description=Sas10Utp3 family
ACLLAYCQAITFYLLMKAEGLSVQDHPVISRLVETKNMVDKMKQVTTNLGRQEGSTDGHNMDSGTIQADKIVSLDKQEGKCSKGAEVSESRKSEPSNNDRHKVNKEKNKDEHIGLQSLEMLKVRANLEERLKKKGLYNLTRSKPEKLSKTRTTSNQRDLQTLDDFDDEVQRNNQMMKP

SEQ ID NO: 67508 - protein, 624 aa, Setaria italica
  misc_feature (191)..(191): Xaa can be any naturally occurring amino acid
  Transcript Sequence Number=SeqID_1534
  Gene Ontology: Mol. function=aspartic-type endopeptidase activity; Cellular component=small-subunit processome; Biological process=rRNA processing
  Homolog annotation: Hit_ID=B9SX55; Match level="QueryCoverage=95%, HitCoverage=96%, E-value=6e-89, Identity=38%"; Hit description =Something about silencing protein sas10, putative
  Pfam annotation: Domain name=Sas10_Utp3; Domain location=220-304; Score=74.1; E_value=5.1e-19; Accession=PF04000.7; Description =Sas10Utp3 family
  Pfam annotation: Domain name=Sas10_Utp3_C; Domain location=547-622; Score=134.7; E_value=3e-37; Accession=PF09368.2; Description=Sas10 C- terminal domain
  Pfam module annotation: Pfam domain module=Sas10_Utp3::Sas10_Utp3_C; Domain location=220-304::547-622
MGKRPRTTPRRAPARPPPKSKRTDELAAMSDSDDDEIEAFHKQQDMIPLDDDDARESEDDDMEQPVFDLKGVSDSETDDGEGEENDNMEANYEDWDKGYIAKLKRAARVVKQIAGGDDSMDEQEEDEKTKNVWGRGKGAYYDKQLGESGDDELDYEEEVQRIQKENQENLSMKDFGLEDGESDEENDGTRXSNHETKMKENLAVLSSNDKMGVLYSSAPELVSLLSELKEAHEEFRAIGQLNNQVTAGLGKAKGGMLPLEVKKACLLAYCQAITFYLLMKAEGLSVQDHPVISRLVETKNMVDKMKQVTTNLGRQEGSTDGHNMDSGTIQADKIVSLDKQEGKCSKVLTLDKVKQGAEVSESRKSEPSNNDRHKVNKEKNKDEHIGLQSLEMLKVRANLEERLKKKGLYNLTRSKPEKLSKTRTTSNQRDLQTLDDFDDEVQRNNQMMKPSKLVAAAAKSNKNKFVSGDDDLPKRDNVGERRRKHELRVLSRVGANSVEYDHELPEDGDGSEDEFYQDVKRQRTEKLSFKNEKYLPTRGIQPVEEETEGDGKRKISYQIEKNRGLTRSRNRDKKNPRKNYRDKHKKKLVKRKGQVRDIKKPSRPYGGEMSGINPNVSRSVRFKS

SEQ ID NO: 67509 - protein, 64 aa, Setaria italica
  Transcript Sequence Number=SeqID_1535
  Subcellular localization annotation: CTP_CleavageSite=34; ConfidenceScore=5.11e-01
TGIHDFSCSFVLQVQQKSSIMESHPLSYIKRTVSRSIGEKLMSRNGFRTNPAKSNVYRLLYYHQ

SEQ ID NO: 67510 - protein, 54 aa, Setaria italica
  Transcript Sequence Number=SeqID_1536
GHLRLQKEGNSKVNHCMLSLCHYLIPEAGRLSALVGFYIKPDQVCYFFQSSNAC

SEQ ID NO: 67511 - protein, 64 aa, Setaria italica
  Transcript Sequence Number=SeqID_1537
LELNASVQISGERVRYNVGPPFHMIIRSSQGPHLTSKMMKRQTVPALLSASWSNPYVAWVMGRD

SEQ ID NO: 67512 - protein, 234 aa, Setaria italica
  Transcript Sequence Number=SeqID_1538
  Gene Ontology: Mol. function=catalytic activity; Cellular component =endoplasmic reticulum membrane; Biological process=metabolic process
  Homolog annotation: Hit_ID=B9SM94; Match level="QueryCoverage=98%, HitCoverage=89%, E-value=2e-90, Identity=71%"; Hit description=Sur2 hydroxylase/desaturase, putative
  Pfam annotation: Domain name=FA_hydroxylase; Domain location=77-191; Score=127.8; E_value=3.6e-35; Accession=PF04116.5; Description=Fatty acid hydroxylase
VRSVYQLILHRRPLERYRLHTRAEEEEKNLVSLPAVVRGVLLQQLVQAIVAMILFMVTSDSSVTVVQPPIVVQIFQFLIAMLVMDSWQYFVHRYMHQNKFLYRHIHSQHHRLIVPYAIGALYNHPLEGLLLDTLGGAISFLVSGMTPRTAVFFFCFAVLKTVDDHCGLWLPYNIFQNLFQNNTAYHDIHHQLQGTKYNYSQPFFSIWDRILGTHMPYNLVSRKEGGFEARPSRD

SEQ ID NO: 67513 - protein, 60 aa, Setaria italica
  Transcript Sequence Number=SeqID_1539
LELVSGSKNNLNITKPLIMEAQVLRKWRHRWIKSMKHTPLGYQQVTKCIDLAQICMEHDP

SEQ ID NO: 67514 - protein, 37 aa, Setaria italica
  Transcript Sequence Number=SeqID_1540
  Gene Ontology: Mol. function=protein serine/threonine kinase activity; Biological process=protein amino acid phosphorylation
  Homolog annotation: Hit_ID=Q8GUR2; Match level="QueryCoverage=100%, HitCoverage=32%, E-value=3e-10, Identity=83%"; Hit description =Serine/threonine protein kinase (Fragment)
VKACIVIGLKCVEVDLNRRPSITDIVDQLNGKRVPIF

SEQ ID NO: 67515 - protein, 65 aa, Setaria italica
  Transcript Sequence Number=SeqID_1541
  Gene Ontology: Mol. function=nucleoside-triphosphatase activity; Cellular component=protein complex; Biological process=protein catabolic process
  Homolog annotation: Hit_ID=P46466; Match level="QueryCoverage=75%, HitCoverage=10%, E-value=2e-20, Identity=100%"; Hit description=26S protease regulatory subunit 4 homolog
FLESERLTHQCQHKTPEIKEAVELPLTHPELYEDIGIRPPKGVILYGEPGTGKTLLAKAVANSTS

SEQ ID NO: 67516 - protein, 47 aa, Setaria italica
  Transcript Sequence Number=SeqID_1542
MRFSIYFLPQTKLPFLRRLMRLLVTSGIFASERDAEVETYRLNPLSW

SEQ ID NO: 67517 - protein, 82 aa, Setaria italica
  Transcript Sequence Number=SeqID_1543
RMWTSRRPKKRSCSRRKKVCRRASTCETIGSTRTAFGMWFSSILVWRTGICNLIKWSRNVCLHSLLLDYATRIVIISQVGII

SEQ ID NO: 67518 - protein, 193 aa, Setaria italica
  misc_feature (69)..(69): Xaa can be any naturally occurring amino acid
  misc_feature (133)..(133): Xaa can be any naturally occurring amino acid
  Transcript Sequence Number=SeqID_1544
  Gene Ontology: Mol. function=protein serine/threonine kinase activity; Biological process=protein amino acid phosphorylation
  Homolog annotation: Hit_ID=Q2L3S0; Match level="QueryCoverage=95%, HitCoverage=33%, E-value=2e-33, Identity=43%"; Hit description =Putative vesicle associated membrane protein
  Pfam annotation: Domain name=Pkinase; Domain location=1-191; Score= -69.5; E_value=0.00024; Accession=PF00069.17; Description=Protein kinase domain
  Pfam annotation: Domain name=Pkinase_Tyr; Domain location=1-191; Score=-142.3; E_value=0.00029; Accession=PF07714.9; Description =Protein tyrosine kinase
  Pfam module annotation: Pfam domain module=Pkinase::Pkinase_Tyr; Domain location=1-191::1-191
VVYTFDIIVGICNGLCYLHKEKNIIHMDLKPANILVDDWMVPKITDFGLSILHDNPQATTTTSRLISPXAAYLNNILLFLKSYKFFMLQCHYVLSCRGYSAPEYCSEGKSSLKSDIYSLGVIILELVSGSKKXPNITKAQVLRKWRHRWIKSMKHTPLGYQQVTKCIDLAQICMEHDPADRPDISDIVQELKR

SEQ ID NO: 67519 - protein, 176 aa, Setaria italica
  Transcript Sequence Number=SeqID_1545
  Gene Ontology: Mol. function=protein serine/threonine kinase activity; Biological process=protein amino acid phosphorylation
  Homolog annotation: Hit_ID=A3FPG3; Match level="QueryCoverage=77%, HitCoverage=46%, E-value=3e-24, Identity=44%"; Hit description =Serine/threonine protein kinase
  Pfam annotation: Domain name=Pkinase; Domain location=1-140; Score= -92.2; E_value=0.0053; Accession=PF00069.17; Description=Protein kinase domain
  Pfam annotation: Domain name=Pkinase_Tyr; Domain location=15-140; Score=-179.2; E_value=0.081; Accession=PF07714.9; Description =Protein tyrosine kinase
  Pfam module annotation: Pfam domain module=Pkinase::Pkinase_Tyr; Domain location=1-140::15-140
YDKRIVHLDLKPENILLDYNMVPKISHFDNSRFIDEGQTLKITENITGFNGYLAPETLNTGVITFKSDIYALGITIAEILTEEKQYSSVVNVLEGWRNRLGTSGEDTLLEQVRLCAEICIRCLDSNPNKRPAIQRIIEALDETESMTPDTQRIIEMLNDTESVDELSNSNLTWIIS

SEQ ID NO: 67520 - protein, 74 aa, Setaria italica
  Transcript Sequence Number=SeqID_1546
  Gene Ontology: Mol. function=nucleoside-triphosphatase activity; Cellular component=protein complex; Biological process=protein catabolic process
  Homolog annotation: Hit_ID=P46466; Match level="QueryCoverage=95%, HitCoverage=15%, E-value=8e-26, Identity=81%"; Hit description=26S protease regulatory subunit 4 homolog
QQQSKMTLADDVNLEEFVMTKDEFSGADIKAICTEAGLLALRERRMKVTHADFKKAKEKVMYKKKEGVPDGLYM

SEQ ID NO: 67521 - protein, 158 aa, Setaria italica
  Transcript Sequence Number=SeqID_1547
  Gene Ontology: Mol. function=protein serine/threonine kinase activity; Cellular component=integral to membrane; Biological process=protein amino acid phosphorylation
  Homolog annotation: Hit_ID=Q2L3S6; Match level="QueryCoverage=86%, HitCoverage=51%, E-value=7e-45, Identity=61%"; Hit description =Putative serine/threonine kinase
  Pfam annotation: Domain name=Pkinase; Domain location=1-157; Score= -3.8; E_value=2.9e-08; Accession=PF00069.17; Description=Protein kinase domain
  Pfam annotation: Domain name=Pkinase_Tyr; Domain location=1-158; Score=-119.0; E_value=8.1e-06; Accession=PF07714.9; Description =Protein tyrosine kinase
  Pfam module annotation: Pfam domain module=Pkinase::Pkinase_Tyr; Domain location=1-157::1-158
TEERAISVEGQTVMVEIRERLLCFEYISNGSLERHLTDELRGLEWRTRFNIIVGICNGLCYLHKEKNITHMDLKPANILVDDQMVPKITDFGLSRLDNNPQATTTSRFVSPGYSAPEYHSKGKSSSKSDIYSLGVIILELVSGSKNNPNITKVLRNGG

SEQ ID NO: 67522 - protein, 209 aa, Setaria italica
  Transcript Sequence Number=SeqID_1548
  Gene Ontology: Mol. function=protein serine/threonine kinase activity; Biological process=protein amino acid phosphorylation
  Homolog annotation: Hit_ID=Q2L3S6; Match level="QueryCoverage=98%, HitCoverage=78%, E-value=5e-60, Identity=57%"; Hit description =Putative serine/threonine kinase
  Pfam annotation: Domain name=Pkinase; Domain location=12-209; Score =36.8; E_value=1.1e-10; Accession=PF00069.17; Description=Protein kinase domain
  Pfam annotation: Domain name=Pkinase_Tyr; Domain location=12-209; Score=-54.2; E_value=4e-10; Accession=PF07714.9; Description=Protein tyrosine kinase
  Pfam module annotation: Pfam domain module=Pkinase::Pkinase_Tyr; Domain location=12-209::12-209
ICLLLQSITDNFSEKQRIGVGGCGEVYKGILRNGVVAVKRLFKIRIIKDKMFHREVKSLIAVRHPNIVRFLGYCSFTEERVMLLQGGTIMVDIRERLLCFDYISNGSLESHLTDELRGHEWNTRYEIIVGICKGLLYLHKEKDIIHMDLKPANILLDDHLVPKITDFGLSRLDNNSQNATTSRLMTPVYCAPEYHSEGKSSSKSDIYSL

SEQ ID NO: 67523 - protein, 240 aa, Setaria italica
  misc_feature (95)..(95): Xaa can be any naturally occurring amino acid
  Transcript Sequence Number=SeqID_1549
  Gene Ontology: Mol. function=protein serine/threonine kinase activity; Cellular component=integral to membrane; Biological process=protein amino acid phosphorylation
  Homolog annotation: Hit_ID=Q2L3S0; Match level="QueryCoverage=85%, HitCoverage=38%, E-value=7e-43, Identity=44%"; Hit description =Putative vesicle associated membrane protein
  Pfam annotation: Domain name=Pkinase; Domain location=1-216; Score= -5.4; E_value=3.6e-08; Accession=PF00069.17; Description=Protein kinase domain
  Pfam annotation: Domain name=Pkinase_Tyr; Domain location=9-216; Score=-106.6; E_value=1.2e-06; Accession=PF07714.9; Description =Protein tyrosine kinase
  Pfam module annotation: Pfam domain module=Pkinase::Pkinase_Tyr; Domain location=1-216::9-216
ISYLSIFSFYGTLDSSYASLDELRGLEWRTRFDIVVGICNGLCYLHKEKNITHMDLKPANILVDDRMVPKITDFGLSRLHNNPQATTTSRLISPXAAYLNNILMFLKSYQFFMLHCHYVLLSCRGYSAPEYCSEGKSSLKSDIYSLGVIILELVSGSKNNPNITKVLRKWRHRWIKSLKHTPLGYQQVTKCIDLAQRCMEQDPADRPDISDIVQELNEIDSNDHQFQVRAYILLEPQEHY

SEQ ID NO: 67524 - protein, 202 aa, Setaria italica
  Transcript Sequence Number=SeqID_1550
  Gene Ontology: Mol. function=protein serine/threonine kinase activity; Cellular component=plasma membrane; Biological process =protein amino acid phosphorylation
  Homolog annotation: Hit_ID=Q2L3S0; Match level="QueryCoverage=92%, HitCoverage=39%, E-value=6e-20, Identity=34%"; Hit description =Putative vesicle associated membrane protein
  Pfam annotation: Domain name=Motile_Sperm; Domain location=74-181; Score=10.3; E_value=0.0014; Accession=PF00635.18; Description=MSP (Major sperm protein) domain
MVAQVLRKWRHRWIKSLKHTPLGYQQVTKCIDLAQRCMEQDPADRPDISDIVQELNEIDSSDHQFQVIPSLEDMLGIEPLEIQFPFEHYWQVSHTVELSNDTDDHFAFVTKPSLHRLRTEPDKGIVPPRSKCSVTVTMMQAQVMALLNNRYKEEITVLSTRVDGGLTAVDITKGMFMEEEGKVVDEVNVMVVLGRPPLEEES

SEQ ID NO: 67525 - protein, 435 aa, Setaria italica
  misc_feature (164)..(164): Xaa can be any naturally occurring amino acid
  Transcript Sequence Number=SeqID_1551
  Gene Ontology: Mol. function=actin binding; Cellular component =cytoskeleton
  Homolog annotation: Hit_ID=B9SL38; Match level="QueryCoverage=30%, HitCoverage=9%, E-value=6e-30, Identity=49%"; Hit description =Protein SCAR2, putative
EQEPPEGEAVLEGLAMAGLVAVLRQLGDLAELAAEVLDGLQDQVMAVSARGRRLAMRAKRLQADLTPSIHNKPNHRLDWHPRRNLNHHHQHGVGEAPPRSIVDHIKRCRGPPNLSALDRFDAHGEGACLKRYTDPSFFRTCHSDDCRSQTDASEKHLQRRRTTXTGSSPEPHMEMEKAKENRPGQSNDSPTSNCCSDYVGNCSDELERTSSFEAWLSPGARFSTHEYETADGTVHHAKQDSEAAETSCNKGVSIEDTNADTPPLVPIPPMQWLSVKVHTGPITYRNSFGRNRVNRAGGKILKTTELSEPAIHSYEAWSEAEGTNQQQVFNHKGPEISSCRGTTVSDSEANKPSQADSASGQGDEDSLHHENVLFSAVEQLAGMSPPWVPRPKHPLPEVASQDRITLRNGPSPIHRSRSILDSRTAMLHQIKDKDK

SEQ ID NO: 67526 - protein, 111 aa, Setaria italica
  Transcript Sequence Number=SeqID_1552
  Gene Ontology: Mol. function=nucleoside-triphosphatase activity; Cellular component=protein complex; Biological process=protein catabolic process
  Homolog annotation: Hit_ID=P46466; Match level="QueryCoverage=100%, HitCoverage=24%, E-value=1e-49, Identity=87%"; Hit description=26S protease regulatory subunit 4 homolog
  Pfam annotation: Domain name=AAA; Domain location=1-79; Score=-23.3; E_value=0.0028; Accession=PF00004.21; Description=ATPase family associated with various cellular activities (AAA)
TTNRIESLDPALLRPGRIDRKIEFPLPDIKTRRRIFQIHTSKMTLADDVNLEEFVMTKDEFSGADIKAICTEAGLLALRERRMKVTHADFKKAKEKVMYKKKEGVPDGLYM

SEQ ID NO: 67527 - protein, 611 aa, Setaria italica
  misc_feature (464)..(464): Xaa can be any naturally occurring amino acid
  misc_feature (508)..(508): Xaa can be any naturally occurring amino acid
  Transcript Sequence Number=SeqID_1553
  Gene Ontology: Mol. function=protein serine/threonine kinase activity; Biological process=protein amino acid phosphorylation
  Homolog annotation: Hit_ID=Q2L3S0; Match level="QueryCoverage=96%, HitCoverage=88%, E-value=1e-83, Identity=41%"; Hit description =Putative vesicle associated membrane protein
  Pfam annotation: Domain name=Pkinase; Domain location=211-483; Score =169.7; E_value=8.4e-48; Accession=PF00069.17; Description=Protein kinase domain
  Pfam annotation: Domain name=Pkinase_Tyr; Domain location=211-483; Score=72.4; E_value=1.5e-18; Accession=PF07714.9; Description =Protein tyrosine kinase
  Pfam module annotation: Pfam domain module=Pkinase::Pkinase_Tyr; Domain location=211-483::211-483
MVPKICADSSRFFDGNTSAEITETIAGSYGYLAPEYLLQGVITFKSDIYALGVIIAEILTGQKEYSSVANVLEGWRNRLGTSGEDTLLEQVRLCAEICIRCLDSNPNKRPAIQRIIEALDETESMTPDTQRIIEMLNDTESVDEFIEFESDMDISLPAAEPSNGVQQSTPTISGVESSEIMELNILERIVAGREEPSHLDLPLLYSVTERFSKNRRIGKGGCGEVYKGILRNADVAVKRLFNNRTIKDKMFHREVKSLITVRHQNIVRFLGYCSFTEERAISVEGQTVMVEIRERLLCFEYISNGSLERHLTDELRGLEWRTRFDIIVGVCNGLCYLHKEKNITHMDLKPANILVDDQMVPKITDFGLSRLDNNPQATTTSRLISPGYSAPEYHSEGKSSLKSDIYSLGVIILELVSGSKNNPNITKVLRKWRHRWIKSPTHKSSKHTPLGYQQVTKCIDLAQXCMEHDPADRPDISDIVQELNEIDTAGNTVSLEHYWQISHAIELXNDTDDHFAFFTKPSLHRLRTEPDKGIVPPRSKCSVTVTMMQAQVMVLLNNRYKEEITVLSTRVDGGLSAVDITKGMFMEEEGKVVDEVNVMVVLGRPPLEEES

SEQ ID NO: 67528 - protein, 479 aa, Setaria italica
  misc_feature (86)..(86): Xaa can be any naturally occurring amino acid
  misc_feature (135)..(135): Xaa can be any naturally occurring amino acid
  Transcript Sequence Number=SeqID_1554
  Gene Ontology: Mol. function=protein serine/threonine kinase activity; Biological process=protein amino acid phosphorylation
  Homolog annotation: Hit_ID=Q2L3S0; Match level="QueryCoverage=82%, HitCoverage=88%, E-value=4e-75, Identity=41%"; Hit description =Putative vesicle associated membrane protein
  Pfam annotation: Domain name=Motile_Sperm; Domain location=351-458; Score=18.2; E_value=0.00026; Accession=PF00635.18; Description=MSP (Major sperm protein) domain
  Pfam annotation: Domain name=Pkinase; Domain location=58-332; Score =181.9; E_value=1.8e-51; Accession=PF00069.17; Description=Protein kinase domain
  Pfam annotation: Domain name=Pkinase_Tyr; Domain location=58-332; Score=76.9; E_value=7.4e-20; Accession=PF07714.9; Description =Protein tyrosine kinase
  Pfam module annotation: Pfam domain module=Motile_Sperm::Pkinase::Pkin ase_Tyr; Domain location=351-458::58-332::58-332
MGIWPAEPSNGVQQSTPTISGVESSEIMELNILERIVAGREEPRHLDLPLLDSVTESFSENRRIGQGGCGEVYKGILRNADVAVKXFNNRTIKDKMFHREVTSLIMVRHQNIVRLLGYCSFTEEHAISFKGKHVXAQVRERLLCLEYISNGSLERHLTDELRGLEWCTRFDIIVGICNGLCYLHKEKNIIHMDLKPANILVDDWMVPKITDFGLSRLHDNPQATTTTSRLISPGYSAPEYCSEGKSSLKSDIYSLGVIILELVSGSKNNPNITKAQVLRKWRHRWIKSSTHKSSKHTPLGYQQVTKCIDLAQKCMEHDPADRPDISDIVQELNEIDSNDHQFQVIPSLEDMLGIEPLEIQFPFEHYWQVSHKVELSNDTDDHFAFVIKPSLHRLRTEPDKGIVPPRSNCSVSVTMMQAQVMALLNNRYKEKITVLSTRVDGGLSAVDITKGMFMEEEGKVVDEVNVMVVLGRPPLEEES

SEQ ID NO: 67529 - protein, 234 aa, Setaria italica
  Transcript Sequence Number=SeqID_1555
  Gene Ontology: Mol. function=ubiquinol-cytochrome-c reductase activity; Cellular component=mitochondrial respiratory chain; Biological process=electron transport chain
  Homolog annotation: Hit_ID=B4F892; Match level="QueryCoverage=79%, HitCoverage=68%, E-value=1e-102, Identity=96%"; Hit description =Ubiquinol-cytochrome c reductase iron-sulfur subunit
  Pfam annotation: Domain name=UCR_TM; Domain location=81-144; Score =2.7; E_value=0.0067; Accession=PF02921.6; Description=Ubiquinol cytochrome reductase transmembrane region
MLRVAGRRLSSALSRRPAAAAAAGTRGPLAGALPGRDDDDTRDSRARFAIDSPFFTAARGFSAETLVPRNQDVGLAELPATVAAVKNPSAKIVYDEYNHERYPPGDPSKRAFAYFVLSGGRFIYASLLRLLILKFVLSMSASKDVLALASLEVDLSSIEPGTTVTVKWRGKPVFIRRRTEDDIKLANSVDVASLRHPQQDAERVKNPEWLVVIGVCTHLGCIPLPNAGDFGGWF

SEQ ID NO: 67530 - protein, 306 aa, Setaria italica
  Transcript Sequence Number=SeqID_1556
  Gene Ontology: Mol. function=protein serine/threonine kinase activity; Cellular component=integral to membrane; Biological process=protein amino acid phosphorylation
  Homolog annotation: Hit_ID=Q2L3S0; Match level="QueryCoverage=94%, HitCoverage=61%, E-value=1e-49, Identity=41%"; Hit description =Putative vesicle associated membrane protein
  Pfam annotation: Domain name=Motile_Sperm; Domain location=179-286; Score=12.4; E_value=0.00087; Accession=PF00635.18; Description=MSP (Major sperm protein) domain
  Pfam annotation: Domain name=Pkinase; Domain location=2-160; Score= -18.1; E_value=2e-07; Accession=PF00069.17; Description=Protein kinase domain
  Pfam annotation: Domain name=Pkinase_Tyr; Domain location=1-160; Score=-128.9; E_value=3.7e-05; Accession=PF07714.9; Description =Protein tyrosine kinase
  Pfam module annotation: Pfam domain module=Motile_Sperm::Pkinase::Pkin ase_Tyr; Domain location=179-286::2-160::1-160
VALHVLTFVVGICNGLCYLHKEKNITHMDLKPANILVDDRMVPKITDFGLSRLHNNPQATTTSRLISPGYSAPEYCSEGKSSLKSDIYSLGVIILELVSGSKNNPNITKVLRKWRHRWIKSLKHTPLGYQQVTKCIDLAQRCMEQDPADRPDISDIVQELNEIDSNDHQFQVIPSLEDMLGIEPLEIQFPFEHYWQVSHTVELSNDTDDHFAFVTKPSLHRLRTEPDKGIVPPGSKCSVTVTMMQAQVMTLLHNRYKEEITVLSTRVDGGLTAVDIAKGMFMEEGKVVDEVNVMVVLGRPPLEEES

SEQ ID NO: 67531 - protein, 367 aa, Setaria italica
  misc_feature (298)..(298): Xaa can be any naturally occurring amino acid
  Transcript Sequence Number=SeqID_1557
  Gene Ontology: Mol. function=protein dimerization activity; Biological process=RNA-dependent DNA replication
  Homolog annotation: Hit_ID=A8QW51; Match level="QueryCoverage=99%, HitCoverage=99%, E-value=1e-173, Identity=80%"; Hit description=O -methyltransferase 2
  Pfam annotation: Domain name=Dimerisation; Domain location=34-82; Score=67.5; E_value=4.9e-17; Accession=PF08100.3; Description =Dimerisation domain
  Pfam annotation: Domain name=Methyltransf_2; Domain location=92-344; Score=225.2; E_value=1.7e-64; Accession=PF00891.10; Description=O -methyltransferase
  Pfam module annotation: Pfam domain module=Dimerisation::Methyltransf_ 2; Domain location=34-82::92-344
MAAASQTIIAPTDAELLQAQADLWRHSLYYLTSMALKCAVELHIPTAIHNLGGATSLPNLVTALSLPQTKLPFLRRLMRLLVTSGIFASERDAEVETYRLNPLSWLLVEGVEAEDHTYQKYFVLATVSRHYVEAGLSLADWFKKDLPASLPSPFEELHGVPLVHETTKLLDEELDRIVNEGVAAHDNLTIGTIIRECNDLFKGVQSLTDCCGGDGTTVRAIVKAFPDIKCTVLDLPKVIETAPAHDSVIYVAGDMFHTIPPAQAVMLKLVLHFWNDEDCVKILEQCRKAIPSREEGGXVIIIEIVLGPSMGPIMYEAQLLMDMLMMVNTRGRQRDENDWRDIFIKAGFSDYKIVKKIGARGIIEVYP

SEQ ID NO: 67532 - protein, 255 aa, Setaria italica
  misc_feature (204)..(204): Xaa can be any naturally occurring amino acid
  Transcript Sequence Number=SeqID_1558
  Gene Ontology: Mol. function=protein dimerization activity; Biological process=RNA-dependent DNA replication
  Homolog annotation: Hit_ID=A8QW51; Match level="QueryCoverage=99%, HitCoverage=69%, E-value=9e-98, Identity=69%"; Hit description=O -methyltransferase 2
  Pfam annotation: Domain name=Dimerisation; Domain location=34-82; Score=63.9; E_value=6.1e-16; Accession=PF08100.3; Description =Dimerisation domain
  Pfam annotation: Domain name=Methyltransf_2; Domain location=92-255; Score=-46.3; E_value=8.5e-06; Accession=PF00891.10; Description=O -methyltransferase
  Pfam module annotation: Pfam domain module=Dimerisation::Methyltransf_ 2; Domain location=34-82::92-255
MSAGSKSVLVPTDAELLQAQADLWRHSLYYLTSMAFKCAVELGVPTAIHNLGGAASVKDLVTTLSLPETKLPFLRRVMRLLVTSGIFASESSADVETYRLNPLSWLLVEGVDAEDHTNQRSFVLATVSRHYVEAAMSLADWFKKDLAPPLPSPFEELHGVPLLHEKTPLLDKDLHDVVLEGLAAHDNLAIGTIMRECHDSFSGXVQSLTDCCGGDGTTARAIVRAHPNIKCTVLDLPEVIKTAPADGVINYVAGD

SEQ ID NO: 67533 - protein, 449 aa, Setaria italica
  misc_feature (95)..(95): Xaa can be any naturally occurring amino acid
  misc_feature (241)..(241): Xaa can be any naturally occurring amino acid
  misc_feature (249)..(249): Xaa can be any naturally occurring amino acid
  Transcript Sequence Number=SeqID_1559
  Gene Ontology: Mol. function=nucleoside-triphosphatase activity; Cellular component=protein complex; Biological process=protein catabolic process
  Homolog annotation: Hit_ID=P46466; Match level="QueryCoverage=93%, HitCoverage=93%, E-value=0.0, Identity=95%"; Hit description=26S protease regulatory subunit 4 homolog
  Pfam annotation: Domain name=AAA; Domain location=228-417; Score =274.7; E_value=2e-79; Accession=PF00004.21; Description=ATPase family associated with various cellular activities (AAA)
  Pfam annotation: Domain name=AAA_2; Domain location=225-358; Score= -35.5; E_value=0.0063; Accession=PF07724.6; Description=ATPase family associated with various
  Pfam annotation: Domain name=AAA_5; Domain location=228-363; Score= -12.9; E_value=0.011; Accession=PF07728.6; Description=ATPase family associated with various
  Pfam module annotation: Pfam domain module=AAA::AAA_2::AAA_5; Domain location=228-417::225-358::228-363
MGQGTPGGMGKQGGAGDRKPGDGADKKDKKFEPPAAPSRVGRKQRKQKGAEAAARLPNVAPLSKCRLRLLKLERVKDYLLMEEEFVAAQERLRPXEDKAEEDRSKVDDLRGTPMSVGSLEEIIDESHAIVSSSVGPEYYVGILSFVDKDQLEPGCSILMHNKVLSVVGILQDEVDPMVSVMKVEKAPLESYADIGGLDAQIQEIKEAVELPLTHPELYEDIGIRPPKGVILYGEPGTGKTXLLAKAVAXNSTSATFLRVVGSELIQKYLGDGPKLVRELFRVADELSPSIVFIDEIDAVGTKRYDAHSGGEREIQRTMLELLNQLDGFDSRGDVKVILATNRIESLDPALLRPGRIDRKIEFPLPDIKTRRRIFQIHTSKMTLADDVNLEEFVMTKDEFSGADIKAICTEAGLLALRERRMKVTHADFKKAKEKVMYKKKEGVPDGLYM

SEQ ID NO: 67534 - protein, 185 aa, Setaria italica
  Transcript Sequence Number=SeqID_1560
  Gene Ontology: Mol. function=nucleic acid binding
  Homolog annotation: Hit_ID=B6U5X6; Match level="QueryCoverage=90%, HitCoverage=90%, E-value=5e-59, Identity=69%"; Hit description=DNA binding protein
  Pfam annotation: Domain name=DDA1; Domain location=35-97; Score=81.6; E_value=2.8e-21; Accession=PF10172.1; Description=Det1 complexing ubiquitin ligase
  Pfam annotation: Domain name=SAP; Domain location=150-184; Score =41.9; E_value=2.5e-09; Accession=PF02037.19; Description=SAP domain
  Pfam module annotation: Pfam domain module=DDA1::SAP; Domain location= 35-97::150-184
  Subcellular localization annotation: CTP_CleavageSite=47; ConfidenceScore=5.25e-01
MAAEEEGSGGGGGCSGGDRKGSPAPTKSGGGGAAKFLAGMPSRGNFSSGSVSSSLGGFRVYVCEHSTDPPEGQVIQTDSTNILIRHLQLNKQKSDAKDSGSRTPGENTRGKRSAARSLEMLNPAKRANLGTSSGSSVYEETISGFSQHTLQSFTVERLRALLRQTGLSTKGKKDELIARLRESQG

SEQ ID NO: 67535 - protein, 56 aa, Setaria italica
  Transcript Sequence Number=SeqID_1561
  Gene Ontology: Mol. function=serine-type endopeptidase activity; Biological process=negative regulation of catalytic activity
  Homolog annotation: Hit_ID=Q9AX30; Match level="QueryCoverage=100%, HitCoverage=6%, E-value=8e-12, Identity=69%"; Hit description =Subtilisin-like proteinase-like
LRFARAGEKKVFTIRMEARATGTSNGGVVRGQFVAGSYAWSDGVHVVRSPIVVLVA

SEQ ID NO: 67536 - protein, 97 aa, Setaria italica
  Transcript Sequence Number=SeqID_1562
SFQFSPIREPAATIFSSERGNMSNEQLEVPKLVSSCPVIDNSKEAKNTGEDNAVQKSNNERSPAIKSPQPFSPDAVQQMKSAQNMQSPLRHDGHESK

SEQ ID NO: 67537 - protein, 222 aa, Setaria italica
  misc_feature (52)..(52): Xaa can be any naturally occurring amino acid
  Transcript Sequence Number=SeqID_1563
  Gene Ontology: Cellular component=plasma membrane
  Homolog annotation: Hit_ID=B9RTK7; Match level="QueryCoverage=89%, HitCoverage=44%, E-value=1e-23, Identity=38%"; Hit description=Ice binding protein, putative
  Pfam annotation: Domain name=DUF828; Domain location=2-222; Score =358.5; E_value=1.2e-104; Accession=PF05703.3; Description=Plant protein of unknown function (DUF828)
ELEDCGVAAASGSSFSFASAATSQLIMERILAQSQEVAPLTSGRLSHSSGPXNGGGSLSDSPPVSPEIDDAKYCRAVSTPKPQAYRPGNKTVGRWLKDRKEKKKEETRAHNAQVHAAVSVAAVAAAVAAVAAATAAASGSGKDDRAARTDMAVASAATLVAAQCVEAAESMGAEREHLEAVVGSAVNVRTPGDIVTVTAAAATALRGAATLKARALKEVWNI

SEQ ID NO: 67538 - protein, 52 aa, Setaria italica
  Transcript Sequence Number=SeqID_1564
  Gene Ontology: Mol. function=calcium ion binding; Cellular component =flagellin-based flagellum; Biological process=ciliary or flagellar motility
  Homolog annotation: Hit_ID=Q7F0J0; Match level="QueryCoverage=100%, HitCoverage=31%, E-value=2e-20, Identity=94%"; Hit description =Probable calcium-binding protein CML13
  Pfam annotation: Domain name=efhand; Domain location=26-52; Score =27.8; E_value=4.4e-05; Accession=PF00036.24; Description=EF hand
STSKGQTRRERPRTRPHGLTKQKRQEIKEAFDLFDTDNSGTIDAKELNVAMR

SEQ ID NO: 67539 - protein, 91 aa, Setaria italica
  misc_feature (15)..(15): Xaa can be any naturally occurring amino acid
  Transcript Sequence Number=SeqID_1565
  Gene Ontology: Mol. function=calcium ion binding; Cellular component =chromatin; Biological process=ciliary or flagellar motility
  Homolog annotation: Hit_ID=Q5GAP6; Match level="QueryCoverage=73%, HitCoverage=28%, E-value=1e-25, Identity=83%"; Hit description =Putative caltractin
  Pfam annotation: Domain name=efhand; Domain location=36-64; Score =40.4; E_value=7e-09; Accession=PF00036.24; Description=EF hand
KSISVYLFDQDRNGXISNIDIQRIAKELGVNLTLDEIQDMVQEADRNGDGEIDFDEFTKMMRRTSYGYFAYHLCERLMLCSRSIASYRLCC

SEQ ID NO: 67540 - protein, 175 aa, Setaria italica
  Transcript Sequence Number=SeqID_1566
  Gene Ontology: Mol. function=calcium ion binding; Cellular component =flagellin-based flagellum; Biological process=ciliary or flagellar motility
  Homolog annotation: Hit_ID=Q7F0J0; Match level="QueryCoverage=95%, HitCoverage=99%, E-value=2e-82, Identity=90%"; Hit description =Probable calcium-binding protein CML13
  Pfam annotation: Domain name=efhand; Domain location=107-135; Score =22.6; E_value=0.0017; Accession=PF00036.24; Description=EF hand
  Pfam annotation: Domain name=efhand; Domain location=143-171; Score =40.4; E_value=7e-09; Accession=PF00036.24; Description=EF hand
  Pfam annotation: Domain name=efhand; Domain location=34-62; Score =39.8; E_value=1.1e-08; Accession=PF00036.24; Description=EF hand
  Pfam annotation: Domain name=efhand; Domain location=70-98; Score =37.9; E_value=4.2e-08; Accession=PF00036.24; Description=EF hand
  Pfam module annotation: Pfam domain module=efhand::efhand::efhand::efh and; Domain location=107-135::143-171::34-62::70-98
METQPSFRSTSKGQTRRERPRTRPHGLTKQKRQEIKEAFDLFDTDNSGTIDAKELNVAMRALGFEMTEEQINQMIADVDKDGSGAIDYEEFEHMMTAKIGERDSKEELTKAFRIIDQDRNGKISNIDIQRIAKELGVNLTLDEIQDMVQEADRNGDGEIDFDEFTKMMRRTSYGY

SEQ ID NO: 67541 - protein, 60 aa, Setaria italica
  Transcript Sequence Number=SeqID_1567
HLTPQSPFDTVNFELRKENSHVHAFLSKQSRVQNECPAPRMETPWRHCKHNAVLSLSPAE

SEQ ID NO: 67542 - protein, 83 aa, Setaria italica
  Transcript Sequence Number=SeqID_1568
SRSARSLDESMTVIDFPEVSSAGAELRKYQEEKEAFAREAVALRRMLQEMVGKGASVSLHGEDPDETPLHSMLDDCSRLVLEL

SEQ ID NO: 67543 - protein, 58 aa, Setaria italica
  Transcript Sequence Number=SeqID_1569
NCERKLHSLHAKVQESRILFDIASHCVGLSLLYSQSIGVSEVFGCHTADPVQSQLDDD

SEQ ID NO: 67544 - protein, 530 aa, Setaria italica
  Transcript Sequence Number=SeqID_1570
  Gene Ontology: Mol. function=protein serine/threonine kinase activity; Cellular component=chloroplast; Biological process=protein amino acid phosphorylation
  Homolog annotation: Hit_ID=Q6RK06; Match level="QueryCoverage=99%, HitCoverage=77%, E-value=0.0, Identity=94%"; Hit description=Tousled- like kinase 2
  Pfam annotation: Domain name=Pkinase; Domain location=252-525; Score =219.0; E_value=1.2e-62; Accession=PF00069.17; Description=Protein kinase domain
  Pfam annotation: Domain name=Pkinase_Tyr; Domain location=252-523; Score=-25.2; E_value=4.8e-12; Accession=PF07714.9; Description =Protein tyrosine kinase
  Pfam module annotation: Pfam domain module=Pkinase::Pkinase_Tyr; Domain location=252-525::252-523
LHQTRVTSTSSSVVTNGQLDKLTNKEPRSSVQSGHDDKAAVQEELSMLRGKVACLEEELAKSRQEATNYHQLSDRLAKELKDLKDHDQQMRSKQMKVLSDLLIAVSKAERQEARMRIRQESFRLGNVGVMRAGTIISETWEDGQAIKDLNSHLKSLLETKETIERHRKSLKKRQSDKGDGSDAETSMSEEDILLQDEICKSRLTSIKREEEQYLKERDRYELEKGRLIREMKRLRDEDGSRFNNFQILHHRYALLNLLGKGGFSEVYKAFDLVEYKYVACKLHGLNAQWSEEKKQSYIRHAIREYNIHKTLVHPNIVRLWDIFEIDHNTFCTVLEYCSGKDLDAVLKATPILPEKEARIIIVQIFQGLVYLNKRGQKIIHYDLKPGNVLFDEIGVAKVTDFGLSKIVEDDVGSQGMELTSQGAGTYWYLPPECFDLSKTPFISSKVDVWSAGVMFYQMLFGRRPFGHDQTQERILREDTIINARRVEFPSKPAVSNEAKDLIRRCLTYNQSERPDVLTIAQEPYLSYAKR

SEQ ID NO: 67545 - protein, 91 aa, Setaria italica
  Transcript Sequence Number=SeqID_1571
TWLGSSGTPESNSVRSYSPISREDRPILGALTVEDIKISSANSSPRRSRSPSPSPDDMPILGTVGAYWNCSAKGADPVTRGGFMRTRTRFG

SEQ ID NO: 67546 - protein, 170 aa, Setaria italica
  Transcript Sequence Number=SeqID_1572
  Gene Ontology: Mol. function=structural constituent of ribosome; Cellular component=ribonucleoprotein complex; Biological process =translation
  Homolog annotation: Hit_ID=Q5R1X9; Match level="QueryCoverage=100%, HitCoverage=100%, E-value=6e-75, Identity=81%"; Hit description =Ribosomal L14 protein
  Pfam annotation: Domain name=Ribosomal_L14; Domain location=52-170; Score=147.5; E_value=4.2e-41; Accession=PF00238.11; Description =Ribosomal protein L14pL23e
  Subcellular localization annotation: CTP_CleavageSite=33; ConfidenceScore=5.04e-01
MAAFLRSKCLSVGRTLMGSLGNNLYGAASSSVEAATRPSRCDAISQQIRTFIQMRTNLKVVDNSGAKRVMCIQAKRGKYGARLGDTIIGSVKEAQPRGKVKKGDVVYGVVVRAAMKKGRSDGSEVQFDDNAIVLVNNKGELIGTRVFGPVPHELRKKKHLKILALAEHIV

SEQ ID NO: 67547 - protein, 272 aa, Setaria italica
  misc_feature (100)..(100): Xaa can be any naturally occurring amino acid
  misc_feature (253)..(253): Xaa can be any naturally occurring amino acid
  misc_feature (270)..(270): Xaa can be any naturally occurring amino acid
  Transcript Sequence Number=SeqID_1573
  Gene Ontology: Mol. function=hydrolase activity, hydrolyzing O -glycosyl compounds; Cellular component=cell wall; Biological process= carbohydrate metabolic process
  Homolog annotation: Hit_ID=B6TQ18; Match level="QueryCoverage=88%, HitCoverage=79%, E-value=1e-120, Identity=86%"; Hit description =Xyloglucan endotransglucosylase/hydrolase protein 1
  Pfam annotation: Domain name=Glyco_hydro_16; Domain location=33-218; Score=250.9; E_value=3e-72; Accession=PF00722.13; Description =Glycosyl hydrolases family 16
MGAKNCSPWRLFLLLVVVLLVAAAGSAAAEAAFDKNYEVQWGADGYHLVNRGTEANITMDQSSGAGFRSKSMYGSGFFHMRMKLPSGYTAGVVTTFYLIXQPEDGSRDEVDFEFLGDKAGVPITLQTNVFVNGRGDREQRMHLGFDPAADFHDYKILWNPYQLVMFVDDTPIRVLRNLTATVPGYPFPAKQTMLIRASMWDGSGWATDGGRTKVDWSKGPFTAGYRGFDVSGCANGSATPCSSPDLWWNGGEXRNITAEQRAAYERVKKXYM

SEQ ID NO: 67548 - protein, 62 aa, Setaria italica
  Transcript Sequence Number=SeqID_1574
FWKSMGNNHGCGSYGSFSTGKGSKWTSEPASLHGRPAYYLDLLQSAHHCYMHLITSHSYFFR

SEQ ID NO: 67549 - protein, 156 aa, Setaria italica
  misc_feature (25)..(25): Xaa can be any naturally occurring amino acid
  Transcript Sequence Number=SeqID_1575
  Gene Ontology: Mol. function=hydrolase activity, acting on carbon -nitrogen (but not peptide) bonds; Cellular component=chloroplast; Biological process=nitrogen compound metabolic process
  Homolog annotation: Hit_ID=B9RQU7; Match level="QueryCoverage=100%, HitCoverage=47%, E-value=1e-71, Identity=79%"; Hit description =Nitrilase and fragile histidine triad fusion protein, putative
  Pfam annotation: Domain name=CN_hydrolase; Domain location=1-138; Score=78.2; E_value=2.9e-20; Accession=PF00795.14; Description =Carbon-nitrogen hydrolase
NGPYSNDSFPEYAEDIEAGGDAAPXFSMMSEVARSLQITLVGGSIAERSGNNLYNTCCVFGSDGKLKGKHRKIHLFDIDIPGKITFKESKTLTAGQSPTVVDTDVGRIGIGICYDIRFQELAMLYAARGAHLLCYPGAFNMTTGPLHWELLQRARA

SEQ ID NO: 67550 - protein, 344 aa, Setaria italica
  Transcript Sequence Number=SeqID_1576
  Gene Ontology: Mol. function=hydrolase activity, acting on carbon -nitrogen (but not peptide) bonds; Cellular component=chloroplast; Biological process=nitrogen compound metabolic process
  Homolog annotation: Hit_ID=B9RQU7; Match level="QueryCoverage=82%, HitCoverage=92%, E-value=1e-105, Identity=64%"; Hit description =Nitrilase and fragile histidine triad fusion protein, putative
  Pfam annotation: Domain name=CN_hydrolase; Domain location=64-242; Score=191.1; E_value=3.1e-54; Accession=PF00795.14; Description =Carbon-nitrogen hydrolase
  Subcellular localization annotation: CTP_CleavageSite=33; ConfidenceScore=5.45e-01
ATSTAAALLAPRLTCSAIRARLSSSRLPLRRIAAMAAAPSSFRPEEARSPPALELPIPPLSKFKVAMCQLSVTPDKARNIAHARAAIEAAAADGAKLVLLPEIWNGPYSNDSFPEYAEDIEAGGDAAPSFSMMSEVARSLQITLVGGSIAERSGNNLYNTCCVFGSDGKLKGKHRKIHLFDIDIPGKITFKESKTLTAGQSPTVVDTDVGRIGIGICYDIRFQELAMLYAARGAHLLCYPGAFNMTTGPLHWELLQRARAADNQLFVATCGPARDASAGYVAWGHSTLVGPFGEVIVTTEHEETTIIAEIDYSLIEQRRQFLPLQYQRRGDLYQLVDVQRLGSQ

SEQ ID NO: 67551 - protein, 461 aa, Setaria italica
  Transcript Sequence Number=SeqID_1577
  Gene Ontology: Mol. function=hydrolase activity, acting on glycosyl bonds; Biological process=cell wall organization and biogenesis
  Homolog annotation: Hit_ID=B6T994; Match level="QueryCoverage=92%, HitCoverage=93%, E-value=0.0, Identity=89%"; Hit description =Polygalacturonase
  Pfam annotation: Domain name=Glyco_hydro_28; Domain location=57-401; Score=-51.0; E_value=1.5e-06; Accession=PF00295.9; Description =Glycosyl hydrolases family 28
MASPPLQLSAAPLLLLLLVVVIRAARSSRVFSVVDYGAAGDGSRYDTAAIQAAVDACAAAGGGRVLLPAPGNYLTATVHLRSRVVLEVAPGARLLGGTRQADYPPESRRWYVVLAENTTGAGVTGGGEINGQGGAFVVTPSEVKNVMVSWNTTGDCQLGDECRPRLVGFIDSKDVRIHDITLNQPAYWCLHLVRCDNTVIHNVSIFGDFNTPNNDGIDIEYSNNTVITNCHIDTGDDAICSKSSAGPVYNLTAANCWIRTKSCAIKFGSQSSFSFKRLLFDNITIVDSHRGVGMQIRDGGNVSDVVFSNIKMSTRYYHPLWWGRAEPIYITTCPRHPDSKEGTISDIRFINISSVSENGVFLAGSKHGLLRNLKFKNVDLTYKRWTNYTGGLYDYRPGCQEMVKHKTGGMMLEHISGLEIDNVRMRWARGNLKGWDVNPLLFRPSTIDKLSFHDWQSVDVQ

SEQ ID NO: 67552 - protein, 157 aa, Setaria italica
  Transcript Sequence Number=SeqID_1578
  Gene Ontology: Mol. function=nutrient reservoir activity
SVSCSLHFFGGSGIYLQHVLCLYACYLHCHFSFAFYAVFFCCILYTDVQTIFLQNRARNQMSGGYSQQGYRPPRPQSNWGPPGAPPQQPGYGYMQPGAYPGAPPQYGAPQQPYGSYPPTSGGYQTAGWDQSQNQQSHTTPPGTGYDYYSQQDKYKPY

SEQ ID NO: 67553 - protein, 688 aa, Setaria italica
  Transcript Sequence Number=SeqID_1579
  Gene Ontology: Mol. function=RNA binding
  Homolog annotation: Hit_ID=B9RRU4; Match level="QueryCoverage=43%, HitCoverage=93%, E-value=3e-59, Identity=64%"; Hit description =Nucleic acid binding protein, putative
  Pfam annotation: Domain name=KH_1; Domain location=142-207; Score =64.3; E_value=4.5e-16; Accession=PF00013.21; Description=KH domain
  Pfam annotation: Domain name=KH_1; Domain location=237-303; Score =79.6; E_value=1.1e-20; Accession=PF00013.21; Description=KH domain
  Pfam annotation: Domain name=KH_2; Domain location=142-186; Score =3.7; E_value=0.13; Accession=PF07650.9; Description=KH domain
  Pfam annotation: Domain name=KH_2; Domain location=237-289; Score =13.6; E_value=0.012; Accession=PF07650.9; Description=KH domain
  Pfam module annotation: Pfam domain module=KH_1::KH_1::KH_2::KH_2; Domain location=142-207::237-303::142-186::237-289
  Subcellular localization annotation: CTP_CleavageSite=67; ConfidenceScore=5.14e-01
MADDHYSSKRKYDDPSPPPRRTGFSSGPPPVSPPAGGAQSYNSVPPPPDEIQLAKQRAQEIAARIFNAAEAKRPRVDNGDDDVGGYGGGGSLGSSGGGGRIGGGGLGFSSSAGGGHGSSIPPISSQSSAPPYSSYGGYQGTSKKIEIPNGRVGVIIGKAGETIRYLQLQSGAKIQVTRDNEAEPGAQTRPVELSGAPEQISKAEQLIKEVLAEADAGSSGTGSGGRKYNAPQPGAETFQMKIANNKVGLVIGKGGETIKSMQAKSGARIQVIPLHLPAGDTSTERTVHIDGTQEQIEIAKQLVIEVTSENRARNQMSGGYSQQGYRPPRPQSNWGPPGAPPQQPGYGYMQPGAYPGAPPQYGAPQQPYGSYPPTSGGYQTAGWDQSQNQQSHTTPPGTGYDYYSQQQQPQQQSAPGTAASTDATSYNYGQPPTYTSQGYDSTYSQQSAGQQAYDYSGYQTQGQQQGYSQQAGYDQQSYGASAYGSAASSTQDGSAPSYGGTGGASQASPGQQTSTQAAGSHPGYASQPPTSAAASYPAQGSAPSGYGAPPPQSGYGTQPPPQGGYGQGAYGQPSPQGQKPPASSPYGQAPPPGSAQAGYGQYGYSQPGYGAPPPYPGAPPASHPGYGQQQSYVDAYGSGSYGQPPAYSTEATATATSQDQSAAPAPVGATTTSAPAPANSGGAQSAES

SEQ ID NO: 67554 - protein, 126 aa, Setaria italica
  misc_feature (99)..(99): Xaa can be any naturally occurring amino acid
  Transcript Sequence Number=SeqID_1580
  Gene Ontology: Mol. function=hydrolase activity, acting on glycosyl bonds; Cellular component=vacuole; Biological process=cell wall organization and biogenesis
  Homolog annotation: Hit_ID=B6TDS0; Match level="QueryCoverage=94%, HitCoverage=26%, E-value=4e-50, Identity=78%"; Hit description =Polygalacturonase
TLFLARGAVIRATQDTPSWPLIGPLPSYGRGRELPGGRYISLIHGSGLQDVVITGENGTIDGQGSVWWDMWKKGTLPYTRPHLLELMSSSGIIVSNIVXQDSPFWNIHPVYCSNVVIKKCDCTSST

SEQ ID NO: 67555 - protein, 97 aa, Setaria italica
  Transcript Sequence Number=SeqID_1581
  Gene Ontology: Mol. function=hydrolase activity; Biological process =metabolic process
  Homolog annotation: Hit_ID=B6SXT6; Match level="QueryCoverage=93%, HitCoverage=26%, E-value=2e-18, Identity=58%"; Hit description =Gibberellin receptor GID1L2
GGVPPPDLPVEWKDVVYDGAHGLRLRMYRLSTAGAGGRVEEKKLPVLVYFHGGGFCVASFEVINFHAGALRLAAELPAVVLSADYRLAPEHRPPRRA

SEQ ID NO: 67556 - protein, 147 aa, Setaria italica
  Transcript Sequence Number=SeqID_1582
  Gene Ontology: Mol. function=DNA primase activity; Biological process= DNA replication
  Homolog annotation: Hit_ID=UPI0001A7B343; Match level="QueryCoverage =64%, HitCoverage=15%, E-value=1e-33, Identity=68%"; Hit description =DNA primase
  Pfam annotation: Domain name=Herpes_UL52; Domain location=27-93; Score=77.5; E_value=4.9e-20; Accession=PF03121.7; Description =Herpesviridae UL52UL70 DNA primase
KISFPALDGFILSLACIHFTAGKIRSWYWFSQYGLMIYSMLRSRYCENIGREHKSNHVMYIVDFQRAAYYQKCYDPDCQGYRSPLRPVPWDVMPELSSVAESAQAEYQGEVVEINFDDSSRNGCYLSGGKSVMESYEDPDWCRSSEI

SEQ ID NO: 67557 - protein, 150 aa, Setaria italica
  Transcript Sequence Number=SeqID_1583
  Gene Ontology: Mol. function=nucleoside-triphosphatase activity; Cellular component=membrane; Biological process=transport
  Homolog annotation: Hit_ID=Q8GU82; Match level="QueryCoverage=100%, HitCoverage=11%, E-value=2e-48, Identity=59%"; Hit description=PDR -like ABC transporter
TFELFDDIILLCEGRIIYHGPRHNVVGFFDTIGFTCPSRKSVADFLQEVTSKMDQQQYWAGAEREYQYHTIERFEKYFRAYNPPRLLEDKQCQKDDKQDSKASEAADSKNISKWNIFKACFLREVLLVKRNSPVHVFKAVQIILFAFVLA

SEQ ID NO: 67558 - protein, 114 aa, Setaria italica
  Transcript Sequence Number=SeqID_1584
  Gene Ontology: Mol. function=hydrolase activity; Biological process =lipid catabolic process
  Homolog annotation: Hit_ID=Q29VI1; Match level="QueryCoverage=52%, HitCoverage=13%, E-value=9e-21, Identity=76%"; Hit description =Patatin-like protein
RASSSVLLLHRPVLVSSSWQQNKREEPAAGRRSYSPRHPFFHHKCSSGACDAVGDRVTVLTIDGGGIRGLIPGTVLAYLEEQLQELDGPEARLADYFDYIAGTSTGGLITAMLA

SEQ ID NO: 67559 - protein, 347 aa, Setaria italica
  Transcript Sequence Number=SeqID_1585
  Gene Ontology: Mol. function=transferase activity, transferring glycosyl groups; Cellular component=integral to membrane; Biological process=cell wall organization and biogenesis
  Homolog annotation: Hit_ID=Q6YWK8; Match level="QueryCoverage=100%, HitCoverage=60%, E-value=0.0, Identity=88%"; Hit description =Probable mannan synthase 11
VNIKYEVRGNRKGYKAGALKEGLKHDYVKDCQYIAMFDADFQPESDFLLRTIPFLVHNPEIALVQTRWKFVNSDECLLTRFQEMSLDYHFKYEQEAGSSVYSFFGFNGTAGVWRISAIDDAGGWKDRTTVEDMDLAVRAMLRGWKFVYIGDIKVKSELPSTFKAYRFQQHRWSCGPANLFKKMMVEILESKKVSLWSKIHLCYDFFFVGKVAAHTVTFIYYCFAIPVSVLLPEIQIPLWGVVYVPTVITLLKALGTPSSFHLVILWVLFENVMSLHRIKAAVSGLLDAGGRVNEWVVTEKLGDANKTKPNINGSDSIKVIDVKLTEPDSPLVPKLVKKRTRFWERYH

SEQ ID NO: 67560 - protein, 57 aa, Setaria italica
  Transcript Sequence Number=SeqID_1586
RDIPYLVVVGKKLRNMPIFWLTGSYIVLDTAFSFFFPHYVLKIGEASYRTCYSHVTY

SEQ ID NO: 67561 - protein, 75 aa, Setaria italica
  Transcript Sequence Number=SeqID_1587
  Gene Ontology: Mol. function=hydrolase activity, acting on carbon -nitrogen (but not peptide) bonds
MVTPSRALLLLLPLLAVAASHPAHEFCAAGGDAGCGDGGDGTRILIKGGTVVNAHRAEEADVYIEDGVVVAVRPN

SEQ ID NO: 67562 - protein, 70 aa, Setaria italica
  Transcript Sequence Number=SeqID_1588
KRDFLYGLSTKKNIQTTEMETQLQYELTRSFWQLIKYKYVEGNLQVYLPSKSMKQQIHHNDNSLHLLIKK

SEQ ID NO: 67563 - protein, 55 aa, Setaria italica
  Transcript Sequence Number=SeqID_1589
DTAKVPQAWVTLYAACILSGNLQSSKTFHITQGDSDYVLKNSTSALNPGWLQGSH

SEQ ID NO: 67564 - protein, 55 aa, Setaria italica
  Transcript Sequence Number=SeqID_1590
  Gene Ontology: Mol. function=hydrolase activity, acting on ester bonds; Cellular component=apoplast; Biological process=lipid metabolic process
  Homolog annotation: Hit_ID=B9RQB3; Match level="QueryCoverage=98%, HitCoverage=15%, E-value=9e-16, Identity=70%"; Hit description=Zinc finger protein, putative
SIQHAIPLSQQLQYFREYQSKLAAVAGGAQAHSIISGALYIISAGASDFVQNYYI

SEQ ID NO: 67565 - protein, 161 aa, Setaria italica
  Transcript Sequence Number=SeqID_1591
  Gene Ontology: Mol. function=hydrolase activity, acting on ester bonds; Cellular component=apoplast; Biological process=lipid metabolic process
  Homolog annotation: Hit_ID=B9RQB3; Match level="QueryCoverage=88%, HitCoverage=40%, E-value=5e-55, Identity=74%"; Hit description=Zinc finger protein, putative
  Pfam annotation: Domain name=Lipase_GDSL; Domain location=31-161; Score=-13.3; E_value=0.063; Accession=PF00657.14; Description=GDSL -like LipaseAcylhydrolase
VGLVLVRWSSCLPSSVGVFHGGGAQPLVPAVMTFGDSSVDVGNNDYLHTIIKANFPPYGRDFANHVATGRFCNGKLATDITADTLGFTTYPAAYLSPQASGQNLLIGANFASAGSGYYDHTALMYHAIPLSQQLQYFREYQSKLAAVAGGAQAHSIISGAL

SEQ ID NO: 67566 - protein, 313 aa, Setaria italica
  misc_feature (45)..(45): Xaa can be any naturally occurring amino acid
  Transcript Sequence Number=SeqID_1592
  Gene Ontology: Mol. function=hydrolase activity, acting on ester bonds; Cellular component=apoplast; Biological process=lipid metabolic process
  Homolog annotation: Hit_ID=B9SN62; Match level="QueryCoverage=99%, HitCoverage=86%, E-value=1e-112, Identity=61%"; Hit description=Zinc finger protein, putative
  Pfam annotation: Domain name=Lipase_GDSL; Domain location=1-304; Score=158.5; E_value=2e-44; Accession=PF00657.14; Description=GDSL -like LipaseAcylhydrolase
GNNDYLHTIIKANFPPYGRDFANHVATGRFCNGKLATDITADTLXGFTTYPAAYLSPQASGQNLLIGANFASAGSGYYDHTALMYHAIPLSQQLQYFREYQSKLAAVAGGAQAHSIISGALYIISAGASDFVQNYYINPFLFKTQTADQFSDRLVAIFSNTVSQLYGMGARRIGVTSLPPLGCLPASITLFGHGSNGCVSRLNRDSQSFNGKMNATVEALSRRYPDLKIAVFDIYTPLHDLATDPQAQGFTEARRGCCGTGTVETTVLLCNPKSVGTCPNATSYVFWDAVHPSEAANQVIADSLITEGLNLVT

SEQ ID NO: 67567 - protein, 287 aa, Setaria italica
  misc_feature (229)..(229): Xaa can be any naturally occurring amino acid
  Transcript Sequence Number=SeqID_1593
  Gene Ontology: Mol. function=hydrolase activity, acting on ester bonds; Cellular component=apoplast; Biological process=lipid metabolic process
  Homolog annotation: Hit_ID=B9SN62; Match level="QueryCoverage=86%, HitCoverage=69%, E-value=5e-93, Identity=65%"; Hit description=Zinc finger protein, putative
  Pfam annotation: Domain name=Lipase_GDSL; Domain location=35-280; Score=98.9; E_value=1.8e-26; Accession=PF00657.14; Description=GDSL -like LipaseAcylhydrolase
MAPATTLQARWLLAVALLLAVGIHGGGAQPLVPAVMTFGDSSVDVGNNDYLHTIIKANFPPYGRDFANHVATGRFCNGKLATDITADTLGFTTYPAAYLSPQASGQNLLIGANFASAGSGYYDHTALMYHAIPLSQQLQYFREYQSKLAAVAGGAQAHSIISGALYIISAGASDFVQNYYINPFLFKTQTADQFSDRLVAIFSNTVSQLYGMGARRIGVTSLPPLGCLXGRSITLFGHGSNGCVSRLNRDSQSFNGKMNATVEALSRRYPDLKIAVFRTILYLRSVL

SEQ ID NO: 67568 - protein, 56 aa, Setaria italica
  Transcript Sequence Number=SeqID_1594
  Gene Ontology: Mol. function=hydrolase activity, acting on carbon -nitrogen (but not peptide) bonds; Cellular component=cytosol; Biological process=pyrimidine base catabolic process
  Homolog annotation: Hit_ID=B9SXX3; Match level="QueryCoverage=85%, HitCoverage=9%, E-value=9e-19, Identity=83%"; Hit description =Dihydropyrimidinase, putative
QKAFGSDDFRKIPNGVNGLEERMHIIWDSMVETGKISVTDYVRVTSTEWYYTLTLL

SEQ ID NO: 67569 - protein, 57 aa, Setaria italica
  Transcript Sequence Number=SeqID_1595
  Gene Ontology: Mol. function=hydrolase activity, acting on carbon -nitrogen (but not peptide) bonds
  Homolog annotation: Hit_ID=Q9FMP3; Match level="QueryCoverage=98%, HitCoverage=10%, E-value=5e-22, Identity=83%"; Hit description =Dihydropyrimidinase
NFINTPLYVVHVMSVDAMEEIAKAKREGQRVIGEPVVSGLVLDDSWLWDPDFIVASK

SEQ ID NO: 67570 - protein, 66 aa, Setaria italica
  Transcript Sequence Number=SeqID_1596
  Subcellular localization annotation: CTP_CleavageSite=30; ConfidenceScore=5.24e-01
ISWFLHFVGSFIMIDDSSSSSFYRVSWPIVLSTKKRFISFVDDRVFKKDRFFTPFGSGFWLVYRRS

SEQ ID NO: 67571 - protein, 98 aa, Setaria italica
  Transcript Sequence Number=SeqID_1597
  Subcellular localization annotation: CTP_CleavageSite=29; ConfidenceScore=5.30e-01
PFLACPHYLLLHLSIPPVLSLTLSSPSLTCSLSTPPFLPRSTHPAFLACPHYLLLHLFFLLPTSPHFPFHHHQNHTHPRPRARTGPRKRRNRIQSLNP

SEQ ID NO: 67572 - protein, 393 aa, Setaria italica
  Transcript Sequence Number=SeqID_1598
MKEDKKVMNVDIQDAKEADGEHMKIVEEKTDGRIAEAIENRKKREIEGNAEENKTDARIDAENVIMVDQESACQNKDKEEKTDDSQDAKAAEGEDIKVVEAKSDAGNAGVKENGKKEEKEQHNEEKANDVNNQADEVKIVDKEDACQKEDNGRKNEDSHRAKAAGCEEIMVVEAKSTDVHAEVKENGKKEEDQNTTEEEQNDDKEEIICVKRQDEDRMEPTEVDKQEKQDGSNEEEKGGVDKLHVSDGEESVKESQEVLKGEAKDNVDKQEMDDREENVKEKQDGLEEEGVGSSKHEVAKDEQDGAAEKQEGEKQDGNVASEKKEEEKQDAKLTAEEKDKTQDRKVATEKKEEEEVNKNVAFENNAEIVIEMGVSEKDEEMETNGKTTADKQG

SEQ ID NO: 67573 - protein, 146 aa, Setaria italica
  Transcript Sequence Number=SeqID_1599
  Gene Ontology: Mol. function=transcription regulator activity; Cellular component=nucleus; Biological process=regulation of transcription
  Homolog annotation: Hit_ID=Q8L5G8; Match level="QueryCoverage=71%, HitCoverage=20%, E-value=1e-41, Identity=82%"; Hit description =Hexokinase
  Pfam annotation: Domain name=Hexokinase_1; Domain location=45-146; Score=-61.6; E_value=2.9e-06; Accession=PF00349.13; Description =Hexokinase
CIGKAAAVGTAVVVCAAVGVAVVLARRRRRRDAELLGSADADRKRRAAAVIEEVERSLATPTALLRSIADAMVTEMERGLRADIHAQLKMLISYVDNLPTGDEHGLFYALDLGGTNFRVLRVQLGGREKRVVKQQMWWNGNLLILL

SEQ ID NO: 67574 - protein, 432 aa, Setaria italica
  Transcript Sequence Number=SeqID_1600
  Gene Ontology: Mol. function=transcription regulator activity; Cellular component=nucleus; Biological process=regulation of transcription
  Homolog annotation: Hit_ID=Q8L5G8; Match level="QueryCoverage=99%, HitCoverage=84%, E-value=0.0, Identity=92%"; Hit description =Hexokinase
  Pfam annotation: Domain name=Hexokinase_1; Domain location=1-176; Score=179.1; E_value=1.3e-50; Accession=PF00349.13; Description =Hexokinase
  Pfam annotation: Domain name=Hexokinase_2; Domain location=183-427; Score=251.0; E_value=2.9e-72; Accession=PF03727.8; Description =Hexokinase
  Pfam module annotation: Pfam domain module=Hexokinase_1::Hexokinase _2; Domain location=1-176::183-427
ERGHDGTIHAQLKMLISYVDNLPTGDEHGLFYALDLGGTNFRVLRVQLGGREKRVVKQQYEEVSIPPHLMVGTSLELFDFIAAALAKFVDTEGEDFHLPEGRQRELGFTFSFPVNQTSISSGTLIKWTKGFSVNGMVGEDVVSELSKAMERQGLDMKVTALVNDTVGTLAGGRYMDNDVVAAVILGTGTNAAYVEHANAIPKWTGLLPKSGNMVINTEWGSFKSDKLPLSEYDKAMDFESLNPGEQIYEKLISGMYLGEIVRRILLKLAHDASLFGDVVPSKLEQPFVLRTPDMSAMHHDSSHDLKILGAKLKDIVGVADTSLEVRYITRHICDLVAERGARLAAAGIYSILKKIGRDKVPSNGSKMPRTVIALDGGLYEHYKKFSSCVETTLTDLLGEEASSSVVAKLANDGSGIGAALLAASHSQYAEAD

SEQ ID NO: 67575 - protein, 180 aa, Setaria italica
  Transcript Sequence Number=SeqID_1601
  Gene Ontology: Mol. function=nucleotide binding
WVERAGKLANISLRDTEMSGGETLTRLANVLSLRCLKLSRRSFLEQALIFRDDIHFKALKFLVVDGDTITSVTFAAAGAAPELEKIVWSISKPHSGDLISGIDRLPNLKEIEIRGNFNVNNLLQAIGSLTDPPVTSYRCRYVYLSDLSDITVGKKGKSDTTLSVPVGVINQQQQVNQITI

SEQ ID NO: 67576 - protein, 60 aa, Setaria italica
  Transcript Sequence Number=SeqID_1602
  Gene Ontology: Mol. function=zinc ion binding
  Homolog annotation: Hit_ID=B6SJ02; Match level="QueryCoverage=55%, HitCoverage=15%, E-value=5e-12, Identity=96%"; Hit description=Zinc finger protein
IFHLFQATLQFAGFFLPCYVIARSCYALQHRRRRQVYFLSHRYMYKRNLWPAYSKSSKSC

SEQ ID NO: 67577 - protein, 72 aa, Setaria italica
  Transcript Sequence Number=SeqID_1603
DSIDCCLNPVLLGPTPLLCHHCFLLDVKMHVTVYKHIYKSIFKKEDCLTCCIGYHNRCRDLSETLKNIRRTN

SEQ ID NO: 67578 - protein, 212 aa, Setaria italica
  Transcript Sequence Number=SeqID_1604
  Gene Ontology: Mol. function=zinc ion binding
  Homolog annotation: Hit_ID=B6SJ02; Match level="QueryCoverage=100%, HitCoverage=100%, E-value=1e-84, Identity=71%"; Hit description=Zinc finger protein
  Pfam annotation: Domain name=zf-C3HC4; Domain location=35-80; Score =61.6; E_value=3e-15; Accession=PF00097.17; Description=Zinc finger, C3HC4 type (RING finger)
MARAEKVAGDGFSGGEGHVEVEVGLGADVKGVIECRICQEEGEESAMDSPCACTGTLKFAHRKCIQRWCNKKGNITCEICNQVYSPNYVLPPPKCCSDEMDMDLRQNWVGRIDTHDSHFLAIAIAEQQLLQAEFEDCVSANSSGVTCCRTIALILMFLLLVRHVIVIVRDISMLQDVTVLFSATLQFAGFFLPCYVIARSCYALQHRRRRQV

SEQ ID NO: 67579 - protein, 78 aa, Setaria italica
  Transcript Sequence Number=SeqID_1605
IEKCLTIRKMRCYAMMGLFLLFSLLMLDLRIIDLSWGMSLLLTIRLTACISIVPHRWHPFILFFSRYISFCTLLKHML

SEQ ID NO: 67580 - protein, 232 aa, Setaria italica
  Transcript Sequence Number=SeqID_1606
  Gene Ontology: Mol. function=anthranilate synthase activity; Cellular component=cyanelle; Biological process=glutamine metabolic process
  Homolog annotation: Hit_ID=B6UGS8; Match level="QueryCoverage=91%, HitCoverage=75%, E-value=1e-122, Identity=98%"; Hit description =Anthranilate synthase component II
  Pfam annotation: Domain name=GATase; Domain location=33-223; Score =264.5; E_value=2.4e-76; Accession=PF00117.20; Description=Glutamine amidotransferase class-I
  Pfam annotation: Domain name=Peptidase_C26; Domain location=31-206; Score=-78.7; E_value=0.00045; Accession=PF07722.5; Description =Peptidase C26
  Pfam module annotation: Pfam domain module=GATase::Peptidase_C26; Domain location=33-223::31-206
GREGTASPVAFAAVAAPVADLNGRPATEKQPIIVIDNYDSFTYNLCQYMGELGLNFEVYRNDELTIEDVKRKNPRGILISPGPGEPQDSGISLQTVLELGPTIPIFGVCMGLQCIGEAFGGKIIRAPSGVMHGKSSPVFYDEELGKALFNGLPNPFTAARYHSLVIEEETFPHDALEATAWTEDGLIMAARHKKYKHIQGVQFHPESIITPEGKKIILNFVKFIEELEKQRS

SEQ ID NO: 67581 - protein, 77 aa, Setaria italica
  Transcript Sequence Number=SeqID_1607
MSYYGQQPPVGVPPQQGYPGKDGYPPPGYPPAGYPPPAQGYPQQGYPQQGYPPPYAQQPPRQQQSSGPSFMKEGLVL

SEQ ID NO: 67582 - protein, 279 aa, Setaria italica
  Transcript Sequence Number=SeqID_1608
  Gene Ontology: Mol. function=phosphotransferase activity, alcohol group as acceptor
  Homolog annotation: Hit_ID=Q10D72; Match level="QueryCoverage=83%, HitCoverage=6%, E-value=1e-114, Identity=85%"; Hit description =Phosphatidylinositol 3-and 4-kinase family protein, expressed
  Pfam annotation: Domain name=WD40; Domain location=128-171; Score =14.9; E_value=0.34; Accession=PF00400.24; Description=WD domain, G -beta repeat
  Pfam annotation: Domain name=WD40; Domain location=228-266; Score =13.1; E_value=1.1; Accession=PF00400.24; Description=WD domain, G -beta repeat
  Pfam annotation: Domain name=WD40; Domain location=66-104; Score =16.7; E_value=0.099; Accession=PF00400.24; Description=WD domain, G -beta repeat
  Pfam module annotation: Pfam domain module=WD40::WD40::WD40; Domain location=128-171::228-266::66-104
MAAAEEGAAAAPPDGGAESEAAAEMDAAAVMEGEEKEEAAEYSWPQLRFDRPPRRLYQFARQFRSATPAGGRGSGDNFLKGVKWSPDGSSFLTSSDDNSLRLFYLPEDAYSGAEHVADAAVGGEDSYGAFLQVNEGEPVYDFCWYPCMSLSDPATCVFASTSRDHPIHLWDATSGELRCTYRAYDSMDEITAALSISFNSAGSKLFAGYNKAIRVFDVHRPGRDFDQYSLLKGDEGPRGIVSSISFSPHNGMLAVGSYSQTTAVYAESNMEDLVVNNQP

SEQ ID NO: 67583 - protein, 121 aa, Setaria italica
  Transcript Sequence Number=SeqID_1609
  Subcellular localization annotation: CTP_CleavageSite=62; ConfidenceScore=5.08e-01
CHHPAHDPLQGPSQGPHLKTGNKGEDDQATSSRLTKSTPFPEGISSNLPPCQQFRGTLVWLRASRFSEHEIIPVIIGRRWMPCLGWLMRYMAIPLHKDVYLYCLMLSWWSENEMISNKKLK

SEQ ID NO: 67584 - protein, 135 aa, Setaria italica
  Transcript Sequence Number=SeqID_1610
QDHRYLQRDLLLLVRLEVGQVSHVPTRMQGRHWTEPSRESLLPNVTLGSMWCSQASQISNLSAYPVLARAKTKPGEKGGKARDNLALRVRRVVVPRVAVVELQVWCSRRPHSPATYWDSTLATSAPPLALLLFQG

SEQ ID NO: 67585 - protein, 101 aa, Setaria italica
  Transcript Sequence Number=SeqID_1611
MYVGKLLPGFQVLICSLLLFNHLAASCCCPFAQAAILSSFVPNAPSDCPQVHRSFHVHPLIITVVDSHDLDTWLMLQSCSCLPVIQVVYSKYCLCIEIQSI

SEQ ID NO: 67586 - protein, 132 aa, Setaria italica
  Transcript Sequence Number=SeqID_1612
  Gene Ontology: Mol. function=bile acid:sodium symporter activity; Cellular component=membrane; Biological process=sodium ion transport
  Homolog annotation: Hit_ID=B9IB31; Match level="QueryCoverage=98%, HitCoverage=31%, E-value=9e-46, Identity=66%"; Hit description=Bile acid:Na+ symporter family protein
FAMVCTSLCIGSPLAINRSKILSQEGFFLLLPIVAFHIVSFVAGYWISKLPQWRQEEPVCRTISVCTGMQSSTLAGLLATQFLGTSQAVPAACSVVIMAIFGLTLGSYWGSGSRIRDVSGGFLPQASAGVSS

SEQ ID NO: 67587 - protein, 219 aa, Setaria italica
  Transcript Sequence Number=SeqID_1613
  Gene Ontology: Mol. function=transcription factor activity; Cellular component=nucleus; Biological process=regulation of transcription, DNA-dependent
  Homolog annotation: Hit_ID=B6TX04; Match level="QueryCoverage=86%, HitCoverage=46%, E-value=4e-73, Identity=76%"; Hit description=DNA -binding protein RAV1
  Pfam annotation: Domain name=B3; Domain location=34-146; Score=125.0; E_value=2.4e-34; Accession=PF02362.13; Description=B3 DNA binding domain
  Subcellular localization annotation: CTP_CleavageSite=24; ConfidenceScore=5.15e-01
AAAASAPTTSALANAHSSPSPSPAAAAAAAREHLFDKTVTPSDVGKLNRLVIPKQHAEKHFPLQLPSAGGESKGVLLNFEDAGGKVWRFRYSYWNSSQSYVLTKGWSRFVKEKGLQAGDVVGFYRSAAAAGADSKLFIACRLRPNGDVAALTSPVVEVEPSSAPVAKAVRLFGVDLLSAPAQAPAAAPAEAMAGCKRARDLAALPQAAFKKQLVELALV

SEQ ID NO: 67588 - protein, 107 aa, Setaria italica
  Transcript Sequence Number=SeqID_1614
  Gene Ontology: Mol. function=transferase activity
  Homolog annotation: Hit_ID=Q2RBE2; Match level="QueryCoverage=100%, HitCoverage=13%, E-value=7e-43, Identity=80%"; Hit description =Nucleotidyltransferase family protein, putative, expressed
DGDIDLTAFGPAISDENLANEVCAILKSEGRRKDSEFEVKDVQYIHATEVKLVKCLVQNIVVDISVNQIGGLCTLCFLEKVDQNFGKKHLFKRSIMLIKDWCYYESR

SEQ ID NO: 67589 - protein, 452 aa, Setaria italica
  Transcript Sequence Number=SeqID_1615
  Gene Ontology: Mol. function=nucleotide binding; Biological process =defense response
  Homolog annotation: Hit_ID=Q9ZTI4; Match level="QueryCoverage=36%, HitCoverage=98%, E-value=1e-82, Identity=89%"; Hit description =Disease resistance gene analog PIC21 (Fragment)
  Pfam annotation: Domain name=Arch_ATPase; Domain location=149-347; Score=-49.7; E_value=0.0053; Accession=PF01637.10; Description =Archaeal ATPase
  Pfam annotation: Domain name=NACHT; Domain location=169-318; Score= -39.3; E_value=0.088; Accession=PF05729.4; Description=NACHT domain
  Pfam annotation: Domain name=NB-ARC; Domain location=152-430; Score =197.9; E_value=2.7e-56; Accession=PF00931.14; Description=NB-ARC domain
  Pfam module annotation: Pfam domain module=Arch_ATPase::NACHT::NB -ARC; Domain location=149-347::169-318::152-430
MEFLASIIDTVFRPLKDYVMRTVGYAMSCGDYIDLLVDEMSELKSKRDDVQRMVDAAERQGMEATSQVTWWLERVSSLEGLADEIILDFQERLELPPEQAPGIKATYILSKKADETRAEAAALKEKADFHKVADELVQLRFEEMPSAPVLGRDALLQELEACVRDGDVGIVGIYGIAGVGKTALLNKFNNEFLINSPDIHVAIYMELGKDYNLDDFQRIIGDRLGVSWENRTPKERAAVLYRVLSKMNFVLLLDDVWEPLNFRMLGIPVPKHNSKSKIVLTTRIEDVCDRMDVRRKLKMECLPWAPAWELFREKVGDHLMSASPEIRQQAQALATKCGGLPLALITVGRAMASKRTAKEWKHAITVLKIAPWQLLGMEFDVLQPLKKSYDNLPSDKLRLCLLYCSLFPEEFSISKDWIIGYCIGEGFIDDLYTKKVMSLVVYFIHLSVQVIY

SEQ ID NO: 67590 - protein, 74 aa, Setaria italica
  Transcript Sequence Number=SeqID_1616
KSWSNTCTIILLFASSQVTTKQALPTIYACKQSIFHSFLKNSSLSQGHRLNHGLYSDQAPASLHVIFRLWHQCV

SEQ ID NO: 67591 - protein, 387 aa, Setaria italica
  Transcript Sequence Number=SeqID_1617
  Gene Ontology: Mol. function=iron ion transmembrane transporter activity; Cellular component=flagellum; Biological process=iron ion transport
  Homolog annotation: Hit_ID=B9N487; Match level="QueryCoverage=96%, HitCoverage=63%, E-value=1e-127, Identity=59%"; Hit description =Ferroportin protein family
  Pfam annotation: Domain name=FPN1; Domain location=152-246; Score =2.1; E_value=0.055; Accession=PF06963.4; Description=Ferroportin1 (FPN1)
ALNAVQVATQLISAAMVIYALKNLSHASTTAVVLRPWFIALVAAGAIERLAGLALGVAMERDWVVLLAGTNRPVALAQANAVLNRLDLICETVGASVFGLLLSKYHPVTCLKIACGLMICSFPVLVMLGQVINRVSCHALDSSRTATDESICIDLLDLRKIVQNSLSTIKHGWNEYKQQTVLPASAATVFLNFNVALAPGAIMTTLLMHRGISPSIVGAFSGLCSIMGLVATFISSSLVKRVGILKAGAAGLIFQASLLSVALTVYLAGSVSQRTPLLIFLASIALSRLGHMSYDVVGTQIVQTGVPASKANLIGGMEVSIASLAELVMLAMAIIANDVSHFGFLAILSVSSVAGAAWMFCRWLTNPTDEQRELFMFDPLYQVQAIR

SEQ ID NO: 67592 - protein, 339 aa, Setaria italica
  Transcript Sequence Number=SeqID_1618
  Gene Ontology: Mol. function=protein binding; Biological process =protein amino acid phosphorylation
  Homolog annotation: Hit_ID=Q9FLK9; Match level="QueryCoverage=89%, HitCoverage=93%, E-value=1e-131, Identity=75%"; Hit description=Cf-5 disease resistance protein-like
  Pfam annotation: Domain name=LRRNT_2; Domain location=38-80; Score =26.0; E_value=0.00015; Accession=PF08263.4; Description=Leucine rich repeat N-terminal domain
  Pfam annotation: Domain name=LRR_1; Domain location=111-133; Score =18.1; E_value=0.038; Accession=PF00560.25; Description=Leucine Rich Repeat
  Pfam annotation: Domain name=LRR_1; Domain location=135-157; Score =15.1; E_value=0.3; Accession=PF00560.25; Description=Leucine Rich Repeat
  Pfam annotation: Domain name=LRR_1; Domain location=159-181; Score =16.6; E_value=0.1; Accession=PF00560.25; Description=Leucine Rich Repeat
  Pfam annotation: Domain name=LRR_1; Domain location=183-205; Score =16.0; E_value=0.16; Accession=PF00560.25; Description=Leucine Rich Repeat
  Pfam annotation: Domain name=LRR_1; Domain location=207-228; Score =13.4; E_value=0.83; Accession=PF00560.25; Description=Leucine Rich Repeat
  Pfam annotation: Domain name=LRR_1; Domain location=234-256; Score =17.3; E_value=0.063; Accession=PF00560.25; Description=Leucine Rich Repeat
  Pfam annotation: Domain name=LRR_1; Domain location=258-277; Score =12.6; E_value=1.2; Accession=PF00560.25; Description=Leucine Rich Repeat
  Pfam annotation: Domain name=LRR_1; Domain location=282-304; Score =11.0; E_value=2.4; Accession=PF00560.25; Description=Leucine Rich Repeat
  Pfam annotation: Domain name=LRR_1; Domain location=306-332; Score =2.3; E_value=1.1e+02; Accession=PF00560.25; Description=Leucine Rich Repeat
  Pfam module annotation: Pfam domain module=LRRNT_2::LRR_1::LRR_1::LRR_ 1::LRR_1::LRR_1::LRR_1::LRR_1::LRR_1::LRR_1; Domain location=38 -80::111-133::135-157::159-181::183-205::207-228::234-256::258 -277::282-304::306-332
  Subcellular localization annotation: CTP_CleavageSite=29; ConfidenceScore=5.02e-01
TATTSALLLPRPSMAAARALSLLVVLLLLAGAARGKTVKRDVKALNEIKSSLGWRVVYSWVGDDPCGHGSLPPWSGVTCSQQGDYRVVTELEVYAVSIVGPFPTAVTNLLDLRRLDLHNNKLTGPIPPQIGRLKHLRILNLRWNKLQDVLPPEIGELKKLTHLYLSFNNFKGEIPVELANLPELRYLYLHENRFTGRIPPELGTLKNLRHLDVGNNHLTGTLRDLISNGNGFPSLRNLYLNNNELTGVLPDQIANLTNLEILHLSNNKMIGSISPKLVQIPRLIYLYLDNNNFIGRIPEGLYKHPFLKELYIEGNHFRPGTRSKGTHKVLELPDADILV

SEQ ID NO: 67593 - protein, 61 aa, Setaria italica
  Transcript Sequence Number=SeqID_1619
  Gene Ontology: Mol. function=GTP binding
QPNVMDQGSNRKVLSAVKKFTKKCPPDIVLYVDRLDSLSRDLNDLPLLKTITAVLGFQKRQ

SEQ ID NO: 67594 - protein, 69 aa, Setaria italica
  Transcript Sequence Number=SeqID_1620
  Gene Ontology: Mol. function=GTP binding; Cellular component=plastid outer membrane; Biological process=protein transport
  Homolog annotation: Hit_ID=B9T0W6; Match level="QueryCoverage=85%, HitCoverage=5%, E-value=7e-13, Identity=66%"; Hit description =Protein translocase, putative
QVRELIHSLDDDYGYANIAGENDQDPPPENVSVPLPDMVLPPSFDCDNPTYRYRFLEPTSTVLARNPLL

SEQ ID NO: 67595 - protein, 189 aa, Setaria italica
  Transcript Sequence Number=SeqID_1621
  Gene Ontology: Mol. function=GTP binding; Cellular component=plastid outer membrane; Biological process=protein transport
  Homolog annotation: Hit_ID=O81283; Match level="QueryCoverage=82%, HitCoverage=10%, E-value=4e-15, Identity=36%"; Hit description =Translocase of chloroplast 159, chloroplastic
LRAEALADVEDGVGNEADEDDDGANSDTSPARVAILESSEAAKQIMKELAEGSSRGSVSGSRDFTESMDGQIMLDDSEDDDDDDEEDGDEKGFDSAALAALLKAATGGSSDGNITVASQDGSRIFTMDRPAGLGSSATSLRPTAPRQPARPNLQPLELAVTADPTEEMTEEEKKLHDKVELIRVKFLRL

SEQ ID NO: 67596 - protein, 342 aa, Setaria italica
  Transcript Sequence Number=SeqID_1622
  Gene Ontology: Mol. function=GTP binding; Cellular component=plastid outer membrane; Biological process=protein transport
  Homolog annotation: Hit_ID=B9T0W6; Match level="QueryCoverage=97%, HitCoverage=32%, E-value=1e-105, Identity=57%"; Hit description =Protein translocase, putative
DDYNNNAASAPPEGLNGAPMTYEVLMAQRSHIIQQSIRQAAGDMRLMNPVALVENHPSCRRNREGQKVLPNGQSWRHQMLLLCYSSKILSEANSLLKLQDPNPGKLFGFRFRSPPLPFLLSSLLQSRAHPKLSAEQGGNEGDSDIELDDYSDVEQDDEEEEYDQLPPFKPLTKAQLLRLTKEQKNAYFDEYDYRVKLLQKKQWKDEIRRLKEMKKRGKTDLDDDYGYANIAGENDQDPPPENVSVPLPDMVLPPSFDCDNPTYRYRFLEPTSTVLARPVLDAHGWDHDCGYDGVSVEETLAILNRFPANVAVQVTKDKKEFSIHLDSSIAAKHGDNASLEPK

SEQ ID NO: 67597 - protein, 127 aa, Setaria italica
  Transcript Sequence Number=SeqID_1623
  Gene Ontology: Mol. function=GTP binding; Cellular component=plastid outer membrane; Biological process=protein transport
  Homolog annotation: Hit_ID=B9T0W6; Match level="QueryCoverage=94%, HitCoverage=11%, E-value=2e-39, Identity=68%"; Hit description =Protein translocase, putative
QLSLVKRLSLVASTGMMKAQGDTAYGANLEAALRIKTTQFGQSLSTLGLSLMKWRRDLALGANLQSQFSIGRGSKMAVRLGLNNKLSGQITVRTSTSEQVQIALMGLVPVLASIYRSFRPSEPSFAY

SEQ ID NO: 67598 - protein, 216 aa, Setaria italica
  misc_feature (167)..(167): Xaa can be any naturally occurring amino acid
  Transcript Sequence Number=SeqID_1624
  Gene Ontology: Mol. function=GTP binding; Cellular component=plastid outer membrane; Biological process=protein transport
  Homolog annotation: Hit_ID=B9T0W6; Match level="QueryCoverage=62%, HitCoverage=12%, E-value=2e-52, Identity=71%"; Hit description =Protein translocase, putative
VFHDPNQENHFGFHFSSLALHFLLSSLLQSRAHPKLLVEHGGNEGNFDIELDDYSDVEQADDEEEYDQLPPFPDMVLPPSFDCDNPTYRYRFLEPTSTVQARPVLDAHGWDHDCGYDTISVEETLAILNRFPAKVAVQVTKNKKEFSIHLDSSIVAKHGENASSLCXVFDIQTVGRQFAYILRGESKIKNIKKNRTTGGFFSCTFPWVVTYFVLVS

SEQ ID NO: 67599 - protein, 786 aa, Setaria italica
  Transcript Sequence Number=SeqID_1625
  Gene Ontology: Mol. function=GTP binding; Cellular component=viral envelope; Biological process=protein transport
  Homolog annotation: Hit_ID=Q5ZBJ3; Match level="QueryCoverage=79%, HitCoverage=77%, E-value=1e-122, Identity=38%"; Hit description =Putative OEP86=outer envelope protein
  Pfam annotation: Domain name=AIG1; Domain location=232-417; Score =47.8; E_value=1.6e-14; Accession=PF04548.8; Description=AIG1 family
  Pfam annotation: Domain name=MMR_HSR1; Domain location=232-330; Score= 24.4; E_value=5.5e-06; Accession=PF01926.15; Description=GTPase of unknown function
  Pfam annotation: Domain name=Miro; Domain location=233-360; Score= -10.3; E_value=0.1; Accession=PF08477.5; Description=Miro-like protein
  Pfam module annotation: Pfam domain module=AIG1::MMR_HSR1::Miro; Domain location=232-417::232-330::233-360
TDIGVVKPTEIEDVVLVEGIDVKPESVSEVVHDGSVKEFDPVSTDSVLEDSHGKEQNAEGLATISEAVEDDGDDNGDKGFDYATLAPTGGPSYGNIIFSSQDGSGILNMDWAGGLGSSTPSLRPTAPHQPAGSNLFITSELALTDDPTEEMTEEEKKLHDKVELIRVKFLRLVYRLGATLEETVVAQVLYRLSLVEGIIHGRQTNQAFSLDYTWKKALILEAEGKEDMNFSCNILVLGKTGVGKSATINSIFGEEKLKTDAFSLATTSMREIVGDVHGVKIRIIDTPGLRPSVMDQGSNRKILVAVKKYIKKCPPDIVLYVDRLDCLSRDLSDLPLLKTITAILGSSIWFDAIVALTHAASTPEGLNGAPMTYDVIMAQSSHIIQQSIRQAAGDMRLMNPVALVENHPSCRRNSEGQKVLPNGQSWRHQMLLLFYSSKILSEANSLLKLHDPNQENHFGFHFSSLALHFLLSSLLQSRAHPKLLVEHGGNEGNFDIELDDYSDVEQADDEEEYDQLPPFPDMVLPPSFDCDNPTYRYRFLEPTSTVQARPVLDAHGWDHDCGYDTISVEETLAILNRFPAKVAVQVTKNKKEFSIHLDSSIVAKHGENASSLAGFDIQTVGRQFAYILRGESKIKNIKKNRTTGGFLVTFLGDTVATGLKVEDQLYLGKRLSLVARTGAMRVQGDTAYGANLEAHLKDKECPIGQSLSTLGLSLMKLRQDLALGANLQSQFSIGIGSKMALHLGLNNKLSGQITVKTSTSEQVQIALLGLMPVAASIYKSFRPSKP

SEQ ID NO: 67600 - protein, 451 aa, Setaria italica
  misc_feature (59)..(59): Xaa can be any naturally occurring amino acid
  misc_feature (77)..(77): Xaa can be any naturally occurring amino acid
  misc_feature (212)..(212): Xaa can be any naturally occurring amino acid
  Transcript Sequence Number=SeqID_1626
  Gene Ontology: Cellular component=integral to membrane; Biological process=transport
  Homolog annotation: Hit_ID=B9ST27; Match level="QueryCoverage=98%, HitCoverage=87%, E-value=1e-154, Identity=63%"; Hit description =Protein PNS1, putative
  Pfam annotation: Domain name=DUF580; Domain location=126-451; Score =325.5; E_value=1.1e-94; Accession=PF04515.4; Description=Protein of unknown function, DUF580
TEGGKCRDVFWLVVFLLHLLVFGAALALFGLNRFRQADRFNIGRYANLTAEPWGSTPPXPASELTETYWKFYGAAGXMGAALAWAWLAAASWRKDGGKVVMRTAVHCLTAYLAVVSVLCFWGKHFFWGVALAVGAFLHFLYVMSVLDRFPFTMLVLQKAVRMVWELPDVMRISYAFVVVMLCWMALWSFGISGIVAFGIPNGGQWWLLLIFXVSLFWTGAVLSNTLHVTVSGMVFLVLIHGGPAAATMPPKPLLKSLQYAVTTSFGSICYGSLFTAAIRTLRWEIRGIRSKIGSNECLLCCIDFLFHIVETLVRFFNKYAYVQIAVNGESFNRSARDAWELFQSTGMEALVAYDCSGAILLMSTILGGLVTGTCTGVWTYFKQSDKAVMVGSTSMLMGMILVGLTVVVVESAVTSIYICYAEDPLLIQRWDPEFFELLSEALHKRLQYRSA

SEQ ID NO: 67601 - protein, 88 aa, Setaria italica
  Transcript Sequence Number=SeqID_1627
  Subcellular localization annotation: CTP_CleavageSite=37; ConfidenceScore=5.57e-01
ILRLSYQLHVKLTGSPRTYGSRFGACTGVKQISQVLRVVQRRSLKPRFCVNRMACSFFMLHSNGSMCLFFIEVEPPNISFIIFSNLYS

SEQ ID NO: 67602 - protein, 49 aa, Setaria italica
  Transcript Sequence Number=SeqID_1628
LGRVYLYYSNSLLPTMRTSDRLTYLVNVLISVIELRQGNTNERALTSIY

SEQ ID NO: 67603 - protein, 460 aa, Setaria italica
  Transcript Sequence Number=SeqID_1629
  Homolog annotation: Hit_ID=Q9CAC4; Match level="QueryCoverage=77%, HitCoverage=45%, E-value=5e-51, Identity=40%"; Hit description=IFA -binding protein
  Pfam annotation: Domain name=DUF593; Domain location=99-192; Score =181.0; E_value=3.3e-51; Accession=PF04576.7; Description=Protein of unknown function, DUF593
VPADTFNDDTNAWKEDIEEDPTEAALTSIHEPLTSLDKFSPNHTVTEEERDPETPTRIEGICDSQELLDSKAAVSDSKSVDSSVATMTTDLESTEFVSVDQLKSALASARKSLNSLYAELENERNAAAIAADETMAMINRLQEQKAAMQMEAIQYQRLMEEQSEYDQEALQRLNELVVKREKEKQDLERELELYRHKVHLYEAKVRKMSRHKADDQNGSSSASSSAEDSDDLSQSFYEGDESAHGLNGSNGSIPTDVVLQETARHLVTLDGSLADFEEERLSILEQLKVLEDKLFDLDDEESDNMKTDKHFSEEHHLSGASNGFSDDESCFKLHDKRKSVTCRGKKLLPLFDDATVGARNIVLTKQGDEADHSTEVTLDLAREQDKLAIAHEIDQVHERLHALEADREYIKQCVRSLKKGGKGFDLLQEILQHLRDLRRIEQRARNSGELSPHYLHLYTD

SEQ ID NO: 67604 - protein, 212 aa, Setaria italica
  misc_feature (141)..(141): Xaa can be any naturally occurring amino acid
  Transcript Sequence Number=SeqID_1630
  Gene Ontology: Mol. function=heat shock protein binding
NTFQYSREYVNQLLRCTTCYDVFLAVEVPHPTSSTKMYPTGPTPMATNNNIGGNTVPGMATPVQEGVSCGNQNGYPAVLKSTTCANSTRYTVQEDAGEANTAVNEEADSRKIMQDVRKHAHAVSSVKRANAKTREHEAAKXKRVNSGKKATWQSASSCPDGDGCKPMRPAKRRPRSTAETSGAKKRKVSSVDLNCESSGDAGGTSFGRVLMQ

SEQ ID NO: 67605 - protein, 85 aa, Setaria italica
  Transcript Sequence Number=SeqID_1631
PPCTKHQFFGNQRENEKECCFVNTVGDRCYFRDSPSLPVRRGRRSTASTSRAASGLRCSSLVPPAVSAPGSQSQMPHSKLVLFTF

SEQ ID NO: 67606 - protein, 293 aa, Setaria italica
  Transcript Sequence Number=SeqID_1632
  Gene Ontology: Mol. function=binding
  Homolog annotation: Hit_ID=Q2QNV7; Match level="QueryCoverage=84%, HitCoverage=23%, E-value=2e-10, Identity=27%"; Hit description =Retrotransposon protein, putative, unclassified, expressed
MITNRFIASTLDTCVEKGVVNTLNRTVITFAEELLQSEQSGDHGVAVSVLHVVVIERKERRAGAIEQICSSEQLVGMLFRLLSSKSPLDLDTRTLAAKIVKKLSNKLYLGNIPGAANVLSSMLDACFMETRAQTSHKTGETLVSIKSDNGEIIVHGLQILCKLADDPGNCTEMYNTKDLVSKIIASLTHGLHKAIASESATVEVVIASLGLLVKLTSRTGESSTELRRTILDDSRTVGNILWILSNSSHTDMKILAVKILTTLTLGQLSKKKKKAYLESGREPRPSAAGHNVE

SEQ ID NO: 67607 - protein, 108 aa, Setaria italica
  Transcript Sequence Number=SeqID_1633
  Gene Ontology: Mol. function=protein serine/threonine kinase activity; Biological process=protein amino acid phosphorylation
  Homolog annotation: Hit_ID=B6TDR7; Match level="QueryCoverage=100%, HitCoverage=25%, E-value=6e-39, Identity=75%"; Hit description =Serine/threonine-protein kinase receptor
  Pfam annotation: Domain name=SKG6; Domain location=29-66; Score=11.7; E_value=0.033; Accession=PF08693.2; Description=Transmembrane alpha -helix domain
MEEPGERMAGPPYLLRHRRLMDIAPASSSDSGHSGSKGMTIMVSILVVVIICTLFYCVYCWRWRKRNAVRRAQIESLRPLSNSDLPLMDLTSIHEATNSFSKENKLGE

SEQ ID NO: 67608 - protein, 234 aa, Setaria italica
  misc_feature (78)..(78): Xaa can be any naturally occurring amino acid
  Transcript Sequence Number=SeqID_1634
  Gene Ontology: Mol. function=protein serine/threonine kinase activity; Cellular component=nucleus; Biological process=regulation of transcription
  Homolog annotation: Hit_ID=Q5JQV1; Match level="QueryCoverage=85%, HitCoverage=13%, E-value=2e-37, Identity=41%"; Hit description =OSJNBa0061C06.21 protein
QYFSESIFFLHLLLYKWRSKLKNFLQIDQQWMYDDRCPMSFINGLKTFLKMAEANKSPKGFMCCPCRMCKITRITLIXKTLHDHICRWGFMDNYILWIKHRERGVVMEDGEEDDDDNNIPADWVEGGAFADFEMGEAEEDFAKDEPADELSQELLYAKKDSENTKETKKFEKMLDDHKKLGSTLELMHWKAANGVTDKGFGELLRVVKNMFLKGTTLATYEAKKLFASHVPQGY

SEQ ID NO: 67609 - protein, 164 aa, Setaria italica
  Transcript Sequence Number=SeqID_1635
  Homolog annotation: Hit_ID=Q8W0Y1; Match level="QueryCoverage=98%, HitCoverage=21%, E-value=3e-69, Identity=75%"; Hit description =Putative transposase
AVKSQFSLSRDAFDIMLTVFGSLLPVGHILPKSMYEAKKVLRALKMPYEHIHACPKGCILFRKEYAEAKYYVKCESSRFLEVDSGDGQKKQLAIPVKVLRYLPFIPRIQRLFMTEESAKQMTWHKNGRRYNPEKLVHPSDAEAWRSFDAIYPAKALEARNVRVA

SEQ ID NO: 67610 - protein, 103 aa, Setaria italica
  Transcript Sequence Number=SeqID_1636
  Subcellular localization annotation: CTP_CleavageSite=76; ConfidenceScore=5.26e-01
GERERIQPNPPIHFSLLPHFLFQSFLRTPDPPLRLRTHLASPQSARAPRHPTPIATSSCWAPLRSARSALLLGLRRAAAASGGGGAGMDSEDDMHDANDSADD

SEQ ID NO: 67611 - protein, 508 aa, Setaria italica
  misc_feature (67)..(67): Xaa can be any naturally occurring amino acid
  Transcript Sequence Number=SeqID_1637
  Gene Ontology: Mol. function=transferase activity; Cellular component= cytosol; Biological process=Mo-molybdopterin cofactor biosynthetic process
  Homolog annotation: Hit_ID=B9S0G3; Match level="QueryCoverage=99%, HitCoverage=99%, E-value=0.0, Identity=63%"; Hit description =Molybdopterin-binding, putative
  Pfam annotation: Domain name=MoCF_biosynth; Domain location=265-398; Score=65.2; E_value=2.4e-16; Accession=PF00994.16; Description =Probable molybdopterin binding domain
  Pfam annotation: Domain name=PAPS_reduct; Domain location=37-204; Score=77.6; E_value=4.7e-20; Accession=PF01507.11; Description =Phosphoadenosine phosphosulfate reductase family
  Pfam module annotation: Pfam domain module=MoCF_biosynth::PAPS _reduct; Domain location=265-398::37-204
MEIDEAVRGCSDRRLRTKYANAVYVVQRAFALYPFEEVAFSFNGGKDSTVLLHLIRASTTFKRWFSXVDVAQMDAVKNCPLRTIYFESPCAFPEINSFTYETVSTYGLPLETIQSDFKSGLEGLLKEKPTKAIFIGTRIGDPNAVGQEQFSPSSPGWPPFMRVNPILDWSYRDVWSFLLICKVKYCSLYDQGYTSIGSIHDTVPNALLSDSSTEKSFRPAYMLTDGRLERAGRTKKTNHKIEMNSVASNGMSNIEGEHMVSRAASIIIVGDEILFGTTEDKLGTALCKKLHAIGWRVSHVAVVRNEIDSVAEEVERCKSTDDMVFIFGGLGPLHSDVSLAGVAKAFGVRLAPDEEFEDYLSQLMGNNYTGDRNEMALLPEGITELLHHKTLPLPLIKCRNVITLAVTNVDELDTEWDCLLDTQESGLVQAKPFVSKHLSTTLSDVQIAPVLAKLCLEFSDVYIGCHRISRAGPLVVNLTGKDNQRVEAAAEKLTSSFEGQFSQVDSCK

SEQ ID NO: 67612 - protein, 94 aa, Setaria italica
  Transcript Sequence Number=SeqID_1638
  Gene Ontology: Mol. function=hydrolase activity, hydrolyzing O -glycosyl compounds; Cellular component=anchored to membrane; Biological process=carbohydrate metabolic process
  Homolog annotation: Hit_ID=B6TX61; Match level="QueryCoverage=67%, HitCoverage=12%, E-value=6e-20, Identity=80%"; Hit description =Glucan endo-1,3-beta-glucosidase 5
  Pfam annotation: Domain name=X8; Domain location=6-62; Score=37.3; E _value=1e-08; Accession=PF07983.5; Description=X8 domain
RTRQRRWGYGCSCGGGALDARGNASYAFNVYYQSQGQAESACDFQGLAVVVDKDPSLGACKFSVGFVGSGAPAAAPVMMARTAAVAAALLLVLL

SEQ ID NO: 67613 - protein, 49 aa, Setaria italica
  Transcript Sequence Number=SeqID_1639
  Homolog annotation: Hit_ID=B6UFL7; Match level="QueryCoverage=97%, HitCoverage=9%, E-value=6e-14, Identity=79%"; Hit description =Periodic tryptophan protein 1
MEDSLNGMISAISWVPRGAAKNVPVVAEPPTQEEIDEAIKTLALGGDGG

SEQ ID NO: 67614 - protein, 77 aa, Setaria italica
  Transcript Sequence Number=SeqID_1640
  Subcellular localization annotation: CTP_CleavageSite=19; ConfidenceScore=5.20e-01
AAWAPSQGVRRQATRPSLPAATLWPATDISTSHMLGASCHSTKLPSWARPPPPPPLLGSCSIDRRTRPDAYMLLMAP

SEQ ID NO: 67615 - protein, 38 aa, Setaria italica
  Transcript Sequence Number=SeqID_1641
IISQGNINAALDRTREAIDSGNALRRLMSYIKISHKVT

SEQ ID NO: 67616 - protein, 503 aa, Setaria italica
  misc_feature (12)..(12): Xaa can be any naturally occurring amino acid
  misc_feature (14)..(14): Xaa can be any naturally occurring amino acid
  Transcript Sequence Number=SeqID_1642
  Gene Ontology: Mol. function=transferase activity, transferring glycosyl groups; Cellular component=chloroplast; Biological process =metabolic process
  Homolog annotation: Hit_ID=B9SPJ6; Match level="QueryCoverage=99%, HitCoverage=85%, E-value=0.0, Identity=72%"; Hit description =Anthranilate phosphoribosyltransferase, putative
PRPNATVLEAQXRXCTGPGRDAPAREEQAMRVLDTILRSAMGELKEEPVSSAQLGAFFAGMTIRANSFPEATQWSEGERRAMSIFWPRLVQVLPPEVKFIADPEGTIMGANGLTGPRYVGQGTREMRLVGALREVLAGGHLGYEEVQCVLKDILPIGSNSSSTVVSEALLAAFLIGQRMNRETDRELKAYCLAFDDELGPPPVADVKSLTHYGEPYDGNTRFFRSTLFVAAVRACYGESSLLHGVEWMPPKGGITEGQMLKFMGANIRLSPTHAKTLLEDENAGFAYLNLQEACPPLYSIIGLREHIKKRPPIATSEKVQQFVRARGRESMIAGFYHEGYEDPLLMLMRRRTVHAGLVVKGEEGALSMTTKERSAHASKGLPVNHCSGFRTPNSINSSETDGIPRESFRVIVNAQELGFESTETPRTDRSVLKNLELGLAALGGEKGAAYDRIVLNAAMADHLLGCSGAEDINAALDRTREAIDSGNALRRLMSYIKISHKVT

SEQ ID NO: 67617 - protein, 96 aa, Setaria italica
  Transcript Sequence Number=SeqID_1643
  Gene Ontology: Mol. function=N-acetyltransferase activity; Biological process=metabolic process
  Homolog annotation: Hit_ID=B9RTP5; Match level="QueryCoverage=64%, HitCoverage=35%, E-value=3e-12, Identity=56%"; Hit description=N -acetyltransferase, putative
QTNGIAAAAIVQVVGRVFDDLPGLERLEAVTDVDNARSQRVLEKAGFRREGLLRRYIAGRGGAQARDAVIYSFLSSDRACATPAPADSMGQGFICG

SEQ ID NO: 67618 - protein, 109 aa, Setaria italica
  misc_feature (57)..(57): Xaa can be any naturally occurring amino acid
  Transcript Sequence Number=SeqID_1644
  Gene Ontology: Mol. function=ribonuclease activity; Cellular component=nucleolar ribonuclease P complex
REHESSAYTGLISSPTKFKMEKGILLDNYVQRGPRLVDAQARSLLIHSKRSKQHMSXLKQHKKCGSFDLDGTFHKYDLYKPMHEMWKTYIRELTKITPYDVTLLFYLLF

SEQ ID NO: 67619 - protein, 246 aa, Setaria italica
  Transcript Sequence Number=SeqID_1645
  Gene Ontology: Mol. function=ribonuclease activity; Cellular component=nucleolar ribonuclease P complex; Biological process=tRNA processing
  Homolog annotation: Hit_ID=Q9CR08; Match level="QueryCoverage=62%, HitCoverage=66%, E-value=2e-19, Identity=32%"; Hit description =Ribonuclease P protein subunit p29
  Pfam annotation: Domain name=UPF0086; Domain location=150-235; Score=- 7.5; E_value=0.0012; Accession=PF01868.8; Description=Domain of unknown function UPF0086
SCSRQQKSSASSGEEINPVYAELSCSLHDNLLQDGISDCDNTEVVHSVRYDIIQKGGDSGKITKGAKKLKMEKGILLDNYVQRGPRLVDAQARSLLIHSKRSKQHMSLKQHKKCGSFDLDGTFHKYDLYKPMHEMWKTYIRELTKITPKKQLSENLLSADLHGALLIVAECKAASYQGVSGIMIRDTAETFGIISEDNHFRVVPKAGSVFILQADCWKVTLIGDKLSPKEKLKEDQRQQRAQSLIR

SEQ ID NO: 67620 - protein, 104 aa, Setaria italica
  misc_feature (70)..(70): Xaa can be any naturally occurring amino acid
  Transcript Sequence Number=SeqID_1646
  Gene Ontology: Mol. function=DNA binding; Biological process =regulation of transcription
  Homolog annotation: Hit_ID=B9SKP0; Match level="QueryCoverage=82%, HitCoverage=17%, E-value=4e-24, Identity=69%"; Hit description =Transcription factor, putative
CNISITRYAGTSEKRTTTEELSLDLKTSMDLTEALRLQMEVQKRLHEQLEIQRKLQLRIEEQGKYLQMMXEKQCKSTTEVVQDPSSGDTSANPSSDPSHSANRI

SEQ ID NO: 67621 - protein, 74 aa, Setaria italica
  Transcript Sequence Number=SeqID_1647
RFQVQGQLFSGGPFFRCTCITSYGNVTLMIIIHTDFNTVTCMPAICNIVPHDMVIMPTKKMNVSQPLRPSPCVV

SEQ ID NO: 67622 - protein, 253 aa, Setaria italica
  Transcript Sequence Number=SeqID_1648
  Gene Ontology: Mol. function=DNA binding; Biological process =regulation of transcription
  Homolog annotation: Hit_ID=B9SKP0; Match level="QueryCoverage=95%, HitCoverage=50%, E-value=2e-65, Identity=57%"; Hit description =Transcription factor, putative
  Pfam annotation: Domain name=Myb_DNA-binding; Domain location=37-88; Score=48.6; E_value=2.4e-11; Accession=PF00249.23; Description=Myb -like DNA-binding domain
  Subcellular localization annotation: CTP_CleavageSite=30; ConfidenceScore=5.33e-01
PIASLLAVNQSASSHSGEICPVASPPNSSNASAAKQRMRWTPELHECFVDAVNQLGGSEKATPKGVLKLMKVDGLTIYHVKSHLQKYRTARYKPDLSEGTSEKRTTTEELSLDLKTSMDLTEALRLQMEVQKRLHEQLEIQRKLQLRIEEQGKYLQMMFEKQCKSTTEVVQDPSSGDTSANPSSDPSHSANKDSSAAMDRNRIGDRPGTAELGERSTKLGVKQKISEIDSDPEAAADGGPKISQEKRRKLQDS

SEQ ID NO: 67623 - protein, 259 aa, Setaria italica
  Transcript Sequence Number=SeqID_1649
  Gene Ontology: Mol. function=DNA binding; Biological process =regulation of transcription
  Homolog annotation: Hit_ID=B6U1F3; Match level="QueryCoverage=98%, HitCoverage=64%, E-value=1e-26, Identity=34%"; Hit description=CDPK substrate protein 1
MRNFNLRQSQNSRVLGAMSSSLPILPNSLKESFPRPCTPQHIPMSRQLPDDSMPLHNGTPQSDTLQPRTGVIGASYSGYSANPLDSVSNHEAQSMVSPFICQPSNVDVFQSLSDNTPGAHAEATWFPSSMDVLPVYTDNIAASDNQIQSGSSAMTSDEVAKQNDWWAEIMNDDWKDILDATATDSQSKAMMQPSNSIASLLAVNQSASSHSGEICPVASPPNSSNASAAKQRMRWTPELHECFVDAVNQLGGSEKGLTT

SEQ ID NO: 67624 - protein, 146 aa, Setaria italica
  Transcript Sequence Number=SeqID_1650
  Gene Ontology: Mol. function=catalytic activity; Cellular component =chloroplast; Biological process=metabolic process
  Homolog annotation: Hit_ID=B1PAT2; Match level="QueryCoverage=79%, HitCoverage=22%, E-value=6e-28, Identity=50%"; Hit description=Male sterility-related protein
  Pfam annotation: Domain name=Sterile; Domain location=21-118; Score =44.1; E_value=5.6e-10; Accession=PF03015.11; Description=Male sterility protein
GPRSPVAPPLRLFDSMDQFAAYVETDALLRSEQQRRRLSQRARELCARSVEQAVHLGSIYQPYTFYGGRFDNGNTEALLAAMSVAEKARFHFDVRSVDWADYITNVHIPGLRKHVMKGRASPPPTSCSPAPPSDGPHHGRPAGGRR

SEQ ID NO: 67625 - protein, 135 aa, Setaria italica
  Transcript Sequence Number=SeqID_1651
  Gene Ontology: Cellular component=intracellular
  Homolog annotation: Hit_ID=Q2R9I2; Match level="QueryCoverage=84%, HitCoverage=23%, E-value=1e-30, Identity=63%"; Hit description=BRCA1 C Terminus domain containing protein, expressed
  Subcellular localization annotation: CTP_CleavageSite=21; ConfidenceScore=5.01e-01
ELLSGCQVTPSNPTHNSGVASANEETTAPAVSKRKLLSVSGQANDTCGNIGSTEKHLESGSVPDVADAIEVLSSKIQDVQSPRSIFEPDNSAVVQDQKDTHSFGISRSWLNMQQKQDNTPGRVKVGSFKLPPPCT

SEQ ID NO: 67626 - protein, 279 aa, Setaria italica
  Transcript Sequence Number=SeqID_1652
  Gene Ontology: Mol. function=acyltransferase activity; Cellular component=integral to membrane; Biological process=metabolic process
  Homolog annotation: Hit_ID=Q5ZAU5; Match level="QueryCoverage=100%, HitCoverage=77%, E-value=1e-141, Identity=83%"; Hit description =Putative acyl-CoA:1-acylglycerol-3-phosphate acyltransferase
  Pfam annotation: Domain name=Acyltransferase; Domain location=2-142; Score=7.2; E_value=0.00023; Accession=PF01553.13; Description =Acyltransferase
FANHRTEVDWMYLWDLALRKGHLGYIKYILKSSLMKLPIFSWAFHIFEFIPVERKWEIDEAIIQNKLSKFKNPRDPIWLAVFPEGTDYTEKKCIKSQEYASEHGLPKLEHVLLPKTKGFICCLQQLRSSLDAVYDVTIAYKHRLPDFLDNVYGVDPSEVHIHIRTIQLSDIPTSEDEITEWMIERFRQKDQLLSDFFAKGHFPDEGTEGDLSTPKCLANVFVIVGLTGICLYLTLFSSVWFKIYVVASCAYLSFVTYYSVLPPQLVGSPEGGVKAKKAV

SEQ ID NO: 67627 - protein, 132 aa, Setaria italica
  Transcript Sequence Number=SeqID_1653
  Gene Ontology: Mol. function=signal transducer activity; Biological process=response to light stimulus
  Homolog annotation: Hit_ID=Q84YF6; Match level="QueryCoverage=100%, HitCoverage=20%, E-value=2e-38, Identity=67%"; Hit description=RPT2 -like protein
LLPAAEELGVVRRAADAVALRICNEALFPTRSPPGWWTAELAALSPASFQKVVTALRCRRADPEVLANAASAYAELTLAEVLADPRDREDQRALLESVVDVLPSAADAPIPAAFLCRLLHAAVTTEASAKTC

SEQ ID NO: 67628 - protein, 90 aa, Setaria italica
  Transcript Sequence Number=SeqID_1654
IKTLLLERLCTLNARAFLVSHLYASFPPLLAPQVYEMYPLVSSQGGSLAEQHSWQHGHGWLNILCKTSATTGVYDILTYVCSTIICSVAV

SEQ ID NO: 67629 - protein, 227 aa, Setaria italica
  Transcript Sequence Number=SeqID_1655
  Subcellular localization annotation: CTP_CleavageSite=70; ConfidenceScore=5.59e-01
WPSKKLLQTFFSFFFFDIDSRSTESSSGTCQPQTIQKMSSSSFSRKQMKSGSIMLTTGKLGITRGRFWPAASYRPKNSPSSMVALKSLRHFPQLVTQTQRNGSGSPASIYGRGEFASRGSGMKLIKLLVRVCRLEVHEQHALVAMNPAQEAAADVEEDVGSERDKVEAHHAHVGSYLQPLNPPWRGGAGAGRRMVQDAELDRLVGTWREIRHREQPFFMSSHPLTHG

SEQ ID NO: 67630 - protein, 165 aa, Setaria italica
  Transcript Sequence Number=SeqID_1656
  Homolog annotation: Hit_ID=B6SLM1; Match level="QueryCoverage=95%, HitCoverage=92%, E-value=6e-73, Identity=85%"; Hit description=TPR repeat region family protein
  Pfam annotation: Domain name=DUF339; Domain location=55-105; Score =80.4; E_value=6.6e-21; Accession=PF03937.8; Description=Protein of unknown function (DUF339)
  Subcellular localization annotation: CTP_CleavageSite=69; ConfidenceScore=5.51e-01
MVAALLCRVLPSPTLPAASGQRLLSAFTTSQQNAATTVDLSSDESRRRLLNRLVYRSKQRGFLELDLVLGSWVEQHVHSMDESNIRALLQVLDLENPDLWKWFTGQEQPPEDLNSNPVFTAIKSKVTDNLSKHASPETRSTPGQPWVRGWDDIKKGKDGPKYGNQ

SEQ ID NO: 67631 - protein, 47 aa, Setaria italica
  Transcript Sequence Number=SeqID_1657
LDSALVVSFTISVSEHASELYFVSVNFIESSTTDLMVDFKDSYFACL

SEQ ID NO: 67632 - protein, 155 aa, Setaria italica
  misc_feature (41)..(41): Xaa can be any naturally occurring amino acid
  Transcript Sequence Number=SeqID_1658
  Gene Ontology: Cellular component=plasma membrane
MALPVPFVRLSLLLLVALPFCAAHPAPGFHAPREFQTPALXLSNGFGLVARRSIAEAPADINITTNSSFVLAADRTYRKDPLNGFRKYPGGWNISEIHYFASVGYTAIPLFAIALVWFVVFFLVMLGICCHHCCCPHRSYKYSRAAYALSLILLI

SEQ ID NO: 67633 - protein, 71 aa, Setaria italica
  Transcript Sequence Number=SeqID_1659
ICLPKFTKPNSSCKYEEDTGLACFCFALLHHMCCQNIADLEWSNCNGGPSFIACICYTRFAWHKFCLHLLH

SEQ ID NO: 67634 - protein, 109 aa, Setaria italica
  Transcript Sequence Number=SeqID_1660
  Gene Ontology: Mol. function=electron carrier activity; Cellular component=integral to membrane; Biological process=oxidation reduction
  Homolog annotation: Hit_ID=Q69LJ6; Match level="QueryCoverage=100%, HitCoverage=15%, E-value=4e-54, Identity=93%"; Hit description =Putative respiratory burst oxidase protein E
  Pfam annotation: Domain name=NADPH_Ox; Domain location=1-94; Score =176.6; E_value=7.2e-50; Accession=PF08414.2; Description=Respiratory burst NADPH oxidase
RRALKGLRFISRTTGSVEAAELWQRVEDRFNGLAREGLLSRDDFGECIGMVDSKEFAVGIFDALARRRRQNLERITKEELYDFWLQISDQSFDARLQIFFDMVDTNVDG

SEQ ID NO: 67635 - protein, 159 aa, Setaria italica
  Transcript Sequence Number=SeqID_1661
  Gene Ontology: Mol. function=RNA binding
  Homolog annotation: Hit_ID=Q4U4H1; Match level="QueryCoverage=47%, HitCoverage=45%, E-value=2e-20, Identity=64%"; Hit description=KH domain-containing protein (Fragment)
RISVMIEPPLPIRHPIRILSKENVPKVAAEDEEMVQISGGLDVARHALLQIAARLKANFFEREGALSAFPPVIPYHPLPAGVSDEPKYLSRDTKPVGHYLYSSGFRGSDDMIPSDSYGSYSSSQAPGGGYGAYSGYSGRSTNSGLSGHSSLPYGKRHGY

SEQ ID NO: 67636 - protein, 250 aa, Setaria italica
  Transcript Sequence Number=SeqID_1662
  Gene Ontology: Mol. function=RNA binding
  Homolog annotation: Hit_ID=Q5NRN6; Match level="QueryCoverage=88%, HitCoverage=72%, E-value=2e-61, Identity=45%"; Hit description=KH domain containing protein, putative
  Pfam annotation: Domain name=KH_1; Domain location=137-204; Score =67.6; E_value=4.7e-17; Accession=PF00013.21; Description=KH domain
  Pfam annotation: Domain name=KH_1; Domain location=39-104; Score =46.2; E_value=1.3e-10; Accession=PF00013.21; Description=KH domain
  Pfam module annotation: Pfam domain module=KH_1::KH_1; Domain location=137-204::39-104
MAGHRNSHGKRHSDYAENGGGKRRNPGDDSYAPGPDDTVYRYLCASRKIGSIIGRGGEIAKQLRAETQAKIRIGESVPGCEERVITIFSSSRETNTIDDAEDKVCPAQDALFRVHERLASDEGPGNEDSEEVLPQVTVRLLVPSDQIGCIIGKGGHIIQGIRSETGAQIRVLSNDHIPACAINGDELLQISGDAVVVRKALHQVSSRLHDNPSKSQHLLASSLTQPYAGSSHLGSSSSAPVVGITPVIPC

SEQ ID NO: 67637 - protein, 127 aa, Setaria italica
  Transcript Sequence Number=SeqID_1663
  Gene Ontology: Mol. function=RNA binding
  Homolog annotation: Hit_ID=Q4U4H1; Match level="QueryCoverage=48%, HitCoverage=36%, E-value=8e-12, Identity=55%"; Hit description=KH domain-containing protein (Fragment)
VVTRISGGLDVARHALLQIAARLKANFFEREGALSAFPPVIPYHPLPAGVSDEPKYLSRDTKPVGHYLYSSGFRGSDDMIPSDSYGSYSSSQAPGGGYGAYSGYSGRSTNSGLSGHSSLPYGKRHGY

SEQ ID NO: 67638 - protein, 498 aa, Setaria italica
  misc_feature (268)..(268): Xaa can be any naturally occurring amino acid
  Transcript Sequence Number=SeqID_1664
  Gene Ontology: Mol. function=nucleotide binding; Cellular component =myosin complex
  Homolog annotation: Hit_ID=Q7Y1D5; Match level="QueryCoverage=99%, HitCoverage=33%, E-value=0.0, Identity=88%"; Hit description =Putative myosin heavy chain
  Pfam annotation: Domain name=Myosin_head; Domain location=1-498; Score=516.6; E_value=3.1e-152; Accession=PF00063.13; Description =Myosin head (motor domain)
SGGRSVQQQVLESNPVLEAFGNAKTVRNNNSSRFGKFVEIQFDQNGKISGAAIRTYLLERSRVCQISDPERNYHCFYMLCSAPPEDRERYKLGDAASFHYLNQSSCIKLDAMDDASEYIITRRAMDIVGISSDEQDAIFRVVAAILHLGNVEFSEGSEADSSVPKDEKSQFHLKTAAELFMCDEKALEESLCKRVMATRGESIVKNLDARAAALSRDALARIVYSRLFDWLVNKINTSIGQDLSSKLLIGVLDIYGFESFKTNRCLTXFEQFCINLTNEKLQQHFNQHVFKMEQEEYTKEEIDWSYIQFVDNQEILDLIEKKPGGIIALLDETCMLRNSTHEIFAEKLYQKFKGNPHFSRPKFSRSDFTIHHYAGNVTYQTDLFLDKNIDYAVNEHQVLLNASRCSFVSSLFPPSEQSTKSTKFTSIGSSFKQQLQSLLETLSATEPHYIRCIKPNNVLKPAIFENSNVLQQLRCGGVLEAIRISCLGYPTRRRFDEF

SEQ ID NO: 67639 - protein, 53 aa, Setaria italica
  Transcript Sequence Number=SeqID_1665
NMNHHSDLRLIITLLHSRFSICISSKACKECVCTHARAWHICLPDQWLLNIIA

SEQ ID NO: 67640 - protein, 247 aa, Setaria italica
  Transcript Sequence Number=SeqID_1666
  Gene Ontology: Mol. function=3-dehydroquinate synthase activity
  Homolog annotation: Hit_ID=B4FYZ3; Match level="QueryCoverage=99%, HitCoverage=60%, E-value=1e-125, Identity=89%"; Hit description=3 -dehydroquinate synthase
  Pfam annotation: Domain name=DHQS; Domain location=2-247; Score =340.8; E_value=2.7e-99; Accession=PF01959.8; Description=3 -dehydroquinate synthase (EC 4.6.1.3)
YPLFIDGPNIFDGENQKVAVISQVSSPRELELVQPDSVEAVNVVIDFRGGWQVIPAENIVAAFQGCRGTVLAVSTKLSEAQGIQEALEQGLDGVVLKVDDMDDIIKLKDYFDRRNEAKSQLPLTKATVSKVEVVGMGDRVCVDLCSIMRPGEGLLVGSYARGMFLVHSECLETNYIASRPFRVNAGPVHAYVTVPGGKTSYLSELRSGKEVIVVDQHGLWRTVVVGRVKIESRPLILVEAKDNSGDD

SEQ ID NO: 67641 - protein, 158 aa, Setaria italica
  Transcript Sequence Number=SeqID_1667
  Gene Ontology: Mol. function=3-dehydroquinate synthase activity
  Homolog annotation: Hit_ID=B4FYZ3; Match level="QueryCoverage=96%, HitCoverage=37%, E-value=5e-77, Identity=91%"; Hit description=3 -dehydroquinate synthase
  Pfam annotation: Domain name=DHQS; Domain location=1-158; Score =123.9; E_value=5.1e-34; Accession=PF01959.8; Description=3 -dehydroquinate synthase (EC 4.6.1.3)
MASCFQVGSYARGMFLVHSECLETNYIASRPFRVNAGPVHAYVTVPGGKTSYLSELRSGKEVIVVDQHGLWRTVVVGRVKIESRPLILVEAKDNSGDDTYSIFLQNAETVALVTHESGSSGRTAIPVTSLKVGDEVLVRKQGGARHTGIEIQEFIVEK

SEQ ID NO: 67642 - protein, 336 aa, Setaria italica
  Transcript Sequence Number=SeqID_1668
  Homolog annotation: Hit_ID=B6SPB1; Match level="QueryCoverage=100%, HitCoverage=81%, E-value=0.0, Identity=71%"; Hit description =Pentatricopeptide repeat protein PPR986-12
  Pfam annotation: Domain name=PPR; Domain location=27-61; Score=19.8; E_value=0.011; Accession=PF01535.12; Description=PPR repeat
  Pfam annotation: Domain name=PPR; Domain location=63-97; Score=8.9; E_ value=0.78; Accession=PF01535.12; Description=PPR repeat
  Pfam annotation: Domain name=PPR; Domain location=99-133; Score=11.0; E_value=0.44; Accession=PF01535.12; Description=PPR repeat
  Pfam module annotation: Pfam domain module=PPR::PPR::PPR; Domain location=27-61::63-97::99-133
LVDLYGKCGAVELARQVFDRMPARDLASWNAMVLALANHGCVQESLDLFDRMTKTENVSPNAITFVAVLSACNHGGLVEEGRRYFAAMVSEYGIRPRIEHYGCMVDILARAGLIEEALDIVSGMNCRPDSVIWRSLLDACCKRNAGLELSEAMAKLALDVPDDAVSGVYVLLSRVYASAQRWNDVGMIRRLMSEEGFKKEPGFSSIEMAGSVHQFVAGDTSHPQSEEIYGKLDEIQERLTSAGYKPDLSEAPMVADADRTKGATLRLHSERLAISFGLLNATPGAPIRILKNLRVCKDCHTISKLISKLYDVEIIVRDRIRFHHFKDGSCSCKDYW

SEQ ID NO: 67643 - protein, 134 aa, Setaria italica
  misc_feature (12)..(12): Xaa can be any naturally occurring amino acid
  misc_feature (18)..(18): Xaa can be any naturally occurring amino acid
  Transcript Sequence Number=SeqID_1669
  Gene Ontology: Mol. function=nucleic acid binding; Cellular component= nucleus
  Homolog annotation: Hit_ID=A9U2Y8; Match level="QueryCoverage=100%, HitCoverage=7%, E-value=2e-73, Identity=91%"; Hit description=SWR1 complex protein, SNF2 family DNA-dependent ATPase (Fragment)
  Pfam annotation: Domain name=SNF2_N; Domain location=1-134; Score= -66.7; E_value=6.6e-05; Accession=PF00176.15; Description=SNF2 family N-terminal domain
TSVMLNWETEFXSKWCPXFKILTYFGSAKERKQKRQGWMKPNYFHVCITTYRLVIQDSKVFKRKKWKYLILDEAHLIKNWKSQRWQTLLNFNSKRRILLTGTPLQNDLMELWSLMHFLMPHVFQSHQEFKDWFC

SEQ ID NO: 67644 - protein, 108 aa, Setaria italica
  Transcript Sequence Number=SeqID_1670
  Gene Ontology: Cellular component=nucleus; Biological process =multicellular organismal development
  Homolog annotation: Hit_ID=Q49KJ2; Match level="QueryCoverage=99%, HitCoverage=41%, E-value=1e-56, Identity=96%"; Hit description=AS2
  Pfam annotation: Domain name=DUF260; Domain location=6-106; Score =224.1; E_value=3.6e-64; Accession=PF03195.6; Description=Protein of unknown function DUF260
TDTGSPCAACKFLRRKCQPDCVFAPYFPPDNPQKFVHVHRVFGASNVTKLLNELHPFQREDAVNSLAYEADMRLRDPVYGCVGVISILQHNLRQLQQDLARAKYELSK

SEQ ID NO: 67645 - protein, 109 aa, Setaria italica
  Transcript Sequence Number=SeqID_1671
  Subcellular localization annotation: CTP_CleavageSite=70; ConfidenceScore=5.39e-01
TTINFNKVIVSTKLTINYIVKTVMHMRLPTINSIFTLSFPPRETSSAVSTSHPQSQQGNVASPTATTPISINGKQYSKQVNCDPKLFTKLKFQIEQPVPCQQKKYHPAD

SEQ ID NO: 67646 - protein, 164 aa, Setaria italica
  Transcript Sequence Number=SeqID_1672
  Gene Ontology: Mol. function=hydrolase activity, acting on carbon -nitrogen (but not peptide) bonds, in linear amidines; Cellular component=chloroplast; Biological process=metabolic process
  Homolog annotation: Hit_ID=B4FA57; Match level="QueryCoverage=100%, HitCoverage=32%, E-value=5e-84, Identity=90%"; Hit description =Metallopeptidase
  Pfam annotation: Domain name=Peptidase_M20; Domain location=41-162; Score=-32.0; E_value=0.087; Accession=PF01546.20; Description =Peptidase family M20M25M40
IRATAVIVSWMKDAGLTTWVDQMGNIHGRFEPANSTKEALLIGSHMDTVIDAGMYDGSLGIICAISALKVLKVTGKLHRLIRPVEVIAFSDEEGVRFQTTFLGSAAVAGTLPESILQVSDKSGTTVQDVLKMNSFEATAAAISQARYNPESVESYVEVHIEQGP

SEQ ID NO: 67647 - protein, 246 aa, Setaria italica
  misc_feature (58)..(58): Xaa can be any naturally occurring amino acid
  misc_feature (104)..(104): Xaa can be any naturally occurring amino acid
  Transcript Sequence Number=SeqID_1673
  Gene Ontology: Mol. function=hydrolase activity, acting on carbon -nitrogen (but not peptide) bonds, in linear amidines; Cellular component=chloroplast; Biological process=metabolic process
  Homolog annotation: Hit_ID=B4FA57; Match level="QueryCoverage=95%, HitCoverage=49%, E-value=1e-122, Identity=87%"; Hit description =Metallopeptidase
  Pfam annotation: Domain name=Peptidase_M20; Domain location=36-238; Score=1.5; E_value=0.00047; Accession=PF01546.20; Description =Peptidase family M20M25M40
VIVSWMKDAGLTTWVDQMGNIHGRFEPANSTKEALLIGSHMDTVIDAGMYDGSLGIIXAISALKVLKVTGKLHRLIRPVEVIAFSDEEGVRFQTTFLGSAAVAXGTTVQDVLKMNSFEATAAAISQARYNPESVESYVEVHIEQGPVLEALRYPLGVVKGIAGQTRLKVIVDGSQGHAGTVPMKLRRDPMVAAAELVVTLERLCKEPNKFLTYDEECGCFTEESLAGLVCTVGELLNVDPRRPRQT

SEQ ID NO: 67648 - protein, 401 aa, Setaria italica
  Transcript Sequence Number=SeqID_1674
  Gene Ontology: Mol. function=hydrolase activity, acting on carbon -nitrogen (but not peptide) bonds, in linear amidines; Cellular component=chloroplast; Biological process=metabolic process
  Homolog annotation: Hit_ID=B4FA57; Match level="QueryCoverage=100%, HitCoverage=79%, E-value=0.0, Identity=85%"; Hit description =Metallopeptidase
  Pfam annotation: Domain name=M20_dimer; Domain location=255-378; Score=19.0; E_value=0.0046; Accession=PF07687.6; Description =Peptidase dimerisation domain
  Pfam annotation: Domain name=Peptidase_M20; Domain location=119-372; Score=9.7; E_value=0.00013; Accession=PF01546.20; Description =Peptidase family M20M25M40
  Pfam module annotation: Pfam domain module=M20_dimer::Peptidase_M20; Domain location=255-378::119-372
MAPSSSRPLRHNLYLLVVSISVLLASVPALAADGLPELGGDGLHREILRDETVMRLKELGKISDGEGYLERTFLSPASIRATAVIVSWMKDAGLTTWVDQMGNIHGRFEPANSTKEALLIGSHMDTVIDAGMYDGSLGIICAISALKVLKVTGKLHRLIRPVEVIAFSDEEGVRFQTTFLGSAAVAGTLPESILQVSDKSGTTVQDVLKMNSFEATAAAISQARYNPESVESYVEVHIEQGPVLEALRYPLGVVKGIAGQTRLKVIVDGSQGHAGTVPMKLRRDPMVAAAELVVTLERLCKEPNKFLTYDEECGCFTEESLRGLVCTVGELLTWPSASNVIPGQVNFTVDIRAMDDKVRETIVTSFSRLVLQRCDDRLVDCRVEHKHSAPATPSDPELTAQ

SEQ ID NO: 67649 - protein, 380 aa, Setaria italica
  Transcript Sequence Number=SeqID_1675
  Gene Ontology: Mol. function=hydrolase activity, acting on carbon -nitrogen (but not peptide) bonds, in linear amidines; Cellular component=chloroplast; Biological process=metabolic process
  Homolog annotation: Hit_ID=B4FA57; Match level="QueryCoverage=94%, HitCoverage=71%, E-value=0.0, Identity=89%"; Hit description =Metallopeptidase
  Pfam annotation: Domain name=M20_dimer; Domain location=135-258; Score=19.3; E_value=0.0043; Accession=PF07687.6; Description =Peptidase dimerisation domain
  Pfam annotation: Domain name=Peptidase_M20; Domain location=5-359; Score=45.6; E_value=2e-10; Accession=PF01546.20; Description =Peptidase family M20M25M40
  Pfam module annotation: Pfam domain module=M20_dimer::Peptidase_M20; Domain location=135-258::5-359
MRSNQYGIDAGMYDGSLGIICAISALKVLKVTGKLHRLIRPVEVIAFSDEEGVRFQTTFLGSAAVAGTLPESILQVSDKSGTTVQDVLKMNSFEATAAAISQARYNPESVESYVEVHIEQGPVLEALRYPLGVVKGIAGQTRLKVIVDGSQGHAGTVPMKLRRDPMVAAAELVVTLERLCKEPNKFLTYDEECGCFTEESLAGLVCTVGELLTWPSASNVIPGQVNFTVDIRAMDDKVRETIVTSFSRLVLQRCDDRLVDCRVEHKHSAPATPSDPELTAQLKRAARSTVLAMPGHAAAAETPVLMSGAGHDAMAMARLTKIGMLFVRCRGGVSHSPEESVTDDDVWAAGLALANFVEQAAVSSEPQPLEAAERSAVAAS

SEQ ID NO: 67650 - protein, 217 aa, Setaria italica
  Transcript Sequence Number=SeqID_1676
GETGDGSLEGERHLGHEEVDDVQVEGDGGDHVLVVGVALEQHVGVEDDEAREHDGSQEPVDGDADPSKREEDLDDEVHQQHVEAGEQEGEHEGEVVALLHSPEGEEGEPQNSSCSEDGRLQNHSADAAGGGDGDAEAAAEREDAEQHQVPGMLLPVLHHGEHHDERRDEDHDEDGPDGGGGPGGEEARDGADEAGRDGDRRCDRELQGSRYWSLVPL

SEQ ID NO: 67651 - protein, 124 aa, Setaria italica
  misc_feature (114)..(114): Xaa can be any naturally occurring amino acid
  misc_feature (118)..(118): Xaa can be any naturally occurring amino acid
  Transcript Sequence Number=SeqID_1677
  Gene Ontology: Mol. function=magnesium ion binding; Cellular component=chloroplast; Biological process=photosynthesis, light harvesting
  Homolog annotation: Hit_ID=B6SZR1; Match level="QueryCoverage=100%, HitCoverage=48%, E-value=6e-64, Identity=95%"; Hit description =Chlorophyll a-b binding protein 4
  Pfam annotation: Domain name=Chloroa_b-bind; Domain location=1-122; Score=106.1; E_value=1.2e-28; Accession=PF00504.13; Description =Chlorophyll A-B binding protein
MMGLAGMLIPEVLTKAGLINAPQWYDAGKSEYFASSSTLFVIEFILFHYVEIRRWQDIKNPGSVNQDPIFKSYSLPPHECGYPGSVFNPLNFAPTLEAKEKELANGRLAMLAFXGFLXIQHNVT

SEQ ID NO: 67652 - protein, 70 aa, Setaria italica
  misc_feature (18)..(18): Xaa can be any naturally occurring amino acid
  Transcript Sequence Number=SeqID_1678
  Homolog annotation: Hit_ID=B6UFP0; Match level="QueryCoverage=97%, HitCoverage=12%, E-value=8e-27, Identity=82%"; Hit description=Auxin- independent growth promoter-like protein
RSSRPSVWSRLNAPYLCXQEGIRLHCPRVSDRDSLWENPRAAATSWKPCAERRSDEISDLVSENETSGFI

SEQ ID NO: 67653 - protein, 117 aa, Setaria italica
  Transcript Sequence Number=SeqID_1679
  Homolog annotation: Hit_ID=B6UFP0; Match level="QueryCoverage=100%, HitCoverage=21%, E-value=3e-62, Identity=93%"; Hit description=Auxin- independent growth promoter-like protein
  Pfam annotation: Domain name=DUF246; Domain location=29-117; Score= -217.7; E_value=0.066; Accession=PF03138.6; Description=Plant protein family
STSWKPCAERRSDEISDLVSENETSGFIFIHAEGGLNQQRIAICNAVAIAKIMNATLILPVLKQDQIWKDQTKFEDIFDVDHFINYLKDDVRIVRDIPDWFTEKEELFTSIKRTVKN

SEQ ID NO: 67654 - protein, 83 aa, Setaria italica
  Transcript Sequence Number=SeqID_1680
  Homolog annotation: Hit_ID=B6UFP0; Match level="QueryCoverage=100%, HitCoverage=14%, E-value=2e-42, Identity=97%"; Hit description=Auxin- independent growth promoter-like protein
SIKPFVDRLGYDNVPMDINRLRCRVNYHALKFLPDIEEMADKLATRMRNRTGNLNPYMALHLRFEKGMVGLSFCDFAGTREEK

SEQ ID NO: 67655 - protein, 380 aa, Setaria italica
  Transcript Sequence Number=SeqID_1681
  Homolog annotation: Hit_ID=B6UFP0; Match level="QueryCoverage=94%, HitCoverage=64%, E-value=0.0, Identity=95%"; Hit description=Auxin -independent growth promoter-like protein
  Pfam annotation: Domain name=DUF246; Domain location=14-344; Score =428.7; E_value=9.1e-126; Accession=PF03138.6; Description=Plant protein family
RVLIWFGFLFLSPVCLPIPSLRVSEDQTKFEDIFDVDHFINYLKDDVRIVRDIPDWFTEKEELFTSIKRTVKNIPKYASAQFYVDNVLPRIKEKKIMSIKPFVDRLGYDNVPMDINRLRCRVNYHALKFLPDIEEMADKLATRMRNRTGNLNPYMALHLRFEKGMVGLSFCDFAGTREEKAMMATYRQKQWPRRYKNGSHLWPLALEKRKEGRCPLEPGEIGIILRAMGYTKETQIYVASGQVYGGNTRMAPLRNMFPNLVSKEDLASKEEMEPFKKHVTSLAALDFLVCLKSDVFVMTHGGNFAKLIIGYRRYMGRHRLKSIKPDKGLMSKFFGDPYMPWATFVEDVMITHQTRTGLPEPTFPHYDLWENPLTPCMCRA

SEQ ID NO: 67656 - protein, 60 aa, Setaria italica
  Transcript Sequence Number=SeqID_1682
LICISKPLTGQHVLRVCINSEKTSSPPRPLLIPMRPWPLAHFRDYARMQPRTNQISPNHP

SEQ ID NO: 67657 - protein, 196 aa, Setaria italica
  misc_feature (17)..(17): Xaa can be any naturally occurring amino acid
  Transcript Sequence Number=SeqID_1683
  Gene Ontology: Mol. function=hydrolase activity, acting on acid anhydrides, catalyzing transmembrane movement of substances; Cellular component=integral to membrane; Biological process =metabolic process
  Homolog annotation: Hit_ID=B8YPY0; Match level="QueryCoverage=100%, HitCoverage=63%, E-value=4e-91, Identity=81%"; Hit description =Plasma membrane H+-ATPase (Fragment)
LIEIFVKGVDPEEVILXAARASRVENQDAIDAAMVSMLSDPKEARDGIEEVHFLPFNPVDKRTALTYISRADGSWHRVSKGAPEQIMTLCKCRDDVVNKVHNVIDKYAERGLRSLAVARQEVPENRKDSPGGPWQFVALLPLFDPPRHDSAETIKKALNLGVNVKMITGDQLAIANWAGKRLGMGTNMYPSSALLG

SEQ ID NO: 67658 - protein, 108 aa, Setaria italica
  Transcript Sequence Number=SeqID_1684
KQRLNLPDYANELRGPPSPEPNRADASRLLHQSSRGGGRRKRGEDARDVCPRRMSRAAVATTTRMAAEEMGRASASVATAEAAPAQASRWARVWPPSLRWIPTPPTAS

SEQ ID NO: 67659 - protein, 69 aa, Setaria italica
  Transcript Sequence Number=SeqID_1685
  Subcellular localization annotation: CTP_CleavageSite=30; ConfidenceScore=5.10e-01
GAADGGFPWGGAVVRTWQGLPRALSGCSISTSLGGGGARFAAINGALPAVRLWAASTASCEPWWAGADE

SEQ ID NO: 67660 - protein, 468 aa, Setaria italica
  Transcript Sequence Number=SeqID_1686
  Homolog annotation: Hit_ID=Q9FZ97; Match level="QueryCoverage=72%, HitCoverage=59%, E-value=3e-71, Identity=40%"; Hit description =F3H9.11 protein
  Pfam annotation: Domain name=DUF616; Domain location=109-414; Score =578.7; E_value=6.5e-171; Accession=PF04765.5; Description=Protein of unknown function (DUF616)
RGGGGAEVALKADSAAMRLVWRRGAVRLVLVSAIAWAMLVLLALAFHLWSCSSSVAFLSALCKKDSKVLNVLDSMGLSSKPLHRCPIPVADDPNAVAIPKRTPNTIIKKLSYITIDKQDKDPSPLFGGRQNWKQREESFKLNSTMKVHCGFMKNSGADMDSVDVKYIQKCKFVVASGIFDGYDIPHQPSNISRRSQKLFCFLMVVDEVSLDFIEKNTTVKIDSNGGKWVGIWRLITVHRLPFDEPRRNGKIPKILTHRLFPQAWYSIWIDGKMELIVDPLLILERYLWRGKYTFAVAVHKHHRSIYEEGDAIKRRKRYARPLVDLQMKMYYYEGMEPWSSKKKMPSDVPEGAVLIREHTTMTDLFSCLWFNEVNLFTPRDQISFGYVVHRLGDSLKFFMFPNCEYNSLFILHKHTREHSSKVEWAKTIDEILKKGLKESRGGLGLWTPYPADLSSVELPAVKRISPAG

SEQ ID NO: 67661 - protein, 95 aa, Setaria italica
  Transcript Sequence Number=SeqID_1687
IIYSSFKKDRGKGSSESQKHEALLPGSSILCSELEDVGDCGDNFVKPPLSNNIRVDLKKKGKRALELVNSQNSSDVTGVDTRDNVRRTRARKVRV

SEQ ID NO: 67662 - protein, 446 aa, Setaria italica
  misc_feature (96)..(96): Xaa can be any naturally occurring amino acid
  Transcript Sequence Number=SeqID_1688
  Gene Ontology: Mol. function=binding
  Homolog annotation: Hit_ID=UPI0001A7B215; Match level="QueryCoverage =29%, HitCoverage=9%, E-value=1e-17, Identity=42%"; Hit description =binding
YIVRKSFICKLYGLLKRRAIPVRYACAFALASTDCSGDVRAESASYLSEVLKEQRRFFVQQNRASKDSIVDNPAYAVVFLIHTLAYDGGLPSNFLXDETSFPEICSPLCVMLRELVEIDSFNRTEHGPAASSVSVLSGIFRAIQKAEDPADSEITPKLHILSKIGLLIVKELDKHCKMSDSPRHVLLPSSYYKLSGSERKADECCQENFISDKLVKRILKAHEPYKHQDNVKCSVVSERVSNESAPDQMNASVCDKGKGNRSLASGKAVSKKKDQNTNNSLEKENASSCGSAGTKLSSPGSLGLAKEADSRDCVSLLDKQNRPMSRCSTGETRASKADRNFCRKTVDLSNFHLRECSFKKDRGKGSSESQKHEALLPGSSILCELEDVGDCGDNFVKPPLSNNIRVDLKKKGKRALELVNSQNSSDVTGVDTRDNVRRTRARKVRV

SEQ ID NO: 67663 - protein, 61 aa, Setaria italica
  Transcript Sequence Number=SeqID_1689
  Subcellular localization annotation: CTP_CleavageSite=3; ConfidenceScore=5.30e-01
MLRAAAAAAAVFPARFAAAPAVAAAEDLRSPLLRVLGTLRGGRGSVLLGRRARFCSNSSAS

SEQ ID NO: 67664 - protein, 65 aa, Setaria italica
  Transcript Sequence Number=SeqID_1690
TMVGSLPAHIQNCYHLATRGHECISLRQAVIMCISPCSLIFNKHLGLRVAWLAAHFNIPSLWSLQ

SEQ ID NO: 67665 - protein, 143 aa, Setaria italica
  Transcript Sequence Number=SeqID_1691
  Gene Ontology: Mol. function=cysteine-type endopeptidase activity; Biological process=proteolysis
  Homolog annotation: Hit_ID=Q41522; Match level="QueryCoverage=81%, HitCoverage=28%, E-value=3e-32, Identity=66%"; Hit description=Thiol protease
  Pfam annotation: Domain name=Inhibitor_I29; Domain location=55-112; Score=98.2; E_value=2.9e-26; Accession=PF08246.4; Description =Cathepsin propeptide inhibitor domain (
  Subcellular localization annotation: CTP_CleavageSite=25; ConfidenceScore=5.16e-01
MPLSSSPSLALALLALVTLTGVLPLASSSRGHGVAATTNGVPPLEKHELLMLERFHGWMAEHGRSYATAEEKLRRFEIYRRNVEFIEAANRDGRLTYTLGENAFTDLTHEEFLATHTNRAPRPEEEDEEPEEETVITTRAGHV

SEQ ID NO: 67666 - protein, 73 aa, Setaria italica
  Transcript Sequence Number=SeqID_1692
PFLSLSLSLSLFFPFAPSQLHISHPSLELMQLIDLALISIFCSSTNLMSHFIQCTPVQSTWDVHKVIFLPPLT

SEQ ID NO: 67667 - protein, 67 aa, Setaria italica
  Transcript Sequence Number=SeqID_1693
  Subcellular localization annotation: CTP_CleavageSite=30; ConfidenceScore=5.16e-01
ISEKNELYITNLGTTPTAAGPISRGAAGRRTSAVKGRRICAGVFGVFSRAKDKGRGERGRWEAAEGA

SEQ ID NO: 67668 - protein, 775 aa, Setaria italica
  Transcript Sequence Number=SeqID_1694
  Gene Ontology: Mol. function=transferase activity, transferring glycosyl groups; Cellular component=cell wall
  Homolog annotation: Hit_ID=Q9M2R0; Match level="QueryCoverage=99%, HitCoverage=100%, E-value=0.0, Identity=82%"; Hit description =Anthranilate phosphoribosyltransferase-like protein
  Pfam annotation: Domain name=C2; Domain location=204-286; Score=96.0; E_value=1.3e-25; Accession=PF00168.22; Description=C2 domain
  Pfam annotation: Domain name=C2; Domain location=366-457; Score=76.9; E_value=7.4e-20; Accession=PF00168.22; Description=C2 domain
  Pfam annotation: Domain name=C2; Domain location=43-123; Score=111.1; E_value=3.7e-30; Accession=PF00168.22; Description=C2 domain
  Pfam annotation: Domain name=PRT_C; Domain location=620-775; Score =439.0; E_value=7.5e-129; Accession=PF08372.2; Description=Plant phosphoribosyltransferase C-ter
  Pfam module annotation: Pfam domain module=C2::C2::C2::PRT_C; Domain location=204-286::366-457::43-123::620-775
MMQRPPFRPEEYSLKETKPHLGGHAAGDKLTSTYDLVEQMQYLYVRVVKAKELPNMDITGSCDPYVEVKLGNYKGTTRFFEKTSNPEWNQVFAFSKERIQSSVVEIVVKDKDLVKDDFIGRVIFDLNEVPKRVPPDSPLAPQWYRLEDRNGHKVKGELMLAVWMGTQADEAFPDAWHSDAASVPGDGLSSIRSKVYLTPKLWYLRVNVIEAQDLIPNDKTRFPDVYVKAILGNQVLRTRVSPARTLNPMWNEDLLFVAAEPFEEHLILSVEDRVAPGKDEVIGRTVISLQHVPRRLDHRLLTSQWYNLEKHVMIDGEQKKETKFSSRIHLRICLEGGYHVLDESTHYSSDLRPTAKPLWKPSIGVLELGILTAQGLLPMKTKDGRGTTDAYCVAKYGQKWVRTRTIIDSFTPKWNEQYTWEVYDPCTVITIGVFDNCHLNGGDKANGARDTRIGKVRIRLSTLETDRVYTHSYPLIVLTPAGVKKMGEVQLAVRFTCSSLLNMMHLYSQPLLPKMHYVHPLSVMQVDNLRRQATNIVSTRLGRAEPPLRKEIVEYMLDVDSHMWSMRKSKANFFRIMGVLGPLIAVAKWFDQICHWRNPLTTILIHVLFMILVLYPELILPTIFLYLFLIGVWYYRWRPRQPPHMDTRLSHAETAHPDELDEEFDTFPTSRPPDVVRMRYDRLRSVAGRIQTVVGDLATQGERLQSLLSWRDPRATALFVVFCFIAAIVLYVTPFRVVVFLAGLYVLRHPRFRHKMPSVPLNFFRRLPARTDSML

SEQ ID NO: 67669 - protein, 77 aa, Setaria italica
  Transcript Sequence Number=SeqID_1695
  Gene Ontology: Mol. function=transcription regulator activity; Cellular component=nucleus; Biological process=regulation of transcription
  Homolog annotation: Hit_ID=Q56YJ8; Match level="QueryCoverage=100%, HitCoverage=18%, E-value=1e-30, Identity=81%"; Hit description =Transcription factor FAMA
EVAENKSCLADIEVRALGADAMIKILSRRRPGQLIKTIAALEDMQMSILHTNITTIEQTVLYSFNVKILGEARYSAE

SEQ ID NO: 67670 - protein, 152 aa, Setaria italica
  misc_feature (23)..(23): Xaa can be any naturally occurring amino acid
  Transcript Sequence Number=SeqID_1696
  Gene Ontology: Mol. function=binding; Cellular component=plasma membrane
  Homolog annotation: Hit_ID=B6ST20; Match level="QueryCoverage=85%, HitCoverage=19%, E-value=7e-58, Identity=83%"; Hit description =Armadillo/beta-catenin-like repeat family protein
VAHITASETRVMPLVQLLDDREXPVMKEAVVALTKFACTENHLHVNHCKAIMDAGGARHLVQLVYLGDHLQIEALILLCYIALHVPESEELAQAGVLAVLMWASKQAHMVQDLRVEALLPNAKGRLDTYVTRACSTTLQACSNHPVEMSLFI

SEQ ID NO: 67671 - protein, 243 aa, Setaria italica
  misc_feature (109)..(109): Xaa can be any naturally occurring amino acid
  Transcript Sequence Number=SeqID_1697
  Gene Ontology: Mol. function=aspartic-type endopeptidase activity; Cellular component=extracellular region; Biological process =proteolysis
  Homolog annotation: Hit_ID=O81054; Match level="QueryCoverage=100%, HitCoverage=67%, E-value=6e-43, Identity=41%"; Hit description =Putative chloroplast nucleoid DNA binding protein
  Subcellular localization annotation: CTP_CleavageSite=73; ConfidenceScore=5.31e-01
DGTTTMGVYATERFTFTSSSGDDALSVLLGFGCGSMNVGSLNNGSGIVGFGRNPLSLVSQLSIRRFSYCLTPYASGRRSTLLFGSVADGVYGDDTAAGPVQTTPLLQSXPQNPTFYYVHLAGLTVGARRLRIPESAFALQPDGSGGVIVDSGTALTLLPAAVLVEVVRAFQVQLRLPFANGSSPDDGVCFVVPAAWRRASSAPQVPVPRMVLHFQGADLDLPRRNYVLDDHRRGRLCLLLADS

SEQ ID NO: 67672 - protein, 284 aa, Setaria italica
  misc_feature (185)..(185): Xaa can be any naturally occurring amino acid
  Transcript Sequence Number=SeqID_1698
  Homolog annotation: Hit_ID=B9S796; Match level="QueryCoverage=96%, HitCoverage=62%, E-value=1e-23, Identity=30%"; Hit description =Pentatricopeptide repeat-containing protein, putative
  Subcellular localization annotation: CTP_CleavageSite=65; ConfidenceScore=5.40e-01
MAKCYSDWPPIPPLHPSRRTPPQSHASPCAIRRQVASFVLHCSRSCASPLLEPTKNLPDEFPAVPAAAPVSPPLPDAALKLGISNKFIRGFCSDPQTEQLAFECYRRALLQPGFLPEKKTANALTVQLLRAKQWGSLELLVEDFRAYGVLPEKRTCARLVACCIRARQFGLADAVLGVLKAKKGXPAVMAFAAAMQAYNKLHMYRSTVLLYGQARVARLPLSTDGYRAAMAACAALGEPDMVASLFKLYRSQKWHPSEDSGEAYAIVCDAMGKAGRALDALRCL

SEQ ID NO: 67673 - protein, 227 aa, Setaria italica
  misc_feature (119)..(119): Xaa can be any naturally occurring amino acid
  Transcript Sequence Number=SeqID_1699
  Gene Ontology: Mol. function=protein serine/threonine kinase activity; Cellular component=plasma membrane; Biological process =protein amino acid phosphorylation
  Homolog annotation: Hit_ID=B9T428; Match level="QueryCoverage=99%, HitCoverage=32%, E-value=2e-74, Identity=59%"; Hit description =Kinase, putative
  Pfam annotation: Domain name=APH; Domain location=20-214; Score= -17.8; E_value=0.044; Accession=PF01636.15; Description =Phosphotransferase enzyme family
  Pfam annotation: Domain name=Pkinase; Domain location=18-224; Score =84.8; E_value=3.1e-22; Accession=PF00069.17; Description=Protein kinase domain
  Pfam annotation: Domain name=Pkinase_Tyr; Domain location=18-227; Score=-13.1; E_value=7.4e-13; Accession=PF07714.9; Description =Protein tyrosine kinase
  Pfam module annotation: Pfam domain module=APH::Pkinase::Pkinase_Tyr; Domain location=20-214::18-224::18-227
DHPQRLPYKELYAATNGFERRKLLGAGGFGQVYKGVLRCSGDEVAIKRISSSGTQGMREFVAEVASLGRMRHRNLVELRGWCKRGQDLLLVYEFMPNGSLDEHLFGRAGAVMPPKPLVXRSAPRRPFRVASGLVYLHEEWEQVVVHRDVKASNVLLGADMAPRLGDFGLARLYEHGADPATTRIVGTLGYMAPDLTVTARASRATDLFAFGVLLLEVACGCRPIVPR

SEQ ID NO: 67674 - protein, 37 aa, Setaria italica
  Transcript Sequence Number=SeqID_1700
MICLRSCGRCREDGGGGEAGAEELLGGALQGPHRRGQ

SEQ ID NO: 67675 - protein, 112 aa, Setaria italica
  Transcript Sequence Number=SeqID_1701
  Subcellular localization annotation: CTP_CleavageSite=45; ConfidenceScore=5.07e-01
LDGEVPGVLLPVALLRLPLLHLHLPVNRNSSGGVHHGKSIRSFVRSFVGREFRTELKRGGRTERLRPLDGEAGAGEAPGAAVEGAAALLHPQPDPARLVGEEGGATGGVNRG

SEQ ID NO: 67676 - protein, 214 aa, Setaria italica
  misc_feature (11)..(11): Xaa can be any naturally occurring amino acid
  misc_feature (21)..(21): Xaa can be any naturally occurring amino acid
  misc_feature (123)..(123): Xaa can be any naturally occurring amino acid
  misc_feature (132)..(132): Xaa can be any naturally occurring amino acid
  Transcript Sequence Number=SeqID_1702
  Gene Ontology: Mol. function=methyltransferase activity; Cellular component=cytoplasm; Biological process=metabolic process
  Homolog annotation: Hit_ID=B6T8R8; Match level="QueryCoverage=95%, HitCoverage=39%, E-value=9e-98, Identity=86%"; Hit description =Phosphoethanolamine N-methyltransferase
  Pfam annotation: Domain name=CMAS; Domain location=11-210; Score= -170.6; E_value=0.0036; Accession=PF02353.12; Description =Cyclopropane-fatty-acyl-phospholipid synthase
  Pfam annotation: Domain name=Methyltransf_11; Domain location=51-152; Score=83.9; E_value=5.5e-22; Accession=PF08241.4; Description =Methyltransferase domain
  Pfam annotation: Domain name=Methyltransf_12; Domain location=51-150; Score=44.5; E_value=4.2e-10; Accession=PF08242.4; Description =Methyltransferase domain
  Pfam annotation: Domain name=Ubie_methyltran; Domain location=19-208; Score=-116.3; E_value=0.00069; Accession=PF01209.10; Description =ubiECOQ5 methyltransferase family
  Pfam module annotation: Pfam domain module=CMAS::Methyltransf _11::Methyltransf_12::Ubie_methyltran; Domain location=11-210::51 -152::51-150::19-208
KVFLDNVQYKXSRILRYERIXFGEGYVSTGGIETTKEFVDKLDLKPGHKVLDVGCGIGGGDFYMAEKYDAHVIGIDLSINMISFALERAIGRSCSVEFEVADCTTKTYPDNTFDVIYSRRTTXYLTTITRNXNPTLFKSFFKWLKPGGKVLISDYCRSPGKPSEEFAAYIKQRGYDLHDVDAYGQMLKNAGFSHVIAEDRTDQFLGYFTEGAGL

SEQ ID NO: 67677 - protein, 96 aa, Setaria italica
  Transcript Sequence Number=SeqID_1703
  Gene Ontology: Mol. function=phosphoethanolamine N-methyltransferase activity; Cellular component=cytoplasm; Biological process=metabolic process
  Homolog annotation: Hit_ID=B6T8R8; Match level="QueryCoverage=97%, HitCoverage=18%, E-value=5e-40, Identity=84%"; Hit description =Phosphoethanolamine N-methyltransferase
VVLSAYIKQRGYDLHDVDAYGQMLKNAGFSHVIAEDRTDQFLGILQKELDKFEKSKDDFLSDFSQGDYDDIVNGWKAKVQRSSAGEQRWGLFIATK

SEQ ID NO: 67678 - protein, 163 aa, Setaria italica
  misc_feature (14)..(14): Xaa can be any naturally occurring amino acid
  misc_feature (70)..(70): Xaa can be any naturally occurring amino acid
  misc_feature (114)..(114): Xaa can be any naturally occurring amino acid
  Transcript Sequence Number=SeqID_1704
  Gene Ontology: Mol. function=phosphoethanolamine N-methyltransferase activity; Cellular component=cytoplasm; Biological process=metabolic process
  Homolog annotation: Hit_ID=Q5SDQ0; Match level="QueryCoverage=72%, HitCoverage=23%, E-value=8e-46, Identity=80%"; Hit description =Putative phosphoethanolamine N-methyltransferase
  Pfam annotation: Domain name=Methyltransf_11; Domain location=18-115; Score=32.8; E_value=1.4e-06; Accession=PF08241.4; Description =Methyltransferase domain
  Pfam annotation: Domain name=Methyltransf_12; Domain location=18-113; Score=22.1; E_value=0.0023; Accession=PF08242.4; Description =Methyltransferase domain
  Pfam module annotation: Pfam domain module=Methyltransf _11::Methyltransf_12; Domain location=18-115::18-113
NLRLVLSLPPSYEXKSVLELGAGIGCFTGELGKTAWHVFALDFIENVIKKNESTNGRYKNTSFMCAGVTXPDLMIEENSIYLIFSNWLLMYLSDEIDRLVERMVKWLKVGGYGXIFFRESCFADNRMFSLQQVDLIIRLLEAKGYYACTFQWTGRYHCFLLYW

SEQ ID NO: 67679 - protein, 273 aa, Setaria italica
  Transcript Sequence Number=SeqID_1705
  Gene Ontology: Mol. function=magnesium ion binding; Cellular component=chloroplast; Biological process=photosynthesis, light harvesting
  Homolog annotation: Hit_ID=B9RR76; Match level="QueryCoverage=85%, HitCoverage=81%, E-value=1e-102, Identity=75%"; Hit description =Chlorophyll A/B binding protein, putative
  Pfam annotation: Domain name=Chloroa_b-bind; Domain location=75-244; Score=254.1; E_value=3.3e-73; Accession=PF00504.13; Description =Chlorophyll A-B binding protein
  Subcellular localization annotation: CTP_CleavageSite=51; ConfidenceScore=5.69e-01
MALSAGSFAACSLQPSRASVRACHAPRPAQPPPLQGPTAVSFTRKTGRRVNATKGVSAVCEPLGPDRPLWFPGSTPPPWLDGSLPGDFGFDPLGLGSEPELLRWFAQAELMHGRWAMLAAVGILIPDLLARWGFIDAGFSWFDAGSRDYFADPWTLFVSQMALMGWAEGRRWADLLNPGCVDIEPDFPNRKKPVPDVGYPGGLWFDWANWGRGSPEPVMVLRTKEIKNGRLAMLAFVGFWFQAVYTGQGPIDNLLAHLADPGHCNVFSAFTSH

SEQ ID NO: 67680 - protein, 155 aa, Setaria italica
  misc_feature (144)..(144): Xaa can be any naturally occurring amino acid
  Transcript Sequence Number=SeqID_1706
HTAGIRRMKSSSSYPELRLGSDGVWSLASPEAAWRSYDDADLYRNRRPERRERSWDVDPQGRAPEVKTIPVDTFVERGRRSPPPREPRSRRRSVERLPKMPEVVEEERPQPRDAVVTPARSMRWSAEAEDVIPEQEVRVAPPRXSRRWNSESLDS

SEQ ID NO: 67681 - protein, 125 aa, Setaria italica
  Transcript Sequence Number=SeqID_1707
RMKYWNGRACWLWSGYANCDFREATCCVQLKPASVRPSEWQLVLLVQRPSTIRTHRRPAARSVDGIGFLQQFQFVSSVDSTRAAAGLACVTRASSPSPAPMHLTAAVGIDRCRREPKVIVDAGPC

SEQ ID NO: 67682 - protein, 334 aa, Setaria italica
  Transcript Sequence Number=SeqID_1708
  Gene Ontology: Mol. function=binding; Cellular component =intracellular; Biological process=mRNA processing
  Homolog annotation: Hit_ID=B9S078; Match level="QueryCoverage=92%, HitCoverage=40%, E-value=1e-146, Identity=74%"; Hit description =Plant RNA cleavage stimulation factor, putative
  Pfam annotation: Domain name=TPR_2; Domain location=284-317; Score =20.9; E_value=0.0051; Accession=PF07719.9; Description =Tetratricopeptide repeat
MPEEKSGGGGGGGGGHGDGSDIYNVQAAEILAKEALLLPINEAAPIYEKLLATFPTAAKYWKQYVEAYMATNNDDATKQIFSRCLLNCLHISLWRCYINFIRRINDKRGSEGLDETKKAFDFMLNYVGNDAASGPVWMEYIAFLKSMPVVTPQEESHRMTTVRKVYQKAILVPTNHVEQLWKDYENFENSVSRTLAKGLLSEYQPKFNSAKAVYRERKKYIDDIDWNVLAIPPTGSFKEEQQCMAWKRLLAFEKGNPQRIDVTTANRRVTFTYEQCLMYLYHHPDIWYDYAMWHAKNGSMDSAAKIFQRALKAIPDSELLKYAFAEMEEFLVGV

SEQ ID NO: 67683 - protein, 251 aa, Setaria italica
  Transcript Sequence Number=SeqID_1709
  Gene Ontology: Mol. function=binding
  Homolog annotation: Hit_ID=B6TBS1; Match level="QueryCoverage=100%, HitCoverage=55%, E-value=1e-129, Identity=90%"; Hit description =Ankyrin-1
  Pfam annotation: Domain name=Ank; Domain location=14-46; Score=37.8; E_value=4.2e-08; Accession=PF00023.22; Description=Ankyrin repeat
  Pfam annotation: Domain name=Ank; Domain location=47-79; Score=4.6; E_ value=7.9; Accession=PF00023.22; Description=Ankyrin repeat
  Pfam annotation: Domain name=TPR_1; Domain location=123-156; Score =11.7; E_value=0.23; Accession=PF00515.20; Description=Tetratricopepti de repeat
  Pfam annotation: Domain name=TPR_1; Domain location=157-190; Score =2.7; E_value=2.8; Accession=PF00515.20; Description=Tetratricopeptide repeat
  Pfam annotation: Domain name=TPR_1; Domain location=191-224; Score =30.5; E_value=6.6e-06; Accession=PF00515.20; Description =Tetratricopeptide repeat
  Pfam annotation: Domain name=TPR_2; Domain location=123-156; Score =21.2; E_value=0.0042; Accession=PF07719.9; Description =Tetratricopeptide repeat
  Pfam annotation: Domain name=TPR_2; Domain location=157-190; Score =19.3; E_value=0.016; Accession=PF07719.9; Description=Tetratricopepti de repeat
  Pfam annotation: Domain name=TPR_2; Domain location=191-224; Score =26.2; E_value=0.00013; Accession=PF07719.9; Description =Tetratricopeptide repeat
  Pfam module annotation: Pfam domain module=Ank::Ank::TPR_1::TPR _1::TPR_1::TPR_2::TPR_2::TPR_2; Domain location=14-46::47-79::123 -156::157-190::191-224::123-156::157-190::191-224
VLIEAGANPNIKAGGATPLHIAADSRNIEVINCLLKAGGDPNTCDDDGLKPIQVAAWSNNREVVELLLPLTSPIPGVSNWNVDGIIEYMAKESEEKSQLKEATSKRSGRPQPVEVSSEAKKRSLEAKSRGDDAFRRKDYLVAVDAYTQATELDPNDATVLSNRSLCWLRAGQAERALEDAKACRALRPDWAKACYREGAAHRLLQRFEEAANAFYEGVQLEPENKELVSAFREAIEAGRKFHGVDTPNPAQ

SEQ ID NO: 67684 - protein, 66 aa, Setaria italica
  Transcript Sequence Number=SeqID_1710
  Homolog annotation: Hit_ID=B9S736; Match level="QueryCoverage=77%, HitCoverage=5%, E-value=3e-09, Identity=60%"; Hit description =Leucine-rich repeat-containing protein 2, lrrc2, putative
KYLSLRGTHISKLPSGISRLYGLETLDISDTHIEELPSEIVQLIKLQHLLACNGPWYLKVIKVSIT

SEQ ID NO: 67685 - protein, 57 aa, Setaria italica
  Transcript Sequence Number=SeqID_1711
GPVTRSRAKKLQQEVNSLLAEFKLHTNENCLLSKCCTLIILRFTHEVIDDTRWRKVT

SEQ ID NO: 67686 - protein, 145 aa, Setaria italica
  Transcript Sequence Number=SeqID_1712
SIFHFRGPDVDIPTNAPTSYVNHGPVTQVDEQATSNNVPQGPITRSCAKKLQQEVNSLLAELKLHRNENCLLPKCCTLIVLRFTHEDMDNTQLEKGYVKSRMSYMKTNKVAVQAETGYMCETLSCAADASNSRASLYQSAMTRGA

SEQ ID NO: 67687 - protein, 133 aa, Setaria italica
  Transcript Sequence Number=SeqID_1713
  Gene Ontology: Mol. function=electron carrier activity; Biological process=oxidation reduction
  Homolog annotation: Hit_ID=Q6ZIG7; Match level="QueryCoverage=98%, HitCoverage=24%, E-value=7e-45, Identity=58%"; Hit description =Putative cytochrome P450
EGKTMITEDDLEGLSYLKLVIKEALRLHCPLPLLLPRQCRETCQVMGYDIPKGTSVFINAWAICRDPKYWDDAEEFKPDRFEKNNIDYKGTNYEFLPFGSGRRMCPGANLGIANVELALASLLYHFDWKLPDG

SEQ ID NO: 67688 - protein, 84 aa, Setaria italica
  Transcript Sequence Number=SeqID_1714
MNFVFLPTMRLTRSHLNTGSGGILKLHEDVQTCGYKDVQVMFDMLTSELEAAAQAQKPPPSPPRKQAPPPVWPGRSSSTIAAAQ

SEQ ID NO: 67689 - protein, 84 aa, Setaria italica
  Transcript Sequence Number=SeqID_1715
  Homolog annotation: Hit_ID=B9RUK2; Match level="QueryCoverage=96%, HitCoverage=12%, E-value=2e-12, Identity=43%"; Hit description =Pentatricopeptide repeat-containing protein, putative
  Pfam annotation: Domain name=PPR; Domain location=10-44; Score=9.9; E_ value=0.6; Accession=PF01535.12; Description=PPR repeat
  Pfam annotation: Domain name=PPR; Domain location=46-80; Score=29.1; E_value=1.8e-05; Accession=PF01535.12; Description=PPR repeat
  Pfam module annotation: Pfam domain module=PPR::PPR; Domain location =10-44::46-80
PADGVAPDAESYSPILAALARRGRHLAAVSLFSHMRAVARVKPDLSVFNIVLNAYGQLDLAREADRLFWNMRRAGVAPSVVTYN

SEQ ID NO: 67690 - protein, 157 aa, Setaria italica
  Transcript Sequence Number=SeqID_1716
  Gene Ontology: Mol. function=electron carrier activity; Cellular component=extracellular region; Biological process=hydrogen peroxide catabolic process
  Homolog annotation: Hit_ID=A7J0U4; Match level="QueryCoverage=78%, HitCoverage=39%, E-value=4e-57, Identity=82%"; Hit description =Peroxidase
  Pfam annotation: Domain name=peroxidase; Domain location=47-157; Score=42.0; E_value=3.9e-13; Accession=PF00141.15; Description =Peroxidase
MANSMGCLVLLCLVSPLLFANAVRSHPWGGLFPQFYDHSCPKAKEIVQSIVAQAVAKETRMAASLVRLHFHDCFVKGCDASVLLDNSSSIVSEKGSNPNRNSLRGFEVVDQIKAALEAACPGTVSCADILAIAARDSTVPVWATNQDSGVTGCDGED

SEQ ID NO: 67691 - protein, 76 aa, Setaria italica
  Transcript Sequence Number=SeqID_1717
  Gene Ontology: Mol. function=electron carrier activity; Cellular component=extracellular region; Biological process=hydrogen peroxide catabolic process
  Homolog annotation: Hit_ID=A7J0U4; Match level="QueryCoverage=76%, HitCoverage=18%, E-value=2e-22, Identity=80%"; Hit description =Peroxidase
MANSMGCLVLLCLVSPLLFANAVRSHPWGGLFPQFYDHSCPKAKEIVQSIVAQAVAKETRMAASLVRLHFHDCFVK

SEQ ID NO: 67692 - protein, 213 aa, Setaria italica
  Transcript Sequence Number=SeqID_1718
  Gene Ontology: Mol. function=electron carrier activity; Cellular component=extracellular region; Biological process=response to oxidative stress
  Homolog annotation: Hit_ID=A7J0U4; Match level="QueryCoverage=88%, HitCoverage=57%, E-value=7e-97, Identity=89%"; Hit description =Peroxidase
  Pfam annotation: Domain name=peroxidase; Domain location=47-213; Score=269.5; E_value=8e-78; Accession=PF00141.15; Description =Peroxidase
MANSMGCLVLLCLVSPLLFANAVRSHPWGGLFPQFYDHSCPKAKEIVQSIVAQAVAKETRMAASLVRLHFHDCFVKGCDASVLLDNSSSIVSEKGSNPNRNSLRGFEVVDQIKAALEAACPGTVSCADILAIAARDSTVLVGGPYWDVPLGRRDSLGASIQGSNNDIPAPNNTLPTIITKFKLQGLNVVDVVALSGGHTIGMSRCTKTLPVLK

SEQ ID NO: 67693 - protein, 195 aa, Setaria italica
  Transcript Sequence Number=SeqID_1719
  Gene Ontology: Mol. function=electron carrier activity; Cellular component=extracellular region; Biological process=response to oxidative stress
  Homolog annotation: Hit_ID=A7J0U4; Match level="QueryCoverage=97%, HitCoverage=56%, E-value=1e-103, Identity=94%"; Hit description =Peroxidase
  Pfam annotation: Domain name=peroxidase; Domain location=1-156; Score= 141.6; E_value=2.5e-39; Accession=PF00141.15; Description=Peroxidase
NNPGPYWDVPLGRRDSLGASIQGSNNDIPAPNNTLPTIITKFKLQGLNVVDVVALSGGHTIGMSRCTSFRQRLYNQTGNGMADSTLDVSYAAQLRQGCPRSGGDNNLFPLDFVTPAKFDNFYYKNILAGKGLLSSDEVLLTKSAETAALVKAYAADVNLFFQHFAQSMVNMGNISPLTGSQGEIRKNCRRLNNDH

SEQ ID NO: 67694 - protein, 92 aa, Setaria italica
  Transcript Sequence Number=SeqID_1720
  Gene Ontology: Mol. function=translation initiation factor activity
  Homolog annotation: Hit_ID=B6SS88; Match level="QueryCoverage=97%, HitCoverage=46%, E-value=6e-31, Identity=77%"; Hit description=GTP binding protein
KRGGGGKSMARVAPQCAAGAPFEVEGSYGRRRCVVYDGERRAVAEVQPKEAVGTDVFRLVVQPGVDVSLAMAVVVALDQMFGRPSLLRSWSS

SEQ ID NO: 67695 - protein, 106 aa, Setaria italica
  Transcript Sequence Number=SeqID_1721
  Gene Ontology: Mol. function=microtubule motor activity; Cellular component=nuclear chromosome, telomeric region; Biological process =telomere maintenance
  Homolog annotation: Hit_ID=B7T1K1; Match level="QueryCoverage=96%, HitCoverage=20%, E-value=1e-39, Identity=76%"; Hit description =Protection of telomeres 1a protein
SFALFEGKVSTESSPYQTSMKYHGSKYDNELLTQMRMWLAYNPPGMKELELQLRSLKSETTFDLVCKVLHVHESNGEWTFYVWDGTDTPAAEFQAILDAEAVCNSF

SEQ ID NO: 67696 - protein, 99 aa, Setaria italica
  Transcript Sequence Number=SeqID_1722
  Gene Ontology: Mol. function=electron carrier activity; Cellular component=endoplasmic reticulum membrane; Biological process =oxidation reduction
  Homolog annotation: Hit_ID=Q10I14; Match level="QueryCoverage=95%, HitCoverage=21%, E-value=2e-37, Identity=73%"; Hit description =Cytochrome P450 family protein
RDHNIWKDPEEFNPERFIGSNIDFNGAHFEFIPFGSGRRICPGMAMAVSNMEFTLANLLYCFDWELPEGVAKEDISMQEAGSLAFQKKAPLMLVPRRYE

SEQ ID NO: 67697 - protein, 67 aa, Setaria italica
  Transcript Sequence Number=SeqID_1723
MASESETTAHSTITTTTLDDGGTHESKRDLGNGAATTPSVGLGEEEEMIGPGPAPAKQRQKRPLQFE

SEQ ID NO: 67698 - protein, 66 aa, Setaria italica
  Transcript Sequence Number=SeqID_1724
RCKLLLVHSLASFSSMLVTVLFFAEQTRGSYETGRIILLRSEGNIQKMQNIPCFHFLLLCGLNASF

SEQ ID NO: 67699 - protein, 106 aa, Setaria italica
  Transcript Sequence Number=SeqID_1725
  Gene Ontology: Mol. function=cyclopropane-fatty-acyl-phospholipid synthase activity; Biological process=lipid biosynthetic process
  Homolog annotation: Hit_ID=B6SV21; Match level="QueryCoverage=99%, HitCoverage=11%, E-value=8e-52, Identity=90%"; Hit description =Cyclopropane fatty acid synthase
RVEMEISDMSFSVSTQLGTGGSRCEWGSRNGISGLLAQKSNAISPSFWCMIREILKFKDDALKYLEDRENNPDMDRNETLGQFIQSHGYSQFFQEAYLIPICACIW

SEQ ID NO: 67700 - protein, 73 aa, Setaria italica
  Transcript Sequence Number=SeqID_1726
  Gene Ontology: Mol. function=1-(5-phosphoribosyl)-5-[(5 -phosphoribosylamino)methylideneamino]imidazole-4-carboxamide isomerase activity
  Homolog annotation: Hit_ID=A4U1C1; Match level="QueryCoverage=93%, HitCoverage=45%, E-value=3e-14, Identity=48%"; Hit description =Protein containing DUF971
  Pfam annotation: Domain name=DUF971; Domain location=1-43; Score =31.1; E_value=1.2e-07; Accession=PF06155.4; Description=Protein of unknown function (DUF971)
GEKVIFGRRHVGIMSAESVGNYGVRILFDDLHKTGIFTWDYLHHLGSNKFSLMRSYIRTLRKHGLSRDPRRRK

SEQ ID NO: 67701 - protein, 154 aa, Setaria italica
  misc_feature (56)..(56): Xaa can be any naturally occurring amino acid
  Transcript Sequence Number=SeqID_1727
  Gene Ontology: Cellular component=vacuole
  Homolog annotation: Hit_ID=B6U9L4; Match level="QueryCoverage=87%, HitCoverage=85%, E-value=5e-51, Identity=74%"; Hit description=ML domain protein
  Pfam annotation: Domain name=E1_DerP2_DerF2; Domain location=25-145; Score=122.8; E_value=1.2e-33; Accession=PF02221.7; Description=ML domain
MATKQHFLLFAAAAMLLLLLPFGCTATAVEYCNKGLDYPVKVSGVEVVPDPVVRGXPATFKISASTDKNITAGKLVIDVAYFIFHVHSETHNFCDETPCPATGEFVLASKQTLPSFTPPGSYTLTMKLLGDSNEELTCISFGFSIGFVTPNAII

SEQ ID NO: 67702 - protein, 113 aa, Setaria italica
  Transcript Sequence Number=SeqID_1728
KLAQKLPCHGMHEIQLPGQVIGFSESWAPALWLPHEMMGHAPRKECSASFTRYFAVIDAPSGKESTVDSLSKKTLNSGSIEGSKVTVYEEKGFPRSYQDLAKSEKCIISYLQS

SEQ ID NO: 67703 - protein, 50 aa, Setaria italica
  Transcript Sequence Number=SeqID_1729
GAAAASRFGIGTRRGERRVVVRPRQPPLPLLSAPAYPRPAPPQPPLHALV

SEQ ID NO: 67704 - protein, 144 aa, Setaria italica
  misc_feature (114)..(114): Xaa can be any naturally occurring amino acid
  Transcript Sequence Number=SeqID_1730
  Gene Ontology: Mol. function=DNA (cytosine-5-)-methyltransferase activity; Cellular component=chromatin; Biological process=protein amino acid phosphorylation
  Homolog annotation: Hit_ID=B9FJ44; Match level="QueryCoverage=95%, HitCoverage=11%, E-value=3e-61, Identity=78%"; Hit description =Cytosine-specific methyltransferase
  Pfam annotation: Domain name=Chromo; Domain location=72-128; Score =51.5; E_value=3.3e-12; Accession=PF00385.16; Description='chromo' (CHRromatin Organisation MOdifier)
GDEVACESFRLNHPETRVRNETTDDFLELLREWEKLCKTYVKQRSKVKSRSNISVQSSDETPDCSTIPPEEFEVWKLVDICFGDPNGVGKHGLYFKVRWKGYGPNDDTWEPIEXLKNCKDAIRDFVIEGHKGKILPLPVSLINA

SEQ ID NO: 67705 - protein, 150 aa, Setaria italica
  misc_feature (16)..(16): Xaa can be any naturally occurring amino acid
  misc_feature (25)..(25): Xaa can be any naturally occurring amino acid
  Transcript Sequence Number=SeqID_1731
  Gene Ontology: Mol. function=DNA (cytosine-5-)-methyltransferase activity; Cellular component=chromatin; Biological process=DNA methylation
  Homolog annotation: Hit_ID=C0SQ91; Match level="QueryCoverage=88%, HitCoverage=17%, E-value=1e-64, Identity=85%"; Hit description =Chromomethylase OsMET2c (Fragment)
EKQDKFIVFMDVMQFXLKPKYIYMXNVLDILKFADATLARYALSRLVAMNYQAKLGIMAAGCYGLPQFRMRVFLLGCHPMENLPPFPLPTHEAIVKNGCPLAFERNLVGWPDGMPMQLEKPIVLEDALSDLPEEVYIQFSLKSHLIQKLL

SEQ ID NO: 67706 - protein, 446 aa, Setaria italica
  Transcript Sequence Number=SeqID_1732
  Gene Ontology: Mol. function=DNA binding; Cellular component =chromatin; Biological process=DNA methylation
  Homolog annotation: Hit_ID=B8AZD1; Match level="QueryCoverage=97%, HitCoverage=34%, E-value=0.0, Identity=83%"; Hit description =Cytosine-specific methyltransferase
  Pfam annotation: Domain name=Chromo; Domain location=3-37; Score =16.3; E_value=0.01; Accession=PF00385.16; Description='chromo' (CHRromatin Organisation MOdifier)
  Pfam annotation: Domain name=DNA_methylase; Domain location=23-408; Score=34.1; E_value=2.4e-14; Accession=PF00145.9; Description=C-5 cytosine-specific DNA methylase
  Pfam module annotation: Pfam domain module=Chromo::DNA_methylase; Domain location=3-37::23-408
LPYFKVRWKGYGPNDDTWEPIEGLKNCKDAIRDFVIEGHKGKILPLPGDVDVICGGPPCQGISGYNRNREFDAPFNCERNKQIIVFMDVMQFLKPKYIYMENVLDILKFADATLARYALSRLVAMNYQAKLGIMAAGCYGLPQFRMRVFLLGCHPMENLPPFPLPTHEAIVKNGCPLAFERNLVGWPDGMPMQLEKPIVLEDALSDLPEVANGEKREEMLYVKGPQTEFQRYIRSFNSEVIGSRAHVTKDSKSKLYDHRPRALDNDNYLRVLQIPKKKGANFRDLPGVIVGPDNVARLDPTKERILLPSGNPLVIDCVLNYEHGKSLRPYGRLWWDEVVGTVLTCPNARMQALIHPAQDRLLTIRESARLQGFPDSFRFRGTVKDRYRQIGNAVAVPVGRALGYALAMAILNKTGDEPLMVLPPKFAFSHDVQGLSSPNGLQSGNI

SEQ ID NO: 67707 - protein, 64 aa, Setaria italica
  Transcript Sequence Number=SeqID_1733
LQRHEFDKTAWQNLSYVIWRHHTIFTPRKKNFFWPPQLMYFYFQLERQNMPNRTAETIKNLRRQ

SEQ ID NO: 67708 - protein, 63 aa, Setaria italica
  Transcript Sequence Number=SeqID_1734
EHVFYKVISLSDEYLQGLERKTISLQVLLHFTRRSKVQLRSTPFWIARQICQLVFRPVVTVIS

SEQ ID NO: 67709 - protein, 426 aa, Setaria italica
  Transcript Sequence Number=SeqID_1735
  Gene Ontology: Mol. function=transporter activity; Cellular component= integral to membrane; Biological process=response to antibiotic
  Homolog annotation: Hit_ID=Q2RAW8; Match level="QueryCoverage=100%, HitCoverage=90%, E-value=1e-175, Identity=69%"; Hit description =Major facilitator superfamily antiporter, putative, expressed
  Pfam annotation: Domain name=MFS_1; Domain location=14-395; Score =115.8; E_value=1.4e-31; Accession=PF07690.8; Description=Major Facilitator Superfamily
  Pfam annotation: Domain name=Sugar_tr; Domain location=16-423; Score=- 141.4; E_value=0.002; Accession=PF00083.16; Description=Sugar (and other) transporter
  Pfam module annotation: Pfam domain module=MFS_1::Sugar_tr; Domain location=14-395::16-423
ESRKGVPYKELLFVGITTFASALPITSLFPFLYFMIRDLHVAQTEEDIGFYAGFLGASYMIGRGIASVFWGMVADRIGRKPVIAISVFSVIVFNTLFGLSVKYWMAIATRFLLGAMNGFLAPVKAYSIEVCRPDQQALGISIVSTAWGMGVIIGPAIGGYLAQPVKQYPHLFHEKSVFGRFPYLLPCLCISLFATLVFISCAWLPETLHKHKGLERAVEMVEGSTNQESTEPPKKSLLKNWPLMSSIITYCVFSLHDTAYAEIFSLWTVSNRKYGGLSFSSKDVGQVLTVAGASLLVYQLFAYRWVNKTFGPIYSTQISSALSIPIIAAYPFMTHLSGIRLGVPLYIAAMLKSIFAITRVTGTSLLQNNAVPQEQRGAANGIATTAMSLSKAFAPAGAGIIFSWAQKRQHAAFFPGDHMMFLLLNL

SEQ ID NO: 67710 - protein, 95 aa, Setaria italica
  Transcript Sequence Number=SeqID_1736
  Pfam annotation: Domain name=DUF588; Domain location=1-78; Score= -36.9; E_value=0.081; Accession=PF04535.4; Description=Domain of unknown function (DUF588)
GFQLVAEVHYLVTRRHIIQAPWRSYFNLAMDQMLAYLLLSASSAALSRNGVWMSRFGGDQFTKLIDASASMAFLAFIALGLSSIISAYCVFSLVS

SEQ ID NO: 67711 - protein, 286 aa, Setaria italica
  Transcript Sequence Number=SeqID_1737
  Gene Ontology: Cellular component=integral to membrane
  Homolog annotation: Hit_ID=B6UBY6; Match level="QueryCoverage=48%, HitCoverage=37%, E-value=1e-15, Identity=33%"; Hit description =Vegetative cell wall protein gp1
  Pfam annotation: Domain name=DUF588; Domain location=133-269; Score =86.2; E_value=1.2e-22; Accession=PF04535.4; Description=Domain of unknown function (DUF588)
PRRTPPPPPAPPPPPAPASSEAKSEQEAAESASESGSMTLALALTQTEDSMPPTPPKASSTQASPIGSPQKESAVTIAKLLSGEDPAVDKVAPPSDPGSLAAAAAVTGVGGGGGSVGSKRWLLAAGVPEKVRRAELRRAELGFRVSAAVFCLVALSVMAADTTTGWSGDSFRRYNEYRYVLAASVVAFTYSGFQLVAEVHYLVTRRHIIQAPWRSYFNLAMDQMLAYLLLSASSAALSRNGVWMSRFGGDQFTKLIDASASMENLAYLALNIALGLSAYCVFSLVS

SEQ ID NO: 67712 - protein, 64 aa, Setaria italica
  Transcript Sequence Number=SeqID_1738
  Gene Ontology: Mol. function=branched-chain-amino-acid transaminase activity; Biological process=branched chain family amino acid metabolic process
  Homolog annotation: Hit_ID=Q10L48; Match level="QueryCoverage=62%, HitCoverage=8%, E-value=2e-14, Identity=90%"; Hit description =Branched-chain amino acid aminotransferase, putative, expressed
VQFNCNRGFLNRCCFASFQQLFFVLSVLPEWKPPVYNNSHGIKLVTATTCRNSPNSIDSKIHHN

SEQ ID NO: 67713 - protein, 45 aa, Setaria italica
  Transcript Sequence Number=SeqID_1739
WYYQPRGKLVAIMKPKYQTTKLLDTNNVYVQDLVSLNSIKFAQLS

SEQ ID NO: 67714 - protein, 564 aa, Setaria italica
  Transcript Sequence Number=SeqID_1740
  Gene Ontology: Mol. function=transaminase activity; Biological process=metabolic process
  Homolog annotation: Hit_ID=B6TME5; Match level="QueryCoverage=97%, HitCoverage=98%, E-value=0.0, Identity=89%"; Hit description =Aminotransferase, class IV family protein
  Pfam annotation: Domain name=Aminotran_4; Domain location=312-547; Score=295.0; E_value=1.6e-85; Accession=PF01063.11; Description =Aminotransferase class IV
MGSPAPEGEGQGPVVIHAWSAPRSLSTSLMYSFAQRDDMEVLDEPLYANFLQVTGVDRPYREELLSKMDPDGNKVVKEAIFGPGEKTYRYCKHISKQRLPNLSSDLMKKGKHFILIRNPLNILPSFDKVVPPSFLELGIGELVSIYSELCGLGKPPPVIDADDLQREPEVVLRGLCEDLGIPFQPQMLKWEAGPKEFDGIWAPWWYRSVHKSTGFSKFRQYPSTFPFALYDLLEQSLPFYNMLKRQVRGTIGSQQPLLPDPPLPVPANKKILVWVGDELLPRDSAKVSVFDSVVQGGDAVWEGLRIYDGKVFKLDEHLDRLFDSAKAMAFSNVPTRDWIKDAVFKTLIANGMFNNAHIRLTLTRGKKVTSGMSPAFNLYGCALIVLAEWKPPVYNNSHGIKLVTATTRRNSPNSIDSKIHHNNLINNILAKIEGNLAQAEDAIMLDKDGFVSETNATNIFMVKKGTVLTPHADYCLPGITRATVMDLVVKENFVLHERRISLSEFHAADEVWTTGTMGEITPVVMIDGREIGDGKIGPVTRQIQNAYKVLTAGQGVPIPRNGDA

SEQ ID NO: 67715 - protein, 73 aa, Setaria italica
  Transcript Sequence Number=SeqID_1741
QLQYSQYYHQQHPGCNPYVQQYQQQQLQYSQYYHQQHPGCNPYVQQYQQYGQYQHVYQQYPQPPLQVPSQNMM

SEQ ID NO: 67716 - protein, 529 aa, Setaria italica
  Transcript Sequence Number=SeqID_1742
  Pfam annotation: Domain name=zf-C3HC4; Domain location=20-59; Score =12.6; E_value=0.0037; Accession=PF00097.17; Description=Zinc finger, C3HC4 type (RING finger)
MGFDNECISSIQSLPGEYFCPVCRTLIYPNEALQTQCTHLYCKPCLAYVVATTKACPYDGYLVTEADSKPLMESNKTLAETIGKVTVHCLYHKSGCQWHGTLSACITHGTTCAYGNSPVICNRCGTQIVHRQVQEHAQLCNGVQSQTQQTDGTQVQPAVATQAVTQDPSLASAGSAAGTATTLPSTTATVVADSASATGGGAAGATTASTTLPPSFSATSGSGSQTPTAEQCYQQQQLQYSQYYHQQHPGCNPYVQQYQQYGQYQHVYQQYPQPPLQVPSQNMMQGSAQPATYVQPQVQSSQPQYMMQSQPQSQPHLPHFQLPAGQSQPHQSIQPAPQVPQLQPQSQVPLQLSGPQVQPAAHTPAPTPVGNQQFAITSTQAMTPQVQPHVQAQPPQQQHANLQALPPQQNLQPQMQLNTQTQPEIPQAQQQSYPQPQAYAQQTHHMHPQNASYPQQQIPHGALLQQPVHTSRQEAPVSQHPAPMRPPVPGQQPAMLPPQGIQQTTQNQQHIGYHAQWPPMQPNIAFQAP

SEQ ID NO: 67717 - protein, 277 aa, Setaria italica
  Transcript Sequence Number=SeqID_1743
  Gene Ontology: Mol. function=structural molecule activity; Biological process=response to gibberellin stimulus
  Homolog annotation: Hit_ID=B6TP74; Match level="QueryCoverage=64%, HitCoverage=78%, E-value=2e-71, Identity=75%"; Hit description =Structural molecule
  Pfam annotation: Domain name=Motile_Sperm; Domain location=90-202; Score=103.2; E_value=8.7e-28; Accession=PF00635.18; Description=MSP (Major sperm protein) domain
MAISGEERHAPAGGDSGGGKLWNLCRMPFRQAGGAPAAPPPQSSSSSSGIHHSAGRYGHEAPVAGDGGAQGASAGSISSVAKSLLPARRRLRLDPANKLYFPYEPGKQVKSAIRIKNTSKSHVAFKFQTTAPKSCFMRPPGAVLAPGETIIATVFKFVEHPENNENVLQKCKVKFKILSLKVKGPMEYAPELFDEQKDQAVVEKILKVVFLDINGQSPQLEKLNNQLAEAEAALEARKKPPEENGPKIVGEGLVIDEWKERRERYLAQQQVEVVDSV

SEQ ID NO: 67718 - protein, 259 aa, Setaria italica
  Transcript Sequence Number=SeqID_1744
  Gene Ontology: Mol. function=transcription factor activity; Cellular component=nucleus; Biological process=regulation of transcription, DNA-dependent
  Homolog annotation: Hit_ID=A9LNM4; Match level="QueryCoverage=92%, HitCoverage=91%, E-value=3e-81, Identity=64%"; Hit description=DRE -binding protein 2
  Pfam annotation: Domain name=AP2; Domain location=80-131; Score=79.7; E_value=1e-20; Accession=PF00847.12; Description=AP2 domain
MDLGHGAQGGEGDSSGSGGQLRKKRMRRKSTGPDSIAETIKWWKEQNQKLQDESGSRKAPAKGSKKGCMAGKGGPENGNCPYRGVRQRTWGKWVAEIREPNRGKRLWLGSFPTAVEAAHAYDEAAKAMYGLKARVNFPENSADANSGCTSALSLLASSVPAAALHGFNEKDEVESVETEVHEVKAEANDDLGSIHVECKSVEVLQSEEIVLQKEGNVSYDYFNVEEVVEMIIIELNADKKIEVHEECLGGDDGFSLFAY

SEQ ID NO: 67719 - protein, 117 aa, Setaria italica
  Transcript Sequence Number=SeqID_1745
  Gene Ontology: Mol. function=protein dimerization activity; Cellular component=nucleus
  Homolog annotation: Hit_ID=Q8S983; Match level="QueryCoverage=98%, HitCoverage=11%, E-value=3e-27, Identity=56%"; Hit description=Auxin response factor 11
TSSAQELDVRARGPRNTDSYSSQSISDQNSKGEHRTKTRRSKKGLSHKSISDKSELSSVPSQICDDQRHGSEPKLVDCETEQVNCGNNEDSSGALTRGGFAGEPQVQQVEQHELLAP

SEQ ID NO: 67720 - protein, 235 aa, Setaria italica
  Transcript Sequence Number=SeqID_1746
  Gene Ontology: Cellular component=integral to membrane
  Homolog annotation: Hit_ID=B6T6Y9; Match level="QueryCoverage=100%, HitCoverage=100%, E-value=1e-94, Identity=75%"; Hit description =Cytochrome b561
  Pfam annotation: Domain name=Cytochrom_B561; Domain location=11-231; Score=142.8; E_value=1.1e-39; Accession=PF03188.8; Description =Eukaryotic cytochrome b561
MAAAPAVRIPVFGLVRLLGLAAAAGILFWAVHYRGGMALSTNEESKLSIFNVHPVLMLIGLVALNGEALLAYKTVPGTKKLKKLVHLALQFFAMFLCIIGLWAVWKFHDERKIEHLYTLHSWLGLTCIIFFSLQWATGFWTFWYPGGSRSGRASLLPWHVFFGIFIYVLAIATSVSGLLEKSIFMQSTKMIGRFSTEAMFMNSLGMLLVVLGALVILAIVSPGPGKIDTYRGSSE

SEQ ID NO: 67721 - protein, 55 aa, Setaria italica
  Transcript Sequence Number=SeqID_1747
  Gene Ontology: Cellular component=plasma membrane; Biological process= ubiquitin-dependent protein catabolic process
  Homolog annotation: Hit_ID=B6SVW9; Match level="QueryCoverage=92%, HitCoverage=11%, E-value=5e-21, Identity=94%"; Hit description=Tubby- like protein
TKSIVKNPEFSGKITFPVSLKQPGPRDATIQCFIKRDKSTQTYYLYLCLSTGKPF

SEQ ID NO: 67722 - protein, 436 aa, Setaria italica
  Transcript Sequence Number=SeqID_1748
  Gene Ontology: Cellular component=plasma membrane
  Homolog annotation: Hit_ID=B6SVW9; Match level="QueryCoverage=100%, HitCoverage=100%, E-value=0.0, Identity=86%"; Hit description=Tubby -like protein
  Pfam annotation: Domain name=F-box; Domain location=51-106; Score =32.4; E_value=1.8e-06; Accession=PF00646.25; Description=F-box domain
  Pfam annotation: Domain name=Tub; Domain location=117-430; Score =576.7; E_value=2.6e-170; Accession=PF01167.10; Description=Tub family
  Pfam module annotation: Pfam domain module=F-box::Tub; Domain location=51-106::117-430
MSFRSIVRDVRDGLGSLSRRGFEVKLLGHRRGKSHGAVHELHDPAPVIQSSCWANLPPELLRDVIERLEASEATWPNRKNVVSCAAVCRTWREMCKEIVKNPEFSGKITFPVSLKQPGPRDATIQCFIKRDKSTQTYYLYLCLSTAVLVESGKFLLCAKRTSRPTCTEYTIFMNSENISRSSKMYIGKLRSNLLGTKFAIYDTQPPCNAALPGKTSRRFYSRKVSPKVSSSTYNIAQVSYELNVLGTRGPRRMNCVMHSIPASSLEAGGTVPCQPDSVLTRPLDESFGSISFSKSSVMDHSMRFSSTRFSEVSMGSHRIGDMALGDNDECNERPLILRNKAPRWHEQLQCWCLNFRGRVTVASVKNFQLVAATQPSAGAPTPSQAAPAPPPEHEKVILQFGKVAKDMFTMDYRYPLSAFQAFAICLSSFDTKLACE

SEQ ID NO: 67723 - protein, 214 aa, Setaria italica
  misc_feature (201)..(201): Xaa can be any naturally occurring amino acid
  Transcript Sequence Number=SeqID_1749
  Gene Ontology: Mol. function=transferase activity, transferring glycosyl groups; Biological process=metabolic process
  Homolog annotation: Hit_ID=B6T427; Match level="QueryCoverage=79%, HitCoverage=48%, E-value=1e-47, Identity=59%"; Hit description =Anthocyanidin 3-O-glucosyltransferase
QKPAIPAGILLQPDFDGPSNDESRSGSARPEVLQWLDKQPSKSVIYVALGSETPLTAENLHEVALGLELAGVRFLWAFRKPTGISAPGTDVVDLLPAGFEARTRGHGLVWTGWVPQVRVLAHGAVGAFLTHCGWGSTIEGLAFGHPLVMLPFVVDQGLIARTMEERGVGVEVARDDGDGSFGRDDVAAAVRRVMVEEERKXFSSNATKLKQVLK

SEQ ID NO: 67724 - protein, 130 aa, Setaria italica
  Transcript Sequence Number=SeqID_1750
GPGDARKKHKKIQLPPPDDAAVEPPPPAAAKVGLWEQFEAYFRPVTLADVEMLKPKLPFGYSKLDSCMLIPFLGTGEELMNQGETYDVAVFETSSYLGVGGAEVVSNRERGDQSGHLLSQKEKRDQNVDP

SEQ ID NO: 67725 - protein, 43 aa, Setaria italica
  Transcript Sequence Number=SeqID_1751
RAAMDAGVLTVTVPKVGAIAAAADADAEKAAEAPAMAIEAGPC

SEQ ID NO: 67726 - protein, 110 aa, Setaria italica
  Transcript Sequence Number=SeqID_1752
RRMKLLHGGAAVQALSFSLLHACRQPRHTHTHRKVCKTKPEEEASDGTTWRATLHSATERRRDRARRRRISRARPRWPSPAPRPPSRRRRRQRRRWPRPLGLRLYRCSPR

SEQ ID NO: 67727 - protein, 471 aa, Setaria italica
  misc_feature (220)..(220): Xaa can be any naturally occurring amino acid
  Transcript Sequence Number=SeqID_1753
  Gene Ontology: Mol. function=tetracycline:hydrogen antiporter activity; Cellular component=cytoplasm; Biological process=response to antibiotic
  Homolog annotation: Hit_ID=Q53LS8; Match level="QueryCoverage=100%, HitCoverage=92%, E-value=0.0, Identity=77%"; Hit description =Diphthamide biosynthesis protein 2 containing protein, expressed
  Pfam annotation: Domain name=Diphthamide_syn; Domain location=2-353; Score=99.9; E_value=9e-27; Accession=PF01866.9; Description=Putative diphthamide synthesis protein
VARALRQELASGGGVRVFVMADTAYNSCCVDEVGASHIDAQCVVHYGHACMSPTSNLPAFFVFGKAPLDVHACACLMLECSRKSNKRILVLYGLEYAYALVDLRRTFEESCKSNSCNPEVQYADVLCSVMSPSSITTEENNCHLSSGTSCSGDLSINSDLAALNNRCGIECTSSTHKYSLGGVTWTVSVQEKMEDYLIFWIGQDNSAFANIVLTFNKCEXRYDATENQLSTDVSHLMKVLRRRYYLVEKAKDASIIGILVGTLGVAGYLHIIKQMKELIKAAGKKSYTLVMGRPNSAKLANFPECEVFVYVSCAQTALLDSKDFLAPVITPFEAVLAFSRGREWTGEYLLDFKDLITSEKQEVASAAEEARFSFIKGAYVEDNRAQENMEQSETETSLALAEVTEKALSIQNQNNDAVLYQGRAMSSIDYLKARSYRGLTGEYEGPAPDSILVGRTGRAAGYSDEKTQSAQ

SEQ ID NO: 67728 - protein, 259 aa, Setaria italica
  Transcript Sequence Number=SeqID_1754
  Gene Ontology: Mol. function=iron ion binding; Cellular component =integral to membrane; Biological process=iron ion transport
  Homolog annotation: Hit_ID=Q6H3Z6; Match level="QueryCoverage=100%, HitCoverage=38%, E-value=1e-129, Identity=85%"; Hit description =Metal-nicotianamine transporter YSL2
  Pfam annotation: Domain name=OPT; Domain location=1-243; Score= -200.5; E_value=0.00011; Accession=PF03169.7; Description=OPT oligopeptide transporter protein
WYYVIVAYVLAPVLGFSNAYGTGLTDMNMSYNYGKIALFIFAAWGGKDNGVIAGLVGCGIVKQLVQVSAELMHDFKTGHLTLTSPRSMLVGQVIGTAMGCVISPLTFMLFFRAFDVGNPDGYWKAPYALIFRNMAVLGVEGISALPAHCLELSVGFFALAVLANVARDLLPRRFGECVPLPTAMAVPFLVGANFAVDMCVGSLVVFALRKVGNGEEAALLVPAIASGFICGDGIWTFPSSLLSLAKVKPPICMKFAPGS

SEQ ID NO: 67729 - protein, 55 aa, Setaria italica
  Transcript Sequence Number=SeqID_1755
  Gene Ontology: Mol. function=ATP-dependent helicase activity
  Homolog annotation: Hit_ID=Q0DBS1; Match level="QueryCoverage=70%, HitCoverage=6%, E-value=5e-10, Identity=76%"; Hit description =Putative DEAD-box ATP-dependent RNA helicase 51
LCPSFRKDSKGRCHASSLHQLDLQKVAASFCFRSPPKVNLDLESSAAKHRKKRRL

SEQ ID NO: 67730 - protein, 65 aa, Setaria italica
  Transcript Sequence Number=SeqID_1756
ESTLEGSFLSYVLISCLQTIWMQCCDFSWYLTSKDLMIVCWVPSEYDVPWLTMLSNQSILIPLKK

SEQ ID NO: 67731 - protein, 52 aa, Setaria italica
  Transcript Sequence Number=SeqID_1757
FHPESTLEGSFLSYVLISCLQTIWMQCCDFSWYLTSKDLMIVCWVPSEHDVP

SEQ ID NO: 67732 - protein, 81 aa, Setaria italica
  Transcript Sequence Number=SeqID_1758
  Gene Ontology: Mol. function=structural constituent of ribosome; Cellular component=ribonucleoprotein complex; Biological process =translation
  Homolog annotation: Hit_ID=Q41852; Match level="QueryCoverage=100%, HitCoverage=100%, E-value=2e-39, Identity=95%"; Hit description=40S ribosomal protein S21
  Pfam annotation: Domain name=Ribosomal_S21e; Domain location=1-81; Score=209.1; E_value=1.1e-59; Accession=PF01249.10; Description =Ribosomal protein S21e
MQNEEGKMVDLYVPRKCSATNRIIIAKDHASVQINIGHLDENGLYDGHFTTFALSGFVRAQGDADSSLDRLWQKRKAEIKQ

SEQ ID NO: 67733 - protein, 86 aa, Setaria italica
  Transcript Sequence Number=SeqID_1759
  Gene Ontology: Mol. function=structural constituent of ribosome; Cellular component=ribonucleoprotein complex; Biological process =translation
  Homolog annotation: Hit_ID=P35687; Match level="QueryCoverage=36%, HitCoverage=37%, E-value=2e-10, Identity=96%"; Hit description=40S ribosomal protein S21
  Pfam annotation: Domain name=Ribosomal_S21e; Domain location=1-64; Score=53.9; E_value=6.2e-13; Accession=PF01249.10; Description =Ribosomal protein S21e
MQNEEGKMVDLYVPRKCSATNRIITAKDHASFIESDSEEEESVYDTASDGDEGEERQQELESDDEDEDVEERSNDDEEGEDEDEDE

SEQ ID NO: 67734 - protein, 81 aa, Setaria italica
  Transcript Sequence Number=SeqID_1760
  Gene Ontology: Mol. function=structural constituent of ribosome; Cellular component=ribonucleoprotein complex; Biological process =translation
  Homolog annotation: Hit_ID=P35687; Match level="QueryCoverage=100%, HitCoverage=98%, E-value=2e-39, Identity=90%"; Hit description=40S ribosomal protein S21
  Pfam annotation: Domain name=Ribosomal_S21e; Domain location=1-81; Score=211.5; E_value=2.2e-60; Accession=PF01249.10; Description =Ribosomal protein S21e
MQNEEGKMVDLYVPRKCSATNRIITAKDHASVQINIGHLDENGMYDGRFTTFALSGFVRAQGDADSSLDRLWQKKRAEIKQ

SEQ ID NO: 67735 - protein, 47 aa, Setaria italica
  Transcript Sequence Number=SeqID_1761
  Gene Ontology: Mol. function=structural constituent of ribosome; Cellular component=ribonucleoprotein complex; Biological process =translation
  Homolog annotation: Hit_ID=Q41852; Match level="QueryCoverage=100%, HitCoverage=58%, E-value=3e-19, Identity=95%"; Hit description=40S ribosomal protein S21
  Pfam annotation: Domain name=Ribosomal_S21e; Domain location=1-47; Score=47.2; E_value=6.3e-11; Accession=PF01249.10; Description =Ribosomal protein S21e
NIGHLDENGLYDGHFTTFALSGFVRAQGDADSSLDRLWQKRKAEIKQ

SEQ ID NO: 67736 - protein, 135 aa, Setaria italica
  Transcript Sequence Number=SeqID_1762
TMQLLSVSAGVQHLSTDESRESKCGEAAIIHPILIQVPNVDLDRSMVLGGDDPVCGRAAKTSRVRNVWCPHSMLFHKAFTQIRLLHIPLPGDIEVHHLTLLVLHDGDWGNTAALLMFTEEKMQPIGNRSNYNGSV

SEQ ID NO: 67737 - protein, 35 aa, Setaria italica
  Transcript Sequence Number=SeqID_1763
INIGHLDENGLYDGHFTTFALSGFVRAQVIVTYPL

SEQ ID NO: 67738 - protein, 43 aa, Setaria italica
  Transcript Sequence Number=SeqID_1764
  Gene Ontology: Mol. function=structural constituent of ribosome; Cellular component=ribonucleoprotein complex; Biological process =translation
  Homolog annotation: Hit_ID=Q41852; Match level="QueryCoverage=95%, HitCoverage=50%, E-value=1e-15, Identity=95%"; Hit description=40S ribosomal protein S21
  Pfam annotation: Domain name=Ribosomal_S21e; Domain location=1-43; Score=23.1; E_value=2.5e-05; Accession=PF01249.10; Description =Ribosomal protein S21e
NWSNGLYDGHFTTFALSGFVRAQGDADSSLDRLWQKRKAEIKQ

SEQ ID NO: 67739 - protein, 631 aa, Setaria italica
  misc_feature (109)..(109): Xaa can be any naturally occurring amino acid
  Transcript Sequence Number=SeqID_1765
  Gene Ontology: Mol. function=ATP-dependent helicase activity; Cellular component=nucleolus; Biological process=ribosome biogenesis
  Homolog annotation: Hit_ID=Q84T03; Match level="QueryCoverage=79%, HitCoverage=84%, E-value=0.0, Identity=82%"; Hit description=DEAD -box ATP-dependent RNA helicase 27
  Pfam annotation: Domain name=DEAD; Domain location=160-331; Score =249.3; E_value=9.2e-72; Accession=PF00270.21; Description=DEADDEAH box helicase
  Pfam annotation: Domain name=Helicase_C; Domain location=407-483; Score=103.6; E_value=6.6e-28; Accession=PF00271.23; Description =Helicase conserved C-terminal domain
  Pfam annotation: Domain name=ResIII; Domain location=156-328; Score= -13.2; E_value=0.00068; Accession=PF04851.7; Description=Type III restriction enzyme, res subunit
  Pfam annotation: Domain name=YL1; Domain location=28-323; Score= -89.6; E_value=0.075; Accession=PF05764.5; Description=YL1 nuclear protein
  Pfam module annotation: Pfam domain module=DEAD::Helicase _C::ResIII::YL1; Domain location=160-331::407-483::156-328::28-323
MCPAAATMKSAGLSKKRKQPVVAPPESDSEEEESVYDTASDGDEGEERQQELESDDEDEDVEERSNDDEEGEDEDEDEDESEEEEVKEDKKKKKETEQAKETVKEDKKXKKEKEVGKEEKKVKKKKGEGSGILSNKLCSELPISELTANAIREMNYTHLTQIQARSIPHLLEGKDVMGAAKTGSGKTLAFLVPAIELLHHLHFSPRNGTGVIVVCPTRELAIQTHNVAKELMKYHSQTLGYVIGGNNRRSEADQLAKGVNLLVATPGRLLDHLQNTKSFIYKRLKCLVIDEADRILEQNFEEDMKQIFKRLPQNRQTVLFSATQTPEVEKFAKLSFEKNEESKEKPVYVGVDDDNSKATVEGLQQGYCVISSEKRFLVLYAFLKKKQNKKVMVFFSSCNSVKFHTELLNFIGIECFDIHGKQKQQKRTTTFFNFCKAEKGILLCTNVAARGLDIPDVDYIVQYDPPDEPKDYIHRVGRTARGDKGKGSALLFLLPEELKFLIYLKAARVALTEYEFSQKNVPNLQSHLEKIVSDNYYLNQSAKEAYRSYVLAYDSHSMKDIFNVHQLDLQKVAASFCFRSPPKVNLDLESSAAKHRKKRRLDGGKRHGIGPSNPYGRKDKDGGNKRQFARF

SEQ ID NO: 67740 - protein, 67 aa, Setaria italica
  Transcript Sequence Number=SeqID_1766
  Subcellular localization annotation: CTP_CleavageSite=27; ConfidenceScore=5.34e-01
MDDAGRASAPAAVTVSATSAPALPPPSATTAAADTSSPDPSALYGEGMWQQMAMNSGATMQPGPYSL

SEQ ID NO: 67741 - protein, 145 aa, Setaria italica
  Transcript Sequence Number=SeqID_1767
  Gene Ontology: Mol. function=structural constituent of ribosome; Cellular component=ribonucleoprotein complex; Biological process =translation
  Homolog annotation: Hit_ID=Q10JD1; Match level="QueryCoverage=97%, HitCoverage=9%, E-value=1e-76, Identity=97%"; Hit description =Retrotransposon protein, putative, Ty1-copia subclass
  Pfam annotation: Domain name=Ribosomal_S19e; Domain location=7-143; Score=344.8; E_value=1.7e-100; Accession=PF01090.11; Description =Ribosomal protein S19e
MATSTARTVKDVNPHDFVKAYSAHLKRSGKMELPEWVDIVKTARFKELPPYDPDWYYTRAASIARKIYLRQGIGVGGFQKIYGGRQRNGSRPPHFCKSSGAICRNILQQLQKMGIIDVDPKGGRLITSVGRRDLDQVAGRVAVVP

SEQ ID NO: 67742 - protein, 205 aa, Setaria italica
  Transcript Sequence Number=SeqID_1768
  Gene Ontology: Mol. function=protein tyrosine kinase activity; Cellular component=plasma membrane; Biological process=protein amino acid phosphorylation
  Homolog annotation: Hit_ID=B9SX32; Match level="QueryCoverage=90%, HitCoverage=45%, E-value=8e-95, Identity=88%"; Hit description =Serine/threonine-protein kinase PBS1, putative
  Pfam annotation: Domain name=Pkinase; Domain location=1-185; Score= -79.6; E_value=0.00094; Accession=PF00069.17; Description=Protein kinase domain
  Pfam annotation: Domain name=Pkinase_Tyr; Domain location=1-185; Score=-58.7; E_value=8e-10; Accession=PF07714.9; Description=Protein tyrosine kinase
  Pfam module annotation: Pfam domain module=Pkinase::Pkinase_Tyr; Domain location=1-185::1-185
GAQPGPALDWMQRVKVAVDAAKGLEYLHEKVQPSIVHRDIRSSNILLFEDFKAKIADFNLSNQAPDMAARLHSTRVLGTFGYHAPEYAMTGQLTQKSDVYSFGVVLLELLTGRKPVDHTMPRGQQSLVTWATPRLTEDKVKQCVDPRLKGEYPAKGLAKLAAVAALCVQYEAEFRPNMSIVVKALSPLLVSKQTQTPAPPPAVDS

SEQ ID NO: 67743 - protein, 161 aa, Setaria italica
  Transcript Sequence Number=SeqID_1769
  Gene Ontology: Mol. function=DNA binding; Cellular component=nucleus; Biological process=regulation of transcription, DNA-dependent
  Homolog annotation: Hit_ID=B6SXX7; Match level="QueryCoverage=95%, HitCoverage=22%, E-value=2e-64, Identity=76%"; Hit description=Auxin response factor 4
  Pfam annotation: Domain name=Auxin_resp; Domain location=2-76; Score =99.8; E_value=9.4e-27; Accession=PF06507.5; Description=Auxin response factor
IRLSVSSCFNPRTGASEFIVSYGKFLKGLNYPFSTGMRFKVGFENEDANQRSHGLISGISEVDPIRWPGSKWRCLLVKWDDDTKCNHRNRVSPWDIEGISSSISMTNCLSSVSKRTKLCFPQGDLDAPILDGNGRPDSMETECFHRVLQGQELVRTRTHGV

SEQ ID NO: 67744 - protein, 108 aa, Setaria italica
  Transcript Sequence Number=SeqID_1770
ADCSGACACGCCHQVEQVRRAFRVESCALHHRILCLRVTSDSVLLRALFFVCSFFPGDDIVLCFFSRKKGIIPFCLIYFACFFSVRVFGVAPCPTNVSDVKILMQECC

SEQ ID NO: 67745 - protein, 58 aa, Setaria italica
  Transcript Sequence Number=SeqID_1771
RIDTTQGVFPDYHIIFTSKCNGGCYLNYFLPLSKLAWCNMLAMAKVSFLNSQPLSHTP

SEQ ID NO: 67746 - protein, 203 aa, Setaria italica
  Transcript Sequence Number=SeqID_1772
  Gene Ontology: Mol. function=protein serine/threonine kinase activity; Biological process=protein amino acid phosphorylation
  Homolog annotation: Hit_ID=B6U2B7; Match level="QueryCoverage=100%, HitCoverage=24%, E-value=1e-112, Identity=96%"; Hit description =Serine/threonine-protein kinase receptor
  Pfam annotation: Domain name=Pkinase; Domain location=1-196; Score =28.9; E_value=3.3e-10; Accession=PF00069.17; Description=Protein kinase domain
  Pfam annotation: Domain name=Pkinase_Tyr; Domain location=1-182; Score=-19.0; E_value=1.8e-12; Accession=PF07714.9; Description =Protein tyrosine kinase
  Pfam module annotation: Pfam domain module=Pkinase::Pkinase_Tyr; Domain location=1-196::1-182
LDEFKNEVLLIAKLQHRNLVRLLGCSISGQERMLVYEYMANKSLDYFLFEKANVVLDWQVRYRIIEGITRGLLYLHQDSRYRIIHRDLKAANVLLDKEMTPKISDFGMARIFGNEETEINTRKVVGTYGYMSPEYAMDGIFSVKSDVFSYGVLLLEIVSGRRNRGAYSCSNNQSLLGHAWSLWNEEKSIELADEKMEGSFNPD

SEQ ID NO: 67747 - protein, 278 aa, Setaria italica
  Transcript Sequence Number=SeqID_1773
  Gene Ontology: Mol. function=sequence-specific DNA binding; Cellular component=nucleus; Biological process=regulation of transcription, DNA-dependent
  Homolog annotation: Hit_ID=B6T910; Match level="QueryCoverage=88%, HitCoverage=89%, E-value=1e-121, Identity=84%"; Hit description =WUSCHEL-related homeobox 14
  Pfam annotation: Domain name=Homeobox; Domain location=96-157; Score =72.4; E_value=1.7e-18; Accession=PF00046.21; Description=Homeobox domain
MEWGDRAKASAVAAAAAAADERAGGGGEGLGGYVKVMTDEQMEVLRKQISIYATICEQLVEMHRTLTEHQDSIAGMRFSNLYCDPLIIPGGHKITARQRWQPTPMQLQILENIFDQGNGTPSKQKIKEITAELSHHGQISETNVYNWFQNRRARSKRKQAAALPNNAESEAEVDEDALTDKKPKSDRPLHENKAMTMSIHNAERISGMHHFDASDHDQIGGMMYGSSDNGMRSSGNPGQMSFYENIMSNPRIDHFPGKVESSRSFSHLQHGEGFDMFG

SEQ ID NO: 67748 - protein, 89 aa, Setaria italica
  Transcript Sequence Number=SeqID_1774
MITRSKLVEQLRDYQIRSQHKRDIIGAISWGLLCCFLIISSYMTLYFRHFWLSAIIISVGILLPAGLYILRQRKLAKKRERRLLLPLSM

SEQ ID NO: 67749 - protein, 120 aa, Setaria italica
  Transcript Sequence Number=SeqID_1775
  Subcellular localization annotation: CTP_CleavageSite=71; ConfidenceScore=5.62e-01
MSLDILYGKFLFSSCAAAKPPCKKLITSLAAGASPSTPSRPRSPNSKSLRPRRVRTVLSSPTKQASPPAVRSTSGAVKRRGRRSKAEGEQGVGGGGGERGGECVPSTEEASICVGTLYQN

SEQ ID NO: 67750 - protein, 159 aa, Setaria italica
  Transcript Sequence Number=SeqID_1776
  Gene Ontology: Mol. function=binding; Cellular component=cytoplasm; Biological process=protein transport
  Homolog annotation: Hit_ID=B6SUZ9; Match level="QueryCoverage=97%, HitCoverage=29%, E-value=7e-76, Identity=93%"; Hit description =Importin alpha-2 subunit
  Pfam annotation: Domain name=Arm; Domain location=105-146; Score =13.1; E_value=0.27; Accession=PF00514.15; Description=Armadillobeta -catenin-like repeat
  Pfam annotation: Domain name=Arm; Domain location=19-59; Score=25.6; E_value=0.0002; Accession=PF00514.15; Description=Armadillobeta -catenin-like repeat
  Pfam annotation: Domain name=Arm; Domain location=62-103; Score=16.9; E_value=0.085; Accession=PF00514.15; Description=Armadillobeta -catenin-like repeat
  Pfam module annotation: Pfam domain module=Arm::Arm::Arm; Domain location=105-146::19-59::62-103
STLVAEQCAWAIGNVAGEGADLRSKLLAQGALWPLARLMLSNKGSTARTAAWALSNLIKGPDPKAANELISIDGVLNAIIRNLEKADEELATEVAWVVVYLSALSEKATSLIVRSSVPQLLIGRLLASENLQLLIPVLRSLGNLVAGDGYMVDSVPNCW

SEQ ID NO: 67751 - protein, 300 aa, Setaria italica
  Transcript Sequence Number=SeqID_1777
  Gene Ontology: Mol. function=binding; Cellular component=cytoplasm; Biological process=protein transport
  Homolog annotation: Hit_ID=B6SUZ9; Match level="QueryCoverage=96%, HitCoverage=54%, E-value=1e-128, Identity=79%"; Hit description =Importin alpha-2 subunit
  Pfam annotation: Domain name=Arm; Domain location=124-165; Score =37.0; E_value=7.3e-08; Accession=PF00514.15; Description =Armadillobeta-catenin-like repeat
  Pfam annotation: Domain name=Arm; Domain location=168-206; Score =20.3; E_value=0.0078; Accession=PF00514.15; Description =Armadillobeta-catenin-like repeat
  Pfam annotation: Domain name=Arm; Domain location=208-248; Score =25.6; E_value=0.0002; Accession=PF00514.15; Description =Armadillobeta-catenin-like repeat
  Pfam annotation: Domain name=Arm; Domain location=251-292; Score=5.4; E_value=2.6; Accession=PF00514.15; Description=Armadillobeta-catenin -like repeat
  Pfam module annotation: Pfam domain module=Arm::Arm::Arm::Arm; Domain location=124-165::168-206::208-248::251-292
  Subcellular localization annotation: CTP_CleavageSite=58; ConfidenceScore=5.48e-01
MDDGSASASPSSASPHQHHRDAIKSSVHNSASSRRREHAIAVGKERREALMRAKRVCRAPLSGNDETVMEEGDMVIDEKKADLEAQTAQAVEELKSALSTQGKGAQKKKIEVLRALRRLLSQSEVPPVEAAIKAGAIPLLVQYLSFGSSDEQLLEAAWCLTNIAAGEPEETKSLLPALPLLIAHLGEKSSTLVAEQCAWAIGNVAGEGADLRSKLLAQGALWPLARLMLSNKGSTARTAAWALSNLIKGPDPKAANELISIDGVLNAIIRNLEKADEELATEVAWVVVYPFSTFLVKSLT

SEQ ID NO: 67752 - protein, 292 aa, Setaria italica
  misc_feature (13)..(13): Xaa can be any naturally occurring amino acid
  Transcript Sequence Number=SeqID_1778
  Gene Ontology: Mol. function=binding; Cellular component=cytoplasm; Biological process=protein transport
  Homolog annotation: Hit_ID=B6SUZ9; Match level="QueryCoverage=97%, HitCoverage=54%, E-value=1e-145, Identity=88%"; Hit description =Importin alpha-2 subunit
  Pfam annotation: Domain name=Arm; Domain location=108-148; Score =19.6; E_value=0.013; Accession=PF00514.15; Description=Armadillobeta- catenin-like repeat
  Pfam annotation: Domain name=Arm; Domain location=150-190; Score =27.4; E_value=6e-05; Accession=PF00514.15; Description=Armadillobeta- catenin-like repeat
  Pfam annotation: Domain name=Arm; Domain location=16-57; Score=16.9; E_value=0.085; Accession=PF00514.15; Description=Armadillobeta -catenin-like repeat
  Pfam annotation: Domain name=Arm; Domain location=59-100; Score=13.1; E_value=0.27; Accession=PF00514.15; Description=Armadillobeta-catenin- like repeat
  Pfam annotation: Domain name=HEAT; Domain location=114-150; Score =14.5; E_value=0.43; Accession=PF02985.14; Description=HEAT repeat
  Pfam annotation: Domain name=HEAT; Domain location=156-192; Score =4.2; E_value=15; Accession=PF02985.14; Description=HEAT repeat
  Pfam module annotation: Pfam domain module=Arm::Arm::Arm::Arm::HEAT::H EAT; Domain location=108-148::150-190::16-57::59-100::114-150::156-192
GTCRLWALSNLIXGPDPKAANELISIDGVLNAIIRNLEKADEELATEVAWVVVYLSALSEKATSLIVRSSVPQLLIGRLLASENLQLLIPVLRSLGNLVAGDGYMVDSVLTVGNSITDQALSSLIKCLKSDNRVLKKEASWAMSNIAAGSFEHKKLIFASEAMTLLMHLLTTAQFDIRREAAYTLGNMCVVPAGNAAPPNIIVDHLVTIVNGGALPGFINLVRSADIESARLGLQFLELVMRGYPNGQGPKLVESEDGIEAMERFQFHENELMRNMANGLVDKYFGEDYGLE

SEQ ID NO: 67753 - protein, 149 aa, Setaria italica
  Transcript Sequence Number=SeqID_1779
  Gene Ontology: Mol. function=structural constituent of ribosome; Cellular component=small ribosomal subunit; Biological process =translation
  Homolog annotation: Hit_ID=B6TFQ9; Match level="QueryCoverage=68%, HitCoverage=53%, E-value=7e-51, Identity=92%"; Hit description =Chloroplast 30S ribosomal protein S10
  Pfam annotation: Domain name=Ribosomal_S10; Domain location=62-149; Score=110.9; E_value=4.2e-30; Accession=PF00338.14; Description =Ribosomal protein S10pS20e
CFISFQFPTGNIFKYCNNLTLTQLCVSIWYLHSSVCLQEVHIGLTTVNLNVTCSQLAPKQKIRIKLRSYWVPLIEDSCKKIIEAAKTTNAKTMGPVPLPTKRRVYCVLNSPHVHKDSRFHFEIRTHQRLIDIMYPTAQTIDSLMQLQLP

SEQ ID NO: 67754 - protein, 175 aa, Setaria italica
  Transcript Sequence Number=SeqID_1780
  Gene Ontology: Mol. function=structural constituent of ribosome; Cellular component=small ribosomal subunit; Biological process =translation
  Homolog annotation: Hit_ID=B6TFQ9; Match level="QueryCoverage=74%, HitCoverage=60%, E-value=6e-57, Identity=85%"; Hit description =Chloroplast 30S ribosomal protein S10
  Pfam annotation: Domain name=Ribosomal_S10; Domain location=100-175; Score=69.6; E_value=1.2e-17; Accession=PF00338.14; Description =Ribosomal protein S10pS20e
  Subcellular localization annotation: CTP_CleavageSite=31; ConfidenceScore=5.66e-01
TSTTSPLPLLLLHRGAANPSPASLSFPSSLRASSLRSRAAAAPPAETLSDDGIPAPPEGEGTGIPLPSSIGDDGEQEVHIGLTTVNLNVTCSQLAPKQKIRIKLRSYWVPLIEDSCKKIIEAAKTTNAKTMGPVPLPTKRRVYCVLNSPHVHKDSRFHFEIRTHQRLIDIMYPTA

SEQ ID NO: 67755 - protein, 196 aa, Setaria italica
  Transcript Sequence Number=SeqID_1781
  Gene Ontology: Mol. function=structural constituent of ribosome; Cellular component=small ribosomal subunit; Biological process =translation
  Homolog annotation: Hit_ID=B6TFQ9; Match level="QueryCoverage=68%, HitCoverage=71%, E-value=1e-71, Identity=98%"; Hit description =Chloroplast 30S ribosomal protein S10
  Pfam annotation: Domain name=Ribosomal_S10; Domain location=100-196; Score=146.7; E_value=7.3e-41; Accession=PF00338.14; Description =Ribosomal protein S10pS20e
  Subcellular localization annotation: CTP_CleavageSite=48; ConfidenceScore=5.84e-01
KRLLPHPLPSSVAMAVSTSTTSPLPLLLLHRGAANPSPASLSFPSSLRASSLRSRAAAAPPAETLSDDGIPAPPEGEGTGIPLPSSIGDDGEQLAPKQKIRIKLRSYWVPLIEDSCKKIIEAAKTTNAKTMGPVPLPTKRRVYCVLNSPHVHKDSRFHFEIRTHQRLIDIMYPTAQTIDSLMQLQLPAGVDVEVKL

SEQ ID NO: 67756 - protein, 311 aa, Setaria italica
  Transcript Sequence Number=SeqID_1782
  Gene Ontology: Mol. function=proteasome activator activity; Cellular component=cytoplasm; Biological process=RNA elongation from RNA polymerase II promoter
  Homolog annotation: Hit_ID=B4G1K7; Match level="QueryCoverage=100%, HitCoverage=100%, E-value=1e-138, Identity=81%"; Hit description =Adhesion regulating molecule conserved region family protein
  Pfam annotation: Domain name=ARM_1; Domain location=9-281; Score =59.4; E_value=1.4e-14; Accession=PF04683.5; Description=Adhesion regulating molecule conserved region
MESSEPLQDVMCEFRAGKMSLEGTRVVPDTRKGLVRVGRGEEGLVHFQWLDRGQNIVEDDQIVFPDEAVFEKVSESSGRVYILKFKHDNRKFFFWMQEPNADGDSQICIQVNAYINRPLDAEADLAVPIEAEMSEDTADDDISSRAGNLVDQSMTADLAGEVTSAAGPVRLEDLQRILSAIQPSGAAADPDAGLGLGDILKPDLVLPLIENLPIEQLASHLPEGSWTPSDILELLQSPPLRQQLDAFTHVLRTGQIDLAQFGVDPSKYKFTVVSFLEALEDSVAKAGSSSASGDKDVEPKRGGGNDPMDES

SEQ ID NO: 67757 - protein, 129 aa, Setaria italica
  misc_feature (30)..(30): Xaa can be any naturally occurring amino acid
  Transcript Sequence Number=SeqID_1783
  Gene Ontology: Mol. function=4 iron, 4 sulfur cluster binding; Biological process=tRNA processing
  Homolog annotation: Hit_ID=Q8H8N3; Match level="QueryCoverage=76%, HitCoverage=15%, E-value=5e-50, Identity=91%"; Hit description=tRNA wybutosine-synthesizing protein 1 homolog
DGLDELELEGEESDDDDEEETVAVEIDMEXDIAGKAPARQNGKVEGSLANGGQNGVKEMVTPIIRTSLEKQGYKILGSHSGVKICRWTKSQLRGRGGCYKHSFYGIESHRCMEATPSLACANKCVFCWR

SEQ ID NO: 67758 - protein, 162 aa, Setaria italica
  misc_feature (144)..(144): Xaa can be any naturally occurring amino acid
  misc_feature (151)..(151): Xaa can be any naturally occurring amino acid
  Transcript Sequence Number=SeqID_1784
  Gene Ontology: Mol. function=transporter activity; Cellular component= integral to membrane; Biological process=transport
  Homolog annotation: Hit_ID=Q6ZLK1; Match level="QueryCoverage=92%, HitCoverage=48%, E-value=4e-76, Identity=92%"; Hit description =Membrane transporter PFB0275w-like protein
MYMNITSLSPSARNHLSSKDVLPPPSIWKDSWVATRSVMKVKTFQIIVLQGIIGSLPWTAIVFFTMWFELIGFDNNSSAALNSLFAIGCASGAFIGGVIADRLSKHYPDSARVMCAQFSAFMGIPFSWILLTVIPQSVDYWYAXAVTLFFXGITISWCATSA

SEQ ID NO: 67759 - protein, 202 aa, Setaria italica
  Transcript Sequence Number=SeqID_1785
  Gene Ontology: Mol. function=transporter activity; Cellular component= integral to membrane; Biological process=transport
  Homolog annotation: Hit_ID=Q6ZLK1; Match level="QueryCoverage=99%, HitCoverage=64%, E-value=1e-108, Identity=94%"; Hit description =Membrane transporter PFB0275w-like protein
ILLGFDNNSSAALNSLFAIGCASGAFIGGVIADRLSKHYPDSARVMCAQFSAFMGIPFSWILLTVIPQSVDYWYAFAVTLFFMGITISWCATSANNPMFAEVVPPKHRTMIYAFDRAFEGSFASLAAPAVGLVTEKIYGYDAKTVNLANGSAEGAFALSRGLLTMMIVPFGVCVLFYSPLYLVFKHDRENAKLASFKEQELV

SEQ ID NO: 67760 - protein, 109 aa, Setaria italica
  Transcript Sequence Number=SeqID_1786
LNNHAQRMTSENRSSVGLPDTAVIQSTVVDFNSNCSEDKKSSDNKISLLDNVEWPLKDKLHSTIHYDICRSVNNEGPEELVLQHQLFKSCTDKLNPTGVTPEISNAERN

SEQ ID NO: 67761 - protein, 213 aa, Setaria italica
  Transcript Sequence Number=SeqID_1787
  Gene Ontology: Mol. function=protein binding; Cellular component =spliceosome; Biological process=dorsal/ventral axis specification
  Homolog annotation: Hit_ID=Q9ZWB1; Match level="QueryCoverage=98%, HitCoverage=31%, E-value=2e-93, Identity=74%"; Hit description =F21M11.16 protein
  Pfam annotation: Domain name=CactinC_cactus; Domain location=89-213; Score=335.1; E_value=1.4e-97; Accession=PF09732.1; Description =Cactus-binding C-terminus of cactin pr
MDHFSPQLMHGDEDEDAIDPEEDKAELDRKREAEFFEHQRKVQEAIKAKARVPDEMEMKAIKTMGAMEEGDAVFGAGAEVNLDSQVYWWHDKYRPRKPKYFNRVHTGYEWNKYNQTHYDHDNPPPKIVQGYKFNIFYPDLVDKSKAPTYSIEKDGSTGETCLIRFHAGPPYEDIAFRIVNKEWEYSHKKGFKCTFERGILHLYFNFKRYRYRR

SEQ ID NO: 67762 - protein, 581 aa, Setaria italica
  Transcript Sequence Number=SeqID_1788
  Gene Ontology: Mol. function=protein binding; Cellular component =spliceosome; Biological process=mRNA processing
  Homolog annotation: Hit_ID=Q9ZWB1; Match level="QueryCoverage=81%, HitCoverage=71%, E-value=1e-156, Identity=60%"; Hit description =F21M11.16 protein
  Pfam annotation: Domain name=Cactin_mid; Domain location=199-398; Score=365.1; E_value=1.3e-106; Accession=PF10312.1; Description =Conserved mid region of cactin
  Subcellular localization annotation: CTP_CleavageSite=57; ConfidenceScore=5.53e-01
MPKRDRDSEGRRRSSSSRRRRSPSPSDSEAASDSSGSPRRRRSRHSRRSRRRRDTPSSSSDASGSGSEDSGSDSGGDRGRRGRSGSRRRRDVTEEQIVEYMAKKAQKKAEKVAKKLKANAVSGYSNDSNPFGDPNLTENFVWRKKIERDVSQGQKVDISVKSEKKRQLERMAEIEKVKKRREERAIEKAQHEEEMQLLARERARAEFQDWEKKEEEFHFDQSKVRSEIRLREGRTKPIDVLLKNLSFSDEFDVELNEPYLVFKGLTVKEMEELRDDIKMHLDLDRESQTNVKYWEALMVVCDWELGEARKRDAIDRARVRGEEPPPEVLAEERGLHASIEGDVKSLLDGKTSTELEDMQSQIESQMRSGTAKVVEYWEAILKRLHIYKAKACLREIHASILRKHLHRLEHPGTAELEVESEKEIDDKVEDEMHDDEDDKPYSPEPIPQQTDNHLEEEDGSFSPQLMHGDEDEDAIDPEEDKAELDRKREAVVFEHQRKVQEAIKAKARVPDEMEMKAIKTMGAMEEGDAVFGAGAEVNLDSQVYWWHDKYRPRKPKYFNRVHTVIMSLVVFIPFISSMHPI

SEQ ID NO: 67763 - protein, 56 aa, Setaria italica
  Transcript Sequence Number=SeqID_1789
QEYHLSLSLHGLTFCDIVDVFLFMHIFPHCTPVLKLIRPCSVNHQSISSMLKLMDP

SEQ ID NO: 67764 - protein, 58 aa, Setaria italica
  Transcript Sequence Number=SeqID_1790
FYTAKISLRLWFCGDFCSSMCEAVTSFISNAISILKYLWHLSFGIFPCWSFQLITTCI

SEQ ID NO: 67765 - protein, 81 aa, Setaria italica
  Transcript Sequence Number=SeqID_1791
  Subcellular localization annotation: CTP_CleavageSite=28; ConfidenceScore=5.35e-01
MGNIPVIPAQTGQDHEGNNSPVIASSVSASVATPASGVLLTSVAIPQQSVPVFRQPLGVHIPHFPTNYVPYNQYISPFYST

SEQ ID NO: 67766 - protein, 655 aa, Setaria italica
  Transcript Sequence Number=SeqID_1792
  Homolog annotation: Hit_ID=Q6EP64; Match level="QueryCoverage=81%, HitCoverage=68%, E-value=1e-103, Identity=46%"; Hit description =Hydroxyproline-rich glycoprotein family protein-like
TIKSGSAASADLKGDLLSKDVVATVGPNVPQSLRPASPSDSVAVPSLDSHGLGDAGAGASRQAIGSNKTLVEHKVGRDVPIDNKGSSQQSVSSSFGRSSGSRPSSSYSSRSQQSCGSQKVIPSKEWKPKPTSSAASQATENVAIPNSVPLAADTITQSSISNSVGTEDLLKVDKSFNGLQLSDKQHVIIPDHLQVSESEKYGLSFGSFNASFQQTMGSSDPECVKSSLPEYNSSHELNGSDDEPQPVQSDQNSSSPVQDEADHVPQQLPSAKLENCAPSAMEISFIAPTESDECRDDSAASGVPQSTSVCTAPSYMTYGLAPQSHGNEIAVIDKSESQVQAPIDFSTSYSTQSYQPATDADERLSPFLAAESAHKYGNIPVIPAQTGQDHEGNNSPVIASSVSASVATPASGVLLTSVAIPQQSVPVFRQPLGVHIPHFPTNYVPYNQYISPFFIPPPTLHPFMSNATFPQPPSTGAMYPAPGSAGILPPVKYSLPPFKPGPNTGSQASIGIPGGYGTYGSSPSVYTNSTNNTTVSSGNPAENDDVTSSQFKENSIYIAGLQTEGSALWIPTPGRDISALQANSFFGLPPQGQQVTFAPQAGPFGGIYHPAHTVAGAAVHPLLQPSHTMAGAVEIVGAPSSVYQHPQAQMNWGSY

SEQ ID NO: 67767 - protein, 69 aa, Setaria italica
  Transcript Sequence Number=SeqID_1793
YLFFLFVLVHGDDRTRFFHGQRNDGSNGLMPQHEDQMVPSQIEHLQSGGPITQKKISFAKKLTDSLLPQ

SEQ ID NO: 67768 - protein, 62 aa, Setaria italica
  Transcript Sequence Number=SeqID_1794
  Gene Ontology: Mol. function=carboxylesterase activity
  Homolog annotation: Hit_ID=A5A7N4; Match level="QueryCoverage=100%, HitCoverage=23%, E-value=5e-10, Identity=48%"; Hit description =Alpha/beta hydrolase fold superfamily
LLDAVAAAPDGERLVLVGHSLGGLNVALAMERFPSKVAAAVFLAASMPRVGSHMGITIEEVS

SEQ ID NO: 67769 - protein, 175 aa, Setaria italica
  Transcript Sequence Number=SeqID_1795
RVHGDDRTRFFHGQRNDGSNGLMPQHEDQMVPSQIEHLQSGGPITQKKISFAKKLTDSLLPQPELTVAKGKAVRNTDNNLQHSKKETPASRKSARIASKKKPDLTMEEQATALLMRKCGLLDENKIPNSETHNKFRAHFIEPLEQQTVGNVRETFGISEGNGADVLGVIAINAEA

SEQ ID NO: 67770 - protein, 45 aa, Setaria italica
  Transcript Sequence Number=SeqID_1796
RVKKRLRASKKKQTKLIQSTSMIPSISSYVAKSYSSLGFCFYCSS

SEQ ID NO: 67771 - protein, 185 aa, Setaria italica
  misc_feature (134)..(134): Xaa can be any naturally occurring amino acid
  Transcript Sequence Number=SeqID_1797
  Homolog annotation: Hit_ID=A8I440; Match level="QueryCoverage=25%, HitCoverage=10%, E-value=2e-13, Identity=78%"; Hit description =Truncated required to maintain repression 1
GPTTTAKPPEPSSTGRARKRRGKELEAETEVEARARRGERVKVSRGNESDGDGGRGDDASHDGNGEARTAGANAKQGNRDRPRATGGHQIQEHCVAREVTALDLDHLTDEVASGDAEEVECGGDDGGGRDGGFXVDEDTQDSGNRELAPIVNEVAEEMAPFEDDYDNEMLEEQLVGDVIRAYSNG

SEQ ID NO: 67772 - protein, 68 aa, Setaria italica
  Transcript Sequence Number=SeqID_1798
SAAYPPPGTAYPPPGQQAYPPPAYGAPPPMAAGYPPPPPPQQEKGGNDGFLKGCLAALCCCCVLDMCF

SEQ ID NO: 67773 - protein, 73 aa, Setaria italica
  Transcript Sequence Number=SeqID_1799
MSYQQGGAYPPPGTAYPPPGQQAYPPPAYGAPPPMAAGYPPPPPPQQEKGGNDGFLKGCLAALCCCCVLDMCF

SEQ ID NO: 67774 - protein, 62 aa, Setaria italica
  Transcript Sequence Number=SeqID_1800
  Gene Ontology: Mol. function=structural constituent of ribosome; Cellular component=intracellular; Biological process=translation
  Homolog annotation: Hit_ID=B6UF11; Match level="QueryCoverage=54%, HitCoverage=30%, E-value=9e-12, Identity=97%"; Hit description =Ribosomal protein L37
  Subcellular localization annotation: CTP_CleavageSite=23; ConfidenceScore=5.32e-01
ISCNTDPNITAFYPQKTDNWSVKAIRRKTTGTGRMRYLRHVPRRFKSNFREGEFLLAPCYAF

SEQ ID NO: 67775 - protein, 43 aa, Setaria italica
  Transcript Sequence Number=SeqID_1801
MSYQQGGAYPPPPPPQQEKGGNDGFLKGCLAALCCCCVLDMCF

SEQ ID NO: 67776 - protein, 66 aa, Setaria italica
  Transcript Sequence Number=SeqID_1802
  Gene Ontology: Mol. function=structural constituent of ribosome; Cellular component=ribonucleoprotein complex; Biological process =translation
  Homolog annotation: Hit_ID=Q6Z8Y5; Match level="QueryCoverage=95%, HitCoverage=67%, E-value=5e-26, Identity=92%"; Hit description =Ribosomal protein L37
  Pfam annotation: Domain name=Ribosomal_L37e; Domain location=1-25; Score=15.8; E_value=2.4e-05; Accession=PF01907.11; Description =Ribosomal protein L37e
  Subcellular localization annotation: CTP_CleavageSite=53; ConfidenceScore=5.37e-01
KSTCSSCGYPAARIRKYNWSVKAIRRKTTGTGRMRYLRHVPRRFKSNFREGTEAVSRKKGAAAGTN

SEQ ID NO: 67777 - protein, 94 aa, Setaria italica
  Transcript Sequence Number=SeqID_1803
  Gene Ontology: Mol. function=structural constituent of ribosome; Cellular component=ribonucleoprotein complex; Biological process =translation
  Homolog annotation: Hit_ID=Q6Z8Y5; Match level="QueryCoverage=100%, HitCoverage=100%, E-value=4e-46, Identity=95%"; Hit description =Ribosomal protein L37
  Pfam annotation: Domain name=Ribosomal_L37e; Domain location=2-55; Score=129.2; E_value=1.3e-35; Accession=PF01907.11; Description =Ribosomal protein L37e
  Subcellular localization annotation: CTP_CleavageSite=21; ConfidenceScore=5.18e-01
MGKGTGSFGKRRNKTHTLCIRCGRRSFHLQKSTCSSCGYPAARIRKYNWSVKAIRRKTTGTGRMRYLRHVPRRFKSNFREGTEATPKKSAAAAN

SEQ ID NO: 67778 - protein, 133 aa, Setaria italica
  Transcript Sequence Number=SeqID_1804
  Gene Ontology: Mol. function=transferase activity
  Homolog annotation: Hit_ID=Q5QPY3; Match level="QueryCoverage=100%, HitCoverage=30%, E-value=8e-44, Identity=66%"; Hit description =Glycosyltransferase (Fragment)
  Pfam annotation: Domain name=DUF563; Domain location=1-108; Score= -22.2; E_value=7.8e-08; Accession=PF04577.6; Description=Protein of unknown function (DUF563)
KHEVVDIDNDDEVRCYPSVVVGPTFHKELGIDASRTPGSSSMVEFRAMLRGAFGLERATATPSSDRWDIRRRPRLLIISRRSSRRFLNERAMADMAMSLGFDVRVGDPDVSTDVSKFARLVNSADVMVGAHGA

SEQ ID NO: 67779 - protein, 73 aa, Setaria italica
  Transcript Sequence Number=SeqID_1805
PKVDSIVRSVTWAQVAANPALPARLLRLHFHDCFVKVRPLPSPSLPRLCPLHSLSPTAQPIASPAQSGSPVGV

SEQ ID NO: 67780 - protein, 105 aa, Setaria italica
  Transcript Sequence Number=SeqID_1806
  Subcellular localization annotation: CTP_CleavageSite=44; ConfidenceScore=5.17e-01
IIWLVLKFSPFPLSTLCRKFYDRIMSARTHIFPCSNWTLPFPTVSSLEGSGPRQETALAASVIHNGWIGASCREPRLRAPRLRGGNEKIAGEEWKRQDFSFTRKM

SEQ ID NO: 67781 - protein, 199 aa, Setaria italica
  Transcript Sequence Number=SeqID_1807
  Homolog annotation: Hit_ID=B6U0I5; Match level="QueryCoverage=97%, HitCoverage=70%, E-value=1e-81, Identity=78%"; Hit description=NHL25
  Pfam annotation: Domain name=Hin1; Domain location=34-172; Score =151.5; E_value=2.6e-42; Accession=PF07320.5; Description=Harpin -induced protein 1 (Hin1)
RRGPGGCCCRFLCCAAVTLVVLAVLAAAAAGALYLIFRPKAPRYSVDRLAVSAFQVDPSTLTARAAFDVSVTAANPNSRIGIYYERGSSLSVWYESYRLARGALPAFYQGHRNTTVLALAMAGEVQLGSAVVSGLRDAQQAGSVPLVFRADVPVRVELGSFKLWKVTSRVRCDLVVDRLMDLSSPIKIKASNCKFSLKL

SEQ ID NO: 67782 - protein, 205 aa, Setaria italica
  Transcript Sequence Number=SeqID_1808
  Homolog annotation: Hit_ID=Q5ZC72; Match level="QueryCoverage=88%, HitCoverage=33%, E-value=2e-27, Identity=45%"; Hit description=Light stress-responsive one-helix protein-like
MLLAVEGGGFFSSSASGYSHGLALLLLGRKGEEKHDKGSTCSHYRLVGQEAEHECQVPSGKNDVPGKCASFICFGCTPARLVGASPPKLGSSNAPGSSSEQPSSSSTGTATTNGSINGSGIKGCLKSNLKRDSSECSTLSCSEEPRESLEEVQTLRSGVERRKVQWTDTYGKELFEIREFEVSDDGLSEDDLENDGFRKCECVIQ

SEQ ID NO: 67783 - protein, 379 aa, Setaria italica
  misc_feature (76)..(76): Xaa can be any naturally occurring amino acid
  Transcript Sequence Number=SeqID_1809
  Homolog annotation: Hit_ID=O04621; Match level="QueryCoverage=86%, HitCoverage=71%, E-value=1e-101, Identity=52%"; Hit description=A _IG002N01.14 protein
  Pfam annotation: Domain name=DUF231; Domain location=237-375; Score =104.8; E_value=2.9e-28; Accession=PF03005.7; Description=Arabidopsis proteins of unknown function
  Subcellular localization annotation: CTP_CleavageSite=95; ConfidenceScore=5.36e-01
MGSSPMTWSASPPSPWGRGAGKWWALGGPLAVKAVGFLLLAGLLFRVLCSFPPSPAPALQVSKGKCNLFNGKWIPXPSGPAYTNASCRFIDSHQNCMMNGRPDKGYLHWKWKPYGCDLPPFDAVRFLDSMRNKAWGLIGDSILRNQVQSLLCLLSKAEEPVEVYHDKEFKNRRWHFQSYNFTVSIVWAPFLIRSDVFENENGESTSEIQLHLDILDASWTSQYESFDYVIISGGQWFLRTAVYWENGAVVGCHYCQNKNLVELGFEHLYRKTLQKVFSFITSAKHKPVIFFRTWSPDHFENGEWFNGGSCNRVTPFKKGEYQEGYNERVMRAIELEEFNKAAAALRGSVDVERMELMDTYSLSFLRPDGHVGPYRTPYP

SEQ ID NO: 67784 - protein, 168 aa, Setaria italica
  misc_feature (163)..(163): Xaa can be any naturally occurring amino acid
  Transcript Sequence Number=SeqID_1810
  Gene Ontology: Mol. function=protein binding
  Pfam annotation: Domain name=WW; Domain location=137-167; Score=29.8; E_value=1.1e-05; Accession=PF00397.18; Description=WW domain
FLIWQHLSVGISGCDCSLLDKKENPLALLGQYSDDEEEDEEAADQPTGEAKGSPGDASAQTTIEHANTPGDNGNAQTEPSGTVGDQQEAPEAGDVKNYTQSVSEGKTLVPEPTLQEENVTAAGSVPDSSGMQIVADIGGNWKAVMHEQSNQCYYWNTVTGETXWEIPN

SEQ ID NO: 67785 - protein, 158 aa, Setaria italica
  Transcript Sequence Number=SeqID_1811
  Homolog annotation: Hit_ID=Q5KS41; Match level="QueryCoverage=99%, HitCoverage=31%, E-value=5e-27, Identity=40%"; Hit description =FOLDED PETALS
GEPMSPAGRLFRETHLNCHIVALIGLGAAVDVAAARAGLEATLVRHPRFSSVQVKDDVKNKNAKPRWVRTTVNLDDHIIFPHLDPAATSANPDQAVEDYLSSLSTAPMDHSRPLWELHVLDFPTSEAASAVAVRMHHSLGDGISLLSLLIACTRSAAD

SEQ ID NO: 67786 - protein, 118 aa, Setaria italica
  Transcript Sequence Number=SeqID_1812
  Gene Ontology: Mol. function=oxidoreductase activity; Cellular component=cytoplasm; Biological process=oxidation reduction
  Homolog annotation: Hit_ID=B6T5H2; Match level="QueryCoverage=100%, HitCoverage=30%, E-value=7e-56, Identity=86%"; Hit description =Alcohol dehydrogenase 1
DGGADYSFECVGDTGVVSTALQSCSDGWGVTVTLGVPKAKPEVSAHYAFLLSGRTLKGSLFGGWRPKSDLPSLVNKYADKEIQVDGLVTHDIPFGDINRALELMLESKCLRCVIHMSQ

SEQ ID NO: 67787 - protein, 339 aa, Setaria italica
  Transcript Sequence Number=SeqID_1813
  Gene Ontology: Mol. function=oxidoreductase activity; Cellular component=cytoplasm; Biological process=oxidation reduction
  Homolog annotation: Hit_ID=B6T5H2; Match level="QueryCoverage=96%, HitCoverage=84%, E-value=1e-167, Identity=88%"; Hit description =Alcohol dehydrogenase 1
  Pfam annotation: Domain name=ADH_N; Domain location=40-168; Score =103.4; E_value=7.8e-28; Accession=PF08240.4; Description=Alcohol dehydrogenase GroES-like doma
  Pfam annotation: Domain name=ADH_zinc_N; Domain location=199-339; Score=117.2; E_value=5.6e-32; Accession=PF00107.18; Description=Zinc- binding dehydrogenase
  Pfam module annotation: Pfam domain module=ADH_N::ADH_zinc_N; Domain location=40-168::199-339
MAADAASSSPPAAITCRAAVAWGPGQPLVMEEVEVAPPGAMEIRVKVVSTSVCRSDVTAWQSKAQPDLFPRIFGHEASGVVESVGEGVTEFQVGDHVLTVFIGECQSCKHCVSGKSNMCQKLGLERKGVMHSDQMTRFSVKGKPVYHYCAVSSFSEYTVVHSGCAVKVGLTVPMDRVCLLSCGVSAGLGAAWNVADVSEGSSVVIFGLGTVGLSVAQGAKLRGASKIIGVDTNPEKQEKGKAFGVTDFINPNELSEPVQQVIKRMTDGGADYSFECVGDTGVVSTALQSCSDGWGVTVTLGVPKAKPEVSAHYAFLLSGRTLKGSLFGGWRPKSDLPSL

SEQ ID NO: 67788 - protein, 393 aa, Setaria italica
  Transcript Sequence Number=SeqID_1814
  Gene Ontology: Mol. function=protein binding
  Homolog annotation: Hit_ID=Q9SF14; Match level="QueryCoverage=42%, HitCoverage=31%, E-value=2e-20, Identity=35%"; Hit description =F26K24.14 protein
  Pfam annotation: Domain name=DUF593; Domain location=1-52; Score=5.3; E_value=4.3e-06; Accession=PF04576.7; Description=Protein of unknown function, DUF593
LQREKAEVQMELRQFRRFADEKMALDAAEIDQLRALLAQRARRLMRLRARLREYRLQFLHLGIPLPEGEDLVAQNAQEEEDDLLLLEGEDGYADGDGGYYPELRCHDGEYYYEDGQEEEDAVALDLERRICRLEHDQETHLLEPVLEEEEGTNLYTDEGLPELPGLERGGFYADEMLPEEAVEERSQLYNDDEELPESPSAGFGGGEEASETDGVGSASGSDRVYTIDKVHQGASAPIARVPDKYQDEVVEPDIKKLYMRLEALEADRESMRQALVAMRTEKTQLVLLCEIAQQLAKDGAPAGSGAGVGPGVHHTPGKCKVGIVERRFMEDKKAALVKTFSMVALFKWVLTLFGKKKKLLQSRYTFGLSSNNVGLLLLLDKCPRIQKTLTRTG

SEQ ID NO: 67789 - protein, 86 aa, Setaria italica
  Transcript Sequence Number=SeqID_1815
  Homolog annotation: Hit_ID=Q2HU53; Match level="QueryCoverage=97%, HitCoverage=13%, E-value=2e-31, Identity=72%"; Hit description =Tetratricopeptide-like helical
SHPRSDEIYAELERLEGLMSQAGYVPDTTPVFHNVEDDEKRNMVRGHSERLAISFGLISTPPGTKLLVTKNLRVCEDCHVVMKLEF

SEQ ID NO: 67790 - protein, 143 aa, Setaria italica
  Transcript Sequence Number=SeqID_1816
  Gene Ontology: Mol. function=protein serine/threonine kinase activity; Cellular component=plasma membrane; Biological process =protein amino acid phosphorylation
  Homolog annotation: Hit_ID=Q9SHI2; Match level="QueryCoverage=96%, HitCoverage=12%, E-value=1e-41, Identity=58%"; Hit description =Similar to leucine-rich receptor-like protein kinase
YYYMAPEYAFTMKVTEKCDIYSFGVVLLELLTGQSPIQPLEKGGDLVNLVRRMMNKMTPSREMFDSRLDLSSRRVVEEMSLVLKIALFCTNESPFDRPSMREVISMLMDARASSYDSFSSPASEAPIEDGSSPKVLRLLSSFY

SEQ ID NO: 67791 - protein, 287 aa, Setaria italica
  Transcript Sequence Number=SeqID_1817
  Gene Ontology: Mol. function=serine-type endopeptidase activity; Cellular component=extracellular region; Biological process=negative regulation of catalytic activity
  Homolog annotation: Hit_ID=B6U1P8; Match level="QueryCoverage=90%, HitCoverage=33%, E-value=1e-108, Identity=79%"; Hit description =Subtilisin-like protease
  Pfam annotation: Domain name=Inhibitor_I9; Domain location=30-107; Score=61.6; E_value=2.9e-15; Accession=PF05922.8; Description =Peptidase inhibitor I9
MGNPVMLRALVLAALAVAAAAAAAATEKRKTYIVHMAKSAMPAEYADDHREWYGASLRSVSAASNMLYAYDTVLHGFSARLTAQEAADLACLGGVLAVNPEARYELHTTRTPEFLGIADGGADQGGLFPQSGTAADVVVGVLDTGVWPESRSYDDAGLGEVPSFWKGRCVEGAGFNASACNRKLVGARFFNRGYEAAMGPMDTDRESRSPRDDDGHGTHTSSTAAGAAVPGASLFGFASGTARGMAPRARVAVYKVCWLGGCFSSDILAGMDAAVADGCGVLSLSLG

SEQ ID NO: 67792 - protein, 328 aa, Setaria italica
  Transcript Sequence Number=SeqID_1818
  Pfam annotation: Domain name=SPRY; Domain location=118-235; Score= -7.2; E_value=0.045; Accession=PF00622.20; Description=SPRY domain
  Subcellular localization annotation: CTP_CleavageSite=24; ConfidenceScore=5.22e-01
PAAAAAAASSTKRWLPGSIPSPLRGDADAGNNPSALCLARMSLPLPGPPLAGAPFPQDAYFEITIIYLNTKRPEWSASRASRRGRDGASESDRVKLISFAPDAKDPVQESRAAKDDQQDKQRHLVMSLGLAVASAAPARPALAGTYASSIGFHSNGAVYLDGMKLVYESDKSSWVGVDKVVGCGFEPAKRKVFFTVDGQLVHAVSCNAEAFASPLYPVLASSFDVMALVNLGQGKFRYAPANARRTANPCFVRAASAVDARGGGGGSDSMGLDFDDSGELFSMGRVDSGWMEALRASKSRKDSVTGSGAASVGDPEAESDLFEISLRD

SEQ ID NO: 67793 - protein, 64 aa, Setaria italica
  Transcript Sequence Number=SeqID_1819
  Subcellular localization annotation: CTP_CleavageSite=38; ConfidenceScore=5.20e-01
CTAFLMALQSLLDSWNQRSFLDSSTVGDIRRTTSRCARGALLPSPKYNSTRLHACITGRQEGIL

SEQ ID NO: 67794 - protein, 352 aa, Setaria italica
  Transcript Sequence Number=SeqID_1820
  Gene Ontology: Mol. function=zinc ion binding
  Homolog annotation: Hit_ID=Q8H3L3; Match level="QueryCoverage=97%, HitCoverage=29%, E-value=7e-48, Identity=35%"; Hit description =Putative far-red impaired response protein
  Pfam annotation: Domain name=SWIM; Domain location=236-272; Score =21.2; E_value=0.0019; Accession=PF04434.9; Description=SWIM zinc finger
QLLLDVMDGKKPSTILTHQDSAITKSIAEVFHTAFHRFDMWHVLRKARDELGSFMAHRGGMETELTHLVSNSVATEEFENGWQAMLEKYDAASNAHLDLMYQTRLMWVPVYFKHVFSPFTQSTGCSKSKHSIFKDYVQQNDTIETFISQYDIFQEEAVSIEDGDRSQSTLKKPVYSTRHPIERHAAEIYTTGMFLRFQKELLDASAFNAFEKERDVIYTVKKALDYEDAEFLRDSFSVDVDLKTNTFNCICSKFERDGIVCCHVLRLFTQFSINMIPEHYIKPRWTKKFREQELQKYCSEKIGSDISQSSLRYAMIMNRMAESCAAVSKDPNQSKIFLEEHERILWKQTDRE

SEQ ID NO: 67795 - protein, 64 aa, Setaria italica
  Transcript Sequence Number=SeqID_1821
  Homolog annotation: Hit_ID=B6U179; Match level="QueryCoverage=75%, HitCoverage=10%, E-value=5e-16, Identity=77%"; Hit description =LEC14B protein
  Subcellular localization annotation: CTP_CleavageSite=41; ConfidenceScore=5.03e-01
ITCKRLRWTVSDIALSPDQRFLAYSSLSPTVHIVNVQNAVRESHANVTVCPLLHSFFLVQSCSR

SEQ ID NO: 67796 - protein, 160 aa, Setaria italica
  misc_feature (29)..(29): Xaa can be any naturally occurring amino acid
  misc_feature (70)..(70): Xaa can be any naturally occurring amino acid
  Transcript Sequence Number=SeqID_1822
  Homolog annotation: Hit_ID=B6U179; Match level="QueryCoverage=88%, HitCoverage=27%, E-value=9e-50, Identity=68%"; Hit description =LEC14B protein
  Pfam annotation: Domain name=WD40; Domain location=24-62; Score=34.0; E_value=5.8e-07; Accession=PF00400.24; Description=WD domain, G-beta repeat
TSDVLYSGSDDSLCKVWDRRCHKNKPVGXLTGHLDGITFIDSRGDGHYFISNCKDQTIKLWDLRKMSSTXKSNYISCLHGYLDNCTPKAYEWDYRWMTYPSEARYLKHPYDQSLATFRGHSVLRTLIRCYFSPMHSLGGRFYLRPLVLPFLFTNFLDMFL

SEQ ID NO: 67797 - protein, 252 aa, Setaria italica
  Transcript Sequence Number=SeqID_1823
  Homolog annotation: Hit_ID=B6U179; Match level="QueryCoverage=99%, HitCoverage=52%, E-value=2e-78, Identity=60%"; Hit description =LEC14B protein
MRWKRKIHHGGSSQQQLISPTLADEVCAIDKDVSHLSRIKSEPSQRTRAAIYAGQKRPISTFKLLSGRESNCSGMGRFSSADCSYALRKHLPVKGPWCVDDMDSEAYISQFSADGSLLIGGFRGSHIRVYNSEKNWKVHKDITCKRLRWTVSDIALSPDQRFLAYSSLSPTVHIVNVQNAVRESHANVTEIHEGLEFSDEDDGFSFGIFSVKFSKDGRELVVGNNNESICIYDLGANKVTERINAHAADVNV

SEQ ID NO: 67798 - protein, 284 aa, Setaria italica
  Transcript Sequence Number=SeqID_1824
  Homolog annotation: Hit_ID=B6U179; Match level="QueryCoverage=96%, HitCoverage=58%, E-value=1e-114, Identity=71%"; Hit description =LEC14B protein
  Pfam annotation: Domain name=WD40; Domain location=169-213; Score =16.3; E_value=0.13; Accession=PF00400.24; Description=WD domain, G -beta repeat
  Pfam annotation: Domain name=WD40; Domain location=217-255; Score =29.8; E_value=1.1e-05; Accession=PF00400.24; Description=WD domain, G-beta repeat
  Pfam annotation: Domain name=WD40; Domain location=48-87; Score=29.6; E_value=1.2e-05; Accession=PF00400.24; Description=WD domain, G-beta repeat
  Pfam annotation: Domain name=WD40; Domain location=6-44; Score=12.0; E_value=1.5; Accession=PF00400.24; Description=WD domain, G-beta repeat
  Pfam annotation: Domain name=WD40; Domain location=94-132; Score =35.8; E_value=1.7e-07; Accession=PF00400.24; Description=WD domain, G-beta repeat
  Pfam module annotation: Pfam domain module=WD40::WD40::WD40::WD40::WD4 0; Domain location=169-213::217-255::48-87::6-44::94-132
EIHEGLEFSDEDDGFSFGIFSVKFSKDGRELVVGNNNESICIYDLGANKVTERINAHAADVNVVTFADETSDVLYSGSDDSLCKVWDRRCHKKQKPVGVLTGHLDGITFIDSRGDGHYFISNCKDQTIKLWDLRKMSSTKKDCTPKAYEWDYRWMTYPSEARYLKHPYDQSLATFRGHSVLRTLIRCYFSPMHSTGQRYIYTGSSDQCVYIYDVATGKVVEKLRWHGSIIRDCSWHPYLPTLVSSSWDGYLVRWEATEDDRDPSMLKTGNKRMHPEGYTMSFVL

SEQ ID NO: 67799 - protein, 72 aa, Setaria italica
  Transcript Sequence Number=SeqID_1825
QPSYSSWTLLACACPARLGCLHISNQLNNLNPLLNELDCFGCWPIYVTCVSLHRIEYVPPLTSLNVNTKLPR

SEQ ID NO: 67800 - protein, 76 aa, Setaria italica
  Transcript Sequence Number=SeqID_1826
TKVKIFCMLLHKFNKSTSFFMGKSKNLVCVTTDLHSCADTIHGTMVLWSMHWQPNLSRIITGLTHITSCLNTKFLI

SEQ ID NO: 67801 - protein, 415 aa, Setaria italica
  Transcript Sequence Number=SeqID_1827
  Gene Ontology: Mol. function=translation initiation factor activity; Cellular component=Golgi apparatus; Biological process=translation
  Homolog annotation: Hit_ID=B6T6B3; Match level="QueryCoverage=100%, HitCoverage=100%, E-value=0.0, Identity=83%"; Hit description=PCI domain containing protein
  Pfam annotation: Domain name=PCI; Domain location=262-364; Score =80.7; E_value=5.2e-21; Accession=PF01399.19; Description=PCI domain
MATIVNTTEEEPMLAVVRFTAELAWADAGPEVADPEVTRLCLEAQEHILAGRWLDMASLMLASADLLLTSPSRVPDKDLECILSVICSLVTKAGSEDQALQITDLICAKLTQQPEDKPALRLKVLFSLYNLLPSPYGKAFVYKKALELATAGKAAECIIPSFKNIDSFVSEWGIGNLEQRELYRAITRILKDHKGMTKEYFNFLNKYLTTFKGSDDDSATIDDAKEEAVAAIVEFVKSSTLFQCDLLNMPAVAQLEKDEKYQLVYELLKIFLTKRLDSYLEFQAANSALLKDYGLVHEECITKMRLMSLLDLSSCCSGEIPYSAIIEALQINDDEVEQWIVKAIAFKILDCRVDQLNQTVIVSRHTERIFGLPQWQGLRTKLGAWRGNIASAINTIQANKVTDEGTQGMQGLMIR

SEQ ID NO: 67802 - protein, 105 aa, Setaria italica
  Transcript Sequence Number=SeqID_1828
  Homolog annotation: Hit_ID=Q2QM66; Match level="QueryCoverage=96%, HitCoverage=13%, E-value=9e-33, Identity=74%"; Hit description =Pentatricopeptide, putative
  Pfam annotation: Domain name=PPR; Domain location=20-53; Score=14.3; E_value=0.18; Accession=PF01535.12; Description=PPR repeat
  Pfam annotation: Domain name=PPR; Domain location=54-87; Score=3.3; E_ value=3.6; Accession=PF01535.12; Description=PPR repeat
  Pfam module annotation: Pfam domain module=PPR::PPR; Domain location =20-53::54-87
KEATELVKKMLNRGLLPTPVTYRTVIHRYCERDKVEDLLILLDKMLARQEFSSAYNQVIEKLCAFGKLSEAYNLLSKVLRTASKRDAQTCHCFDGVVFNKAPTSI

SEQ ID NO: 67803 - protein, 65 aa, Setaria italica
  Transcript Sequence Number=SeqID_1829
HDLGTAIESHLEIAPPISLQLTPIIQIFGICRTNSTTLWFEIILIITYISSCTVMFIAYIMMFKF

SEQ ID NO: 67804 - protein, 57 aa, Setaria italica
  Transcript Sequence Number=SeqID_1830
VITSSVFMKACRFEVQISHKHAVLKQSFPPKVVSLIHKLPDGLLSLYHSPIYPVPEL

SEQ ID NO: 67805 - protein, 203 aa, Setaria italica
  Transcript Sequence Number=SeqID_1831
  Gene Ontology: Cellular component=endoplasmic reticulum membrane; Biological process=transport
  Homolog annotation: Hit_ID=B6TZG0; Match level="QueryCoverage=98%, HitCoverage=68%, E-value=8e-79, Identity=74%"; Hit description =Prenylated Rab receptor 2
  Pfam annotation: Domain name=PRA1; Domain location=28-183; Score =186.9; E_value=5.5e-53; Accession=PF03208.11; Description=PRA1 family protein
QAGPIHDPTAPPSPLTKAAELVTRFREQGQALIAARRPWAEVLRAPAFSKPPSLGEALARMRRNTAYFRANYALAVLAVVAASLLWHPGTLFALLFLCAAWFFLYFARPAQGGQPLRVFGVEFDDGTVLAALCGVTVVAMLFTNVGWNVVGSVMIGGTLVGAHAALRSTDDLFLTEEEAAGNGLVAAGMSAAGPILPTYVRIG

SEQ ID NO: 67806 - protein, 87 aa, Setaria italica
  Transcript Sequence Number=SeqID_1832
QQQCYLNLKQIIMFPRIPKEFIMELMAVRTLNIGSKDTESTFVQILHYRLTQKSKLMMKGSNSIVLTSNPLVLTQMPYLCNANEWVF

SEQ ID NO: 67807 - protein, 87 aa, Setaria italica
  misc_feature (38)..(38): Xaa can be any naturally occurring amino acid
  Transcript Sequence Number=SeqID_1833
  Homolog annotation: Hit_ID=Q7XQK1; Match level="QueryCoverage=96%, HitCoverage=8%, E-value=9e-27, Identity=70%"; Hit description =OSJNBa0017B10.7 protein
CSCDGETILVNGEETYFFSTLCQDDIYRYDIVSNVYHXHVDSITTVYRKESSPKEESSLVVKSPKEKKKGLFGMIMKDNKGSKSKES

SEQ ID NO: 67808 - protein, 92 aa, Setaria italica
  Transcript Sequence Number=SeqID_1834
PSKALLLQMLELSPNDASVSDNHNTVSKESLLLLCTENAVRLFSLSHAIQGTKKIINKKKFSSNCCFASLIHSSSDEIGLILVFSNGKIEIR

SEQ ID NO: 67809 - protein, 78 aa, Setaria italica
  Transcript Sequence Number=SeqID_1835
  Homolog annotation: Hit_ID=Q7XQK1; Match level="QueryCoverage=67%, HitCoverage=6%, E-value=9e-15, Identity=71%"; Hit description =OSJNBa0017B10.7 protein
MQNDDNTSGGNPITSLQFDMPSSILISGDMSGMVRIITFKKDSTDNIFSFLNGTVLLILSLNPTVGVSILIYNYVLLV

SEQ ID NO: 67810 - protein, 145 aa, Setaria italica
  Transcript Sequence Number=SeqID_1836
  Homolog annotation: Hit_ID=Q7XQK1; Match level="QueryCoverage=90%, HitCoverage=15%, E-value=2e-51, Identity=73%"; Hit description =OSJNBa0017B10.7 protein
DGTLSFWDASCPLLLQIFKIKQQNDDNTSGGNPITSLQFDMPSSILISGDMSGMVRIITFKKDSTDNIFSFLNAKQGDNYNVRSIKLKGAVTTMSSISKSKHFAAGTEKGVVSVINVEDATILYQKQFECRLSGGIASLQFEIYS

SEQ ID NO: 67811 - protein, 172 aa, Setaria italica
  Transcript Sequence Number=SeqID_1837
  Homolog annotation: Hit_ID=Q7XQK1; Match level="QueryCoverage=89%, HitCoverage=18%, E-value=2e-55, Identity=70%"; Hit description =OSJNBa0017B10.7 protein
MFVHRHVDSITTVYRKESSPKEESSLVVKSPKEKKKGLFGMIMKDNKGSKSKESDANGSEQCITTSEKLASIFSSANFAPPSERRNSSLKDEENVDLDIDDIDIDDNPQKQKGPHFPGLSKDKISKGFQSLRGKLMPKTEEKTSSGNKKTEDETSVKYKVRTKNKRIENNRN

SEQ ID NO: 67812 - protein, 463 aa, Setaria italica
  Transcript Sequence Number=SeqID_1838
  Gene Ontology: Mol. function=methyltransferase activity; Cellular component=integral to membrane; Biological process=vesicle-mediated transport
  Homolog annotation: Hit_ID=Q7XQK1; Match level="QueryCoverage=73%, HitCoverage=39%, E-value=1e-133, Identity=72%"; Hit description =OSJNBa0017B10.7 protein
AQRSKPTKCYNVTTEKGVVSVINVEDATILYQKQFECRLSGGIASLQFEIYSHNGYDKDILIIAMEDSSIFILEEETGKLLNPNPVQTDKPSKALLLQMLELSPNDASVSDNHNTVSKESLLLLCTENAVRLFSLSHAIQGTKKIINKKKFSSNCCFASLIHSSSDEIGLILVFSNGKIEIRSLPDLSLLKDASLRGFVYSRNLNSSSFIACSCDGETILVNGEETYFFSTLCQDDIYRHVDSITTVYRKESSPKEESSLVVKSPKEKKKGLFGMIMKDNKGSKSKESDANGSEQCITTSEKLASIFSSANFAPPSERRNSSLKDEENVDLDIDDIDIDDNPQKQKGPHFPGLSKDKISKGFQSLRGKLMPKTEEKTSSGNKKTEDETSVSQVDQIKMKYGYANATNDDSTSVPKMIGNKLQENMKKLEGINLRAADMATGAQSFSAMAKELLRTTKNEKGTS

SEQ ID NO: 67813 - protein, 94 aa, Setaria italica
  misc_feature (37)..(37): Xaa can be any naturally occurring amino acid
  misc_feature (53)..(53): Xaa can be any naturally occurring amino acid
  Transcript Sequence Number=SeqID_1839
MVVRLKDIRWMTVVITPMNQGVRASDLVTLRWLKITXAYTFINSERGGLLRDXPHSWDHKEWKFEEILATIICSFSFSVPPPECRHCFLSLFIE

SEQ ID NO: 67814 - protein, 71 aa, Setaria italica
  misc_feature (16)..(16): Xaa can be any naturally occurring amino acid
  Transcript Sequence Number=SeqID_1840
  Gene Ontology: Mol. function=acetylglucosaminyltransferase activity; Cellular component=membrane
QYQDNTSHLGWKISAXKKRARPVILDTALYEDGRAELLRPENISTNLRRFPTAFKLYTGSFQCIERPCGAQ

SEQ ID NO: 67815 - protein, 423 aa, Setaria italica
  Transcript Sequence Number=SeqID_1841
  Gene Ontology: Mol. function=acetylglucosaminyltransferase activity; Cellular component=membrane
  Homolog annotation: Hit_ID=Q5BM97; Match level="QueryCoverage=84%, HitCoverage=88%, E-value=1e-105, Identity=53%"; Hit description =Secondary cell wall-related glycosyltransferase family 14
  Pfam annotation: Domain name=Branch; Domain location=72-301; Score =314.1; E_value=2.9e-91; Accession=PF02485.13; Description=Core-2I -Branching enzyme
MAMRARVMGLGGGRRELLVSAAFTALLVASILLLPSLLLTGAGAGPKSWPFLSSLAASDGAAGEAPRYPVSFAYLISASSGDAGRAARLLAALYHPANSYLLHLDREAPAEEHRRLAELVSGRGVYATAGNVWIVGRPNLVTYRGPTMLTTTLHAVALLLRLRRRWDWFVNLSASDYPLVTQDDMMEAFAGLPRDLNFIQHTSHLGWKIKKRARPVILDTALYEDGRAELLRPENISTNLRRFPTAFKLYTGSAWTMLSRPFAEYVTMGWDNLPRTLLLYHANIISSPEFYFQTVACNSRRFRNATVNHDLHFIRWDNPPKQHPLYLTARDYRRMLLSGVPFARKFREGDPVLDRIDRDILRRRDPGQFAYGGWCSEGGAALCGNPQEPGREGAVKAGAGSRRLKALLRKALSPKNFRKQQCR

SEQ ID NO: 67816 - protein, 53 aa, Setaria italica
  Transcript Sequence Number=SeqID_1842
EFTEVKERKTFTVTVSAAVASAEQKLAEGTLSWVSHDHVVRSPILVDSSITLS

SEQ ID NO: 67817 - protein, 102 aa, Setaria italica
  Transcript Sequence Number=SeqID_1843
  Gene Ontology: Mol. function=heat shock protein binding
  Homolog annotation: Hit_ID=B9T4J7; Match level="QueryCoverage=100%, HitCoverage=19%, E-value=1e-44, Identity=77%"; Hit description=Heat shock protein binding protein, putative
SCCVYDGRGIKTHVIMKHRTLMVKHMHWYQVGDKVSPCECRCSRARLPPSRYWLFEPRCYMHDIGGWYIETYGRDKKGRTIPSQRQWDGLNEHSEKRLHPAI

SEQ ID NO: 67818 - protein, 732 aa, Setaria italica
  misc_feature (18)..(18): Xaa can be any naturally occurring amino acid
  Transcript Sequence Number=SeqID_1844
  Gene Ontology: Mol. function=hydrolase activity, acting on carbon -nitrogen (but not peptide) bonds; Cellular component=cytoplasm; Biological process=nitrogen compound metabolic process
  Homolog annotation: Hit_ID=B9RYP7; Match level="QueryCoverage=86%, HitCoverage=94%, E-value=0.0, Identity=76%"; Hit description =Glutamine-dependent NAD(+) synthetase, putative
  Pfam annotation: Domain name=CN_hydrolase; Domain location=5-201; Score=61.7; E_value=2.9e-15; Accession=PF00795.14; Description =Carbon-nitrogen hydrolase
  Pfam annotation: Domain name=NAD_synthase; Domain location=339-653; Score=-8.6; E_value=8.6e-12; Accession=PF02540.9; Description=NAD synthase
  Pfam module annotation: Pfam domain module=CN_hydrolase::NAD _synthase; Domain location=5-201::339-653
MRLLRVATCNLNQWANRXYDTNLRNVKESIARAKAAGAAVRVGPELELTGYGCEDHFLEQDTTAHAWECLKDILTGDYTDNILCSIGMPVIFNSVRYNCQVFCLNRKIIMIRPKMSLANDGNYREFRWFSAWTFKDEIVEFQLPIEVSEAISQDTVPFGYGYMQFLDVSLAAETCEELFTANAPRIDLALNGVEVFMNASGSHHQLRKLNLRIDSIRNATQTCGGVYMYANQQGCDGGRLYYDGCCCIAVNGDLVAQGSQFSLKDVEVMDALVDLDAVSSYRASVSSFREQASHRTNVPYVKVPYKLCQSFRNGMVPTSPVQIMYHCPEEEIAFGPSCWLWDYLRRSQASGFLLPLSGGADSSSVAAIVGCMCQLVIKDIEKGDEQVKADALRIGQYKDGEIPTDSTELAKRLFYTVYMGTENSSEDTRSRAKRLAEEIGSFHFDVPIDSIVSAFLSLFERLTGKRPRYKVDGGSNTENLGLQNIQARIRMVLAFMMASLMPWVHNKSGFYLVLGSSNVDEGLRGYLTKYDCSSADINPIGSVSKQDLRAFLRWAAIHLKYSSLAEVESAPPTAELEPIRANYNQLDEVDMGMTYEELSVYGRLRKIFRCGPVSMFQNLCHSWCGRLSPSEVADKVKHFFKYYSINRHKMTVLTPSYHAESYSPEDNRFDLRQFLYNSRWPYQFRKINELAQEMDKDGKWETRAEGQATEQGVQGSGMGVVAAGAANPSVGF

SEQ ID NO: 67819 - protein, 281 aa, Setaria italica
  Transcript Sequence Number=SeqID_1845
  Gene Ontology: Mol. function=oxidoreductase activity; Biological process=oxidation reduction
  Homolog annotation: Hit_ID=B6TQU4; Match level="QueryCoverage=100%, HitCoverage=81%, E-value=1e-132, Identity=84%"; Hit description =Oxidoreductase/ zinc ion binding protein
  Pfam annotation: Domain name=ADH_N; Domain location=1-54; Score=10.4; E_value=0.00016; Accession=PF08240.4; Description=Alcohol dehydrogenase GroES-like doma
  Pfam annotation: Domain name=ADH_zinc_N; Domain location=85-230; Score=101.9; E_value=2.2e-27; Accession=PF00107.18; Description=Zinc- binding dehydrogenase
  Pfam module annotation: Pfam domain module=ADH_N::ADH_zinc_N; Domain location=1-54::85-230
PPLPFVPGSDYAGVVDAVGPGVRGLRPGDRVCSFAGLGSFADFIVAEEKQLFLVPDGCDLVATGALPVAFGTSHLALVHRAQLKAGQVLLVLGAAGGVGVSAVQIGKVCGAVVIAVARGVEKLQYLKSIGADHVIDSSKDNVIESAKFFLKARGLKGVDVLYDPVGGKLTQDSLKLLNWGAHILVIGFASGDVPVIRANIALVKNWTIHGLYWGSYSTHQPRVLIDSLNELLSWLSKGLITVQISHCYRLAEAHLAFAALRDRKAVGKVMIVMASSAKSRL

SEQ ID NO: 67820 - protein, 84 aa, Setaria italica
  Transcript Sequence Number=SeqID_1846
SCSSACNSKHRNFTIMQPPTHSDIENLPGERPNTSFPKSSQLLQNEVLLKDPSISARLHDISLTYINYRTRGSLEKHISKQDGL

SEQ ID NO: 67821 - protein, 117 aa, Setaria italica
  misc_feature (66)..(66): Xaa can be any naturally occurring amino acid
  Transcript Sequence Number=SeqID_1847
  Gene Ontology: Mol. function=protein serine/threonine kinase activity; Biological process=protein amino acid phosphorylation
  Homolog annotation: Hit_ID=Q25AB6; Match level="QueryCoverage=60%, HitCoverage=78%, E-value=1e-20, Identity=59%"; Hit description =B0808H03.2 protein
  Pfam annotation: Domain name=PAN_2; Domain location=1-58; Score=49.4; E_value=1.4e-11; Accession=PF08276.3; Description=PAN-like domain
MKVPDHFLLIRNKSFDECTVECRSNCSCMAYAYANMSTRAIDGDDTRCLIWTGMLIDTEKCSEGGXNLYIRTNKLSGLISCFHLSAYLTRQVFEFLKFMVKRILLKLKNKGPIFVKY

SEQ ID NO: 67822 - protein, 83 aa, Setaria italica
  Transcript Sequence Number=SeqID_1848
  Subcellular localization annotation: CTP_CleavageSite=73; ConfidenceScore=5.95e-01
ASRSNPRPPARPLASLPPPPPPPPRPPSPSRPLLISRLVNSRVSRRPPGSSSARRAPLKLRIARPRSAHSLPRSAPRRRRRRR

SEQ ID NO: 67823 - protein, 108 aa, Setaria italica
  Transcript Sequence Number=SeqID_1849
FSIGVPLSKNTSAQLVYDTGNHEVTGGESYYVLPAEHGTGGGLRMFPTFFQWDDSSVNQCHNQLPHPHNMRTANAIDPSHHPQPRDGVAVGKDEGASYPVPLGSRLIP

SEQ ID NO: 67824 - protein, 67 aa, Setaria italica
  misc_feature (9)..(9): Xaa can be any naturally occurring amino acid
  Transcript Sequence Number=SeqID_1850
  Gene Ontology: Mol. function=6-phosphofructokinase activity; Cellular component=6-phosphofructokinase complex; Biological process=glycolysis
  Homolog annotation: Hit_ID=B6U6D5; Match level="QueryCoverage=95%, HitCoverage=11%, E-value=6e-22, Identity=75%"; Hit description=6 -phosphofructokinase
NGRHCYIPXYRITEKQNRVSITDRMWARLLSSTNQPSFLCNKVVEEAKKEEERTAQLIDGSPSHPRI

SEQ ID NO: 67825 - protein, 82 aa, Setaria italica
  Transcript Sequence Number=SeqID_1851
  Gene Ontology: Mol. function=zinc ion binding
  Homolog annotation: Hit_ID=Q8S283; Match level="QueryCoverage=93%, HitCoverage=31%, E-value=7e-29, Identity=75%"; Hit description=Zinc finger protein-like
VTKNTRGNKICEICGSAACNVAGFSDMDFIEQWNESSSTAAAQATASEPRRFWQGHRFLNFLLACMVFAFVISWLFHFNVPG

SEQ ID NO: 67826 - protein, 180 aa, Setaria italica
  Transcript Sequence Number=SeqID_1852
  Gene Ontology: Mol. function=electron carrier activity; Biological process=response to oxidative stress
SGTVPMDSVSPNVFDGTYFALALAKKMPLTIDRLVGMDPKTEPVLKAMEAKPADFVPLFAKSMEKLSVLKVLTGKDGEIMKTCSEFNNPQASSDTSVIRISSLNPDQMGLSQPGAAKPAVAEARKVAPGGEEEATKRIRNAVKLTKTFVNEAAAKVEGGVVVNKAAQIQTPKPNVVPTIQ

SEQ ID NO: 67827 - protein, 86 aa, Setaria italica
  Transcript Sequence Number=SeqID_1853
  Subcellular localization annotation: CTP_CleavageSite=36; ConfidenceScore=5.04e-01
ALATYVRKNRQHAALARTLHSLPSHGALTGGRRGLRARRRGGGDGDRLRQPPRGDGPPELRLCPDTTMVVDLRQNHVCVLASGRGA

SEQ ID NO: 67828 - protein, 57 aa, Setaria italica
  Transcript Sequence Number=SeqID_1854
NLRLDINLFLREPNMACLSASEPLRRSKHAMIHRNSTDYLFKINSLAYLGRGKGKCA

SEQ ID NO: 67829 - protein, 177 aa, Setaria italica
  Transcript Sequence Number=SeqID_1855
  Gene Ontology: Mol. function=DNA binding; Cellular component=nucleus; Biological process=regulation of transcription, DNA-dependent
  Homolog annotation: Hit_ID=B6U1E7; Match level="QueryCoverage=88%, HitCoverage=28%, E-value=6e-59, Identity=73%"; Hit description =ATSWI3A
  Pfam annotation: Domain name=SWIRM; Domain location=24-118; Score =73.6; E_value=7.1e-19; Accession=PF04433.9; Description=SWIRM domain
MSPPAAGAAATSGDGPPSSPRELYTIPASSGWFRWDGIHETERRALPEFFGGAGGAGFGTATRNPRIYREYRDFIIARYREDPARRLTFTEVRRALVGDVTLLRKLFAFLDASGLINFSASSSSSGTASRQQEVGVVVEAPVGLQVTPRPPASYFAEEKRGGAGEERENGFRLPPLT

SEQ ID NO: 67830 - protein, 44 aa, Setaria italica
  Transcript Sequence Number=SeqID_1856
  Gene Ontology: Mol. function=flavin-containing monooxygenase activity; Cellular component=intrinsic to endoplasmic reticulum membrane; Biological process=metabolic process
  Homolog annotation: Hit_ID=Q9FLK4; Match level="QueryCoverage=88%, HitCoverage=8%, E-value=3e-10, Identity=66%"; Hit description =Dimethylaniline monooxygenase (N-oxide-forming)-like protein
MIFLVQIECLCEDGRVVFADGSCVVADAVIYCTGYNYWYPFLDT

SEQ ID NO: 67831 - protein, 366 aa, Setaria italica
  Transcript Sequence Number=SeqID_1857
  Gene Ontology: Mol. function=flavin-containing monooxygenase activity; Cellular component=intrinsic to endoplasmic reticulum membrane; Biological process=metabolic process
  Homolog annotation: Hit_ID=B9RLT7; Match level="QueryCoverage=91%, HitCoverage=71%, E-value=3e-92, Identity=49%"; Hit description =Dimethylaniline monooxygenase, putative
  Pfam annotation: Domain name=FMO-like; Domain location=14-319; Score=- 320.5; E_value=1.7e-10; Accession=PF00743.11; Description=Flavin -binding monooxygenase-like
  Pfam annotation: Domain name=Pyr_redox; Domain location=97-179; Score= -13.8; E_value=0.099; Accession=PF00070.19; Description=Pyridine nucleotide-disulphide oxidore
  Pfam module annotation: Pfam domain module=FMO-like::Pyr_redox; Domain location=14-319::97-179
AFGIMDVVRFNTRVVHVGVAPPDDGGAAAGDKRLRWVVRWMKPGEVITEEEVFDAVVVAVGQYTQPRLPSINGMDKWKGRQLHSHSYRVPDSFRGEVVVVVGCHESGKEIALELCDVAREVHISVKSMGDDVTPGVSKAVSRHHNLHLHLQIECLCEDGRVVFADGSCVVADAVIYCTGYNYWYPFLDTGGLVTVDDNRVGPLYEHTFPPALAPSLSFVGLPRMVVVPRFYEVQARWVAQVLSGRSALPSEEEMMRSVDEYQRAREMAGVPKRHTHVLDDLEYCDDLGEKYCGFPRLDGWKKELLCSSLTRLRDNRESFRDDYHHDSDLVREGLRSEGWLVDADTPRVEMNGELAMTTTSMAQPQP

SEQ ID NO: 67832 - protein, 283 aa, Setaria italica
  Transcript Sequence Number=SeqID_1858
  Homolog annotation: Hit_ID=Q9LR63; Match level="QueryCoverage=98%, HitCoverage=85%, E-value=1e-66, Identity=47%"; Hit description =F21B7.22
  Pfam annotation: Domain name=DUF789; Domain location=1-278; Score =461.8; E_value=1e-135; Accession=PF05623.4; Description=Protein of unknown function (DUF789)
STDAWHHAETDSVEYFNLADLWEQYYEWSAYGAGVAVQLPGGERVVQYYVPYLSGIQLYTNKVLTASRSFGEDNGMDLWSDDEDNEKMSRSWSSTSDESLFNCDVLGANRKRPGHLYFEFFEVGSPYGRVPLIDKVYELSQGFPGLTSLKSADLSPVSWMSVAWYPIYHIPYQRNVKDLSACFLTYHTISSSFQDQALETMTNGGCHPVTSGKQNGHIMDKKSNTVSLPPFGLAAHKIQGSLWTNPMVGDHRKMDFYFSAADSWLKQLGVQHHDFNFFITHPM

SEQ ID NO: 67833 - protein, 104 aa, Setaria italica
  Transcript Sequence Number=SeqID_1859
LHKEIEAGGGRYRRGASDDFMIYGQEKSMHRGSSLDPLAEAQYKNPSMVEKNAHSMADESFMIPLRFTSEDNLGPESRTAIDIDVELPSTVQKVSDAKAGEQLF

SEQ ID NO: 67834 - protein, 448 aa, Setaria italica
  Transcript Sequence Number=SeqID_1860
  Gene Ontology: Mol. function=transmembrane receptor activity; Cellular component=plasma membrane; Biological process=innate immune response
  Homolog annotation: Hit_ID=Q9FHR5; Match level="QueryCoverage=95%, HitCoverage=38%, E-value=1e-74, Identity=36%"; Hit description =Similarity to COP1-interacting protein 7
MRPETRLESAVFQLTPTRTRCDLVVVANGWKEKIASGLLNPFVAHLKVAQEQIATGGYSITLEPDPEIDAPWFTRGTVERFVRFVSTPEVLERVTTIESEILQIEDAIAVQGNDSLGLRSVEDHNGKSVDCMEGSKTIFDPDADMALVPYKAGTQPTLPVQNNGATQEENSKAQLLRVLETRKTVLRKEQAMAFARAVAAGFDIDNLVYLITFAERFGASRLMKACTHFIGLWKQKHETGQWIEVEPEAMSARSEFAPFNPSGIMFMGDNMKQTMETMSVSNGDANGEDASKADQRTSQHSGAPHEFFHGPYQSAYPPWAMHPPYSMQGMPYYPGMNPYYPSPYPSMDDTRHHHSERRASKKHSSDSKDSETSDDGSDQSGSERETSYGHRSHKKDKRTGKKKPSVVVIRNINVTSKRHGSSDSESQTGSDVASEDSDDLNTKSRKKK

SEQ ID NO: 67835 - protein, 49 aa, Setaria italica
  Transcript Sequence Number=SeqID_1861
FSSKFYLLDFRLFWLVLFESTLKAELIYPDENWPNFQISVIGWSFRLMA

SEQ ID NO: 67836 - protein, 88 aa, Setaria italica
  Transcript Sequence Number=SeqID_1862
  Gene Ontology: Mol. function=actin binding
MGFEGLVVVSDPYLQRRFTQADLRALQAKYAALRDASPSGRLRIRDLPAAISSLRGATVAAKGDAEKENSAPEAGPGPGLTDEEWASV

SEQ ID NO: 67837 - protein, 54 aa, Setaria italica
  Transcript Sequence Number=SeqID_1863
LNLHGNETTPLVNEMPSYGPLASQILSPMTYTPSNPTKSALFEFKFCPTKRVHL

SEQ ID NO: 67838 - protein, 109 aa, Setaria italica
  Transcript Sequence Number=SeqID_1864
  Gene Ontology: Mol. function=protein serine/threonine kinase activity; Cellular component=cell surface; Biological process =protein amino acid phosphorylation
  Homolog annotation: Hit_ID=Q6UY58; Match level="QueryCoverage=67%, HitCoverage=10%, E-value=2e-17, Identity=47%"; Hit description =Lectin-like receptor kinase 7;3
PVSVATRPRRPLISTKLDLRPVFKEDMYVGFSSSTGKLASAHYILAWSFRTNGPAQPINLRRLPKVPRPSSGPSKLVIVKFAAVACAGTLAVIAAGMAAVRWVRKRAAL

SEQ ID NO: 67839 - protein, 28 aa, Setaria italica
  Transcript Sequence Number=SeqID_1865
KEPYIVAGAYMISCFLTLVAGYLGLRSA

SEQ ID NO: 67840 - protein, 155 aa, Setaria italica
  misc_feature (16)..(16): Xaa can be any naturally occurring amino acid
  Transcript Sequence Number=SeqID_1866
  Gene Ontology: Mol. function=protein serine/threonine kinase activity; Biological process=protein amino acid phosphorylation
  Homolog annotation: Hit_ID=Q2QZV1; Match level="QueryCoverage=59%, HitCoverage=3%, E-value=8e-23, Identity=56%"; Hit description =Retrotransposon protein, putative, unclassified
PAGAAGGRMIGGLLRXLQDAHPMRAPETRAPVEELEETLRRAYLLVRSCQRRGYAYRCFMGARHADELREVQGEIGFYLQLFPLVSYVDATLNWVRLLDKAGENSSCQEAPVVRPCLVPFLFLSCDGCCLAIVQGVCLGNWHSTDTVYTSSSNFF

SEQ ID NO: 67841 - protein, 96 aa, Setaria italica
  Transcript Sequence Number=SeqID_1867
  Gene Ontology: Mol. function=transition metal ion binding; Cellular component=chloroplast; Biological process=cellular iron ion homeostasis
  Homolog annotation: Hit_ID=A3CE65; Match level="QueryCoverage=65%, HitCoverage=24%, E-value=2e-25, Identity=88%"; Hit description =Ferritin
  Pfam annotation: Domain name=Ferritin; Domain location=1-72; Score= -20.4; E_value=0.026; Accession=PF00210.16; Description=Ferritin-like domain
LCFDLCAFGLISAMELALALEKLVNEKLHNLHAVATRCNDPQLTDFIESEFLADQVEDIKKISEYVAQLRRVGEGARLVCCSTSLFHLLYPFAYIP

SEQ ID NO: 67842 - protein, 76 aa, Setaria italica
  Transcript Sequence Number=SeqID_1868
  Gene Ontology: Mol. function=transition metal ion binding; Cellular component=chloroplast; Biological process=cellular iron ion homeostasis
  Homolog annotation: Hit_ID=B9GBF4; Match level="QueryCoverage=69%, HitCoverage=10%, E-value=6e-22, Identity=88%"; Hit description=DNA -directed RNA polymerase
HPFDSESCSVEYNASYAYHSLFAYFDRDNVALKGFAKFFKESSDEEREHAEKLMKYQVITSLPVVAMIFSNILGYS

SEQ ID NO: 67843 - protein, 123 aa, Setaria italica
  Transcript Sequence Number=SeqID_1869
MSSGGGGRKAAGPGGEEAEVEALLRAAQDAVLLKLQANSHLVSSTSSASASAPTVPLDDATAPDPLEDDLARRFDALKSRRPRFGQGGGAARLAALWDGLQGRREGQGGAQVGSLPALEEIEG

SEQ ID NO: 67844 - protein, 58 aa, Setaria italica
  Transcript Sequence Number=SeqID_1870
  Gene Ontology: Mol. function=transition metal ion binding; Cellular component=chloroplast; Biological process=cellular iron ion homeostasis
  Homolog annotation: Hit_ID=A4GSN6; Match level="QueryCoverage=98%, HitCoverage=22%, E-value=1e-22, Identity=87%"; Hit description =Ferritin
QVATRCNDPQLTDFVESEFLADQVEDIKKISEYVAQLRRVGKGHGVWHFDQKLLEEEA

SEQ ID NO: 67845 - protein, 150 aa, Setaria italica
  Transcript Sequence Number=SeqID_1871
  Gene Ontology: Mol. function=transition metal ion binding; Cellular component=chloroplast; Biological process=cellular iron ion homeostasis
  Homolog annotation: Hit_ID=P29036; Match level="QueryCoverage=100%, HitCoverage=59%, E-value=7e-69, Identity=84%"; Hit description =Ferritin-1, chloroplastic
  Pfam annotation: Domain name=Ferritin; Domain location=1-132; Score =178.0; E_value=2.7e-50; Accession=PF00210.16; Description=Ferritin -like domain
SYAYHSLFAYFDRDNVALKGFAKFFKESSDEEREHAEKLMKYQNTRGGRVRLQSIVTPLTEFDHPEKGDALYAMELALALEKLVNEKLHNLHAVATRCNDPQLTDFIESEFLADQVEDIKKISEYVAQLRRVGKGHGVWHFDQKLLEEEA

SEQ ID NO: 67846 - protein, 144 aa, Setaria italica
  Transcript Sequence Number=SeqID_1872
  Gene Ontology: Mol. function=transition metal ion binding; Cellular component=chloroplast; Biological process=cellular iron ion homeostasis
  Homolog annotation: Hit_ID=P29036; Match level="QueryCoverage=81%, HitCoverage=46%, E-value=2e-50, Identity=82%"; Hit description =Ferritin-1, chloroplastic
  Pfam annotation: Domain name=Ferritin; Domain location=6-135; Score =137.1; E_value=5.6e-38; Accession=PF00210.16; Description=Ferritin -like domain
HPFDSESCSVEYNASYAYHSLFAYFDRDNVALKGFAKFFKESSDEEREHAEKLMKYQNTRGGRVRLQSIVTPLTEFDHPEKGDALYAMELALALEKLVNEKLHNLHAVATRCNDPQLTDFIGCRVVVAVGLLLRRWFHGLLQGT

SEQ ID NO: 67847 - protein, 93 aa, Setaria italica
  Transcript Sequence Number=SeqID_1873
YIDTFFLLANPVTESTYRHLYPPMQGYICTRILISRDNNILAVKDSLGEVVMDTMVQVVEDTELSGDESLKEWVADSLEGKGIKQMKGTQKSI

SEQ ID NO: 67848 - protein, 50 aa, Setaria italica
  Transcript Sequence Number=SeqID_1874
RARLAVPLSRTRLQPGFILCGTCSSRLPYQLIAVHGERPVYFPSAIYPCN

SEQ ID NO: 67849 - protein, 66 aa, Setaria italica
  Transcript Sequence Number=SeqID_1875
PRGQGWRCHYLGPGCNQVSSYVGYICTRILISRDNNILAVKDSVGEVVMDTMVQVVEDTELSGDES

SEQ ID NO: 67850 - protein, 74 aa, Setaria italica
  Transcript Sequence Number=SeqID_1876
KLFTKEKGLKDPTKQHHRICLLQQWHSILTVFATEQNIHIHSGSRLQKANWSSDATSGGFRELKNKTQNPEWQH

SEQ ID NO: 67851 - protein, 180 aa, Setaria italica
  Transcript Sequence Number=SeqID_1877
  Gene Ontology: Mol. function=protein serine/threonine kinase activity; Biological process=protein amino acid phosphorylation
  Homolog annotation: Hit_ID=Q5F1Y3; Match level="QueryCoverage=70%, HitCoverage=17%, E-value=7e-38, Identity=54%"; Hit description =Putative wall-associated kinase 4
  Pfam annotation: Domain name=EGF_CA; Domain location=118-155; Score =28.1; E_value=3.6e-05; Accession=PF07645.7; Description=Calcium binding EGF domain
YEVTNISLDEGLMYVNKLSESEDANTNYLSIYYGGSDYFGQQLIYGLEKSGLSEEYGAWSWSITNLTCESAKQNSTYACLSINSECLGVTHGTIYIGYRCKCSPGFEGNPYIQNGCTDIDECLIPNYCNGICYNFLGSYSCCPHGVSFDPVRRQCTSSKRQNILLGTAVGISSGFGVLLF

SEQ ID NO: 67852 - protein, 95 aa, Setaria italica
  misc_feature (5)..(5): Xaa can be any naturally occurring amino acid
  Transcript Sequence Number=SeqID_1878
QQKFXKQQQKKKSIRVRMDPVPAQLMEGEGELRGSLSVISTSRPAGPSSWRSAPRLRPAVPLGCSALHRPGRSDETNPIAVTEDGERGRCLRHNE

SEQ ID NO: 67853 - protein, 63 aa, Setaria italica
  Transcript Sequence Number=SeqID_1879
TLQCHQKRCTLEYFCCSMKSETNVLVLLAPGAIPVLQVTFLGSGLAIFFSFQQEEVAEFAFRL

SEQ ID NO: 67854 - protein, 158 aa, Setaria italica
  Transcript Sequence Number=SeqID_1880
  Homolog annotation: Hit_ID=B6SP54; Match level="QueryCoverage=97%, HitCoverage=27%, E-value=2e-39, Identity=59%"; Hit description =Nodulin-like protein
LIPVVLRVRESMAKIRETKWENRIHDHDSDGAETAVSVSVVELEAEDKQEEQGQEAEPQRSSQEEVGGLRLLRKLDFWLYFFSYMFSGTLGLVFLNNLGQIAESRGLADASTLVSLSSSFGFFGRLLPAFLDYYTAKSGYSLSRTASMASLMAPCPDE

SEQ ID NO: 67855 - protein, 119 aa, Setaria italica
  Transcript Sequence Number=SeqID_1881
  Gene Ontology: Mol. function=nucleic acid binding; Cellular component= nucleus; Biological process=RNA metabolic process
  Homolog annotation: Hit_ID=Q2R4J4; Match level="QueryCoverage=94%, HitCoverage=73%, E-value=6e-60, Identity=66%"; Hit description=Zinc finger CCCH domain-containing protein 63
  Pfam annotation: Domain name=zf-CCCH; Domain location=100-119; Score =5.4; E_value=0.29; Accession=PF00642.16; Description=Zinc finger C -x8-C-x5-C-x3-H type (and similar)
  Pfam annotation: Domain name=zf-CCCH; Domain location=54-80; Score =45.7; E_value=1.9e-10; Accession=PF00642.16; Description=Zinc finger C-x8-C-x5-C-x3-H type (and similar)
  Pfam annotation: Domain name=zf-CCCH; Domain location=9-35; Score =37.2; E_value=6.4e-08; Accession=PF00642.16; Description=Zinc finger C-x8-C-x5-C-x3-H type (and similar)
  Pfam module annotation: Pfam domain module=zf-CCCH::zf-CCCH::zf-CCCH; Domain location=100-119::54-80::9-35
TGADTHERVGEPDCSYYMRTGMCRFGMTCKFNHPADRKLAVAAARMKGEYPQRSGQPECQYYLKTGTCKFGATCKFHHPREKAAMATRVQLNELGYPFRPNEKECAYYLRTGQCKFGST

SEQ ID NO: 67856 - protein, 86 aa, Setaria italica
  misc_feature (72)..(72): Xaa can be any naturally occurring amino acid
  Transcript Sequence Number=SeqID_1882
  Gene Ontology: Mol. function=isomerase activity; Biological process =carbohydrate metabolic process
  Homolog annotation: Hit_ID=Q9M1T1; Match level="QueryCoverage=98%, HitCoverage=23%, E-value=1e-27, Identity=71%"; Hit description=Sugar- phosphate isomerase-like protein
PVDALHGDIGALFPGDVLVLLSKSGASDELLALAPCARAKGAYLISLTSAASGGDCPLAAACDLNVHLPLQXEICPFGLAPVTSTR

SEQ ID NO: 67857 - protein, 117 aa, Setaria italica
  misc_feature (74)..(74): Xaa can be any naturally occurring amino acid
  Transcript Sequence Number=SeqID_1883
  Gene Ontology: Mol. function=cysteine-type endopeptidase activity; Cellular component=vacuole; Biological process=regulation of catalytic activity
  Homolog annotation: Hit_ID=A6N1G1; Match level="QueryCoverage=100%, HitCoverage=64%, E-value=1e-36, Identity=68%"; Hit description =Cathepsin b-like cysteine proteinase 3 (Fragment)
EVYINGPVEVAFTVYEDFAHYKSGVYKHITGGIMGGHAVKLIGWGTSDAGEDYWVCCWITILLCALSNDEASPXVVCFILSAFQLLANQWNRGWGDIIRGVNECGIEEDVVAGMPST

SEQ ID NO: 67858 - protein, 48 aa, Setaria italica
  Transcript Sequence Number=SeqID_1884
  Subcellular localization annotation: CTP_CleavageSite=33; ConfidenceScore=5.24e-01
MFGSTNPFGQSSTSPFGQNSFGTQQGFGQATPAANNPFAPKPFGSPTT

SEQ ID NO: 67859 - protein, 122 aa, Setaria italica
  misc_feature (19)..(19): Xaa can be any naturally occurring amino acid
  misc_feature (50)..(50): Xaa can be any naturally occurring amino acid
  Transcript Sequence Number=SeqID_1885
  Gene Ontology: Mol. function=cysteine-type endopeptidase activity; Cellular component=vacuole; Biological process=regulation of catalytic activity
  Homolog annotation: Hit_ID=Q711Q3; Match level="QueryCoverage=95%, HitCoverage=33%, E-value=1e-49, Identity=80%"; Hit description =Cathepsin B
  Pfam annotation: Domain name=Peptidase_C1; Domain location=6-122; Score=-90.7; E_value=4.3e-05; Accession=PF00112.15; Description =Papain family cysteine protease
KNQQQWRYFVRNMDRTRLXQHHFEQVGCNHPGCEPAYPTPVCEKKCKVQXNQVWDEKKHFSVNAYSINSDPDDIMSEVYINGPVEVAFTVYEDFAHYKSGVYKHITGGIMGGHAVKLIGWGT

SEQ ID NO: 67860 - protein, 75 aa, Setaria italica
  Transcript Sequence Number=SeqID_1886
  Gene Ontology: Mol. function=cysteine-type endopeptidase activity; Biological process=regulation of catalytic activity
  Homolog annotation: Hit_ID=Q03109; Match level="QueryCoverage=56%, HitCoverage=32%, E-value=1e-11, Identity=73%"; Hit description =Cathepsin B (Fragment)
  Pfam annotation: Domain name=Propeptide_C1; Domain location=46-75; Score=27.2; E_value=6.5e-05; Accession=PF08127.5; Description =Peptidase family C1 propeptide
MGGTLQQLLLLFFFLSAVAPQVVRAVKPIPNSNLGVEEGDNSIGIIQKDIIETVNKHPNAGWTAAHNPYFANYTI

SEQ ID NO: 67861 - protein, 71 aa, Setaria italica
  Transcript Sequence Number=SeqID_1887
ANSGLLHDRWRRSKLSKKQDESYANPAAELSKNTARLRYKSLNSTSGSQSRCCCIPIKTLQVPLVVLTFKK

SEQ ID NO: 67862 - protein, 112 aa, Setaria italica
  misc_feature (15)..(15): Xaa can be any naturally occurring amino acid
  misc_feature (24)..(24): Xaa can be any naturally occurring amino acid
  Transcript Sequence Number=SeqID_1888
  Gene Ontology: Mol. function=cysteine-type endopeptidase activity; Cellular component=vacuole; Biological process=regulation of catalytic activity
  Homolog annotation: Hit_ID=B6TLR9; Match level="QueryCoverage=99%, HitCoverage=31%, E-value=2e-52, Identity=86%"; Hit description =Cathepsin B-like cysteine proteinase 3
  Pfam annotation: Domain name=Peptidase_C1; Domain location=25-112; Score=-87.1; E_value=2.4e-05; Accession=PF00112.15; Description =Papain family cysteine protease
LGVKPTPQDALTDVXFQTYSRSLXLPKEFDARSKWSHCSTIGNILDQGHCGSCWAFGAVECLQDRFCIHMNMNISLSVNDLLACCGFMCGDGCNGGYPIMAWRYFVQNGVVY

SEQ ID NO: 67863 - protein, 56 aa, Setaria italica
  Transcript Sequence Number=SeqID_1889
  Gene Ontology: Mol. function=protein binding; Cellular component =nuclear pore; Biological process=transport
  Homolog annotation: Hit_ID=Q2QX81; Match level="QueryCoverage=100%, HitCoverage=6%, E-value=2e-25, Identity=92%"; Hit description =Nucleoporin autopeptidase family protein, expressed
  Pfam annotation: Domain name=Nucleoporin2; Domain location=1-56; Score=-22.2; E_value=5.4e-08; Accession=PF04096.6; Description =Nucleoporin autopeptidase
PGYCSRVKDFVVGRHGYGSIKFLGETDVRGLDLESIVEFNNREVIVYKDDSKKPPV

SEQ ID NO: 67864 - protein, 145 aa, Setaria italica
  misc_feature (72)..(72): Xaa can be any naturally occurring amino acid
  Transcript Sequence Number=SeqID_1890
  Gene Ontology: Cellular component=nuclear pore; Biological process =transport
  Homolog annotation: Hit_ID=Q2QX81; Match level="QueryCoverage=95%, HitCoverage=17%, E-value=1e-58, Identity=80%"; Hit description =Nucleoporin autopeptidase family protein, expressed
  Subcellular localization annotation: CTP_CleavageSite=59; ConfidenceScore=5.74e-01
NRSPSQSNMVMQPASVSNPFGTLPAMPQMSIGNGGSSPSVQYGISSLPVAEKPLPTRTLSMAVPRHLSQRKXKNCCQENINPISDGKVPFFADDEESPATPKADAFFIPRENPRNLIIRPIEQWPSRSAINRQSVPKDSTDLGTK

SEQ ID NO: 67865 - protein, 159 aa, Setaria italica
  misc_feature (62)..(62): Xaa can be any naturally occurring amino acid
  misc_feature (70)..(70): Xaa can be any naturally occurring amino acid
  misc_feature (72)..(72): Xaa can be any naturally occurring amino acid
  misc_feature (127)..(127): Xaa can be any naturally occurring amino acid
  Transcript Sequence Number=SeqID_1891
  Gene Ontology: Mol. function=cysteine-type endopeptidase activity; Cellular component=vacuole; Biological process=regulation of catalytic activity
  Homolog annotation: Hit_ID=B6TLR9; Match level="QueryCoverage=74%, HitCoverage=34%, E-value=1e-35, Identity=64%"; Hit description =Cathepsin B-like cysteine proteinase 3
  Pfam annotation: Domain name=Propeptide_C1; Domain location=46-88; Score=49.2; E_value=1.6e-11; Accession=PF08127.5; Description =Peptidase family C1 propeptide
MGGTLQQLLLLFFFLSAVAPQVVRAVKPIPNSNLGVEEGDNSIGIIQKDIIETVNKHPNAGXTAAHNPYXNXTIAQFKHILGVKPTPQDALTDVPSKTYSRSLKLPKEFDARSKWSHCSTIGNILGXIVAPVGHLVPWSASRIRFCIHMNMVSKYNRDG

SEQ ID NO: 67866 - protein, 276 aa, Setaria italica
  Transcript Sequence Number=SeqID_1892
  Homolog annotation: Hit_ID=B7ETM3; Match level="QueryCoverage=55%, HitCoverage=71%, E-value=3e-47, Identity=61%"; Hit description=(RAP Annotation release2) Histone deacetylase superfamily protein
  Pfam annotation: Domain name=NC; Domain location=121-191; Score=38.5; E_value=2.6e-08; Accession=PF04970.5; Description=NC domain
MPAGLLSNRVDREDLAAGDHIYSWRAAYLYAHHRDLMVFRPILLHHHGIYVGDEMVIHFTRAAGHEIGTGTFLDSFLFSSSTSSAAAAAGGQCQRCGHLVRPDDGVVMSCLDCFLHGGGLYLFHYAVSPALFLAKARGGTCTLAASDPGHVVVHRARYLLDKGFGAYSLFKNNCEDFAIYCKTGLLVETAFSVGRSGQLASLTAAFSAVASSPLRFLTTSAPGLAIVTTGMYCAGRYVSDMGVRRDVVKVPVQTLVAQATPAATEEAACSLTNHPL

SEQ ID NO: 67867 - protein, 920 aa, Setaria italica
  misc_feature (599)..(599): Xaa can be any naturally occurring amino acid
  Transcript Sequence Number=SeqID_1893
  Gene Ontology: Mol. function=structural constituent of nuclear pore; Cellular component=nuclear pore; Biological process=transport
  Homolog annotation: Hit_ID=Q2QX81; Match level="QueryCoverage=72%, HitCoverage=83%, E-value=0.0, Identity=60%"; Hit description =Nucleoporin autopeptidase family protein, expressed
  Pfam annotation: Domain name=Nucleoporin2; Domain location=756-920; Score=287.2; E_value=3.6e-83; Accession=PF04096.6; Description =Nucleoporin autopeptidase
  Subcellular localization annotation: CTP_CleavageSite=33; ConfidenceScore=5.61e-01
MFGSTNPFGQSSTSPFGQNSFGTQQGFGQATPAANNPFAPKPFGSPTTAFGAQTGGSPFGTASTGAFGQQQSTPTFGTTSTGAFGQQQSTSTFGTPSSSPFGSTPAFGASPTPAFGATSSTFGSGSLFGQKQSFGGFGSSPSQSSPFGSTFQQTQPTFGSSTFGASTTPAFGTTTTPAFGATAPAFGTSTPAFGTATTPAFGSTSTSLFGASSTPGFGSSTPGFGTSGSTAFGVGGTAPGFGSSSTPSFGTSTNAFSFGSSPSFAQTAVSSGSSPFGTTSPFGVQTPAFGSQTAAPAFGQAQFGNQAGGTRIKPYAQTPDVDGATSGTQPAAKLDSISAMPEYKDKSHEELRWEDYQRGDKGGPNPSGTPAAASIFPSLSTQQNAFAPTSNVFNQSTPNTIPTNNPFAPKPVSTSASSFNSFNSTVASSSPFTSSTSTTMFGQTGVSPFQASSSPSLFANTTPFAPSSLFGTSTTNNPNPFGTVSSLANTQSAPLFQSAPAFTQQPSSTPSFSSGNLFSTPPGSLFGSGPSLFSTPTFQTSAPVQTPNTFSFQPPTQPASTGGFPGFSNSANQALIGQQSPSQSNMVMQPAPVSNPFGXTLPAMPQMSIGNGGSSPSVQYGISSLPVAEKPLPTRTLSMAVPRHLSQRRIKLLPRKYNPISDGKVPFFADDEESPATPKADAFFIPRENPRNLIIRPIEQWPSRSAINRQSVPKDSTDLDKYEDTSTESGRDKTVKSPSSSPLVENGQQHEPSHHGNGKGTSVERLLPKLPQEDYFTEPSLEELAAKERGEPGYCSRVKDFVVGRHGYGSIKFLGETDVRGLDLESIVEFNNREVIVYKDDSKKPPVGEGLNKAAEVTLLNIKCMNKKTGEQYREGPRVERYRDMLMMKAEEQGAEFVSFDAAKGEWKFRVKHFSAYGLW

SEQ ID NO: 67868 - protein, 849 aa, Setaria italica
  Transcript Sequence Number=SeqID_1894
  Gene Ontology: Mol. function=structural constituent of nuclear pore; Cellular component=nuclear pore; Biological process=transport
  Homolog annotation: Hit_ID=Q2QX81; Match level="QueryCoverage=78%, HitCoverage=83%, E-value=0.0, Identity=62%"; Hit description =Nucleoporin autopeptidase family protein, expressed
  Pfam annotation: Domain name=Nucleoporin2; Domain location=685-849; Score=289.2; E_value=8.9e-84; Accession=PF04096.6; Description =Nucleoporin autopeptidase
  Subcellular localization annotation: CTP_CleavageSite=47; ConfidenceScore=5.81e-01
STPTFGTTSTGAFGQQQSTPTFGTPSSSPFGSTPAFGASPAPAFGATSSTFGSGSLFGQKQSFGGFGSSPSQSSPFGSTFQQTQPTFGSSTFGASTTPAFGTTTTPAFGATAPAFGTSTPAFGTATTPAFGSTSTSTSLFGASSTPAFGSSTPGFGTSGSTAFGVGGTAPGFGSSSTPSFGTSTNAFSFGSSPSFAQTAVSSGSSPFGTTSPFGAQTPAFGSQTAAAAFGQAQFGNQAGGTRIKPYAQTPDVDGATSATQPAAKLDSISAMPEYKDKSHEELRWEDYQRGDKGGPNPSGTPAAAPIFPSLSTQQNAFAPTSNVFNQSTPSAIPTNNPFAPKPVSTSASPFNSFNSTVASSSPFASSTSTTMFGQTGVSPFQASSSPSLFANTTPFASSSLFGTSTTNNPNPFGTVSSLANTQSAPLFQSAPTFAQPSSTPAFSSGNLFSTPPGSLFGGGPSLFSTPTFQTSAPVQTPNTFSFQPPTQPASTGGFPGFSNTANQALIGQQSPSQSNMVMQPAPISNPFGTLPAMPQMSIGNGGSSPSVQYGISSLPVAEKPLPTRTLSMAVPRHLSQRRIKLLPRKYNPISDGKVPFFADDEESPATPKADAFFIPRENPRNLIIRPIEQWPSRSAINRQSVPKDSTDLDKYEDTSTESGRDKTVKSPRSSPLVENGQQHEPSHHGNGKGTSVERLLPKLPQEDYFTEPSLEELAAKERGEPGYCSRVKDFVVGRHGYGSIKFLGETDVRGLDLESIVEFNNREVIVYKDDSKKPPVGEGLNKAAEVTLLNIKCMNKKTGDQYREGPRVERYRDMLMMKAEEQGAEFVSFDAAKGEWKFRVKHFSTYGLW

SEQ ID NO: 67869 - protein, 919 aa, Setaria italica
  Transcript Sequence Number=SeqID_1895
  Gene Ontology: Mol. function=structural constituent of nuclear pore; Cellular component=nuclear pore; Biological process=transport
  Homolog annotation: Hit_ID=Q2QX81; Match level="QueryCoverage=72%, HitCoverage=83%, E-value=0.0, Identity=62%"; Hit description =Nucleoporin autopeptidase family protein, expressed
  Pfam annotation: Domain name=Nucleoporin2; Domain location=755-919; Score=284.2; E_value=3e-82; Accession=PF04096.6; Description =Nucleoporin autopeptidase
  Subcellular localization annotation: CTP_CleavageSite=33; ConfidenceScore=5.61e-01
MFGSTNPFGQSSTSPFGQNSFGTQQGFGQATPAANNPFAPKPFGSPTTAFGAQTGGSPFGTASTGAFGQQQSTPTFGTTSTGAFGQQQSTPTFGTPSSSPFGSTPAFGASPAPAFGATSSTFGSGSLFGQKQSFGGFGSSPSQSSPFGSTFQQTQPTFGSSTFGASTPPAFGTTTTTAFGATAPAFGTSTPAFGTATTPAFGSTSTSLFGASSTPAFGSSTPGFGTTGSTAFGVGGTAPGFGSSSTPSFGTSTNAFSFGSSPSFAQTAVSSGSSPFGTTSPFGVQTPAFGSQTAAPAFGQAQFGNQAGGTRIKPYAQTPDVDGATSATQPAAKLDSISAMPEYKDKSHEELRWEDYQRGDKGGPNPSGTPAAAPIFPSLSTQQNAFAPTNNVFNQSTPNTIPTNNPFAPKPVSTSASPFNSFNSTVASSSPFTSSTSTTMFGQTGVSPFQASSSPSLFANTTPFASSSLFGTSTTNNPNPFGTVSSLANTQSAPLFQSAPAFAQQPSSTPAFSSGNLFSTPPGSLFGSGPSLFSTPTFQTSAPVQTPNTFSFQPPTQPASTGGFPGFSNTANQALIGQQSPSQSNMVMQPASVSNPFGTLPAMPQMSIGNGGSSPSVQYGISSLPVAEKPLPTRTLSMVVPRHLSQRRIKLLPRKYNPISDGKVPFFADDEESPATPKADAFFIPRENPRNLIIRPIEQWPSRSAINRQSVPKDPTDLDKYEDTSTESGRDKTVKSPSGSPLVENGQQHEPRHHGNGKGTSVERLLPKLPQEDYFTEPSLEELAAKERGEPGYCSRVKDFVVGRHGYGSIKFLGETDVMGLDLESIVEFNNREVIVYKDDSKKPPVGEGLNKAAEVTLLNIKCMNKKTGEQYREGPRVERYRDMLMMKAEEQGAEFVSFDAAKGEWKFRVKHFSAYGLW

SEQ ID NO: 67870 - protein, 361 aa, Setaria italica
  misc_feature (110)..(110): Xaa can be any naturally occurring amino acid
  Transcript Sequence Number=SeqID_1896
  Gene Ontology: Mol. function=cysteine-type endopeptidase activity; Cellular component=vacuole; Biological process=regulation of catalytic activity
  Homolog annotation: Hit_ID=B6TLR9; Match level="QueryCoverage=90%, HitCoverage=94%, E-value=1e-169, Identity=86%"; Hit description =Cathepsin B-like cysteine proteinase 3
  Pfam annotation: Domain name=Peptidase_C1; Domain location=106-342; Score=342.8; E_value=6.4e-100; Accession=PF00112.15; Description =Papain family cysteine protease
  Pfam annotation: Domain name=Propeptide_C1; Domain location=46-89; Score=69.3; E_value=1.4e-17; Accession=PF08127.5; Description =Peptidase family C1 propeptide
  Pfam module annotation: Pfam domain module=Peptidase_C1::Propeptide _C1; Domain location=106-342::46-89
MGGTLQQLLLLFFFLSAVAPQVVRAVKPIPNSNLGVEEGDNSIGIIQKDIIETVNKHPNAGWTAAHNPYFANYTIAQFKHILGVKPTPQDALTDVPSKTYSRSLKLPKEXFDARSKWSHCSTIGNILDQGHCGSCWAFGAVECLQDRFCIHMNMNISLSVNDLLACCGFMCGDGCNGGYPIMAWRYFVQNGVVTDECDPYFDQVGCNHPGCEPAYPTPVCEKKCKVQNQVWDEKKHFSVNAYSINSDPDDIMSEVYINGPVEVAFTVYEDFAHYKSGVYKHITGGIMGGHAVKLIGWGTSDAGEDYWLLANQWNRGWGDDGYFKIIRGVNECGIEEDVVAGMPSTKNMVRNYGGSSGTAVV

SEQ ID NO: 67871 - protein, 88 aa, Setaria italica
  Transcript Sequence Number=SeqID_1897
  Gene Ontology: Mol. function=transcription regulator activity; Cellular component=nucleus; Biological process=regulation of transcription
  Homolog annotation: Hit_ID=B6UDF7; Match level="QueryCoverage=100%, HitCoverage=100%, E-value=8e-26, Identity=74%"; Hit description=DNA binding protein
  Pfam annotation: Domain name=HLH; Domain location=7-55; Score=17.0; E_ value=0.0027; Accession=PF00010.18; Description=Helix-loop-helix DNA -binding domain
MSSRRSSRGNISEDEINELISKLQALLPSSRRRGSGQASTTKLLKETCSYIKSLHREVDDLSDRLSDLMSTMDHNSPGAEIIRSILRS

SEQ ID NO: 67872 - protein, 54 aa, Setaria italica
  Transcript Sequence Number=SeqID_1898
MGIHLLGVLAARGFLQVFQVSAPLLWPLNLWMPLARHLSEACAAFYGALFSHAA

SEQ ID NO: 67873 - protein, 52 aa, Setaria italica
  Transcript Sequence Number=SeqID_1899
HWHHTNLPYQSFLNKGKKTHTIHNHNNINAHASSNLSCILQFVMHPPIYQHT

SEQ ID NO: 67874 - protein, 170 aa, Setaria italica
  misc_feature (118)..(118): Xaa can be any naturally occurring amino acid
  misc_feature (147)..(147): Xaa can be any naturally occurring amino acid
  Transcript Sequence Number=SeqID_1900
  Gene Ontology: Cellular component=chloroplast
RFMDGPDDPRLRHPHDWYKYGRYGPYHWRGIVVGPPIRGRFSDDRVSLMEEVHDHEEWDRIEQFDMCNQFSHRLNDLADGVGFRYYWVFVRHPRWRPNEKPWEQWTLSAEVAVQAGKXERLDKWSLMGRFGNPTRELITRCAAWTRXPDIIYVKRPLYQSRFEPQEDFFK

SEQ ID NO: 67875 - protein, 66 aa, Setaria italica
  Transcript Sequence Number=SeqID_1901
MISIFALFIFLPLPSFYRKAIDLRLPCTEAQIEPSFCSNTYTASTAAALTLARRSTLPFYWNPAPP

SEQ ID NO: 67876 - protein, 156 aa, Setaria italica
  Transcript Sequence Number=SeqID_1902
ASVHRGTDRAFLLQQHVHSFHSGGTDPRQTQYLALLLDPAPPPRSRRRRHWPSSLPYSPDSTPRPPTRMQLPLLQAPAGGYGLRRGLLRAAVVGPRRCCRAWATARWVFGAAGRKGWGGGADGVLGRRSRSSGALGRDWAREREYRGKIGGDGRRP

SEQ ID NO: 67877 - protein, 232 aa, Setaria italica
  Transcript Sequence Number=SeqID_1903
  Gene Ontology: Mol. function=transferase activity, transferring glycosyl groups
  Homolog annotation: Hit_ID=B9SEI8; Match level="QueryCoverage=92%, HitCoverage=61%, E-value=9e-79, Identity=68%"; Hit description =Transferase, transferring glycosyl groups, putative
  Pfam annotation: Domain name=Glyco_transf_8; Domain location=2-201; Score=184.0; E_value=4.3e-52; Accession=PF01501.12; Description =Glycosyl transferase family 8
FDARLVRGKISSSVRRALDQPLNYARIYLADLLPRSVSRVLYLDSDLLVVDDVARLWATDLGPDAALAAPEYCHANFTSYFTDAFWRHPEYAAVFANRTRVPCYFNTGVMVIDLDRWRAGGYTGKLEYWMEVQKQEARIYELGSLPPFLLVFAGEVKAVEHRWNQHGLGGDNVAGQCRELHPGPVSLLHWSGKGKPWLRLDAGRPCPLDALWAPYDLLRRRGARDDLLAAVA

SEQ ID NO: 67878 - protein, 86 aa, Setaria italica
  misc_feature (1)..(36): Xaa can be any naturally occurring amino acid
  Transcript Sequence Number=SeqID_1904
XXXXXXXXXXXXXXXXXXXXXXXXXXXXXXXXXXXXFFFFFSQRLILYAIDQQNGTFTNYITGRATLLDTNGVSVLVRRIAPGKGG

SEQ ID NO: 67879 - protein, 44 aa, Setaria italica
  Transcript Sequence Number=SeqID_1905
RLLCSLWYFLCDPISWSLVIQFFLSYITDQMLKNEILIGIHYTC

SEQ ID NO: 67880 - protein, 80 aa, Setaria italica
  Transcript Sequence Number=SeqID_1906
  Subcellular localization annotation: CTP_CleavageSite=47; ConfidenceScore=5.08e-01
MGELAASSSPPPAAVLPVLFVDGDRTVDLGTVTVQPSLAVKRLQAVVADRVGVAPNQISASLARPRRARRVPLEEGTDLA

SEQ ID NO: 67881 - protein, 72 aa, Setaria italica
  misc_feature (53)..(53): Xaa can be any naturally occurring amino acid
  Transcript Sequence Number=SeqID_1907
  Gene Ontology: Mol. function=transferase activity, transferring acyl groups, acyl groups converted into alkyl on transfer; Cellular component=chloroplast; Biological process=carboxylic acid metabolic process
  Homolog annotation: Hit_ID=B6SWN1; Match level="QueryCoverage=95%, HitCoverage=10%, E-value=6e-32, Identity=92%"; Hit description=2 -isopropylmalate synthase B
DGHVPVICGLSRCNRKDIDAAWEAVRHARRPRIHTFIATSEIHMQHKLRKTPXQVVAIAREMVAYARRPGCP

SEQ ID NO: 67882 - protein, 148 aa, Setaria italica
  Transcript Sequence Number=SeqID_1908
  Gene Ontology: Mol. function=transferase activity, transferring acyl groups, acyl groups converted into alkyl on transfer; Cellular component=chloroplast envelope; Biological process=carboxylic acid metabolic process
  Homolog annotation: Hit_ID=B6SWN1; Match level="QueryCoverage=100%, HitCoverage=23%, E-value=8e-68, Identity=85%"; Hit description=2 -isopropylmalate synthase B
  Pfam annotation: Domain name=HMGL-like; Domain location=1-137; Score =3.2; E_value=3.4e-10; Accession=PF00682.11; Description=HMGL-like
GRSNREFLYHILEEVIKAGATTLNIPDTVGYTLPYEFGNLIADIKANTPGIENAIISTHCQNDLGLATANTLAGARAGARQLEVTINGIGERAGNASLEEVVMAIKCRGELLNGLYTGINSQHITLTSKMVQEHSGLHVQPHKAIVGA

SEQ ID NO: 67883 - protein, 179 aa, Setaria italica
  Transcript Sequence Number=SeqID_1909
  Gene Ontology: Mol. function=transferase activity, transferring acyl groups, acyl groups converted into alkyl on transfer; Cellular component=chloroplast envelope; Biological process=carboxylic acid metabolic process
  Homolog annotation: Hit_ID=B6SWN1; Match level="QueryCoverage=96%, HitCoverage=27%, E-value=4e-92, Identity=93%"; Hit description=2 -isopropylmalate synthase B
  Pfam annotation: Domain name=HMGL-like; Domain location=13-179; Score= 44.9; E_value=4.4e-13; Accession=PF00682.11; Description=HMGL-like
DPNYVRIFDTTLRDGEQSPGATMTSAEKLVVARQLARLGVDIIEAGFPASSPDDLDAVRSIAIEVGNTPVGEEGHVPVICGLSRCNRKDIDAAWEAVRHARRPRIHTFIATSEIHMQHKLRKTPEQVVAIAREMVAYARSLGCPDVEFSPEDAGRSNREFLYHILEEVIKAGAIPTTFL

SEQ ID NO: 67884 - protein, 168 aa, Setaria italica
  Transcript Sequence Number=SeqID_1910
  Gene Ontology: Mol. function=transferase activity, transferring acyl groups, acyl groups converted into alkyl on transfer; Cellular component=chloroplast envelope; Biological process=carboxylic acid metabolic process
  Homolog annotation: Hit_ID=B6SWN1; Match level="QueryCoverage=91%, HitCoverage=24%, E-value=2e-80, Identity=91%"; Hit description=2 -isopropylmalate synthase B
  Pfam annotation: Domain name=HMGL-like; Domain location=1-168; Score =67.0; E_value=6.9e-17; Accession=PF00682.11; Description=HMGL-like
IEVGKTPFGEDGHVPVICGLSRCNRKDIDAAWEAVRHARRPRIHTFIATSEIHMQHKLRKTPEQVVAIAREMVAYARSLGCPDVEFSPEDAGRSNREFLYHILEEVIKAGATTLNIPDTVGYTLPYEFGNLIADIKANTPGIENAIISTHCQNDLGLATANTLAGARC

SEQ ID NO: 67885 - protein, 159 aa, Setaria italica
  misc_feature (20)..(20): Xaa can be any naturally occurring amino acid
  Transcript Sequence Number=SeqID_1911
  Gene Ontology: Mol. function=transferase activity, transferring acyl groups, acyl groups converted into alkyl on transfer; Cellular component=chloroplast envelope; Biological process=carboxylic acid metabolic process
  Homolog annotation: Hit_ID=B6SWN1; Match level="QueryCoverage=100%, HitCoverage=24%, E-value=1e-75, Identity=86%"; Hit description=2 -isopropylmalate synthase B
  Pfam annotation: Domain name=HMGL-like; Domain location=1-118; Score=- 51.4; E_value=2.1e-06; Accession=PF00682.11; Description=HMGL-like
ATTLNIPDTVGYTLPYEFGXLIADIKANTPGIENAIISTHCQNDLGLATANTLAGARAGARQLEVTINGIGERAGNASLEEVVMAIKCRGELLNGLYTGINSQHITLTSKMVQEHSGLHVQPHKAIVGANAFAHESGIHQDGMLKYKGTYEIISPDDIG

SEQ ID NO: 67886 - protein, 136 aa, Setaria italica
  Transcript Sequence Number=SeqID_1912
  Gene Ontology: Mol. function=nucleic acid binding; Cellular component= nucleus; Biological process=regulation of transcription, DNA-dependent
  Homolog annotation: Hit_ID=Q67W65; Match level="QueryCoverage=94%, HitCoverage=7%, E-value=2e-50, Identity=75%"; Hit description =Transcription initiation factor TFIID subunit 1
  Pfam annotation: Domain name=Bromodomain; Domain location=48-135; Score=77.7; E_value=4.1e-20; Accession=PF00439.17; Description =Bromodomain
SSRSSSLNDRRVPERQRAVKRSIPVDMIEHTPSAKRRRGGEVELSNILEKIVDDLRGNTQISLLFLKPVTRKDAPDYLEIIQRPMDLGTIRDKVRKMEYRNRYEFRHDVAQIQLNAHIYNDERHPHIPPLADALIG

SEQ ID NO: 67887 - protein, 258 aa, Setaria italica
  misc_feature (235)..(235): Xaa can be any naturally occurring amino acid
  Transcript Sequence Number=SeqID_1913
  Gene Ontology: Mol. function=nucleic acid binding; Cellular component= nucleus; Biological process=regulation of transcription, DNA-dependent
  Homolog annotation: Hit_ID=Q67W65; Match level="QueryCoverage=92%, HitCoverage=13%, E-value=1e-126, Identity=89%"; Hit description =Transcription initiation factor TFIID subunit 1
IELAAASHIERELQITSWNLTSNFVACTNQDRENIERLEITGVGDPSGRGLGFSYVRVAPKAPSSNSMLKKKSAAAKGTTVTGTDADLRRLSMDAARELLLKFGVPEEQIDKLTRWHRIAMVRKLSSEQAASGITIDEIPVSKFARGQRMSFLQLQQQTREKCQEIWDRQLQSLSAIDGDDNGSDTEANSDLDSFAGDLENLLDAEEFDDEDTSTAELRSDKADGMRGLKMRRCXYHAQINEEIEDDEAEASLDKKNS

SEQ ID NO: 67888 - protein, 491 aa, Setaria italica
  Transcript Sequence Number=SeqID_1914
  Gene Ontology: Mol. function=transferase activity, transferring acyl groups, acyl groups converted into alkyl on transfer; Cellular component=chloroplast envelope; Biological process=carboxylic acid metabolic process
  Homolog annotation: Hit_ID=B6SWN1; Match level="QueryCoverage=100%, HitCoverage=80%, E-value=0.0, Identity=86%"; Hit description=2 -isopropylmalate synthase B
  Pfam annotation: Domain name=HMGL-like; Domain location=1-237; Score =259.7; E_value=7e-75; Accession=PF00682.11; Description=HMGL-like
  Pfam annotation: Domain name=LeuA_dimer; Domain location=330-473; Score=166.4; E_value=8.6e-47; Accession=PF08502.2; Description=LeuA allosteric (dimerisation) domain
  Pfam module annotation: Pfam domain module=HMGL-like::LeuA_dimer; Domain location=1-237::330-473
LARLGVDIIEAGFPASSPDDLDAVRSIAIEVGNTPVIEEAHVPVRHARRPRIHTFIATSEIHMQHKLRKTPEQVVAIAREMVAYARSLGCPDVEFSPEDAGRSNREFLYHILEEVIKAGATTLNIPDTVGYTLPYEFGNLIADIKANTPGIENAIISTHCQNDLGLATANTLAGARAGARQLEVTINGIGERAGNASLEEVVMAIKCRGELLDGLYTGINSQHITLTSKMVQEHSGLHVQPHKAIVGANAFAHESGIHQDGMLKYKGTYEIISPDDIGLTRANEFGIVLGKLSGRHAVRSKLVELGYEISDKEFEDFFKRYKEVAEKKKRVTDEDIEALLSDEIFQPKVIWSLAAVQATCGTLGLSTATVKLIAPDGEEKIACCVGTGPVDAAYKAVDEIIQIPTVLREYGMTSVTEGIDAIATTRVVITGDVSSNSKHALTSLNRSFSGSGASMDVVVSSVRAYLSALNKMCSFAGAVKASSEVPESTSV

SEQ ID NO: 67889 - protein, 347 aa, Setaria italica
  misc_feature (32)..(32): Xaa can be any naturally occurring amino acid
  Transcript Sequence Number=SeqID_1915
  Gene Ontology: Mol. function=transferase activity, transferring acyl groups, acyl groups converted into alkyl on transfer; Cellular component=chloroplast envelope; Biological process=carboxylic acid metabolic process
  Homolog annotation: Hit_ID=B6SWN1; Match level="QueryCoverage=100%, HitCoverage=54%, E-value=0.0, Identity=90%"; Hit description=2 -isopropylmalate synthase B
  Pfam annotation: Domain name=LeuA_dimer; Domain location=184-329; Score=163.3; E_value=7.4e-46; Accession=PF08502.2; Description=LeuA allosteric (dimerisation) domain
DIKANTPGIENAIISTHCQNDLGLATANTLAXARQLEVTINGIGERAGNASLEEVVMAIKCRGELLNGLYTGINSQHITLTSKMVQEHSGLHVQPHKAIVGANAFAHESGIHQDGMLKYKGTYEIISPDDIGLTRANEFGIVLGKLSGRHAVRSKLVELGYEISDKEFEDFFKRYKEVAEKKKRVTDEDIEALLSDQIFQPKVIWSLADVQATCGTLGLSTATVKLIAPDGEEKIACCVGTGPVDAAYKAVDEIIQIPTVLREYGMTSVTEGIDAIATTRVIITGDLSNNSKHALTGHSFNRSFSGSGASMDVVVSSVRAYLSALNKMCSFAGVVKASSEVPESTSV

SEQ ID NO: 67890 - protein, 658 aa, Setaria italica
  Transcript Sequence Number=SeqID_1916
  Gene Ontology: Mol. function=nucleic acid binding; Cellular component= nucleus; Biological process=regulation of transcription, DNA-dependent
  Homolog annotation: Hit_ID=Q67W65; Match level="QueryCoverage=96%, HitCoverage=35%, E-value=0.0, Identity=71%"; Hit description =Transcription initiation factor TFIID subunit 1
  Pfam annotation: Domain name=Bromodomain; Domain location=548-635; Score=77.5; E_value=4.9e-20; Accession=PF00439.17; Description =Bromodomain
  Pfam annotation: Domain name=zf-CCHC; Domain location=218-237; Score =7.0; E_value=0.048; Accession=PF00098.15; Description=Zinc knuckle
  Pfam module annotation: Pfam domain module=Bromodomain::zf-CCHC; Domain location=548-635::218-237
MSFLQLQQQTREKCQEIWDRQLQSLSAIDGDDNGSDTEANSDLDSFAGDLENLLDAEEFDDEDTSTAELRSDKADGMRGLKMRRCPTHAQINEEIEDDEAEASLAKKLLEDNGNDMKRKKQPEGLTNCGTSTGANKTKQNKTGQMIKSSGYAGASTPKESTPREAKEAENSFAEGGLPTKLKTKVAFDGNDILLVKKKSALGKDGPKEKRQGARGDTLVCGACGQLGHMRTNKLCPKYREDQETSEMDANSVKSNPTDIVNHLPTKTPKRLITKVSSEATETEGPECIEKTKSVPVKFKLGAPDKSLERNMSLSSSLVSEKRTMDVTDYRSTGKVNKIIIPNRIKSDDYPPDTPKPSVVFRPPAEEKDVPRKKITIKQPKGVDQQKLVEPRSGQEPTRKTRKMVELSSFEGKSREDDHWFGGEPSQMNSSHERGLGLEGKRRSKAVMESEKSWRDFEEQREMPQQRLTDARIYASREEDHQKAKKKNKKKKKHEFRDDDLLDHRPYKNDRRVPERQRAVKRSIPVDMIEHTPSAKRRRGGEVELSNILEKIVDDLRGNTQISLLFLKPVTRKDAPDYLEIIQRPMDLGTIRDKVRKMEYRNRYEFRHDVAQIQLNAHIYNDERHPHIPPLADALMEMCDYLLDESADELAEAEDAIEH

SEQ ID NO: 67891 - protein, 94 aa, Setaria italica
  Transcript Sequence Number=SeqID_1917
  Subcellular localization annotation: CTP_CleavageSite=84; ConfidenceScore=5.16e-01
SASRPAPTSETRPSPLRFDPDPGNPVYRWILLSLPQTSVLSARWTREIFFPQIFCDRRTRVACPLQSLPTRGSSSPTPPLSFVSGSRPNGFSRP

SEQ ID NO: 67892 - protein, 326 aa, Setaria italica
  misc_feature (49)..(49): Xaa can be any naturally occurring amino acid
  Transcript Sequence Number=SeqID_1918
  Gene Ontology: Mol. function=peptidyl-prolyl cis-trans isomerase activity; Cellular component=endoplasmic reticulum lumen; Biological process=protein folding
  Homolog annotation: Hit_ID=B4FFW0; Match level="QueryCoverage=96%, HitCoverage=98%, E-value=1e-143, Identity=80%"; Hit description =Peptidyl-prolyl cis-trans isomerase, cyclophilin-type family protein
  Pfam annotation: Domain name=Pro_isomerase; Domain location=112-278; Score=2.3; E_value=1.3e-08; Accession=PF00160.13; Description =Cyclophilin type peptidyl-prolyl cis-tr
  Subcellular localization annotation: CTP_CleavageSite=30; ConfidenceScore=5.59e-01
MAFPSSSIIAASSTVYPAYLSLHHRPNSQRASSRPSNANHDNTYKCIKXPKIVRRSLFSLPASFLLLHTSSSLAIDDTNTTSTSAIDTTITDRIFMDFSVCPSYFRSDRPLGAELSSCPDSEPLGRVVFGLYGRLLPTTTANFKATCTAAAYRGTLVHKLLQGQFFAAGRQGSRREKGEVQPPSGLIRNSETVDARAFKLRHARPGTLSLCLGQNDDDNDIKLNPNYHNVEFLVTTGPGPCPQLDGQNIVFGTVLEGMDVITSIAAIPTYKPAERIRLFNDFAQLIGDERAQTARAMWDRPLKTVYISDCGELRVTKQSLSPPSLP

SEQ ID NO: 67893 - protein, 116 aa, Setaria italica
  misc_feature (102)..(102): Xaa can be any naturally occurring amino acid
  Transcript Sequence Number=SeqID_1919
  Gene Ontology: Mol. function=structural constituent of ribosome; Cellular component=ribonucleoprotein complex; Biological process =translational elongation
  Homolog annotation: Hit_ID=B6TBN5; Match level="QueryCoverage=51%, HitCoverage=58%, E-value=1e-23, Identity=93%"; Hit description=60S acidic ribosomal protein P1
  Pfam annotation: Domain name=Ribosomal_60s; Domain location=27-115; Score=122.2; E_value=1.6e-33; Accession=PF00428.11; Description=60s Acidic ribosomal protein
MDLPAAMSSSEIACTYAALILSDDGIPITAEKIATIVKAANIKVESYWPALFAKLLEKRSVEDLILSVGSGGGAAPVAAAAPAGGAAAAAAPAAEEKKEEAXKEESDDDMGFSLFD

SEQ ID NO: 67894 - protein, 138 aa, Setaria italica
  Transcript Sequence Number=SeqID_1920
  Gene Ontology: Mol. function=solute:hydrogen antiporter activity; Cellular component=integral to membrane; Biological process =regulation of pH
  Homolog annotation: Hit_ID=B9RKA1; Match level="QueryCoverage=100%, HitCoverage=24%, E-value=2e-67, Identity=91%"; Hit description=Inner membrane protein ybaL, putative
LSRTGVPWFLKLMISLSSQTNELYQLAAVAFCLLFAWCSDKLGLSLELGSFAAGVMISTTDLAQHTLEQIEPIRNFFAALFLASIGMLINVHFLWNHVDILLAAVILVITVKTFIVAIVVKGFGYSNKTSLLVGMSLA

SEQ ID NO: 67895 - protein, 75 aa, Setaria italica
  Transcript Sequence Number=SeqID_1921
  Gene Ontology: Mol. function=solute:hydrogen antiporter activity; Cellular component=integral to membrane; Biological process =regulation of pH
  Homolog annotation: Hit_ID=B9RRT5; Match level="QueryCoverage=69%, HitCoverage=10%, E-value=4e-12, Identity=68%"; Hit description =Potassium:hydrogen antiporter, putative
IGFPQGKLYLLLLGTTALSLVTTPLLFKMIPAVVHLGVLLRWFSVDSNQLGLKNDVLRIDSGKRINLIVQGSHDS

SEQ ID NO: 67896 - protein, 571 aa, Setaria italica
  Transcript Sequence Number=SeqID_1922
  Gene Ontology: Mol. function=solute:hydrogen antiporter activity; Cellular component=integral to membrane; Biological process =regulation of pH
  Homolog annotation: Hit_ID=B9HDN8; Match level="QueryCoverage=93%, HitCoverage=92%, E-value=0.0, Identity=75%"; Hit description =Potassium efflux antiporter (Fragment)
  Pfam annotation: Domain name=DUF92; Domain location=295-461; Score= -143.7; E_value=0.028; Accession=PF01940.8; Description=Integral membrane protein DUF92
  Pfam annotation: Domain name=Na_H_Exchanger; Domain location=152-522; Score=339.3; E_value=7.3e-99; Accession=PF00999.13; Description =Sodiumhydrogen exchanger family
  Pfam module annotation: Pfam domain module=DUF92::Na_H_Exchanger; Domain location=295-461::152-522
AAGSRAGKQEAEAEAEARGDRVAVAEAGGEVVAQGNATDNKEGSLADMIDRALEKEFPESEGEQGGGETDPGSFNNTVAEKQGVLETVARRVTKKNETKDNKAFQFKEVFLDRSEQEDVPTLIDRKDNVFIISNPKSKYPVLQLDLRLISDLVVVIVSATCGGIAFACLGQPVITGYLLAGSIIGPGGFSFVNEMVQVETVAQFGVIFLLFALGLEFSTAKLRVVRAVAVLGGLLQIMLFMFLCGILATLCGGKTKEGVFVGVLLSMSSTAVVLKFLMERNSINALHGQVTVGTLILQDCAVGLLFALLPILSGTSGLLHGVASMTKSLVVLITFLAILSILSRTGVPWFLKLMISLSSQTNELYQLAAVAFCLLFAWCSDKLGLSLELGSFAAGVMISTTDLAQHTLEQIEPIRNFFAALFLASIGMLINVHFLWNHVDILLAAVILVITVKTFIVAIVVKGFGYSNKTSLLVGMSLAQIGEFAFVLLSRASSIHLIEGKLYLLLLGTTALSLVTTPLLFKMIPAVVHLGVLLRWFSVDSNQVELGLKNDVLRIDSGKRINLIVQGSHDS

SEQ ID NO: 67897 - protein, 65 aa, Setaria italica
  Transcript Sequence Number=SeqID_1923
FCCSFCCQYLHCLMKCLFKMIKSLHLFSIYIPDCIGKHFYSMNKDTYETIMLALPMYMLNDSLLF

SEQ ID NO: 67898 - protein, 89 aa, Setaria italica
  Transcript Sequence Number=SeqID_1924
  Subcellular localization annotation: CTP_CleavageSite=46; ConfidenceScore=5.69e-01
MRPLQLGPRAAAAAGPARPRSLPGRLSLRPCRSGRRSSRNALVAVAATTRGGGKTTAAAADVVREFYDGVNRRDLAAVAPLIAEGCVYE

SEQ ID NO: 67899 - protein, 290 aa, Setaria italica
  misc_feature (234)..(234): Xaa can be any naturally occurring amino acid
  Transcript Sequence Number=SeqID_1925
  Gene Ontology: Mol. function=phosphoprotein phosphatase activity; Cellular component=cytoplasm; Biological process=protein amino acid dephosphorylation
  Homolog annotation: Hit_ID=A0DN20; Match level="QueryCoverage=87%, HitCoverage=19%, E-value=1e-114, Identity=70%"; Hit description =Serine/threonine protein phosphatase
  Pfam annotation: Domain name=Metallophos; Domain location=10-207; Score=152.8; E_value=1.1e-42; Accession=PF00149.20; Description =Calcineurin-like phosphoesterase
RQPNLLELDAPINVCGDVHGQFRDLVRILQELGGLPPRSKYLFLGDYVDRGDQSLETICLLLAYKVRYPEHVFLLRGNHECASINRIYGFYDECKRRYTVRLWRTFTDCFNCLPAAALVDDRILCVHGGISPHLRSLDQIRDLPRPCDVPDEGLLCDLLWSDPAAGVRGWAPNDDRGVSCTFGADVLKAFLRTHDLDLLCRAHQVVEDGYEFFADRQLVTVFSAPNYCGEFAYXRPIMSIDADLVCSFHIIKPAAGDTTTNRGIAAAWGRSSAASASSSSSSGRSNKKGV

SEQ ID NO: 67900 - protein, 361 aa, Setaria italica
  misc_feature (235)..(235): Xaa can be any naturally occurring amino acid
  Transcript Sequence Number=SeqID_1926
  Gene Ontology: Mol. function=protein kinase activity; Cellular component=integral to membrane; Biological process=protein amino acid phosphorylation
  Homolog annotation: Hit_ID=B9SRR7; Match level="QueryCoverage=100%, HitCoverage=57%, E-value=2e-98, Identity=54%"; Hit description =Nodulation receptor kinase, putative
  Pfam annotation: Domain name=LRRNT_2; Domain location=1-36; Score =26.7; E_value=9.7e-05; Accession=PF08263.4; Description=Leucine rich repeat N-terminal domain
  Pfam annotation: Domain name=LRR_1; Domain location=112-134; Score =18.5; E_value=0.027; Accession=PF00560.25; Description=Leucine Rich Repeat
  Pfam annotation: Domain name=LRR_1; Domain location=136-157; Score =13.0; E_value=0.97; Accession=PF00560.25; Description=Leucine Rich Repeat
  Pfam annotation: Domain name=LRR_1; Domain location=158-179; Score =14.1; E_value=0.59; Accession=PF00560.25; Description=Leucine Rich Repeat
  Pfam annotation: Domain name=LRR_1; Domain location=66-88; Score =16.5; E_value=0.11; Accession=PF00560.25; Description=Leucine Rich Repeat
  Pfam annotation: Domain name=LRR_1; Domain location=90-111; Score =2.4; E_value=1e+02; Accession=PF00560.25; Description=Leucine Rich Repeat
  Pfam module annotation: Pfam domain module=LRRNT_2::LRR_1::LRR_1::LRR_ 1::LRR_1::LRR_1; Domain location=1-36::112-134::136-157::158-179::66 -88::90-111
SEKQALLAFASAVYHGNKLNWGPNIPLCSWHGVTCSPDRSRIWALRVPGAGLIGTIPANTLGRLASLQVLSLRSNRLSGSLPSDVASLPSLQATFLQHNELSGDLPSFFSPSLNTLDLSYNSFTGQIPLGLQNLTQLSVLNLAGNSLSGPIPDLKLPSLRQLNLSNNELMGSIPPFLQIFSNSCFLGNPGLCGPPLAECSFLPSSTPSQVPSLPSSPHREKKAGNGLIIAAVVGXFVICLLAAVMFLVCFSKRKEKKDEVGYNSKVTDGARIEKHKEDVSSGVQMAHKNKLVFLDGCSYNFDLEDLLRASAEVLGKGSYGTAYKAILEDGTIVVVKRLKDVVAGKKEFEQQMELIGRVGKH

SEQ ID NO: 67901 - protein, 135 aa, Setaria italica
  misc_feature (16)..(16): Xaa can be any naturally occurring amino acid
  misc_feature (58)..(58): Xaa can be any naturally occurring amino acid
  Transcript Sequence Number=SeqID_1927
  Gene Ontology: Mol. function=electron carrier activity; Cellular component=nucleus; Biological process=proteolysis
  Homolog annotation: Hit_ID=Q7XL25; Match level="QueryCoverage=99%, HitCoverage=30%, E-value=7e-37, Identity=59%"; Hit description =OSJNBa0079M09.3 protein
EIWELDCGPLKVPLFXCQWVAGGGVSKDRYGMTIVDLNKIGYRDEPFILAMDVSQVFXVKYMLSKPKTKAGKKSEDEPKRHIVLPGKRKIIGVEDILEKLEDFDQFDDLPLFLVQVDPSILLSKEDAPYLRCDHD

SEQ ID NO: 67902 - protein, 76 aa, Setaria italica
  Transcript Sequence Number=SeqID_1928
LSRSSPMDRQQQHIQLARTSRGAPAANVTPPMQPQHDGARLTSMCNFLHLAVYKGLKVEVMAQRSGTTRCWRQYST

SEQ ID NO: 67903 - protein, 92 aa, Setaria italica
  Transcript Sequence Number=SeqID_1929
  Gene Ontology: Mol. function=oxidoreductase activity, acting on the CH-NH2 group of donors, NAD or NADP as acceptor; Cellular component =chloroplast; Biological process=glutamate biosynthetic process
  Homolog annotation: Hit_ID=A7VKB1; Match level="QueryCoverage=81%, HitCoverage=3%, E-value=4e-21, Identity=66%"; Hit description=NADH -glutamate synthase 2
KVEKAARKAEQKTRKAGLDKKAGEVIKAPNGISIMTKKVKGKKSSSRPTQVFNAENSRGFITYDREGISYRDANERVEDWNEVTNELVPGPL

SEQ ID NO: 67904 - protein, 80 aa, Setaria italica
  Transcript Sequence Number=SeqID_1930
  Gene Ontology: Mol. function=carbohydrate binding; Biological process= carbohydrate metabolic process
  Homolog annotation: Hit_ID=B9RE17; Match level="QueryCoverage=76%, HitCoverage=19%, E-value=9e-13, Identity=64%"; Hit description =Aldose 1-epimerase, putative
YSSIQNNSTKKHSVVWCYVDVLHLYSSEVRIEGLETLDYLDNLSQRERFTEQGDAITFESEVPFFCFNNINAARIYMGFI

SEQ ID NO: 67905 - protein, 58 aa, Setaria italica
  Transcript Sequence Number=SeqID_1931
  Subcellular localization annotation: CTP_CleavageSite=31; ConfidenceScore=5.32e-01
MAEAAGTALAQAQQQPARVGTTTTTTGSDVSARLQQVLALLFPSNLAAKAALFALVVA

SEQ ID NO: 67906 - protein, 113 aa, Setaria italica
  Transcript Sequence Number=SeqID_1932
  Subcellular localization annotation: CTP_CleavageSite=54; ConfidenceScore=5.18e-01
VLLATCFYFKLSLGTPCSLPKVLSTLMQTLKCFPQQYTDSIVTTVCSSKNGVPREQYLDPSPLRFNICIWQTKACARINFQSPGRSFVMWCWRLALLLSVSRTKICSMPAAAE

SEQ ID NO: 67907 - protein, 245 aa, Setaria italica
  Transcript Sequence Number=SeqID_1933
  Gene Ontology: Mol. function=molecular_function; Cellular component =spliceosome; Biological process=positive regulation of cytotoxic T cell differentiation
  Homolog annotation: Hit_ID=Q9DF64; Match level="QueryCoverage=37%, HitCoverage=53%, E-value=1e-21, Identity=53%"; Hit description =Squamous-cell carcinoma T-cell-recognized antigen (Fragment)
ARKTEDDGVYMDEDDDDMPSDNHVKDDTNGLAAMEEDAHAEKQVKVDEEEVKPDEVIHEVAVGKGLAGALKILKERGSLNEGTDWGGRTTDKKKSKLVGVEDGPKDIRIERMDEFGRVMTPKEAFRDLSHKFHGKGPGKMKQEKRQKKYQDEMKTKRMKSSDTPLMAAEKMREAQARNQTPYLILSGNAKTSQASDASGFATVEKEQPGSLTPMLGDKKVEHFLGIKRSAKPGGLPPPVPKKPKN

SEQ ID NO: 67908 - protein, 48 aa, Setaria italica
  Transcript Sequence Number=SeqID_1934
KTKQGSVSASSSSRPFYSFMPVGPVRCERPLSEIKADVSDGVDLELKL

SEQ ID NO: 67909 - protein, 173 aa, Setaria italica
  misc_feature (53)..(53): Xaa can be any naturally occurring amino acid
  Transcript Sequence Number=SeqID_1935
  Gene Ontology: Mol. function=calcium ion binding
  Homolog annotation: Hit_ID=B6SRA7; Match level="QueryCoverage=100%, HitCoverage=100%, E-value=1e-43, Identity=62%"; Hit description =Caltractin
  Pfam annotation: Domain name=efhand; Domain location=102-130; Score =26.8; E_value=8.7e-05; Accession=PF00036.24; Description=EF hand
  Pfam annotation: Domain name=efhand; Domain location=22-50; Score =25.9; E_value=0.00016; Accession=PF00036.24; Description=EF hand
  Pfam annotation: Domain name=efhand; Domain location=62-90; Score =27.1; E_value=7.2e-05; Accession=PF00036.24; Description=EF hand
  Pfam module annotation: Pfam domain module=efhand::efhand::efhand; Domain location=102-130::22-50::62-90
MCPTGRYLGLDLSAVVAGAAGDLRPAFDVLDADRDGRISREDLKSFYAAAGPXAGEQFDDDDLAAMIAAADADRDGFVQYDEFERLLASRATTAAAAGRGSAMEDAFRLMDRDGDGKVGFEDLKAYLGWAGMPAADEEVRAMIRVAGGGDGDEGVGLEALARVLAVDLEGIAL

SEQ ID NO: 67910 - protein, 245 aa, Setaria italica
  Transcript Sequence Number=SeqID_1936
  Gene Ontology: Mol. function=structural molecule activity; Cellular component=plasma membrane; Biological process=lipid transport
  Homolog annotation: Hit_ID=Q84WW5; Match level="QueryCoverage=93%, HitCoverage=96%, E-value=2e-42, Identity=45%"; Hit description =Putative proline-rich protein
  Pfam annotation: Domain name=Motile_Sperm; Domain location=12-118; Score=106.9; E_value=6.6e-29; Accession=PF00635.18; Description=MSP (Major sperm protein) domain
SFVSVVLLSSKLLRVYPSELKIPYEMKKQRSCCMQLTNRTDQFVAFKVKTTNPRKYSVRHSCGIVLPRGSCNVTVIMQAPMEMLLDHQCKDKFLVQSVVVKDRATIKDFGPQLFTKAPGRVIEEFKLRVVYIAANPPSPVPEEEEEEDSSPRSEVVCGVKTSSTFDAEHRCIGASAAEPSCPEGTSVISELVQEREYVDKHQKLQQDMELLGETRSSQQGFSLMFVVFVFMSSMFIGHLMNEIKV

SEQ ID NO: 67911 - protein, 50 aa, Setaria italica
  Transcript Sequence Number=SeqID_1937
  Gene Ontology: Mol. function=cysteine-type endopeptidase activity; Cellular component=vacuole; Biological process=proteolysis
  Homolog annotation: Hit_ID=Q10717; Match level="QueryCoverage=100%, HitCoverage=13%, E-value=6e-19, Identity=94%"; Hit description =Cysteine proteinase 2
SALESTVFAALGRTRDALRFARYAVRYGKSYESVAEVHKRFRIFSESLEL

SEQ ID NO: 67912 - protein, 41 aa, Setaria italica
  Transcript Sequence Number=SeqID_1938
ATQPYGRDVQAGANSFPYGCVGRLSAGGSKLLILYVSMLFY

SEQ ID NO: 67913 - protein, 70 aa, Setaria italica
  Transcript Sequence Number=SeqID_1939
LLMTLLDGHVAVTKIRDKVLKHLNIIQLFFKLSTISHFLYFLLHALFALFLSAVHRNGHLSMLSESRKRG

SEQ ID NO: 67914 - protein, 231 aa, Setaria italica
  misc_feature (170)..(170): Xaa can be any naturally occurring amino acid
  Transcript Sequence Number=SeqID_1940
  Gene Ontology: Mol. function=acireductone synthase activity; Cellular component=chloroplast; Biological process=methionine salvage
  Homolog annotation: Hit_ID=Q2HS18; Match level="QueryCoverage=96%, HitCoverage=65%, E-value=2e-46, Identity=33%"; Hit description =Tetratricopeptide-like helical
  Pfam annotation: Domain name=PPR; Domain location=123-157; Score =30.9; E_value=5.3e-06; Accession=PF01535.12; Description=PPR repeat
  Pfam annotation: Domain name=PPR; Domain location=195-228; Score=2.7; E_value=4.3; Accession=PF01535.12; Description=PPR repeat
  Pfam annotation: Domain name=PPR; Domain location=22-56; Score=23.0; E_value=0.0012; Accession=PF01535.12; Description=PPR repeat
  Pfam module annotation: Pfam domain module=PPR::PPR::PPR; Domain location=123-157::195-228::22-56
VRIDVRERPKAVFDGMRVRNSVSWCCMVVAYAQNGGEEEAFSLYLGARRAGEEPTDFMVSSVLTTCAGLLGLDLGRALHAVAVRSCIDANIFVASALVDMYGKCGDIENAEQVFFEMPQRNLVTWNAMVGGYAHIGDARNALAVFDGMMKCGETAPNYITLVNVLTACSXGGLTKERYELFKTMHERFGIKPRIEHYACVVDLLGRAGMEEQAYEIIQGMPMRPSISVWGA

SEQ ID NO: 67915 - protein, 100 aa, Setaria italica
  Transcript Sequence Number=SeqID_1941
  Gene Ontology: Mol. function=substrate-specific transmembrane transporter activity; Cellular component=integral to membrane; Biological process=transmembrane transport
  Homolog annotation: Hit_ID=B6T6Z1; Match level="QueryCoverage=83%, HitCoverage=16%, E-value=2e-30, Identity=79%"; Hit description =Solute carrier family 2, facilitated glucose transporter member 8
  Subcellular localization annotation: CTP_CleavageSite=57; ConfidenceScore=5.20e-01
MASNRAGGGGGGYESGSDHDGALQKPLLPNSGSWYRMGMGSRQSSLNAGTSSMAVLRESHVSALLCTLIVALGPIQFGFTGGYSSPTQDGIIRDLNLSIS

SEQ ID NO: 67916 - protein, 120 aa, Setaria italica
  Transcript Sequence Number=SeqID_1942
  Gene Ontology: Mol. function=acid-amino acid ligase activity; Cellular component=intracellular; Biological process=ubiquitin -dependent protein catabolic process
  Homolog annotation: Hit_ID=B9SMZ3; Match level="QueryCoverage=100%, HitCoverage=3%, E-value=1e-47, Identity=73%"; Hit description=E3 ubiquitin protein ligase upl2, putative
QDNSLPVSLSLIFQNVEKFGGDIYFSAVTVMSEIIHKDPTCFPALKELGLPDAFLSSVTAGVIPSCKALICVPNGLGAICLNNQGLEAVRETSALRFLVDTFTSRKYLMPMNEGVVLLAN

SEQ ID NO: 67917 - protein, 236 aa, Setaria italica
  Transcript Sequence Number=SeqID_1943
  Homolog annotation: Hit_ID=Q9SPP7; Match level="QueryCoverage=66%, HitCoverage=45%, E-value=7e-12, Identity=38%"; Hit description =Fertilin alpha subunit
PPPGAAADVPAAAPEAVSTGSDKGVHAAAPSLKQAHWNDFGGASTGAPGADPFGDLPPGEAEDTFFGGTAAEDQGGQASLLPASNASAPPDHSFSAGAGNNATDAAGLPDYSFYGVMDTNSANSQFDSATGAAGYATDHSTNAQLESADPRYLESLYPGWKYDDTTQQWYQVDTLTDQHVTTEVTSAVASDGIQQQQQLSALYLQNDSHAEAGLEPTEVTPQPKPVTQADDQPMPA

SEQ ID NO: 67918 - protein, 49 aa, Setaria italica
  Transcript Sequence Number=SeqID_1944
KYIWFGPSNMTMEFYYSMDKVKVNGNKPMKMQKNFIRQSTELLLFDLSK

SEQ ID NO: 67919 - protein, 124 aa, Setaria italica
  Transcript Sequence Number=SeqID_1945
  Gene Ontology: Mol. function=nucleotide binding; Biological process =defense response
  Homolog annotation: Hit_ID=B9GUS0; Match level="QueryCoverage=83%, HitCoverage=10%, E-value=4e-12, Identity=40%"; Hit description=Cc -nbs-lrr resistance protein
AVEEQETTSVVSAVVGRTVEKQAVINILLSSNNKACSTNTHPQETSHCTVIHGLAGVGKTALAQLVFNDERIQEAFPHRAWVYLYQNWHEKEIGRAIISVVEHRPCNLEILESIYQHLKKVLLS

SEQ ID NO: 67920 - protein, 178 aa, Setaria italica
  misc_feature (39)..(39): Xaa can be any naturally occurring amino acid
  Transcript Sequence Number=SeqID_1946
  Gene Ontology: Mol. function=zinc ion binding
MRALQQRTMRDLYDHTRHKDLAAPEEPAEGRGGGRAEGXGYRELVPKEDKAAVRKRLVPSNSTRLKAESGTCNVCYAPCSSCLHRSLAVEDSNAECASSQTCSARSEVRNNSLVRSEKGLHNKGENDDEFSATSGHVSYSITGGNNKVFARPSIADDSSEVDMPAKRRRLLNQKQKTI

SEQ ID NO: 67921 - protein, 1479 aa, Setaria italica
  Transcript Sequence Number=SeqID_1947
  Gene Ontology: Mol. function=zinc ion binding
  Homolog annotation: Hit_ID=Q2QSD0; Match level="QueryCoverage=55%, HitCoverage=53%, E-value=1e-47, Identity=54%"; Hit description=PHD -finger family protein, expressed
  Pfam annotation: Domain name=PHD; Domain location=319-368; Score =23.0; E_value=7.8e-05; Accession=PF00628.21; Description=PHD-finger
KKTKKLKTLKRKSKERKGTTNNKGENDDEFSATSGHVSYSITGGNNKVFARPSIADDSSEVDMPAKRRRLLNQNKKQSRAEHHDDSNSCVTGTSAEGKLHADKKKLSTSASSRDLTANDYKDNSMVCRSRLKNQCVDESKKGSDAHDMHPSSSGRLFPADSPISTKKLLRTQSSVSASSRLSPKKKAHECGTVQDNSSHQSCEKVSLSKNNVEQPRGGKLDPCVAGSGNHGTLAGYSNINANKAGFSSKDLENGSSCRKDEIQEHAGIQSNDGVTRNEGDKQEWDQDCSMDISSDGKLNIQHDMMTDCGTSEGLIDVNVCDICGDVGREYLLATCTRCLEGAEHIYCMRVKLDKVPDGEWLCEECQLREDQNNTRSNYGVTAVNMSEGKKNQSSESRNKPKALQIVVPELDAPESTRSTPKADQCDGKNKKLHLASADTQTRQAKVTPLASERLDVKSKKLLSIANRNKQVLPSDLDARPHTHGTPTAGGSNKKCQSSEFLLNRKKLRVSTDMESPSSSEGLRSPTMSCKRQAENNSSPKPRLLKTDSFRKHDVISRENSFKKSDKGGLTSVDNAPVRTTQAVKNSQALSRSYSLGNMVAKTPVPSPKGLLSKQLSFNSTNNGPKVKQLAEGVASKLRPANHSPRDPRDKGAVKKLVQSGSFKREGSVCLDAGSSKQKQTFHLSQDEKPGILKPVKEKNLMERRASFSFKKPSIPSSPRPDSCMKLGERKNDQDISRSGSSILKSSKRPGNVEKKQSSDLSKSDNDKQDVTIHPKSMGVVSGKVAHVPDPPVSSKCVKKESSNGVSKSDNDKQDVTVHPKSMGVVSGKDAHVSDPPVPSKCVKKESSNDVEDEDLFISVKNGSRMPNESAEVVLTSSTTMTSESGLRDVAIASTSEDSAPKVVCFQQKPLESTGDDSCKIVEAAQATGSILNEIPPGVQMAHNLYPPDDKLDKPDLKQEAFMDQSSALENPLRDLVIPEQSYIWQGSFEVSRHGNSPEIFDGFQAYLSICASSKAREVGEQLPDKIQLAEVPRLSSWPLQFKEVNPTEDNIALFFFAKDVESYERAYGKLLENMLLGDLSLTANISGSELLIFPSDKLPERIQRWNGLLFFWGIFHARKASSPPELPLTGTNNCSLQQITGSDVGSPKALQSLGIDLNECPNDDISDPAISLGSESEKSGAFVDHNTFLVSKHEDRKLNASEIHHEETADAKQIIPGHPTAASYGIHPPTLSTGEGHDMIRNYSTAAKGSTGTAGRNKMEEDQNEALFCAAQQPGAIGSISDEIKPKKHDLLPSIEVSQRHFIGSKICDGPSKLIPNSDMGSFDPDLTYKRQKTSYGKYSACSFGDEMQPSKCLSKIHPLPVGQHNPFDDLQYNYRVPSDPGSLKQPVPDHIIHVLSSDDEDSPEPSTSLNKASLKADESSSPLLSLSLSMVATKHNLSGSDIVDDEPLSLSLGLPSVVEGGRALEMKQFLPEKPGINT

SEQ ID NO: 67922 - protein, 114 aa, Setaria italica
  Transcript Sequence Number=SeqID_1948
RMMSFLDLYPALWVLMEAWLRLLTPSLLSWARPRCMMCALGSCIENSRKKALTFGDSKGVLCIMTFAFRVVEILVQLFCMHFLFLGDSCIMFLSGPQVMVRPCDIIKSWALSCK

SEQ ID NO: 67923 - protein, 106 aa, Setaria italica
  Transcript Sequence Number=SeqID_1949
MIQKTFFPIPYLSPVNKNSRRAMKHKQSEFAVMENGRVRQHLIGTEDINVPRIRKERFLTSDSIDPQQIEQEASFHQLGNIDASCSGSSQRYSCGNDNFRQTTGHH

SEQ ID NO: 67924 - protein, 339 aa, Setaria italica
  Transcript Sequence Number=SeqID_1950
  Gene Ontology: Mol. function=metalloexopeptidase activity; Cellular component=chloroplast; Biological process=cellular process
  Homolog annotation: Hit_ID=B6TIN4; Match level="QueryCoverage=100%, HitCoverage=100%, E-value=0.0, Identity=92%"; Hit description =Methionine aminopeptidase
  Pfam annotation: Domain name=Peptidase_M24; Domain location=103-338; Score=252.3; E_value=1.2e-72; Accession=PF00557.16; Description =metallopeptidase family M24
MAIRVPSMELHRPAPLVSGGRGKTCLQKKPFLVQAKRLGGLEKASTRGAQESGQPKKRAPLIRGTVSPPLPVPGNIPRPPYVGTKDVPEIAKEIQMHDKESIIHMRAACELAARVLEYAGTLVKPSVTTDEIDKAVHKMIIDAGAYPSPLGYGGFPKSVCTSVNECMCHGIPDSRALQDGDIINIDVTVYLNGYHGDTSKTFLCGEVDEASKRLVKVTEECLLRGISTCKHGTSFKKIGRRISEHAERHGLGVVECFVGHGVGRVFHSEPIIYHQRNNKPGQMVEGQTFTIEPILSMGSTDCDMWDDGWTAVTTDGSLAAQFEHTILITRTGAEILTKC

SEQ ID NO: 67925 - protein, 118 aa, Setaria italica
  Transcript Sequence Number=SeqID_1951
  Homolog annotation: Hit_ID=B6U1B3; Match level="QueryCoverage=38%, HitCoverage=13%, E-value=6e-10, Identity=62%"; Hit description =Agenet domain containing protein
SLHEEPIGEGGYYDAYCKDLRPALDWSLEKSWSVPLSQGNGKSWYTAQLIIQSTDSGSSSSDEDIEQSCDCEEVQKCLDRPSDLPAEAMGSGTKLSANVSDEVFINNQGHGKEESPEC

SEQ ID NO: 67926 - protein, 192 aa, Setaria italica
  Transcript Sequence Number=SeqID_1952
RTKKLTKESKTRLQDEDIEQSCDCEEVQKCLDRPSDLPAEAMGSGTKLSANVSDEVFINNQGHGKEESPECLNGASNMPQEVTDSKGELPPNQNGHCCIKSETNSPIAKQGESPEALSDGKSSPISLKRQKTSSGDISVEAPPDSVDYSIMKLEKVANKIRRLESLLLSVGSPPSKVAKPSWKFLEEDASHK

SEQ ID NO: 67927 - protein, 100 aa, Setaria italica
  Transcript Sequence Number=SeqID_1953
LTLQVHTSRVVQVLARSRAPSSSTSTRECPSSDESYANIGLAGGRTIKREIDTCLSNLSVLFNYMCLGPDSSFCCWFASACPIWKHTDTANLSFVARSCV

SEQ ID NO: 67928 - protein, 56 aa, Setaria italica
  Transcript Sequence Number=SeqID_1954
  Gene Ontology: Mol. function=histidinol dehydrogenase activity; Cellular component=chloroplast; Biological process=amino acid biosynthetic process
  Homolog annotation: Hit_ID=A7QMZ3; Match level="QueryCoverage=100%, HitCoverage=12%, E-value=4e-25, Identity=96%"; Hit description =Histidinol dehydrogenase
LYCAKKAGVTHILKAGGAQAISAMAWGTVSCPKVEKIFGPGNQYVTAAKMILQNSE

SEQ ID NO: 67929 - protein, 478 aa, Setaria italica
  Transcript Sequence Number=SeqID_1955
  Gene Ontology: Mol. function=histidinol dehydrogenase activity; Cellular component=chloroplast; Biological process=amino acid biosynthetic process
  Homolog annotation: Hit_ID=B6TZ66; Match level="QueryCoverage=100%, HitCoverage=100%, E-value=0.0, Identity=92%"; Hit description =Histidinol dehydrogenase
  Pfam annotation: Domain name=Histidinol_dh; Domain location=57-470; Score=898.5; E_value=3.4e-267; Accession=PF00815.12; Description =Histidinol dehydrogenase
  Subcellular localization annotation: CTP_CleavageSite=41; ConfidenceScore=5.66e-01
MGSLRAPPAPAPLVGSARVSFGSGLRFAAARVLKPRGLTTSSAMKSYRLSELSDAEVSGLKARPRIDFSSIFGTVNPIVEDVRVRGDAAVKDYTEKFDKVTLDDVVVRVSDLPDAELGPAVKEAFDVAYDNIYAFHVAQKLPEKTVENMKGVRCKRITRCIGSVGLYVPGGTAVLPSTALMLAVPAQIAGCKTIVLATPPSCDGSICKEVLYCAKKAGVTHILKAGGAQAISAMAWGTVSCPKVEKIFGPGNQYVTAAKMILQNSEAMVSIDMPAGPSEVLVIADKYANPVHVAADLLSQAEHGPDSQVVLVIAGDSVDLDAIEAEVSKQCNALPRGEFASKALSHSFTVFAKDMVEAISFSNLYAPEHLIINVKDAEQWEELVENAGSVFLGQWTPESVGDYASGTNHVLPTYGYARMYSGVSLNSFLKYITVQSLTEEGLRKLGPYVAKMAEVEGLEAHKRAVTLRLQEAEATVTV

SEQ ID NO: 67930 - protein, 370 aa, Setaria italica
  Transcript Sequence Number=SeqID_1956
  Gene Ontology: Mol. function=catalytic activity; Cellular component =nucleus; Biological process=red or far red light signaling pathway
  Homolog annotation: Hit_ID=B6SWD0; Match level="QueryCoverage=100%, HitCoverage=72%, E-value=0.0, Identity=93%"; Hit description=Light -mediated development protein DET1
  Pfam annotation: Domain name=Det1; Domain location=1-370; Score =744.1; E_value=1e-220; Accession=PF09737.1; Description=De-etiolated protein 1 Det1
AQSNDSTATEGAIHGVPSIEKITFYLVRLEDGVILDEKAFCNDFINLAHSIGAYLYEDLLCIVSLRYQTIHILQIRDSGNLVEVRRIGAFCREDDELFLHSHVQTGFGGSFLPGIKQRLLSYIFRKTWNEVPDETLRVQHLKKKFYFHFQDYVDLIIWKVQFLDRHHLFIKFGSVDGGVSRSTDQNLAFFAVYNMETTDIISLYQNSSEELYSLFEQFYDHFHANPQDSSHGKFISSHSNDIHALDQLRTIKNKASSSSQFVKKMMASLPYTCQSQSPSPYFDLSLFRYDEKLISAIDRHRHCTEHPIKFISVRSPNVVRFKIKPGSDSGASDSRAKRISSFLFHPFFPFALSIQQTYMQPTVVNIHFRR

SEQ ID NO: 67931 - protein, 80 aa, Setaria italica
  Transcript Sequence Number=SeqID_1957
  Gene Ontology: Cellular component=integral to membrane; Biological process=protein transport
  Homolog annotation: Hit_ID=Q75IC7; Match level="QueryCoverage=100%, HitCoverage=25%, E-value=5e-39, Identity=93%"; Hit description =Secretory carrier-associated membrane protein 4
  Pfam annotation: Domain name=SCAMP; Domain location=1-80; Score=19.6; E_value=2e-08; Accession=PF04144.5; Description=SCAMP family
HDIGNEIPVHLQRTQYVAFASLLGLVLCLFWNIICVSAAWAKGSGPKIWFLAIIYFILGCPGAYYLWYRPLYRAMRNESA

SEQ ID NO: 67932 - protein, 68 aa, Setaria italica
  Transcript Sequence Number=SeqID_1958
  Homolog annotation: Hit_ID=Q7XSZ4; Match level="QueryCoverage=95%, HitCoverage=29%, E-value=1e-19, Identity=66%"; Hit description =Protein tyrosine phosphatase-like protein PASTICCINO 2A
  Pfam annotation: Domain name=PTPLA; Domain location=4-68; Score= -67.5; E_value=0.087; Accession=PF04387.6; Description=Protein tyrosine phosphatase-like protein, PTPLA
MNSILHSILGFVRSPVIATSTQVCARTLVTWAIVWTYPETHSHILITSLVLSWSITEVIRYSFFGLRE

SEQ ID NO: 67933 - protein, 65 aa, Setaria italica
  Transcript Sequence Number=SeqID_1959
RIQTQWKSKEILKIYSTPTLLYTPVDLKTLHTMNSIHAVLICTAHQNAALAALRAASRFICASFP

SEQ ID NO: 67934 - protein, 180 aa, Setaria italica
  misc_feature (118)..(118): Xaa can be any naturally occurring amino acid
  Transcript Sequence Number=SeqID_1960
  Gene Ontology: Mol. function=ATP-dependent helicase activity; Biological process=positive regulation of growth rate
  Homolog annotation: Hit_ID=Q7XSZ4; Match level="QueryCoverage=72%, HitCoverage=66%, E-value=1e-37, Identity=56%"; Hit description =Protein tyrosine phosphatase-like protein PASTICCINO 2A
  Pfam annotation: Domain name=PTPLA; Domain location=4-144; Score =98.4; E_value=2.5e-26; Accession=PF04387.6; Description=Protein tyrosine phosphatase-like protein, PTPLA
MIHELLKGFVRSPVIATSTQVCARTLVTWAIVWTYPETHSHILITSLVLSWSITEVIRYSFFGLREAFGITPFWLLWLRYTTFTVLYPIGLISEVGLIFTAMPHMKGSLLLIWVPLSXGIAVRLSPYMYCYMLSQRKKALFEGVKPSINLSLNLLYFPFLYVLVFFFSFFPFFSFFSFFF

SEQ ID NO: 67935 - protein, 202 aa, Setaria italica
  Transcript Sequence Number=SeqID_1961
  Gene Ontology: Mol. function=ATP-dependent helicase activity; Cellular component=endoplasmic reticulum membrane; Biological process=positive regulation of growth rate
  Homolog annotation: Hit_ID=Q7XSZ4; Match level="QueryCoverage=94%, HitCoverage=93%, E-value=4e-58, Identity=56%"; Hit description =Protein tyrosine phosphatase-like protein PASTICCINO 2A
  Pfam annotation: Domain name=PTPLA; Domain location=52-200; Score =168.4; E_value=2.1e-47; Accession=PF04387.6; Description=Protein tyrosine phosphatase-like protein, PTPLA
SRSAAQRLYLSVYNWVSFFGWAQVLYYATLALLGGGHETVYAAVKLPLLFSQTAMLTEILHSILGFVRSPVIATSTQVCARTLVTWAIVWTYPETHSHILITSLVLSWSITEVIRYSFFGLREAFGITPFWLLWLRYTTFTVLYPIGLISEVGLIFTAMPHMKGSLLLIWVPLTFLYIPGFPYMYCYMLSQRKKALSKAKTA

SEQ ID NO: 67936 - protein, 64 aa, Setaria italica
  Transcript Sequence Number=SeqID_1962
  Gene Ontology: Cellular component=membrane
  Homolog annotation: Hit_ID=B9S0T3; Match level="QueryCoverage=98%, HitCoverage=16%, E-value=2e-10, Identity=55%"; Hit description=Auxin- induced protein 5NG4, putative
FALIFESGKWKELDKKALGWLFINAFAGYSLPMALYYYGLRDTPASYAVIFSSLTPLVTFVLSP

SEQ ID NO: 67937 - protein, 128 aa, Setaria italica
  Transcript Sequence Number=SeqID_1963
FKTELVHPNALFWDTRETLEKNLKSLNMLGLDDSLHHALHRPTVPASGRLVVLVAGKGPGEDVARGAAARPVVGLSPPGKGREDQVRREGTGERERRTPSRQRRAGPPASLVQRRKQKWAERFGPGQG

SEQ ID NO: 67938 - protein, 91 aa, Setaria italica
  Transcript Sequence Number=SeqID_1964
HGESIADAAVAAGEQGAAGAMRVKIVLSKQQLKQVAAAVAGGGVCGFALPPALEQLVSVLKRQHAKKQVAAVGRRRGRWSPALQSIPEECF

SEQ ID NO: 67939 - protein, 103 aa, Setaria italica
  Transcript Sequence Number=SeqID_1965
  Subcellular localization annotation: CTP_CleavageSite=48; ConfidenceScore=5.23e-01
HPTPLFSATYSLISPLSSLLSLGRIAASQPHARPARTSHCTQIHTTVREELGNRERGQEEEHSFREQERCSAWLPASSLPAAGGVSASPRRPAMSSMDEATAL

SEQ ID NO: 67940 - protein, 133 aa, Setaria italica
  Transcript Sequence Number=SeqID_1966
  Gene Ontology: Mol. function=metal ion binding; Cellular component =integral to membrane
  Homolog annotation: Hit_ID=Q52T38; Match level="QueryCoverage=97%, HitCoverage=20%, E-value=8e-31, Identity=50%"; Hit description=S -acyltransferase TIP1
MVCSFMQGNARRVHERGCGGNGYFRKLSKFGLAPLLWCIIIALIFVYTHSIILGDYNTNMTLPLGLFSWLGVFLATAGLVMFYRCSRKDPGYISKNVRDSQNQRDDEPLLKRDLDNLELLDGNWSQLCITCKI

SEQ ID NO: 67941 - protein, 618 aa, Setaria italica
  Transcript Sequence Number=SeqID_1967
  Gene Ontology: Mol. function=zinc ion binding; Cellular component =integral to membrane; Biological process=positive regulation of I -kappaB kinase/NF-kappaB cascade
  Homolog annotation: Hit_ID=Q52T38; Match level="QueryCoverage=90%, HitCoverage=90%, E-value=0.0, Identity=69%"; Hit description=S -acyltransferase TIP1
  Pfam annotation: Domain name=Ank; Domain location=124-157; Score =11.6; E_value=0.77; Accession=PF00023.22; Description=Ankyrin repeat
  Pfam annotation: Domain name=Ank; Domain location=158-190; Score =24.9; E_value=0.00034; Accession=PF00023.22; Description=Ankyrin repeat
  Pfam annotation: Domain name=Ank; Domain location=191-225; Score =31.4; E_value=3.7e-06; Accession=PF00023.22; Description=Ankyrin repeat
  Pfam annotation: Domain name=Ank; Domain location=58-90; Score=30.6; E_value=6.5e-06; Accession=PF00023.22; Description=Ankyrin repeat
  Pfam annotation: Domain name=Ank; Domain location=91-123; Score=36.8; E_value=8.5e-08; Accession=PF00023.22; Description=Ankyrin repeat
  Pfam annotation: Domain name=zf-DHHC; Domain location=356-420; Score =84.8; E_value=3e-22; Accession=PF01529.12; Description=DHHC zinc finger domain
  Pfam module annotation: Pfam domain module=Ank::Ank::Ank::Ank::Ank::zf -DHHC; Domain location=124-157::158-190::191-225::58-90::91-123::356 -420
TAPSAADGAGAEAGAGAAAAEDESLKNDVYTAAAYGDLEKLQRLVEGEGRPVGEPDGGGYHALQWAALNNRVAAAQYILEHGADINAVDHTGQTALHWSAVRGHIQVAELLLKEGAKVDAADLYGYQATHVAAQYGQTAFIYHIVAKWNADPDVPDNDGRSPLHWAAYKGFADSIRLLLFLDAYRGRQDKEGCTPLHWAAIRGNLEACTVLVQVGKKDDLMVKDNTGLTPAQLAADKNHRQVKFFLDNAGRVYDRGCGANTKFGKLSKLGLAPLLWCIIIGMLITYIHSVISVQYATNMTAPFGMFAWSGVFLATAGLVMFYKCSRKDPGFININTRGSQNQRDDEPLLKMELENPALLSGNWSQLCITCKIVRPVRSKHCSTCDRCVEQFDHHCPWVSNCIGKKNKWEFFMFLTLEVLAMIITGSAAIMRIVRDPDSPSSFGAWIHYSAFQHPGVVSFLAMDFFLFFGVAVLTVVQASQIARNITTNEMANSMRYAYLRGPGGRFRNPYDHGIRKNCSDFLLNGYNEDIERLEQTSRTDEEMGMIQMTGAVSQNGDHGNGTDHSCTDSQTNSKSHSKAGSSQCCDHSKRTDRAPLGLGLGLGRNSASRQYVRSLIPL

SEQ ID NO: 67942 - protein, 99 aa, Setaria italica
  Transcript Sequence Number=SeqID_1968
  Gene Ontology: Cellular component=integral to membrane
  Homolog annotation: Hit_ID=B4FET6; Match level="QueryCoverage=65%, HitCoverage=18%, E-value=1e-25, Identity=93%"; Hit description=ATPUP3
LLLVPVVAAYVARRARDRAAPALLTPPRILLAAVGLGVATGVDDFIYAYGLSYLPVSTSAILISTQLAFTVLFAFLIVRQRLTAASVNAVALLTVGAVV

SEQ ID NO: 67943 - protein, 122 aa, Setaria italica
  misc_feature (27)..(27): Xaa can be any naturally occurring amino acid
  misc_feature (85)..(85): Xaa can be any naturally occurring amino acid
  misc_feature (96)..(96): Xaa can be any naturally occurring amino acid
  Transcript Sequence Number=SeqID_1969
  Gene Ontology: Mol. function=protein dimerization activity
  Homolog annotation: Hit_ID=Q2R1C3; Match level="QueryCoverage=99%, HitCoverage=17%, E-value=7e-16, Identity=40%"; Hit description=HAT family dimerisation domain containing protein
YSQMRMSFFKKLFPGAEELKRVKEEYXDFSTCIGEFNDYDSIYDRLILDPLNWSVNYGQCSPLLHGLAIKSVNQPASCSCCERTXSTYNFIHSMKXDQLNPERDEVFGFVHNNVRLMSRKTQ

SEQ ID NO: 67944 - protein, 145 aa, Setaria italica
  misc_feature (30)..(30): Xaa can be any naturally occurring amino acid
  Transcript Sequence Number=SeqID_1970
  Gene Ontology: Mol. function=protein serine/threonine kinase activity; Biological process=protein amino acid phosphorylation
  Homolog annotation: Hit_ID=B8QUJ2; Match level="QueryCoverage=71%, HitCoverage=23%, E-value=5e-12, Identity=42%"; Hit description=NPKL3
VVRGQGLLRMCLKEPRHRPTATQLLDHPFXVSAEPAKHCWASPTSTLNTAFWESEDDEDDDEEASESAAGRISSLASPRSALPDWDSEDGWIDVHSECSLQVSEVPAITVTVGAGFGLRSEPLDAAEVGLHVVDVEDAIRYPTSH

SEQ ID NO: 67945 - protein, 80 aa, Setaria italica
  Transcript Sequence Number=SeqID_1971
  Gene Ontology: Mol. function=triacylglycerol lipase activity; Biological process=lipid metabolic process
  Homolog annotation: Hit_ID=Q53LH1; Match level="QueryCoverage=72%, HitCoverage=8%, E-value=2e-16, Identity=70%"; Hit description=Lipase family protein, expressed
WARVEEARERTESARSERDAAVLAMMLEELQEFESYSRELVASKEVSTDVLAPQSSYTLWVEEWNQLKLRDEVRAILLQF

SEQ ID NO: 67946 - protein, 483 aa, Setaria italica
  misc_feature (51)..(51): Xaa can be any naturally occurring amino acid
  misc_feature (60)..(60): Xaa can be any naturally occurring amino acid
  misc_feature (160)..(160): Xaa can be any naturally occurring amino acid
  Transcript Sequence Number=SeqID_1972
  Gene Ontology: Mol. function=metal ion binding
  Homolog annotation: Hit_ID=B6U0P6; Match level="QueryCoverage=96%, HitCoverage=96%, E-value=0.0, Identity=84%"; Hit description=XBAT32
  Pfam annotation: Domain name=Ank; Domain location=117-148; Score=9.6; E_value=1.5; Accession=PF00023.22; Description=Ankyrin repeat
  Pfam annotation: Domain name=Ank; Domain location=180-212; Score =40.7; E_value=5.6e-09; Accession=PF00023.22; Description=Ankyrin repeat
  Pfam annotation: Domain name=Ank; Domain location=223-255; Score =35.0; E_value=3.1e-07; Accession=PF00023.22; Description=Ankyrin repeat
  Pfam annotation: Domain name=Ank; Domain location=37-82; Score=12.0; E_value=0.67; Accession=PF00023.22; Description=Ankyrin repeat
  Pfam annotation: Domain name=Ank; Domain location=83-115; Score=32.8; E_value=1.4e-06; Accession=PF00023.22; Description=Ankyrin repeat
  Pfam annotation: Domain name=zf-C3HC4; Domain location=321-370; Score= 24.1; E_value=0.00018; Accession=PF00097.17; Description=Zinc finger, C3HC4 type (RING finger)
  Pfam module annotation: Pfam domain module=Ank::Ank::Ank::Ank::Ank::zf -C3HC4; Domain location=117-148::180-212::223-255::37-82::83-115::321- 370
MGILGMMGDSFGCSATGERLVSAARDGDIQEARALLELNPRLARYSTFGIXSATSRRGSXKGHHEIVSLLIESGVNINLRNCRGQTALMQACLYGHWKVVQILVLFKANIHRRDCFSGATAIHFATLKGHTRCIRLLVADYVPSLSEFWNVMHGKSTDEXKKDTFDATSLRRLINGKSDGGVTPLHLAALHGHAESVQLLLDLGASVSEVTVNDGSTIDLIGSGSTPLHYAACGGSAVCCQLLIAAGANMGAENANGYTPLHVARSWHKTSVEGILSKQPEGRIRILPSPYLCLPLMSIIKIARECGWRKTSASSTCQDPCVICLEVECTVAAEGCGHEFCTKCALYLCSTTSSSTSTRGVPGSISCPLCRHAIVSFMKLTSTTPIKELPWTSTSLALCAAGAGTAPNRASSLHRRPDTRRLRSSSVQLGCSSFRSIGSGKLSSLKLNCTGAEEAVPCLISCLRPDVQRSSSYRERIRRYSEF

SEQ ID NO: 67947 - protein, 50 aa, Setaria italica
  Transcript Sequence Number=SeqID_1973
SFLTERSSLHQVSNAFYRLLSFLCRPYLILLDCPCYTNYQLRFMNRCHYL

SEQ ID NO: 67948 - protein, 175 aa, Setaria italica
  Transcript Sequence Number=SeqID_1974
  Homolog annotation: Hit_ID=Q7XGZ6; Match level="QueryCoverage=28%, HitCoverage=11%, E-value=1e-11, Identity=65%"; Hit description=F-box domain containing protein, expressed
  Pfam annotation: Domain name=F-box; Domain location=122-172; Score =19.2; E_value=0.017; Accession=PF00646.25; Description=F-box domain
MDRVAGGGGRRSRRGSRGFGRSGPSAPVEGWTSATGSGMPTPAQDRDFDGGEQGRRGGRGSERPTSVEPSSGGAAAGRASAAGRQSQRGGTMVWRPRRPQSPAQSGSAEDDADAAVSATSPAVPAALDNEDILGEILLRLPPGPSSVPRAGAVCKRWRRLVADPGFLHRFREHHR

SEQ ID NO: 67949 - protein, 172 aa, Setaria italica
  misc_feature (140)..(140): Xaa can be any naturally occurring amino acid
  misc_feature (163)..(163): Xaa can be any naturally occurring amino acid
  Transcript Sequence Number=SeqID_1975
  Gene Ontology: Mol. function=receptor activity; Cellular component =chloroplast
  Homolog annotation: Hit_ID=B9S0A4; Match level="QueryCoverage=100%, HitCoverage=13%, E-value=3e-26, Identity=38%"; Hit description =ATSMC2, putative
IAKSSKAASRSGICQWPDTILEPIWFSKDEVSKEYEECQYKIIVSVGSTKSGILGEIFLNLSNFLNLVDPTAISLPLKRCNSGTVLQLKVQCLGTKSKLSGVRSLRDMSPRLEDRSPTPTNDDMDNRSDCSDSMFNRGVXSSSENHVGTTYQDEPGNRETSFXASGSHRSSN

SEQ ID NO: 67950 - protein, 35 aa, Setaria italica
  Transcript Sequence Number=SeqID_1976
ESNAINTLLKMSRIAESVYDVSQPQKGKLIHSKLN

SEQ ID NO: 67951 - protein, 151 aa, Setaria italica
  Transcript Sequence Number=SeqID_1977
  Gene Ontology: Mol. function=hydrolase activity
  Homolog annotation: Hit_ID=B9S5Y4; Match level="QueryCoverage=92%, HitCoverage=42%, E-value=2e-23, Identity=43%"; Hit description =Monoglyceride lipase, putative
MPADGDAPAPAVHFWGDHPATESDYYAAHGAEGEPSYFTTPDEGARRLFTRAWRPRAPARPKALVFMVHGYGNDISWTFQSTAVFLARSGFACFAADLPGHGRSHGLRAFVPDLDAAVADLLAFFRAVRAREEHAGLPCFLFGESMGGAIC

SEQ ID NO: 67952 - protein, 211 aa, Setaria italica
  Transcript Sequence Number=SeqID_1978
  Gene Ontology: Mol. function=aspartyl esterase activity; Cellular component=cell wall; Biological process=cell wall modification
  Pfam annotation: Domain name=Pectinesterase; Domain location=2-204; Score=7.8; E_value=3.3e-22; Accession=PF01095.11; Description =Pectinesterase
LGVLRSFVWLWQNTAPAPMPGTQGGQAVAFRISGDKAFFFGCGFYGAQDTLCDDAGRHYFRDCYIEGSIDFVFGNARSLYKDCELRSTAERYGSVAAHGRHDPCERTGFAFVNCRVTGTGRLYVGRAMGQYSRIVYAYTYFDSVIAPGGWDDWDHASNKSMTAFFGMYRNWGPGVDAVHGVPWARELDYFAARPFLGKSFVNGYHWLTPDV

SEQ ID NO: 67953 - protein, 176 aa, Setaria italica
  Transcript Sequence Number=SeqID_1979
  Gene Ontology: Mol. function=hydrolase activity, hydrolyzing O -glycosyl compounds; Cellular component=cellular_component; Biological process=carbohydrate metabolic process
  Homolog annotation: Hit_ID=Q94IY5; Match level="QueryCoverage=97%, HitCoverage=20%, E-value=4e-73, Identity=79%"; Hit description =Putative alpha-L-arabinofuranosidase/beta-D-xylosidase isoenzyme ARA- I
  Pfam annotation: Domain name=Glyco_hydro_3_C; Domain location=1-107; Score=5.9; E_value=1.8e-07; Accession=PF01915.14; Description =Glycosyl hydrolase family 3 C terminal domain
PIVLVIMSAGGVDVSFAQSNPKIGAIVWAGYPGEEGGTAIADVLFGKHNPGGRLPLTWFKNEYVNQIPMTSMALRPDAAHGYPGRTYKFYGGPAVLYPFGHGLSYTTFSYASATAGATVTVPIGAWEHCKTLTYKAGAAPSPPPACPALNVASHRCDEVVSFAVTVRNTGGVGTER

SEQ ID NO: 67954 - protein, 204 aa, Setaria italica
  misc_feature (92)..(92): Xaa can be any naturally occurring amino acid
  Transcript Sequence Number=SeqID_1980
  Gene Ontology: Mol. function=hydrolase activity, acting on ester bonds; Cellular component=vacuole; Biological process=lipid metabolic process
  Homolog annotation: Hit_ID=Q10KY9; Match level="QueryCoverage=98%, HitCoverage=59%, E-value=2e-45, Identity=46%"; Hit description=GDSL -like Lipase/Acylhydrolase family protein
AEDFRYGANFAVTSATALSQTFFKEKGLDVDGITPYSLGAQIEWLKKVLDTLGSTNHERREIMASSLFLVGEMGANDYNHPFTQNRTLDFVXPLVPLVIRSIGHSLEALIQLGAKTLYVPGIFPLGCIPRYLFQFRDSGAGAHDPATGCLRWLDDLAVHHNALLKAELAALRRAHRGVSIVYVDYYGEILGIVTSPAEYGFGVR

SEQ ID NO: 67955 - protein, 217 aa, Setaria italica
  Transcript Sequence Number=SeqID_1981
  Subcellular localization annotation: CTP_CleavageSite=90; ConfidenceScore=5.76e-01
PPQGSPTTPSYPSPPSSATTPSYHHSPPPTTPSYPSPPKGSPTPSYPSPPSSSSTPSYHSPPHGAPTPSYPSPPKGSSSPTPVTHAPPPPTSADEPDLRHAPPPGSYGPTPSTPPSHGSPSPPSTGHPTPSPPTEHPGYVLPPHAPGTPSSSPSHPGTPSTTPGTPPSKHCSPPPQGGSPGTGTGGDHGHGHGGKLPFPPVYGVSYASPPPPGKPYY

SEQ ID NO: 67956 - protein, 265 aa, Setaria italica
  Transcript Sequence Number=SeqID_1982
  Homolog annotation: Hit_ID=Q9LNZ8; Match level="QueryCoverage=79%, HitCoverage=67%, E-value=4e-51, Identity=50%"; Hit description =F9C16.20
  Subcellular localization annotation: CTP_CleavageSite=42; ConfidenceScore=5.60e-01
MAARGGALCFSSSSGAAAVTSSRPSRRTGGCRPEPPRFLVVSCDTRTADVYSSLAAKLLGPPTTFNAAKLKVEFAGEDLQLRGKNKKQPFPRAYTLTHCDFTANLTLAVTGPMSSEQLRSWQSTLQRDDVVAEWKEAAGGEMTTTLHVHCFVSGANLLQELAAGFRYYVFCKELPLVLKAVVHGDAALFAERPELMDAKVWVHFHSSSRKYNRIECWGPLREATKRNLQLDLDGRLDELQSAITRRRRKWASPETIFNALVALLL

SEQ ID NO: 67957 - protein, 104 aa, Setaria italica
  Transcript Sequence Number=SeqID_1983
VRSCCSFICCGSTSKTLPENSIDASWIRSYLIQVSSCRIHAAPGSDMIRFKSDIGVWIRSGQVSSVEADFMNTLLISCFTPLLLFQFCYAEGVFRILFCTRNLF

SEQ ID NO: 67958 - protein, 366 aa, Setaria italica
  misc_feature (205)..(205): Xaa can be any naturally occurring amino acid
  misc_feature (357)..(357): Xaa can be any naturally occurring amino acid
  Transcript Sequence Number=SeqID_1984
  Gene Ontology: Cellular component=nucleus; Biological process=cell cycle
  Homolog annotation: Hit_ID=B9SQY5; Match level="QueryCoverage=95%, HitCoverage=80%, E-value=2e-95, Identity=40%"; Hit description =Pentatricopeptide repeat-containing protein, putative
  Pfam annotation: Domain name=PPR; Domain location=101-135; Score =15.2; E_value=0.14; Accession=PF01535.12; Description=PPR repeat
  Pfam annotation: Domain name=PPR; Domain location=136-170; Score=7.9; E_value=1; Accession=PF01535.12; Description=PPR repeat
  Pfam annotation: Domain name=PPR; Domain location=171-204; Score =12.8; E_value=0.27; Accession=PF01535.12; Description=PPR repeat
  Pfam annotation: Domain name=PPR; Domain location=205-239; Score =29.8; E_value=1.1e-05; Accession=PF01535.12; Description=PPR repeat
  Pfam annotation: Domain name=PPR; Domain location=240-274; Score =39.0; E_value=1.8e-08; Accession=PF01535.12; Description=PPR repeat
  Pfam annotation: Domain name=PPR; Domain location=275-309; Score =33.2; E_value=1e-06; Accession=PF01535.12; Description=PPR repeat
  Pfam annotation: Domain name=PPR; Domain location=310-344; Score =15.6; E_value=0.13; Accession=PF01535.12; Description=PPR repeat
  Pfam module annotation: Pfam domain module=PPR::PPR::PPR::PPR::PPR::PP R::PPR; Domain location=101-135::136-170::171-204::205-239::240 -274::275-309::310-344
PGKDRHVRRSVVKDDVNVVLSCITQESSIEECNSALIHLEKHSDEKALNFFDWMKANGKLKGNAYAYHLALQAIAWKENWKMAELLLHEMVADSDCTLDARAFNGLIYVCAKRRLDDWGTRWFRMMLDSEVQPNVSTIGMLMGLYQKTGNLSEAEFTFAKMRNYNIKCVNAYSAMITLYTRLGLFAKSEDAIALMNNDGVVPNMXNWLVRLNVYCQQGKMEEAKLVFQSMVDEGFTLNVVAYNTLITGYGKSTDVQKAKEVFDSLGSAGLVPDETTYRSMVEGFGRADKYEEAILYYRKLKSAGFRPNASNFYTMINLLARHDDNEGAAEILEGMRAAGCQCSSIVTVLVRAYGTVXGRMHKVLPI

SEQ ID NO: 67959 - protein, 57 aa, Setaria italica
  Transcript Sequence Number=SeqID_1985
YTKLLHFSMVSLSNVTCGVVIVAAFFNCQCIECRYSKYQLEFRQQVVELCSLKNLLC

SEQ ID NO: 67960 - protein, 83 aa, Setaria italica
  Transcript Sequence Number=SeqID_1986
  Homolog annotation: Hit_ID=Q9SGU5; Match level="QueryCoverage=97%, HitCoverage=22%, E-value=5e-30, Identity=75%"; Hit description =T6H22.2 protein
GGKKWKKKLADGHLSSTAFDRYSMILFAGIAAEALVYGEAEGGENDENLFRSLCLLLNPPPSVAQMANRARWSVMQSYNLLKW

SEQ ID NO: 67961 - protein, 98 aa, Setaria italica
  Transcript Sequence Number=SeqID_1987
  Homolog annotation: Hit_ID=Q9SGU5; Match level="QueryCoverage=97%, HitCoverage=26%, E-value=4e-37, Identity=77%"; Hit description =T6H22.2 protein
NCRYSMILFAGIAAEALVYGEAEGGENDENLFRSLCLLLNPPPSVAQMANRARWSVMQSYNLLKWHKKAHRAVVKALEDGHSLSVVIRRIEETIASDR

SEQ ID NO: 67962 - protein, 58 aa, Setaria italica
  Transcript Sequence Number=SeqID_1988
NKLLPFSRARAQPFDRELRLLHSHGDLGEVLPIFPTNFRGDFTLPTIIKVRTSSSLLS

SEQ ID NO: 67963 - protein, 237 aa, Setaria italica
  Transcript Sequence Number=SeqID_1989
  Gene Ontology: Mol. function=hydrolase activity, hydrolyzing O -glycosyl compounds; Cellular component=extracellular region; Biological process=carbohydrate metabolic process
  Homolog annotation: Hit_ID=P12257; Match level="QueryCoverage=90%, HitCoverage=69%, E-value=3e-85, Identity=70%"; Hit description =Lichenase-2 (Fragment)
  Pfam annotation: Domain name=Glyco_hydro_17; Domain location=1-220; Score=267.8; E_value=2.5e-77; Accession=PF00332.10; Description =Glycosyl hydrolases family 17
GYIAVGNEVAGKAADLLAPAMENVHSALDAAGLGHIKVTTSVSQAIVVFNQPSGGNFTKEAQGFMGPVLKFLARTGAPLMANIYPYFTYAYNTAGMEVDYALFTAPGTVVKDGKYNYQNLFDATVDAFYEAMAKLGVSDVPVLVSETGWPSGGGKAATPENAKIYNQNLIEHIRKGTPRHPEPIKTYVFSMFNENQKDKGVEQNWGLFYPNMKPVYAISLSTSAAPAPAPSPDSVEE

SEQ ID NO: 67964 - protein, 101 aa, Setaria italica
  Transcript Sequence Number=SeqID_1990
  Gene Ontology: Mol. function=transferase activity, transferring glycosyl groups; Cellular component=chloroplast
  Homolog annotation: Hit_ID=B6SPG7; Match level="QueryCoverage=100%, HitCoverage=13%, E-value=3e-51, Identity=90%"; Hit description =Phosphoribosylanthranilate transferase
HRLGRMDPPLRRECIEHLCEAHSHLWSMRRSKAHFFRVMAALAPLFAALRWFVDVCHWRNPATTIAVHIIYAMLVCCPNLILPTFFLYKFLLGLWNYRRRP

SEQ ID NO: 67965 - protein, 50 aa, Setaria italica
  Transcript Sequence Number=SeqID_1991
  Gene Ontology: Mol. function=protochlorophyllide reductase activity; Cellular component=chloroplast; Biological process=chlorophyll biosynthetic process
  Homolog annotation: Hit_ID=Q8W3D9; Match level="QueryCoverage=92%, HitCoverage=20%, E-value=2e-13, Identity=51%"; Hit description =Protochlorophyllide reductase B, chloroplastic
PVHPLGCRDFLKASRAAKAVVCNAAVYQPTAKEPSYTADGFEMSVGVNHL

SEQ ID NO: 67966 - protein, 28 aa, Setaria italica
  Transcript Sequence Number=SeqID_1992
PPRRNYERHSGTGRGYEMKRDGAGRGNW

SEQ ID NO: 67967 - protein, 75 aa, Setaria italica
  misc_feature (27)..(27): Xaa can be any naturally occurring amino acid
  misc_feature (58)..(58): Xaa can be any naturally occurring amino acid
  misc_feature (60)..(60): Xaa can be any naturally occurring amino acid
  Transcript Sequence Number=SeqID_1993
GERGRGRGGRGYGQNRDFGGDNANGFXQGGYGGGGFGDGAVTGGAEGERERGPRPPYXGXGRRGGYRNGDFGDDS

SEQ ID NO: 67968 - protein, 47 aa, Setaria italica
  misc_feature (31)..(31): Xaa can be any naturally occurring amino acid
  Transcript Sequence Number=SeqID_1994
RRKENAERDERAKKSVSINEFLKPAEGEKVXNGGRGRGRGRGDRGGF

SEQ ID NO: 67969 - protein, 68 aa, Setaria italica
  misc_feature (24)..(24): Xaa can be any naturally occurring amino acid
  Transcript Sequence Number=SeqID_1995
  Subcellular localization annotation: CTP_CleavageSite=9; ConfidenceScore=5.24e-01
VVRSSFRLRAQAVATAPVATPGRXKTTATKDGKKTLRQGVVVITGASSGLGLAAAKALAETGKWHVVM

SEQ ID NO: 67970 - protein, 117 aa, Setaria italica
  Transcript Sequence Number=SeqID_1996
  Gene Ontology: Mol. function=protochlorophyllide reductase activity; Cellular component=chloroplast; Biological process=chlorophyll biosynthetic process
  Homolog annotation: Hit_ID=Q7XKF3; Match level="QueryCoverage=100%, HitCoverage=29%, E-value=3e-17, Identity=52%"; Hit description =Protochlorophyllide reductase A, chloroplastic
  Subcellular localization annotation: CTP_CleavageSite=72; ConfidenceScore=5.61e-01
PKKGNLAAVVKDTAAFLSVPQKVPSLSVRAQAVATAPVATPGASTATKDGKKTLRQGVVVITGASSGLGLAAAKALAETGKWHVVMACRDFLKTAKAAKGRRVYWSVGSSYTIMHLD

SEQ ID NO: 67971 - protein, 57 aa, Setaria italica
  Transcript Sequence Number=SeqID_1997
  Subcellular localization annotation: CTP_CleavageSite=18; ConfidenceScore=5.09e-01
HGRSSHRLRSTNKRVLVRGGKLSPTAGASHGCASGRHHAKPTSFSLISQSFLAFRRR

SEQ ID NO: 67972 - protein, 375 aa, Setaria italica
  misc_feature (118)..(118): Xaa can be any naturally occurring amino acid
  misc_feature (203)..(203): Xaa can be any naturally occurring amino acid
  misc_feature (354)..(354): Xaa can be any naturally occurring amino acid
  Transcript Sequence Number=SeqID_1998
  Homolog annotation: Hit_ID=B6T8U0; Match level="QueryCoverage=59%, HitCoverage=59%, E-value=5e-61, Identity=60%"; Hit description =Plasminogen activator inhibitor 1 RNA-binding protein
  Pfam annotation: Domain name=GRP; Domain location=1-146; Score=-22.4; E_value=0.017; Accession=PF07172.3; Description=Glycine rich protein family
  Pfam annotation: Domain name=HABP4_PAI-RBP1; Domain location=159-271; Score=161.9; E_value=1.8e-45; Accession=PF04774.7; Description =Hyaluronan  mRNA binding family
  Pfam module annotation: Pfam domain module=GRP::HABP4_PAI-RBP1; Domain location=1-146::159-271
MATLNPFDLLGADDGDDPSQLIAAAAAAAQKAEAKKAATAPAGKAAQPAAAAKFPTKPAPPSQAVRDARGGGAPARGGFGRGERGRGRGGRGYGQNRDFGGDNANGFQGGYGGGGFGXGAVTGGAEGERERGPRPPYRGGGRRGGYRNGDFGDDSERPPRRNYERHSGTGRGYEMKRDGAGRGNWGTATDEVLAQETEEALKXREGAPIAEKQGEQNDAPAADENKDNKDAAADEEEKEEDKEMTLEEFEKIREEKRKALLALKAEERRVEVDKDLQSLQPLSNKKENDEVFIKLGSDKDKKKESAERDERAKKSVSINEFLKPAEGERYYGGRGRGRGRGERGGRGGYFGGYXRGPAAAPAIEDQAQFPSLGGK

SEQ ID NO: 67973 - protein, 454 aa, Setaria italica
  misc_feature (131)..(131): Xaa can be any naturally occurring amino acid
  misc_feature (138)..(138): Xaa can be any naturally occurring amino acid
  misc_feature (276)..(276): Xaa can be any naturally occurring amino acid
  Transcript Sequence Number=SeqID_1999
  Homolog annotation: Hit_ID=B6T8U0; Match level="QueryCoverage=50%, HitCoverage=60%, E-value=1e-63, Identity=59%"; Hit description =Plasminogen activator inhibitor 1 RNA-binding protein
  Pfam annotation: Domain name=HABP4_PAI-RBP1; Domain location=237-348; Score=163.4; E_value=6.8e-46; Accession=PF04774.7; Description =Hyaluronan  mRNA binding family
  Subcellular localization annotation: CTP_CleavageSite=53; ConfidenceScore=5.36e-01
MIDGSESFDGAKAYKAARSATCSPCRSSAAAATLALRSSTSSEPWRCGPAGWCCSQKGQFPSPHIQERECSVTFAAAVSMATLNPFDILGAVDNDDPTQLLAAAAAAKQKAEAKKQAAAAAGKGAQPAPAXKLPTKPXPPPQAVRESRSGGAPSRGGYGRGERGRGRGGRGYGQNRDYGSEDANGFQGAYGAGGGARAGGEEGAQDKGPRPPYRGGGGGRRGGYRDGEFGDDSERPPRRTYERHSGTGRGYEMKREGAGRGNWGTTTDEIISQETXKALKLDEKAPVPEKQGALEDAPQAEENKDSKDANAEEEKEEDKEMTLEEFEKIREEKRKALLALKTEERKVEVDKDLQSMQPLSNKKENDEIFVKLGSDKDALKKKENAERDERAKKSVSINEFLKPAEGERFYGGRGRGRGRGDRGGFRGGYGGGYRAPPAAPAIQDQSQFPSLGGK

SEQ ID NO: 67974 - protein, 394 aa, Setaria italica
  misc_feature (187)..(187): Xaa can be any naturally occurring amino acid
  Transcript Sequence Number=SeqID_2000
  Gene Ontology: Mol. function=protochlorophyllide reductase activity; Cellular component=chloroplast; Biological process=chlorophyll biosynthetic process
  Homolog annotation: Hit_ID=Q70L71; Match level="QueryCoverage=93%, HitCoverage=100%, E-value=0.0, Identity=89%"; Hit description=NADPH -protochlorophyllide oxidoreductase (Fragment)
  Pfam annotation: Domain name=KR; Domain location=82-245; Score=-88.5; E_value=0.059; Accession=PF08659.2; Description=KR domain
  Pfam annotation: Domain name=adh_short; Domain location=82-248; Score= 2.6; E_value=9.3e-06; Accession=PF00106.17; Description=short chain dehydrogenase
  Pfam module annotation: Pfam domain module=KR::adh_short; Domain location=82-245::82-248
  Subcellular localization annotation: CTP_CleavageSite=15; ConfidenceScore=5.10e-01
MALQAAASFLPSALSARKEGTAKESAFLGVRLADGLKLETSALGLRTKRVSTSVAIRAQAAAVSSPSVTPASPSDKKTLRQGTAIITGASSGLGLATAKALAETGKWHVIMGCRDFLKASRAAKAAGMEKDSYTIVHLDLASLDSVRQFVKNVRQLEMPIDVVVCNAAVYQPTAKEPSYTADGFEMXVGVNHLGHFLLARELLSDLQSSDYPSKRLIIVGSITGNTNTLAGNVPPKANLGDLRGLAGGLNGVGSSVMIDGGEFDGAKAYKDSKVCNMLTMQEFHRRYHEETGVTFASLYPGCIATTGLFREHIPLFRLLFPPFQKYITKGYVSEDEAGKRLAQVVSDPSLTKSGVYWSWNKNSASFENQLSEEASDAEKAKKLWEISEKLVGLA

SEQ ID NO: 67975 - protein, 61 aa, Setaria italica
  Transcript Sequence Number=SeqID_2001
TVALTYCSKNIPDGCYAFVQRKFSLASHETQTVAYIKACKPIFCPISNFQILNDLNVMQSS

SEQ ID NO: 67976 - protein, 202 aa, Setaria italica
  Transcript Sequence Number=SeqID_2002
  Gene Ontology: Cellular component=integral to membrane
  Homolog annotation: Hit_ID=B6TW89; Match level="QueryCoverage=100%, HitCoverage=82%, E-value=1e-82, Identity=84%"; Hit description =Cytochrome b561
  Pfam annotation: Domain name=Cytochrom_B561; Domain location=19-200; Score=93.3; E_value=8.3e-25; Accession=PF03188.8; Description =Eukaryotic cytochrome b561
MAHEIFGGHHHSIVASRVAMLAHVLFLTTAVLMLVWLLHYRGGINIQSEDPEQIFNVHPFVMSWGFILLIGEAILAYSTIPMDHRTQKMAHMMIHLVGLILGIFGVYAAFKFHAAAVVPDLMSLHSWLGITAIALFGLQWLFGFVTFWLPAAHERKRNAAKPAHVMAGLAIFMLAVCAAQTGLVEKSAAAASAAEMKLINVT

SEQ ID NO: 67977 - protein, 335 aa, Setaria italica
  misc_feature (171)..(171): Xaa can be any naturally occurring amino acid
  Transcript Sequence Number=SeqID_2003
  Gene Ontology: Mol. function=hydrolase activity, hydrolyzing O -glycosyl compounds; Cellular component=vacuole; Biological process =carbohydrate metabolic process
  Homolog annotation: Hit_ID=B6TVA3; Match level="QueryCoverage=81%, HitCoverage=85%, E-value=1e-125, Identity=80%"; Hit description =Hevamine-A
  Pfam annotation: Domain name=Glyco_hydro_18; Domain location=62-322; Score=176.7; E_value=6.8e-50; Accession=PF00704.20; Description =Glycosyl hydrolases family 18
  Subcellular localization annotation: CTP_CleavageSite=42; ConfidenceScore=5.21e-01
STDSSAIKRPRTSEQDPSFRAVPLAHYIPRTRSRNKMARSLPAMVLVAALALAGLAAGARAGDIAIYWGQNGNEGTLAQTCATGNYKFVNVAFLPTFGKGQTPVLNLAGHCNPATNGCTGVGADIKSCQSRGIKVFLSIGGGVGSYGLSSPADARKVAKYLWDNYLGGNSXSRPLGDAVLDGIDFDIESGGSLYWDDLARELKSYSRWGRKPVYLAAAPQCPFPDASLGAALATGRFDYVWVQFYNNPPCQYSASAGVGGLASAWARWTSIRAGRVFLGLPAAPQAAGSGFVPTSDLVAQVLPVVKNATKYGGIMLWSRFYDGLTGYSDAVKSQV

SEQ ID NO: 67978 - protein, 156 aa, Setaria italica
  misc_feature (132)..(132): Xaa can be any naturally occurring amino acid
  Transcript Sequence Number=SeqID_2004
  Gene Ontology: Mol. function=nucleoside-triphosphatase activity; Biological process=defense response
  Homolog annotation: Hit_ID=Q69KF7; Match level="QueryCoverage=99%, HitCoverage=14%, E-value=3e-26, Identity=45%"; Hit description =Pollen signalling protein with adenylyl cyclase activity-like
  Pfam annotation: Domain name=LRR_1; Domain location=22-43; Score =11.0; E_value=2.4; Accession=PF00560.25; Description=Leucine Rich Repeat
  Pfam annotation: Domain name=LRR_1; Domain location=45-66; Score =12.3; E_value=1.4; Accession=PF00560.25; Description=Leucine Rich Repeat
  Pfam annotation: Domain name=LRR_1; Domain location=68-90; Score=4.0; E_value=53; Accession=PF00560.25; Description=Leucine Rich Repeat
  Pfam annotation: Domain name=LRR_1; Domain location=92-113; Score =6.6; E_value=17; Accession=PF00560.25; Description=Leucine Rich Repeat
  Pfam module annotation: Pfam domain module=LRR_1::LRR_1::LRR_1::LRR _1; Domain location=22-43::45-66::68-90::92-113
IILSGSPPNDRALGDIFQRLTHLRVLDLGDTQIECVARSLGSMTHLRYLSFANTQIREIPSTIENLRMLQFLILKNCTRLNALTESLGRLTNLRTLDISGAGLNQVKFRFCMMKELNCLQGFIVSPGGARNXWQFQELRSLDKLTSLKMLRLERTL

SEQ ID NO: 67979 - protein, 58 aa, Setaria italica
  Transcript Sequence Number=SeqID_2005
NHSLYGHLFLIQAHEPYKKVRYSRRSATYTCQKFRRRTISSENGHSSQTSLDAVMPHS

SEQ ID NO: 67980 - protein, 79 aa, Setaria italica
  Transcript Sequence Number=SeqID_2006
  Gene Ontology: Mol. function=serine-type endopeptidase activity; Biological process=negative regulation of catalytic activity
  Homolog annotation: Hit_ID=Q5ZBS1; Match level="QueryCoverage=97%, HitCoverage=25%, E-value=9e-27, Identity=79%"; Hit description =Subtilisin-like serine proteinase-like protein
LAAMDDAIHDGVDILSLSLAVDEDSFGALHAIQNGITVVYAGGNSGPRSQVLFNTAPWVITVAASKIDRSFPTTITLVG

SEQ ID NO: 67981 - protein, 138 aa, Setaria italica
  misc_feature (50)..(50): Xaa can be any naturally occurring amino acid
  Transcript Sequence Number=SeqID_2007
  Subcellular localization annotation: CTP_CleavageSite=53; ConfidenceScore=5.63e-01
MARRKRARSSDSSASGMAGSVLGGSRRGARRKTTGMERSRSRESTNGEVXGVVAGGVISGQRLPRLRPLRSGSAECEQPAANAAADLGCVVWWRWGAGIRFFSERKSSGDLRAIDVDRPPQIGRREKGPATWILRFGG

SEQ ID NO: 67982 - protein, 263 aa, Setaria italica
  misc_feature (172)..(172): Xaa can be any naturally occurring amino acid
  Transcript Sequence Number=SeqID_2008
  Gene Ontology: Cellular component=extracellular region; Biological process=plant-type cell wall organization and biogenesis
  Homolog annotation: Hit_ID=Q852A1; Match level="QueryCoverage=91%, HitCoverage=90%, E-value=1e-127, Identity=91%"; Hit description =Expansin-A7
  Pfam annotation: Domain name=DPBB_1; Domain location=69-158; Score =151.5; E_value=2.6e-42; Accession=PF03330.10; Description=Rare lipoprotein A (RlpA)-like double
  Pfam annotation: Domain name=Pollen_allerg_1; Domain location=169 -247; Score=150.6; E_value=4.8e-42; Accession=PF01357.13; Description= Pollen allergen
  Pfam module annotation: Pfam domain module=DPBB_1::Pollen_allerg_1; Domain location=69-158::169-247
MAAMPALLLLVAAAAALVLPAAARIPGVYGGGAWQSAHATFYGGSDASGTMGGACGYGNLYSQGYGVNNAALSTALFNEGQSCGAFFEIKCENQPGWRWCHPGSPSILVTATNFCPPNYALPSDDGGWCNPPRPHFDLAMPMFLHIAEYRAGIVPVSYRRVPCRKSGGIRFXTINGFRYFNLVLITNVAGAGDIVRASVKGSGTGWLPMSRNWGQNWQSNAILVGDALSFRVTGSDRRTSTSWNAAPRNWQFGQTFEGKNFRV

SEQ ID NO: 67983 - protein, 140 aa, Setaria italica
  misc_feature (104)..(104): Xaa can be any naturally occurring amino acid
  Transcript Sequence Number=SeqID_2009
  Subcellular localization annotation: CTP_CleavageSite=28; ConfidenceScore=5.42e-01
KLARKDPCPSSWKRFPSDCLDPWPRRSRCTSSWQLLCCHRPWRRRSSSTRRTRLLRSPLHDWSACGGSTTPASSPSPSSSSTRSTSSSHASGICHRGCTGHSRXRTRRTPGRAPSCSAPSGAPWPRPPPRRRRCCSPATA

SEQ ID NO: 67984 - protein, 88 aa, Setaria italica
  Transcript Sequence Number=SeqID_2010
  Gene Ontology: Mol. function=DNA binding
  Homolog annotation: Hit_ID=B6SR16; Match level="QueryCoverage=79%, HitCoverage=80%, E-value=2e-22, Identity=70%"; Hit description =SANT/MYB protein
  Pfam annotation: Domain name=Myb_DNA-binding; Domain location=15-65; Score=29.1; E_value=1.8e-05; Accession=PF00249.23; Description=Myb -like DNA-binding domain
MSGSRSSSSHNVNMASTWSKREEKLFEEALAYYGEGTPDRWHKVSRAMGGSKTADEVRRQYEILEDDVKLIESGRVPFPRYNTQGAWN

SEQ ID NO: 67985 - protein, 511 aa, Setaria italica
  Transcript Sequence Number=SeqID_2011
  Gene Ontology: Cellular component=plasma membrane
  Homolog annotation: Hit_ID=B2ZAS0; Match level="QueryCoverage=77%, HitCoverage=87%, E-value=1e-64, Identity=36%"; Hit description=UNE1 -like protein
  Pfam annotation: Domain name=DUF641; Domain location=105-243; Score =215.8; E_value=1.1e-61; Accession=PF04859.4; Description=Plant protein of unknown function (DUF641)
MEAQVAAPHHHHHQQKAANLARTFTKLLRRKRADAAAQGVPEAPASVVGAGDYEEERTEPPVVPSLSKLKLSGNLAAAYSFDAFFRNAAEKKASAAAGGGGGVGRPAPGEVTPEAAADSLLATLFAGVSAVKAAYAQLQLAQFPYDAEAIQSADAAVVAELTRLSDTKRRYLRDPAAAARGAAAAGHTTLAAHAEEQRHLLKTYQITARKLESELRAKDAEAERIRSSLTAELRAERALEARLHPGRTLASLDDLHLSGLNPTHFLTALRHTVKSIRSFSKSMLNSMQSAGWDLAAAAVAVHPGVPLRRAGDTKFVFESYVAMKMFANFHRRDFNFSFLDEREFYDRRRFFEEFTELKAEPASAFLDVRNPRWGGFGKFLRAKYLSLVHARMETAFFGRLEQRGIVSAGPGFPESSWFAEFAEMARRVWLLHCLFFAFDGGAEEDGASIFQVRTGARFSEVYMESVSDGRADDAAVAADDRVVGFTVLPGFRVGRTLIQCRVYLSRPVRRP

SEQ ID NO: 67986 - protein, 86 aa, Setaria italica
  Transcript Sequence Number=SeqID_2012
AIHHYIWTWVCALNKSNKSSSSNQYGSFIHHIPSLLHHLGVAADPDAHALRVVGYRNRYLREMQQERPKGELHPLRLVSFREQQPG

SEQ ID NO: 67987 - protein, 48 aa, Setaria italica
  Transcript Sequence Number=SeqID_2013
  Homolog annotation: Hit_ID=Q9LR38; Match level="QueryCoverage=95%, HitCoverage=2%, E-value=9e-11, Identity=67%"; Hit description =F26F24.8
CSYPPFFDDIAARLLPVIPLIIYRLIENDATDIADRVLAFYSSLLAFH

SEQ ID NO: 67988 - protein, 96 aa, Setaria italica
  Transcript Sequence Number=SeqID_2014
LKDTTDNDDALKNMSMIITARSILRLDEDTGYSYCNSSDPTASLLQRFKGSRIIHALVSCDIRMCFARALDASLHILSSWDQSSGARGDVARLASN

SEQ ID NO: 67989 - protein, 336 aa, Setaria italica
  Transcript Sequence Number=SeqID_2015
  Gene Ontology: Mol. function=transporter activity; Cellular component= mitochondrial inner membrane; Biological process=transport
  Homolog annotation: Hit_ID=B6T7U0; Match level="QueryCoverage=93%, HitCoverage=94%, E-value=1e-152, Identity=84%"; Hit description =Grave disease carrier protein
  Pfam annotation: Domain name=Mito_carr; Domain location=121-225; Score=117.3; E_value=5e-32; Accession=PF00153.19; Description =Mitochondrial carrier protein
  Pfam annotation: Domain name=Mito_carr; Domain location=228-325; Score=86.4; E_value=9.9e-23; Accession=PF00153.19; Description =Mitochondrial carrier protein
  Pfam annotation: Domain name=Mito_carr; Domain location=25-115; Score= 98.3; E_value=2.6e-26; Accession=PF00153.19; Description =Mitochondrial carrier protein
  Pfam module annotation: Pfam domain module=Mito_carr::Mito_carr::Mito_ carr; Domain location=121-225::228-325::25-115
GSSSQGSAAVAAARVDLCALDLMPVFAKEMIAGGVAGAFSKTAIAPLERVKILLQTRTNEFGSLGVLKSLKKLRQHDGVKGFYKGNGASVLRIVPYAALHFMAYERYRCWILNNCPSVGTGPLVDLLAGSASGGTAVLCTYPLDLARTKLAFQVNSSDQLSSAIKRASPHPTYGGIMDVFRGVYSEGGVRALYRGVGPTLMGILPYAGLKFYIYEGLKTRVPEDYKNSVTLKLSCGAAAGLFGQTLTYPLDVVRRQMQVQNQQQNGLFGCPRITGTFQGLIAIKQTQGWRQLFAGLSLNYIKVVPSVAIGFTAYDTMKHLLKIPPREKVRSGDGPA

SEQ ID NO: 67990 - protein, 43 aa, Setaria italica
  Transcript Sequence Number=SeqID_2016
INFNSRVSLSLRPRIEDVSLLSDHRQDASSTSRCLSFPFVLSF

SEQ ID NO: 67991 - protein, 104 aa, Setaria italica
  Transcript Sequence Number=SeqID_2017
  Gene Ontology: Mol. function=microtubule motor activity; Cellular component=microtubule associated complex; Biological process =microtubule-based movement
  Homolog annotation: Hit_ID=Q2QP07; Match level="QueryCoverage=82%, HitCoverage=10%, E-value=9e-17, Identity=53%"; Hit description =Kinesin motor protein, putative, expressed
DELNENRNLVWNKWLTLPSLDSATSCSNQEMAMSTMGLKASGIANRGVSTIKKPEVTSMRNTNPASKSPLQQKKLQTPTRNRNQLSLSSIGGRRTPNSKVNIAK

SEQ ID NO: 67992 - protein, 89 aa, Setaria italica
  Transcript Sequence Number=SeqID_2018
LHKVLRGDHRMMALYELLRTTIEIIEELITRIFGYIHMTSDSKLVKPVTTLLVCTRRGYSLNIYVKATLIHHMLQPPFHVMSNNNLHFL

SEQ ID NO: 67993 - protein, 295 aa, Setaria italica
  misc_feature (12)..(12): Xaa can be any naturally occurring amino acid
  Transcript Sequence Number=SeqID_2019
  Homolog annotation: Hit_ID=Q656E2; Match level="QueryCoverage=93%, HitCoverage=61%, E-value=2e-54, Identity=40%"; Hit description =Endoribonuclease E-like protein
FSREWDNIRPHXFKRCQERADAEPNPEMKHKLLRLSRKLKEIDEDVQRHNELLEVVKSTPSDKIGAIVAKRRKDFTVEFFNHLYYVAESYHDEPEKQTELAKLGNDCVDALQAHDDTTGSLEALNAAELKLKDILNSSSVDAACRKIDDLAEKKELDSALVLMLSKAWSAAKGTDITKSEAKDIMFHLYMTAVANLQRQMPKDIRILKHLIMIEDPEERLSALNDAFTPGPELQGDNVDTLYTSPEALHTWASAIVDAYYNSREGTLLGQARDLMNPKIIRRVEEIVKIIKDKYL

SEQ ID NO: 67994 - protein, 52 aa, Setaria italica
  Transcript Sequence Number=SeqID_2020
LFYNYWQINIYSLYSEVNVIETTLQKIPLPAFEWLEIGLKNNINNKFLVLNY

SEQ ID NO: 67995 - protein, 121 aa, Setaria italica
  Transcript Sequence Number=SeqID_2021
  Gene Ontology: Mol. function=ubiquitin-protein ligase activity; Cellular component=ubiquitin ligase complex; Biological process =ubiquitin-dependent protein catabolic process
  Homolog annotation: Hit_ID=B9RMH5; Match level="QueryCoverage=94%, HitCoverage=13%, E-value=5e-21, Identity=48%"; Hit description =Ubiquitin-protein ligase, putative
VLVVLLSFLVMCTADDKCIVPVLQEGVVPSLVSISAAGTGRGREKAQKLLKLFREQRQRDAPPPQQPQQQQQQSQLTEAGNGGGAIVCHRESKPLCKSKSRKLGRTLSSLWKNRGFSLYQC

SEQ ID NO: 67996 - protein, 327 aa, Setaria italica
  Transcript Sequence Number=SeqID_2022
  Gene Ontology: Mol. function=hydrolase activity, hydrolyzing O -glycosyl compounds; Cellular component=vacuole; Biological process =carbohydrate metabolic process
  Homolog annotation: Hit_ID=P49175; Match level="QueryCoverage=99%, HitCoverage=48%, E-value=1e-152, Identity=82%"; Hit description=Beta- fructofuranosidase 1
  Pfam annotation: Domain name=Glyco_hydro_32C; Domain location=159 -273; Score=170.0; E_value=7.1e-48; Accession=PF08244.4; Description =Glycosyl hydrolases family 32 C termi
  Pfam annotation: Domain name=Glyco_hydro_32N; Domain location=1-118; Score=-74.6; E_value=1.4e-08; Accession=PF00251.12; Description =Glycosyl hydrolases family 32 N termi
  Pfam module annotation: Pfam domain module=Glyco_hydro_32C::Glyco _hydro_32N; Domain location=159-273::1-118
GLETSAPPGPGVKHVVKASLDDDKHDYYAIGTYDAAADTWTPDDTVNDVGIGLRYDYGKFYASKTFYDPVLRRRVLWGWVGETDSERADILKGWASLQSIPRTVLLDTKTGSNLLQWPVVEVENLRMSGKSFGGVALGHGSVVPLDVGKATQLDIEAEFEVDAAAVEAVTEAEVGFNCSTSAGAAGRGMLGPFGLLVLADEDRSEQTAVYFYLVKGTDGSLKTFFCQDELRGSKANDLVKRVYGSVVPVLNGENLSVRILVDHSIVESFAQGGRTCITSRVYPTRAIYDSARVFLFNNATNVHVTAKSVKIWQLNSAYIRPYSASSL

SEQ ID NO: 67997 - protein, 142 aa, Setaria italica
  Transcript Sequence Number=SeqID_2023
  Gene Ontology: Mol. function=transcription regulator activity; Cellular component=nucleus; Biological process=tapetal cell differentiation
  Homolog annotation: Hit_ID=Q84WX1; Match level="QueryCoverage=77%, HitCoverage=21%, E-value=2e-18, Identity=41%"; Hit description=BHLH transcription factor
CSVPWEGGDHPCMAATAAASAGYGGGSVEAALRPLVGADAWDYCIYWRLSLDERFLEMTGLCCSSEFEAQVSAHGELPSSIPLDSSSAGMHAEAIMSNQPIWQTSSCVPELPTSYSTELGSAGPRTRLLVPIAGGLVELFAA

SEQ ID NO: 67998 - protein, 155 aa, Setaria italica
  misc_feature (108)..(108): Xaa can be any naturally occurring amino acid
  Transcript Sequence Number=SeqID_2024
  Gene Ontology: Mol. function=binding
  Homolog annotation: Hit_ID=Q69MJ7; Match level="QueryCoverage=100%, HitCoverage=36%, E-value=4e-55, Identity=58%"; Hit description =Pentatricopeptide (PPR) repeat-containing protein / CBS domain -containing protein-like
  Pfam annotation: Domain name=PPR; Domain location=14-48; Score=26.6; E_value=1e-04; Accession=PF01535.12; Description=PPR repeat
  Pfam annotation: Domain name=PPR; Domain location=56-90; Score=21.6; E_value=0.0032; Accession=PF01535.12; Description=PPR repeat
  Pfam module annotation: Pfam domain module=PPR::PPR; Domain location =14-48::56-90
KDEILRQGLKPDRLTYNTIISACVKSAEIDKAVQFLEDMKEEANRESNPELLPDAVTYTTLLKGLGNSRDLYSVVKIVVEMKSSLLSIDRTAYTAMIDALLACGSIDXDLARGLLRRIVNEKECFSWTSRVGLVAVKVESLSGFTNSLLRPHVFP

SEQ ID NO: 67999 - protein, 140 aa, Setaria italica
  Transcript Sequence Number=SeqID_2025
  Homolog annotation: Hit_ID=Q69MJ7; Match level="QueryCoverage=92%, HitCoverage=23%, E-value=1e-58, Identity=83%"; Hit description =Pentatricopeptide (PPR) repeat-containing protein / CBS domain -containing protein-like
SMVQGLGNSRDLYSVVKIVVEMKSSLLSIDRTAYTAMIDALLACGSIDGALCIFGDIIKQAGKNKDLRPKPHLYLSIMRAFATRGDVDMVMRLNKRMWPDSVGSISRAAKEEAHELLMEAAINDNQVEMKPRMDLYCLAM

SEQ ID NO: 68000 - protein, 66 aa, Setaria italica
  Transcript Sequence Number=SeqID_2026
  Homolog annotation: Hit_ID=Q69MJ7; Match level="QueryCoverage=90%, HitCoverage=10%, E-value=4e-23, Identity=86%"; Hit description =Pentatricopeptide (PPR) repeat-containing protein / CBS domain -containing protein-like
  Pfam annotation: Domain name=PPR; Domain location=30-63; Score=18.9; E_value=0.021; Accession=PF01535.12; Description=PPR repeat
LQGYIKSNFPLGALTVKDEILRQGLKPDRLTYNTIISACVKSAEIDKAVQFLEDMKVSHKCWKGQF

SEQ ID NO: 68001 - protein, 394 aa, Setaria italica
  misc_feature (20)..(20): Xaa can be any naturally occurring amino acid
  Transcript Sequence Number=SeqID_2027
  Gene Ontology: Mol. function=binding; Cellular component=mitochondrion
  Homolog annotation: Hit_ID=Q69MJ7; Match level="QueryCoverage=94%, HitCoverage=61%, E-value=1e-177, Identity=83%"; Hit description =Pentatricopeptide (PPR) repeat-containing protein / CBS domain -containing protein-like
  Pfam annotation: Domain name=PPR; Domain location=135-169; Score =26.2; E_value=0.00013; Accession=PF01535.12; Description=PPR repeat
  Pfam annotation: Domain name=PPR; Domain location=170-204; Score =26.6; E_value=1e-04; Accession=PF01535.12; Description=PPR repeat
  Pfam annotation: Domain name=PPR; Domain location=212-246; Score =21.6; E_value=0.0032; Accession=PF01535.12; Description=PPR repeat
  Pfam annotation: Domain name=PPR; Domain location=24-58; Score=17.3; E_value=0.064; Accession=PF01535.12; Description=PPR repeat
  Pfam annotation: Domain name=PPR; Domain location=247-280; Score=6.9; E_value=1.3; Accession=PF01535.12; Description=PPR repeat
  Pfam annotation: Domain name=PPR; Domain location=60-94; Score=18.5; E_value=0.029; Accession=PF01535.12; Description=PPR repeat
  Pfam module annotation: Pfam domain module=PPR::PPR::PPR::PPR::PPR::PP R; Domain location=135-169::170-204::212-246::24-58::247-280::60-94
AAQIMEEVEAARRRVRGGGXLNTIVMNAVLDACVRCGDVDRALRLFEDMRGPRGCGIDGVSYGILLKGLGIARRIDEAFEILESIEKDSSIGSPRLSPHLICGFLNALIEGGDMRRANALVARFRKVLYEGHSVLLYNLLMKGYIKSNFPLGALTVKDEILRQGLKPDRLTYNTIISACVKSAEIDKAVQFLEDMKEEANRESNPELLPDAVTYTTLLKGLGNSRDLYSVVKIVVEMKSSLLSIDRTAYTAMIDALLACGSIDGALCIFGDIIKQAGKNKDLRPKPHLYLSIMRAFATRGDVDMVMRLNKRMWPDSVGSISRAAKEEAHELLMEAAINDNQIDLARGLLRRIVNEKECFSWTSRVGLVAVKVESLSGFTNSLLRPHVFPQIYSL

SEQ ID NO: 68002 - protein, 225 aa, Setaria italica
  Transcript Sequence Number=SeqID_2028
  Homolog annotation: Hit_ID=B9RNM2; Match level="QueryCoverage=86%, HitCoverage=32%, E-value=3e-44, Identity=43%"; Hit description =Pentatricopeptide repeat-containing protein, putative
  Pfam annotation: Domain name=CBS; Domain location=80-181; Score=22.7; E_value=0.001; Accession=PF00571.20; Description=CBS domain
LPISRSCRPCIYSSLIKSFQIDLARGLLRRIVNEKECFSWTSRVGLVAVKVESLSGFTNSLLRPHVFPQIILNDPVEKYMVPFQESRPLPADLILRKVVMRFLKDRAVPLVDDWGGCVGIVHRDDCTKLDAPLLSMLRGPPLCVPTSTTVEHVIDLLLREKSEMVVVVKSGNMYEGSYTSSSRPLGVFSLAILWNFTGDYSPDIHDAGVSRVTTLKQDAEACNCG

SEQ ID NO: 68003 - protein, 107 aa, Setaria italica
  Transcript Sequence Number=SeqID_2029
  Gene Ontology: Mol. function=transporter activity; Cellular component= membrane; Biological process=oligopeptide transport
  Homolog annotation: Hit_ID=B9T1Z5; Match level="QueryCoverage=71%, HitCoverage=13%, E-value=2e-22, Identity=60%"; Hit description =Peptide transporter, putative
  Subcellular localization annotation: CTP_CleavageSite=63; ConfidenceScore=5.34e-01
CFVLGFPFVSLFFSRGLTLFWFVFFTLPYQEFPKTLRSTATAMAPLLIALGFYLSTVFVDVVRRVTAWLPGDINQGRLDNVYWALAVTATANFGYFLVCVSLYKSRK

SEQ ID NO: 68004 - protein, 153 aa, Setaria italica
  misc_feature (20)..(20): Xaa can be any naturally occurring amino acid
  Transcript Sequence Number=SeqID_2030
  Gene Ontology: Mol. function=phosphotransferase activity, alcohol group as acceptor
  Homolog annotation: Hit_ID=Q10D72; Match level="QueryCoverage=94%, HitCoverage=3%, E-value=4e-70, Identity=92%"; Hit description =Phosphatidylinositol 3-and 4-kinase family protein, expressed
  Subcellular localization annotation: CTP_CleavageSite=44; ConfidenceScore=5.03e-01
AVLAGSKFLADMEVLVHDPXLAASHNSGRLRPLFACFSTVLQIMASGVAERNNLRELVAGPLEALAPQLLRCASVIASKLGWSERMEEASRCLVLLAEILQERFAEFYVLFVDVLAQSLEVASSAQLVAALKTNLQVLSLQNLGLCASSVGRL

SEQ ID NO: 68005 - protein, 132 aa, Setaria italica
  Transcript Sequence Number=SeqID_2031
  Gene Ontology: Mol. function=phosphopantetheine binding; Cellular component=mitochondrial respiratory chain; Biological process=fatty acid biosynthetic process
  Homolog annotation: Hit_ID=Q10LF1; Match level="QueryCoverage=77%, HitCoverage=75%, E-value=8e-48, Identity=90%"; Hit description=Acyl carrier protein
  Pfam annotation: Domain name=PP-binding; Domain location=57-125; Score=65.6; E_value=1.9e-16; Accession=PF00550.17; Description =Phosphopantetheine attachment site
MAAARSLILRRLRLAAAPSSAASFRPAAALQEALWGRRWMSSEDAKGSFLDKGEVTDRIIKTVRNFQKIDDPSKVTPDAHFKNDLGLDSLDTVEVVMALEEEFGFEIPDNEADKIDSIKVAVDFIASHPQAK

SEQ ID NO: 68006 - protein, 66 aa, Setaria italica
  Transcript Sequence Number=SeqID_2032
QMNLQMSKASSSQARWSRLSTLKRMTGASVEAIWVVELSEAVIIVFQKSPDARVYTFRHTYIYIAH

SEQ ID NO: 68007 - protein, 491 aa, Setaria italica
  misc_feature (453)..(453): Xaa can be any naturally occurring amino acid
  Transcript Sequence Number=SeqID_2033
  Gene Ontology: Mol. function=diacylglycerol kinase activity; Cellular component=plasma membrane; Biological process=activation of protein kinase C activity
  Homolog annotation: Hit_ID=Q9LRB0; Match level="QueryCoverage=93%, HitCoverage=61%, E-value=1e-135, Identity=55%"; Hit description =Sphingoid long-chain bases kinase 1
  Pfam annotation: Domain name=DAGK_cat; Domain location=229-362; Score= 151.6; E_value=2.4e-42; Accession=PF00781.16; Description =Diacylglycerol kinase catalytic domain
  Subcellular localization annotation: CTP_CleavageSite=38; ConfidenceScore=5.48e-01
MDGSELENPTSRSSSQKSSRRSSSRRSQKSAGQHSSPSTQEKRSKLRSLRQKHLVIDDTDVKKGKSHDHKIDVADERSNFLGYEVYAGKLIFDKKNKSTSDNNQLPANGKAGAVDARLTSKALIWGSSVLLLEDVISVSYNSGVKYFTVHAYPTKKSLFGKTRRVQTDFCFVASILDEAILWVTCFAEQSIYVNLLPRPGVSSINQDSDNPLSESLFDQPPIKCKSPQRVLVILNPRSGHGRSSKVFHEKAEPIFKLAGFQMEVVKTTHAGHAKSLVSTFDFSTCPDGIVCVGGDGIVNEVLNGLLIRSDRTEAVSIPVGIIPAGSDNSLVWTVLGVRDPITASLLIVKGGFTALDILAVEWIQSGQIHFGSTVSYYGFISDVLELSEKYQKKFGPLRYFVAGILKFLCLPSYFYELEYLPLSKEMATNGKGTDQDKNQLSNVYTDVMHGRSXKREGIPRASSLSSIDSIMTPSRMSLGDVDTSGSTVAST

SEQ ID NO: 68008 - protein, 373 aa, Setaria italica
  Transcript Sequence Number=SeqID_2034
  Gene Ontology: Mol. function=diacylglycerol kinase activity; Cellular component=plasma membrane; Biological process=activation of protein kinase C activity
  Homolog annotation: Hit_ID=Q5KR50; Match level="QueryCoverage=94%, HitCoverage=43%, E-value=1e-122, Identity=61%"; Hit description =Sphingosine kinase
SNCLGCPGTFWKSKKFGPLSHEISKRTKFLCLPSYFYELEYLPLSKEMATNGKGTDQDKNQLSNVYTDVMHGRSKREGIPRASSLSSIDSIMTPSRMSLGDVDTSGSTVASTEPSDYVRGLDPKAKRLSLGRSNIVSEPEEVLHPQPHHGSFWPRTRSKARTERNSVGVTSTNDTQLSWAAPSMHDKEDISSTISDPGPIWDSEPKWDTGPKWDSELTWEPDHPIELPGPPEDREIGAPMELVPNLDEKWVVRKGHFLGVLICNHSCKTVQSLSSQVVAPKATHDDNSLDLLLVGGKGRWKLLRFFIQLQFGRHLSLPYVEYVKVKSVKLKPGANTHNGCGIDGELCRVKGQVLCSLLPEQCRLIGRQCRQSI

SEQ ID NO: 68009 - protein, 371 aa, Setaria italica
  Transcript Sequence Number=SeqID_2035
  Gene Ontology: Mol. function=nucleotide binding; Biological process =defense response
  Homolog annotation: Hit_ID=Q8LL84; Match level="QueryCoverage=100%, HitCoverage=41%, E-value=1e-118, Identity=55%"; Hit description=NBS -LRR-like protein
  Pfam annotation: Domain name=NACHT; Domain location=121-275; Score= -14.6; E_value=0.0011; Accession=PF05729.4; Description=NACHT domain
  Pfam annotation: Domain name=NB-ARC; Domain location=102-371; Score =212.7; E_value=9.7e-61; Accession=PF00931.14; Description=NB-ARC domain
  Pfam module annotation: Pfam domain module=NACHT::NB-ARC; Domain location=121-275::102-371
AELRNLSFHVEDVMDKYSYHAFHLREENSFHKVYRGAHYATVFSELADEVVKIKCEIEQVKKLPKDYFHDNLLLPRSRIATDQRVSQGCLPELVQDDDLVGIKVNQSNMIGWLNSNASDSSVITVSGMGGLGKTTLVLNVYDREMTNFPVHAWITVSKSYTIDALLRKLLKEIGYIENPSAEIDKMDAITLRQEIRKKLEGGKKCMVVLDDVWDREVYLKMEDIFKNLKASHVIITTRNDDVASLASSTERHLQLQPLNSDDAFNLFCRRAFSNRIDKKCPPELKNVADSIVNKCKGLPLAIISMGSLMSTKKPIEHAWNQVYNQFQSELLNTGDVQAILNLSYNDLPGNIRNCFLYCSLFPEDYIMSRET

SEQ ID NO: 68010 - protein, 95 aa, Setaria italica
  Transcript Sequence Number=SeqID_2036
  Homolog annotation: Hit_ID=Q7XQK3; Match level="QueryCoverage=98%, HitCoverage=23%, E-value=2e-20, Identity=47%"; Hit description =OSJNBa0017B10.5 protein
AIRLGKNFRELLMKHGDDEVEVKDIVERLMTDTTKADKDTLPNTGCDPNWEHGLSSIFIEVQTDQGLYGTRSTAVLSVNYDGEASLYEKYLESGI

SEQ ID NO: 68011 - protein, 90 aa, Setaria italica
  misc_feature (63)..(63): Xaa can be any naturally occurring amino acid
  misc_feature (86)..(86): Xaa can be any naturally occurring amino acid
  Transcript Sequence Number=SeqID_2037
  Homolog annotation: Hit_ID=A9X6Y0; Match level="QueryCoverage=92%, HitCoverage=30%, E-value=4e-20, Identity=56%"; Hit description =Cuticular water permeability
MKLSSTYHFSTRASIIVCTVQSNKSPLEVATEVAEEADEYNGFNLILADLTTNIMVYVSNRPXGQPTTIQLVSPGLHVLSNARLDXPWQK

SEQ ID NO: 68012 - protein, 266 aa, Setaria italica
  Transcript Sequence Number=SeqID_2038
  Homolog annotation: Hit_ID=B6T6S7; Match level="QueryCoverage=100%, HitCoverage=98%, E-value=6e-88, Identity=55%"; Hit description =Ser/Thr-rich protein T10 in DGCR region
  Pfam annotation: Domain name=DUF833; Domain location=1-263; Score =217.3; E_value=3.9e-62; Accession=PF05742.4; Description=Protein of unknown function (DUF833)
MCIAAWIWQAHPVHQLLLLLNRDEFHSRPTKAVGWWGEGSKKILGGRDVLGGGTWMGCTKDGRLAFLTNVLEPDAMPGARTRGDLPLRYLQSNKSPLEVATEVAEEADEYNGFNLILADLTTNIMVYVSNRPKGQPTTIQLVSPGLHVLSNARLDSPWQKAIRLGKNFRELLMKHGDDEVEVKDIVERLMTDTTKADKDTLPNTGCDPNWEHGLSSIFIEVQTDQGLYGTRSTAVLSVNYDGEASLYEKYLESGIWKDHTVNYQID

SEQ ID NO: 68013 - protein, 71 aa, Setaria italica
  Transcript Sequence Number=SeqID_2039
  Gene Ontology: Mol. function=transferase activity
  Homolog annotation: Hit_ID=Q8GTB9; Match level="QueryCoverage=83%, HitCoverage=25%, E-value=1e-19, Identity=79%"; Hit description =Glutathione transferase F4
MAPMKLYGWVVSPWMARVLVCLEEAGAEYEVVPMSRSGGDHRRPEHLARNVSTFGAILVHLTVVEQSCCWL

SEQ ID NO: 68014 - protein, 87 aa, Setaria italica
  Transcript Sequence Number=SeqID_2040
  Gene Ontology: Mol. function=transferase activity; Biological process= auxin mediated signaling pathway
  Homolog annotation: Hit_ID=Q9FQD1; Match level="QueryCoverage=80%, HitCoverage=31%, E-value=3e-28, Identity=82%"; Hit description =Glutathione S-transferase GST 8
  Pfam annotation: Domain name=GST_N; Domain location=2-67; Score=45.2; E_value=2.5e-10; Accession=PF02798.12; Description=Glutathione S -transferase, N-terminal domain
MAPMKLYGWVVSPWMARVLVCLEEAGAEYEVVPMSRSGGDHRRPEHLARNPFGEIPVLEDGDLTLYRKPTCAPMPFFFRLHQDCCSC

SEQ ID NO: 68015 - protein, 222 aa, Setaria italica
  Transcript Sequence Number=SeqID_2041
  Gene Ontology: Mol. function=glutathione transferase activity; Biological process=auxin mediated signaling pathway
  Homolog annotation: Hit_ID=Q9FQD1; Match level="QueryCoverage=99%, HitCoverage=98%, E-value=2e-99, Identity=76%"; Hit description =Glutathione S-transferase GST 8
  Pfam annotation: Domain name=GST_C; Domain location=110-201; Score =75.3; E_value=2.3e-19; Accession=PF00043.17; Description=Glutathione S-transferase, C-terminal domain
  Pfam annotation: Domain name=GST_N; Domain location=2-77; Score=94.4; E_value=4e-25; Accession=PF02798.12; Description=Glutathione S -transferase, N-terminal domain
  Pfam module annotation: Pfam domain module=GST_C::GST_N; Domain location=110-201::2-77
MAPMKLYGWVVSPWMARVLVCLEEAGAEYEVVPMSRSGGDHRRPEHLARNPFGEIPVLEDGDLTLYQSRAIARYILRKYKPELLGDGSLKQSATVDVWVEVESHQLEPVLKTIVVHCIIGPYVGRERDQAAVDESLGKLRALLPVYEARLSACRYLAGDEVTAADLCHFGFMRYFMATEYAGVVDEYPHVKGWWDALLARPSVKKIIAGMPPDFGFGSGKIP

SEQ ID NO: 68016 - protein, 81 aa, Setaria italica
  Transcript Sequence Number=SeqID_2042
  Gene Ontology: Mol. function=protein serine/threonine kinase activity; Biological process=protein amino acid phosphorylation
  Homolog annotation: Hit_ID=Q60DG4; Match level="QueryCoverage=85%, HitCoverage=7%, E-value=9e-27, Identity=81%"; Hit description =Serine/threonine-protein kinase Nek4
MESRMDQYEIMEQIGRGAFGAAILVNHKIEKKKYVLKKIRLARQTERCRKSAHQEMALIARLQHPYIVDFFISSSISPPSQ

SEQ ID NO: 68017 - protein, 333 aa, Setaria italica
  Transcript Sequence Number=SeqID_2043
  Gene Ontology: Cellular component=mitochondrion
  Homolog annotation: Hit_ID=Q8S5M5; Match level="QueryCoverage=100%, HitCoverage=58%, E-value=1e-161, Identity=44%"; Hit description =Pentatricopeptide, putative, expressed
  Pfam annotation: Domain name=PPR; Domain location=126-160; Score =47.3; E_value=5.9e-11; Accession=PF01535.12; Description=PPR repeat
  Pfam annotation: Domain name=PPR; Domain location=161-195; Score =34.7; E_value=3.6e-07; Accession=PF01535.12; Description=PPR repeat
  Pfam annotation: Domain name=PPR; Domain location=196-230; Score =42.8; E_value=1.4e-09; Accession=PF01535.12; Description=PPR repeat
  Pfam annotation: Domain name=PPR; Domain location=231-265; Score =30.0; E_value=9.6e-06; Accession=PF01535.12; Description=PPR repeat
  Pfam annotation: Domain name=PPR; Domain location=25-59; Score=22.1; E_value=0.0024; Accession=PF01535.12; Description=PPR repeat
  Pfam annotation: Domain name=PPR; Domain location=266-300; Score =37.1; E_value=7.2e-08; Accession=PF01535.12; Description=PPR repeat
  Pfam annotation: Domain name=PPR; Domain location=301-333; Score=6.0; E_value=1.8; Accession=PF01535.12; Description=PPR repeat
  Pfam annotation: Domain name=PPR; Domain location=91-125; Score=39.7; E_value=1.1e-08; Accession=PF01535.12; Description=PPR repeat
  Pfam module annotation: Pfam domain module=PPR::PPR::PPR::PPR::PPR::PP R::PPR::PPR; Domain location=126-160::161-195::196-230::231-265::25 -59::266-300::301-333::91-125
DQGGVAEAATLLDEMFLMGCPADVNTFDDLVRGLCGLGRVRDAARLVDRMMMKGCTPSMLTYGFLMEGLCRARQVDEALAMLGRVPEVNVVLFNTVIGGCLAEGKLDKATELYEIMGSKGCPPDVHTYSILVHGLCKLGRFGSAMRLLGEMVEKGCAPNVMTYTTLLHSFCRNGMWDDTRVILDQMSAKGLSMNSQGYNGMIYALCKDGKFDDAMRLIQEMKSQGCKPDICTYNTVIYHLCNNDRMEEAEHVFGNLLEEGVVANGITYNTLIHALLRSGRWQQGLRLANEMVLNGCSLDVISYNGLIKALCKEGNVDRSMGLLQEMMEKGIKP

SEQ ID NO: 68018 - protein, 95 aa, Setaria italica
  Transcript Sequence Number=SeqID_2044
  Subcellular localization annotation: CTP_CleavageSite=40; ConfidenceScore=5.61e-01
SPAAAAVRVAPRAPLHPVGAAGGSHRASRIASGAPGASRRVAAGRCQRRRQREDREAAAWRRRSSGDAAADEGSVAAIRGGAGSIMCGERHMFFF

SEQ ID NO: 68019 - protein, 92 aa, Setaria italica
  misc_feature (83)..(83): Xaa can be any naturally occurring amino acid
  Transcript Sequence Number=SeqID_2045
  Gene Ontology: Mol. function=hydrolase activity
  Homolog annotation: Hit_ID=Q10KC9; Match level="QueryCoverage=98%, HitCoverage=26%, E-value=6e-36, Identity=78%"; Hit description =Hydrolase, alpha/beta fold family protein, putative, expressed
DNVLINDRKLSDLPKIRQPTLIIWGEQDQVFPMELAHRLERHLGDNSRLVVVKNAGHAANIEKSKEVCKSIVEYFQEQDSSAXNGGKEVQLY

SEQ ID NO: 68020 - protein, 77 aa, Setaria italica
  misc_feature (67)..(67): Xaa can be any naturally occurring amino acid
  Transcript Sequence Number=SeqID_2046
  Subcellular localization annotation: CTP_CleavageSite=25; ConfidenceScore=5.38e-01
MSPPAMLLPVVCSAAPSCSPLCPVTASHVAARVPRRVDVGAALRSYADPLVAQVPDRPPLADSSILXSPYPAAPDDI

SEQ ID NO: 68021 - protein, 95 aa, Setaria italica
  Transcript Sequence Number=SeqID_2047
  Gene Ontology: Mol. function=protein serine/threonine kinase activity; Biological process=protein amino acid phosphorylation
  Homolog annotation: Hit_ID=Q656X4; Match level="QueryCoverage=100%, HitCoverage=14%, E-value=8e-28, Identity=62%"; Hit description =Putative receptor serine/threonine kinase PR5K
VKSDELADLIDKHSTDMQVHKQEIVDMMKLAMWCLQIEPKRRPQMSEVIKVLEGHMNAESNIDHKFVATSQTMFGISENTGSSDPPQASYLSAPR

SEQ ID NO: 68022 - protein, 222 aa, Setaria italica
  Transcript Sequence Number=SeqID_2048
  Subcellular localization annotation: CTP_CleavageSite=54; ConfidenceScore=5.15e-01
LQPDLSPWRRGSSPDAAPPLAGTRALSSLPRYPGAPSPHGLGKVLGYEPRSHLSGAQVFTFVWFFLLVASNGSPMQKVQQEFTRRTKQSQGAELKQSDAQKSSEGVAPKVMAFSPLEAAIAKPRSSPLTSESSKVRRSEIAPIASLYMIPAMLLVSRNSISTSLLVGAVFHQVYMFHKEILLDYVHHDITRKWSLIYFKLLLLVMAKDTIMSITIIPFGDCS

SEQ ID NO: 68023 - protein, 222 aa, Setaria italica
  Transcript Sequence Number=SeqID_2049
  Gene Ontology: Cellular component=mitochondrion
  Homolog annotation: Hit_ID=Q5IA02; Match level="QueryCoverage=40%, HitCoverage=85%, E-value=6e-10, Identity=36%"; Hit description =Succinate oxido-reductase subunit 4 (Fragment)
MASRILARSKALPLAAALTRAAADAAPPLAGTRALSSLPRYPGAPSPHGLGKVLGYEPRSHLSGAQVLPRWFSSVASNGSPMQKSQISETNKSGAELKQSDAQKSSEGVAPKVMAFSPLEAAIAKPRSSPLTSESSKVRRSEIATEVTFYMIPAMLLVSRNSISTSLLVGAVFHQVYMFHKEILLDYVHHDITRKWSLIYFKLLLLVMAKDTIMYFNLFPFF

SEQ ID NO: 68024 - protein, 164 aa, Setaria italica
  Transcript Sequence Number=SeqID_2050
  Gene Ontology: Mol. function=microtubule motor activity; Cellular component=microtubule associated complex; Biological process =microtubule-based movement
TQKIPKGPTEPHQQTMYEQSLSSMHQPRNHISDSSIEIYQASSMPSSELSEEHCKEVSYIETNELRRSQAFFPSDHDGTDIDEEKHGESMINTADSAIKLYTCDSDPSSDTGKPNNDESLALKRCVIISRDSVLTRSKSCRASFMVIPNSWFDDSMDMKMTEPG

SEQ ID NO: 68025 - protein, 126 aa, Setaria italica
  Transcript Sequence Number=SeqID_2051
  Gene Ontology: Mol. function=nucleoside-triphosphatase activity; Biological process=DNA integration
  Homolog annotation: Hit_ID=B6SVG1; Match level="QueryCoverage=97%, HitCoverage=24%, E-value=5e-42, Identity=65%"; Hit description =ATPase 3
  Subcellular localization annotation: CTP_CleavageSite=54; ConfidenceScore=5.03e-01
MAWVDKWTGLGSALASFLFLWSVVQSHLPAAFHHRLSTWGTNLASCFSPYLHITISEYGAERFSRTDLFLAVEAYLSDACARRARRLRAELGKDSSNLQVSVDDNDEVTDTFSGAKLWWYAAKTSQ

SEQ ID NO: 68026 - protein, 301 aa, Setaria italica
  Transcript Sequence Number=SeqID_2052
  Gene Ontology: Mol. function=nucleoside-triphosphatase activity
  Homolog annotation: Hit_ID=Q2QSF2; Match level="QueryCoverage=100%, HitCoverage=58%, E-value=1e-132, Identity=74%"; Hit description=Cell Division Protein AAA ATPase family, putative, expressed
  Pfam annotation: Domain name=AAA; Domain location=118-301; Score =41.1; E_value=4.4e-09; Accession=PF00004.21; Description=ATPase family associated with various cellular activities (AAA)
SSFSFYPGEEERRFYQLVFHRRHRDLVVASYLPYVLAEGRAVTVRNRERRLFTNNPSSSWNPYRTRNGVWSHVPFEHPATFATLAMDPADKEAIVDDLEAFREAKDYYAKVGKPWKRGYLLYGPPGTGKSTMIAAMANYLDYDVYDLELTAVKNNTELRKLFIETTGKSIIVIEDIDCSVDLTGKRKDKKKKPDDGDGSDDKPKLPVDPDKDDSTKVTLSGLLNFIDGLWSACGGERIIIFTTNHKEKLDQALIRRGRMDKHIEMSYCSFEAFKVLAKNYLDITEHDLFGEVRRLLEETQM

SEQ ID NO: 68027 - protein, 351 aa, Setaria italica
  misc_feature (42)..(42): Xaa can be any naturally occurring amino acid
  Transcript Sequence Number=SeqID_2053
  Gene Ontology: Mol. function=nucleoside-triphosphatase activity
  Homolog annotation: Hit_ID=B6SVY2; Match level="QueryCoverage=86%, HitCoverage=59%, E-value=1e-119, Identity=72%"; Hit description =ATPase 2
  Pfam annotation: Domain name=AAA; Domain location=120-326; Score =59.4; E_value=1.4e-14; Accession=PF00004.21; Description=ATPase family associated with various cellular activities (AAA)
  Pfam annotation: Domain name=AAA_5; Domain location=120-273; Score= -22.5; E_value=0.07; Accession=PF07728.6; Description=ATPase family associated with various
  Pfam module annotation: Pfam domain module=AAA::AAA_5; Domain location=120-326::120-273
GSAGAGAGAQEERRFYRLFFLERHRDLVLDTYLPLVRQRGRXAVMVKNRQRKLFTNISTHQWSDGGYMRSAWSHVVFEHPKTFATLAMDPAKKKEITDDLDMFKNGKDYYARVGKAWKRGYLLYGPPGTGKSAMIAAMANYLDYDIYDIELTSVHSNTDLRKLFIETTSKSIIVIEDIDCSLDLTGARKKKKAAAEDDDKKDGAAAAAKAAAGGDRKDTSSKVTLSGLLNFIDGLWSACGGERIIVFTTNHVEKLDPALIRRGRMDKHIEMSYCGFEAFKFLAKTYLDVDAHPLFDAVEELLREVEMTPADVAENLTPKSLEDNPDSCLAALVKALEEAKEKKKASGGGGS

SEQ ID NO: 68028 - protein, 502 aa, Setaria italica
  Transcript Sequence Number=SeqID_2054
  Gene Ontology: Mol. function=nucleoside-triphosphatase activity
  Homolog annotation: Hit_ID=Q69S60; Match level="QueryCoverage=88%, HitCoverage=87%, E-value=1e-121, Identity=53%"; Hit description=AAA -type ATPase-like
  Pfam annotation: Domain name=AAA; Domain location=283-481; Score =64.6; E_value=3.6e-16; Accession=PF00004.21; Description=ATPase family associated with various cellular activities (AAA)
  Pfam annotation: Domain name=AAA_5; Domain location=283-428; Score= -6.5; E_value=0.0033; Accession=PF07728.6; Description=ATPase family associated with various
  Pfam module annotation: Pfam domain module=AAA::AAA_5; Domain location=283-481::283-428
  Subcellular localization annotation: CTP_CleavageSite=98; ConfidenceScore=5.40e-01
PAPGPPANIGSAATMAEPGKVVRRWQRWAFANLGSAFTNFGSLWFILAPLVSLVATYAPRRLFQTYFNLFLRRRTRRVLNVVDPYVTIDISEPGSDVRYSRYGPVSDNDGTYEEVKAYLSGACSHEDARELRAEGAKDGDGLVISMRDGQDVADEFRGVPLWWSSVVDKDVQGQRQGKRRFQRLTFHLRHRRLVVDEYLPHVRRRGREILFSNRRRRLYTNSKSRDVYSYESKSWSYIDFDHPTTFNTLAMDRAKKKDIMDDLDAFRNNRDFYRRTGKPWKRGYLLYGPPGTGKSTMVAAMANYLDYDIYDVELTVVNTNTDLRRLLIETTSKSIIVIEDIDCSLDLTGDRARQRRRPGGPPKDDDRYYADDRPRNTVTLSGLLNFIDGLWSASGGERIVVFTTNHVDKLDPALIRRGRMDMHIEMSYCGFEAFQTLAKNYLDIDDHELFGSVEEILREVKLTPADVAECLMTAKRAGAGEPSPCLEILIDELKKRAEEKEK

SEQ ID NO: 68029 - protein, 488 aa, Setaria italica
  Transcript Sequence Number=SeqID_2055
  Gene Ontology: Mol. function=nucleoside-triphosphatase activity
  Homolog annotation: Hit_ID=B6SVG1; Match level="QueryCoverage=94%, HitCoverage=91%, E-value=0.0, Identity=74%"; Hit description=ATPase 3
  Pfam annotation: Domain name=AAA; Domain location=246-461; Score =60.3; E_value=7.3e-15; Accession=PF00004.21; Description=ATPase family associated with various cellular activities (AAA)
  Pfam annotation: Domain name=AAA_5; Domain location=246-395; Score= -21.2; E_value=0.055; Accession=PF07728.6; Description=ATPase family associated with various
  Pfam module annotation: Pfam domain module=AAA::AAA_5; Domain location=246-461::246-395
  Subcellular localization annotation: CTP_CleavageSite=54; ConfidenceScore=5.11e-01
MAAVDKWTGFGSALASFLFLWSVVQRHIPATLTLRLATWSNKLASYFNPYLEVTISEYGAERFRRSDFYLAVEAYLSDACARRARKLRAELGKDSKNLQVSVDDYDEVTDTFHGATIWWHASKKIARSNVISIYPGEDERRFYRVIFHSRHRDLVVDSYLPFVLEEGRAVIVRNRERRLFTNNPSSSWSSYRGGKKQWSHVPFEHPATFDTLAMDPDDKEAIIDDLEAFREAKDYYTKVGKPWKRGYLLYGPPGTGKSTMIAAMANFLDYDVYDLELTAVKNNTELRKLFIETTGKSIIVIEDIDCSVDLTGKRKDKKAEKKTDGEGDDKPKLPVDPDKDDSTKVTLSGLLNFIDGLWSACGGERIIIFTTNHKEKLDPALIRRGRMDKHIEMSYCSFEAFKVLAKNYLDITEHDLFGEVRRLLEETQISPADVAENLMPMSKKKKRDTNACLAALVEALNKAKEEAAAAKAKEEAEAKEKAEAEAKE

SEQ ID NO: 68030 - protein, 531 aa, Setaria italica
  Transcript Sequence Number=SeqID_2056
  Gene Ontology: Mol. function=nucleoside-triphosphatase activity
  Homolog annotation: Hit_ID=B6SVY2; Match level="QueryCoverage=88%, HitCoverage=91%, E-value=0.0, Identity=71%"; Hit description=ATPase 2
  Pfam annotation: Domain name=AAA; Domain location=273-486; Score =55.3; E_value=2.3e-13; Accession=PF00004.21; Description=ATPase family associated with various cellular activities (AAA)
GSQAASEREIEREAAMEASSLWSGLNSGIVLSLLAVVWTMLWQGLQGLQLQHLFGRHSRRISRRLAAALDPYLTVTVAEYDGGRMRRSDAYKEAQAYLQRATREAGGGVRHLKAEPDKDPDRLVLSMDDNEEVADEFKGATVWWLAYTAPPREDGGGSPYFWGRGVARAERRFYRLFFLERDRDLVLGEYLPHVRREGRAVMVENRQRKLFTNISGDTFWSGSSWSHVVFEHPKTFATLAMDPARKKEIMDDLDAFRKGKDYYARVGKAWKRGYLLYGPPGTGKSTMIAAMANYLDYDVYDIELTSVRTNTDLRKLFIETTSKSIIVIEDIDCSLDLTGKRKKKKKKKADGDGQSKDGGEKKDGAEAGKEEEEKADDKGGSKVTLSGVLNFIDGLWSACGGERIIVFTTNHVEKLDPALIRRGRMDKHIEMSYCCFESFRFLARVYLDVDAHPLFDAVAALLREVDMTPADVAENLTPKGPGEDADSCLAALVEALEKAKEKALAKKAKEDAALAKKKAGGKAKEVAADEA

SEQ ID NO: 68031 - protein, 55 aa, Setaria italica
  Transcript Sequence Number=SeqID_2057
  Gene Ontology: Cellular component=extracellular region; Biological process=sexual reproduction
  Homolog annotation: Hit_ID=B6TT10; Match level="QueryCoverage=85%, HitCoverage=17%, E-value=3e-19, Identity=93%"; Hit description=Beta -expansin 3
  Pfam annotation: Domain name=Pollen_allerg_1; Domain location=1-50; Score=8.3; E_value=0.00045; Accession=PF01357.13; Description=Pollen allergen
  Subcellular localization annotation: CTP_CleavageSite=33; ConfidenceScore=5.13e-01
MQANSAQWQDMQHIWGATWSLTPGPLVGPFSVRLTTLTGKQTLTAQDVRTVLITP

SEQ ID NO: 68032 - protein, 213 aa, Setaria italica
  Transcript Sequence Number=SeqID_2058
  Homolog annotation: Hit_ID=Q9SHG2; Match level="QueryCoverage=99%, HitCoverage=46%, E-value=3e-70, Identity=61%"; Hit description =F20D23.27 protein
FHNRTALDDAGRWLRGGLFGTYELDAADPGSGDVSYYSVTWEKEVAASAGAGGWAFHHKLRTSNEYPWLMLYLRSDATRGFSGGYHYDTRGMTKQVPESPDFKVRVTLEVKQGGGPNSQFYLMDMGSCWKNDGRPCDGDAATDVTRYSEMIINPETPAWCRPSRIDQCPPWHTFRNGTRVHRTDAARFPYGAYHVYCSPGNARRAEQPTTYCD

SEQ ID NO: 68033 - protein, 77 aa, Setaria italica
  Transcript Sequence Number=SeqID_2059
  Gene Ontology: Mol. function=hydrolase activity, hydrolyzing O -glycosyl compounds; Cellular component=extracellular region; Biological process=carbohydrate metabolic process
  Homolog annotation: Hit_ID=Q0E0P0; Match level="QueryCoverage=70%, HitCoverage=9%, E-value=4e-15, Identity=68%"; Hit description=Beta -fructofuranosidase, insoluble isoenzyme 1
MGTPQRVLAPWAVLLLALQLAGASHVIHRSLEAEAAPPSVPASIVNSLLRTGYHFQPPMNWINDPNAPMYYKGWYHL

SEQ ID NO: 68034 - protein, 123 aa, Setaria italica
  Transcript Sequence Number=SeqID_2060
  Gene Ontology: Mol. function=hydrolase activity, hydrolyzing O -glycosyl compounds; Cellular component=extracellular region; Biological process=carbohydrate metabolic process
  Homolog annotation: Hit_ID=B6U1H5; Match level="QueryCoverage=89%, HitCoverage=20%, E-value=1e-44, Identity=75%"; Hit description=Beta -fructofuranosidase, insoluble isoenzyme 2
  Pfam annotation: Domain name=Glyco_hydro_32N; Domain location=1-119; Score=-182.7; E_value=0.036; Accession=PF00251.12; Description =Glycosyl hydrolases family 32 N termi
LLIGSVTGPAHGVAYVYRSRDFKRWTRVERPLHSAATGMWECPDFYPVEAAGRREGLDTSVSGRRARKYVLKNSLDLRRYDYYTVGTYDRRAERYVPDDPAGDERHLRYELTDKLNLNVNVKT

SEQ ID NO: 68035 - protein, 190 aa, Setaria italica
  Transcript Sequence Number=SeqID_2061
  Gene Ontology: Mol. function=hydrolase activity, hydrolyzing O -glycosyl compounds; Cellular component=extracellular region; Biological process=carbohydrate metabolic process
  Homolog annotation: Hit_ID=Q2XQ21; Match level="QueryCoverage=97%, HitCoverage=32%, E-value=1e-82, Identity=79%"; Hit description=Cell wall invertase BObetaFRUCT1
  Pfam annotation: Domain name=Glyco_hydro_32N; Domain location=2-185; Score=101.3; E_value=3.4e-27; Accession=PF00251.12; Description =Glycosyl hydrolases family 32 N termi
SYDRNINATQFRDPTTAWLSGGQWRLLIGSAAEGGSRGVAYVYRSRDFRRWRRVERPLHSAATGMWECPDFYPVEAGYADGLEASASGPKVKYVLKNSLDLRRYDYYTVGTYDEKAERYVPDDAAGDEHHLRYDYGNFYASKTFYDPAKKRRVLWGWANESDTRTHDVAKGWAGIQAIPRKVWLDFSGKQ

SEQ ID NO: 68036 - protein, 109 aa, Setaria italica
  Transcript Sequence Number=SeqID_2062
  Gene Ontology: Mol. function=hydrolase activity, hydrolyzing O -glycosyl compounds; Cellular component=extracellular region; Biological process=carbohydrate metabolic process
  Homolog annotation: Hit_ID=A2I9A2; Match level="QueryCoverage=100%, HitCoverage=20%, E-value=9e-52, Identity=92%"; Hit description=Cell wall invertase (Fragment)
  Pfam annotation: Domain name=Glyco_hydro_32C; Domain location=1-61; Score=45.1; E_value=2.7e-10; Accession=PF08244.4; Description =Glycosyl hydrolases family 32 C termi
PARGGDKPVVLMCTDPTKSSLNPNLYQPTFAGFVDTDISDGKISLRSLIDRSVVESFGAGGKTCILSRVYPSLATGKNARLYVFNGGKADVKVSRLTAWEMKKPLMNGA

SEQ ID NO: 68037 - protein, 308 aa, Setaria italica
  Transcript Sequence Number=SeqID_2063
  Gene Ontology: Mol. function=hydrolase activity, hydrolyzing O -glycosyl compounds; Cellular component=extracellular region; Biological process=carbohydrate metabolic process
  Homolog annotation: Hit_ID=Q2XQ21; Match level="QueryCoverage=100%, HitCoverage=52%, E-value=1e-150, Identity=82%"; Hit description=Cell wall invertase BObetaFRUCT1
  Pfam annotation: Domain name=Glyco_hydro_32C; Domain location=141 -260; Score=168.2; E_value=2.3e-47; Accession=PF08244.4; Description =Glycosyl hydrolases family 32 C termi
  Pfam annotation: Domain name=Glyco_hydro_32N; Domain location=1-100; Score=-147.2; E_value=0.00028; Accession=PF00251.12; Description =Glycosyl hydrolases family 32 N termi
  Pfam module annotation: Pfam domain module=Glyco_hydro_32C::Glyco _hydro_32N; Domain location=141-260::1-100
KASLDLRRYDYYTVGTYDEKAERYVPDDAAGDEHHLRYDYGNFYASKTFYDPAKKRRVLWGWANESDTRTHDVAKGWAGIQAIPRKVWLDFSGKQVLQWPIEEVEALRHQPVTLKDKVIKPGKHVEVTGLQTAQADVEVSFALSSLEGAEPLDPALAHDAERLCGVKGADVQGGIGPFGLWVLASADLQERTAVFFRVFKAAGKDKPVVLMCTDPTKSSLNPDLYLPTFAGFVDTELPDGKISLRTLIDRSVVESFGAGGKTCILSRVYPSLAIDKDAHLYVFNNGKADVKVSLLTAWQMKKPLMNGA

SEQ ID NO: 68038 - protein, 93 aa, Setaria italica
  Transcript Sequence Number=SeqID_2064
RNQLQLKGILSTTNYTRQAVAAGAWIEFRPEPSAESRDLLPRGTVARSNPHEMESKSNLFTTTKLSFLEGRRSRPPLLCCFFGLRRKATAGNQ

SEQ ID NO: 68039 - protein, 43 aa, Setaria italica
  Transcript Sequence Number=SeqID_2065
LMTSVIYPIRYTNLAAYLPLGVHYHLIQSSHLNYVGTPGTLCF

SEQ ID NO: 68040 - protein, 69 aa, Setaria italica
  Transcript Sequence Number=SeqID_2066
RQEVSQLKRRLAEMELSMATLNAKLHRALSKVAHMEADNAAAARASIERGRSGDVALAVWAERRAPSRP

SEQ ID NO: 68041 - protein, 119 aa, Setaria italica
  Transcript Sequence Number=SeqID_2067
  Gene Ontology: Mol. function=transferase activity
  Homolog annotation: Hit_ID=B6SYB6; Match level="QueryCoverage=100%, HitCoverage=23%, E-value=1e-41, Identity=66%"; Hit description =Glycosyltransferase
  Pfam annotation: Domain name=DUF563; Domain location=1-119; Score= -102.7; E_value=0.012; Accession=PF04577.6; Description=Protein of unknown function (DUF563)
VLEYHYWWLGRYGAVLERLTNYKIVDFRYDRRVHCFDEMIVGLRIHGELVVDPKLMPNGKSIKDFQALLHQGYSRASSSSASPPVPLPLAPPSRPCPRPAKPKLLIFIRKQNRVLLNLP

SEQ ID NO: 68042 - protein, 560 aa, Setaria italica
  misc_feature (29)..(29): Xaa can be any naturally occurring amino acid
  Transcript Sequence Number=SeqID_2068
  Gene Ontology: Mol. function=protein binding
  Homolog annotation: Hit_ID=Q2RBJ7; Match level="QueryCoverage=90%, HitCoverage=76%, E-value=0.0, Identity=53%"; Hit description=Leucine Rich Repeat family protein, expressed
  Pfam annotation: Domain name=LRR_1; Domain location=147-170; Score =11.4; E_value=2; Accession=PF00560.25; Description=Leucine Rich Repeat
  Pfam annotation: Domain name=LRR_1; Domain location=173-196; Score =7.6; E_value=11; Accession=PF00560.25; Description=Leucine Rich Repeat
  Pfam annotation: Domain name=LRR_1; Domain location=198-214; Score =1.1; E_value=1.9e+02; Accession=PF00560.25; Description=Leucine Rich Repeat
  Pfam annotation: Domain name=LRR_1; Domain location=223-245; Score =5.9; E_value=22; Accession=PF00560.25; Description=Leucine Rich Repeat
  Pfam annotation: Domain name=LRR_1; Domain location=249-272; Score =9.2; E_value=5.3; Accession=PF00560.25; Description=Leucine Rich Repeat
  Pfam annotation: Domain name=LRR_1; Domain location=301-323; Score =6.0; E_value=22; Accession=PF00560.25; Description=Leucine Rich Repeat
  Pfam annotation: Domain name=LRR_1; Domain location=325-352; Score =3.1; E_value=77; Accession=PF00560.25; Description=Leucine Rich Repeat
  Pfam annotation: Domain name=LRR_1; Domain location=377-400; Score =7.1; E_value=13; Accession=PF00560.25; Description=Leucine Rich Repeat
  Pfam annotation: Domain name=LRR_1; Domain location=402-429; Score =4.3; E_value=47; Accession=PF00560.25; Description=Leucine Rich Repeat
  Pfam annotation: Domain name=LRR_1; Domain location=44-66; Score=4.9; E_value=36; Accession=PF00560.25; Description=Leucine Rich Repeat
  Pfam annotation: Domain name=LRR_1; Domain location=454-476; Score =11.8; E_value=1.6; Accession=PF00560.25; Description=Leucine Rich Repeat
  Pfam annotation: Domain name=LRR_1; Domain location=70-92; Score=3.3; E_value=71; Accession=PF00560.25; Description=Leucine Rich Repeat
  Pfam annotation: Domain name=LRR_1; Domain location=96-124; Score =8.5; E_value=7.2; Accession=PF00560.25; Description=Leucine Rich Repeat
  Pfam module annotation: Pfam domain module=LRR_1::LRR_1::LRR_1::LRR _1::LRR_1::LRR_1::LRR_1::LRR_1::LRR_1::LRR_1::LRR_1::LRR_1::LRR_1; Domain location=147-170::173-196::198-214::223-245::249-272::301 -323::325-352::...
  Pfam module annotation: Domain location=377-400::402-429::44-66::454 -476::70-92::96-124
RSWGFGAAGLAALAGPCPDLADLDLSNGXDLGDTAAAEVARMRRLRRLSLSRCKALTDMGLGCVAVGCTDLRDLSLKWCLGVTDLGLNLLALKCKNLITLDLSYTMITKQSFLAIMKLPDLQVLTLVGCIGIDDDALASLEKECSKSLQVLDMSHCQNITDVGVSSIVKSIPNLLELDLSYCCPVTPSMLRSLQKISKLRSLKLEGCKFMADGLKAIGSSCVSIRELSLSKCSGVTDMELSFAVSKLKNLQKLDITCCRNITDVSVAAITGSCTSLISLRMESCSHVSSGALQLIGKHCSHLEELDLTDSDLDDEGLKALAGCSNLSSLKIGICLRISDEGLAHIGKSCPKLQDIDLYRCGGISDEGVIQIAQGCPTLESINLSYCTEITDRSLMSLSKCTKLNTLEIRGCPRVSSTGLSGIAMGCRLLSKLDIKKCFEINDVGMLHLSQFSHSLRQINLSYCSITDIGLLSLSSICGLQNMTIVHLAGITPNGLIAALMVCGGLTKVKLHKAFKSMMPPHMLKNVEARGCIFQWINKPFKVEVEPCDVWKQQSQDVLVR

SEQ ID NO: 68043 - protein, 56 aa, Setaria italica
  Transcript Sequence Number=SeqID_2069
  Gene Ontology: Mol. function=hydrogen ion transmembrane transporter activity; Cellular component=integral to membrane; Biological process=proton transport
  Homolog annotation: Hit_ID=Q41758; Match level="QueryCoverage=96%, HitCoverage=10%, E-value=9e-24, Identity=94%"; Hit description=H+ -pyrophosphatase (Fragment)
ALVSWLGLPYTFTIFNFGVQKTVYNWQLFLCVAVGLWAGLVIGFVTEYYTSNAYRC

SEQ ID NO: 68044 - protein, 44 aa, Setaria italica
  Transcript Sequence Number=SeqID_2070
VKVMKEYRPPAPVVPSRPAPPKPEKQAPPALALVADAPAFSPNT

SEQ ID NO: 68045 - protein, 95 aa, Setaria italica
  Transcript Sequence Number=SeqID_2071
TSLSSSWRSSPSCCPLLCHSWWHPLQMALNRLELGTKAVVLQGGEQCVSYTASMAYALLLELMNPVVCVVSVFFVPSSSRFQPCFDPIISPLAFV

SEQ ID NO: 68046 - protein, 134 aa, Setaria italica
  Transcript Sequence Number=SeqID_2072
  Gene Ontology: Mol. function=oxidoreductase activity; Cellular component=cytoplasm; Biological process=cell redox homeostasis
  Homolog annotation: Hit_ID=B4FN24; Match level="QueryCoverage=88%, HitCoverage=72%, E-value=3e-55, Identity=88%"; Hit description =Peroxiredoxin-5
  Pfam annotation: Domain name=AhpC-TSA; Domain location=2-114; Score= -19.9; E_value=0.035; Accession=PF00578.13; Description=AhpCTSA family
  Pfam annotation: Domain name=Redoxin; Domain location=3-134; Score =112.6; E_value=1.3e-30; Accession=PF08534.2; Description=Redoxin
  Pfam module annotation: Pfam domain module=AhpC-TSA::Redoxin; Domain location=2-114::3-134
SNRSIDLLPLKPFEEDASFFYVCSMQHVPGFITQSEQLKAKGVDEILLISVNDPFVMKAWAKTYPENKHVKFLADGSGAYTKALGLELDLTEKGLGIRSRRFALLADNLKVTVANIEEGGQFTISGAEEILKAL

SEQ ID NO: 68047 - protein, 57 aa, Setaria italica
  Transcript Sequence Number=SeqID_2073
IVAYSNSPQKSYYLKWTQQMNTNSNKNLDDAPGGLTLKDGGQKKAHQPTTKTRTTSE

SEQ ID NO: 68048 - protein, 95 aa, Setaria italica
  Transcript Sequence Number=SeqID_2074
RRNYGIKTWLESGTRRHEENGNHAHDGVHQLEEQSICHRCCIADTLLSTLQNYGLRPPTLAGLEPFEEDATMSGKEGGRTRRDSDFKKQADSLTL

SEQ ID NO: 68049 - protein, 49 aa, Setaria italica
  Transcript Sequence Number=SeqID_2075
IEGSPVTIGGRQCYVEEKRTPGSRGPSRGGGYGNRGGGGYGNSDGNWRS

SEQ ID NO: 68050 - protein, 126 aa, Setaria italica
  Transcript Sequence Number=SeqID_2076
  Gene Ontology: Mol. function=hydrogen-translocating pyrophosphatase activity; Cellular component=membrane; Biological process=proton transport
  Homolog annotation: Hit_ID=B6DXD7; Match level="QueryCoverage=100%, HitCoverage=14%, E-value=4e-52, Identity=84%"; Hit description =Vacuolar-type H-pyrophosphatase
MIPPGALVMLTPLIVGILFGVETLSGVLAGALVSGVQVGTLSVVAFIVIISCDIAISASNTGGAWDNAKKYIEAGASEHARTLGPKGSDPHKAAVIGDTIGDPLKDTSGPSLNILIKLMAVESLVF

SEQ ID NO: 68051 - protein, 97 aa, Setaria italica
  Transcript Sequence Number=SeqID_2077
  Gene Ontology: Mol. function=hydrogen ion transmembrane transporter activity; Cellular component=integral to membrane; Biological process=proton transport
  Homolog annotation: Hit_ID=Q41758; Match level="QueryCoverage=97%, HitCoverage=18%, E-value=3e-45, Identity=96%"; Hit description=H+ -pyrophosphatase (Fragment)
MTMKSVGSAALKMVEEVRRQFNTIPGLMEGTTKPDYATCVKISTDASIKEMIPPGALVMLTPLIVGILFGVETLSGVLAGALVSGVQIAISAYQTTR

SEQ ID NO: 68052 - protein, 142 aa, Setaria italica
  misc_feature (15)..(15): Xaa can be any naturally occurring amino acid
  Transcript Sequence Number=SeqID_2078
  Gene Ontology: Mol. function=hydrogen ion transmembrane transporter activity; Cellular component=integral to membrane; Biological process=proton transport
  Homolog annotation: Hit_ID=Q41758; Match level="QueryCoverage=95%, HitCoverage=26%, E-value=4e-70, Identity=97%"; Hit description=H+ -pyrophosphatase (Fragment)
  Pfam annotation: Domain name=H_PPase; Domain location=1-141; Score= -512.6; E_value=0.00013; Accession=PF03030.8; Description=Inorganic H+ pyrophosphatase
SAMTMKSVGSAALKXVEEVRRQFNTIPGLMEVTTKPDYATCVKISTDASIKEMIPPGALVMLTPLIVGILFGVETLSGVLAGALVSGVQIAISASNTGGAWDNAKKYIEAGASEHARTLGPKGSDPHKAAVIGDTIRLYSVF

SEQ ID NO: 68053 - protein, 146 aa, Setaria italica
  misc_feature (8)..(8): Xaa can be any naturally occurring amino acid
  Transcript Sequence Number=SeqID_2079
  Gene Ontology: Mol. function=hydrogen-translocating pyrophosphatase activity; Cellular component=membrane; Biological process=proton transport
  Homolog annotation: Hit_ID=Q42651; Match level="QueryCoverage=99%, HitCoverage=18%, E-value=9e-70, Identity=93%"; Hit description =Pyrophosphatase
  Pfam annotation: Domain name=H_PPase; Domain location=1-131; Score= -544.4; E_value=0.002; Accession=PF03030.8; Description=Inorganic H+ pyrophosphatase
GKPDYATXVKISTDASIKEMIPPGALVMLTPLIVGTLFGVETLSGVLAGALVSGVQIAISASNTGGAWDNAKKYIEAGASEHARTLGPKGSDCHKAAVIGDTIGDPLKDTSGPSLNILIKLMAVEFPLLFRPPFFATHGGLIFKYL

SEQ ID NO: 68054 - protein, 320 aa, Setaria italica
  Transcript Sequence Number=SeqID_2080
  Gene Ontology: Mol. function=hydrolase activity; Cellular component =cytoplasm; Biological process=adult locomotory behavior
  Homolog annotation: Hit_ID=B6TDI4; Match level="QueryCoverage=100%, HitCoverage=91%, E-value=1e-172, Identity=89%"; Hit description =Protein N-terminal asparagine amidohydrolase
SGMELVAALTGHPGLRDAADRLKATPERRISAEQEGAPRHVYVFQREYATVDPARVELVGTDEATTCIGVVIRNNRTGMTSVSHMDFPKIVEGGLKQMLELLGDDNAPFDVHLIGGFSDASTKVVRSSGKKHIKQEGYSYPLCCKIVEVLHKSQQQFHLRSFCVLGNNTTTDSLGNALPVIGGFVVQTSSGVVMPASFDMNSRCPDEVVRRIRVSVCSYDPTWQGRLLETYDTQCDVFRIAPACWMPDWADIASSLNQLSDSEVLMQCSTSPAAEPPHFVENERRIWKYLINNPDWEETFPKHKSRVFHRASDGSWSRYS

SEQ ID NO: 68055 - protein, 286 aa, Setaria italica
  misc_feature (162)..(162): Xaa can be any naturally occurring amino acid
  misc_feature (171)..(171): Xaa can be any naturally occurring amino acid
  Transcript Sequence Number=SeqID_2081
  Gene Ontology: Mol. function=hydrogen-translocating pyrophosphatase activity; Cellular component=membrane; Biological process=proton transport
  Homolog annotation: Hit_ID=B6DXD7; Match level="QueryCoverage=99%, HitCoverage=37%, E-value=1e-149, Identity=94%"; Hit description =Vacuolar-type H-pyrophosphatase
  Pfam annotation: Domain name=H_PPase; Domain location=1-272; Score =48.4; E_value=8.3e-26; Accession=PF03030.8; Description=Inorganic H+ pyrophosphatase
YGVAVAGMLSTIATGLAIDAYGPISDNAGGIAEMAGMSHRIRERTDALDAAGNTTAAIGKGFAIGSAALVSLALFGAFVSRAEISTVDVLSPKVFIGLIVGAMLPYWFSAMTMKSVGSAALKMVEEVRRQFNTIPGLMEGTTKPDYATCVKISTDASIKEMXPPGALVMLXTPLIVGILFGVETLSGVLAGALVSGVHIAISASNTGGAWDNAKKYIEAGASEHARTLGPKGSDPHKAAVIGDTIGDPLKDTSGPSLNILIKLMAVESLVFAPFFATHGGILFKWL

SEQ ID NO: 68056 - protein, 454 aa, Setaria italica
  Transcript Sequence Number=SeqID_2082
  Gene Ontology: Mol. function=nucleic acid binding; Cellular component= intracellular; Biological process=transport
  Homolog annotation: Hit_ID=B6ST52; Match level="QueryCoverage=80%, HitCoverage=76%, E-value=3e-55, Identity=81%"; Hit description=RNA -binding protein-like
  Pfam annotation: Domain name=NTF2; Domain location=1-112; Score =135.0; E_value=2.4e-37; Accession=PF02136.12; Description=Nuclear transport factor 2 (NTF2) domain
  Pfam annotation: Domain name=RRM_1; Domain location=291-360; Score =53.2; E_value=9.7e-13; Accession=PF00076.14; Description=RNA recognition motif. (a.k.a. RRM, RBD, o
  Pfam module annotation: Pfam domain module=NTF2::RRM_1; Domain location=1-112::291-360
AFVQQYYLVLHQSPDLVYRFYQDDSRVGRPASAAGMESVTTMKAISEKIMEMDVAKAEIRTVDSQESLERGVTVLVTGHLTGRDGVRREFSQSFFLAPQEKGYFVLNDIFRFVGDGPAPAAVEAQPEADAVVPPVAAPLANGTAAPAVEPAVPEHDATQQQEHHVVEPAAPQPEEEEEAEVYNPPPEEVVDEEQPVPEVINEVPNNVAPVVATTVAPVSQEEAPKKSYASIVKVMKEVPLPAPAPSTRPAPPKPEKQAPAPAPAPVTDVPAFSSNPENSTIQEPEVDAHAIYVRNLPLNATETQLEDEFKKFGAIKQNGIQVRSNKIQGFCYGFVEFEDATSVQSAIEGSPVTIGGRQCYVEEKRTPGSRGPSRGGGRFAPGRGNNFRNEGARGRGNYSGGRGYGRGEFSYRSDYGGRSGGRSGAARGADVGYQRVEYTGGRGGRTAAAGAPAK

SEQ ID NO: 68057 - protein, 450 aa, Setaria italica
  misc_feature (244)..(244): Xaa can be any naturally occurring amino acid
  Transcript Sequence Number=SeqID_2083
  Gene Ontology: Mol. function=nucleic acid binding; Cellular component= intracellular; Biological process=transport
  Homolog annotation: Hit_ID=B6TQ25; Match level="QueryCoverage=74%, HitCoverage=66%, E-value=2e-99, Identity=62%"; Hit description=RNA -binding protein-like
  Pfam annotation: Domain name=GRP; Domain location=317-420; Score= -28.0; E_value=0.065; Accession=PF07172.3; Description=Glycine rich protein family
  Pfam annotation: Domain name=NTF2; Domain location=1-90; Score=43.9; E_value=6.2e-10; Accession=PF02136.12; Description=Nuclear transport factor 2 (NTF2) domain
  Pfam annotation: Domain name=RRM_1; Domain location=284-353; Score =50.5; E_value=6.4e-12; Accession=PF00076.14; Description=RNA recognition motif. (a.k.a. RRM, RBD, o
  Pfam module annotation: Pfam domain module=GRP::NTF2::RRM_1; Domain location=317-420::1-90::284-353
SRPAAGAAAAADGMDTVTTMDAINDKIVSMGITRAEIKAVDAQESLKGGVTVLVMGHLTGRTGVGREFVQSFFLAPQEKGYFVLNDILRYVGEGEGEEGTGHPAPPPPPQQPEVAVDAEAAPSAVLANGTVVGGGDTESVPREQDALPLPEQNATEPAPQPKEEEELNGEEVYNPPNNVEKPAVEETPVPEVIKEVQNNVAVAAPSSSPPVPLEEAPKKSYASIVKVMKEYRPPAPVVPSRPAXPPKPEKQAPPALALVADAPAFSPNTQGGSFQDPEVDAHAIYVRNLPLNATPQQLEEEFKRFGTIKHEGIQVRSNKIQGFCYGFVEFEDASAVQTAIEASPVMIGERQCYVEEKRTTGSRGGSRGGRFAPGRGGNFRGEGLRGRGTYNGGRGYGRGEFGYRSDYGGRGGGRGGSSRGGDVGYQRVDHSGTAGGRGARAPSAATAAAK

SEQ ID NO: 68058 - protein, 482 aa, Setaria italica
  misc_feature (423)..(423): Xaa can be any naturally occurring amino acid
  Transcript Sequence Number=SeqID_2084
  Gene Ontology: Mol. function=hydrogen ion transmembrane transporter activity; Cellular component=integral to membrane; Biological process=proton transport
  Homolog annotation: Hit_ID=Q06572; Match level="QueryCoverage=98%, HitCoverage=62%, E-value=0.0, Identity=92%"; Hit description =Pyrophosphate-energized vacuolar membrane proton pump
  Pfam annotation: Domain name=BCCT; Domain location=145-464; Score= -445.0; E_value=0.066; Accession=PF02028.9; Description=BCCT family transporter
  Pfam annotation: Domain name=H_PPase; Domain location=1-478; Score =725.5; E_value=4e-215; Accession=PF03030.8; Description=Inorganic H+ pyrophosphatase
  Pfam module annotation: Pfam domain module=BCCT::H_PPase; Domain location=145-464::1-478
MVDDWEGLFESITGYGLGGSSMALFGRVGGGIYTKAADVGADLVGKVERNIPEDDPRNPAVIADNVGDNVGDIAGMGSDLFGSYAESSCAALVVASISSFGINHDFTGMCYPLLVSSVGKECGEQADYDANRAHKQWVAHPRQHIISTALMTVGIAIISWLALPAKFTIFNFGAQKEVSNWGLFFCVSIGLWAGLIIGFVTEYYTSNAYSPVQDVADSCRTGAATNVIFGLALGYKSVIIPIFAIAVSIYVSFSIAAMYGIAVAALGMLSTIATGLAIDAYGPISDNAGGIAEMAGMSHRIRERTDALDAAGNTTAAIGKGFAIGSAALVSLALFGAFVSRAGVKVVDVLSPKVFIGLIVGAMLPYWFSAMTMKSVGSAALKMVEEVRRQFNTIPGLMEGTGKPDYATCVKISTDASIKEMIXPPGALVMLTPLIVGTLFGVETLSGVLAGALVSGVQIAISASNTGGAWDNAKKVTIRRTR

SEQ ID NO: 68059 - protein, 794 aa, Setaria italica
  Transcript Sequence Number=SeqID_2085
  Gene Ontology: Mol. function=hydrogen ion transmembrane transporter activity; Cellular component=integral to membrane; Biological process=proton transport
  Homolog annotation: Hit_ID=P21616; Match level="QueryCoverage=95%, HitCoverage=99%, E-value=0.0, Identity=85%"; Hit description =Pyrophosphate-energized vacuolar membrane proton pump
  Pfam annotation: Domain name=DUF606; Domain location=353-442; Score= -63.3; E_value=0.097; Accession=PF04657.5; Description=Protein of unknown function, DUF606
  Pfam annotation: Domain name=H_PPase; Domain location=36-780; Score =1612.2; E_value=0; Accession=PF03030.8; Description=Inorganic H+ pyrophosphatase
  Pfam annotation: Domain name=OPT; Domain location=37-587; Score= -277.2; E_value=0.042; Accession=PF03169.7; Description=OPT oligopeptide transporter protein
  Pfam module annotation: Pfam domain module=DUF606::H_PPase::OPT; Domain location=353-442::36-780::37-587
HTTLVSLRFAEGPKPSRKGTLARSEQLPAMAAILPELATQVVIPVAAAVGIAFAVLQWVLVSKVRLTPERGRADGGAAKTGPSDYLIEEEEGLNDHNVVVKCAEIQSAISEGATSFLFTEYKYVGLFMGIFAILIFLFLGSVEGFSTKSQPCHYSKDKICKPALANAIFSTIAFVLGAVTSLVSGFLGMKIATYANARTTLEARKGVGKAFITAFRSGAVMGFLLAASGLLVLYIAINLFGIYYGDDWEGLFEAITGYGLGGSSMALFGRVGGGIYTKAADVGADLVGKVERNIPEDDPRNPAVIADNVGDNVGDIAGMGSDLFGSYAESSCAALVVASISSFGINHEFTPMVYPLLVSSVGIIACLITTLFATDFFEIKAVNEIEPALKKQLIISTVVMTIGIALISWLGLPYTFTIFNFGVQKTVQSWQLFLCVAVGLWAGLVIGFVTEYYTSNAYSPVQDVADSCRTGAATNVIFGLALGYKSVIIPIFAIAFSIFLSFSLAAMYGVAVAALGMLSTIATGLAIDAYGPISDNAGGIAEMAGMSHRIRERTDALDAAGNTTAAIGKGFAIGSAALVSLALFGAFVSRAAISTVDVLSPKVFIGLIVGAMLPYWFSAMTMKSVGSAALKMVEEVRRQFNTIPGLMEGTTKPDYATCVKISTDASIKEMIPPGALVMLTPLIVGILFGVETLSGVLAGALVSGVQIAISASNTGGAWDNAKKYIEAGVSEHARTLGPKGSDPHKAAVIGDTIGDPLKDTSGPSLNILIKLMAVESLVFAPFFATHGGILFKWL

SEQ ID NO: 68060 - protein, 769 aa, Setaria italica
  Transcript Sequence Number=SeqID_2086
  Gene Ontology: Mol. function=hydrogen ion transmembrane transporter activity; Cellular component=integral to membrane; Biological process=proton transport
  Homolog annotation: Hit_ID=B6DXD7; Match level="QueryCoverage=98%, HitCoverage=99%, E-value=0.0, Identity=83%"; Hit description =Vacuolar-type H-pyrophosphatase
  Pfam annotation: Domain name=H_PPase; Domain location=9-755; Score =1602.1; E_value=0; Accession=PF03030.8; Description=Inorganic H+ pyrophosphatase
  Pfam annotation: Domain name=OPT; Domain location=9-562; Score= -265.7; E_value=0.017; Accession=PF03169.7; Description=OPT oligopeptide transporter protein
  Pfam module annotation: Pfam domain module=H_PPase::OPT; Domain location=9-755::9-562
MASPAFLPELATQVIVPVAAVVGIAFAVLQWVLVSKVKLSPEPRRGDGSSGKSGAGASEYLIEEEEGLNEHNVVVKCAEIQNAISEGATSFLFTEYKYVGLFMGIFAVLIFLFLGSVEGFSTKSQPCHYSKGKMCKPALANALFSTIAFVLGAVTSLVSGFLGMKIATYANARTTLEARKGVGKAFITAFRSGAVMGFLLAASGLFVLYIAINLFGIYYGDDWEGLYEAITGYGLGGSSMALFGRVGGGIYTKAADVGADLVGKVERNIPEDDPRNPAVIADNVGDNVGDIAGMGSDLFGSYAESSCAALVVASISSFGINHEFTPMLYPLLVSSVGIIACLITTLFATDFFEIKAVDEIEPALKKQLIISTAVMTVGIALVSWLGLPYTFTIFNFGVQKTVYNWQLFLCVAVGLWAGLVIGFVTEYYTSNAYSPVQDVADSCRTGAATNVIFGLALGYKSVIIPIFAIAFSIFLSFSLAAMYGVAVAALGMLSTIATGLAIDAYGPISDNAGGIAEMAGMSHRIRERTDALDAAGNTTAAIGKGFAIGSAALVSLALFGAFVSRAEISTVDVLSPKVFIGLIVGAMLPYWFSAMTMKSVGSAALKMVEEVRRQFNTIPGLMEGTTKPDYATCVKISTDASIKEMIPPGALVMLTPLIVGILFGVETLSGVLAGALVSGVQIAISASNTGGAWDNAKKYIEAGASEHARTLGPKGSDPHKAAVIGDTIGDPLKDTSGPSLNILIKLMAVESLVFAPFFATHGGILFKWL

SEQ ID NO: 68061 - protein, 331 aa, Setaria italica
  misc_feature (100)..(100): Xaa can be any naturally occurring amino acid
  misc_feature (103)..(103): Xaa can be any naturally occurring amino acid
  Transcript Sequence Number=SeqID_2087
  Gene Ontology: Mol. function=transposase activity; Biological process= transposition, DNA-mediated
  Homolog annotation: Hit_ID=Q2QT97; Match level="QueryCoverage=96%, HitCoverage=41%, E-value=3e-31, Identity=30%"; Hit description =Transposon protein, putative, CACTA, En/Spm sub-class
MANRARWMMKYEKGLVDILHENNTSLYRTPTGWKTEGWRKIVRDFNMRYPEAKFSKMQIQEHETQLKKDYKLIKLILQRDGVSWDQSASMIRATDEIWDXNLXDMPKARKYQNKSFQMHDSLGLLFDGPIPEGGQNSPQNIVGNVDEGGNNMSMTPDMSGRPSGTIIANIDETWKNVSLLQQTSLGPQGIDDLDVLHNHTEEVLGRQQHGADGRAQRADEQAHSSSCVEPHRDRRKKRKATDIQQIMEAYLNFRMKQARVKEQKANEADQFTISNCIKAMNTMSDVSDEIKILASDVFKDAENREIFLSYEPRLRTLWLKREVGKQLTSAY

SEQ ID NO: 68062 - protein, 122 aa, Setaria italica
  Transcript Sequence Number=SeqID_2088
  Subcellular localization annotation: CTP_CleavageSite=36; ConfidenceScore=5.45e-01
MAATPPWPPPVATRADPGHRRHKKSAERNTSVFMPRVATYSSGHALPVANRVPSLGFDSATKEWDNIHQHKVQSINFLSSLERPSENSVIAGKMAGGKLNNHSVEPTKRNHLFSLIELVLQK

SEQ ID NO: 68063 - protein, 42 aa, Setaria italica
  Transcript Sequence Number=SeqID_2089
MNSCSPFKKRRKTITNVLADASVMDKHIDQESRTQHKQGITN

SEQ ID NO: 68064 - protein, 207 aa, Setaria italica
  misc_feature (179)..(179): Xaa can be any naturally occurring amino acid
  Transcript Sequence Number=SeqID_2090
  Gene Ontology: Mol. function=DNA ligase (ATP) activity; Cellular component=intracellular; Biological process=response to DNA damage stimulus
  Homolog annotation: Hit_ID=B9FCD0; Match level="QueryCoverage=100%, HitCoverage=15%, E-value=6e-99, Identity=83%"; Hit description=DNA ligase
  Pfam annotation: Domain name=DNA_ligase_A_C; Domain location=127-204; Score=64.4; E_value=4.1e-16; Accession=PF04679.7; Description=ATP dependent DNA ligase C terminal region
  Pfam annotation: Domain name=DNA_ligase_A_M; Domain location=1-103; Score=-49.3; E_value=0.032; Accession=PF01068.13; Description=ATP dependent DNA ligase domain
  Pfam module annotation: Pfam domain module=DNA_ligase_A_C::DNA_ligase_ A_M; Domain location=127-204::1-103
VAFDILYAGDTSVIHQSLTERQEILQKVVKPLKGRLEILIPTGGLNARRPSDEPCWSIIAHNLEDVEKFFKDTIENRDEGIILKDLDSKWEPGDRNGKWLKLKPDYIHAGADLDAIIIGGYYGSGRRGGEVAQFLVGLAVPSDDNSYPKRFLSFCRVGTGLSDEERDALVTKLKPYFRXNEYPKKPPKFYEVTNNSKERPDVWIESP

SEQ ID NO: 68065 - protein, 312 aa, Setaria italica
  Transcript Sequence Number=SeqID_2091
  Gene Ontology: Mol. function=UDP-3-O-[3-hydroxymyristoyl] N -acetylglucosamine deacetylase activity; Biological process=lipid A biosynthetic process
  Homolog annotation: Hit_ID=Q10PR9; Match level="QueryCoverage=75%, HitCoverage=89%, E-value=1e-100, Identity=80%"; Hit description=UDP -3-0-acyl N-acetylglucosamine deacetylase family protein, expressed
  Pfam annotation: Domain name=LpxC; Domain location=9-302; Score =316.2; E_value=6.8e-92; Accession=PF03331.5; Description=UDP-3-O -acyl N-acetylglycosamine deacetylase
  Subcellular localization annotation: CTP_CleavageSite=16; ConfidenceScore=5.17e-01
HAVFSWKPTGRPQQTLAAAVSRSGVGLHSGARVTATLLPTYAGEGRYFQVEGKEEARVAAEVGNAEPRSQLCTTLQRGEGCGPRIRTVEHLLSAMEALGVDNCRVEVIGGDEIPLLDGSAQEWVEAIRSAGLCAAEDTGGQKLEKLAPQIHEPVYLQRDDCFVAAFPSSQIHITYGIDFPKVPAIGCQWFSTFLDANIYSSKIAPARTFCIFEEIEKMRGAGLIKGGSLENAMVCSMSGGWLNPPVRFEDEPCRHKILDLIGDFSLLAQNGNQGFPIAHIIAYKAGHALHTDFLRHLCGRITVDQEEVARQC

SEQ ID NO: 68066 - protein, 265 aa, Setaria italica
  Transcript Sequence Number=SeqID_2092
RIPGINLWSRMISGPSRLRYRRKAHSKVVPDADNSSQQRILRRSADAAVAYFQSTGHSNIDDSSPGPGKSSSDGGRANVGGSEFTSNDKTVGSSEIASTSLAESPLDNQQSSQCRSCNLDNNVLLCHHSEGLQIGQVTQANFPQGPVLERFENPFENKFVPHRETIFGNFGSCTHAHNWVPFWPFQLKGFLVRFNAPCASLDVQIQKLKSQFAIGPGDISAELTEGVSQIPSGGVQHALPITLDSVYFNGGNLMLLGYGDQEPRN

SEQ ID NO: 68067 - protein, 46 aa, Setaria italica
  Transcript Sequence Number=SeqID_2093
MMTAWSAYGYMSTMVFTSVVMFMLAALFFNLNLFSRLSDVSAILQP

SEQ ID NO: 68068 - protein, 165 aa, Setaria italica
  misc_feature (13)..(13): Xaa can be any naturally occurring amino acid
  Transcript Sequence Number=SeqID_2094
  Gene Ontology: Mol. function=tetraacyldisaccharide 4'-kinase activity; Biological process=lipid A biosynthetic process
  Pfam annotation: Domain name=LpxK; Domain location=1-165; Score= -196.0; E_value=0.05; Accession=PF02606.6; Description=Tetraacyldisacc haride-1-P 4'-kinase
LSALGRADIVVIXNADLASQVQLKAVRSTIEDNAATCSVFYSRLAPSHIFEVKQPSRRLPLNVLNDKIVLCVSAIGCPNAFIHTVKEMGPLKIDRLDFSDHHFFNAHVRTVIQETVRSLMDQHGKDTIILVTEKDYDRDPEVLTTLDAKVWVLSSSLQIMPHKEQ

SEQ ID NO: 68069 - protein, 70 aa, Setaria italica
  misc_feature (1)..(11): Xaa can be any naturally occurring amino acid
  Transcript Sequence Number=SeqID_2095
  Subcellular localization annotation: CTP_CleavageSite=39; ConfidenceScore=5.57e-01
XXXXXXXXXXXVFSFSLGHSLNKMNLSRSLFTVTLVNSSCFHNRTVYDKGTQFRFYFTDKSTKDEQKVLK

SEQ ID NO: 68070 - protein, 150 aa, Setaria italica
  misc_feature (25)..(25): Xaa can be any naturally occurring amino acid
  Transcript Sequence Number=SeqID_2096
  Gene Ontology: Mol. function=dihydrodipicolinate synthase activity; Cellular component=chloroplast; Biological process=diaminopimelate biosynthetic process
  Homolog annotation: Hit_ID=B4FK44; Match level="QueryCoverage=95%, HitCoverage=37%, E-value=2e-48, Identity=71%"; Hit description =Dihydrodipicolinate synthase 2
  Subcellular localization annotation: CTP_CleavageSite=68; ConfidenceScore=5.14e-01
LSPRRNRALPTTANPGVRLVGWKEXPALGMASASRLALPCRAAVAPHRTGRGKFPVAAITLDNYLPMRSSEVKNRTSTGDITSLRLITAVKTPYLPDGRFDLEAYDSLINMQIEGGAEGVIVGGTAGEGHLMSWDEHIMLIGHTVNCFST

SEQ ID NO: 68071 - protein, 115 aa, Setaria italica
  Transcript Sequence Number=SeqID_2097
  Gene Ontology: Mol. function=dihydrodipicolinate synthase activity; Cellular component=chloroplast; Biological process=diaminopimelate biosynthetic process
  Homolog annotation: Hit_ID=P24846; Match level="QueryCoverage=100%, HitCoverage=29%, E-value=6e-52, Identity=84%"; Hit description =Dihydrodipicolinate synthase 1, chloroplastic
  Pfam annotation: Domain name=DHDPS; Domain location=1-91; Score= -147.9; E_value=0.038; Accession=PF00701.14; Description =Dihydrodipicolinate synthetase family
TRWKYGATGVISVASNLVPGLMRSLIHEGENAALNEKLLPLMKWLFCEPNPIPLNTALAQLGVARPVFRLPYKALALEKRVEFVQIIEAIGREHFIGNREARVLDDDDFIPISRY

SEQ ID NO: 68072 - protein, 95 aa, Setaria italica
  Transcript Sequence Number=SeqID_2098
  Gene Ontology: Mol. function=dihydrodipicolinate synthase activity; Cellular component=chloroplast; Biological process=diaminopimelate biosynthetic process
  Homolog annotation: Hit_ID=P26259; Match level="QueryCoverage=100%, HitCoverage=25%, E-value=3e-48, Identity=91%"; Hit description =Dihydrodipicolinate synthase, chloroplastic
LMHSLMYEGENATLNEKLLPLMKWLFCQPNPIALNTALAQLGVTRPVFRLPYVPLPLKKRIEFVRIVEAIGRQNFVGQKEARILDDDDFVLISRY

SEQ ID NO: 68073 - protein, 156 aa, Setaria italica
  Transcript Sequence Number=SeqID_2099
  Gene Ontology: Mol. function=dihydrodipicolinate synthase activity; Cellular component=chloroplast; Biological process=diaminopimelate biosynthetic process
  Homolog annotation: Hit_ID=B4FK44; Match level="QueryCoverage=99%, HitCoverage=41%, E-value=2e-71, Identity=82%"; Hit description =Dihydrodipicolinate synthase 2
  Pfam annotation: Domain name=DHDPS; Domain location=2-156; Score =66.8; E_value=8.1e-17; Accession=PF00701.14; Description =Dihydrodipicolinate synthetase family
NLIGNTGSNSTREAVHATEQGFAVGMHAALHINPYYGKTSTEGMKAHFKAVLPMGPTIIYNVPSRTGQDILPPVIEDLWGHPNMAGVKECVGHERVKCYTNKGISVWSGNDDECHDSRWKYGATGVMSVTSNLVPGLMRSLMYAAGVLTSLLLQLP

SEQ ID NO: 68074 - protein, 38 aa, Setaria italica
  Transcript Sequence Number=SeqID_2100
CLSAECAYTKKVSEKVDVYSFGVVLLELTTGKGGQLRR

SEQ ID NO: 68075 - protein, 170 aa, Setaria italica
  Transcript Sequence Number=SeqID_2101
  Gene Ontology: Mol. function=protein dimerization activity; Cellular component=nucleus; Biological process=regulation of transcription, DNA-dependent
  Homolog annotation: Hit_ID=B6SKU0; Match level="QueryCoverage=87%, HitCoverage=55%, E-value=6e-54, Identity=78%"; Hit description=G-box- binding factor 4
  Pfam annotation: Domain name=bZIP_1; Domain location=86-143; Score =47.7; E_value=4.6e-11; Accession=PF00170.13; Description=bZIP transcription factor
  Pfam annotation: Domain name=bZIP_2; Domain location=86-144; Score =43.8; E_value=6.5e-10; Accession=PF07716.7; Description=Basic region leucine zipper
  Pfam module annotation: Pfam domain module=bZIP_1::bZIP_2; Domain location=86-143::86-144
PEPNRTERTGRPNRHDAGAGGPEMTLEDFLAREGAVKEDEARISGPSAPAEGQVVMGFLGGAEGVGVAGGGGGRGRKRQLMDPVDRAAMQRQKRMIKNRESAARSRERKQAYIAELESLVTQLEEENAELLRGQEERHQKRLKELLERVTPVIVRKKLSRDLRRTNSMQW

SEQ ID NO: 68076 - protein, 48 aa, Setaria italica
  Transcript Sequence Number=SeqID_2102
GGWQLRLPHDYHCIEFVLLRSRDSFFLTMTGVTRSKSCINQNSYLENT

SEQ ID NO: 68077 - protein, 73 aa, Setaria italica
  Transcript Sequence Number=SeqID_2103
NPMREIKKIIYRHHQYIQEPPLKQNQCTSLHHSNHHLPSSAAQHPPLFATENDLGDLCLTSSYSTTAKQPPPN

SEQ ID NO: 68078 - protein, 155 aa, Setaria italica
  misc_feature (19)..(19): Xaa can be any naturally occurring amino acid
  Transcript Sequence Number=SeqID_2104
  Gene Ontology: Mol. function=hydrolase activity, hydrolyzing O -glycosyl compounds; Cellular component=extracellular region; Biological process=carbohydrate metabolic process
  Homolog annotation: Hit_ID=Q0DM48; Match level="QueryCoverage=63%, HitCoverage=21%, E-value=4e-31, Identity=71%"; Hit description =Mannan endo-1,4-beta-mannosidase 3
PTELYLGKPLLVTEYGKFXLWEGVAGANRTQRDRFLDLVLDSIYDSAAEGGPLVGGAFWQLLDPGMDTLRDGYEIILPEDRHAAGIIGNHSRQLAQLNGQDVDAVRRRRRRSARSRKVHVGSSGRSSSSDTRQLHMLLVRFISLFRSVSSLFSSV

SEQ ID NO: 68079 - protein, 137 aa, Setaria italica
  Transcript Sequence Number=SeqID_2105
  Gene Ontology: Mol. function=transferase activity, transferring glycosyl groups; Cellular component=chloroplast; Biological process =glucan biosynthetic process
  Homolog annotation: Hit_ID=B2Z9Y0; Match level="QueryCoverage=100%, HitCoverage=19%, E-value=2e-72, Identity=95%"; Hit description =Starch synthase IIb
  Pfam annotation: Domain name=Glycos_transf_1; Domain location=8-137; Score=-24.0; E_value=0.037; Accession=PF00534.12; Description =Glycosyl transferases group 1
GKRQCKAALQRQLGLQVRDDVPLIGFIGRLDHQKGVDIIADAIHWIAGQDVQLVMLGTGRPDLEEMLRRCEAEHGDKVRAWVGFSVPMAHRITAGADVLLMPSRFEPCGLNQLYAMAYGTVPVVHAVGGLRDTVAPF

SEQ ID NO: 68080 - protein, 72 aa, Setaria italica
  Transcript Sequence Number=SeqID_2106
  Gene Ontology: Mol. function=transferase activity, transferring glycosyl groups; Cellular component=chloroplast; Biological process =starch biosynthetic process
  Homolog annotation: Hit_ID=Q6Z2T8; Match level="QueryCoverage=100%, HitCoverage=10%, E-value=5e-37, Identity=98%"; Hit description =Soluble starch synthase 2-2, chloroplastic/amyloplastic
PFDPFADAGLGWTFDRAEANRMIDALGHCLNTYRNYKESWRGLQARGMAQDLSWDHAAELYEDVLVKAKYQW

SEQ ID NO: 68081 - protein, 481 aa, Setaria italica
  Transcript Sequence Number=SeqID_2107
  Gene Ontology: Mol. function=transferase activity, transferring glycosyl groups; Cellular component=chloroplast; Biological process =glucan biosynthetic process
  Homolog annotation: Hit_ID=B2Z9Y0; Match level="QueryCoverage=89%, HitCoverage=61%, E-value=1e-171, Identity=71%"; Hit description =Starch synthase IIb
  Pfam annotation: Domain name=Glyco_transf_5; Domain location=216-459; Score=423.9; E_value=2.5e-124; Accession=PF08323.3; Description =Starch synthase catalytic domain
  Subcellular localization annotation: CTP_CleavageSite=29; ConfidenceScore=5.42e-01
MSGAIASSSSAFLLLVASSSPRRRRSRVGAALRSYRYSYGGAELRLHWTRRGLLRNGAAVVRAAAEPAGGEGEEAAAAGESSTPKGVTVQGSKAKAAGSAPPPKPVTSAPKQRHSAAKQNGALGSSSASKPGAPASEPIAESTAPVSERTETETDASAKVEEPKPTALDDAKESVGIAEPVEAKAGAAVAADAATSAADGSEDKEPGPLAGPNVMNVVVVASECAPFCKTGGLGDVVGALPKALARRGHRVMVVIPRYGEYAEARDLGVRRRYRVAGQDSEVTYFHSYIDGVDFVFIEAPPFRHRHNDIYGGERLDVLKRMILFCKAAVEVPWYAPCGGTVYGDGNLVFIANDWHTALLPVYLKAYYRDNGLMQYARSVLVIHNIAHQGRGPVDDFFNFDLPEHYIDHFKLYDPVGGDHSNVFAAGLKMADRVVTVSRGYLWELRTSEGGWGLHDIINQNDWKLDGIVETELKLKRKNKKL

SEQ ID NO: 68082 - protein, 472 aa, Setaria italica
  Transcript Sequence Number=SeqID_2108
  Gene Ontology: Mol. function=transferase activity, transferring glycosyl groups; Cellular component=chloroplast; Biological process =starch biosynthetic process
  Homolog annotation: Hit_ID=B2Z9X9; Match level="QueryCoverage=96%, HitCoverage=61%, E-value=0.0, Identity=88%"; Hit description=Starch synthase IIa
  Pfam annotation: Domain name=Glyco_transf_5; Domain location=8-225; Score=256.9; E_value=4.7e-74; Accession=PF08323.3; Description =Starch synthase catalytic domain
  Pfam annotation: Domain name=Glycos_transf_1; Domain location=273 -447; Score=41.8; E_value=2.8e-09; Accession=PF00534.12; Description =Glycosyl transferases group 1
  Pfam module annotation: Pfam domain module=Glyco_transf_5::Glycos _transf_1; Domain location=8-225::273-447
VELDGLSNILGECLFQSKVVVPRYGDYAEASDMGIVKYYKAAGQDLEVKYFHAFIDGVDFVFIDAPLFRHRQGDIYGGERLDVLKRMILFCKAAVEVPWYAPCGGVCYGDGNLVFIANDWHTALLPVYLKAYYRDNGQMQYTRSVLVIHNIAHQGRGPVAEYPYMDLPEHYLQHFELYDPVGGEHANIFAAGLKMADRVVTVSRGYLWELKTVEGGWGLHDIINQNDWKLDGIVNGIDMSEWNPAVDVHLHSDDYTNYTFETLDTGKRQCKAALQRQLGLQVRDDVPLIGFIGRLDHQKGVDIIADAMPWLAGQDVQLVMLGAGRGDLERMLQHLERMHQDKVRGWVGFSVPMAHRITAGADVLLMPSRFEPCGLNQLYAMAYGTVPVVHAVGGLRDTVVPFDPFGDAGLGWTFDRAEPNKLIEALGHCLDTYRNYRESWRRIQERGMSQDLSWDHAAELYEEVLVKAKYQW

SEQ ID NO: 68083 - protein, 143 aa, Setaria italica
  Transcript Sequence Number=SeqID_2109
DMSKVKMPGAACPASTICTQQMSDELASINKTVLPYLDPRIIRSPCTTEGHQFPSYFGSAITKWYAITKTKMKMPRKLAKKPRSWSSNILPAKQISWAARRAALPLLTLACCVAAAPCRERGVVRREDQRRRLLDSCEHRGLL

SEQ ID NO: 68084 - protein, 147 aa, Setaria italica
  Transcript Sequence Number=SeqID_2110
  Homolog annotation: Hit_ID=Q69VS2; Match level="QueryCoverage=94%, HitCoverage=16%, E-value=2e-34, Identity=56%"; Hit description =Putative calreticulin interacted protein
FLGKRDGQTADPDEKGEGGMDLSRMLQQMMPVVSQVLGGAGAQPVGANNGQSRSQTRSSDTSGGNMLNSSSSQIDLHQARQSIEQHEFPENIFSAVLETAAQAYGEDDSIQSMLEELASDPELTNDYLRLLLEQFRQRLQSESQSGS

SEQ ID NO: 68085 - protein, 610 aa, Setaria italica
  Transcript Sequence Number=SeqID_2111
  Gene Ontology: Biological process=protein modification process
  Homolog annotation: Hit_ID=B6U0P5; Match level="QueryCoverage=99%, HitCoverage=63%, E-value=0.0, Identity=67%"; Hit description =Ubiquitin family protein
  Pfam annotation: Domain name=DUF303; Domain location=44-601; Score= -40.8; E_value=0.091; Accession=PF03629.10; Description=Domain of unknown function (DUF303)
  Subcellular localization annotation: CTP_CleavageSite=61; ConfidenceScore=5.72e-01
PVYINSTGPNPIMVQPSFQNTPPFGVSNIPVSGAFGIVDTSRSSGFGDPFRNINVQSSGASATSGSSAGTTTTSGGAINGNRQDAARTQGGNAPGHAAATRGLPTRTVVAAIPARSSAEAPNHVLNVVLPVQVRGQVAVPNQSTSSQGSQTAVGAQPNATSAVSQASVGGVAGAHPLVAQINALVANALAANAPGQVSSSVQSAADQGFHLTTDSRAGVLSSSTPTTTPQQNDPSGTCGSTLSSQDMNAVNVPSLDSIQQHPQSEDTSADTANLSGDPASTCTHDAPSSTSVEKSALKNKSSDELGSQALEPSASGSSEPVGLGGGLIPKRRSRAAKPSGSTTDPGRDSSSVSQNQDAVSVAQQFLQSFASQNTNPSQRNAPTSGPPSSRPQPTGVPPRRQGGEGQPDIGSMISGMLNNPVFGNLLSNVATQAGGSSADLRSVMEGLQSPAVVDTISNIVQNVDERDLGAMFGSGRGQGGMDLSRMLQQMMPVVSQVLGGAGAQPVGANNGQSRSQTRSSDTSGGNMLNSSSSQIDLHQARQSIEQHESPENIFSAVLETAAQAYGEDDSIQSMLEELASDPELTNDYLRLLLEQFRQRLQSESQSGSQS

SEQ ID NO: 68086 - protein, 82 aa, Setaria italica
  Transcript Sequence Number=SeqID_2112
  Subcellular localization annotation: CTP_CleavageSite=64; ConfidenceScore=5.36e-01
PLYQPQETKRLAPSSTYNSPTTPIFFSTLHVRFCQTLTQIFLPPFVLQIKTLNYKQLTYMRHIKSMNTVRYRTNRNLLLLLV

SEQ ID NO: 68087 - protein, 45 aa, Setaria italica
  Transcript Sequence Number=SeqID_2113
LYNWLHAIISKARKHNDGDFLIKELWNVSVHVTKHNKRLLTHKWK

SEQ ID NO: 68088 - protein, 58 aa, Setaria italica
  Transcript Sequence Number=SeqID_2114
  Gene Ontology: Mol. function=catalytic activity; Biological process =metabolic process
  Homolog annotation: Hit_ID=B6SVP8; Match level="QueryCoverage=94%, HitCoverage=7%, E-value=2e-14, Identity=65%"; Hit description =Cycloartenol synthase
VKGLTAAGRTYENSSSIRKACSFLLSKQLRTGGWGETYLSSETESYVEASGPQAVFNC

SEQ ID NO: 68089 - protein, 150 aa, Setaria italica
  Transcript Sequence Number=SeqID_2115
  Gene Ontology: Mol. function=catalytic activity; Biological process =metabolic process
  Homolog annotation: Hit_ID=Q53MS8; Match level="QueryCoverage=100%, HitCoverage=27%, E-value=2e-58, Identity=68%"; Hit description =Similar to beta-amyrin synthase
  Pfam annotation: Domain name=Prenyltrans; Domain location=58-111; Score=24.0; E_value=0.00061; Accession=PF00432.13; Description =Prenyltransferase and squalene oxidase re
  Pfam annotation: Domain name=Prenyltrans; Domain location=9-51; Score= 35.7; E_value=1.9e-07; Accession=PF00432.13; Description =Prenyltransferase and squalene oxidase re
  Pfam module annotation: Pfam domain module=Prenyltrans::Prenyltrans; Domain location=58-111::9-51
GYRKEEIGNCIKSTSKFVEKEQRKDGSWFGIWGVCFTYGLFFAVKGLAAAGRTYENSSSIRKACSFLLSMQLSTGGWGETYLSSETESYVEASGPHAVNTAWAMLALISGGQVERDPTPLYHAAKELINMQLESGDFPQQEHVGCFNSSL

SEQ ID NO: 68090 - protein, 69 aa, Setaria italica
  Transcript Sequence Number=SeqID_2116
  Gene Ontology: Mol. function=catalytic activity; Biological process =metabolic process
  Homolog annotation: Hit_ID=Q53MS8; Match level="QueryCoverage=78%, HitCoverage=9%, E-value=1e-16, Identity=70%"; Hit description =Similar to beta-amyrin synthase
ILSCLPLYIWQSYVEASGPHAVNTAWAMLALIYGGQVERDPTPLYHAAKELINMQLESGDFPQQVIIFI

SEQ ID NO: 68091 - protein, 127 aa, Setaria italica
  Transcript Sequence Number=SeqID_2117
  Gene Ontology: Mol. function=protein binding
  Homolog annotation: Hit_ID=B9S7R0; Match level="QueryCoverage=99%, HitCoverage=13%, E-value=6e-41, Identity=62%"; Hit description =Protein PIR, putative
ILTWEAKSEVKTEVLHDLKEIGSALYWMSILDIVLRQIDTTQFMQSAPWLGLVPGNDGQVKHAYSDNTPFTTLLNAATNAVTSSPACPNPSTFLVMSKQAEAASLLYKSNLNSGSVLEYALAFTSAA

SEQ ID NO: 68092 - protein, 39 aa, Setaria italica
  Transcript Sequence Number=SeqID_2118
LQGCKYVTIQEYWLKPCISCIYSKGKQLRNKIRSIVNEV

SEQ ID NO: 68093 - protein, 119 aa, Setaria italica
  Transcript Sequence Number=SeqID_2119
  Gene Ontology: Mol. function=catalytic activity; Biological process =metabolic process
  Homolog annotation: Hit_ID=Q2R2I4; Match level="QueryCoverage=73%, HitCoverage=22%, E-value=3e-26, Identity=59%"; Hit description =Cycloartenol synthase, putative, expressed
  Pfam annotation: Domain name=Prenyltrans; Domain location=51-97; Score=11.2; E_value=0.26; Accession=PF00432.13; Description =Prenyltransferase and squalene oxidase re
  Pfam annotation: Domain name=Prenyltrans; Domain location=9-44; Score= 12.9; E_value=0.16; Accession=PF00432.13; Description=Prenyltransferas e and squalene oxidase re
  Pfam module annotation: Pfam domain module=Prenyltrans::Prenyltrans; Domain location=51-97::9-44
MIYLTYKKEHIQKGSRKDGSWFGSWGVCFTYGIFFAVKGLTAAGRTYENSSSIRKACSFLLSKQLRTGGWGETYLSSETEVTVNFRYLTVTMWKVCSGYGIFLIFLNFRCMILSLSNVI

SEQ ID NO: 68094 - protein, 336 aa, Setaria italica
  misc_feature (21)..(21): Xaa can be any naturally occurring amino acid
  Transcript Sequence Number=SeqID_2120
  Gene Ontology: Mol. function=protein serine/threonine kinase activity; Cellular component=plasma membrane; Biological process =protein amino acid phosphorylation
  Homolog annotation: Hit_ID=Q7X6D5; Match level="QueryCoverage=100%, HitCoverage=44%, E-value=1e-157, Identity=81%"; Hit description =OSJNBa0043L24.25 protein
  Pfam annotation: Domain name=Pkinase; Domain location=167-336; Score =13.2; E_value=2.8e-09; Accession=PF00069.17; Description=Protein kinase domain
  Pfam annotation: Domain name=Pkinase_Tyr; Domain location=167-336; Score=4.4; E_value=5.1e-14; Accession=PF07714.9; Description=Protein tyrosine kinase
  Pfam module annotation: Pfam domain module=Pkinase::Pkinase_Tyr; Domain location=167-336::167-336
LVPLGQKFDRTSASLISNRFXKKVPINSSIFGDYVATYVHYPGLPSLVPIPGSLGPVSSNEDPFGANIHNRSHHKINSKMVAIIALSAVVFVLMCFAIGIIWRFKVFKNSHATGPISSSSITRKGGMRSSFSGTSSSTASFASTIGTCPSTVKTFTITELEKATENFSFSKIIGEGGYGRVYRGIIEDGVEVAVKLLTRKHQNRDREFIAEVEMLSRLHHRNLVKLIGICIERSTRCLVFELVPNGSVESHLHGSDKIYGPLDFDTRMKIALGAARGLAYLHEDANPHVIHRDFKASNVLLENDFTPKVADFGLAKEASDGMDHISTQVMGTFGYV

SEQ ID NO: 68095 - protein, 313 aa, Setaria italica
  misc_feature (293)..(293): Xaa can be any naturally occurring amino acid
  misc_feature (297)..(297): Xaa can be any naturally occurring amino acid
  Transcript Sequence Number=SeqID_2121
  Gene Ontology: Mol. function=catalytic activity; Biological process =metabolic process
  Homolog annotation: Hit_ID=Q6IW97; Match level="QueryCoverage=100%, HitCoverage=41%, E-value=1e-117, Identity=64%"; Hit description=Beta- amyrin synthase
  Pfam annotation: Domain name=Prenyltrans; Domain location=145-188; Score=46.6; E_value=9.7e-11; Accession=PF00432.13; Description =Prenyltransferase and squalene oxidase re
MWRLKVAEGDRASLKTSNNFLGRAVWEFDPDLGTPEERAEVERVRREFTERRFQKREASDLLLRMQYAKQKHLQVDPPPAKLAENVQVTEEIILTSLRRALAQHSSLQADDGHWPVDFSGILFIMPLLVFALYITGSLNTVLSKEHRREICRYIYNIQNADGGWGKQVVGPSTMFGSCLNYVTLRLLGEESTHDALTKGREWILSHGSAAAIPQWGKIWLSMIGLYDWSGNNPIIPELWLVPHFLPIHPGRFWVFTRMVYLPMAYLFGKKFVGPITPTILALRDELYGVPYYXLIVXKARDNCAKVDLIYPRT

SEQ ID NO: 68096 - protein, 285 aa, Setaria italica
  Transcript Sequence Number=SeqID_2122
  Gene Ontology: Mol. function=protein serine/threonine kinase activity; Cellular component=plasma membrane; Biological process =protein amino acid phosphorylation
  Homolog annotation: Hit_ID=Q7X6D5; Match level="QueryCoverage=91%, HitCoverage=35%, E-value=1e-114, Identity=80%"; Hit description =OSJNBa0043L24.25 protein
  Pfam annotation: Domain name=Pkinase; Domain location=1-231; Score =4.8; E_value=8.8e-09; Accession=PF00069.17; Description=Protein kinase domain
  Pfam annotation: Domain name=Pkinase_Tyr; Domain location=10-231; Score=-45.5; E_value=1.1e-10; Accession=PF07714.9; Description =Protein tyrosine kinase
  Pfam module annotation: Pfam domain module=Pkinase::Pkinase_Tyr; Domain location=1-231::10-231
SWPSNLTERVRISERIREKVLLLSKCCTKHRFELVPNGSVESHLHGSDKIYGPLDFDTRMKIALGAARGLAYLHEDANPHVIHRDFKASNVLLENDFTPKVADFGLAKEASDGMDHISTQVMGTFGYVAPEYAMTGHLLVKSDVYSYGVVLLELLSGRKPVDMTQPPGSENLVTWARPLLTTREGLQRLVDPSLPAGYDFEKLAKAAAIASMCVHIEASQRPFMGEVVQALKLIHSCGGAAGDETCSGSFGGGATEESPWNDGSRSTWNDGPATPGPALALGYGS

SEQ ID NO: 68097 - protein, 76 aa, Setaria italica
  Transcript Sequence Number=SeqID_2123
  Gene Ontology: Mol. function=catalytic activity; Biological process =metabolic process
  Homolog annotation: Hit_ID=B6SVP8; Match level="QueryCoverage=78%, HitCoverage=7%, E-value=3e-16, Identity=66%"; Hit description =Cycloartenol synthase
ILSCLPLYIWQSYVEASGPHAVNTAWAMLALIYGGQVERDPTPLYHAAKELINMQLESGDFPQQVIYIYFWLIEEL

SEQ ID NO: 68098 - protein, 759 aa, Setaria italica
  Transcript Sequence Number=SeqID_2124
  Gene Ontology: Mol. function=protein binding; Cellular component =microtubule organizing center; Biological process=microtubule cytoskeleton organization and biogenesis
  Homolog annotation: Hit_ID=B9S7R0; Match level="QueryCoverage=100%, HitCoverage=78%, E-value=0.0, Identity=67%"; Hit description=Protein PIR, putative
WMAKTSNADPEQNSLHQETEEMRQNTFYPRPVAPTAAQIHCLQFLICELVSGGNMRKPGGLFGNSGSGIPVEDLKQLETFFYKLSFFLHILDYTATIGTLTDLGFLWFREFYLESSRVIQFPIECSLPWMLVDHVIESQDAGLLESILIPFDLYNDSAQHALTCLKQRFLYDEIEAEVDLCFDLLAQKLNEIIFTYYKSCAASTLLDSSFTYACDDGEKYFVKPLRFDAIFKLRRVMVLGRTIDLRSLITQRMNKIFRENIDFLLERFENGDLCGVVELQQLLDILELTHQSISRFLELDSYSLMLSEMQENLSLVSYSSRISSQIWSEMQTDFLPNFILCNTTQRFVRSTKGTHHSSQRSSASTGKPYFYCGSYDLTMAYQGLAGLYRDFFGVPHMFAVVKLLGSRSLPAIIRALLDHISSKITGMVPKITALQEALPKSIGLLSFDGGIAGCQKIIHEILTWEAKSEVKTEVLHDLKEIGSALYWMSILDIVLRQIDTTQFMQSAPWLGLVPGNDGQVKHAYSDNTPFTTLLNAATNAVTSSPACPNPSTFLVMSKQAEAASLLYKSNLNSGSVLEYALAFTSAALDRHYSKWSATPKTGFIDITTSKDFYRIFSGLQYSYLEETINYPSKKQEMLGDSVAWAGCTIMYLLGQQQHFELFDFSYQFLNVAEVESATISHYQSSERTKSPNLLQGYEGILEAMRKARRLNNHVFSMLRARCPLEDKVACAIKPSGAPLHRMKFMNTVSAFETLPQRAT

SEQ ID NO: 68099 - protein, 509 aa, Setaria italica
  Transcript Sequence Number=SeqID_2125
  Gene Ontology: Mol. function=catalytic activity; Biological process =metabolic process
  Homolog annotation: Hit_ID=Q2R712; Match level="QueryCoverage=99%, HitCoverage=66%, E-value=0.0, Identity=70%"; Hit description =Cycloartenol synthase, putative, expressed
  Pfam annotation: Domain name=Prenyltrans; Domain location=340-382; Score=39.1; E_value=1.7e-08; Accession=PF00432.13; Description =Prenyltransferase and squalene oxidase re
  Pfam annotation: Domain name=Prenyltrans; Domain location=389-442; Score=23.3; E_value=0.001; Accession=PF00432.13; Description =Prenyltransferase and squalene oxidase re
  Pfam module annotation: Pfam domain module=Prenyltrans::Prenyltrans; Domain location=340-382::389-442
ISPTTGRFWVFTRMVYLPMAYLFGKKFVGPITPTILALRDELYGVPYNEVDWNKARDNCAKVDLIYPRTMAQNLVWTCLNKVVEPMLNCWPVNKLRHITLKNIIKHIYYEDEISKYICVCPINKALDMICCWAENPNSDAFKQHLPRIYDFLWLAEDGMKAQVYDGCPAWETAFIVQAYCSTGLVNEFSPTLRKAHEFIKCSQIRENHPDYEAYYRHRSKGSWTLSTADNGWNVSDCTAEALKALLLLSKISPDLVGDPIKGESLYDAVDCILSYVNDDGTFSTYERKRTSPLLEVLNPSESFINIVVDYPSVECTSSVLQALIMFKELDPGYRKEEIGNCIKSTSEFIEKEQRKDGSWFGSWGVCFTYGIFFAVKGLTAAGRTYENSSSIRKACSFLLSKQLRTGGWGETYLSSETESYVEASGPHAVNTAWAMLALIYGGQVERDPTPLYHAAKELINMQLESGDFPQQEHVGCFNSSLYFNYGNYRNLYPIWALGEFRHRLLARKN

SEQ ID NO: 68100 - protein, 518 aa, Setaria italica
  Transcript Sequence Number=SeqID_2126
  Gene Ontology: Mol. function=protein binding; Cellular component=SCAR complex; Biological process=cortical actin cytoskeleton organization and biogenesis
  Homolog annotation: Hit_ID=Q5S2C3; Match level="QueryCoverage=100%, HitCoverage=40%, E-value=0.0, Identity=76%"; Hit description=Protein PIR
ASLLYTYRSCVKALPQLPDSMKHSQADLYLETYQVLDLEMSRLREIQRWQASAASKLAADMQRFSRPERLVNGPTITHFWSMLKLLDVLLQLDHLKNAKASIPNDFSWYKRTFTQVSSQWQDTDTMREELDDLQIFLSTRWAILLNLHAEMFRTNTVEDILQVLIVFCVESLELDFALLFPERHTLLRVLPVLVVLATSSEKEGESLYKRVKINRLLNIFKNDPVIPAFPDLHLSPAAILKELSSYFQNFSSQTRLLTLPAPHEILPRELQDYQRHYLILNHMGTIRAEHDDFSIRFASAMNQMIMLKSSDGVDNDWSRDIKGNMYDIVVEGFQLLSRWTGRIWEQCAWKFSRPCKEPPISDSQQNSTTFFDYEKVVRWNYTAEERRALLELIGYIKSVGLMMQHCDTLVSEALWETIHMEVQDFVQDKLDTMLRTTFRKKKDLSRILSDMRTLSADWMAKTSNADPEQNSLHQETEEMRQNTFYPRPVAPTAAQIHCLQFLICELVSGGNMRKPGGY

SEQ ID NO: 68101 - protein, 622 aa, Setaria italica
  misc_feature (295)..(295): Xaa can be any naturally occurring amino acid
  Transcript Sequence Number=SeqID_2127
  Gene Ontology: Mol. function=protein binding; Cellular component =nucleus; Biological process=regulation of transcription, DNA -dependent
  Homolog annotation: Hit_ID=Q9ST48; Match level="QueryCoverage=99%, HitCoverage=98%, E-value=0.0, Identity=70%"; Hit description=DELLA protein DWARF8
  Pfam annotation: Domain name=GRAS; Domain location=238-618; Score =694.2; E_value=1.1e-205; Accession=PF03514.6; Description=GRAS family transcription factor
MKREYQDAGGSGGDMGSSKDKMMAAVAGAGEQDEEVDELLAALGYKVRSSDMADVAQKLEQLEMAMGMGGAGAAADDGFVSHLATDTVHYNPSDLSSWVESMLSELNAPPPPLPPAPPAPRLASTSSTVTGGAAAGGVYFDLPPAVDSSSSTYALKPIPSPAAASADPSTDSAREPKRMRTGGGSTSSSSSSSSSLDGGRTRSSVVEAAPPAAQASAAASGPAVPVVVVDTQEAGIRLVHALLACAEAVQQENFAAAEALVKQIPMLASSQGGAMRKVAAYFGEALARRVYRFRXPPPDSSLLDAAFADLLHAHFYESCPYLKFAHFTANQAILEAFAGCRRVHVVDFGIKQGMQWPALLQALALRPGGPPSFRLTGVGPPQPDETDALQQVGWKLAQFAHTIRVDFQYRGLVAATLADLEPFMLQPDGEDTDDEPEVIAVNSVFELHRLLAQPGALEKVLGTVRAVRPRIVTVVEQEANHNSGSFLDRFTESLHYYSTMFDSLEGAGSGNSAADASPAPAGGTDQVMSEVYLGRQICNVVACEGTERTERHETLGQWRNRLGRAGFEPVHLGSNAYKQASTLLALFAGGDGYRVEEKDGCLTLGWHTRPLIATSAWRAAAP

SEQ ID NO: 68102 - protein, 88 aa, Setaria italica
  Transcript Sequence Number=SeqID_2128
  Homolog annotation: Hit_ID=Q98EP9; Match level="QueryCoverage=100%, HitCoverage=17%, E-value=6e-28, Identity=67%"; Hit description =Mll4144 protein
  Pfam annotation: Domain name=MlrC_C; Domain location=1-88; Score =32.4; E_value=2.9e-09; Accession=PF07171.4; Description=MlrC C -terminus
GDPLDFRVKVMRTVETGWQSFRNSRVTLGRAAVVRPLGTEIDIILITSRTQTYEPDIFSNLGIDFAKKDLLLVKSTNHFHAGFAPIAS

SEQ ID NO: 68103 - protein, 247 aa, Setaria italica
  misc_feature (10)..(10): Xaa can be any naturally occurring amino acid
  Transcript Sequence Number=SeqID_2129
  Gene Ontology: Mol. function=aspartic-type endopeptidase activity; Cellular component=chromatin; Biological process=DNA integration
  Homolog annotation: Hit_ID=Q7XFV5; Match level="QueryCoverage=72%, HitCoverage=19%, E-value=4e-96, Identity=92%"; Hit description =Retrotransposon protein, putative, Ty1-copia subclass
AEFVSYCADXGIQRHYSAPYSPQQNGVVERRNQTVVGMTRALLKQRGMPAVLWGEAVVTAVYILNRSPTKALDSRTPYEAWHGRKPAVSHLRVFGCLAFAKELGYIGKLDNRSTPGVFIGYAEGSKAYRILDPETQRVRTARDVVFDEGRGWAWDKAVDDGSTPTYDDFTVEYVHFEGAGGVGNSSSSSVPTPVPEPPPTPTPATPAVPRSPAATSAATSFSPAPPQPATPRTPAPTATPPGCARHE

SEQ ID NO: 68104 - protein, 249 aa, Setaria italica
  Transcript Sequence Number=SeqID_2130
  Pfam annotation: Domain name=LEA_4; Domain location=116-159; Score =8.8; E_value=0.21; Accession=PF02987.8; Description=Late embryogenesis abundant protein
  Pfam annotation: Domain name=LEA_4; Domain location=27-70; Score =10.3; E_value=0.15; Accession=PF02987.8; Description=Late embryogenesis abundant protein
  Pfam module annotation: Pfam domain module=LEA_4::LEA_4; Domain location=116-159::27-70
GGTAAEYARAAAEKAKEAAVATARTTAGYTQQAAAKATEMTADTARKVAEYAREKAEQGKERQAEEPREDVAWEAAGKARHMTGQHEDTTGAMARRVGDTAGQAKDMVKDVTGSMAQKASDTAGRAKDTAMDAAGSVAQRSRDTAAEAGDKTKDATSHAEHKAGEVKDKASGTGKADGCGGGVTTKAKGGGGEDTTVVGDVLETVGAMVVGLAQHTKGLIAGEEELVPVEGGEEGKVTEARKEEKRKTA

SEQ ID NO: 68105 - protein, 173 aa, Setaria italica
  Transcript Sequence Number=SeqID_2131
NIIEIRRGKINVKASKSEAKNIYGRGCKRSCASHRRLAREVMQLAGDVVPTLVIPPVCCRLPLRPARHLSLVLSDPSNLGELVPAEVVAATSVHVDNAVEVIPTVSAQREEGLAACLRVVHAKVGLARGAPPPVDLTPLQDGEPTGHHHDLTLLQEAKDVVASIEEIRKTKGR

SEQ ID NO: 68106 - protein, 74 aa, Setaria italica
  Transcript Sequence Number=SeqID_2132
  Subcellular localization annotation: CTP_CleavageSite=53; ConfidenceScore=5.22e-01
GQQYGFGGQSSFGLGAHAPAQSGGFGFSSGFDNAMGSYMSQHQQQQRQNDAMHASRAKEEPREDMFFPQSMMYN

SEQ ID NO: 68107 - protein, 143 aa, Setaria italica
  Transcript Sequence Number=SeqID_2133
  Gene Ontology: Mol. function=catalytic activity
  Homolog annotation: Hit_ID=B9R8H7; Match level="QueryCoverage=78%, HitCoverage=15%, E-value=2e-37, Identity=64%"; Hit description =Pentatricopeptide repeat-containing protein, putative
LWRIVLGACRSLRDFNVGAYAGEKLMELGSEDSSAYILLSNIYAAQSKWIDVERVRRLMRLRGVSKDLGCSWVELNCQVHVFVVGEQQHPEATNINVELMRLAKHMKDEGYHQTCKFPFDEELDALGESPEEDQLELISAAYS

SEQ ID NO: 68108 - protein, 164 aa, Setaria italica
  misc_feature (73)..(73): Xaa can be any naturally occurring amino acid
  Transcript Sequence Number=SeqID_2134
  Gene Ontology: Cellular component=endoplasmic reticulum membrane
  Homolog annotation: Hit_ID=B6UA46; Match level="QueryCoverage=73%, HitCoverage=94%, E-value=4e-49, Identity=84%"; Hit description=BS14b
  Pfam annotation: Domain name=SNARE; Domain location=73-135; Score =60.7; E_value=5.4e-15; Accession=PF05739.11; Description=SNARE domain
FACADVHILNPFHFANYSFVCTYQFCVDSYYYITIICTFRSYRSTRTSLFDGIEEGGVRATSYSSHEIDEQEXNDRAIDGLQDRVSILKRLSGDIHEEVETHNRMLDRMGNDMDTSRGFLSGTVDKFKMVFETKSSRRMGTLVASFVALFLLVYYLTRYVRHRK

SEQ ID NO: 68109 - protein, 92 aa, Setaria italica
  Transcript Sequence Number=SeqID_2135
  Homolog annotation: Hit_ID=B6SLR0; Match level="QueryCoverage=100%, HitCoverage=36%, E-value=3e-34, Identity=78%"; Hit description=Tic20- like protein
  Subcellular localization annotation: CTP_CleavageSite=58; ConfidenceScore=5.55e-01
MVLCQGLSAGNTQLLAFPGRSSSLKNAQFRVKRNHFSARALRVGTDSIHHGMPTSFPMGNSVKGIPSLSIRHSQHPRSVSCQAFSLASFSYP

SEQ ID NO: 68110 - protein, 86 aa, Setaria italica
  misc_feature (31)..(31): Xaa can be any naturally occurring amino acid
  misc_feature (43)..(43): Xaa can be any naturally occurring amino acid
  Transcript Sequence Number=SeqID_2136
  Gene Ontology: Cellular component=microtubule organizing center; Biological process=microtubule cytoskeleton organization and biogenesis
ESRQLMRLPPRQSTAEADLMIPFQLAALETXGEILVSLKMLSXMKSSTSQKDLQKPNASELPCVGSSEAVASQQNIPEQYYPTHQV

SEQ ID NO: 68111 - protein, 320 aa, Setaria italica
  Transcript Sequence Number=SeqID_2137
  Gene Ontology: Mol. function=structural constituent of cytoskeleton; Cellular component=microtubule organizing center; Biological process= microtubule cytoskeleton organization and biogenesis
  Homolog annotation: Hit_ID=B9SAS5; Match level="QueryCoverage=100%, HitCoverage=42%, E-value=1e-142, Identity=75%"; Hit description =Gamma-tubulin complex component, putative
LMRLPPRQSTAEADLMIPFQLAALKTIGEEDKYFTRVSLKMLSYGMKSSTSQKDLQKPNASELPTQGKAASELALDGWDSIALEYSVDWPLQLFFTPDVLSKYRKVFQYLIRLKRTQMELEKSWAAVMHKDHADFSDYCKDRKNGSATQLRRQRSKPLWRVREHMAFLIRNLQFYIQVDVIESQWNVLQSHVQDSHDFTELVSFHQEYLSALVSQSFLDIGSVSRILDSIMKLCLQFCWSIEQYETRPNISEIDHITEEFNKKSNSLYTILRSSRLAGSQRAPFLRQFLMRLNFNSFFETTARGVMNSGRLRPSTAGAQL

SEQ ID NO: 68112 - protein, 48 aa, Setaria italica
  Transcript Sequence Number=SeqID_2138
KMQICGPLIMVDIDYQVLNVNELGHLRERKAMNRMPLLIRSCTSYYYY

SEQ ID NO: 68113 - protein, 216 aa, Setaria italica
  Transcript Sequence Number=SeqID_2139
  Gene Ontology: Mol. function=protein serine/threonine kinase activity; Cellular component=ubiquitin ligase complex; Biological process=ubiquitin-dependent protein catabolic process
  Homolog annotation: Hit_ID=B9RK56; Match level="QueryCoverage=51%, HitCoverage=14%, E-value=1e-15, Identity=39%"; Hit description=ATP binding protein, putative
MSESNANLRIESISHETFEQSHRSLLFDNFADDEAHSDSFSQAHSSHSASNVVTSSESSEHVASESSGTNATGTEGSKNYDSLSSLGGAPCATSNSSEECQSMDEVAKLRKELQDTLVVYDKACADLVNAKKKIQVLSTECSEEARKVEHALEWEEALKRTVADEKAKQLEATNQVEHARRSFTREAYSRHKAEMATNVLSQDRAQIVDAYSVKEQ

SEQ ID NO: 68114 - protein, 195 aa, Setaria italica
  Transcript Sequence Number=SeqID_2140
  Gene Ontology: Mol. function=carbon-nitrogen ligase activity, with glutamine as amido-N-donor
  Homolog annotation: Hit_ID=Q2A9N4; Match level="QueryCoverage=100%, HitCoverage=36%, E-value=1e-58, Identity=62%"; Hit description =Amidase, putative
  Pfam annotation: Domain name=Amidase; Domain location=1-195; Score= -121.4; E_value=2.2e-05; Accession=PF01425.13; Description=Amidase
  Subcellular localization annotation: CTP_CleavageSite=30; ConfidenceScore=5.03e-01
SALPPLHGIPVLLKDNIAAAGPLNATVGSLAMVGSRPAGDAGVVERLRSAGAVLLGTASLSEWCNFRGPGIPAGWSPRGGQGKNPYVPSATPCSSSSGSAIAAATNMAAVTIGTETDGSIMCPSSFNSVVGIKPTVGLTSRAGVIIISPRMDTVGPITRTVSDAVHVLEAIVGYDARDAEATRMASQYIPEGGYR

SEQ ID NO: 68115 - protein, 154 aa, Setaria italica
  misc_feature (41)..(41): Xaa can be any naturally occurring amino acid
  Transcript Sequence Number=SeqID_2141
  Pfam annotation: Domain name=DUF584; Domain location=1-154; Score =41.5; E_value=1.2e-10; Accession=PF04520.5; Description=Protein of unknown function, DUF584
  Subcellular localization annotation: CTP_CleavageSite=33; ConfidenceScore=5.37e-01
APANPSPIPRLRRPPEGILDALPERRRSPPQPSSSTSSSPXSPAAAPPRMIPAVPRPAPVPSPQMARSLPVNVPAARLRKPPKVMGEKTLLFPLSPMDEDDEEMLPPHEMVARARARESPMTTFSVLEGAGRTLKGRDLRQVRNAVWRKTGFLD

SEQ ID NO: 68116 - protein, 105 aa, Setaria italica
  Transcript Sequence Number=SeqID_2142
RCGGGGAAAGLRLFGVQLGAASTSGGGASPALQLHKSYSVDCLNLQACSAPAYALVAAPLLLSPSRSSALLLSIDECSTGRATDGGSGGGYLSDDGGRGGAALRE

SEQ ID NO: 68117 - protein, 86 aa, Setaria italica
  Transcript Sequence Number=SeqID_2143
LHSQLLIHAEVFSSHVLLLRSYAYILVINRAYNKQEAPNSASYFYVCSTFYVIYSSFETRAHEQEPPLRLLPFVLFCFVLFMFGCA

SEQ ID NO: 68118 - protein, 104 aa, Setaria italica
  misc_feature (77)..(77): Xaa can be any naturally occurring amino acid
  Transcript Sequence Number=SeqID_2144
  Gene Ontology: Mol. function=hydrolase activity, acting on glycosyl bonds; Biological process=cell wall organization and biogenesis
  Homolog annotation: Hit_ID=B6T6X1; Match level="QueryCoverage=66%, HitCoverage=12%, E-value=4e-26, Identity=82%"; Hit description =Polygalacturonase
  Subcellular localization annotation: CTP_CleavageSite=65; ConfidenceScore=5.10e-01
SSLLGQSRSLGLTWILSFSTMWSSRQCHILNLMQALRFYGSFNVLVAGITIVNSSQCHLKFDNCQGVMVHDVTISSXPENSLNTDGIHLQSTESLRLSHTNMAW

SEQ ID NO: 68119 - protein, 206 aa, Setaria italica
  Transcript Sequence Number=SeqID_2145
  Gene Ontology: Mol. function=hydrolase activity, acting on glycosyl bonds; Biological process=cell wall organization and biogenesis
  Homolog annotation: Hit_ID=B6T6X1; Match level="QueryCoverage=94%, HitCoverage=36%, E-value=5e-99, Identity=89%"; Hit description =Polygalacturonase
  Pfam annotation: Domain name=Glyco_hydro_28; Domain location=1-171; Score=-23.4; E_value=6.1e-08; Accession=PF00295.9; Description =Glycosyl hydrolases family 28
RQGVPFVFFNAGDDCISIQTGCSNINIHNVNCGPGHGISIGGLGRDNTKACVSNVTVRDVNMLRTMNGVRIKTWQGGVGLVQDIRFSNIQVTEVQTPIIIDQFYCDKSTCRNQTSAVGVSGVQYENIRGTFTIKPVHFACSDSLPCSGISLTGVQLRPVQVPHYHLNNPFCWQAFGELYPPTVPPIACLQLGKPAGNNLQTYNDIC

SEQ ID NO: 68120 - protein, 258 aa, Setaria italica
  Transcript Sequence Number=SeqID_2146
  Gene Ontology: Mol. function=hydrolase activity, acting on glycosyl bonds; Biological process=cell wall organization and biogenesis
  Homolog annotation: Hit_ID=B6T6X1; Match level="QueryCoverage=97%, HitCoverage=46%, E-value=1e-107, Identity=76%"; Hit description =Polygalacturonase
  Pfam annotation: Domain name=Glyco_hydro_28; Domain location=7-258; Score=85.2; E_value=2.3e-22; Accession=PF00295.9; Description =Glycosyl hydrolases family 28
GAWAAACKQGASTVLVPPELEFLVGPISFSGPYCKTNIVFQLEGTILAPTSAKAWGSGLLQWLEFTKLNGIVIQGNGIINGRGQQWWTYADLEDEDEDDTYDVEFETMPHIKPTALRFYGSFNVLVAGITIVNSSQCHLKFDNCQGVMVHDVTISSPENSLNTDGIHLQNSKDVSIHHTNMACGDDCISIQTGCSNINIHNVNCGPGHGISIGGLGRDNTKACVSNVTVRDVNMLRTMNGVRIKTWQVSLGTDIQIKS

SEQ ID NO: 68121 - protein, 83 aa, Setaria italica
  Transcript Sequence Number=SeqID_2147
  Gene Ontology: Mol. function=2-alkenal reductase activity; Biological process=oxidation reduction
  Homolog annotation: Hit_ID=Q2KM86; Match level="QueryCoverage=86%, HitCoverage=20%, E-value=4e-29, Identity=84%"; Hit description=2 -alkenal reductase
MAAAAAAAGTEEVPNRRVILKRHVTGFPAEDDMEVVAGAARLAVPPGSAAVVLKNLYLSCDPYMRGRMSKHDRPSYVPDFVPG

SEQ ID NO: 68122 - protein, 83 aa, Setaria italica
  Transcript Sequence Number=SeqID_2148
  Gene Ontology: Mol. function=oxidoreductase activity, acting on the CH-OH group of donors, NAD or NADP as acceptor; Cellular component =chloroplast; Biological process=L-serine biosynthetic process
  Homolog annotation: Hit_ID=B6SYR1; Match level="QueryCoverage=100%, HitCoverage=14%, E-value=3e-38, Identity=90%"; Hit description=D-3 -phosphoglycerate dehydrogenase
  Pfam annotation: Domain name=2-Hacid_dh_C; Domain location=1-83; Score=-13.0; E_value=7.8e-09; Accession=PF02826.11; Description=D -isomer specific 2-hydroxyacid dehydr
LGMDIIAHDPYAPVDRARAIGVDLVSFDEAISTADFISLHMPLTPSTAKLFNDETFAKMKKGVRIINVARGGVVDEEALLRAL

SEQ ID NO: 68123 - protein, 56 aa, Setaria italica
  Transcript Sequence Number=SeqID_2149
LGRSKRFIFADRTGLFHKKQEEIPVSKLYILLSMVNKALATVMGWLNKLVQEEQRY

SEQ ID NO: 68124 - protein, 151 aa, Setaria italica
  Transcript Sequence Number=SeqID_2150
MGLPSCQVVEINSYIGNLTSSYTEKSNELSMVAASVIMFVLVGLFFNLNLFSGISDISAILDPKVRLVLTSALSLFLPVMSYLFSEAKNTGHLQSSTTAGSTQVADLPLRAGLILAWMLLVELLRKKVDEIRMRGFSGTIQRAGRVGGCLG

SEQ ID NO: 68125 - protein, 167 aa, Setaria italica
  misc_feature (117)..(117): Xaa can be any naturally occurring amino acid
  Transcript Sequence Number=SeqID_2151
  Gene Ontology: Mol. function=aspartic-type endopeptidase activity; Cellular component=chromatin; Biological process=RNA-dependent DNA replication
  Homolog annotation: Hit_ID=Q10PF2; Match level="QueryCoverage=98%, HitCoverage=17%, E-value=1e-55, Identity=61%"; Hit description =Retrotransposon protein, putative, unclassified
GSFVLVFLDDILIYSPTLEVHIRHLRLVLEKFREHHFFLKHSKCSFAQHQLDYLGHIISDQGVATDPTKIEAMLKWPIPTNVADLRGFLGLTCYYRKFIKHYGLMAKPLTALLKKSXFEWSALAQAAFDKLKEAMVTAPVLAIPNFTKPFTIETDASDSGVGAVLMQ

SEQ ID NO: 68126 - protein, 178 aa, Setaria italica
  misc_feature (33)..(33): Xaa can be any naturally occurring amino acid
  misc_feature (150)..(150): Xaa can be any naturally occurring amino acid
  Transcript Sequence Number=SeqID_2152
  Gene Ontology: Mol. function=serine-type carboxypeptidase activity; Cellular component=extracellular region; Biological process =proteolysis
  Homolog annotation: Hit_ID=Q10QL8; Match level="QueryCoverage=97%, HitCoverage=46%, E-value=3e-62, Identity=64%"; Hit description =Serine carboxypeptidase family protein, expressed
  Pfam annotation: Domain name=Peptidase_S10; Domain location=1-178; Score=-139.8; E_value=7.3e-07; Accession=PF00450.14; Description =Serine carboxypeptidase
YAADTEVYKAMGDNMTASDSLQFLLKWLDRFPXYKNRDFFIVGESYAGHYVPELATAIQVAKITRPAEVPINLKGIALGNAILEFAAEQAALYEYLWQHAFISDSGHDMIAQNCKNIDDNSPLCSVANDTAYGQIGNVDVYNVYAATCHXDKKAKATGSNCMDLADPCAQYYVEAYLN

SEQ ID NO: 68127 - protein, 62 aa, Setaria italica
  Transcript Sequence Number=SeqID_2153
  Gene Ontology: Mol. function=binding
  Homolog annotation: Hit_ID=B9SG46; Match level="QueryCoverage=98%, HitCoverage=5%, E-value=9e-13, Identity=54%"; Hit description =Tetratricopeptide repeat protein, tpr, putative
PPDVQVDWEAILSPDPDAFVDAVKPWLYPSIKISRCLKDYTDVSCAFSKTGSVVAALTSVDP

SEQ ID NO: 68128 - protein, 1013 aa, Setaria italica
  misc_feature (84)..(84): Xaa can be any naturally occurring amino acid
  Transcript Sequence Number=SeqID_2154
  Gene Ontology: Mol. function=binding
  Homolog annotation: Hit_ID=B9SG46; Match level="QueryCoverage=99%, HitCoverage=99%, E-value=0.0, Identity=64%"; Hit description =Tetratricopeptide repeat protein, tpr, putative
  Pfam annotation: Domain name=TPR_1; Domain location=266-299; Score =11.1; E_value=0.27; Accession=PF00515.20; Description=Tetratricopepti de repeat
  Pfam annotation: Domain name=TPR_1; Domain location=300-333; Score =28.0; E_value=4e-05; Accession=PF00515.20; Description =Tetratricopeptide repeat
  Pfam annotation: Domain name=TPR_1; Domain location=334-367; Score =40.5; E_value=6.7e-09; Accession=PF00515.20; Description =Tetratricopeptide repeat
  Pfam annotation: Domain name=TPR_1; Domain location=35-68; Score =19.9; E_value=0.011; Accession=PF00515.20; Description =Tetratricopeptide repeat
  Pfam annotation: Domain name=TPR_1; Domain location=368-401; Score =10.5; E_value=0.32; Accession=PF00515.20; Description=Tetratricopepti de repeat
  Pfam annotation: Domain name=TPR_1; Domain location=402-435; Score =7.5; E_value=0.74; Accession=PF00515.20; Description=Tetratricopeptid e repeat
  Pfam annotation: Domain name=TPR_1; Domain location=436-469; Score =8.3; E_value=0.59; Accession=PF00515.20; Description=Tetratricopeptid e repeat
  Pfam annotation: Domain name=TPR_1; Domain location=470-503; Score =17.4; E_value=0.048; Accession=PF00515.20; Description =Tetratricopeptide repeat
  Pfam annotation: Domain name=TPR_1; Domain location=504-537; Score =23.7; E_value=0.00078; Accession=PF00515.20; Description =Tetratricopeptide repeat
  Pfam annotation: Domain name=TPR_1; Domain location=69-102; Score =6.9; E_value=0.88; Accession=PF00515.20; Description=Tetratricopeptid e repeat
  Pfam annotation: Domain name=TPR_2; Domain location=266-299; Score =15.5; E_value=0.23; Accession=PF07719.9; Description=Tetratricopeptid e repeat
  Pfam annotation: Domain name=TPR_2; Domain location=300-333; Score =26.0; E_value=0.00016; Accession=PF07719.9; Description =Tetratricopeptide repeat
  Pfam annotation: Domain name=TPR_2; Domain location=334-367; Score =35.3; E_value=2.5e-07; Accession=PF07719.9; Description =Tetratricopeptide repeat
  Pfam annotation: Domain name=TPR_2; Domain location=35-68; Score =11.2; E_value=1.4; Accession=PF07719.9; Description=Tetratricopeptide repeat
  Pfam annotation: Domain name=TPR_2; Domain location=368-401; Score =5.1; E_value=8; Accession=PF07719.9; Description=Tetratricopeptide repeat
  Pfam annotation: Domain name=TPR_2; Domain location=402-435; Score =10.5; E_value=1.7; Accession=PF07719.9; Description=Tetratricopeptide repeat
  Pfam annotation: Domain name=TPR_2; Domain location=436-469; Score =9.2; E_value=2.4; Accession=PF07719.9; Description=Tetratricopeptide repeat
  Pfam annotation: Domain name=TPR_2; Domain location=470-503; Score =15.4; E_value=0.24; Accession=PF07719.9; Description=Tetratricopeptid e repeat
  Pfam annotation: Domain name=TPR_2; Domain location=504-537; Score =19.8; E_value=0.012; Accession=PF07719.9; Description=Tetratricopepti de repeat
  Pfam annotation: Domain name=TPR_2; Domain location=69-102; Score =4.3; E_value=9.9; Accession=PF07719.9; Description=Tetratricopeptide repeat
  Pfam module annotation: Pfam domain module=TPR_1::TPR_1::TPR_1::TPR _1::TPR_1::TPR_1::TPR_1::TPR_1::TPR_1::TPR_1::TPR_2::TPR_2::TPR _2::TPR_2::TPR_2::TPR_2::TPR_2::TPR_2::TPR_2::TPR_2; Domain location =266-299::300-333::...
  Pfam module annotation: Domain location=334-367::35-68::368-401::402 -435::436-469::470-503::504-537::69-102::266-299::300-333::334 -367::35-68::368-401::402-435::436-469::470-503::504-537::69-102
MSSERAELARLCSIRNWSKAIRLLDSILARSPSSIHDLCNRAFCYSHLELHKHVVKDCDRALQLDPALLQAYVLKGKALSALEXKEDALVAWKQGYEVAVRDTTDLKQLLELEELVSSVKICETTEPADSVMDASPCDTKVVISEDRVVDTSSAATTMADTKTVVCEEAIGNSKVSSNGDTKLPNHNNKVDNNKVSSSPVKDSTRTQAPKKAPKPDKKNKAKAVKEINGRAEDVTDRTSSDDCKTISLDQTLFATKISKSSKSISLDFRLSRGIAQVNEGRYDQAISIFDQILRETPTYPEALIGRGTAYAFQRELDSAISDFTKAIQSNPSAGEAWKRRGQARAALGEFKEAIEDLTKALEFEPNSSDILHERGIVNFKFKDYNCALEDLSTCVKRDKKNSSAHTYLGLTLSALGEYKRAEDEHLVGIKYDESFLDCWAHLAQLYLDLAYPEKLLNCLEKAIQIDSRFAKAYHLRGILYHGMGRHRSAIKELSIALTYESSSIECLYLRASCHHAVGEYKLAIKDYDDVLDLELDSMDKFVLQCLAFYQKEMALYIASKANLEFSQFNIDDDVDPLFKEYWCKRLHPKNVAEKVYRQPPLRISLRSGRLNKQDFKFTKQQTTLLLAADSIGKKIQYNCRGFLPNQRQYRMAGLAAIEIAQKVSKAWRFLRNPKNIAKLVRRRDKLNMSQNRGGYCSTSTLSGSPTSSPNEERVFSGISLSWLDVYNIAVKWRQISEPCDPVVWVNKLSEEFNSGFGSHTPMLLGQAKVVRYYPYYQRVLETAKTIMLDLKYVNNAEDRAIFLTDIEKLKKIEVASSCSDLYHIVGETYWVATRCDSMASQGRRLEGTRITTQNMGKTGFDFAIRTPCTPSRWEEYDEEMTAAWEAICEAYCNDTNPTRDPGTLDAVKDAILRMTYYWYNFMPLSRGSAVVGYIVLLGLFLAANMDVTASIPPDVQVDWEAILSPDPDAFVDAVKPWLYPSIKISRCLKDYTDVSCAFSKTGSVVAALTSVDP

SEQ ID NO: 68129 - protein, 72 aa, Setaria italica
  Transcript Sequence Number=SeqID_2155
YPLVGLGPPDPINSTQPIQKNPTEPDQCIGSDGRGLIFMTDQKYDMGQFFYPKSKKFNQTPRLHTKRGSNSI

SEQ ID NO: 68130 - protein, 210 aa, Setaria italica
  Transcript Sequence Number=SeqID_2156
  Gene Ontology: Mol. function=catalytic activity; Cellular component =anchored to membrane; Biological process=oxidation reduction
  Homolog annotation: Hit_ID=C3TX91; Match level="QueryCoverage=92%, HitCoverage=27%, E-value=8e-88, Identity=78%"; Hit description =Hedgehog-interacting-like protein
FSNPWRCSFDSKRPSYFYCGDVGQDAYEEVDLITKGGNYGWRAYEGPYIYHPQQSPGGNTSLDSINAIFPVMGYDHSSVNKEIGSASITGGYVYRGSTDPCLYGRYLYTDLYSSMMWTGTETPEGSGNYTSAVIPLSCSKNSPIACESSTGSTDPLLGYIFSFGEDNSKDIFVLASKGVYRVVRPSLCGYTCAAEKPDTNNGTTTTPGSS

SEQ ID NO: 68131 - protein, 190 aa, Setaria italica
  Transcript Sequence Number=SeqID_2157
  Gene Ontology: Mol. function=nucleotide binding; Biological process =defense response
  Homolog annotation: Hit_ID=Q8RUA3; Match level="QueryCoverage=85%, HitCoverage=17%, E-value=1e-57, Identity=68%"; Hit description =Putative disease resistance protein
FLLFRSVRYFRSLFRFVSSLFRPFPSLRRLQSLKLLGPVDSPEGPDGAEDARYIRPNLTRLSMWGTMVKQRFVDMLAELPSLAELTLMNDAYDGDRLAFGEAGFRSLHELKLGLPKLEEWAVGAGSMPGLATLTLYRCAKMQMLPEALAGMTELEEVVLYSMLDIVGRIKEGEGQDHHKVKHVPVIQTIY

SEQ ID NO: 68132 - protein, 62 aa, Setaria italica
  Transcript Sequence Number=SeqID_2158
  Gene Ontology: Mol. function=phosphoprotein phosphatase activity; Cellular component=cytoplasm; Biological process=G1/S transition of mitotic cell cycle
  Homolog annotation: Hit_ID=B7FL39; Match level="QueryCoverage=85%, HitCoverage=30%, E-value=2e-23, Identity=98%"; Hit description =Serine/threonine protein phosphatase (Fragment)
LLFVWPDVQVKEILIEESNVQPVNSPVTVCGDIHGQFHDLMKLFATGGHVPETNYIFMGDFV

SEQ ID NO: 68133 - protein, 126 aa, Setaria italica
  Transcript Sequence Number=SeqID_2159
  Gene Ontology: Mol. function=phosphoprotein phosphatase activity; Cellular component=cytosol; Biological process=protein amino acid dephosphorylation
  Homolog annotation: Hit_ID=Q9SX52; Match level="QueryCoverage=100%, HitCoverage=41%, E-value=4e-65, Identity=91%"; Hit description =Phytochrome-associated serine/threonine protein phosphatase 1
DRGFNSLEVFTILLLLKARYPAHITLLRGNHESRQLTQVYGFYDECQRKYGNANAWRYCTDVFDYLTLSAIINGTVLCVHGGLSPDVRTVDQIRVIDRNCEIPHEGPFCDLMWSDPEEIDTWQVVP

SEQ ID NO: 68134 - protein, 76 aa, Setaria italica
  Transcript Sequence Number=SeqID_2160
QKRADFAFSWQLRPLFLSQDKPACITVADEPLNHKVCLIPQKSMVDAERQQFAYFIDGPTETLPLIQKVLIVFYSF

SEQ ID NO: 68135 - protein, 159 aa, Setaria italica
  Transcript Sequence Number=SeqID_2161
  Gene Ontology: Mol. function=phosphoprotein phosphatase activity; Cellular component=cytoplasm; Biological process=G1/S transition of mitotic cell cycle
  Homolog annotation: Hit_ID=Q9SX52; Match level="QueryCoverage=100%, HitCoverage=52%, E-value=2e-83, Identity=89%"; Hit description =Phytochrome-associated serine/threonine protein phosphatase 1
DYLTLSAIINGTVLCVHGGLSPDVRTVDQIRVIDRNCEIPHEGPFCDLMWSDPEEIDTWAVSPRGAGWLFGTRVTQEFNHINKIELVCRAHQLVQEGLKYMFDNGLVTVWSAPNYCYRCGNIASILSFSENMEREVKFFTETEENNQMRGPRTAVPYFL

SEQ ID NO: 68136 - protein, 303 aa, Setaria italica
  Transcript Sequence Number=SeqID_2162
  Gene Ontology: Mol. function=phosphoprotein phosphatase activity; Cellular component=cytoplasm; Biological process=G1/S transition of mitotic cell cycle
  Homolog annotation: Hit_ID=Q9SX52; Match level="QueryCoverage=100%, HitCoverage=100%, E-value=1e-167, Identity=91%"; Hit description =Phytochrome-associated serine/threonine protein phosphatase 1
  Pfam annotation: Domain name=Metallophos; Domain location=43-238; Score=141.2; E_value=3.3e-39; Accession=PF00149.20; Description =Calcineurin-like phosphoesterase
MDLDLWISKVKEGQHLAEHELQTLCEYVKEILIEESNVQPVNSPVTVCGDIHGQFHDLMKLFATGGHVPETNYIFMGDFVDRGFNSLEVFTILLLLKARYPAHITLLRGNHESRQLTQVYGFYDECQRKYGNANAWRYCTDVFDYLTLSAIINGQVLCVHGGLSPDVRTIDQIRTIDRNCEIPHEGPFCDLMWSDPEEIETWAVSPRGAGWLFGSRVTAEFNFVNGIELVCRAHQLVQEGLKYMFQEKGLVTVWSAPNYCYRCGNVASILSFDEKMERDVKFFTETEENNQMRGPRTAVPYFL

SEQ ID NO: 68137 - protein, 220 aa, Setaria italica
  Transcript Sequence Number=SeqID_2163
  Gene Ontology: Mol. function=phosphoribosyl-AMP cyclohydrolase activity; Cellular component=chloroplast; Biological process =histidine biosynthetic process
  Homolog annotation: Hit_ID=B6TR63; Match level="QueryCoverage=100%, HitCoverage=73%, E-value=1e-120, Identity=94%"; Hit description =Histidine biosynthesis bifunctional protein hisIE
  Pfam annotation: Domain name=MazG; Domain location=144-206; Score =9.6; E_value=0.00032; Accession=PF03819.9; Description=MazG nucleotide pyrophosphohydrolase domain
  Pfam annotation: Domain name=PRA-CH; Domain location=19-93; Score =123.6; E_value=6.5e-34; Accession=PF01502.10; Description =Phosphoribosyl-AMP cyclohydrolase
  Pfam annotation: Domain name=PRA-PH; Domain location=114-207; Score =79.2; E_value=1.5e-20; Accession=PF01503.9; Description =Phosphoribosyl-ATP pyrophosphohydrolase
  Pfam module annotation: Pfam domain module=MazG::PRA-CH::PRA-PH; Domain location=144-206::19-93::114-207
  Subcellular localization annotation: CTP_CleavageSite=28; ConfidenceScore=5.16e-01
TKGLAVAIAQHVDTGAILMQGFANKEALAKTISTRKATFFSRSRSSLWTKGETSMNFINVHDIFLDCDRDSIIYLGKPDGPTCHTGAETCYYTSVYNALQGSKPNEDRQVMTTLYSLEDTISRRQEETVTEGSGKPSWTKKLLLDNQLLCSKIREEAGELIQTLLENEDQSRTASEMADLLYHAMVLLRVKDVKMEEVLEVLRKRFSQSGIEEKANRNKS

SEQ ID NO: 68138 - protein, 86 aa, Setaria italica
  Transcript Sequence Number=SeqID_2164
PHPPPPLPLPLGTASRSFWILPPEWMERKFYEKYTALKKRKLLDEGLERKREEQLKELYDAMKDWVGGLEKDKEELSEKLADKEDE

SEQ ID NO: 68139 - protein, 267 aa, Setaria italica
  Transcript Sequence Number=SeqID_2165
SVSFLRSKLLPSLLSKSVSLASTRGLERKREEQLKELYDAMKDWVGGLEKDKEELSEKLADKEDELEKAREEFLEDLRAKDSEILRLKKLLDEQIEKNNSTATRSVDQTPEAIQANPTQMSPKRKTPQSNCNTKRVQLSENASIPHSSLEDESQELECSRRYTCISGNETNECPSAHMFHLLLQSLVRMKVTVDDGTERFSVSVCHEASGYSFNLTWLEKPGEWSYKLSSLGTLERIAVNWMKQDIRFSMNMCRVFFERISNIITRG

SEQ ID NO: 68140 - protein, 69 aa, Setaria italica
  Transcript Sequence Number=SeqID_2166
  Subcellular localization annotation: CTP_CleavageSite=48; ConfidenceScore=5.12e-01
QHLLPAGCLIPHRCTSSCFCSSHQLVSHRCGRRSRIDPVIPRWSPSPAASEGEDSSGRGLEQRQAPVVT

SEQ ID NO: 68141 - protein, 114 aa, Setaria italica
  Transcript Sequence Number=SeqID_2167
LAGIGCIPGCHCRQPPSTSADQNPPSSSHHFQINKEKSLSSYSPLTNLLHVDFFSPKSQAPELAQAAAAGAARQLPQAALPEAARRNTPTTPMTQSRVMQSTCCWIPMHASSWI

SEQ ID NO: 68142 - protein, 233 aa, Setaria italica
  Transcript Sequence Number=SeqID_2168
  Gene Ontology: Mol. function=transferase activity, transferring glycosyl groups; Cellular component=integral to membrane; Biological process=cell wall organization and biogenesis
  Homolog annotation: Hit_ID=Q7EZW6; Match level="QueryCoverage=93%, HitCoverage=18%, E-value=1e-117, Identity=91%"; Hit description =Cellulose synthase-like protein D3
  Pfam annotation: Domain name=Cellulose_synt; Domain location=1-233; Score=-282.5; E_value=0.0096; Accession=PF03552.6; Description =Cellulose synthase
KNKTKPKETKVNEGTKTEWGDRVGWIYGSVTEDVVSGYRMHNRGWRSVYCIPKRDAFLGTAPINLTDRLHQVLRWATGSVEIFFSRNNAFLASRRLYLVKRVAYLNVGIYPFTSIFLLVYCFIPALSLFSGFFIVQTLNVAFLCYLLTITVTLIALGVLEVKWSGIALEDWWRNEQFWLISGTSAHLYAVVQGLLKVMAGIEISFTLTAKAAADENEDIYADLYVVKWSSLLT

SEQ ID NO: 68143 - protein, 48 aa, Setaria italica
  Transcript Sequence Number=SeqID_2169
GCTNAEHPGKIPGCVKHISGCSAFVHTHVWLWLRMVFQWIRISDASTS

SEQ ID NO: 68144 - protein, 81 aa, Setaria italica
  Transcript Sequence Number=SeqID_2170
  Gene Ontology: Mol. function=protein dimerization activity; Cellular component=nucleus; Biological process=regulation of transcription, DNA-dependent
EGQRIDAEIDSFPFQKHSSVDSVICTDPPLCFNTNAEVAARETSSGGPTILDFEIDESGSVSRELDIPEVVNSMDAAASYF

SEQ ID NO: 68145 - protein, 620 aa, Setaria italica
  Transcript Sequence Number=SeqID_2171
  Gene Ontology: Mol. function=protein kinase activity; Cellular component=cell wall; Biological process=protein amino acid phosphorylation
  Homolog annotation: Hit_ID=Q53PC8; Match level="QueryCoverage=99%, HitCoverage=92%, E-value=1e-133, Identity=35%"; Hit description =Leucine Rich Repeat family protein, expressed
  Pfam annotation: Domain name=LRR_1; Domain location=100-122; Score =12.7; E_value=1.1; Accession=PF00560.25; Description=Leucine Rich Repeat
  Pfam annotation: Domain name=LRR_1; Domain location=124-146; Score =11.2; E_value=2.2; Accession=PF00560.25; Description=Leucine Rich Repeat
  Pfam annotation: Domain name=LRR_1; Domain location=148-170; Score =11.3; E_value=2.1; Accession=PF00560.25; Description=Leucine Rich Repeat
  Pfam annotation: Domain name=LRR_1; Domain location=172-194; Score =17.5; E_value=0.055; Accession=PF00560.25; Description=Leucine Rich Repeat
  Pfam annotation: Domain name=LRR_1; Domain location=196-219; Score =11.1; E_value=2.2; Accession=PF00560.25; Description=Leucine Rich Repeat
  Pfam annotation: Domain name=LRR_1; Domain location=28-50; Score =12.5; E_value=1.2; Accession=PF00560.25; Description=Leucine Rich Repeat
  Pfam annotation: Domain name=LRR_1; Domain location=4-26; Score=16.1; E_value=0.14; Accession=PF00560.25; Description=Leucine Rich Repeat
  Pfam annotation: Domain name=LRR_1; Domain location=52-74; Score =16.8; E_value=0.091; Accession=PF00560.25; Description=Leucine Rich Repeat
  Pfam annotation: Domain name=LRR_1; Domain location=76-98; Score =15.6; E_value=0.2; Accession=PF00560.25; Description=Leucine Rich Repeat
  Pfam annotation: Domain name=Pkinase; Domain location=312-607; Score =119.8; E_value=8.9e-33; Accession=PF00069.17; Description=Protein kinase domain
  Pfam annotation: Domain name=Pkinase_Tyr; Domain location=312-607; Score=52.1; E_value=3.4e-17; Accession=PF07714.9; Description =Protein tyrosine kinase
  Pfam module annotation: Pfam domain module=LRR_1::LRR_1::LRR_1::LRR _1::LRR_1::LRR_1::LRR_1::LRR_1::LRR_1::Pkinase::Pkinase_Tyr; Domain location=100-122::124-146::148-170::172-194::196-219::28-50::4 -26::52-74::76-98::312-607::312-607
LPTNLTTLIMSDNHLSGTVPASIGKLNSLIHLALDGNNLTGTIDEWIGKLTNLQRLNLGGNNFAGIIPPSISDLIGLSFLSFANNNFTGSIPPSLGNLQPLINLSLSNNNFRGSIPVEFGNLKQLVVLDISSNKLGGVIPENLGQCKHLTTIEMDQNILTGNIPTTFSNLNSLSMLNLSHNNLSGPLPDSLNDLELLSKLDLSYNNFQGEIPRNSIFDNVTVVSLNGNPGLCGGAMDLRMPSCRVDSRRARHVNYLVKILIPIFGFMSLLLLVYFLVLEKKTSRRADLSQLSFGEHFEKVSYNDLAQATRDFSESNLIGRGSYGSVYSGKLKENKMEVAVKVFNLEMRGAERSFLAECEALRSIQHRNLLPIITACSTVDNAGNVFKALVYELMPNGNLDTWIHHRDDEAAPKRLNLTQRIGIVVNVADALDYLHHDCGRPTVHCDLKPSNILLDDDMNALLGDFGIARLYVDHQSAWAGSISSIGVKGTIGYIPPEYGGGGHASTSGDVYSFGVLLLEILTGKRPTDPMFTDGLDIISFVENSFPDQIFQVIDAHLVEECKKLTQEKKVTENEIYQCLAALLQVALSCTRLLPSERSNMKQVASKIHAIKASHLGWKYK

SEQ ID NO: 68146 - protein, 455 aa, Setaria italica
  Transcript Sequence Number=SeqID_2172
  Gene Ontology: Mol. function=protein serine/threonine kinase activity; Cellular component=cell wall; Biological process=protein amino acid phosphorylation
  Homolog annotation: Hit_ID=Q53PC8; Match level="QueryCoverage=93%, HitCoverage=58%, E-value=3e-74, Identity=32%"; Hit description =Leucine Rich Repeat family protein, expressed
  Pfam annotation: Domain name=LRRNT_2; Domain location=36-74; Score =48.6; E_value=2.5e-11; Accession=PF08263.4; Description=Leucine rich repeat N-terminal domain
  Pfam annotation: Domain name=LRR_1; Domain location=104-125; Score =7.7; E_value=10; Accession=PF00560.25; Description=Leucine Rich Repeat
  Pfam annotation: Domain name=LRR_1; Domain location=127-149; Score =15.4; E_value=0.24; Accession=PF00560.25; Description=Leucine Rich Repeat
  Pfam annotation: Domain name=LRR_1; Domain location=151-173; Score =16.7; E_value=0.096; Accession=PF00560.25; Description=Leucine Rich Repeat
  Pfam annotation: Domain name=LRR_1; Domain location=175-197; Score =10.1; E_value=3.6; Accession=PF00560.25; Description=Leucine Rich Repeat
  Pfam annotation: Domain name=LRR_1; Domain location=199-221; Score =7.8; E_value=9.7; Accession=PF00560.25; Description=Leucine Rich Repeat
  Pfam annotation: Domain name=LRR_1; Domain location=223-245; Score =6.2; E_value=20; Accession=PF00560.25; Description=Leucine Rich Repeat
  Pfam annotation: Domain name=LRR_1; Domain location=247-269; Score =10.8; E_value=2.6; Accession=PF00560.25; Description=Leucine Rich Repeat
  Pfam annotation: Domain name=LRR_1; Domain location=272-294; Score =13.4; E_value=0.82; Accession=PF00560.25; Description=Leucine Rich Repeat
  Pfam annotation: Domain name=LRR_1; Domain location=296-318; Score =11.5; E_value=1.9; Accession=PF00560.25; Description=Leucine Rich Repeat
  Pfam annotation: Domain name=LRR_1; Domain location=350-372; Score =12.8; E_value=1.1; Accession=PF00560.25; Description=Leucine Rich Repeat
  Pfam annotation: Domain name=LRR_1; Domain location=375-397; Score =16.1; E_value=0.14; Accession=PF00560.25; Description=Leucine Rich Repeat
  Pfam annotation: Domain name=LRR_1; Domain location=399-421; Score =12.5; E_value=1.2; Accession=PF00560.25; Description=Leucine Rich Repeat
  Pfam annotation: Domain name=LRR_1; Domain location=423-445; Score =16.8; E_value=0.091; Accession=PF00560.25; Description=Leucine Rich Repeat
  Pfam annotation: Domain name=LRR_1; Domain location=80-102; Score =1.0; E_value=1.9e+02; Accession=PF00560.25; Description=Leucine Rich Repeat
  Pfam module annotation: Pfam domain module=LRRNT_2::LRR_1::LRR_1::LRR_ 1::LRR_1::LRR_1::LRR_1::LRR_1::LRR_1::LRR_1::LRR_1::LRR_1::LRR_1::LRR_ 1::LRR_1; Domain location=36-74::104-125::127-149::151-173::175 -197::199-221::...
  Pfam module annotation: Domain location=223-245::247-269::272 -294::296-318::350-372::375-397::399-421::423-445::80-102
MWQSKLLPKLTMLVVLPLLLLCYAAGNVHCSTIHENSEDFHSLLDFKKGITDPTALSNWTSNTHFCRWNGVNCTLTRPYRVTELVLPGKNLAGQISSSLGNLTYLNKLVLTNNSFHGPIPLLNKLLNLKYLSLGSNLLQGEIPDALTNCSNLVKLDLSKNNLTGVIPPRIGFLTKLESLLLYENSLSCVIPPGLGNITDLSVIALSQNQLNGPIPTEFWRMPNIALLYMPENNLSGGIPQTLFNLSSLRLLSLAYNMLGNTLPSNFGNALPNIQFLYLANNMFEGNIPASLANASGLIDLSLSSNKFTGQIPSIFVNFSVLSTLILEENMLEASDSAGWEFFDALTNCSFLTVLSLAGNNLQGVVPNSVGNLPTNLTTLIMSDNHLSGTVPASIGKLNSLIHLALDGNNLTGTIDEWIGKLTNLQRLNLGGNNFAGIIPPSISDLIGVQIGYKLT

SEQ ID NO: 68147 - protein, 212 aa, Setaria italica
  Transcript Sequence Number=SeqID_2173
  Gene Ontology: Mol. function=threonine-type endopeptidase activity; Cellular component=proteasome core complex; Biological process =ubiquitin-dependent protein catabolic process
  Homolog annotation: Hit_ID=B6T4A2; Match level="QueryCoverage=93%, HitCoverage=93%, E-value=1e-108, Identity=94%"; Hit description =Proteasome subunit beta type
  Pfam annotation: Domain name=Proteasome; Domain location=1-182; Score= 183.2; E_value=7.2e-52; Accession=PF00227.18; Description=Proteasome A-type and B-type
MECVLGLVGRDFAVVAADTSAVQSILVHKTDEDKVMVLDSHKLMGASGEPGDRVQFTEYIQKNLHLYQFRNTIPLSTAATANFTRGELATALRKNPYMVNVILGGYDKDVGASLYYIDYIATLHKIDKGAFGYGSYFCLSLMDKLYHPDMTLEEAVDLVDKCIKEIRLRLVVAPQNFVIKVVDKDGARELARRELVGDSASAEAAAATTVAA

SEQ ID NO: 68148 - protein, 457 aa, Setaria italica
  misc_feature (270)..(270): Xaa can be any naturally occurring amino acid
  Transcript Sequence Number=SeqID_2174
  Pfam annotation: Domain name=PAM2; Domain location=242-259; Score =26.3; E_value=0.00013; Accession=PF07145.7; Description=Ataxin-2 C -terminal region
MARPRKAKPPPPPSPPKAAVPSLAEALLLATVCMVGLPVEVQVRDGSAYAGVLHTACVDDGYGVVLKKAKKIANGKGDANLLLGAFVDTLVVHPDDLVQVIAKGLTLPIKGVGTTPDCDAVAASGSLKPQTSHANDPKMAKTENLSPVEQVEKCTTVGKGKDNSVKKSGPVSGTATSVSSSTGHVGPYFSMNGVSESTTMGPKVDVVASSVIAAPMVASDVKASQLANNLATNIVTSSKTTAKEFKLNPCAKVFSPSFASSRQVLAAAAXPVNSNYISHSTPEVPMGIPVYEPKSVPGVSSLSNKIHCSNLSPANYAFSPQYVQSIMGHNGSRMDPARAGTPYHPIPMGGTYTSPSPQPVMTGKYSPVVYVHPISQDAMHGTSVSSQGWPHPVLLNSYQASMQKFQGNAPVYLAPPVMATGNLPLVVPSPAPLVQPFQAIHPIMVPAASSMVPGKYM

SEQ ID NO: 68149 - protein, 65 aa, Setaria italica
  Transcript Sequence Number=SeqID_2175
AILIFPAMQSSNLVQKMKFVYENRIDWRRMLAKVTRISSSLSLSLVNILNIRNDCESCSSIHGTL

SEQ ID NO: 68150 - protein, 54 aa, Setaria italica
  misc_feature (44)..(54): Xaa can be any naturally occurring amino acid
  Transcript Sequence Number=SeqID_2176
PQAFYLVSFPLLYILLLYNAIGDLNMPEILLKKASQLYYCPFKXXXXXXXXXXX

SEQ ID NO: 68151 - protein, 191 aa, Setaria italica
  misc_feature (62)..(62): Xaa can be any naturally occurring amino acid
  misc_feature (80)..(80): Xaa can be any naturally occurring amino acid
  Transcript Sequence Number=SeqID_2177
  Gene Ontology: Mol. function=metal ion binding; Cellular component =integral to membrane; Biological process=ubiquitin-dependent protein catabolic process
  Homolog annotation: Hit_ID=B9T298; Match level="QueryCoverage=85%, HitCoverage=52%, E-value=6e-19, Identity=33%"; Hit description=Ring finger protein, putative
  Pfam annotation: Domain name=zf-C3HC4; Domain location=22-64; Score =23.9; E_value=0.00019; Accession=PF00097.17; Description=Zinc finger, C3HC4 type (RING finger)
TAAACGDAGGCSMAPRISVSECAVCLSEFVERERVRLLPNCSHAFHIDCIDTWLQGSARCPXFCRSDVTLPAAARFRRAXVPAAATTVPSRRDTELPCDSIVIEVRGEHERWFGHRGAGTPAGGRRPRHQKQLRKSESVGDEAIDTRKTGEEFAVQPLRRSLSLDSCCDDKHLYVSVQELRAATQRQAFDP

SEQ ID NO: 68152 - protein, 76 aa, Setaria italica
  Transcript Sequence Number=SeqID_2178
  Subcellular localization annotation: CTP_CleavageSite=60; ConfidenceScore=5.03e-01
MERAEPSLKPEWLLRPATVAVTALRPATSPRADDQGRGASSRNRSSGRDRDRSSQQSSSRRNSGSGGPRRNDRDGT

SEQ ID NO: 68153 - protein, 344 aa, Setaria italica
  Transcript Sequence Number=SeqID_2179
  Gene Ontology: Mol. function=zinc ion binding
  Homolog annotation: Hit_ID=Q7Y091; Match level="QueryCoverage=81%, HitCoverage=32%, E-value=2e-51, Identity=50%"; Hit description =Putative far-red impaired response protein
  Pfam annotation: Domain name=LexA_DNA_bind; Domain location=205-269; Score=1.2; E_value=0.012; Accession=PF01726.8; Description=LexA DNA binding domain
  Subcellular localization annotation: CTP_CleavageSite=27; ConfidenceScore=5.59e-01
TTRKFWKFQEISSNKQKKRKRNSNSSRENTTSNQLMYVQQPVNFLFVAPGSSSALQGPSQLVAAAPVSLSTQYGQTSGTSNSVDDNTSPASVVVDKFTGLPDRNASASAPSSGNLQGGEAKSTGAVSQIKESPELSQANGNRGCCVNTLNSNAAPQLVTVPIGLCLPSMDGSKIPAAGVNSLNSGGSNNNGKLSLGLHQPESSTQQPATPSQTKTLESIDSRTNPEGYSIRAAAIAAGARIASPSDAASIIKAAQSKDAIRIRPGESLPNYLKPLAPKPLSSLPPVNTPNSAHANPGQRSFGDSAAAKDAIFGSSDGSDDDEYDDDDDTDDEDEGLTGDDAEHE

SEQ ID NO: 68154 - protein, 59 aa, Setaria italica
  misc_feature (2)..(2): Xaa can be any naturally occurring amino acid
  misc_feature (6)..(6): Xaa can be any naturally occurring amino acid
  Transcript Sequence Number=SeqID_2180
  Subcellular localization annotation: CTP_CleavageSite=50; ConfidenceScore=5.61e-01
FXFFFXFFFFLFKTVQTTKLQQFSFSNSGYKLQQFRLTFTTQPNTYELHRLSPVKSSLA

SEQ ID NO: 68155 - protein, 147 aa, Setaria italica
  Transcript Sequence Number=SeqID_2181
  Homolog annotation: Hit_ID=B9RNU1; Match level="QueryCoverage=95%, HitCoverage=28%, E-value=1e-33, Identity=47%"; Hit description =Transporter, putative
MFGSCCSKAALGLLSIPSALVLSAGILLKENRAAEVDYKQVHKKFYKAIRCMGATLKCPEVWQPCIYMFVSHNLSLDIQGGMFYWYTDPVVGPGFSEGSIGLIYAIGSVGSLLGVLLYQTTLKDYPFRSILLWGQVLSSLAGMLDLV

SEQ ID NO: 68156 - protein, 122 aa, Setaria italica
  misc_feature (24)..(24): Xaa can be any naturally occurring amino acid
  Transcript Sequence Number=SeqID_2182
  Gene Ontology: Cellular component=integral to membrane; Biological process=auxin mediated signaling pathway
  Homolog annotation: Hit_ID=Q5JLM1; Match level="QueryCoverage=96%, HitCoverage=32%, E-value=9e-42, Identity=73%"; Hit description =Probable auxin efflux carrier component 6
HHQNSIGIMAQCGNGLAMFSMGLXMAQQDKLIPCGPSLTFLSLVLKFVLDPIAMTIGSIAVGLRGDVVRVAIIQAAVPQSITSFIFAKEYGLHPDVLSTAVIVGMLVSVPLIVLFYVGLEGL

SEQ ID NO: 68157 - protein, 378 aa, Setaria italica
  Transcript Sequence Number=SeqID_2183
  Gene Ontology: Mol. function=hydrolase activity, acting on ester bonds; Biological process=lipid metabolic process
  Homolog annotation: Hit_ID=B6TLP8; Match level="QueryCoverage=89%, HitCoverage=88%, E-value=5e-96, Identity=48%"; Hit description=Alpha- L-fucosidase 2
  Pfam annotation: Domain name=Lipase_GDSL; Domain location=36-361; Score=170.8; E_value=4.1e-48; Accession=PF00657.14; Description=GDSL- like LipaseAcylhydrolase
MACRRPACFVAVLLVAVAAALAAGPRAAAAKEYAAIFNFGDSLVDAGNLVVDGIPDYLATARLPYGMTYFGYPTGRCSDGRLVVDFIAQELGLPLLPPSKAKNATFHHGANFAITGATSLDTPFFQARGLGQTVWNSGSLHTQIKWFQDMKPKICSSPQECRDLFRRSLFIVGEFGGNDYNSPLFAFRPLSEAHDFIPHVVDSIGEGVEKLIAEGAVDLVVPGVLPIGCFPVYLSIFRKQPEGYGPRSGCIKDMNTLSWVHNAALQRKIAELRAKHPGVRIIYADYYTPAIQFVLHAKKYGFLEQTPRACCGAPGVGEYNFNLTSKCGDPGAYACDDPSNHWSWDGIHLTEASYGHIAKGWLYGPFADPPILDNKHLG

SEQ ID NO: 68158 - protein, 323 aa, Setaria italica
  Transcript Sequence Number=SeqID_2184
  Gene Ontology: Mol. function=protein binding
  Homolog annotation: Hit_ID=Q9FVZ3; Match level="QueryCoverage=66%, HitCoverage=100%, E-value=1e-101, Identity=81%"; Hit description =Putative Rhizobium-induced nodule development associated protein
  Pfam annotation: Domain name=F-box; Domain location=11-58; Score =32.5; E_value=1.7e-06; Accession=PF00646.25; Description=F-box domain
LIMGENKWMGKRWEDMDTDVLVKIFKELNLVELSPVSQVCRLWRLACSDPLIWGTLDFGLLKSNFIQTRASPYIWVDDRSDKRLARILRVAMAVSCGNVNCMIFHYNLYMKDEHLHFISERSPHLKRLVMPAWNRITKVGICQAIQRWQELESLTMPTIGHPPYIMEEIGRSCKNFTELKIMGSFDHNFASAISQFLPKLKVLSLRCSKVNMDALQSLLHKMEYLEVLNISHCLLLVAAANGRKQVVHELDGQILERASRLREFHYCQSRSCITCQRMVVDEGIMRWYRYEDWFWRRDEVRSLDLQDYGKLFDAGCERMTSVE

SEQ ID NO: 68159 - protein, 67 aa, Setaria italica
  Transcript Sequence Number=SeqID_2185
  Homolog annotation: Hit_ID=B6SWJ8; Match level="QueryCoverage=92%, HitCoverage=13%, E-value=2e-25, Identity=85%"; Hit description=LEC14B
SILPCSCADDAPTWDYRLSRYPQQNKQLKHPHDQSLATYRGHSVLRTLIRCYFSPATGQKYIYTGSY

SEQ ID NO: 68160 - protein, 58 aa, Setaria italica
  Transcript Sequence Number=SeqID_2186
IKPGAPVSFLSTTKQLTYTTIYLWIQKYHFFLLKLKSTLRTLILPLARKGQDIRITSL

SEQ ID NO: 68161 - protein, 461 aa, Setaria italica
  misc_feature (124)..(124): Xaa can be any naturally occurring amino acid
  Transcript Sequence Number=SeqID_2187
  Homolog annotation: Hit_ID=B6SWJ8; Match level="QueryCoverage=100%, HitCoverage=100%, E-value=0.0, Identity=90%"; Hit description=LEC14B
  Pfam annotation: Domain name=WD40; Domain location=201-239; Score =14.6; E_value=0.41; Accession=PF00400.24; Description=WD domain, G -beta repeat
  Pfam annotation: Domain name=WD40; Domain location=243-282; Score =42.2; E_value=2e-09; Accession=PF00400.24; Description=WD domain, G -beta repeat
  Pfam annotation: Domain name=WD40; Domain location=289-327; Score =27.0; E_value=7.7e-05; Accession=PF00400.24; Description=WD domain, G-beta repeat
  Pfam annotation: Domain name=WD40; Domain location=364-408; Score =18.1; E_value=0.037; Accession=PF00400.24; Description=WD domain, G -beta repeat
  Pfam annotation: Domain name=WD40; Domain location=412-450; Score =36.6; E_value=1e-07; Accession=PF00400.24; Description=WD domain, G -beta repeat
  Pfam module annotation: Pfam domain module=WD40::WD40::WD40::WD40::WD4 0; Domain location=201-239::243-282::289-327::364-408::412-450
MGYGMSRLEDEYYEPEGQDADGSSSDQVNDEFSKLHNDIFHMTRMRSGLSESIYKSVGANRGIISTAKLLSGREVDCSGKGKFSSGDRAFVLGRYVPMNGPELLDRMDSRAYVSQFSADGTLFXAGFQGSHIRIYDVDRDWRIHKDIHARNLRWTISDVSLSPDQRYLVYSSLAPIIHIVNVGNAARESYANVTDIHDGLDFSQHEDVQYSFGIFSVKFSSDGRELVAGSNDESIYVYDLHANKLTLRLPAHTSDVNTVAFADESGHLIYSGSDDTLCKVWDRRCLSAGQAAGVLSGHLHGVTHIDSRGDGRSFISNGKDQAIKLWDIRKMMSNADSCADDAPTWDYRLSRYPQQNKQLKHPHDQSLATYRGHSVLRTLIRCYFSPAYSTGQKYIYTGSYDSSIYIYDVVSGSQVAKLKGHQTAIRDCSWHPFEPTLVSSSWDGRVAKWTGARDEKSSDVD

SEQ ID NO: 68162 - protein, 382 aa, Setaria italica
  Transcript Sequence Number=SeqID_2188
  Gene Ontology: Mol. function=protein tyrosine kinase activity; Biological process=protein amino acid phosphorylation
  Homolog annotation: Hit_ID=B6SY76; Match level="QueryCoverage=99%, HitCoverage=64%, E-value=0.0, Identity=93%"; Hit description=ATP binding protein
  Pfam annotation: Domain name=Pkinase; Domain location=125-381; Score =28.1; E_value=3.6e-10; Accession=PF00069.17; Description=Protein kinase domain
  Pfam annotation: Domain name=Pkinase_Tyr; Domain location=125-376; Score=60.6; E_value=9.4e-18; Accession=PF07714.9; Description =Protein tyrosine kinase
  Pfam module annotation: Pfam domain module=Pkinase::Pkinase_Tyr; Domain location=125-381::125-376
PRIFEKRGLTLGVVMILVQSGNEAVFKNRVESALKSVVKKQRMNSGGVKLPFGLCGCQEEGSRNFDEESMFDPDDGQVLDNEPIRRPQLPTPLPQASVFVSVDEWQTIRSGGEELDRWMLRSEEIEFIDWVGANSFKGAFRGKKVWVNKLRGCDMGSAYDVEIRQDLLQLMSCGQRNILQFHGICFNENHGLCIVTRMMEGGSVHDIIMQRNKRLSLRDTVRIALDVADGLAFMNSYGIAYRDLNSRKILLDRQGNACLGDMGIVTPCNNVGEVTEYETSGYRWLAPEIIAGDPETVSETWMSNVYSYGMVLWEMITGEEAYSTYSPVQAAVGIAACGLRPEIPRDCPPFLRSLMNRCWENSPLKRPQFSEITSILQRQNVR

SEQ ID NO: 68163 - protein, 89 aa, Setaria italica
  Transcript Sequence Number=SeqID_2189
  Pfam annotation: Domain name=WD40; Domain location=36-75; Score=16.9; E_value=0.087; Accession=PF00400.24; Description=WD domain, G-beta repeat
YVPCHSYRNLTNLLFCDCYRLDSLSILHILSVGLQNDVVIQFSSFQSDVNTVAFADESGHLIYSGSDDTLCKVGRCSKFCKLVSINIFD

SEQ ID NO: 68164 - protein, 134 aa, Setaria italica
  Transcript Sequence Number=SeqID_2190
LPPFALARCCDALMHAQLHRAMAKAEQRENTSLTKLPHKVKLPWAQFIGGVYTVLHVHTSNSKLSERKTLHPFLPFLNLASLRQKCSCKSPFLHVLSRSGVYRTFRQFTSAFCASGQQGLLAVEDGVAHGGVGV

SEQ ID NO: 68165 - protein, 101 aa, Setaria italica
  Transcript Sequence Number=SeqID_2191
  Gene Ontology: Mol. function=metal ion binding; Cellular component =chloroplast; Biological process=response to cadmium ion
  Homolog annotation: Hit_ID=Q70DK1; Match level="QueryCoverage=35%, HitCoverage=32%, E-value=3e-10, Identity=80%"; Hit description =Chopper chaperone
MFSVYVPQVYHPWIWVICSSLLVLLESGVETFDIDLKEQKVTVKGNVKPEDVFQTVSKSGKKTSYWEGEATAPAASAPAAEAAPSTAAEAPAAEAAPEITT

SEQ ID NO: 68166 - protein, 106 aa, Setaria italica
  Transcript Sequence Number=SeqID_2192
  Gene Ontology: Mol. function=metal ion binding; Cellular component =chloroplast; Biological process=metal ion transport
  Homolog annotation: Hit_ID=Q70DK1; Match level="QueryCoverage=64%, HitCoverage=60%, E-value=3e-27, Identity=83%"; Hit description =Chopper chaperone
  Pfam annotation: Domain name=HMA; Domain location=6-67; Score=58.7; E_ value=2.2e-14; Accession=PF00403.18; Description=Heavy-metal -associated domain
MAAETVVLKVAMSCEGCAGAVRRVLTKMEGVETFDIDLKEQKVTVKGNVKPEDVFQTVSKSGKKTSYWEGEATAPAASAPAAEAAPSTAAEAPAAEAAPEITPSQS

SEQ ID NO: 68167 - protein, 111 aa, Setaria italica
  Transcript Sequence Number=SeqID_2193
  Gene Ontology: Mol. function=nucleoside-triphosphatase activity; Cellular component=membrane; Biological process=transport
  Homolog annotation: Hit_ID=Q8GU82; Match level="QueryCoverage=100%, HitCoverage=8%, E-value=9e-46, Identity=72%"; Hit description=PDR -like ABC transporter
  Pfam annotation: Domain name=PDR_assoc; Domain location=1-63; Score =90.8; E_value=4.8e-24; Accession=PF08370.3; Description=Plant PDR ABC transporter associated
EFYYADATTVGEAILKIRGQLTEWHWYWICVSILFGYSLIFNILTIFALEFMNSPHKHQVNIKTTKANLEYHSQMVGNGNSSNDKDILPFRPLSLVFDHINYFVDMPKVIS

SEQ ID NO: 68168 - protein, 261 aa, Setaria italica
  misc_feature (245)..(245): Xaa can be any naturally occurring amino acid
  Transcript Sequence Number=SeqID_2194
  Gene Ontology: Mol. function=nucleoside-triphosphatase activity; Cellular component=membrane; Biological process=transport
  Homolog annotation: Hit_ID=Q8GU82; Match level="QueryCoverage=100%, HitCoverage=64%, E-value=1e-134, Identity=60%"; Hit description=PDR -like ABC transporter
  Pfam annotation: Domain name=ABC_tran; Domain location=103-261; Score= 36.3; E_value=7.1e-09; Accession=PF00005.19; Description=ABC transporter
  Pfam annotation: Domain name=PDR_assoc; Domain location=1-33; Score= -4.2; E_value=0.0015; Accession=PF08370.3; Description=Plant PDR ABC transporter associated
  Pfam module annotation: Pfam domain module=ABC_tran::PDR_assoc; Domain location=103-261::1-33
VSILFGYSLIFNILTIFALEFMNSPHKHQVNIKTTKANLEYHSQMVGNGNSSNDKDILPFRPLSLVFDHINYFVDMPKEMAKNGVTEKKLQLLQDVSGAFRPGVLTALMGITGAGKTTLLDVLAGRKTGGYIEGTIKIAGYPKKQETFSRISGYCEQSDIHSPNLTVYESLKFSAWLRLPSNVKPHQRDMFIDEVMSLVELTDLKNAMVGIPGATGLSAEQRKRLTIAVELVASPSIIFMDEPTXGLDARAAAIVMRTVRK

SEQ ID NO: 68169 - protein, 72 aa, Setaria italica
  Transcript Sequence Number=SeqID_2195
TNIHTKQTNIKPKRKLDQQISMFEDLNKLLRKTCFMHMFIWPIYLDKLTSITRREKKFNQRERRSLLVIFLV

SEQ ID NO: 68170 - protein, 203 aa, Setaria italica
  misc_feature (196)..(196): Xaa can be any naturally occurring amino acid
  Transcript Sequence Number=SeqID_2196
  Gene Ontology: Mol. function=hydrogen ion transmembrane transporter activity; Cellular component=proton-transporting ATP synthase complex, coupling factor F(o); Biological process=ATP synthesis coupled proton transport
  Homolog annotation: Hit_ID=P0C2Y7; Match level="QueryCoverage=97%, HitCoverage=80%, E-value=1e-102, Identity=92%"; Hit description=ATP synthase subunit a, chloroplastic
  Pfam annotation: Domain name=ATP-synt_A; Domain location=33-203; Score=158.2; E_value=2.5e-44; Accession=PF00119.12; Description=ATP synthase A chain
MNITPCSIKTLKGLYDISGVEVGQHFYWQIGGFQIHAQVLITSWVVITILLGSVIIAVRNPQTIPTDGQNFFEYVLEFIRDLSKTQIGEEYGPWVPFIGTMFLFIFVSNWSGALLPWKIIELPHGELAAPTNDINTTVALALLTSAAYFYAGLSKKGLSYFEKYIKPTPILLPINILEDFTKPLSLSFRLFGNILXDELVVVV

SEQ ID NO: 68171 - protein, 867 aa, Setaria italica
  Transcript Sequence Number=SeqID_2197
  Gene Ontology: Mol. function=histone-lysine N-methyltransferase activity; Cellular component=nucleus; Biological process=chromatin modification
  Homolog annotation: Hit_ID=A9QA57; Match level="QueryCoverage=89%, HitCoverage=44%, E-value=1e-154, Identity=42%"; Hit description=SDG8
  Pfam annotation: Domain name=SET; Domain location=122-252; Score =168.4; E_value=2e-47; Accession=PF00856.20; Description=SET domain
ETRWTCKDNGDKAFADCSIPQEKTNAEINAELDLSDASADEADDGRSNSKAVKAPSWTSIRSNLFLHRNRRTQSIDESMVCNCKPPQDGRLGCRDGCLNRLLSIECVKRTCPCGEQCSNQKFQRRSYAKLRWFQSGKKGYGLQLQEDVTEGRFLIEYVGEVLDITSYESRQRYYASKGQKHFYFMALNGGEVIDACTKGNLGRFINHSCSPNCRTEKWIVNGEVCIGIFAMRNIKKGEELTFDYNYVRVSGAAPQKCFCGTAKCRGYIGGDISVDIITQDDAEAGHVEQIVLDKDSEELISANGSDADGSHPNIAEPEFSIEGEDLHDCSAGKAELEPLDQTGGTLIETSEPENSLEAWSPQEDEDVIRTPVHVSRTFESSLQQFPVHGPQSSDLLQKTAKSAEGSKVPNGSTPSFDFQSNLVPGLNARHNLKQHRNVKPQSSSPIDNEHILGVEGRLNNLLDGNGGISKRKDTTNGYLKLLIVTAAGDSAGGTSKSVRDLSLILDALLKTKSCSVLLDIINKNGLQMLHNMLKQNKTDFYRIPIIRKLLKVLEFLAEKGILTSEHINGGPRCAGVESFRDSMLSLVRHRDFQVQQIARSFRDRWILHNTARSEPTEYPHTSTFAQDIHRTNMVWSSARRKRKSRWDYQPDEHYKMVGQNIQKVCSGHGGFDVQFGFMRNKLQRNQGTDNCHNDVHGMGSSTEGADDEVPPGFEPQQECQPAQLSIGSDVAPGLCMERYQPSLSVSYGVPVALVQNFGTPESEGGQGHQKWKVAPGVPFSPFPPLPPYPRGSPCPSTSSSHMFQHDGTSLVNHNISGHCGGRTTGRDGKVHRTWRNGPRTKWPYHHQGRRFPSNHHRFERFEPPRPQ

SEQ ID NO: 68172 - protein, 252 aa, Setaria italica
  misc_feature (24)..(24): Xaa can be any naturally occurring amino acid
  misc_feature (101)..(101): Xaa can be any naturally occurring amino acid
  misc_feature (151)..(151): Xaa can be any naturally occurring amino acid
  misc_feature (199)..(199): Xaa can be any naturally occurring amino acid
  Transcript Sequence Number=SeqID_2198
  Gene Ontology: Mol. function=protein serine/threonine kinase activity; Biological process=protein amino acid phosphorylation
  Homolog annotation: Hit_ID=B9S537; Match level="QueryCoverage=93%, HitCoverage=39%, E-value=1e-53, Identity=51%"; Hit description =Receptor serine-threonine protein kinase, putative
  Pfam annotation: Domain name=Pkinase_Tyr; Domain location=2-224; Score=-176.3; E_value=0.052; Accession=PF07714.9; Description =Protein tyrosine kinase
AKGLEYLHEKANPLLSTGISSPDXLLDEEYNPKLSDFGLAKLGPVGGKTHISTRVMGTYGYCAPEYIRTGQLTVKTDVYSFGVFLLELITGRRAVDSSRPXSEQVLVNWVCTKFLFYYTTYILIICLPIEFHISLRATPHTWKMHMNSHKXVMVQGFLTVKFMCDQQAKPMLRDRKRYSELVDPLLRGEYTERDLGQAXVGVAAMCLQEEASVRPYMSDAVVALGFLAEVPAGYKAKSSPIPQMKQVEDPSL

SEQ ID NO: 68173 - protein, 229 aa, Setaria italica
  misc_feature (131)..(131): Xaa can be any naturally occurring amino acid
  Transcript Sequence Number=SeqID_2199
  Gene Ontology: Mol. function=RNA binding
  Homolog annotation: Hit_ID=A7UDM2; Match level="QueryCoverage=99%, HitCoverage=23%, E-value=4e-83, Identity=73%"; Hit description=CFM2 (Fragment)
  Pfam annotation: Domain name=CRS1_YhbY; Domain location=98-185; Score= 57.6; E_value=4.6e-14; Accession=PF01985.13; Description=CRS1  YhbY domain
  Subcellular localization annotation: CTP_CleavageSite=39; ConfidenceScore=5.40e-01
NGTLNLTKSGAPFDDNDMQSKVCLNKPGDGPSVTVSPPCLTGRSSTVSFNGLNRHQNQYGSTVTFNPDSHSEGDSKDVDASKFDLESDPLLPLRATPLTNQERLMLRKQALKMKKKPVLSIGRNNVIDGGXQKQIKTHFKKHPLAIVNIKNRADGTPIQQLISELEEATGSVLVSRETNKVILYRGWGAEVAQKSSMENSANGEEKEVISPQLLEAIRLECGLLPGESG

SEQ ID NO: 68174 - protein, 149 aa, Setaria italica
  Transcript Sequence Number=SeqID_2200
  Gene Ontology: Mol. function=RNA binding
  Homolog annotation: Hit_ID=A7UDM2; Match level="QueryCoverage=91%, HitCoverage=14%, E-value=2e-65, Identity=89%"; Hit description=CFM2 (Fragment)
  Pfam annotation: Domain name=CRS1_YhbY; Domain location=19-105; Score= 68.8; E_value=2e-17; Accession=PF01985.13; Description=CRS1  YhbY domain
VVLLSEAREDQIPVRATPLTNQERLMLRKQALKMKKKPVLSIGRNNVITGVAKTIKTHFKKHPLAIVNIKNRADGTPIQQLISELEEATGSVLVSRETNKVILYRGWGAEVAQKSSMENSANGEEKEVISPQLLEAIRLECGLLPGESG

SEQ ID NO: 68175 - protein, 541 aa, Setaria italica
  misc_feature (252)..(252): Xaa can be any naturally occurring amino acid
  misc_feature (519)..(519): Xaa can be any naturally occurring amino acid
  Transcript Sequence Number=SeqID_2201
  Gene Ontology: Mol. function=RNA binding; Cellular component =chloroplast; Biological process=regulation of translation
  Homolog annotation: Hit_ID=A7UDM2; Match level="QueryCoverage=96%, HitCoverage=55%, E-value=0.0, Identity=78%"; Hit description=CFM2 (Fragment)
  Pfam annotation: Domain name=CRS1_YhbY; Domain location=272-359; Score=138.7; E_value=1.8e-38; Accession=PF01985.13; Description=CRS1 YhbY domain
  Pfam annotation: Domain name=CRS1_YhbY; Domain location=77-161; Score= 41.8; E_value=2.7e-09; Accession=PF01985.13; Description=CRS1  YhbY domain
  Pfam module annotation: Pfam domain module=CRS1_YhbY::CRS1_YhbY; Domain location=272-359::77-161
RSSLVAGVGSPNKFRLQLPGEVKLAEEADRLLDGLGPRFSGWWGYDPLPVDADLLPAIVPGYRRPFRLLPSGVPPKLTDREMTILRRLAHPLPFHYALGRSSNLQGLAASMIKLWERCEVAKIAIKRDAHNTDSELVTEELKGLTGGTLLSRDKESIVFYRGKDFLPPAVSLAIEKRRKWGSSTIYKTKPNAEESTLAQDASVLKVSSDVSVQIHEEVTSVSENRAESLNTVAQNVETRLSQAIAEKEKAEXLLEELENASQPSKADTREVITEDERYMLRKVGLKMKPFLLLGRRGVFDGTIENMHLHWKYRELVKIICKEHSLKDVEYAARTLEAESGGILVAVEKVSKGHAIIVYRGKNYQRPSTLRPKTLLTKRDALKRSMENQRCKSLKLHVLNLSKNIDYLRDQMNSSYYYNAIHDPSVNSGTLQQKNEEVPELAPMSSEPEVEECTSVEMDGTLNLTKSGAPFDDNDMQSKVCLNKPGDGPSVTVSPPCLTGRSSTVSFNGLNRHQNQYGSXYSNLNVIQLPLSVFHKCLIICL

SEQ ID NO: 68176 - protein, 61 aa, Setaria italica
  misc_feature (48)..(48): Xaa can be any naturally occurring amino acid
  Transcript Sequence Number=SeqID_2202
  Gene Ontology: Mol. function=SNAP receptor activity; Cellular component=late endosome membrane; Biological process=intracellular protein transport
  Homolog annotation: Hit_ID=B6UGM4; Match level="QueryCoverage=100%, HitCoverage=25%, E-value=7e-25, Identity=95%"; Hit description=SNARE domain containing protein
MASSSDPWVKEYNEASRLADDISSMIADRGSLPQSGPEIMRHTSAIRXEKITILGTRLDSL

SEQ ID NO: 68177 - protein, 414 aa, Setaria italica
  Transcript Sequence Number=SeqID_2203
  Gene Ontology: Mol. function=protein transporter activity; Cellular component=nuclear pore; Biological process=protein import into nucleus, docking
  Homolog annotation: Hit_ID=Q01KY9; Match level="QueryCoverage=100%, HitCoverage=40%, E-value=0.0, Identity=91%"; Hit description =OSIGBa0137O04.8 protein
  Pfam annotation: Domain name=IBN_N; Domain location=24-99; Score =81.2; E_value=3.6e-21; Accession=PF03810.11; Description=Importin -beta N-terminal domain
  Pfam annotation: Domain name=Xpo1; Domain location=101-234; Score= -8.5; E_value=0.013; Accession=PF08389.4; Description=Exportin 1-like protein
  Pfam module annotation: Pfam domain module=IBN_N::Xpo1; Domain location=24-99::101-234
MDLPSLVVVLRAALSHAPEERKAAEASLEQLQYTPQHLVRLLQIIVDGNCDMAVRQVASIHFKNFVAKNWSPVDPEEKHKIPETDKSMVRENILGFVTQLPPLLRAQLGESIKTLIVVDYPEQWPNLLHWVTHNLESQDQIFGALYVLRILARKYEFKSEEERIPLYQVVEESFPRLLNIFSKLVQIPNPPIEVADLIKLICKIFWSSIYLEIPKQLFDPNVFNAWMVLFLNLLERPVPVEGQPSDPDARKAWGWWKVKKWIAHILNRLYTRFADLKIQKPESKSFAQMFQKNYAGKILGCHLQLLNAIRTGGYLPDRVINLILQYLTNSVTKNSMYQLMQPQMDIIMFEIIFPLLCFNDNDQMLWDEDPHEYVRKGYDIIEDLYSPRTAAMDFVNELVRKRGKGNLQKFIHFI

SEQ ID NO: 68178 - protein, 85 aa, Setaria italica
  Transcript Sequence Number=SeqID_2204
LAFAPARAATPAVAAPRGDDSVEAELGGLGLGLWRWSSTEVGSQRPAATENLPAASPCCCCCCCSRSSVPACPSRALPAKGIPLI

SEQ ID NO: 68179 - protein, 72 aa, Setaria italica
  Transcript Sequence Number=SeqID_2205
  Subcellular localization annotation: CTP_CleavageSite=62; ConfidenceScore=5.50e-01
PHNRLTQWISQALCSGSTCILLSTSSFIRPVSSTSPPLPPKPVLMQVCNCTSDTACDLYQVPALHRPSDLLI

SEQ ID NO: 68180 - protein, 158 aa, Setaria italica
  misc_feature (29)..(29): Xaa can be any naturally occurring amino acid
  misc_feature (145)..(145): Xaa can be any naturally occurring amino acid
  Transcript Sequence Number=SeqID_2206
  Gene Ontology: Mol. function=protein kinase activity; Biological process=protein amino acid phosphorylation
  Homolog annotation: Hit_ID=B9T5N2; Match level="QueryCoverage=98%, HitCoverage=18%, E-value=4e-17, Identity=40%"; Hit description =Ubiquitin ligase protein cop1, putative
RQLQDTVAFLSSDINEVLHQQSALGGNTXNLSPGNDRGVCSGTVEDQSDCGSRKRFRPELQGIDMEEQNHSVEECSRTVPSSELIQESVLSKSSRLMKNFKKLETAYFLTRSKLVKQVGNQINSCHQVVKRATGSAVGTEGSSMXFPLERQYGSRQCW

SEQ ID NO: 68181 - protein, 66 aa, Setaria italica
  Transcript Sequence Number=SeqID_2207
  Gene Ontology: Mol. function=calcium ion binding
  Homolog annotation: Hit_ID=Q7XQX1; Match level="QueryCoverage=93%, HitCoverage=10%, E-value=2e-26, Identity=85%"; Hit description =OSJNBa0014K14.4 protein
MIKEGVIDREEFKKIMSLMRSFNRQGATHKDGLRIGLKVGQPVENGGVVEFFFGNDGNEPLHYDKF

SEQ ID NO: 68182 - protein, 99 aa, Setaria italica
  Transcript Sequence Number=SeqID_2208
  Gene Ontology: Mol. function=calcium ion binding
  Homolog annotation: Hit_ID=Q7XQX1; Match level="QueryCoverage=97%, HitCoverage=15%, E-value=4e-43, Identity=86%"; Hit description =OSJNBa0014K14.4 protein
PLHYDSFQKFLKELHDEIIRLEFSHYDVKSSNTIPAKDFALSMVASADMNHINMLLDRVDDLVNDPDLKDMRISFEEFKAFADLRRRLEPLSMAIFALL

SEQ ID NO: 68183 - protein, 177 aa, Setaria italica
  misc_feature (125)..(125): Xaa can be any naturally occurring amino acid
  Transcript Sequence Number=SeqID_2209
  Gene Ontology: Mol. function=calcium ion binding; Cellular component =integral to membrane; Biological process=defense response
  Homolog annotation: Hit_ID=Q7XQX1; Match level="QueryCoverage=84%, HitCoverage=24%, E-value=1e-63, Identity=77%"; Hit description =OSJNBa0014K14.4 protein
  Pfam annotation: Domain name=efhand; Domain location=12-40; Score =21.7; E_value=0.0029; Accession=PF00036.24; Description=EF hand
  Pfam annotation: Domain name=efhand; Domain location=46-74; Score =34.5; E_value=4.3e-07; Accession=PF00036.24; Description=EF hand
  Pfam module annotation: Pfam domain module=efhand::efhand; Domain location=12-40::46-74
WRERSPGELHCAPSKFFMLFDTNGDGLISFAEYIFFVTLLSIPESNFSVAFKMFDVDHSGVIDREEFKKIMSLMRSFNRQGATHKDGLRIGLKVGQPVENGGVVEFFFGNDGNEPLHYDKFPNFXKELHDEVICCFHSFSQHMMTCPQILPPDLTWKENAFISLSSTYFSQSLLLLV

SEQ ID NO: 68184 - protein, 293 aa, Setaria italica
  Transcript Sequence Number=SeqID_2210
  Gene Ontology: Mol. function=calcium ion binding; Cellular component =integral to membrane; Biological process=defense response
  Homolog annotation: Hit_ID=Q7XQX1; Match level="QueryCoverage=100%, HitCoverage=48%, E-value=1e-137, Identity=81%"; Hit description =OSJNBa0014K14.4 protein
  Pfam annotation: Domain name=efhand; Domain location=124-152; Score =21.7; E_value=0.0029; Accession=PF00036.24; Description=EF hand
  Pfam annotation: Domain name=efhand; Domain location=158-186; Score =34.5; E_value=4.3e-07; Accession=PF00036.24; Description=EF hand
  Pfam annotation: Domain name=efhand; Domain location=244-272; Score =3.3; E_value=9.2; Accession=PF00036.24; Description=EF hand
  Pfam module annotation: Pfam domain module=efhand::efhand::efhand; Domain location=124-152::158-186::244-272
SGLGLWLKPPSLADSGETEAGGQISVAGAGAGAAEARGEKGRFLFADSFRRRVFFNYEKRIRLLSPPEKIFEYFASVRKPEGEVCMLPADLMRAVVPVFPPSESTVVREGRLRGERSPGELHCAPSKFFMLFDTNGDGLISFAEYIFFVTLLSIPESNFSVAFKMFDVDHSGVIDREEFKKIMSLMRSFNRQGATHKDGLRIGLKVGQPVENGGVVEFFFGNDGNEPLHYDKFSKFLKELHDEIIRLEFSHYDVKSSNTIPAKDFALSMVASADMNHINMLLDRVDDLVNDPD

SEQ ID NO: 68185 - protein, 98 aa, Setaria italica
  Transcript Sequence Number=SeqID_2211
  Gene Ontology: Mol. function=calcium ion binding
  Homolog annotation: Hit_ID=Q7XQX1; Match level="QueryCoverage=97%, HitCoverage=15%, E-value=1e-43, Identity=89%"; Hit description =OSJNBa0014K14.4 protein
PKFLKELHDEIIRLEFSHYDVKSSNTIPAKDFALSMVASADMNHINMLLDRVDDLVNDPDLKDMRISFEEFKAFADLRRRLEPLSMAIFAYGKVNGLL

SEQ ID NO: 68186 - protein, 381 aa, Setaria italica
  misc_feature (114)..(114): Xaa can be any naturally occurring amino acid
  misc_feature (140)..(140): Xaa can be any naturally occurring amino acid
  Transcript Sequence Number=SeqID_2212
  Gene Ontology: Mol. function=calcium ion binding
  Homolog annotation: Hit_ID=Q7XQX1; Match level="QueryCoverage=91%, HitCoverage=52%, E-value=1e-164, Identity=82%"; Hit description =OSJNBa0014K14.4 protein
  Pfam annotation: Domain name=efhand; Domain location=212-240; Score =3.3; E_value=9.2; Accession=PF00036.24; Description=EF hand
  Pfam annotation: Domain name=efhand; Domain location=320-348; Score =27.7; E_value=4.8e-05; Accession=PF00036.24; Description=EF hand
  Pfam annotation: Domain name=efhand; Domain location=65-93; Score =21.7; E_value=0.0029; Accession=PF00036.24; Description=EF hand
  Pfam module annotation: Pfam domain module=efhand::efhand::efhand; Domain location=212-240::320-348::65-93
YFRSNSPPEKIFEYFASVRKPEGEVCMLPADLMRAVVPVFPPSESTVVREGRLRGERSPGELHCAPSKFFMLFDTNGDGLISFAEYIFFVTLLSIPESNFSVAFKMFDVDHSGXFISPRKGPALYGHVQSSDFLVDDKAXVIDREEFKKIMSLMRSFNRQGATHKDGLRIGLKVGQPVENGGVVEFFFGNDGNEPLHYDKFSKFLKELHDEIIRLEFSHYDVKSSNTIPAKDFALSMVASADMNHINMLLDRVDDLVNDPDLKDMRISFEEFKAFADLRRRLEPLSMAIFAYGKVNGLLTKQDLKHAAQHVCGVDLTDRVVDIIFHVFDTNQDGNLSSEEFLRALQRRETDIRQPTIPGPLGFLSCWFGGRKSSSLRQMVF

SEQ ID NO: 68187 - protein, 54 aa, Setaria italica
  misc_feature (26)..(26): Xaa can be any naturally occurring amino acid
  Transcript Sequence Number=SeqID_2213
DGNLSSEEFLRALQRRETDIRQTRNXYQPPYPSLGFLSCWFGGRKSSSLRQMVF

SEQ ID NO: 68188 - protein, 201 aa, Setaria italica
  Transcript Sequence Number=SeqID_2214
  Gene Ontology: Mol. function=calcium ion binding
  Homolog annotation: Hit_ID=Q7XQX1; Match level="QueryCoverage=85%, HitCoverage=27%, E-value=1e-72, Identity=80%"; Hit description =OSJNBa0014K14.4 protein
  Pfam annotation: Domain name=efhand; Domain location=140-168; Score =27.7; E_value=4.8e-05; Accession=PF00036.24; Description=EF hand
  Pfam annotation: Domain name=efhand; Domain location=32-60; Score =3.3; E_value=9.2; Accession=PF00036.24; Description=EF hand
  Pfam module annotation: Pfam domain module=efhand::efhand; Domain location=140-168::32-60
QFGTDAQFTSDYLKLFLTILYLTFYQELHDEIIRLEFSHYDVKSSNTIPAKDFALSMVASADMNHINMLLDRVDDLVNDPDLKDMRISFEEFKAFADLRRRLEPLSMAIFAYGKVNGLLTKQDLKHAAQHVCGVDLTDRVVDIIFHVFDTNQDGNLSSEEFLRALQRRETDIRQPTIPGPLGFLSCWFGGRKSSSLRQMVF

SEQ ID NO: 68189 - protein, 143 aa, Setaria italica
  misc_feature (30)..(30): Xaa can be any naturally occurring amino acid
  misc_feature (122)..(122): Xaa can be any naturally occurring amino acid
  misc_feature (133)..(133): Xaa can be any naturally occurring amino acid
  Transcript Sequence Number=SeqID_2215
  Gene Ontology: Cellular component=mitochondrion
  Homolog annotation: Hit_ID=B9RFN9; Match level="QueryCoverage=100%, HitCoverage=27%, E-value=2e-38, Identity=57%"; Hit description =Pentatricopeptide repeat-containing protein, putative
  Pfam annotation: Domain name=PPR; Domain location=52-86; Score=18.7; E_value=0.025; Accession=PF01535.12; Description=PPR repeat
  Pfam annotation: Domain name=PPR; Domain location=87-121; Score=27.7; E_value=4.7e-05; Accession=PF01535.12; Description=PPR repeat
  Pfam module annotation: Pfam domain module=PPR::PPR; Domain location =52-86::87-121
LDEMVAGNTMSKTNTYNCFFKEYRGERCEXATLQPRYDKMKAPSSPTAPDIHTYNILLGMFIKLDRHGTVMEIWSNMCESTVGPDLDSYTLLIHGFCDSQKWREACQFFMEMIEKVFLPQKXITFETLYRGLXIQADMLRTWR

SEQ ID NO: 68190 - protein, 72 aa, Setaria italica
  Transcript Sequence Number=SeqID_2216
  Subcellular localization annotation: CTP_CleavageSite=29; ConfidenceScore=5.20e-01
NLLSAKSDNCGSAHDPQSSWAAVQTSSIKSEMVGSLSLTKILPFNLEKCSPGSNPDSAVSHVSQAELSDPVS

SEQ ID NO: 68191 - protein, 349 aa, Setaria italica
  Transcript Sequence Number=SeqID_2217
  Gene Ontology: Mol. function=DNA topoisomerase (ATP-hydrolyzing) activity; Cellular component=mitochondrion; Biological process=DNA topological change
  Homolog annotation: Hit_ID=Q7XZF7; Match level="QueryCoverage=100%, HitCoverage=37%, E-value=1e-170, Identity=84%"; Hit description =Probable DNA gyrase subunit A, chloroplastic/mitochondrial
  Pfam annotation: Domain name=DNA_gyraseA_C; Domain location=259-308; Score=40.7; E_value=6e-09; Accession=PF03989.5; Description=DNA gyrase C-terminal domain, beta-propeller
  Pfam annotation: Domain name=DNA_gyraseA_C; Domain location=309-349; Score=13.0; E_value=0.13; Accession=PF03989.5; Description=DNA gyrase C-terminal domain, beta-propeller
  Pfam annotation: Domain name=DNA_topoisoIV; Domain location=1-235; Score=31.0; E_value=1.1e-20; Accession=PF00521.12; Description=DNA gyrasetopoisomerase IV, subunit A
  Pfam module annotation: Pfam domain module=DNA_gyraseA_C::DNA_gyraseA_ C::DNA_topoisoIV; Domain location=259-308::309-349::1-235
DIEIIDQKTKREAIIIKEIPYQANKATLVEKIAELVEDKVLEGISDIRDESDRTGMRVVIELKRSADPAIVLNNLYRHTALQSSFSCNMVAILDGQPKLMGLREILQAFLDFRCSVIERRARFKLSQALERKHIVEGIVVGLDNLDAVIQIIRETSNHAAATEALVKEFDLSEKQAEALLDITLRKLTSLERKKFVDEAKTLSEEISKLNELLSSKKLIFQLIQQEAADLKNKFSTLRRSLIDDSVNSEVDDIDIIPNEEMLLILSEKGYVKRMNPNTFNLQNRGTIGKSVGKMRMNDTTSDFIVCQMHDHVLYFSDKGIVYSARAYKIPECTRTATGTPLVQLLSLSD

SEQ ID NO: 68192 - protein, 41 aa, Setaria italica
  Transcript Sequence Number=SeqID_2218
WRCNDELRARAEELHASSQKISKHYIGNSNKLILASICSPF

SEQ ID NO: 68193 - protein, 95 aa, Setaria italica
  Transcript Sequence Number=SeqID_2219
  Gene Ontology: Mol. function=binding
  Homolog annotation: Hit_ID=Q9M8J7; Match level="QueryCoverage=100%, HitCoverage=10%, E-value=2e-14, Identity=48%"; Hit description =F28L1.15 protein
LVEMLNWKRDDEKVVRQCAAEVVSKLAGKRQNALRVSGIPGAIESIMSLLSSNTPVSATHPQNMPGAVAEHEEASPAGRGYDHLPFNLLGLTILK

SEQ ID NO: 68194 - protein, 131 aa, Setaria italica
  misc_feature (62)..(62): Xaa can be any naturally occurring amino acid
  Transcript Sequence Number=SeqID_2220
  Homolog annotation: Hit_ID=B8YIE8; Match level="QueryCoverage=85%, HitCoverage=6%, E-value=1e-21, Identity=53%"; Hit description=DNA glycosylase/lyase 701
  Subcellular localization annotation: CTP_CleavageSite=41; ConfidenceScore=5.65e-01
YSRSRLQQPDRLPALFSTRSTSVLNNMQESSAPQSALSSPMSTAAEQHGSSSVQASWNMPSXCTKVPISILVFRRRLTGRGSRPQLPPSHSSMPSPALPDASEVGASVQLAGSNLLSLGRASNTVAGDMTM

SEQ ID NO: 68195 - protein, 251 aa, Setaria italica
  Transcript Sequence Number=SeqID_2221
  Homolog annotation: Hit_ID=Q8LEZ4; Match level="QueryCoverage=80%, HitCoverage=60%, E-value=3e-34, Identity=38%"; Hit description =Protein NUCLEAR FUSION DEFECTIVE 5, mitochondrial
MRALVSLFRIARRLPAPLAAARAPTPLLLRHLHGDAPPPPPPQDPPPFVSRILQSEPSLTPSAEAEPAPDPFLDEFLARFVAAFRPELAAAFPDYDRAVLDEMLRLVADAVVCRVTGADPGPDAAELSDDLWAAVWKVSASVQEAMRRDQVRADLRHYLHCDEVKEMTRFAVDVGIRGSMLREFRFKWAREKLDEVEFYRGLDDMRAKAEAAANPAPAPVRRLTALPKRKGEVKFTMYGLDMSDPKWAEVA

SEQ ID NO: 68196 - protein, 70 aa, Setaria italica
  Transcript Sequence Number=SeqID_2222
RFVRYLLKGILRIIIIVVCFHNQCLMISLLCISRWLIVNFVSFIVIEIVQNFSGFLAYDIYALDPSEIRN

SEQ ID NO: 68197 - protein, 92 aa, Setaria italica
  misc_feature (19)..(19): Xaa can be any naturally occurring amino acid
  Transcript Sequence Number=SeqID_2223
  Subcellular localization annotation: CTP_CleavageSite=62; ConfidenceScore=5.63e-01
LLPFTRRIRISRDAGYAQXRSTSAPYFYSSTPPPSSSVESLSFLFLPPVSSSPCPSSFDTVPSSLDSSTIPLEPAPSLDPTPPPPLSLPTTL

SEQ ID NO: 68198 - protein, 263 aa, Setaria italica
  misc_feature (79)..(79): Xaa can be any naturally occurring amino acid
  Transcript Sequence Number=SeqID_2224
  Gene Ontology: Mol. function=protein serine/threonine kinase activity; Biological process=protein amino acid phosphorylation
  Homolog annotation: Hit_ID=Q9C7L2; Match level="QueryCoverage=90%, HitCoverage=55%, E-value=1e-96, Identity=68%"; Hit description =Protein kinase, putative
  Pfam annotation: Domain name=Pkinase; Domain location=1-233; Score =35.6; E_value=1.3e-10; Accession=PF00069.17; Description=Protein kinase domain
  Pfam annotation: Domain name=Pkinase_Tyr; Domain location=1-233; Score=13.4; E_value=1.3e-14; Accession=PF07714.9; Description =Protein tyrosine kinase
  Pfam module annotation: Pfam domain module=Pkinase::Pkinase_Tyr; Domain location=1-233::1-233
RMESPYLVGLLGYCADQSHRLLVFEFMPNGSLRSHLHPPPRPATAAGGLPPRQPLDWQTRLGIALDCARALEFLHEHSXPAVIHRDFNCSNVLLDHNYRARVSDFGMAKVGSNKADGQVVTRVIGTTGYLAPEYASTGKLTTKSDVYSYGVVLLELLTGRVPVDTQRPPGQHVLVSWALPRLTDRQKLAQMVDPALKGQFALKDLIQVAAIAAMCIQTKAEYRPLMTDVVQSLIPIAKPSMSCSSTPLRPALEHVIFMSSSQC

SEQ ID NO: 68199 - protein, 184 aa, Setaria italica
  Transcript Sequence Number=SeqID_2225
  Gene Ontology: Mol. function=protein binding
YLPAGFLDFAVNMIHLDRAHLSCLTASGHGLRETLFYSLFSHLQVYKTRSDIQRALPLINDGAVSLDGGILKPNGSFCLGDSKNLEVKFPVSLEVSSSPENILEMEGQVKLKNWEKERLLEDMKREEDLLKEVKELYSKQKQELMDYLTRPELTQAPHDSSTIPSPATPGSNPFGAKPSHKRRY

SEQ ID NO: 68200 - protein, 317 aa, Setaria italica
  Transcript Sequence Number=SeqID_2226
  Gene Ontology: Mol. function=protein binding
  Homolog annotation: Hit_ID=Q9FNF5; Match level="QueryCoverage=79%, HitCoverage=16%, E-value=2e-25, Identity=32%"; Hit description =Similarity to En/Spm-like transposon protein
MASPPLPSQIVELNCKVMEEKLKSLGSEVNRHEDNLRFLKSEINAIEEACVDLAVKLGNYHSSVAAVVNNDTSAQEAEERTVRSILDQDRTAAAIICQLKLRSELASKMPLMKDILGFVATLGKVNNDNLSRLLAEYLGMDNMLALVCKTYNGVKGLEKYDKDGIIDKSSGIHGLGRSVGKLLNGRFTVFCLENLRPFSGDVNIDDPQRKLILHRPRFPGGESPAGFLDFAVNMIHLDRAHLSCLTASGHGLRETLFYSLFSHLQVYKTRSDIQRALPLINDGAVSLDGGILKPNGSFCLGDSKNLEVSMQFSLFVS

SEQ ID NO: 68201 - protein, 164 aa, Setaria italica
  Transcript Sequence Number=SeqID_2227
  Subcellular localization annotation: CTP_CleavageSite=81; ConfidenceScore=5.23e-01
MVVALEVGLAVGKVAVLVVDLEVGKVAGLVSFSSVSRPNPDPTNPAPLTTTVVTVLRVRRLGPHQIRRAEALPAASEAEVAASSVQERAKDILVVVSGLLFGFGCGALTAATMYLVWSLIASTCASGYDDVYSDDEDQLSDSESPKKAGYVIIHDAEEYGTGKN

SEQ ID NO: 68202 - protein, 226 aa, Setaria italica
  Transcript Sequence Number=SeqID_2228
  Gene Ontology: Mol. function=hydrolase activity, acting on glycosyl bonds; Cellular component=extracellular region; Biological process =carbohydrate metabolic process
  Homolog annotation: Hit_ID=B6UDD6; Match level="QueryCoverage=100%, HitCoverage=41%, E-value=1e-119, Identity=90%"; Hit description =Alpha-L-fucosidase 1
IGHTIAEYSRCGDPYGQDWVPAECDVSIRPGWFWHASEKPKNVTTLLDIYYKSVGRNCLLILNVPPNSSGLISDEDMQVLQEFTEIRHTIFSHNFAANATVTANSVRGGQDNLQFAPSNVLEDSIYSYWAPQEGQTCWEMLFDLGQSASFNVLQLQEPIQLGQRVIEFHVDILIDELWQTIVEATTIGYKRLLKFPVTESRYLKLSINSARADPLISFFGVFMDSF

SEQ ID NO: 68203 - protein, 128 aa, Setaria italica
  Transcript Sequence Number=SeqID_2229
  Subcellular localization annotation: CTP_CleavageSite=50; ConfidenceScore=5.61e-01
PAPLALKAAAPKPKSIAAARATRMAKRSPTGNATAAPQPRPPRRAFGTTRSNNVPVEKPAPPLQKPSKVSPPPPKKPSKLSPPPLLKPSKTSPPAVQKPSKLSPPATQKPSKLSPPNPVRATKPSKFA

SEQ ID NO: 68204 - protein, 64 aa, Setaria italica
  Transcript Sequence Number=SeqID_2230
  Homolog annotation: Hit_ID=B6TR77; Match level="QueryCoverage=100%, HitCoverage=34%, E-value=2e-15, Identity=70%"; Hit description=RING -H2 finger protein ATL1R
MHRAARRLMWGTSAPGSDVPSDHDVVIVLASLLCAMITVLGIGLVARCACGRGPRHPAAAAANR

SEQ ID NO: 68205 - protein, 38 aa, Setaria italica
  Transcript Sequence Number=SeqID_2231
RDPPRRWCHYLSLPLPSTVTRMITVTVFSGTGDALPMP

SEQ ID NO: 68206 - protein, 585 aa, Setaria italica
  Transcript Sequence Number=SeqID_2232
  Gene Ontology: Mol. function=cysteine-type peptidase activity; Cellular component=transcription factor TFIID complex; Biological process=ubiquitin-dependent protein catabolic process
  Homolog annotation: Hit_ID=Q33AW7; Match level="QueryCoverage=99%, HitCoverage=62%, E-value=0.0, Identity=76%"; Hit description =Ubiquitin carboxyl-terminal hydrolase
  Pfam annotation: Domain name=UCH; Domain location=1-560; Score=286.8; E_value=4.8e-83; Accession=PF00443.21; Description=Ubiquitin carboxyl- terminal hydrolase
ITENPLGLQGELAIAFGELLRKLWSSGRASVPPRAFKSKLSRFAPQFSGYNQHDSQELLGFLLDGLHEDLNRVKKKPYIEAKDADGRPDDEFAEECWNYHKARNDSIIVDKFQGQYKSTLVCPVCNKISVTFDPFMYLSLPLPSTVTRMITVTVFSGTGDALPMPFTVTIQKNGNCRDLTKALTDACCLKSSETLLLAEVYDHRIYRYLTNPIEGLYTIKDEDILVAYRLPVGHEKLLRLEILHRRADRFGADPQFNINRKLIGCPLVTCIPNDSTGKSDIYAAVSDVLVPFVRAKAHGPDVSAVKLSGNGPSLDGIVLTDNGTTCEEGLSTSSGDDNAVDDDLLPFQLSLTDEKGIARNAINTDSNRVLGIVMRVLMDWSDREREMYNTDYMDELPEVFKPGFLSKKTRQEAVNLFSCLDAFLKEEPLGPDDMWYCPGCKEHRQASKKLDLWRLPEILVVHLKRFSYSRYMKNKLDTFVNFPIHDLNMSKYVKHTSRGNLQPMYELYAVINHYGGLGGGHYSAYAKLVEEDNWYHFDDSHVSSVSEDDIRTSAAYVLFYRRVGGSSAVANSVPVDIEMVDSLET

SEQ ID NO: 68207 - protein, 135 aa, Setaria italica
  Transcript Sequence Number=SeqID_2233
  Gene Ontology: Mol. function=cysteine-type peptidase activity; Cellular component=transcription factor TFIID complex; Biological process=ubiquitin-dependent protein catabolic process
  Homolog annotation: Hit_ID=Q8LMT7; Match level="QueryCoverage=91%, HitCoverage=13%, E-value=2e-39, Identity=70%"; Hit description =Ubiquitin carboxyl-terminal hydrolase
  Pfam annotation: Domain name=UCH; Domain location=1-110; Score=-5.3; E_value=6.3e-07; Accession=PF00443.21; Description=Ubiquitin carboxyl-terminal hydrolase
LRPSFILFWFSSLERFSYSRYMKNKLDTFVNFPIHDLNMSKYVKHTSRGNLQPMYELYAVINHYGGLGGGHYSAYAKLVEEDNWYHFDDSHVSSVSEDDIRTSAAYVLFYRRVGGSSAVANSVPVDIEMVDSLET

SEQ ID NO: 68208 - protein, 408 aa, Setaria italica
  Transcript Sequence Number=SeqID_2234
  Gene Ontology: Mol. function=cysteine-type peptidase activity; Cellular component=cytoplasm; Biological process=ubiquitin-dependent protein catabolic process
  Homolog annotation: Hit_ID=Q33AW7; Match level="QueryCoverage=94%, HitCoverage=41%, E-value=1e-160, Identity=71%"; Hit description =Ubiquitin carboxyl-terminal hydrolase
  Pfam annotation: Domain name=DUF1055; Domain location=100-229; Score =204.5; E_value=2.8e-58; Accession=PF06337.4; Description=Domain of Unknown Function (DUF1055)
  Pfam annotation: Domain name=UCH; Domain location=309-408; Score= -76.0; E_value=0.024; Accession=PF00443.21; Description=Ubiquitin carboxyl-terminal hydrolase
  Pfam module annotation: Pfam domain module=DUF1055::UCH; Domain location=100-229::309-408
MTIPSAEGFLQASSCLPCTAEEERELVAALTREAEENVRDGDLRYLVSQSWWMEWQRYVGLVSDEENDTEQLPQAMNRPGEIDNSKLISAETINGSEEPELQRTLREGEDYTLVPQGVWRRLYGWYKGGPEIPRKVILDSQPNKVYIVDVYPLCLKLIDGRDNSERNIRISRKAKINELYSMVCSIMLVEQSEIVIWDYYQKLKSKKLANFNETLDEAQITMDQEILLEMKLDESRTGFNTRSTNNELALIPLGPSTSSFSIAGGPTYSNGFSSGIGSSFSQDNSFSPLLRDSTDGYNSFSNGTKDDTHGLSGLHNLGNTCFMNSAIQSLVHTPPLVEYFLEDYTREINTENPLGLQGELAIAFGELLRKLWSSGRASVPPRAFKSYHSFTTFQTTNKLQVGIINTKY

SEQ ID NO: 68209 - protein, 385 aa, Setaria italica
  misc_feature (342)..(342): Xaa can be any naturally occurring amino acid
  Transcript Sequence Number=SeqID_2235
  Homolog annotation: Hit_ID=Q2QX12; Match level="QueryCoverage=95%, HitCoverage=74%, E-value=0.0, Identity=89%"; Hit description=Growth regulator protein, putative, expressed
  Pfam annotation: Domain name=DUF246; Domain location=27-385; Score =607.2; E_value=1.7e-179; Accession=PF03138.6; Description=Plant protein family
MNFKSTLIVYITFWFFAELPPSNGYLMIEANGGLNQQRLSICDAVAVASLLNAILVIPTFHLNSVWRDASKFGDIFDEDHFIETLREHVRVVKKLPEDVLLRFNHNISSIPNMRTKAYSSPNHYVQKVLPKLLELGVVRIAPFSNRLAQSVPSNIQALRCLVNYHALRFAEPIRNLAEDLVGRMMKKSSLTGGNYVSVHLRFEEDMVAFSCCTYDGGLKEKTEMDNARERSWRGKFRRHGQVINPEANRRDGKCPLTPLEVGMMLRGMGFDNTTSLYVASGKIYNSEKYMAPLGQMFPLLATKDSLALPEELAQFKGHSSRLAALDYTVCVQSEVFVTTQGXGNFPHFLMGHRRYLFRGNSKTIKPDKRKLVLSFDDPNIRWDRF

SEQ ID NO: 68210 - protein, 73 aa, Setaria italica
  Transcript Sequence Number=SeqID_2236
  Homolog annotation: Hit_ID=B6T6H0; Match level="QueryCoverage=63%, HitCoverage=22%, E-value=6e-16, Identity=86%"; Hit description =Agglutinin
IVGFCGRSGWQLDAVGLYVAPLRPERMYDRVQKLGLSAYRAVMHRIGPPPPQQQQEQAKQENGKAQKQITHKT

SEQ ID NO: 68211 - protein, 150 aa, Setaria italica
  misc_feature (125)..(125): Xaa can be any naturally occurring amino acid
  Transcript Sequence Number=SeqID_2237
  Gene Ontology: Mol. function=protein tyrosine phosphatase activity; Cellular component=cytoplasm; Biological process=dephosphorylation
  Homolog annotation: Hit_ID=B6TFU8; Match level="QueryCoverage=96%, HitCoverage=61%, E-value=1e-75, Identity=92%"; Hit description =Tyrosine specific protein phosphatase family protein
  Pfam annotation: Domain name=Y_phosphatase2; Domain location=1-149; Score=233.3; E_value=5.9e-67; Accession=PF03162.5; Description =Tyrosine phosphatase family
DHGIYRSGFPDVSNLPFLESLRLRSVLCLCPEPYPEANLEFLRAHGIRLFQFGIDGSKEPFVNIPEDRIREALNVILDVRNHPVLIHCKRGKHRTGCVVGCLRKSQRWCLTSIFDEYQRFAAAKXRVSDLRFMELFDISSIKHLPGSFTC

SEQ ID NO: 68212 - protein, 224 aa, Setaria italica
  misc_feature (97)..(97): Xaa can be any naturally occurring amino acid
  Transcript Sequence Number=SeqID_2238
  Gene Ontology: Mol. function=protein tyrosine phosphatase activity; Biological process=dephosphorylation
  Homolog annotation: Hit_ID=B6TFU8; Match level="QueryCoverage=28%, HitCoverage=26%, E-value=2e-29, Identity=93%"; Hit description =Tyrosine specific protein phosphatase family protein
  Pfam annotation: Domain name=Y_phosphatase2; Domain location=102-224; Score=24.6; E_value=1.3e-07; Accession=PF03162.5; Description =Tyrosine phosphatase family
HLAPRCNQPKELIALYRIRIPSAEVCEAAASIMVTEKDALRQCKEQPCRRQDEAPALAALPSSSSSEKDSDAMPPPSSPYAALLRREGEAAPAAARXEELLLVPPLNFAMVDHGIYRSGFPDVSNLPFLESLRLRSVLCLCPEPYPEANLEFLRAHGIRLFQFGIDGSKVKKTQLLALLNLCGLKCSFFSLFLRRKCCFFSIEYLLGSSDILGIISSIVMLLGN

SEQ ID NO: 68213 - protein, 147 aa, Setaria italica
  Transcript Sequence Number=SeqID_2239
  Gene Ontology: Mol. function=protein tyrosine kinase activity; Cellular component=microtubule organizing center; Biological process= microtubule cytoskeleton organization and biogenesis
TKGQLFLLEKSFQLVQHVQDVHQIQTHKVTYGSNVCQNTDCSSQQKFWPDTSSLRIQDGHPKSEDALEESTSQFGNDSREMGLLTLSEIFLICLSGLLENGDHVYEYLRRPHADNVPNNKTSVESESNVHEAKDICAENSTEKNWVK

SEQ ID NO: 68214 - protein, 72 aa, Setaria italica
  Transcript Sequence Number=SeqID_2240
KSETPKQPPLHSLPATARTSRSGQELVSGLHRKAYAFLAMSSMELLHAVIPEKQRGGLLLALLLRDHGVEEL

SEQ ID NO: 68215 - protein, 278 aa, Setaria italica
  misc_feature (86)..(86): Xaa can be any naturally occurring amino acid
  Transcript Sequence Number=SeqID_2241
  Gene Ontology: Mol. function=metal ion binding; Cellular component =intracellular; Biological process=regulation of transcription, DNA -dependent
  Homolog annotation: Hit_ID=B6TS25; Match level="QueryCoverage=100%, HitCoverage=100%, E-value=4e-62, Identity=50%"; Hit description=Zinc- finger protein 1
  Pfam annotation: Domain name=zf-C2H2; Domain location=176-198; Score =19.4; E_value=0.015; Accession=PF00096.18; Description=Zinc finger, C2H2 type
  Pfam annotation: Domain name=zf-C2H2; Domain location=97-119; Score =24.0; E_value=0.00061; Accession=PF00096.18; Description=Zinc finger, C2H2 type
  Pfam module annotation: Pfam domain module=zf-C2H2::zf-C2H2; Domain location=176-198::97-119
MSSMELLHAVIPEKQREEEAAALAPAATTTSSSATATSGDEGAHVPQGWAKRKRSRRQRSEEENLALCLLMLSRGGNHRVQAPPPXVPAAAPAAAEFKCSVCGKSFSSYQALGGHKTSHRVKLPTPPASAASPAVTVVEAPAPITAIPPPPIEVREPATSSTAASSDGAAASSRVHRCSICHKEFPTGQALGGHKRKHYDGGASAAASTDLLATAAAAETSEVGSSGNGSSAARAFDLNLPAVPEFVFRCGKAGKMWEEDEEVQSPLAFKKPRLLMTA

SEQ ID NO: 68216 - protein, 336 aa, Setaria italica
  Transcript Sequence Number=SeqID_2242
  Gene Ontology: Mol. function=hydrolase activity, acting on ester bonds; Biological process=lipid metabolic process
  Homolog annotation: Hit_ID=A1C0L3; Match level="QueryCoverage=99%, HitCoverage=90%, E-value=8e-99, Identity=49%"; Hit description =UCW116, putative lipase
  Pfam annotation: Domain name=Lipase_GDSL; Domain location=1-323; Score=156.3; E_value=9.2e-44; Accession=PF00657.14; Description=GDSL- like LipaseAcylhydrolase
  Subcellular localization annotation: CTP_CleavageSite=61; ConfidenceScore=5.42e-01
FGDSLSDAGNLIVNGTPKALTTARPPYGMTFFRKPTGRCSNGRLVVDFLAEHFGLPLPPPSQAQGKDFRKGANFAITGATALEYSFFKAHGIDQRIWNTGSINTQIGWLQNMKPSLCKSEKDCKDYFSKSLFVVGEFGGNDYNAPLFSGVPFSDVKTYVPLVAKAIANGVEKLIELGATDLLVPGVLPIGCFPLYLTLYNTSRKSDYNARTGCLRRYNRLAYHHNRELKQQLDELQKKYPVTKIMYGDYFKAAMQFVVNPGKFGFSTALQACCGAGGQGNYNFNLKKKCGEQGASVCSNPSSYVSWDGIHMTEAAYKKVADGWLNGPYAEPPILKS

SEQ ID NO: 68217 - protein, 211 aa, Setaria italica
  misc_feature (129)..(129): Xaa can be any naturally occurring amino acid
  Transcript Sequence Number=SeqID_2243
  Gene Ontology: Mol. function=hydrolase activity, hydrolyzing O -glycosyl compounds; Cellular component=anchored to membrane; Biological process=carbohydrate metabolic process
  Homolog annotation: Hit_ID=B6U2N5; Match level="QueryCoverage=93%, HitCoverage=40%, E-value=1e-103, Identity=88%"; Hit description =Glucan endo-1,3-beta-glucosidase 5
  Pfam annotation: Domain name=Glyco_hydro_17; Domain location=1-168; Score=-92.6; E_value=1.1e-05; Accession=PF00332.10; Description =Glycosyl hydrolases family 17
PDVNKTMAELLSFLTNNSSPFMVELNPFLSFQQHKNLSLDYYLFQLMSHPVKDGQNKYDNYFDASIDALVTALTEAGYGDMDIIVGRAGWPTDGAVNATPAIAQSFMTGLVNHLAKKSGTPLRPKVPPXETYLFSLLDEDQRNTASGGYERHHGIFTFDGQAKYYANIGQGPKPLKNAPDVNYVPSKWCVLDNNKDLSNISSSFSAACSNG

SEQ ID NO: 68218 - protein, 323 aa, Setaria italica
  Transcript Sequence Number=SeqID_2244
  Gene Ontology: Mol. function=electron carrier activity; Cellular component=extracellular region; Biological process=response to oxidative stress
  Homolog annotation: Hit_ID=B6TFD7; Match level="QueryCoverage=88%, HitCoverage=89%, E-value=1e-105, Identity=64%"; Hit description =Peroxidase 66
  Pfam annotation: Domain name=peroxidase; Domain location=44-288; Score=470.2; E_value=3e-138; Accession=PF00141.15; Description =Peroxidase
MAVQRMALYFQVAAAVVLLTATGLRAQLRVGFYDNSCPAAEIIVQQEVSKAVGANPGLAAGLLRLHFHDCFVKGCDASVLIDSTPGNTAEKDAGPNTSLRGFEVVDRIKARVEQACSGVVSCADILAFAARDSVALAGGNAYQVPAGRRDGAVSRASDTGGNLPPPTANVAQLTQIFGTKGLTQKDMVVLSGAHTIGSSHCSSFSSRLSRSGTTAGQDPTMDPAYVAQLARQCPQGGDPLVPMDYVSPNAFDEGFYKGVMANRGLLSSDQALLSDKNTAVQVVTYANDPATFQSDFAAAMVKMGSVGVLTGSSGKIRGNCRVA

SEQ ID NO: 68219 - protein, 43 aa, Setaria italica
  misc_feature (13)..(13): Xaa can be any naturally occurring amino acid
  Transcript Sequence Number=SeqID_2245
VKSYLIRQMLHVXLFDNCKQRDTNLNAASEPAASNHSALGTSP

SEQ ID NO: 68220 - protein, 137 aa, Setaria italica
  Transcript Sequence Number=SeqID_2246
  Gene Ontology: Mol. function=nucleic acid binding
  Homolog annotation: Hit_ID=Q9ZUC0; Match level="QueryCoverage=94%, HitCoverage=93%, E-value=2e-42, Identity=65%"; Hit description =F5O8.30 protein
MAADSGARRQPTFTKVDQLRPGTHGHNLIVKVVDSKMVVQRGREGGPQGRQMRIAECLVGDETGIIVFTARNDQVDVMKPGTTVELRNAKIDMFKGSMRLAVDKWGIVKAAESLAEFTAKEDNNMSLIEFELVTVVE

SEQ ID NO: 68221 - protein, 163 aa, Setaria italica
  Transcript Sequence Number=SeqID_2247
  Homolog annotation: Hit_ID=B5TV63; Match level="QueryCoverage=98%, HitCoverage=29%, E-value=7e-16, Identity=32%"; Hit description =Senescence-related protein
  Subcellular localization annotation: CTP_CleavageSite=34; ConfidenceScore=5.43e-01
MASASSNAKQSLYPEVNQSHPDLNTPFYSAPTTSTSTGSSLYPTVDPNKLAENLFPETAEEEAAPPPPTTEETIVTVPGAQLHLVDPDRSLDLGAGTLSVVRLRQGDHSVAVLARLTPEKPHHRRGLFRLFSSGRSGGDGAEHEPVQWPLTRDVAAVKLDAAH

SEQ ID NO: 68222 - protein, 801 aa, Setaria italica
  misc_feature (42)..(42): Xaa can be any naturally occurring amino acid
  Transcript Sequence Number=SeqID_2248
  Gene Ontology: Mol. function=DNA binding; Cellular component=nucleus; Biological process=transcription initiation
  Pfam annotation: Domain name=Plus-3; Domain location=683-779; Score =67.5; E_value=4.9e-17; Accession=PF03126.10; Description=Plus-3 domain
VMNEGKEGSENCCMDKPEDMKVGSCPTRRCEDASHSSPSRKXVMASVSENQVYCATTVHNERSWATNAWRARLIKAVCQKDSMLPKNTENALPPSSLGISCDAGEFSGKLVGFIGNRNVQTLGNDSNLISNVPAIHSHGKHQDPVLQESHKDEPVVARGESASAVNAVEKCESAPGVDARKLEKGKEKVIYNDSNFVSNTKESDDSNESIESCTSTKAPKRKHSQCSEAKLPFGNKRFRRGDNESSCSGLLEKCGSSFFNWMSSLTNGLPMLDEATAAVPLDQKFSASTGEGSAAPPLLLQNNSGIPMHSVGFNSLFQSLYTRNVMITSRNNCHQLGTGHVFNRLALELNNSNSVLDKQIGMGRETLNVTAETLAAERLQMVSGGSKGNFHNQIDIFPTRLERNMKLPNSSQFCSKSLEEKQNECTVGCSNDATRNKGGFGESLWVSWLLPKTSLEVMEATPCNADSAVNPNAVGDKLYCPSLQNFNAEKELNGAQNLTSRGSSDGATSSKYPAMPPEEPKQSETMASVFAKRLDALRHAKTSAVRLAIACDRGMPKLNNHKTNSFVVSYNSRDELEAGQETHKSSSGNGRIVLWAHDKVKEQSNEELRGNMSEHKHQDHGGSTAAPQHNLQVNTWAEDIDTRRIELKEGSSDVMAGLPDNKQIVPYGIMPNVACDESSVVFGALHRLRLSRSDIIRWLRSPIMHTTLDGFFVRLRFGKWEEALGGTGYHVARLNGALDRNRLSVTIRNSTCQVDSRFVSNHDFHEDELKAWWSAAMKGEWKLPSKEELSMKLRERELLRS

SEQ ID NO: 68223 - protein, 64 aa, Setaria italica
  Transcript Sequence Number=SeqID_2249
LQHIEQREANPKLILKLKQNKEFKSATTELALQNLRGYTLNGKNKNKQIGFFFQRKTLWSAQGN

SEQ ID NO: 68224 - protein, 50 aa, Setaria italica
  Transcript Sequence Number=SeqID_2250
MAVGDLAFKALTAGLGVATLYLAATFSVNVYRGLSWHSEQSKLEKAKTED

SEQ ID NO: 68225 - protein, 231 aa, Setaria italica
  misc_feature (18)..(18): Xaa can be any naturally occurring amino acid
  misc_feature (81)..(81): Xaa can be any naturally occurring amino acid
  Transcript Sequence Number=SeqID_2251
  Gene Ontology: Cellular component=membrane
GGEEWVTAGEDGRVHVVXGRGKGNGRLVARRVWDGKGMSGYEAARWASPAEFATGGAGCGVQWWDRRKGDGVAVQCNGIWXGRGIVTGMVHSIDIHSSRKHICVVGGSSGTIFAWDLRWPQQPIPLSGVGLNGTAEPVCESEVWEVHFDTYTQSSDIISSASSKILPVMMCSEDGILAVVKQDERPLELLAEACAINSFDIDPQNPSDVVCALEWESIGVLTRDRDTLVEE

SEQ ID NO: 68226 - protein, 56 aa, Setaria italica
  Transcript Sequence Number=SeqID_2252
FLLSSSYANLKGNSSNRGLHAEPLATSFHKKFLGTVDYLWYASKYRLQLLVHTQYD

SEQ ID NO: 68227 - protein, 366 aa, Setaria italica
  Transcript Sequence Number=SeqID_2253
  Gene Ontology: Mol. function=endonuclease activity; Biological process=cell redox homeostasis
  Homolog annotation: Hit_ID=Q9LS39; Match level="QueryCoverage=88%, HitCoverage=74%, E-value=4e-92, Identity=49%"; Hit description =Carbon catabolite repressor protein 4 homolog 3
  Pfam annotation: Domain name=Exo_endo_phos; Domain location=4-325; Score=82.1; E_value=1.9e-21; Accession=PF03372.15; Description =EndonucleaseExonucleasephosphatase family
EDACTIMSYNILADYHARNHPDLYRDVPWDAMRWDSRRRLIIHEIRHWDPDLVCLQEVDRFQDIAAGMKSRGYEGIYQRRTGDTRDGCAMFWKSKRLRLLEEDSIDFSEFNLRNNVAQICVFELNGTHKLVLGNIHVLFNPKRGDVKLGQIRLLLEKANALAEKWDEIPIVLAGDFNSTPDSAIYKFLSTMKLNISLHDRRKLSGLDSSEFDLYELCSSLKYQWSDEEVRNATGYSNVMVAEHPLKLSSSYANLKGNSSNRGLHAEPLATSFHKKFLGTVDYLWYTHGLECSRVLDTFPIGVLRRTRGLPTREIGSDHLPIIAEFAFTESVEDDFEEEDDSEQDNGSEQEVSTTQHAYLSTDDESR

SEQ ID NO: 68228 - protein, 313 aa, Setaria italica
  Transcript Sequence Number=SeqID_2254
  Gene Ontology: Mol. function=hydrolase activity, acting on ester bonds; Biological process=lipid metabolic process
  Homolog annotation: Hit_ID=Q672R1; Match level="QueryCoverage=97%, HitCoverage=79%, E-value=7e-67, Identity=47%"; Hit description =Lipase 1
  Pfam annotation: Domain name=Lipase_GDSL; Domain location=17-312; Score=96.6; E_value=8.5e-26; Accession=PF00657.14; Description=GDSL -like LipaseAcylhydrolase
LLPWSFSSSIRTNYTSIFCFGDSFADTGNFVIIGGPTTPDLLIAKPPYGMTFFGHPTGRISDGRLAIDFIAEALGLPLLPPSMAANQSFRQGANFAVAGATALDREFFVRDGDTSVTRYNISLGDQLGWFDAMKPSLCSSPQACQRHFARALFVVGEFGWNDYAFMLMAGKSVDEARSHVPQVVRTICTAVEKLIGAGGKTVVVPGLTPLGCASGNLVLFATTNAADYEPDTGCLRGLNRLSREHNRQLRQALARLRGRRPGARIVYADFYAPIADFAAAPVRYGFDGTDGALRACCGGGGGRYNVNLSMACG

SEQ ID NO: 68229 - protein, 98 aa, Setaria italica
  Transcript Sequence Number=SeqID_2255
  Subcellular localization annotation: CTP_CleavageSite=19; ConfidenceScore=5.19e-01
PFTDKSTFSPLQNQGAQPSAATQAPTVQAEGSASTKNELADSLGDIKSLRQLPTDEVVAPMTSFAAPSDSPQGTEPGTNSVQPSEEASFDFSSDEKPT

SEQ ID NO: 68230 - protein, 205 aa, Setaria italica
  Transcript Sequence Number=SeqID_2256
  Subcellular localization annotation: CTP_CleavageSite=26; ConfidenceScore=5.29e-01
MMTLPSNQAQTSSTGPESTPISGDTRLSSDVPATSYLQNKEADSPAATQVPTPRAPLESASTQNVLSDAPQGTEPDQVSHASEPPFSAEPSNEASYAGRASESREGSPVVDAKTTLPSRQVQTASTGSDSTPISGDVPDSSPLQNQGAQPSAATQAPTVQAEGSASTKNELADSLGDIKSLRQLPTDEVVAPMTSSRYTIWYRTT

SEQ ID NO: 68231 - protein, 81 aa, Setaria italica
  Transcript Sequence Number=SeqID_2257
  Gene Ontology: Mol. function=binding; Cellular component=mitochondrion
  Homolog annotation: Hit_ID=Q7XQN7; Match level="QueryCoverage=93%, HitCoverage=10%, E-value=2e-31, Identity=86%"; Hit description =OSJNBa0084A10.18 protein
NLRLVLVHVCAIKTGFEHDALVMSSLISMYSKCGLIIEASQVFEMIMQRDTVTWNAMIATYAYHGLAAEALKLFDRMTKDG

SEQ ID NO: 68232 - protein, 121 aa, Setaria italica
  Transcript Sequence Number=SeqID_2258
  Gene Ontology: Mol. function=serine-type carboxypeptidase activity; Cellular component=extracellular region; Biological process =proteolysis
  Homolog annotation: Hit_ID=B9SJ52; Match level="QueryCoverage=97%, HitCoverage=26%, E-value=1e-21, Identity=41%"; Hit description =Vitellogenic carboxypeptidase, putative
  Subcellular localization annotation: CTP_CleavageSite=18; ConfidenceScore=5.24e-01
DQAYFAGLINAKQKTSVEAMQNRTASLVRAGNWTGARRERNRIISFLRNVTGVATPFNYARERPYPTRPLLNLLNTDEAKAALGARRDVVWVRCSKAVSEALAEDIMRSVKGDVEAVLARD

SEQ ID NO: 68233 - protein, 53 aa, Setaria italica
  Transcript Sequence Number=SeqID_2259
SKYRCALLPSLISRGTRSIQHSALSYDPMNPMNCHHLLRLLLALVDDEEMGYY

SEQ ID NO: 68234 - protein, 81 aa, Setaria italica
  Transcript Sequence Number=SeqID_2260
  Gene Ontology: Mol. function=carbon-nitrogen ligase activity, with glutamine as amido-N-donor
  Homolog annotation: Hit_ID=Q2QX53; Match level="QueryCoverage=82%, HitCoverage=11%, E-value=1e-26, Identity=83%"; Hit description =Amidase family protein, expressed
SESDSATHSCFDFCRNRQMFFHNKIFETADAIVTPMTGVTAYPLQEDALGTGELDYINGAALVRYSIAGNFLGLPAITVPV

SEQ ID NO: 68235 - protein, 165 aa, Setaria italica
  Transcript Sequence Number=SeqID_2261
  Gene Ontology: Mol. function=carbon-nitrogen ligase activity, with glutamine as amido-N-donor; Biological process=proteolysis
  Homolog annotation: Hit_ID=Q2RA14; Match level="QueryCoverage=100%, HitCoverage=27%, E-value=9e-70, Identity=78%"; Hit description =Amidase family protein, expressed
  Pfam annotation: Domain name=Amidase; Domain location=1-162; Score= -149.4; E_value=0.00053; Accession=PF01425.13; Description=Amidase
AVMAGKANMHELGAGTSGINPHHGATRNPYCLARVSGGSSGGSAAAVCAGLCPVALGADGGGSVRMPAALCGVVGFKPTAGRLSNSGLLPLNWTVGMPGILAATVEDALIAYAAIVDQSKPRHLQPELNLPMLTCTRSMPNIRLAKYAKWFDDCSEDIRSLCGKA

SEQ ID NO: 68236 - protein, 315 aa, Setaria italica
  Transcript Sequence Number=SeqID_2262
  Gene Ontology: Mol. function=carbon-nitrogen ligase activity, with glutamine as amido-N-donor
  Homolog annotation: Hit_ID=Q2RA14; Match level="QueryCoverage=94%, HitCoverage=49%, E-value=1e-141, Identity=80%"; Hit description =Amidase family protein, expressed
  Pfam annotation: Domain name=Amidase; Domain location=2-286; Score= -65.6; E_value=4e-08; Accession=PF01425.13; Description=Amidase
  Subcellular localization annotation: CTP_CleavageSite=33; ConfidenceScore=5.22e-01
FKFNFTLKKNRRTRTTSVRMPAALCGVVGFKPTAGRLSNSGLLPLNWTVGMPGILAATVEDALIAYAAIVDQSKPRHLQPELNLPMLTCTRSMPNIRLAKYAKWFDDCSEDIRSLCGKALQMLRTQYGWECVDVTVPEIEEMRLAHYVTMGSECTASLAKYLDNMSKSEIGWDVRIGLSAYRSFSSRDYLNAQRLRNRQMFFHNKIFETADAIVTPMTGVTAYPLQEDALGTGELDYINGAALVRYSIAGNFLGLPAITVPVGYDTGGLPVGLQFIGRPWSEATLLHLAYATQEACAREHRKPKVHYDLLLSKEY

SEQ ID NO: 68237 - protein, 163 aa, Setaria italica
  misc_feature (120)..(120): Xaa can be any naturally occurring amino acid
  misc_feature (154)..(154): Xaa can be any naturally occurring amino acid
  Transcript Sequence Number=SeqID_2263
  Gene Ontology: Mol. function=metal ion binding; Cellular component =nucleus; Biological process=regulation of transcription, DNA -dependent
  Homolog annotation: Hit_ID=Q8S9F8; Match level="QueryCoverage=100%, HitCoverage=31%, E-value=1e-67, Identity=72%"; Hit description =Transcriptional adaptor
VGTKSKQQCIDHYTTAYIPSPCYPLPDMSHVNGKNRKELLAMAKVRVRVKKGTSLLPGELTPKAESPFSPSRVKLEEALGDGPAGRSPSHMAGGANKKASNAGQNKDGANISKVEDEGPXLTELSGYNSKRHEFDPEYDNDAEQALAEMEFKEXDSETDRELK

SEQ ID NO: 68238 - protein, 140 aa, Setaria italica
  Transcript Sequence Number=SeqID_2264
  Gene Ontology: Mol. function=ATPase activity, coupled to transmembrane movement of substances; Cellular component=integral to membrane; Biological process=transport
  Homolog annotation: Hit_ID=Q6YUU5; Match level="QueryCoverage=90%, HitCoverage=61%, E-value=4e-57, Identity=76%"; Hit description =Putative multidrug resistance protein
  Pfam annotation: Domain name=ABC_tran; Domain location=2-108; Score =50.5; E_value=6.4e-12; Accession=PF00005.19; Description=ABC transporter
NESRYAAAKAANAHNFISQLPQGYDTQVGERGAQMSGGQKQRIAIARAILRSPKILLLDEATSALDTESERIVQEALDVASRGRTTIVIAHRLSTIRNADGIAVVESGAVQELGSHSELIAKNGMYSSLVHLQQTRDSSE

SEQ ID NO: 68239 - protein, 153 aa, Setaria italica
  Transcript Sequence Number=SeqID_2265
  Gene Ontology: Cellular component=nucleus; Biological process=cell division
  Homolog annotation: Hit_ID=O24584; Match level="QueryCoverage=99%, HitCoverage=32%, E-value=2e-60, Identity=76%"; Hit description =Cyclin type B-like
  Pfam annotation: Domain name=Cyclin_C; Domain location=28-151; Score =172.0; E_value=1.7e-48; Accession=PF02984.11; Description=Cyclin, C -terminal domain
CDNAFTREQILTKEKAILDKLHWNLTVPTMYMFIVRYLKAAAAKGDKELENMAFFYSELALVQYTMLIYPPSVTAAAAVYAARSTLQMNPLWTDILEYHTGLTEPQLLDCARRLMSFHALAPESKQKAVYRKYSSPKLGAVSLCSPAKKLLSV

SEQ ID NO: 68240 - protein, 90 aa, Setaria italica
  Transcript Sequence Number=SeqID_2266
  Gene Ontology: Mol. function=nucleic acid binding
  Homolog annotation: Hit_ID=B6T453; Match level="QueryCoverage=72%, HitCoverage=18%, E-value=7e-26, Identity=89%"; Hit description =Splicing factor, arginine/serine-rich 6
  Pfam annotation: Domain name=RRM_1; Domain location=18-65; Score=9.0; E_value=0.029; Accession=PF00076.14; Description=RNA recognition motif. (a.k.a. RRM, RBD, o
WKFQVGDAFEYLTHDGFIVCGNHLRRIREVELKRDYAFIEFSDPRDADDAQYNLDGREVDGSRIIVEFAKGVPRGAGGSREYMGRGPPPG

SEQ ID NO: 68241 - protein, 86 aa, Setaria italica
  Transcript Sequence Number=SeqID_2267
  Gene Ontology: Mol. function=nucleic acid binding
  Homolog annotation: Hit_ID=Q2QKC1; Match level="QueryCoverage=55%, HitCoverage=14%, E-value=2e-17, Identity=89%"; Hit description =Alternative splicing regulator
  Pfam annotation: Domain name=RRM_1; Domain location=43-86; Score=4.2; E_value=0.081; Accession=PF00076.14; Description=RNA recognition motif. (a.k.a. RRM, RBD, o
TPQRHHIRSLPRPLSPSPPAPARRLRPDPDMPRYDDRYGSTRLYVGRLASRTRSRDLEYLFSRYGRIREVELKRDYAFIEFSDPRD

SEQ ID NO: 68242 - protein, 100 aa, Setaria italica
  misc_feature (33)..(33): Xaa can be any naturally occurring amino acid
  misc_feature (95)..(95): Xaa can be any naturally occurring amino acid
  Transcript Sequence Number=SeqID_2268
  Gene Ontology: Mol. function=nucleic acid binding
NGIVGGDTRLYVGRLSSRTRSRDLEYLFSKYGXGFSVFYTTREWRLQLDDAFEYLTHDGFIVCGNHLRRIREVELKRDYAFIEFSDPRDADDAQXNLDGR

SEQ ID NO: 68243 - protein, 182 aa, Setaria italica
  misc_feature (84)..(84): Xaa can be any naturally occurring amino acid
  misc_feature (107)..(107): Xaa can be any naturally occurring amino acid
  Transcript Sequence Number=SeqID_2269
  Gene Ontology: Mol. function=nucleic acid binding; Biological process= protein amino acid phosphorylation
  Homolog annotation: Hit_ID=Q2QKC1; Match level="QueryCoverage=75%, HitCoverage=27%, E-value=2e-33, Identity=59%"; Hit description =Alternative splicing regulator
  Pfam annotation: Domain name=RRM_1; Domain location=92-152; Score =8.9; E_value=0.03; Accession=PF00076.14; Description=RNA recognition motif. (a.k.a. RRM, RBD, o
RHNATISVPFPDPSRRRRRLQHAGSVRIPDMPRYDDRYGSTRLYVGRLASRTRSRDLEYLFSRYGRFFGFTGRSVVEGCPWWTXDHLWKFQVGDAFEYLTHDGLLFXGNPLRRIREVELKRDYAFIEFSDPRDADDARYNLDGKDVDGSHIIVEFAKGVPRGPGGSREYMGRGPPPGTGRLL

SEQ ID NO: 68244 - protein, 36 aa, Setaria italica
  Transcript Sequence Number=SeqID_2270
  Gene Ontology: Mol. function=nucleic acid binding
  Homolog annotation: Hit_ID=Q2QKC1; Match level="QueryCoverage=100%, HitCoverage=10%, E-value=8e-11, Identity=94%"; Hit description =Alternative splicing regulator
MPRYDDRYGGTRLYVGRLSSRTRSRDLEYLFSKYGR

SEQ ID NO: 68245 - protein, 338 aa, Setaria italica
  Transcript Sequence Number=SeqID_2271
  Gene Ontology: Mol. function=nucleic acid binding; Biological process= protein amino acid phosphorylation
  Homolog annotation: Hit_ID=Q2QKC1; Match level="QueryCoverage=41%, HitCoverage=42%, E-value=1e-72, Identity=92%"; Hit description =Alternative splicing regulator
  Pfam annotation: Domain name=RRM_1; Domain location=13-75; Score =65.9; E_value=1.5e-16; Accession=PF00076.14; Description=RNA recognition motif. (a.k.a. RRM, RBD, o
  Pfam annotation: Domain name=zf-CCHC; Domain location=102-119; Score =30.9; E_value=3.9e-06; Accession=PF00098.15; Description=Zinc knuckle
  Pfam annotation: Domain name=zf-CCHC; Domain location=124-141; Score =27.5; E_value=1.4e-05; Accession=PF00098.15; Description=Zinc knuckle
  Pfam module annotation: Pfam domain module=RRM_1::zf-CCHC::zf-CCHC; Domain location=13-75::102-119::124-141
MPRYDDRYGGTRLYVGRLSSRTRSRDLEYLFSKYGRIREVELKRDYAFIEFSDPRDADDAQYNLDGKDVDGSHIIVEFAKGVPRGPGGSREYMGRGPPPGTGRCFNCGIDGHWARDCKAGDWKNKCYRCGERGHIERNCQNSPRSVRRERSYSRSPSPRRGRGRGRSRSYSRSRSRSRSRSRSYSRSRSLSGSPRRGHRDLERSRSLSYSRSPMRSASPPAKERSHTPDGSRSPRSPSPRGEVSPPPKDNGERNGPDRGGSPGMMEKENSRSRSWSPSDGNRSPAANGQSPSPRGDRSPSPRGDRSPSPRGDRSPSPKGNGNNDDDDRGASPRGSKSP

SEQ ID NO: 68246 - protein, 304 aa, Setaria italica
  Transcript Sequence Number=SeqID_2272
  Gene Ontology: Mol. function=nucleic acid binding; Cellular component= nucleus; Biological process=mRNA processing
  Homolog annotation: Hit_ID=B6T453; Match level="QueryCoverage=36%, HitCoverage=31%, E-value=1e-56, Identity=91%"; Hit description =Splicing factor, arginine/serine-rich 6
  Pfam annotation: Domain name=RRM_1; Domain location=18-65; Score=9.0; E_value=0.029; Accession=PF00076.14; Description=RNA recognition motif. (a.k.a. RRM, RBD, o
  Pfam annotation: Domain name=zf-CCHC; Domain location=114-131; Score =27.5; E_value=1.4e-05; Accession=PF00098.15; Description=Zinc knuckle
  Pfam annotation: Domain name=zf-CCHC; Domain location=92-109; Score =30.9; E_value=3.9e-06; Accession=PF00098.15; Description=Zinc knuckle
  Pfam module annotation: Pfam domain module=RRM_1::zf-CCHC::zf-CCHC; Domain location=18-65::114-131::92-109
WRLQLDDAFEYLTHDGFIVCGNHLRRIREVELKRDYAFIEFSDPRDADDAQYNLDGREVDGSRIIVEFAKGVPRGAGGSREYMGRGPPPGTGRCFNCGIDGHWARDCKAGDWKNKCYRCGERGHIERNCQNSPRNLRRERSYSRSPSPRRGRGRSRSYSRSRSYSRSRSVSGSPRGGRRDRDERRSRSLSYSRSPRRSASPSAKEKERSPTPNGSRSPRSPSPRDQVSPPPKDNGERNGSDNGDSPGRRENSRSRSRSRSPSDGYRSPAANGRSPSPRDDRSPSPKGNAGDDDGRGSPRGSQSP

SEQ ID NO: 68247 - protein, 62 aa, Setaria italica
  Transcript Sequence Number=SeqID_2273
YKPLGLYESRKFCEAVARASSLHLRSSPHASLTVATQPQLHEFFMIGLSLQVQTYTLTNYPK

SEQ ID NO: 68248 - protein, 109 aa, Setaria italica
  Transcript Sequence Number=SeqID_2274
PIAQALGNSNKYWCPKLQPTCVFLQPTLADDPTDLTMAMSLLSNVTWPPCFTGAAAAGRHPCYISLHLGLRIGKNPDGERSPDGDCGNQSPGDGGGMGPGPRMPVPGSG

SEQ ID NO: 68249 - protein, 55 aa, Setaria italica
  Transcript Sequence Number=SeqID_2275
ELARVSELVASEVPASKLTAADVQPERQDVGAEVEAAVFEELLMEIVADLGSGWC

SEQ ID NO: 68250 - protein, 93 aa, Setaria italica
  Transcript Sequence Number=SeqID_2276
MISPAYVAMLGLNREEHLMISCVQFWPETDEWQRSVVLARLMEAPRFLFNRRGLAHQLLGHDDLAALQKCGTCSTSMRRRQGTRSTRGLPVRD

SEQ ID NO: 68251 - protein, 131 aa, Setaria italica
  Transcript Sequence Number=SeqID_2277
  Gene Ontology: Mol. function=nucleoside-triphosphatase activity; Cellular component=integral to membrane; Biological process=transport
  Homolog annotation: Hit_ID=B6UFL9; Match level="QueryCoverage=97%, HitCoverage=20%, E-value=4e-57, Identity=89%"; Hit description =ATPase, coupled to transmembrane movement of substances
PKKVSYELAARNIYYAKPVATPSSLARLVTRPCGAAPAPPDYILRDVSLTARAGEVLAVVGPSGAGKSTLLDILAARTAPTHGRLLLNSAPLRASSFRRLSAHVPQADVALTLLTVSETFAFAASLLRPGV

SEQ ID NO: 68252 - protein, 155 aa, Setaria italica
  Transcript Sequence Number=SeqID_2278
  Gene Ontology: Mol. function=protein serine/threonine kinase activity; Biological process=defense response
  Homolog annotation: Hit_ID=B4FV87; Match level="QueryCoverage=91%, HitCoverage=43%, E-value=6e-34, Identity=50%"; Hit description =Jasmonate-induced protein
  Pfam annotation: Domain name=Jacalin; Domain location=48-155; Score= -11.6; E_value=0.00059; Accession=PF01419.9; Description=Jacalin-like lectin domain
WRKRPLWWHCSSPPLLWSQQQLRITSRQKAYAPRTLLQRLDLWGGNEGIVKDISEAPKRLESITIISNYSIDSMEFSYIDQTGQKRSAGRWGGPGGTAHKLDLGPTEIVKEVSGTYNMFECEICLTSFKLVTNARTWGPWAEEKGTRFSITAPTG

SEQ ID NO: 68253 - protein, 600 aa, Setaria italica
  Transcript Sequence Number=SeqID_2279
  Gene Ontology: Mol. function=binding
  Homolog annotation: Hit_ID=B9RZX3; Match level="QueryCoverage=68%, HitCoverage=57%, E-value=5e-70, Identity=39%"; Hit description=Yth domain-containing protein, putative
  Pfam annotation: Domain name=YTH; Domain location=288-378; Score =180.6; E_value=4.4e-51; Accession=PF04146.7; Description=YT521-B -like family
  Subcellular localization annotation: CTP_CleavageSite=68; ConfidenceScore=5.37e-01
QVASTPYYIPAVLPYAQDSVPGSATTPLLSNVAFLPGMPSYSAISGLAAFPFIAPVTTKSDIHVNPPVQSTIVSSKQFQDHAKLPKVQLHNSVAQKQELSDRSMVPIKLPHASQASAHLLERPISAAKQSPKAKLSGNNCLGYATSDLQKWAAAEKFQPSSKLSAHLNGPGQKVHHLLNEHSLADSQKPGNQRSSAMVVKSYTSRLPVGNPEGTILIRTDQYNRDDLQVDYTYAKFFVIKSIGEADVHKSIKYGVWSSSSNGNSKLDSAFRDADRISRRNSTKCPVFLFFSVNGSGHFCGMAEMVGPVDFHKDMDFWCQDKWTGCFPVRWHIVKDIPNYSLQHITLQNNENKPVTHSRDTQEIPYIPGMSVLKIFKDIKVKECLFDDFMKYEVEEAQYSPHRRCRLSYNAPDFVPVSQRTKDALDTQQTKSSSVLIDRTSEVQNVSEKPHDPKVIKPQEPCVELSDKQVAEAGKENGQQENQCSGNQSQEDAVKTVTNQPPTSSLKTGADGKQQYWKKVENPRQHTDSAAQGSSKLTEKRLNGVRTSTGVVSESSEEQKITAKLGSFKISSKTEEADRKSRTVGVVTIGSMPVRVDSSEV

SEQ ID NO: 68254 - protein, 94 aa, Setaria italica
  Transcript Sequence Number=SeqID_2280
NSHFFFKFWCGHNGRLIYIVALILLYCTSFVAYCIRTQRMTRKPPKKPPAMCDLPTETAATKKQPETKRSHNQAIMTRRPPGCSAAWASSAPPC

SEQ ID NO: 68255 - protein, 170 aa, Setaria italica
  misc_feature (154)..(154): Xaa can be any naturally occurring amino acid
  Transcript Sequence Number=SeqID_2281
GCERAGSDRWRIDDVCALVDEILFVDPKIQTLEEAHQPDHKIGNSKPCVAWEAPHITPDCIEGIKKSSLDGQLLNDEPQGGCLQKCPESKSTMDTTDRMLSWQHGENASQNLKPHDIGDSPLGNKIDISSHQCSVSDCQQKEPISVTELRYFKXQTANHNNEVSKIDLRY

SEQ ID NO: 68256 - protein, 279 aa, Setaria italica
  Transcript Sequence Number=SeqID_2282
  Gene Ontology: Cellular component=chloroplast
  Homolog annotation: Hit_ID=B6TLL7; Match level="QueryCoverage=100%, HitCoverage=97%, E-value=2e-86, Identity=55%"; Hit description=4 -methyl-5-thiazole monophosphate biosynthesis protein
  Pfam annotation: Domain name=DJ-1_PfpI; Domain location=134-264; Score=131.3; E_value=3.1e-36; Accession=PF01965.16; Description=DJ -1PfpI family
AAICAAPPLALGRWGLLDGVKATAHPAFVENFPAEVTAVDANVVVDGKVVTGSGPATAMEFALALVEQLYGKDKVDQIAKPMLVRYEHGYTFKELNPIQWQCSGTPKVLIPLANGNEDMEVITIIDALRRANADVVVASAEDGVEVVGRYGMRIVADVLLGAAADQQFDLIVVPGGMPGAKTLAGKEKLVALLKKQAAANMPYGSICDATAQVLEPHGLLKGKKATAADGSECEDRVVVDGNVITSRSPGTAMEFAVAIVEKLMGREAAREVAEGLLFV

SEQ ID NO: 68257 - protein, 68 aa, Setaria italica
  Transcript Sequence Number=SeqID_2283
MASPSAPTDSQEAARQSLIAISQSVPETPSPQTVKTPTSTEENGKLEDGADKYRSKLMSITDLVLSCT

SEQ ID NO: 68258 - protein, 79 aa, Setaria italica
  Transcript Sequence Number=SeqID_2284
MASPSAPTDSQEAARQSLIAISQSVPETPSPQTVKTPTSTEENGKLEDGADKYRSKLMSITDLSSDAQPTPCPPKDVAA

SEQ ID NO: 68259 - protein, 87 aa, Setaria italica
  Transcript Sequence Number=SeqID_2285
  Subcellular localization annotation: CTP_CleavageSite=50; ConfidenceScore=5.35e-01
SLFSLHPAPAAVQCKNSKLIKSSSSAVASPLHSLDLPRNTRALPFLAHAEAKHATGRHQGSSLALILAVLVLLFSRGPPRSRDPPAT

SEQ ID NO: 68260 - protein, 52 aa, Setaria italica
  Transcript Sequence Number=SeqID_2286
AWLIRECIISSTSIDHPIGYTRNCPQRYSRTVQMQLNSRLFPYLRHPKLTAV

SEQ ID NO: 68261 - protein, 82 aa, Setaria italica
  Transcript Sequence Number=SeqID_2287
ILSTLNINYRRIPRPDKCLVHPTNHKITRDRHLLVPTCSYQNFHSPCVDMFVSEFSLTLFLHGVCLPLHSGNSVSQNSLLAH

SEQ ID NO: 68262 - protein, 159 aa, Setaria italica
  Transcript Sequence Number=SeqID_2288
  Subcellular localization annotation: CTP_CleavageSite=73; ConfidenceScore=5.52e-01
NPAQISLAFSRGVPSLRAGEPPRATCVPRGFPCLRRPSVRLAWLPHAKRPRLVPGARLRSPGGRPPRRPAQIRARPANRRAASCSIPSLIAAHTHPPARCCLLRSLLPFCIACSLPPQKIEDQNGSHLSSRSGAPTSSQINARGGDKLEAATAYLARKL

SEQ ID NO: 68263 - protein, 54 aa, Setaria italica
  misc_feature (15)..(15): Xaa can be any naturally occurring amino acid
  Transcript Sequence Number=SeqID_2289
QARGSNCISCKKIVXGFWIIPMIFLQVVQLLSQACCLPLPKLSGKAQVMLLMNS

SEQ ID NO: 68264 - protein, 123 aa, Setaria italica
  Transcript Sequence Number=SeqID_2290
  Gene Ontology: Mol. function=hydrolase activity, hydrolyzing O -glycosyl compounds; Cellular component=extracellular region; Biological process=carbohydrate metabolic process
  Homolog annotation: Hit_ID=B9T4P2; Match level="QueryCoverage=89%, HitCoverage=34%, E-value=3e-30, Identity=56%"; Hit description =Glucan 1,3-beta-glucosidase 2, putative
MVLGSDFEIRIYGLKCIIDLHAAPGSQNGMEHSASRDGSLDWPSEANIQKTLDVINFLAQRYADNPCLLGIELLNEPSAAGVPLDTLVSYYKTGYQIVRSYSDTAYVIFCQRIGNADPMELYQ

SEQ ID NO: 68265 - protein, 133 aa, Setaria italica
  Transcript Sequence Number=SeqID_2291
  Gene Ontology: Mol. function=ATP binding; Cellular component =chloroplast; Biological process=protein folding
  Homolog annotation: Hit_ID=B4FAE4; Match level="QueryCoverage=90%, HitCoverage=90%, E-value=1e-57, Identity=93%"; Hit description=CHL -CPN10
  Pfam annotation: Domain name=Cpn10; Domain location=46-132; Score =84.0; E_value=5.2e-22; Accession=PF00166.13; Description=Chaperonin 10 Kd subunit
  Subcellular localization annotation: CTP_CleavageSite=36; ConfidenceScore=5.44e-01
MAPSLLAAAASPFLVAGSSTSRRPLGAAPIRRAGLRVAALKYDPAKVAPQSDRVLVRLHQIPEKSAGGVLLPKSAVKFERYLMGEILSVGADVSEVEAGKKVLFSDINAYEVDLGTDEKHCFCRESDLLAVVE

SEQ ID NO: 68266 - protein, 49 aa, Setaria italica
  Transcript Sequence Number=SeqID_2292
  Gene Ontology: Mol. function=transcription regulator activity; Cellular component=nucleus; Biological process=regulation of transcription
  Homolog annotation: Hit_ID=B6SVB8; Match level="QueryCoverage=100%, HitCoverage=7%, E-value=3e-20, Identity=87%"; Hit description=CCR4 -NOT transcription complex subunit 2
TNFNERGSYICFDPNIWDTVHKDNFVLHYEAVEKRPVLPSAAQNLRREL

SEQ ID NO: 68267 - protein, 611 aa, Setaria italica
  misc_feature (13)..(13): Xaa can be any naturally occurring amino acid
  Transcript Sequence Number=SeqID_2293
  Gene Ontology: Mol. function=transcription regulator activity; Cellular component=nucleus; Biological process=regulation of transcription
  Homolog annotation: Hit_ID=B6SVB8; Match level="QueryCoverage=100%, HitCoverage=97%, E-value=0.0, Identity=85%"; Hit description=CCR4 -NOT transcription complex subunit 2
  Pfam annotation: Domain name=NOT2_3_5; Domain location=456-595; Score= 213.0; E_value=8e-61; Accession=PF04153.10; Description=NOT2  NOT3 NOT5 family
  Subcellular localization annotation: CTP_CleavageSite=78; ConfidenceScore=5.31e-01
NLRDSTGRSFASXFAGQSGSLPGFHHSGSHNIHGNLNLTNISGSLAPRNNSMAGIPSPGVQQPGGSISSGRFPSNNLQASMSQIPHGHSGISNRGGMNVGGNPGFSSSMNAIGGSMQGLSSNLANVGNRNSAPGLAASPVLGNLGPRITNSGNIVGGSNIGRSISSAGLSMPSIASRMNLSGNSGSGAINIQGSNRMSSMLQQASPQFMNLLGSSYPTPGGSLSQNQVQAGNNSLGSSGMLHDGSSGDNAPFDINDFPQLTGRPNSAGGGQGQYGSLRKHGVSVNAIVQQNQEFSIQNEDFPALPGYKGSSSDYGMDMHHKDHLHENVNIMQAQHYPMARSSGFNLGSSYPPRQHQQSANSVQNAGLENIGLRTANSPSPSSNSGVYEQFMQQYHQPQTQNSLRLQATSGPQSFKDQSQKPVQGNPAVPDPYSLLGLLSLIRLKEPGPTALALGIDLTSLGLNLNSQDNLYKTFGSPWSNEPAKGEPDYQIPACFSAEPPPPLQPLHFQKFHPLTLFYIFYSMPKDVAQLYAANELYSKGWFYHKEYRVWLTRAPNSAPLVKTPLHERGSYICFDPNIWDTVHKDNFVLHYEAVEKRPVLPSAAQNLRREL

SEQ ID NO: 68268 - protein, 313 aa, Setaria italica
  misc_feature (11)..(11): Xaa can be any naturally occurring amino acid
  Transcript Sequence Number=SeqID_2294
  Gene Ontology: Mol. function=cysteine-type peptidase activity; Cellular component=cytoplasm; Biological process=ubiquitin-dependent protein catabolic process
  Homolog annotation: Hit_ID=Q0J0M6; Match level="QueryCoverage=99%, HitCoverage=29%, E-value=1e-105, Identity=61%"; Hit description =Ubiquitin carboxyl-terminal hydrolase
  Pfam annotation: Domain name=UCH; Domain location=5-308; Score=27.8; E_value=4.5e-09; Accession=PF00443.21; Description=Ubiquitin carboxyl-terminal hydrolase
CKLQEGGCANXSLADPEQNCNGNFRDSENTTMQRTGAVFTTDNTEPSNSQTDHKEQCVDLKRLELESSSLNKQQHVSDIQYNDGHNVDITAEATGAPVSCDSDSVSCNATNNVEAERVGGAEEVVSSSLPSDAQKTLQSAKDNEEVNTRNQGRRKRMKMVGKAQQVQDNQNKKKEDATKVFRAAMRRILISKAPPVLTINLNRFSQDSHGRYKKLKGHVRFKEMLDIQPFMDPRCKETNNTIYHLVGVVEHLGTMTGGHYIAYVRAAKIGGRQQQSSGLKSWFYASDGQVREASLEEVLNCEAYILFYERVGD

SEQ ID NO: 68269 - protein, 110 aa, Setaria italica
  misc_feature (46)..(46): Xaa can be any naturally occurring amino acid
  Transcript Sequence Number=SeqID_2295
  Gene Ontology: Mol. function=microtubule motor activity; Cellular component=microtubule associated complex; Biological process =microtubule-based movement
  Homolog annotation: Hit_ID=Q9FME7; Match level="QueryCoverage=98%, HitCoverage=7%, E-value=4e-15, Identity=46%"; Hit description =Kinesin-like protein
RSQLEQLQTELLFSRSGSAALEELQLLQKKVSLLELKNSELNHELXKERDLSCEQLAERARAAQLERDQLMLKIASARNGKSWDDIENADNGQDVDLLKSYISKIPSLVW

SEQ ID NO: 68270 - protein, 115 aa, Setaria italica
  Transcript Sequence Number=SeqID_2296
  Gene Ontology: Mol. function=oxidoreductase activity, acting on CH-OH group of donors; Biological process=cellular alcohol metabolic process
  Homolog annotation: Hit_ID=B6SW64; Match level="QueryCoverage=92%, HitCoverage=18%, E-value=1e-51, Identity=86%"; Hit description =Protein HOTHEAD
LLSCLFSTVQQAGWDEELVNQSYPWVEERIVHWPKVAPWQAALRDGLLEAGVSPYNGYTYDHLYGTKVGGTIFDETGYRHTAADLLAAGNPNNLRVLLYARVNKIVFNTKQGKLV

SEQ ID NO: 68271 - protein, 370 aa, Setaria italica
  Transcript Sequence Number=SeqID_2297
  Gene Ontology: Mol. function=oxidoreductase activity, acting on CH-OH group of donors; Cellular component=vacuole; Biological process =cellular alcohol metabolic process
  Homolog annotation: Hit_ID=B6SW64; Match level="QueryCoverage=95%, HitCoverage=61%, E-value=0.0, Identity=84%"; Hit description=Protein HOTHEAD
  Pfam annotation: Domain name=GMC_oxred_C; Domain location=206-355; Score=93.3; E_value=8.4e-25; Accession=PF05199.5; Description=GMC oxidoreductase
TRLLNLLAAGNPNNLRVLLYARVNKIVFNTKQGHRKPRAIGVQFKDENGRHHQAFLREKRGSEIIVSAGAIGSPQLLMLSGIGPRNELKKHNISVTLRNEHVGKGMSDNPMNSIFVPMKNPTKQSLIETVGITDAGVFIEASSGFSQTDDSIHCHHGIMSAEIGQLSTIPPKKRSFDAIQKYVDNKYSLPKEVFDGGFILEKIDGPLSTGNLVLVDTDVDSNPSVTFNYFQHPKDLSRCVYGIKTIEKILKTNHFTNLTANGAGYPMETLLNMSVSANINLIPKHTDDTTSLEQFCRDTVTTIWHYHGGCHVGKVVDQQYRVIGISGLRVVDGSTLFRSPGTNPQATVLMMGRYMGVKILRERLGRAAGV

SEQ ID NO: 68272 - protein, 157 aa, Setaria italica
  Transcript Sequence Number=SeqID_2298
  Gene Ontology: Mol. function=protein binding; Biological process=cell division
  Homolog annotation: Hit_ID=B6SGE4; Match level="QueryCoverage=86%, HitCoverage=59%, E-value=2e-39, Identity=63%"; Hit description=Nuc-1 negative regulatory protein preg
  Pfam annotation: Domain name=Cyclin; Domain location=1-118; Score =64.7; E_value=3.4e-16; Accession=PF08613.3; Description=Cyclin
  Pfam annotation: Domain name=Cyclin_N; Domain location=13-119; Score=- 19.2; E_value=0.049; Accession=PF00134.15; Description=Cyclin, N -terminal domain
  Pfam module annotation: Pfam domain module=Cyclin::Cyclin_N; Domain location=1-118::13-119
ALPAIPVRRYAERIYRYAGCSPACFVVSYVYLDRLAQQRTLVDGEGEEEEEEMAAAAVVGVVDSYSVHRLLITAVLVAAKFMDDMHYNNAYFARVGGVEVAEMNGLELELLFALRFRLNVTPDTFARYCAALEAHMLVPPPPPPAAAAAAPVADSGE

SEQ ID NO: 68273 - protein, 88 aa, Setaria italica
  Transcript Sequence Number=SeqID_2299
  Gene Ontology: Mol. function=transferase activity; Cellular component= intracellular; Biological process=regulation of transcription, DNA -dependent
  Homolog annotation: Hit_ID=B6SJK4; Match level="QueryCoverage=98%, HitCoverage=18%, E-value=2e-17, Identity=61%"; Hit description=HMG box family protein
DSKVSEGDMLLSNQGYSSSDESEHSGLKTVDELNTDTSPEMSMETTEMSMETTGSPGHPDPSADGDRFELRRREIPKADEKQSMPPDP

SEQ ID NO: 68274 - protein, 245 aa, Setaria italica
  misc_feature (12)..(12): Xaa can be any naturally occurring amino acid
  Transcript Sequence Number=SeqID_2300
  Gene Ontology: Cellular component=integral to membrane
  Homolog annotation: Hit_ID=B9SJ26; Match level="QueryCoverage=98%, HitCoverage=45%, E-value=3e-88, Identity=66%"; Hit description =Ankyrin repeat-containing protein, putative
  Pfam annotation: Domain name=Ank; Domain location=115-148; Score =18.9; E_value=0.02; Accession=PF00023.22; Description=Ankyrin repeat
  Pfam annotation: Domain name=Ank; Domain location=12-43; Score=9.8; E_ value=1.4; Accession=PF00023.22; Description=Ankyrin repeat
  Pfam annotation: Domain name=Ank; Domain location=149-179; Score =29.6; E_value=1.3e-05; Accession=PF00023.22; Description=Ankyrin repeat
  Pfam annotation: Domain name=Ank; Domain location=183-216; Score =18.4; E_value=0.031; Accession=PF00023.22; Description=Ankyrin repeat
  Pfam annotation: Domain name=Ank; Domain location=47-79; Score=10.7; E_value=1.1; Accession=PF00023.22; Description=Ankyrin repeat
  Pfam annotation: Domain name=Ank; Domain location=81-114; Score=3.1; E_value=13; Accession=PF00023.22; Description=Ankyrin repeat
  Pfam module annotation: Pfam domain module=Ank::Ank::Ank::Ank::Ank::An k; Domain location=115-148::12-43::149-179::183-216::47-79::81-114
SLAALAAAQTDXVKTALYVAAEAGSEEVVRLLLPLYDLEAATVRSRIDLDAFHVAAKQGHTGVVKEFLGRWPELCSVCDSSKTSPLYSAAVKDHLDVVNAILDTDDSCIRIVRKNGKTSLHTAARIGYHRIVKALIERDPGIVPIRDRKGQTALHMAVKGKNTDVVEELLMADVSILNVRDKKGNTALQIATRKWRPQMVQLLLSYETLEVNAVNSQNETAMDLADKVPYGESKTEIIEWLTEAG

SEQ ID NO: 68275 - protein, 425 aa, Setaria italica
  misc_feature (417)..(417): Xaa can be any naturally occurring amino acid
  Transcript Sequence Number=SeqID_2301
  Gene Ontology: Mol. function=substrate-specific transmembrane transporter activity; Cellular component=integral to membrane; Biological process=transmembrane transport
  Homolog annotation: Hit_ID=B4FS29; Match level="QueryCoverage=99%, HitCoverage=80%, E-value=0.0, Identity=86%"; Hit description=Hexose carrier protein HEX6
  Pfam annotation: Domain name=MFS_1; Domain location=1-363; Score =59.2; E_value=1.5e-14; Accession=PF07690.8; Description=Major Facilitator Superfamily
  Pfam annotation: Domain name=Sugar_tr; Domain location=1-411; Score =344.3; E_value=2.4e-100; Accession=PF00083.16; Description=Sugar (and other) transporter
  Pfam module annotation: Pfam domain module=MFS_1::Sugar_tr; Domain location=1-363::1-411
  Subcellular localization annotation: CTP_CleavageSite=19; ConfidenceScore=5.32e-01
FDSELLTVFTSSLYVAGLVATLFASSVTRRFDRRASILIGGSVFIAGSVFGGAAVNVYMLLLNRILLGIGLGFTNQSIPLYLSEMAPPQYRGAISNGFELCISIGILIANLINYGVEKIADGWGWRISLSLAAVPAAFLTIGAIFLPETPSFIIQRDGNIDEAKILLQRLRGTTRIQKELDDLVSASNISRTIRHPLRNIFKRKYRPQLVIALLIPFFNQVTGINVINFYAPVMFRTIGLKESASLMSAVVTRICATVANIVAMVVVDRFGRRKLFLVGGVQMILSQIMVGAVLAAKFKDHGGMEKEYAYLVLIIMCVFVAGFAWSWGPLTYLVPTEICPLEIRSAGQSIVIAVIFLVTFVIGQTFLAMLCHLKFGTFFLFGGWVCVMTVFVYFFLPETKQLPMEQMEQVWRRHWFXWKRIVRGR

SEQ ID NO: 68276 - protein, 99 aa, Setaria italica
  Transcript Sequence Number=SeqID_2302
  Gene Ontology: Mol. function=transferase activity, transferring glycosyl groups; Cellular component=membrane; Biological process =cell wall biogenesis
  Homolog annotation: Hit_ID=B9S905; Match level="QueryCoverage=93%, HitCoverage=16%, E-value=1e-35, Identity=67%"; Hit description =Galactoside 2-alpha-L-fucosyltransferase, putative
LFLILLSMTDELITSGFSTFGYAAQGLAGLKPWIMFRSENHMVPDPPCGRAMSIEPCFHQAPFYDCKAKRDTDLGKVLPYVRHCEDVSWGLKIVNQTQL

SEQ ID NO: 68277 - protein, 374 aa, Setaria italica
  Transcript Sequence Number=SeqID_2303
  Gene Ontology: Mol. function=damaged DNA binding; Cellular component =Elongator holoenzyme complex; Biological process=regulation of transcription from RNA polymerase II promoter
  Homolog annotation: Hit_ID=B4FCR9; Match level="QueryCoverage=94%, HitCoverage=94%, E-value=0.0, Identity=87%"; Hit description =Elongator component
  Pfam annotation: Domain name=PAXNEB; Domain location=12-374; Score =304.4; E_value=2.4e-88; Accession=PF05625.3; Description=PAXNEB protein
  Subcellular localization annotation: CTP_CleavageSite=22; ConfidenceScore=5.33e-01
MAAARGQTLGRSSFSRATSNPAASSSGAAGIKLGPNGAAFVSSGIPDLDRILGGGFLLGSVVMIMEDADAPHHLLLLRCFMAQGVIHKQPLLFAGPMKEPRLFLGTLPAPVSSSKEDGRHRVMGVGASSDGRGSDEGLRIAWQYKKYFGDEKTSGAEHKDNKQEFSNDFDLRKPLERHLLNGQNIECVSTQDADNLRDLQDRCSTFLSKLPGKDGGSLTAGRIAIQSLCAPQCGYFEKDWEMISFIRSLKAMVRSSNSVAVVTFPSTVLSNSFCRRWQHLADTLLSIKAIPDEDKDLAKLLTGYQDMVGFLHVHKVAQTNSQVPVILEASTLSLKLHKRRSLILERLNQAPVDGSSGPSSAVSGSCSSSQGSQA

SEQ ID NO: 68278 - protein, 367 aa, Setaria italica
  Transcript Sequence Number=SeqID_2304
  Gene Ontology: Mol. function=transcription factor activity; Cellular component=nucleus; Biological process=regulation of transcription, DNA-dependent
  Homolog annotation: Hit_ID=B4G1H0; Match level="QueryCoverage=100%, HitCoverage=100%, E-value=1e-117, Identity=60%"; Hit description =Ethylene response element binding protein
  Pfam annotation: Domain name=AP2; Domain location=112-163; Score =76.7; E_value=8.5e-20; Accession=PF00847.12; Description=AP2 domain
MCGGAILANLTKQPGPRRLTERDLWQEKKKPKRGGGGGSRWFLAEEDEDFEADFEDFQGESEESDLELGEGKDDDVVEIKPFAATSKDGLSTMTTAGYDGPAARSAKRKRKNQYRGIRQRPWGKWAAEIRDPQKGVRVWLGTFNSPEEAARAYDAEARRIRGKKAKVNFPDAPTVAQKRRSGPPAAKAPKSSVEQKPAVKPAVNSLANTNTYFYPPADYTLSKPFVQHENMPFPPAMNSASPIEDPIMNLHSDQGSNSFGCSDLSWENDTKTSDISSIAPINTIAEGDECAFVNSNSNNSLVPSVMETNPVDLTEGLTDLEPYMRFLLDDGASESIDSLLNVDGSQDVVSNMDLWSFDDMPMVGDIY

SEQ ID NO: 68279 - protein, 99 aa, Setaria italica
  Transcript Sequence Number=SeqID_2305
  Gene Ontology: Mol. function=protein serine/threonine kinase activity; Cellular component=plasma membrane; Biological process =protein amino acid phosphorylation
  Homolog annotation: Hit_ID=B6SHU9; Match level="QueryCoverage=80%, HitCoverage=13%, E-value=9e-34, Identity=87%"; Hit description=CDPK -related protein kinase
PWPSLTPEAMDFVKRLLCKDPRRRMTAAQALSHPWIRNYNDIKLPLDILIFRLIKAYIRSSSLRKAALRVSTSKFCSDFYPFVVHACMMFILRFRNCHS

SEQ ID NO: 68280 - protein, 470 aa, Setaria italica
  Transcript Sequence Number=SeqID_2306
  Gene Ontology: Mol. function=protein serine/threonine kinase activity; Cellular component=plasma membrane; Biological process =protein amino acid phosphorylation
  Homolog annotation: Hit_ID=B6SHU9; Match level="QueryCoverage=99%, HitCoverage=77%, E-value=0.0, Identity=94%"; Hit description=CDPK -related protein kinase
  Pfam annotation: Domain name=APH; Domain location=19-215; Score= -21.5; E_value=0.088; Accession=PF01636.15; Description =Phosphotransferase enzyme family
  Pfam annotation: Domain name=Pkinase; Domain location=16-278; Score =302.6; E_value=8.3e-88; Accession=PF00069.17; Description=Protein kinase domain
  Pfam annotation: Domain name=Pkinase_Tyr; Domain location=16-276; Score=-13.5; E_value=7.9e-13; Accession=PF07714.9; Description =Protein tyrosine kinase
  Pfam module annotation: Pfam domain module=APH::Pkinase::Pkinase_Tyr; Domain location=19-215::16-278::16-276
GLDKGFGFNKGFAAKYDMGDEVGRGHFGYTCAATVKKGARKGESVAVKVIPKAKMTTSIAIEDVRREVKILKALAGNKNLVQFYDAYEDTENVYIVMELCEGGELLDRILSRGGKYSEDDAKAVLVQILNVVAFCHIQGVVHRDLKPENFLFTSKDENSHLKAIDFGLSDFVKPDERLNDIVGSAYYVAPEVLHRCYSTEADVWSIGVIAYILLCGSRPFWARTESGIFRSVLKADPSYNEAPWPSLTPEAMDFVKRLLCKDPRRRMTAAQALSHPWIRNYNDIKLPLDILIFRLIKAYIRSSSLRKAALRSLSKTLTVDELFYLKAQFSLLEPDRNGCITLDNIRMALTREATDAMKESRVQEILVSLSALQYRRMDFQEFCAAAVSVHQLEALDRWEQHARSAYEHFEKDGNRAIVIDELASELGLSPSVPLHVVLQDWIRHTDGKLSFLGFVKLLHGMSSRSLSKMR

SEQ ID NO: 68281 - protein, 160 aa, Setaria italica
  misc_feature (148)..(148): Xaa can be any naturally occurring amino acid
  Transcript Sequence Number=SeqID_2307
  Homolog annotation: Hit_ID=B9I6P2; Match level="QueryCoverage=80%, HitCoverage=5%, E-value=4e-21, Identity=41%"; Hit description =Chromatin remodeling complex subunit
  Pfam annotation: Domain name=Chromo; Domain location=40-108; Score =18.4; E_value=0.0058; Accession=PF00385.16; Description='chromo' (CHRromatin Organisation MOdifier)
YRWVSESDIVNSTLQGRDLVSKFSKRIHKEKTIRWKQEWAEPHRLLKRRPLMPPKEAEAFINSLGDKIAYCNAEWLVKWKGLGYEHATWELESSSFLCTPEAEELKRGYENRLEAARRASDPAKADKVKGDIFKGDIFQKLQRLPDGXPPGLDDDHLSSL

SEQ ID NO: 68282 - protein, 228 aa, Setaria italica
  misc_feature (129)..(129): Xaa can be any naturally occurring amino acid
  Transcript Sequence Number=SeqID_2308
  Homolog annotation: Hit_ID=B9I6P2; Match level="QueryCoverage=53%, HitCoverage=5%, E-value=1e-34, Identity=49%"; Hit description =Chromatin remodeling complex subunit
  Pfam annotation: Domain name=PHD; Domain location=81-130; Score=21.3; E_value=0.00012; Accession=PF00628.21; Description=PHD-finger
MPVEMCSLNKAAESISTLEIGEQAAGDSNQNSLPELQNRDCSTAHHEEASKAIEDGDSIGACTSRHFEAVQCDETDYNDNMCVGCKSREISDILKFCDGKGCKRCYHLSCMDPPLGVSLGIWLCIVCTXKRLQFGVYSVSEGIESLWDVKEGADNSKQYFAKYKNLAHVHNRWVSESDIVNSTLQGRDLVSKFSKRIHKEKTIRWKQEWAEPHRLLERRKETKTLKLK

SEQ ID NO: 68283 - protein, 67 aa, Setaria italica
  Transcript Sequence Number=SeqID_2309
  Homolog annotation: Hit_ID=Q70KT0; Match level="QueryCoverage=85%, HitCoverage=23%, E-value=3e-20, Identity=78%"; Hit description=NF protein (Fragment)
FFCSKLQEQAEGYSLLHNQLVNIPIGTWSPHTGRTSNRQLRTLRLSSPLNSCLDLLLQGILTFQMQY

SEQ ID NO: 68284 - protein, 143 aa, Setaria italica
  Transcript Sequence Number=SeqID_2310
  Gene Ontology: Mol. function=kinase activity
  Homolog annotation: Hit_ID=B6TQ12; Match level="QueryCoverage=90%, HitCoverage=36%, E-value=4e-55, Identity=82%"; Hit description=SNF4
MLRKVKDSDNLVDVALTIIRNEISSVPIFKSLPDSSGMPLLNLATLQGILKFLCSKLQEQAEGYSLLHNQLVNIPIGTWSPHTGRTSNRQLRTLRLSSPLNSCLDLLLQDRVSSIPIVDDNGSLRDVYSLRPLYIYTICLFPG

SEQ ID NO: 68285 - protein, 453 aa, Setaria italica
  Transcript Sequence Number=SeqID_2311
  Gene Ontology: Mol. function=kinase activity; Cellular component =nucleus; Biological process=carbohydrate metabolic process
  Homolog annotation: Hit_ID=B6TQ12; Match level="QueryCoverage=100%, HitCoverage=100%, E-value=1e-155, Identity=80%"; Hit description=SNF4
  Pfam annotation: Domain name=CBS; Domain location=141-290; Score =37.8; E_value=4.3e-08; Accession=PF00571.20; Description=CBS domain
  Pfam annotation: Domain name=CBS; Domain location=321-452; Score =52.5; E_value=1.6e-12; Accession=PF00571.20; Description=CBS domain
  Pfam module annotation: Pfam domain module=CBS::CBS; Domain location =141-290::321-452
MVLQRFSWPHGGRHASFCGSFTGWREYPMALVGSEFQVVFDLPPGVYQYRFLVDGVWRCDDTKPFVRDEYGLISNEVLVENNAQPVVQPEPPSTRGINMDEGTIFTTMPPEPSSQNPGMQIAVFRHGISGILLHNTIYDVVPLSSKLAILDAQLPVKQAFKIMHDEGLALVPLWDDHQGTVTGMLTASDFVLMLRKLQRNIRALGNEELEMHPISAWKEAKLQFYGGPDGAAIQRRPLIHVKDSDNLVDVALTIIRNEISSVPIFKSLPDSSGMPLLNLATLQGILKFLCSKLQEQAEGYSLLHNQLVNIPIGTWSPHTGRTSNRQLRTLRLSSPLNSCLDLLLQDRVSSIPIVDDNGSLRDVYSLSDIMALAKNDVYARIELEQVTVQNALDVQYQVQGRRQCHTCLQTSTLLEVLEELSIPGVRRVVVIEQSTRFVEGIISLRDIFTFLLG

SEQ ID NO: 68286 - protein, 141 aa, Setaria italica
  misc_feature (2)..(2): Xaa can be any naturally occurring amino acid
  Transcript Sequence Number=SeqID_2312
  Gene Ontology: Mol. function=protein binding; Biological process =protein metabolic process
  Homolog annotation: Hit_ID=B9T4L3; Match level="QueryCoverage=90%, HitCoverage=12%, E-value=2e-30, Identity=51%"; Hit description=ATP binding protein, putative
  Pfam annotation: Domain name=AAA_2; Domain location=6-137; Score= -51.1; E_value=0.098; Accession=PF07724.6; Description=ATPase family associated with various
  Subcellular localization annotation: CTP_CleavageSite=24; ConfidenceScore=5.05e-01
GXGANKADAWVVFAGPDVVGKRNMAEALSKSVFGTGAVTVRLGCPPARDDGGESVVSCRGRTALDRVAEAIRANPFRVVVLEGIDHADGVVHGSIVRGIESGRLADSHGRDVALGSNIFVVMSQWSSDHLRNSLEAAPLPD

SEQ ID NO: 68287 - protein, 96 aa, Setaria italica
  Transcript Sequence Number=SeqID_2313
  Subcellular localization annotation: CTP_CleavageSite=69; ConfidenceScore=5.17e-01
FSLLFPASLNADGLIGSPPPGPDPAAPPPPPWATTPTPTPPPSPPPHHHPHPQPAAAPRRSAAGPTPTRAAAAMASSSSFPPRKRGRPRGGPGRRS

SEQ ID NO: 68288 - protein, 68 aa, Setaria italica
  Transcript Sequence Number=SeqID_2314
SADVKLGHGRTASWPITAACIVLYHSISSDTAGYLSNDYFVFASEIILLAHLAITRPIGTSTKEAPNR

SEQ ID NO: 68289 - protein, 401 aa, Setaria italica
  misc_feature (30)..(30): Xaa can be any naturally occurring amino acid
  Transcript Sequence Number=SeqID_2315
  Gene Ontology: Mol. function=prenyltransferase activity; Cellular component=integral to membrane
  Homolog annotation: Hit_ID=Q7XB14; Match level="QueryCoverage=95%, HitCoverage=96%, E-value=1e-151, Identity=69%"; Hit description =Homogentisic acid geranylgeranyl transferase
  Pfam annotation: Domain name=UbiA; Domain location=118-401; Score =49.8; E_value=1e-11; Accession=PF01040.10; Description=UbiA prenyltransferase family
MQAATLRAPAAHRHALRLSTDQRDGPKCEXWLGARKFSWTGPLCPEASAGNRQRPVICLHMCHMRTTGRQCRHSLIQFRCSAATHPQHDFNINQFEEIGIELTKKLRSFYWFCRPHTIIGTILGITSVSLLPMKSLDDLSVTVLWGFLEALASALCMNIYVVGLNQLFDIEIDKVNKPTLPLASGEFSVATGVLLVVAFLVMSISIGIRSKSAPLMCALLVSFLLGSAYSIDVPLLRWKRHPFLAASCILVVRAILVQLAFFTHMQQHVLKRPFTPTRSVVFATLFMCCFSAVIALFKDIPDVDGDGDFGIKSLSVQLGQHRVYRLCISMLMTAYTAAILVGASTTNLYQKIAIVFGHGLLAFVLWQRAQQLDVANKTCVTEFYMFIWKLFYAEYLLIPFV

SEQ ID NO: 68290 - protein, 56 aa, Setaria italica
  Transcript Sequence Number=SeqID_2316
  Homolog annotation: Hit_ID=B6SIE7; Match level="QueryCoverage=100%, HitCoverage=34%, E-value=7e-09, Identity=64%"; Hit description =Cysteine proteinase inhibitor B
QVVSGLKYYLRVAAEEEGGAENAGSGEGERVFDAVVVVKPWLESRTLLRFAPAAPK

SEQ ID NO: 68291 - protein, 103 aa, Setaria italica
  misc_feature (73)..(73): Xaa can be any naturally occurring amino acid
  Transcript Sequence Number=SeqID_2317
  Gene Ontology: Mol. function=transferase activity, transferring glycosyl groups; Biological process=metabolic process
  Homolog annotation: Hit_ID=Q5K5A2; Match level="QueryCoverage=100%, HitCoverage=47%, E-value=1e-32, Identity=75%"; Hit description =Glucosyltransferase (Fragment)
CRHFHVTFVNTEYNHRRRLVRSRGPAAGAGLPGFRFATIPDGLPESDADATQDPASLCDSTMTTCTPHLKKLXLLDRLNADGSVVPPVTCVVADNVMSFSLDA

SEQ ID NO: 68292 - protein, 155 aa, Setaria italica
  Transcript Sequence Number=SeqID_2318
  Gene Ontology: Mol. function=transferase activity, transferring glycosyl groups; Biological process=metabolic process
  Homolog annotation: Hit_ID=B6SXW3; Match level="QueryCoverage=65%, HitCoverage=20%, E-value=6e-40, Identity=74%"; Hit description =Cytokinin-O-glucosyltransferase 2
  Subcellular localization annotation: CTP_CleavageSite=32; ConfidenceScore=5.27e-01
LKLHYSSVFSWIVFQYQLPRKLSTSDSISSHSCSQKQSQMSTATPPATGEKPQPHAVCLPFPAQGHITPMLKLAKVLHGRGFHVTFVNTEYNHRRLVRSRGAAAVAGLPGFRFAAIPDGLPASDADATQDPAAISHATKHHCPPHFRSLLAGLGG

SEQ ID NO: 68293 - protein, 41 aa, Setaria italica
  Transcript Sequence Number=SeqID_2319
NTNKHFLIILSKFFEKSHFRLNILYLHCTKYRHMGEISSNS

SEQ ID NO: 68294 - protein, 245 aa, Setaria italica
  misc_feature (216)..(216): Xaa can be any naturally occurring amino acid
  Transcript Sequence Number=SeqID_2320
  Gene Ontology: Mol. function=protein binding; Cellular component =nucleus; Biological process=regulation of transcription, DNA -dependent
  Homolog annotation: Hit_ID=Q8LPU3; Match level="QueryCoverage=100%, HitCoverage=64%, E-value=1e-129, Identity=89%"; Hit description =Nucleosome/chromatin assembly factor 104
  Pfam annotation: Domain name=WD40; Domain location=1-37; Score=20.7; E_value=0.0061; Accession=PF00400.24; Description=WD domain, G-beta repeat
  Pfam annotation: Domain name=WD40; Domain location=134-173; Score =34.3; E_value=5e-07; Accession=PF00400.24; Description=WD domain, G -beta repeat
  Pfam annotation: Domain name=WD40; Domain location=191-230; Score =29.3; E_value=1.6e-05; Accession=PF00400.24; Description=WD domain, G-beta repeat
  Pfam annotation: Domain name=WD40; Domain location=47-86; Score=28.6; E_value=2.5e-05; Accession=PF00400.24; Description=WD domain, G-beta repeat
  Pfam annotation: Domain name=WD40; Domain location=90-129; Score =35.7; E_value=1.9e-07; Accession=PF00400.24; Description=WD domain, G-beta repeat
  Pfam module annotation: Pfam domain module=WD40::WD40::WD40::WD40::WD4 0; Domain location=1-37::134-173::191-230::47-86::90-129
DAVLRGHDAEGYGLAWSPMKEGWLLSGSYDKKICLWDLASGNGAPVLDAQQVFEAHEDLVEDVAWHLKDENIFGSVGDDCKLMMWDLRTNKPEQYIAAHEKEVNSLSFNPFNEWILATASGDATVKLFDMRKLSRSLHTFDSHEGEVFQVEWNPNLATVLASSAADKRVMIWDVNRIGDEQSEEDADDGPPELLFVHGGHTAKISELSWNPSEKWXLASVAEDNVLQIWEMAESIYCDDYSLQDN

SEQ ID NO: 68295 - protein, 83 aa, Setaria italica
  Transcript Sequence Number=SeqID_2321
  Gene Ontology: Mol. function=protein binding; Cellular component =nucleus; Biological process=regulation of transcription, DNA -dependent
  Homolog annotation: Hit_ID=Q8LPU3; Match level="QueryCoverage=78%, HitCoverage=17%, E-value=3e-28, Identity=90%"; Hit description =Nucleosome/chromatin assembly factor 104
  Pfam annotation: Domain name=WD40; Domain location=32-71; Score=29.5; E_value=1.4e-05; Accession=PF00400.24; Description=WD domain, G-beta repeat
PSPLSFFSGSDCLVSVRIGDEQSEEDADDGPPELLFVHGGHTAKISELSWNPSEKWVVASVAEDNVLQIWEMAESIYCDYLVI

SEQ ID NO: 68296 - protein, 70 aa, Setaria italica
  misc_feature (44)..(70): Xaa can be any naturally occurring amino acid
  Transcript Sequence Number=SeqID_2322
CKIYIFFCYSSELSVLSAFLKLCTKKKTVLSVIHNLEWKHYKFXXXXXXXXXXXXXXXXXXXXXXXXXXX

SEQ ID NO: 68297 - protein, 61 aa, Setaria italica
  Transcript Sequence Number=SeqID_2323
LFISDPSMACLLTLSYHHSWEILCSKCIHLLGSTAALAVVGIMEMLYTCTCRLLSISLKQY

SEQ ID NO: 68298 - protein, 126 aa, Setaria italica
  Transcript Sequence Number=SeqID_2324
  Gene Ontology: Mol. function=structural constituent of ribosome; Cellular component=intracellular; Biological process=translation
  Homolog annotation: Hit_ID=B6TUI1; Match level="QueryCoverage=100%, HitCoverage=66%, E-value=3e-67, Identity=96%"; Hit description =Structural constituent of ribosome
  Pfam annotation: Domain name=Ribosomal_L18p; Domain location=9-125; Score=-28.7; E_value=0.0031; Accession=PF00861.14; Description =Ribosomal L18pL5e family
AAWTRRSRSEAEQRPNRKSWKQRTDMYMRPFQLNVFFSKRFVHAKVMHRGTSKVIAVATTNAKDLRLTLPSLVDDNACRTIGRLIAERSMDADVFALAYEPKKNERIEGKLGIIIDTIKEHGIIFV

SEQ ID NO: 68299 - protein, 152 aa, Setaria italica
  Transcript Sequence Number=SeqID_2325
LGPSSTEPIKHVTIIKAKCLFEVSKINLDNKHVKAAYKVRMCIYAQLVSSLLIFCSYGKNKNVHSHRFIFDLLLLAAFSLRQSPGLSERESIKVVLGVLQIWRVWSVLVSVSYPYNCFSHPPSELEVLALYSSSIPLEVIDLHCSLFLQGHR

SEQ ID NO: 68300 - protein, 57 aa, Setaria italica
  Transcript Sequence Number=SeqID_2326
GMYAICQDTEGRRNQESGQHRKIRTHLSTSKVILEMLCQRLKASCDTIKKMKGYNIT

SEQ ID NO: 68301 - protein, 198 aa, Setaria italica
  Transcript Sequence Number=SeqID_2327
  Gene Ontology: Mol. function=RNA binding
  Homolog annotation: Hit_ID=B6TK32; Match level="QueryCoverage=96%, HitCoverage=39%, E-value=3e-59, Identity=58%"; Hit description =Maternal protein pumilio
  Pfam annotation: Domain name=PUF; Domain location=1-29; Score=6.2; E _value=2.5; Accession=PF00806.11; Description=Pumilio-family RNA binding repeat
  Pfam annotation: Domain name=PUF; Domain location=103-138; Score =15.5; E_value=0.19; Accession=PF00806.11; Description=Pumilio-family RNA binding repeat
  Pfam annotation: Domain name=PUF; Domain location=139-172; Score =18.3; E_value=0.033; Accession=PF00806.11; Description=Pumilio -family RNA binding repeat
  Pfam annotation: Domain name=PUF; Domain location=31-65; Score=41.4; E_value=3.6e-09; Accession=PF00806.11; Description=Pumilio-family RNA binding repeat
  Pfam annotation: Domain name=PUF; Domain location=67-102; Score=26.0; E_value=0.00016; Accession=PF00806.11; Description=Pumilio-family RNA binding repeat
  Pfam module annotation: Pfam domain module=PUF::PUF::PUF::PUF::PUF; Domain location=1-29::103-138::139-172::31-65::67-102
YYYKNMHGTRAVQKLIETVTTREQIVLITSALQPAFIELVNDPNGNHVIQKCLTNFGAEDNKFIFEAAAVNCFDMAIHRHGCCVLQRCISCARGGYQAKLIVEICAHGFELAQDPFGNYVVQYVLNLKIPSANAHLASQFEGGYVYLSKQKVSSNVVEKCLKNFPDDAKAVIVHELLSGSHFDNCCNDPYANYVTPHT

SEQ ID NO: 68302 - protein, 86 aa, Setaria italica
  Transcript Sequence Number=SeqID_2328
SRAVQKYGNLIGFVERFSIGVRNITAFLAGALGIPADCYFAGVCFGCLLTLPIQLALGFVLRERPVIALASVAAAVGICTAFPYAA

SEQ ID NO: 68303 - protein, 119 aa, Setaria italica
  Transcript Sequence Number=SeqID_2329
  Homolog annotation: Hit_ID=Q8H5E1; Match level="QueryCoverage=63%, HitCoverage=48%, E-value=4e-21, Identity=49%"; Hit description =Putative cadmium-induced protein
MPSPTWYFTASQYPTLHFFLLSDKIGSLLRLLSADLLLRSVVEIAVEPTMIIKGVLGRYERWNPVHPTAGTFWGIGLPQHGLIRNIEDSGFASNVSLDSARYYAATIIRGMVWDAISYA

SEQ ID NO: 68304 - protein, 113 aa, Setaria italica
  Transcript Sequence Number=SeqID_2330
  Gene Ontology: Mol. function=cadmium ion binding
  Homolog annotation: Hit_ID=Q8H5E1; Match level="QueryCoverage=69%, HitCoverage=32%, E-value=3e-17, Identity=61%"; Hit description =Putative cadmium-induced protein
  Subcellular localization annotation: CTP_CleavageSite=24; ConfidenceScore=5.09e-01
MHDSSRLSHPSPPPPPPPASPTPEASPAANAQPNLIAVEPTMIIKGVLGRYERWNPVHPTAGTFWGVGLGLGCGVGWGPGFGPEVIGYVGAGCGVGFSVGFTLAGVGIGLPQH

SEQ ID NO: 68305 - protein, 271 aa, Setaria italica
  misc_feature (40)..(40): Xaa can be any naturally occurring amino acid
  Transcript Sequence Number=SeqID_2331
  Gene Ontology: Mol. function=cadmium ion binding
  Homolog annotation: Hit_ID=Q8H5E1; Match level="QueryCoverage=87%, HitCoverage=75%, E-value=5e-49, Identity=49%"; Hit description =Putative cadmium-induced protein
  Subcellular localization annotation: CTP_CleavageSite=24; ConfidenceScore=5.19e-01
MHDSSRLSHPSPPPPPPPANPTPEASPAANAQPNLAFCCXIAVEPTMIIKGVLGRYERWNPVHPTAGTFWGVGLGLGCGVGWGPGFGPEVIGYVGAGCGVGFSVGFTLAGVGIGLPQHGLIRNIEDSGFASNVSLDSARYYAATIIRGMVWDAISYAGNVGAIRKESWQKLLRFQDNPRISRVDPVSGGVDLPKLGKGMSRVDPVSGGVDPVSGGVDLPKLGKGAVSRVDLPKLGKGVLRVDLPKLGKGVSSSIQSAVECIRAFKDQHWPH

SEQ ID NO: 68306 - protein, 291 aa, Setaria italica
  Transcript Sequence Number=SeqID_2332
  Gene Ontology: Mol. function=oxidoreductase activity, acting on the CH-CH group of donors; Cellular component=integral to membrane; Biological process=lipid metabolic process
  Homolog annotation: Hit_ID=UPI000150578B; Match level="QueryCoverage =96%, HitCoverage=92%, E-value=1e-109, Identity=67%"; Hit description= oxidoreductase, acting on the CH-CH group of donors
  Pfam annotation: Domain name=DUF1295; Domain location=24-252; Score =447.6; E_value=1.9e-131; Accession=PF06966.4; Description=Protein of unknown function (DUF1295)
MGTVLDSHFLALTAIVTVGYQLMFFIITALLRFDKVTDFVGSTNFVIIAILTLVLKGAWHFRQIVLTVLVTIWGLRLGLFLLMRIMQWGEDRRFDEMRDNLGKLAVFWTFQAVWVWSVSLPVTVVNASDRNPPIEARDIIGWIMWLVGICVEATADQQKLVFKNSPSNRGKWCDVGLWKYTRHPNYFGEIFLWWGVFVASTPVLSGAEWLVILGPIFLTLLLLFVSGIPLLESSADKRYGRLEEYRVYKNTTSPLIPLPPAVYGALPAWFKVAFLLELPLYNPGPGSDPIS

SEQ ID NO: 68307 - protein, 188 aa, Setaria italica
  Transcript Sequence Number=SeqID_2333
  Gene Ontology: Mol. function=aspartic-type endopeptidase activity; Biological process=RNA-dependent DNA replication
  Homolog annotation: Hit_ID=Q2R0G5; Match level="QueryCoverage=96%, HitCoverage=8%, E-value=7e-62, Identity=56%"; Hit description =Retrotransposon protein, putative, unclassified
EATATNNQAEYRAVLQGLQLLREVRADSVEVFGDSMLIVDQLTGRSECKDDVLRLYYEDCLQLLKEFKSAVIEHIPRDHNEDANKLAQHASGYRPILGAMALELTADDWRKEIADYLKDPSKKVERRVRFHATKYVLLEDDLFYRTIDGVLLKCLGTEEAKTLMGEIHEGVCGAHQSAHKMKWMIRNN

SEQ ID NO: 68308 - protein, 186 aa, Setaria italica
  Transcript Sequence Number=SeqID_2334
  Gene Ontology: Mol. function=DNA binding; Cellular component=nucleus
SCSHSENIADTSSGKEASRDRSSAASFTEEASNSQKSQQVQRCDTDSIQANNPSPDEPYPQAQVEKVCPKDSLLWGSRKQRGRRARRTLIKGGHSSRDGDPTSTACIEEREGSSEGCMTDLKSPKVESIVVKKGLKSPKVESSVMNKDLKTPNVGSGVMKKGLKTPNGESDVMKKGLKSPKQNRMF

SEQ ID NO: 68309 - protein, 357 aa, Setaria italica
  Transcript Sequence Number=SeqID_2335
  Gene Ontology: Mol. function=DNA binding; Cellular component=nucleus
  Homolog annotation: Hit_ID=O22724; Match level="QueryCoverage=36%, HitCoverage=26%, E-value=4e-16, Identity=39%"; Hit description =F11P17.6 protein
  Pfam annotation: Domain name=Bromodomain; Domain location=140-211; Score=34.8; E_value=3.4e-07; Accession=PF00439.17; Description =Bromodomain
DVSLLWGSRKQRGRRARRTLIKGGHSSRDGDPTSTACIEEREGSSEGCMTDLKSPKVESIVVKKGLKSPKVESGVMKKGLKTPNAESDVMKKGLKTPKAESDVMKKGLKTPKAECGQAVVEKIKQKLTEILSSISTQGDCLMLQRQLDTQRKRVRYKKMIRRHMDFRTLHSKIKSGAISSTKELLRDILIFVNNVIAFYPKATLEHMAAVELRGFACKTVMQSTSLLLKSHGETGTAGASVVKQNARALQPGRPGPGDARGSKVASKEATAKEGEGKSSRSDTSLTANQKTTQRNEPDKKRGVGRPPKSGQKTAGAQEDNPSKGRKRGAGAQVDSPSKGRKRSAEDSISKGGKKSRR

SEQ ID NO: 68310 - protein, 71 aa, Setaria italica
  misc_feature (21)..(21): Xaa can be any naturally occurring amino acid
  Transcript Sequence Number=SeqID_2336
  Subcellular localization annotation: CTP_CleavageSite=42; ConfidenceScore=5.39e-01
PRPHPLLPPPPPQEPAPPPPXPPRPQRRHPASPQERNLPKPSLSQPPKPPPLRSGNNSQPGPLLLRARRRS

SEQ ID NO: 68311 - protein, 38 aa, Setaria italica
  Transcript Sequence Number=SeqID_2337
  Gene Ontology: Mol. function=oxidoreductase activity
VKFCSCLQIAKAFGASEVIAVDVLDEKLQNARTLGATH

SEQ ID NO: 68312 - protein, 409 aa, Setaria italica
  Transcript Sequence Number=SeqID_2338
  Gene Ontology: Mol. function=oxidoreductase activity; Biological process=oxidation reduction
  Homolog annotation: Hit_ID=B9RHN6; Match level="QueryCoverage=92%, HitCoverage=86%, E-value=1e-170, Identity=73%"; Hit description =Alcohol dehydrogenase, putative
  Pfam annotation: Domain name=ADH_N; Domain location=61-195; Score =120.1; E_value=7.4e-33; Accession=PF08240.4; Description=Alcohol dehydrogenase GroES-like doma
  Pfam annotation: Domain name=ADH_zinc_N; Domain location=226-369; Score=155.6; E_value=1.5e-43; Accession=PF00107.18; Description=Zinc- binding dehydrogenase
  Pfam module annotation: Pfam domain module=ADH_N::ADH_zinc_N; Domain location=61-195::226-369
RIGGALLRRSFCASASAGTDSAAAAAGYHVAGGPSYMRGAVFWEPGRPLTLEEFRMPRPKAGELLIKTKACGVCHSDLHVMKGEIPFSSPCVVGHEITGEVVDHGMHTPAEIINRFPVGSHVVGAFIMPCGNCFYCVKGQEDLCESFFAYNRAKGTLYDGETRLFLRSNGKPVYMYSMGGLAEYCVVPANALAVLPNSLPYTESAILGCAVFTAYGALRHAAEMRAGDSVAVIGVGGVGSSCLQIAKAFGASEVIAVDVLDEKLQNARTLGATHTVNAAKEDAVERIKEITGGRGVDVAVEALGKALTFSQCTKSVRDGGKAVMIGLAATDVVGEVDITRLVRRQVKIIGSYGARARQDLPQIVKLAESGAFNLQNTISRKCKFEEANGAYEDLNQGKIVGRAVVEIME

SEQ ID NO: 68313 - protein, 28 aa, Setaria italica
  Transcript Sequence Number=SeqID_2339
SAFEQLKTKALQLNCWDRSELEGLSITR

SEQ ID NO: 68314 - protein, 121 aa, Setaria italica
  misc_feature (88)..(88): Xaa can be any naturally occurring amino acid
  Transcript Sequence Number=SeqID_2340
  Gene Ontology: Mol. function=binding
  Homolog annotation: Hit_ID=Q01KF2; Match level="QueryCoverage=97%, HitCoverage=13%, E-value=2e-44, Identity=77%"; Hit description =OSIGBa0115M15.7 protein
WCKVLFSTLEMLKSFVTGDDHLFSSLSKLNYPGELSCRICVVTTILIFLCNDRKLRRNLSFGKSVIKGILDYIRHQLDSSVPNVTYEXKQKSKSAFEQLKTKALQLNCWDRSELEGLSITR

SEQ ID NO: 68315 - protein, 147 aa, Setaria italica
  misc_feature (81)..(81): Xaa can be any naturally occurring amino acid
  Transcript Sequence Number=SeqID_2341
  Gene Ontology: Mol. function=binding
  Homolog annotation: Hit_ID=Q01KF2; Match level="QueryCoverage=82%, HitCoverage=14%, E-value=5e-54, Identity=82%"; Hit description =OSIGBa0115M15.7 protein
LELLLRIGQYFPTMDCENLRPFIKLFGVESSSGTVELGPFVNLPRDCQELAISCLYYFPSLLPDVIRPLASCCLSDVLEPXILLKVVEVLQSTYKAGGLQITEQLSFLSLLMARFRVHPGDYLNILFHLLLLLCCLLVTIQTSLLID

SEQ ID NO: 68316 - protein, 331 aa, Setaria italica
  Transcript Sequence Number=SeqID_2342
  Gene Ontology: Mol. function=binding
  Homolog annotation: Hit_ID=Q01KF2; Match level="QueryCoverage=99%, HitCoverage=38%, E-value=1e-146, Identity=77%"; Hit description =OSIGBa0115M15.7 protein
VLLVPFVNLPRDCQELAISCLYYFPSLLPDVIRPLASCCLSDVLEPLILLKVVEVLQSTYKAGGLQITEQLSFLSLLMARFRVHPGGLVTPEDPSKVSNWDTFKLLNRIILTSLSEMGDGSLVLELMWNNLSNAIAQKPSMHNMNGLFRIIVTLDAGTSKLMNEDVVKLIAGYLVDASLDLSKTIEFGFQPDKTRLFQYFIKPCTIMFAKNDKVLFSTLEMLKSFVTGDDHLFSSLSKLNYPGELSCRICVVTTILIFLCNDRKLRRNLSFGKSVIKGILDYIRHQLDSSVPNVTYEEKQKSKSAFEQLKTKALQLNCWDRSELEGLSITR

SEQ ID NO: 68317 - protein, 157 aa, Setaria italica
  Transcript Sequence Number=SeqID_2343
  Gene Ontology: Mol. function=transferase activity, transferring glycosyl groups; Biological process=metabolic process
  Homolog annotation: Hit_ID=B6T4P0; Match level="QueryCoverage=98%, HitCoverage=32%, E-value=3e-56, Identity=76%"; Hit description =Anthocyanidin 5,3-O-glucosyltransferase
MVEKTVVLYPSLGVGHLNPMAQLAKAFLRRGGVAITIAVVDPPEKDAVLAAALARLAAASPSITVRLLPIPPPSCASTEYSHPIMPILDALRAANPALREFLRSQAPAADAIVVDMFCTDALDVAAELAIPAYIFYPSAAGDLAVYLQVPDLWRRAA

SEQ ID NO: 68318 - protein, 348 aa, Setaria italica
  Transcript Sequence Number=SeqID_2344
  Gene Ontology: Mol. function=hydrolase activity, acting on ester bonds; Cellular component=intrinsic to endoplasmic reticulum membrane; Biological process=GPI anchor biosynthetic process
  Homolog annotation: Hit_ID=B6SWR1; Match level="QueryCoverage=92%, HitCoverage=92%, E-value=1e-114, Identity=59%"; Hit description=CAB2
  Pfam annotation: Domain name=Per1; Domain location=72-344; Score =361.0; E_value=2.2e-105; Accession=PF04080.5; Description=Per1-like
MGLPGRRPWLLLLLLLGLASAAVAAAASEGDADPLYKACVEECQKTGSLKETSIKHCMVPTDGTPAHKSWYTHEPLYLQWKEWNCKSECRYHCMMERENERTELGLQPVKYHGKWPLKRASVFQEPLSAALSALTLVVQFNGWLSFFLLLYYKLPLWPETHKTYYEYTGLWHIYGLLAMNSWFWSAIYHSCDTVWTEKLHFSSAAAFLGYSLILAILRTLNLRDEASRVMVAAPILAFVTTHILYLNFYQLDKGLNMKVCTVISIAQFLLWALWAVMTRHPSRLKIIFVAIGGVVSVFLEAYDIPPRWGYVDGRAICLAVAIPLSYLWWSFAKEDAEMRTSAITKKTR

SEQ ID NO: 68319 - protein, 55 aa, Setaria italica
  Transcript Sequence Number=SeqID_2345
  Gene Ontology: Mol. function=nucleic acid binding; Cellular component= ribonucleoprotein complex; Biological process=proteolysis
  Homolog annotation: Hit_ID=Q6JAG6; Match level="QueryCoverage=100%, HitCoverage=12%, E-value=6e-20, Identity=78%"; Hit description =Putative small nuclear ribonucleoprotein
DTRTVYILDPTPLDPVYKYNPNARYVKKLLCIAEFLPKAMSKVCPGSRWNEDVFL

SEQ ID NO: 68320 - protein, 109 aa, Setaria italica
  Transcript Sequence Number=SeqID_2346
  Gene Ontology: Mol. function=strictosidine synthase activity; Cellular component=membrane; Biological process=biosynthetic process
  Homolog annotation: Hit_ID=Q01Y82; Match level="QueryCoverage=62%, HitCoverage=18%, E-value=2e-13, Identity=58%"; Hit description =Gluconolactonase
  Pfam annotation: Domain name=Str_synth; Domain location=35-109; Score= 47.9; E_value=3.9e-11; Accession=PF03088.8; Description=Strictosidine synthase
FASLPNSEATRRAVQCSAVNRCRLFVNIFADFRFADAAIEASDGTVYFSDASARFGFDRWFHDFFESGATGRLLRYDPRTGHTSVVLDHLGFANGVALPRDEASVVVCE

SEQ ID NO: 68321 - protein, 79 aa, Setaria italica
  Transcript Sequence Number=SeqID_2347
  Gene Ontology: Mol. function=strictosidine synthase activity; Biological process=biosynthetic process
  Homolog annotation: Hit_ID=B9RR90; Match level="QueryCoverage=72%, HitCoverage=17%, E-value=1e-11, Identity=50%"; Hit description =Adipocyte plasma membrane-associated protein, putative
EGVLDAPEDVYTATRDGWLHRMHPGNGSWERWRFVGGTGLLGITPSADGTMLVCDADKVYLLLRVMMNRSMKHVPIKLY

SEQ ID NO: 68322 - protein, 371 aa, Setaria italica
  Transcript Sequence Number=SeqID_2348
  Gene Ontology: Mol. function=strictosidine synthase activity; Cellular component=membrane; Biological process=biosynthetic process
  Homolog annotation: Hit_ID=B9RR90; Match level="QueryCoverage=84%, HitCoverage=86%, E-value=6e-90, Identity=53%"; Hit description =Adipocyte plasma membrane-associated protein, putative
  Pfam annotation: Domain name=SGL; Domain location=51-306; Score= -42.3; E_value=1.1e-06; Accession=PF08450.4; Description=SMP -30GluconolaconaseLRE-like region
  Pfam annotation: Domain name=Str_synth; Domain location=145-233; Score=86.9; E_value=7.1e-23; Accession=PF03088.8; Description =Strictosidine synthase
  Pfam module annotation: Pfam domain module=SGL::Str_synth; Domain location=51-306::145-233
MALGLFAAAALAAVASLSAHVALNCPIEPVPSTPPPPMPPPNNLLQRLEKLGEGVLDAPEDVYVDAAAGGALYTATRDGWLHRMHPGNGSWERWRFVGGTGLLGITPSADGTMLVCDADKGLLRVGEDGVTLLASEVDGTPIRFADAAIEASDGTVYFSDASARFGFDRWFHDFFESGATGRLLRYDPRTGHTSVVLDHLGFANGVALPRDEASVVVCESSRFRCMKVWLKGEKAGQAETFIDKLPGCPDNIRLGSDGYFWIALIQMRSPWLDLITRWTLAKRVVATFPALVEWSKSTMKGAMVAQVSEGGDIVRVLDDSQGKVINFVTSVNEFNGDIFLGSLATNFIGKLSLAQVTQEQGAASERRFIPE

SEQ ID NO: 68323 - protein, 40 aa, Setaria italica
  Transcript Sequence Number=SeqID_2349
  Homolog annotation: Hit_ID=Q5VQ32; Match level="QueryCoverage=80%, HitCoverage=7%, E-value=5e-12, Identity=81%"; Hit description=Leaf senescence protein-like
PSRYGHWPNEKVQLYNDCIHWCLPGPIDIWNDMLFQMLLA

SEQ ID NO: 68324 - protein, 405 aa, Setaria italica
  Transcript Sequence Number=SeqID_2350
  Homolog annotation: Hit_ID=Q5VQ32; Match level="QueryCoverage=85%, HitCoverage=79%, E-value=1e-101, Identity=52%"; Hit description=Leaf senescence protein-like
  Pfam annotation: Domain name=DUF231; Domain location=231-403; Score =271.9; E_value=1.4e-78; Accession=PF03005.7; Description=Arabidopsis proteins of unknown function
MKLHWMLRFLFGPVPVYFSALAILIVLTNAQYFGLVGVGVAPRAAKLASTTPVVSVMKYCDIFRGEWVPDTEAPYYNHKTCHMIQEHQNCLKYGRPDLGFLKWRWRPSGCELPRFDPLQFLQFARGKSLAFVGDSLARNHMQSLLCLLSQVAYPKDVSANPTDQNKVYHYRAYNFTISMFWSPFLVRTRAPDNDGPAHMGHWSLYLDEPDESWVSQISRFDYVLVSAANWFSRPSLFYEKRRLIGCSFCSRQYGVPDLTLYYSQRRAWRVALRAINDLEHLRGRVIVRMLSPMSHFENGTWDQGGDCRRTQPLRANETAMEGRDLHFYTAQMEEFRAAEKAAREKGRRLMLMDATAAMLMRPDGHPSRYGHWPNEKVQLYNDCIHWCLPGPIDIWNDMLFQMLLA

SEQ ID NO: 68325 - protein, 225 aa, Setaria italica
  misc_feature (62)..(62): Xaa can be any naturally occurring amino acid
  misc_feature (215)..(215): Xaa can be any naturally occurring amino acid
  Transcript Sequence Number=SeqID_2351
AALPLPLRPAAAHSARIAGEMPKAFVILDDVVQHTLTNLHSIHKSLLFWQAKAEGTNSQCEXFMIFERGPRAFVDTTYQTLTRLGSNGRPVQYILHSASDMVSIKLAALTSMQHCLAAFLAEIHSEVDRCREGLTANSDKSLHTLFIVLNTTFSKLEVSLRNAGEGQDELFTYDGNSYELFEKLPEVDVESPEWTEALSNLGISLIYQNLQKLDXSFLSSQLTSQ

SEQ ID NO: 68326 - protein, 144 aa, Setaria italica
  misc_feature (101)..(101): Xaa can be any naturally occurring amino acid
  Transcript Sequence Number=SeqID_2352
  Gene Ontology: Mol. function=triacylglycerol lipase activity; Biological process=lipid metabolic process
  Homolog annotation: Hit_ID=B6TIE4; Match level="QueryCoverage=92%, HitCoverage=32%, E-value=3e-53, Identity=78%"; Hit description =Triacylglycerol lipase
PRVGGSGFKKRFDAVSGLRLLRVRNARDIVPRYPAVFYHDVGAELAIDTGASPYLRSPGHEQTWHNLEVYLHGMAGARGGAGGGGFELAVARDVALLNRAXDALRDDHGVPPGWWVPHNRGMVKGSDGRWRLMDCEDEDDADSE

SEQ ID NO: 68327 - protein, 47 aa, Setaria italica
  Transcript Sequence Number=SeqID_2353
YHVSYCNLTSCVHGWYSEKLPPLYLSICMQHAVPLFLTYFAWKTIKL

SEQ ID NO: 68328 - protein, 172 aa, Setaria italica
  Transcript Sequence Number=SeqID_2354
  Gene Ontology: Mol. function=ribonucleoprotein binding; Cellular component=spliceosome; Biological process=mRNA processing
  Homolog annotation: Hit_ID=B9SH73; Match level="QueryCoverage=100%, HitCoverage=22%, E-value=6e-60, Identity=71%"; Hit description=U4/U6 small nuclear ribonucleoprotein Prp31, putative
  Pfam annotation: Domain name=NOSIC; Domain location=89-141; Score =96.7; E_value=8.3e-26; Accession=PF08060.5; Description=NOSIC (NUC001) domain
SFLADLDELSDNEGYPEEDNAEAAGMEDDGDDDMPDLESLNYDDLDSVSKLQKTQRYNDIMQKVEVALQKGTDFSNQGSILEEDPEYQLIVDCNALSVDIENEIIIIHNFIRDKYRLKFPELESLVHHPIDYARVVKKIGNEMDLTLVDLEGLLPSAIIMVVSVTASTTSGK

SEQ ID NO: 68329 - protein, 189 aa, Setaria italica
  misc_feature (87)..(87): Xaa can be any naturally occurring amino acid
  Transcript Sequence Number=SeqID_2355
  Gene Ontology: Mol. function=ligase activity; Cellular component =membrane
  Homolog annotation: Hit_ID=B6TGB5; Match level="QueryCoverage=100%, HitCoverage=57%, E-value=7e-93, Identity=87%"; Hit description =Phosphopantothenate--cysteine ligase
  Pfam annotation: Domain name=DFP; Domain location=19-188; Score =111.3; E_value=3.2e-30; Accession=PF04127.7; Description=DNA pantothenate metabolism flavoprotein
LNDFVARHSAGSGGVGGPAGVICITSGGTTVPLEQRCVRYIDNFSSGQRGAAATEYFLKAGYAVIFIHRRGSKQPYCRFLPEDSFLXLFELGEDSEIQVPQSHSAVVKAAISNYRKAIHEGLLLKLPFTTIFEYLQLLQMVATSMNCLGHRGMFFLAAAVSDFYVPWESMAKHKIESAVGPLNMQLNQV

SEQ ID NO: 68330 - protein, 201 aa, Setaria italica
  misc_feature (146)..(146): Xaa can be any naturally occurring amino acid
  Transcript Sequence Number=SeqID_2356
  Gene Ontology: Mol. function=phosphopantothenate--cysteine ligase activity; Cellular component=membrane
  Homolog annotation: Hit_ID=B6TGB5; Match level="QueryCoverage=75%, HitCoverage=47%, E-value=9e-79, Identity=94%"; Hit description =Phosphopantothenate--cysteine ligase
  Pfam annotation: Domain name=DFP; Domain location=12-179; Score=83.3; E_value=8.9e-22; Accession=PF04127.7; Description=DNA  pantothenate metabolism flavoprotein
NICLYLCYAGEAEIQVPQSHSAVVKAAISNYRKAIHEGLLLKLPFTTIFEYLQLLQMVATSMNCLGHRGMFFLAAAVSDFYVPWESMAKHKIESAVGPLNMQLNQVPKMLFILRKNWAPSAFCVSFKLETDPNILLQKAEMALKKXGMNVVVANELANYKDVVVMVTSSGRTTVSRSRTEEDGKSKPNGAPGNYGNLTHHA

SEQ ID NO: 68331 - protein, 79 aa, Setaria italica
  Transcript Sequence Number=SeqID_2357
PHRGAAVRLVEVVDGPRFRSYLPNRIERVQHVERELTAAGAGAGAGSSSSCSKLARALPQEEADAQAKASGRSHCYCLF

SEQ ID NO: 68332 - protein, 94 aa, Setaria italica
  Transcript Sequence Number=SeqID_2358
DLSSAMRWLGFFERSAIAVWRRGVGLESSRRKQKPAGMDESDESESASTSNKGQYFFVWYKRKLETTGDATHTKDRAREKEDLYLVIHDSFFFI

SEQ ID NO: 68333 - protein, 135 aa, Setaria italica
  Transcript Sequence Number=SeqID_2359
RPGGGGLPCIALTSNLAEASGEGELRHLSCRIRPSHRPIQPPYVLRGSIVGQRASCRAGSLVEHEPNCSGSQLSHAVAGILERSAIAVWRRGVGLESSRRKQKPAGMDESDESESASTSNKGQYFFVWYKVSYVY

SEQ ID NO: 68334 - protein, 114 aa, Setaria italica
  Transcript Sequence Number=SeqID_2360
  Homolog annotation: Hit_ID=B4FRP8; Match level="QueryCoverage=46%, HitCoverage=16%, E-value=2e-17, Identity=90%"; Hit description =Plastid-lipid-associated protein 2
  Subcellular localization annotation: CTP_CleavageSite=53; ConfidenceScore=5.65e-01
MAGVASLNALALRAPSPSPAAPSPRRGTVAGALAFPTPPRFPLLRAARRVLARAVAAGGDSEDEWGPEPEGGSAVTGTAVAEASDPEASEVAELKAQLKEALYGTERGLRASSE

SEQ ID NO: 68335 - protein, 281 aa, Setaria italica
  Transcript Sequence Number=SeqID_2361
  Gene Ontology: Mol. function=structural molecule activity; Cellular component=chloroplast
  Homolog annotation: Hit_ID=B4FRP8; Match level="QueryCoverage=92%, HitCoverage=81%, E-value=1e-131, Identity=91%"; Hit description =Plastid-lipid-associated protein 2
  Pfam annotation: Domain name=PAP_fibrillin; Domain location=55-273; Score=388.2; E_value=1.4e-113; Accession=PF04755.4; Description=PAP _fibrillin
VPIWSYWRAARRVLARAVAAGGDSEDEWGPEPEGGSAVTGTAVAEASDPEASEVAELKAQLKEALYGTERGLRASSETRAEVVELITQLEARNPTPAPTEALTLLNGKWILAYTSFSQLFPLLGSGRLPELVKVEEISQTIDSETFTVQNCIKFSGPLATTSVSTNAKFEIRSPKRVQIKFDEGVIGTPQLTDSIVLPEKFELFGQNIDLSPLKGIFSSIENAASSVANTISGQPPLKIPIRTNNAESWLLTTYLDEELRISRGDGSSIFVLFKEGSSLLN

SEQ ID NO: 68336 - protein, 126 aa, Setaria italica
  Transcript Sequence Number=SeqID_2362
  Gene Ontology: Mol. function=nucleoside-triphosphatase activity; Cellular component=membrane; Biological process=transport
  Homolog annotation: Hit_ID=B8XSN5; Match level="QueryCoverage=84%, HitCoverage=7%, E-value=7e-43, Identity=81%"; Hit description=PDR -like ABC transporter
  Pfam annotation: Domain name=ABC_tran; Domain location=1-119; Score= -18.3; E_value=1e-04; Accession=PF00005.19; Description=ABC transporter
VYRTTSTTTKFIDLVNTQEFVDEVLKTVELDEIKDALVGRPGMNGLSLEQRKRLTVAVELVSNPSIILMDEPTTGLDARSAAIVIRAVKNISEKGRTVVCTIHQPSTDIFEAFDELIKNLQYIAIF

SEQ ID NO: 68337 - protein, 91 aa, Setaria italica
  Transcript Sequence Number=SeqID_2363
  Gene Ontology: Mol. function=calcium ion binding; Cellular component =integral to membrane; Biological process=pollen maturation
  Homolog annotation: Hit_ID=Q9ZVT9; Match level="QueryCoverage=92%, HitCoverage=8%, E-value=9e-24, Identity=65%"; Hit description =F15K9.2 protein
  Pfam annotation: Domain name=C2; Domain location=3-83; Score=123.4; E_ value=7.3e-34; Accession=PF00168.22; Description=C2 domain
MRLTVRVIEARNLRAMDSNGFSDPYVKLQLGKQRFKTKVIKMNLNPTWDQEFSFLVGDVRDVLKLDVYDEDILQMDDFLGQLRVPLEDVLA

SEQ ID NO: 68338 - protein, 108 aa, Setaria italica
  Transcript Sequence Number=SeqID_2364
STGRRRTVTGVHGIKLAASRRKIKESGGGDKNQAEDAAAVPAAAASEAGGQLVMPEDGHEWKKYGQKFIKNIQKIRYLSSSRSNMHASHFFGSKLQLDNIPFRSFNYR

SEQ ID NO: 68339 - protein, 208 aa, Setaria italica
  Transcript Sequence Number=SeqID_2365
  Gene Ontology: Mol. function=nucleic acid binding
APQTAPARVSVWQRIEENPSVYTPPSPRKVHISPSKMKNPGSAPKELASVISLDCKSKSADSKDNGDSAGMKKNVVKTSEKVLASVLVKPSSEAKEKERAVSKVTKKSDSKVTKKPDKVENNIPGFTSGGVRSAAFPGAGGKKVKKIVIKKIVRKICTKDKQTSPIVSEKKDGIDANANASEKEEGEITSSSFEKDAISAHNLVSTSD

SEQ ID NO: 68340 - protein, 165 aa, Setaria italica
  misc_feature (37)..(37): Xaa can be any naturally occurring amino acid
  Transcript Sequence Number=SeqID_2366
  Gene Ontology: Mol. function=cysteine-type peptidase activity; Cellular component=nucleus; Biological process=proteolysis
  Homolog annotation: Hit_ID=Q5WML4; Match level="QueryCoverage=96%, HitCoverage=13%, E-value=9e-54, Identity=61%"; Hit description =Putative polyprotein
PVTRKEAITKGYGTEEVIEFCVEFIDELSSIGILVSXHEGHVKGKGTLKNKANMNIHETEIHKANFTVLQNSSLVAPYMEEHKDIVRSENPRKSEEWITRHHIDTFATWIRRHLMGKNMIDEQLQWVSILQYQGYEINGYTFYMRAQDQKSTNQNSGVRIVAIDN

SEQ ID NO: 68341 - protein, 125 aa, Setaria italica
  misc_feature (25)..(25): Xaa can be any naturally occurring amino acid
  Transcript Sequence Number=SeqID_2367
  Homolog annotation: Hit_ID=B9RDF9; Match level="QueryCoverage=94%, HitCoverage=4%, E-value=2e-36, Identity=67%"; Hit description =Nucleotide binding protein, putative
IPGGSQNALNEEGNPVSEDRVSLLXFAFQKVFQAAPRRLMTANVYMALISAAINVSSADESLNLYDSGHRFEHIQFLLVLLRSLPYASRAFQARAIQDLLFLACSHPDNRTTMTSIAEWPELVFW

SEQ ID NO: 68342 - protein, 244 aa, Setaria italica
  Transcript Sequence Number=SeqID_2368
  Gene Ontology: Mol. function=dihydrofolate reductase activity; Cellular component=cytosol; Biological process=one-carbon compound metabolic process
  Homolog annotation: Hit_ID=B6K009; Match level="QueryCoverage=79%, HitCoverage=45%, E-value=6e-16, Identity=30%"; Hit description =Dihydrofolate reductase
  Pfam annotation: Domain name=FSH1; Domain location=5-214; Score=10.1; E_value=5.8e-08; Accession=PF03959.5; Description=Serine hydrolase (FSH1)
MEQDKKAKVLCLHGFRTSGSFLKKQISKWHPSIFQQFDMVFPDGIFPAGGKSEIEGIFPPPYFEWFQFNKEFTEYTNLDECISYLCDYMVRNGPFEGLLGFSQGATLSALLIGYQAQGKVLSDHPPIKFMVSISGSKFRDPSICDIAYKDLIKVKSVHFIGEKDWLKVPSEELASAFDDPLIIRHPQGHTVPRLDDASVKQLSGWSSSILENIKNEDVHVSKALDAEESTGAELSENLVEQVAA

SEQ ID NO: 68343 - protein, 373 aa, Setaria italica
  Transcript Sequence Number=SeqID_2369
  Gene Ontology: Mol. function=metal ion binding
  Homolog annotation: Hit_ID=B6U028; Match level="QueryCoverage=99%, HitCoverage=99%, E-value=1e-155, Identity=74%"; Hit description=Zinc finger, C3HC4 type family protein
  Pfam annotation: Domain name=PHD; Domain location=324-368; Score= -1.1; E_value=0.035; Accession=PF00628.21; Description=PHD-finger
  Pfam annotation: Domain name=zf-C3HC4; Domain location=325-365; Score= 27.2; E_value=6.6e-05; Accession=PF00097.17; Description=Zinc finger, C3HC4 type (RING finger)
  Pfam module annotation: Pfam domain module=PHD::zf-C3HC4; Domain location=324-368::325-365
MDEHMGRRTVGGLLFTKGGSILLFREDGSRPKAKNCCSRHGCSGRHSVDKAKGKEVHRAAVPNESTPATPGRSQVLRKPNRKPPQPQESSASDSISRDAGGSCSETGNRSRETPGRDLLARLKERVNASRKRSLNRENSPPSPNGLSASSPSSSRSISRPSHRAASRIRKADEGANAGADHAHRNGTADARRNSERSDDDLLLVEQVTRDHVPSEGFLSGFMARYRSGHQGGVSSLEDSVEDSNGYWRFDMGVSEELENYFIFNDRHRGMRMDIDGMSYEELLALGERIGTVNTGLSDDALAKCLNRSIYMPTASGSHEDCDRKCSVCQEEYLAGEVVGKMACKHYYHMSCIQHWLRQKNWCPICKSVALNTN

SEQ ID NO: 68344 - protein, 128 aa, Setaria italica
  Transcript Sequence Number=SeqID_2370
HPEVRRKPIFLSQCSIRQRNPKLPNSVVLLFNAQSVMKQNHHGAHGVITTDLNPGWCMKLQVSYGVPLFVLACSSNPSCLQETQVSFSNIAAERSQLLPHRFLVYLTCKLSQSKFRFPLYLLDVSPVL

SEQ ID NO: 68345 - protein, 236 aa, Setaria italica
  Transcript Sequence Number=SeqID_2371
  Gene Ontology: Mol. function=homoserine kinase activity; Cellular component=cytoplasm; Biological process=threonine metabolic process
  Homolog annotation: Hit_ID=B6UB59; Match level="QueryCoverage=100%, HitCoverage=62%, E-value=3e-84, Identity=71%"; Hit description =Homoserine kinase
  Pfam annotation: Domain name=GHMP_kinases_C; Domain location=129-210; Score=46.6; E_value=1e-10; Accession=PF08544.5; Description=GHMP kinases C terminal
  Pfam annotation: Domain name=GHMP_kinases_N; Domain location=1-67; Score=69.3; E_value=1.4e-17; Accession=PF00288.18; Description=GHMP kinases N terminal domain
  Pfam module annotation: Pfam domain module=GHMP_kinases_C::GHMP _kinases_N; Domain location=129-210::1-67
SIHLTKGLPLGSGLGSSAASAAAAAKAVDALFGSRLSRDDLVLAGLESEKAVSGFHADNIAPAILGGFVLVRSYDPFHLVPLASPPALRLHFVLVTPDFEAPTSKMRAALPKDVLVQHHVRNSSQAAALVAAVLQGDAGLIGSAMSSDAIVEPTRAPLIPGMAAVKAAALQAGALGCTISGAGPTAVAVIDGEDKGEEVARRMVDAFWSAGNLKATATVAQLDRLGARVISTAALH

SEQ ID NO: 68346 - protein, 76 aa, Setaria italica
  Transcript Sequence Number=SeqID_2372
RPFPAAGGDDEVSTAWAVAPVFLAAETNQAVDPVIWADEKRMKRELLAWAKAMASMAAAGKNTSSTAPRYRRRGRP

SEQ ID NO: 68347 - protein, 49 aa, Setaria italica
  Transcript Sequence Number=SeqID_2373
EAGKPGRGGSSSSSSRCIHWQSDCQFAVDLGNFWCRQAKIFVNSLESHL

SEQ ID NO: 68348 - protein, 1207 aa, Setaria italica
  misc_feature (18)..(18): Xaa can be any naturally occurring amino acid
  misc_feature (435)..(435): Xaa can be any naturally occurring amino acid
  Transcript Sequence Number=SeqID_2374
  Gene Ontology: Mol. function=nucleic acid binding
  Homolog annotation: Hit_ID=Q08C11; Match level="QueryCoverage=59%, HitCoverage=94%, E-value=1e-120, Identity=36%"; Hit description =Zgc:153813
  Pfam annotation: Domain name=DUF814; Domain location=582-683; Score =183.3; E_value=6.9e-52; Accession=PF05670.5; Description=Domain of unknown function (DUF814)
  Pfam annotation: Domain name=FbpA; Domain location=7-578; Score= -50.7; E_value=2e-10; Accession=PF05833.3; Description=Fibronectin -binding protein A N-terminus (FbpA)
  Pfam annotation: Domain name=zf-CCHC; Domain location=1031-1048; Score=34.9; E_value=3.2e-07; Accession=PF00098.15; Description=Zinc knuckle
  Pfam module annotation: Pfam domain module=DUF814::FbpA::zf-CCHC; Domain location=582-683::7-578::1031-1048
MVKARMTTSDVAAEVKCXLRRLIGMRLANVYDITPKTYLFKLMNSSGITESGESERVLLLMESGVRFHTTQYVRDKSTTPSGFTLKLRKHIRNKRLEDVRMLGYDRIILFQFGLGSNAHFIILELYAQGNILLTDSEYTVMTLLRSHRDDNKGLAIMSRHRYPVEACRVFERTNFAKLKDTLTMSDNVDDNEPLEITSGSTDAQEPSQSTNDGVSVTEISEKPLSRKEKRAAAAKAKQSGSNAKANNGAQSNKATLKTILGEALAYGPALAEHIILDAGLVPSTKVGKDPESTIDDSTIQALMESITRFEDWLVDIISGQRIPEGFILMQNKMTAKKNLTPSEGDSTNQKIYDDYCPILLKQFKSREYDEFATFDAALDEFYSKIESQKVNQQQKAKEESAAQRLNKIKLDQENRVHTLRKEVDHCVKMAELIEXNLEDVDAAILAVRVSLANEMSWEALTRMIKEERKAGNPVAGLIDKLNFERNCMTLLLSNNLDDMDEDEITAPVEKVEVDISLSAHANARRWYEMKKKQESKQEKTITAHEKAFKAAEKKTRLQLAQEKTVAAITHMRKVHWFEKFNWFISSENYLIISGRDAQQNELIVKRYMSKGDLYVHAELHGASSTIIKNHKPDTPIPPLTLNQAGCFTVCHSKAWDSKIVTSAWWVYPHQVSKTAPTGEYLTVGSFMIRGKKNFLPPHPLVMGFGILFRLDESSLASHLNERRVRGEDEALQEIEAESRKKQSNPQSDDEIASESGSNKETYEDESSRENTNIDQNNKLGLSDLSTDIATTNSLEPLAETQVEEKLDNGNSSSKEETVDASVSSQLDDLLDKTLGLGPAKVSGKSSLLSSIPSSLAEDNDDLEVIKPAVRDKPYISKAERRKLKKGQSTGEAATDSQNGEAVETPGASQQEKGKANTKAGSEVSETDTSQQGKGKANTKATGSKVSQPGSSQQEKGKGSTQAANPKVSRGQKGKLKKIKEKYAEQDEEEREIRMALLASSGKALRKDKPSQDEEPTAKESKPSAGEDDSSKICYKCKKAGHLSRDCPESTSEADRNDVSISRSRDGMGTSTAPAGGNSAMDEDDVQEIGDEEKEKLIDLDYLTGNPLPSDILLYAVPVCAPYNALQTYKYRVKITPGTAKKGKAAKTAMSLFLHTPDATNREKELMKACTDPELVAAIVGNAKITAPGLTQLKQKQKQKGKKSAKQN

SEQ ID NO: 68349 - protein, 84 aa, Setaria italica
  misc_feature (54)..(54): Xaa can be any naturally occurring amino acid
  Transcript Sequence Number=SeqID_2375
  Gene Ontology: Mol. function=calmodulin binding; Cellular component =integral to membrane; Biological process=cell death
  Homolog annotation: Hit_ID=Q8H886; Match level="QueryCoverage=100%, HitCoverage=17%, E-value=8e-35, Identity=77%"; Hit description =Putative OsMlo-h1
  Pfam annotation: Domain name=Mlo; Domain location=1-84; Score=-362.4; E_value=0.033; Accession=PF03094.7; Description=Mlo family
AFFRQFFASVTKVDYLTMRQGFINAHLSPNAKFDFQKYIKRSLEDDFKVVVGIXGFGTLIWISFVPLVILLLVGTKLEIVIMEM

SEQ ID NO: 68350 - protein, 121 aa, Setaria italica
  misc_feature (61)..(61): Xaa can be any naturally occurring amino acid
  Transcript Sequence Number=SeqID_2376
  Gene Ontology: Mol. function=calmodulin binding; Cellular component =integral to membrane; Biological process=cell death
  Homolog annotation: Hit_ID=Q8H886; Match level="QueryCoverage=92%, HitCoverage=19%, E-value=1e-28, Identity=57%"; Hit description =Putative OsMlo-h1
LLWPLLAQLTPGLKTCYHENLGLGIMKVSVGLGLQVLCSYITFPLYALVTQVKFKNNHLYXSTNSLKESHPNPTSCVQMGSHIEKTIFEEQTAKAVMKWRKAAKDKVKQREAGFEGLMSTD

SEQ ID NO: 68351 - protein, 398 aa, Setaria italica
  Transcript Sequence Number=SeqID_2377
  Gene Ontology: Mol. function=calmodulin binding; Cellular component =integral to membrane; Biological process=cell death
  Homolog annotation: Hit_ID=Q8H886; Match level="QueryCoverage=100%, HitCoverage=72%, E-value=1e-166, Identity=67%"; Hit description =Putative OsMlo-h1
  Pfam annotation: Domain name=Mlo; Domain location=1-341; Score=530.7; E_value=1.8e-156; Accession=PF03094.7; Description=Mlo family
FVLAVFHVVYSVATMALARLKMRRWKRWESETSSLEYQFANDPSRFRFTNQTSFVKRHLGVSSTPGVRWMVAFFRQFFASVTKVDYLTMRQGFINAHLSPNAKFDFQKYIKRSLEDDFKVVVGISLPLWFVAIFILFMDVQGFGTLIWISFVPLVILLLVGTKLEIVIMEMAKEIQDKATVIKGAPIVEPSDRFFWFNRPKWVLFLIHLTLFQNAFQMAHFIWTLLTPGLKTCYHENLGLGIMKVSVGLGLQVLCSYITFPLYALVTQMGSHMKKTIFEEQTAKAVMKWRKAAKDKVKQREAGFEGLMSTDTTPSHSRPTSPGGGSSPVHLLQKYRGRSEDPESAPTSPGRGQELGDMYPVTDQHRMHRLDPERRRAASSTAVDIDIADADFSFSIQR

SEQ ID NO: 68352 - protein, 206 aa, Setaria italica
  Transcript Sequence Number=SeqID_2378
  Pfam annotation: Domain name=DUF1218; Domain location=57-152; Score =149.9; E_value=7.8e-42; Accession=PF06749.4; Description=Protein of unknown function (DUF1218)
MERKVVAVCAVVGFLGVLSAALGFAAEATRVKVSDVQTTTPGECIYPRSPALALGLISAVCLMLAQSTINTVAGCICCKRHPVPSDTNWSVALISFIISWCTFIIAFLLLLTGAALNDQRGAENMYFGSFCYVVKPGVFSGGAVLSLASVALAIVYYVALTSSKSPPPTLATPQNQGIAMGQPVIPQQSSEPVFVHEDTYNRQQFP

SEQ ID NO: 68353 - protein, 505 aa, Setaria italica
  misc_feature (428)..(428): Xaa can be any naturally occurring amino acid
  Transcript Sequence Number=SeqID_2379
  Gene Ontology: Mol. function=catalytic activity; Biological process =metabolic process
  Homolog annotation: Hit_ID=Q10ML0; Match level="QueryCoverage=98%, HitCoverage=84%, E-value=0.0, Identity=92%"; Hit description=AMP -binding enzyme family protein, expressed
  Pfam annotation: Domain name=AMP-binding; Domain location=1-420; Score=289.9; E_value=5.7e-84; Accession=PF00501.20; Description=AMP -binding enzyme
ARRSVGHGSTVAVIAPNVPAIYEAHFGVPMAGAVVNCVNIRLNAATVAFLLEHSSAEVVMVDQEFFSLAEDSLRIIADQKKGSFKQPLLIVIGDQTCDPAALQDALRKGAIEYETFLESGDPEFAWKPPQDEWKSIALGYTSGTTSNPKGVVLHHRGAYLMSLSGALVWGMNEGAVYLWTLPVFHCNGWCYTWALAALCGTSICLRQVSAKAIFSAIAHQGVTHFCGAPVVLNTIVNAPPADTLPLPRIVNVMTAGAAPPPSILASMSKLGFRITHTYGLSETYGPSTVCAWKPEWDSLPADERARLHARQGIQYVGLEGLDVVDPKTMAPVPADGTTMGEIVMRGNGVMKGYLKNPKANAEAFENGWFHSGDLGVRHADGYIEVRDRAKDIIISGGENISSLEVEKAVYLHPAVLEASVVARADEQXWGESPCAFVTLKDSVDRSDEAALARDIMRFCRERLPGYWVPKSVVFGPLPKTATGKIKKHELRAKAKELGPVRKSRM

SEQ ID NO: 68354 - protein, 378 aa, Setaria italica
  Transcript Sequence Number=SeqID_2380
  Gene Ontology: Mol. function=transcription regulator activity; Cellular component=nucleus; Biological process=regulation of transcription
  Homolog annotation: Hit_ID=Q69JI7; Match level="QueryCoverage=98%, HitCoverage=73%, E-value=1e-102, Identity=57%"; Hit description=BHLH transcription factor
  Pfam annotation: Domain name=HLH; Domain location=95-145; Score=64.7; E_value=3.4e-16; Accession=PF00010.18; Description=Helix-loop-helix DNA-binding domain
EVNPWSLPFAARCVAVASARPQPQQQPQRQPERKAGGGFMDAGSRSSGGAGFDDDDGLAARREVSSSLKELSVRVETKGGSCSGSAGTDQLPNTPRSKHSATEQRRRSKINDRFQILREILPQNDQKRDKASFLLEVIEYIRFLQEKVQKYEVSHPEWNQENAKIMPWSNIYFRSSWKNSQNKDEINGDMVSSDPTQVTKNGSSPRFPFAAKPEDHNNAGAFETAPGAQELAELKGCVPFKQAETPNNVTNTVASQQQAQLTNSSPSDDSAVPNGMLNNPELAIDEGTISLSSQYSQGLLTTLNLALQNSGIDLSQASISVQINLGKRATKRSAPVSNSTSKDLINQASRDQEIGHQLRSGDGAREHTQATKRHKSDR

SEQ ID NO: 68355 - protein, 147 aa, Setaria italica
  misc_feature (26)..(26): Xaa can be any naturally occurring amino acid
  misc_feature (59)..(59): Xaa can be any naturally occurring amino acid
  Transcript Sequence Number=SeqID_2381
  Gene Ontology: Mol. function=catalytic activity; Biological process =cellular metabolic process
  Homolog annotation: Hit_ID=Q5K591; Match level="QueryCoverage=91%, HitCoverage=40%, E-value=1e-41, Identity=62%"; Hit description =Cinnamoyl-CoA reductase
  Pfam annotation: Domain name=adh_short; Domain location=19-141; Score= -51.5; E_value=0.034; Accession=PF00106.17; Description=short chain dehydrogenase
MHANHRFTAAMDGADRSSMVVCVTGXGGFIGSSLVKELLQRGYAVRGTARNPEDRKNAXHLHSLDGAKERLSLHRADVLDYKSLCAAFSLCSGVFHVASPVSDNDPELMAVAIEGTKNVINAAADKGVQRVVFTSSYGAVHMNPNRS

SEQ ID NO: 68356 - protein, 253 aa, Setaria italica
  Transcript Sequence Number=SeqID_2382
  Gene Ontology: Mol. function=catalytic activity; Biological process =cellular metabolic process
  Homolog annotation: Hit_ID=B6E2B5; Match level="QueryCoverage=99%, HitCoverage=72%, E-value=4e-84, Identity=57%"; Hit description =Cinnamoyl-CoA reductase
  Pfam annotation: Domain name=Epimerase; Domain location=4-174; Score=- 51.8; E_value=0.0029; Accession=PF01370.13; Description=NAD dependent epimerasedehydratase family
  Pfam annotation: Domain name=NAD_binding_4; Domain location=1-157; Score=-101.7; E_value=0.024; Accession=PF07993.4; Description=Male sterility protein
  Pfam module annotation: Pfam domain module=Epimerase::NAD_binding_4; Domain location=4-174::1-157
SLCSGVFHVASPVSDNDPELMAVAIEGTKNVINAAADKGVQRVVFTSSYGAVHMNPNRSPDQVLDESCWSDLEFCLKTKNLYCYAKTVAERTAMEEASKRGIQLVVVVPSLTLGEMLQPTLNLGIQLLIVSYMKGAKKTYANTVSGYVDVQDVARAHVLVYETPTARGRYLCIGDVMHRSEFIRMMRELFPQYPITTKCKDGNAARVKPYKFSTQRLQALGMKFTPLKETLHRTVLCLQAQGHIPVLSHKSAL

SEQ ID NO: 68357 - protein, 61 aa, Setaria italica
  Transcript Sequence Number=SeqID_2383
  Gene Ontology: Mol. function=transferase activity, transferring glycosyl groups; Biological process=metabolic process
  Homolog annotation: Hit_ID=B6T4P0; Match level="QueryCoverage=95%, HitCoverage=12%, E-value=1e-15, Identity=75%"; Hit description =Anthocyanidin 5,3-O-glucosyltransferase
ELVTADEVEAKVRLVMESEEGKKLRERTAAAKEMAADAIKEGGSSDVELGEFLKDLGKIDL

SEQ ID NO: 68358 - protein, 359 aa, Setaria italica
  Transcript Sequence Number=SeqID_2384
  Gene Ontology: Mol. function=nucleotide binding; Cellular component =intracellular; Biological process=signal transduction
  Homolog annotation: Hit_ID=Q259E7; Match level="QueryCoverage=99%, HitCoverage=53%, E-value=1e-160, Identity=74%"; Hit description =H0402C08.12 protein
  Pfam annotation: Domain name=GTP_EFTU; Domain location=3-151; Score =66.8; E_value=8e-17; Accession=PF00009.19; Description=Elongation factor Tu GTP binding domain
  Pfam annotation: Domain name=GTP_EFTU_D2; Domain location=175-242; Score=34.1; E_value=5.7e-07; Accession=PF03144.17; Description =Elongation factor Tu domain 2
  Pfam annotation: Domain name=GTP_EFTU_D3; Domain location=248-356; Score=30.6; E_value=1.3e-06; Accession=PF03143.9; Description =Elongation factor Tu C-terminal domain
  Pfam module annotation: Pfam domain module=GTP_EFTU::GTP_EFTU_D2::GTP_ EFTU_D3; Domain location=3-151::175-242::248-356
NFRTTEKYHVVLLDSPGHKDFVPNMISGATQADAAVLVVDASIGSFEAGMGVNGIGQTKEHSQLIRSFGVENLIVAVNKMDQVEYSKDRFNFVKSQLGIFLRSCGFKDSSVTWVPLSAMANENLVTAASDSRLLSWYNGNCMLKSIDSLPPPHHDVSRPLRLPICDVIASITLGQVAVCGKVEAGGIRTGSKVLVMPSGDLATVKTIERDSSRCSSARAGDNIAVGLQGIDTSHLVSGGVICHPDFPVRIASRLELKILVLEITTPILVGLQFELHIHHARVSASLVKIPSLLDQKTGKASKKMPRLLTAKQAAIVEVKLDKEVCVEEFSTLKALGRVFLRSRGNTVAVGVVTRILDQA

SEQ ID NO: 68359 - protein, 152 aa, Setaria italica
  Transcript Sequence Number=SeqID_2385
  Gene Ontology: Cellular component=integral to membrane; Biological process=peroxisome organization and biogenesis
  Homolog annotation: Hit_ID=B6TV18; Match level="QueryCoverage=88%, HitCoverage=55%, E-value=4e-55, Identity=80%"; Hit description =Peroxisomal biogenesis factor 11 family protein
  Pfam annotation: Domain name=PEX11; Domain location=3-149; Score= -2.7; E_value=9.3e-07; Accession=PF05648.6; Description=Peroxisomal biogenesis factor 11 (PEX11)
NALRAHPHPPPALAVLACGGEGVYYFVEQFVWLAKAGLLPAHLLPRLQLLSAWAELLGYVGSIAIKLEEVAKIESSIKERLAEGCGEESEAVRTMRGKLLLKRMSVVQDVADAVMALGDVTDGKGWLGSSTLMASAGLLSALISTHKNWKSC

SEQ ID NO: 68360 - protein, 71 aa, Setaria italica
  Transcript Sequence Number=SeqID_2386
  Subcellular localization annotation: CTP_CleavageSite=38; ConfidenceScore=5.57e-01
LSFQQTLLGQLGQNQSSQDGNNSGSATGTRGNPSLDTLMSMLSGLGSGGGLGVPNNSNVPPEELYATQLYF

SEQ ID NO: 68361 - protein, 593 aa, Setaria italica
  Transcript Sequence Number=SeqID_2387
  Gene Ontology: Mol. function=kinase binding; Cellular component =perinuclear region of cytoplasm; Biological process=protein modification process
  Homolog annotation: Hit_ID=Q336W1; Match level="QueryCoverage=73%, HitCoverage=89%, E-value=1e-146, Identity=63%"; Hit description =Ubiquitin family protein, expressed
  Pfam annotation: Domain name=UBA; Domain location=532-569; Score =27.2; E_value=6.8e-05; Accession=PF00627.23; Description=UBATS-N domain
  Pfam annotation: Domain name=ubiquitin; Domain location=31-99; Score =65.7; E_value=1.7e-16; Accession=PF00240.15; Description=Ubiquitin family
  Pfam module annotation: Pfam domain module=UBA::ubiquitin; Domain location=532-569::31-99
MASGGEGAGSGESPPAAAGEAASAGATLNIRCANGSKFTVRADLAATVGAFKEVVAGSCDVPAPQQRLIYKGRILKDEQTLESYGVETDHTIHLVRGVAPSAASGAPAAAAAAAAASPLASSTPSSGPAGGLGGLFPGVGAPRSGRPSGIFGPGFPELEQVEQHLSQNPNLMREIMNMPAMQNLMNNPDLIRNMIMNNPQLREIMDRNPDLAHVLNDPSVLRQTLEAARNPEIMREMMRNTDRAMSNIESSPEGFNMLRRMYETVQEPFLNATTMGGEGNTASNPFAALLGNQGSNQPGQPATNAPTPGSESTTGTPAPNTNPLPNPWSSNAGSAQGAARSGPTGNARTGATGGLGGLGSPDLSSLLSGLAGNPRSGAAGGLGGLGSPDLGSMLGGVPDASFLNQMLQNPAMMQMMQSLMSDPQTMNQLLNFNPNARNLMESNTQLREMFQNPEFLRQLTSPETLQQLLSFQQTLLGQLGQNQSSQDGNNSGSATGTRGNPSLDTLMSMLSGLGSGGGLGVPNNSNVPPEELYATQLTQLREMGFIDNAENIQALVATAGNVHAAVLYGVTSGPICMYTNPNCKYNTVKQRHD

SEQ ID NO: 68362 - protein, 131 aa, Setaria italica
  Transcript Sequence Number=SeqID_2388
  Gene Ontology: Biological process=protein modification process
  Homolog annotation: Hit_ID=B6T584; Match level="QueryCoverage=90%, HitCoverage=20%, E-value=2e-21, Identity=55%"; Hit description =Ubiquilin-1
  Pfam annotation: Domain name=UBA; Domain location=88-125; Score=40.4; E_value=7.1e-09; Accession=PF00627.23; Description=UBATS-N domain
  Subcellular localization annotation: CTP_CleavageSite=62; ConfidenceScore=5.30e-01
DQAVLIKSFDRPSQLTSPETLQQLLSFQQTLLGQLGQNQSSQDGNNSGSATGTRGNPSLDTLMSMLSGLGSGGGLGVPNNSNVPPEELYATQLTQLREMGFIDNAENIQALVATAGNVHAAVERLLGNLGQ

SEQ ID NO: 68363 - protein, 127 aa, Setaria italica
  Transcript Sequence Number=SeqID_2389
SHQERAGHLSSKVTLTALQLLAFLKLLLFKTSEQRSFGVEDTEPAGNRADRGAGGGRLELLRGGGAPASRRRRGTVKRVRLGEGMHVVAAPSSGDAQARWTGAAKERRRLAVPHTRGGGAARGKDGP

SEQ ID NO: 68364 - protein, 240 aa, Setaria italica
  Transcript Sequence Number=SeqID_2390
  Gene Ontology: Mol. function=aspartic-type endopeptidase activity; Cellular component=apoplast; Biological process=proteolysis
  Homolog annotation: Hit_ID=B9RGP5; Match level="QueryCoverage=98%, HitCoverage=55%, E-value=2e-59, Identity=49%"; Hit description =Aspartic proteinase nepenthesin-1, putative
  Pfam annotation: Domain name=Asp; Domain location=19-238; Score= -163.3; E_value=0.00067; Accession=PF00026.15; Description=Eukaryotic aspartyl protease
CESCHDQQDPLFDPTSSPSYAAVPCNSSSCDALRVAAGMSGPAAACGGDQPAACGYTLSYRDGSYSRGVLARDELSLAGEAIDGFVFGCGTSNQGAPFGGTSGLMGLGRSQLSLVSQTMDQFGGVFSYCLPLKESDSSGSLVLGDDSSVYRNSTPIVYASMVSDPLQGPFYFLNLTGITVGGQEVESSGFSAGKVIVDSGTVITSLVPSIYNAVKAEFLSQFAEYPQAPAFSILDTLLSN

SEQ ID NO: 68365 - protein, 109 aa, Setaria italica
  Transcript Sequence Number=SeqID_2391
KADDDDGGRLYQKGVFDFTGCSTLLLPATTLCALNAAALVGGTWKMMTGGGGGGLSGEMLPQLFLLSYVAALSYPLLEGMFLRMDSARVPGRITALSVALAAVLLSLFG

SEQ ID NO: 68366 - protein, 54 aa, Setaria italica
  Transcript Sequence Number=SeqID_2392
GDKRFNHSYGNARPRNKKKGTGPPRLFAPPAPPRKDQFDDGEIIPIEIDEDILE

SEQ ID NO: 68367 - protein, 130 aa, Setaria italica
  Transcript Sequence Number=SeqID_2393
  Homolog annotation: Hit_ID=B6TPC8; Match level="QueryCoverage=87%, HitCoverage=86%, E-value=5e-21, Identity=54%"; Hit description=PSRP4
  Subcellular localization annotation: CTP_CleavageSite=47; ConfidenceScore=5.69e-01
MALLAIQGMAMSTATTALPSHHHGAVSSFVSTSSYALTTAAAFPRARATLAVGALTSATVTPVLDVYCGRGDKKTKRGKRFNHSYGNARPRNKKKGTGPPRLFAPPAPPRKDQFDDGEIIPIEIDEDILE

SEQ ID NO: 68368 - protein, 140 aa, Setaria italica
  Transcript Sequence Number=SeqID_2394
  Gene Ontology: Cellular component=integral to membrane; Biological process=photosynthesis
  Homolog annotation: Hit_ID=B6U534; Match level="QueryCoverage=99%, HitCoverage=98%, E-value=2e-66, Identity=93%"; Hit description =Photosystem I reaction center subunit V
  Pfam annotation: Domain name=PSI_PSAK; Domain location=43-137; Score =197.4; E_value=3.9e-56; Accession=PF01241.10; Description =Photosystem I psaG  psaK
  Subcellular localization annotation: CTP_CleavageSite=41; ConfidenceScore=5.83e-01
MATSTAAVLSPPSVAGLRLAPSPRARVSFRATPARRSVAARAELSPSLVISLSTGVSLFLGRFVFFNFQRENVAKQVPEQNGKTHFDAGDERAKEYAGLLKSNDPVGFNLVDVLAWGSLGHIVAYYILATSSNGYDPNFF

SEQ ID NO: 68369 - protein, 145 aa, Setaria italica
  misc_feature (37)..(37): Xaa can be any naturally occurring amino acid
  misc_feature (106)..(106): Xaa can be any naturally occurring amino acid
  Transcript Sequence Number=SeqID_2395
  Gene Ontology: Mol. function=histidine-tRNA ligase activity; Cellular component=cytoplasm; Biological process=tRNA aminoacylation for protein translation
  Homolog annotation: Hit_ID=B6TS97; Match level="QueryCoverage=95%, HitCoverage=28%, E-value=8e-64, Identity=86%"; Hit description =Histidyl-tRNA synthetase
  Pfam annotation: Domain name=tRNA-synt_2b; Domain location=1-133; Score=39.9; E_value=9.2e-09; Accession=PF00587.17; Description=tRNA synthetase class II core domain (G, H, P, S and T)
ERTGEEITQQLYNFEDKGGRRVVLRPEITPSLARLVXKQGKSVSLPLKWFTIGQCWRYERMTRGRRREHYQWNMDIFGVPKVRAEAELLQAIVLLFQRLGITSSDXGIRVSSRKVLLAVLNMYSIPEHLFTQVCVIVDKVSPVHC

SEQ ID NO: 68370 - protein, 327 aa, Setaria italica
  Transcript Sequence Number=SeqID_2396
  Gene Ontology: Mol. function=histidine-tRNA ligase activity; Cellular component=cytoplasm; Biological process=tRNA aminoacylation for protein translation
  Homolog annotation: Hit_ID=B6TS97; Match level="QueryCoverage=98%, HitCoverage=66%, E-value=1e-159, Identity=86%"; Hit description =Histidyl-tRNA synthetase
  Pfam annotation: Domain name=HGTP_anticodon; Domain location=245-326; Score=8.6; E_value=0.0076; Accession=PF03129.12; Description =Anticodon binding domain
SKVSPLKWFTIGQCWRYERMTRGRRREHYQWNMDIFGVPKVRAEAELLQAIVLLFQRLGITSSDVGIRVSSRKVLLAVLNMYSIPEHLFTQVCVIVDKFGKLTREEIEKELMSTGLSSEAVQGIIEVLSLKSLSKLEEVLGSGVEAVADLKKLFSFAEQYGYADWICFDASVVRGLAYYTGIVFEAFDREGKLRAICGGGRYDKLLSTFGSEDIPACGFGFGDAVIVELLKEKGLLPDMSRQIDDIVFPLDEVLEGPASSIASSLRKKGRAVDLVEDKRLKWVFKHAERINASRLILVGNSEWERGMVRVKILSTREEYEVKADELD

SEQ ID NO: 68371 - protein, 69 aa, Setaria italica
  Transcript Sequence Number=SeqID_2397
  Gene Ontology: Mol. function=hydrolase activity, hydrolyzing O -glycosyl compounds; Biological process=carbohydrate metabolic process
  Homolog annotation: Hit_ID=Q6UY81; Match level="QueryCoverage=98%, HitCoverage=10%, E-value=3e-20, Identity=66%"; Hit description=Exo -beta-glucanase
MTSSNTSWACLLLLCFASIGNAEYMKYKDPKQPINTRIKDLIGRMTLAEKIGQMTQIERQVASADVIEK

SEQ ID NO: 68372 - protein, 129 aa, Setaria italica
  misc_feature (92)..(92): Xaa can be any naturally occurring amino acid
  Transcript Sequence Number=SeqID_2398
  Gene Ontology: Cellular component=mitochondrion
  Homolog annotation: Hit_ID=B9RT29; Match level="QueryCoverage=98%, HitCoverage=30%, E-value=4e-28, Identity=51%"; Hit description =Pentatricopeptide repeat-containing protein, putative
VLAKEAQVAGNEALLLWNSLLSACRTHKRLDLATLAGQRVSEFNQDVAGGLVVMSNAYASAGQTDNAAAVRSSMRRRGIRKDPGCSWIEVKXIPYVFYAGAISCAGARADEVLMLLDELECKMSEKGYK

SEQ ID NO: 68373 - protein, 61 aa, Setaria italica
  misc_feature (33)..(33): Xaa can be any naturally occurring amino acid
  Transcript Sequence Number=SeqID_2399
  Gene Ontology: Mol. function=hydrolase activity, acting on glycosyl bonds; Cellular component=beta-galactosidase complex; Biological process=carbohydrate metabolic process
  Homolog annotation: Hit_ID=B6U0W2; Match level="QueryCoverage=96%, HitCoverage=6%, E-value=4e-22, Identity=84%"; Hit description=Beta -galactosidase
TSNEPFKSHMQSFTTYIVNMMKKEQLFASQGGXNIILAQIENEYGDYYEQSYGPGGKAHRI

SEQ ID NO: 68374 - protein, 54 aa, Setaria italica
  misc_feature (8)..(8): Xaa can be any naturally occurring amino acid
  misc_feature (17)..(17): Xaa can be any naturally occurring amino acid
  Transcript Sequence Number=SeqID_2400
GGGGGGGXGGSSSSGGXFILFVIVLLLDYLREFERNLQNGSRRGSDYDNGLAPQ

SEQ ID NO: 68375 - protein, 331 aa, Setaria italica
  Transcript Sequence Number=SeqID_2401
  Gene Ontology: Mol. function=catalytic activity; Biological process =cellular metabolic process
  Homolog annotation: Hit_ID=B6TL30; Match level="QueryCoverage=100%, HitCoverage=100%, E-value=1e-130, Identity=76%"; Hit description =Dihydroflavonol-4-reductase
  Pfam annotation: Domain name=Epimerase; Domain location=17-273; Score= -40.7; E_value=0.00044; Accession=PF01370.13; Description=NAD dependent epimerasedehydratase family
  Pfam annotation: Domain name=KR; Domain location=22-181; Score=-81.2; E_value=0.023; Accession=PF08659.2; Description=KR domain
  Pfam annotation: Domain name=adh_short; Domain location=15-169; Score= -43.6; E_value=0.01; Accession=PF00106.17; Description=short chain dehydrogenase
  Pfam module annotation: Pfam domain module=Epimerase::KR::adh_short; Domain location=17-273::22-181::15-169
MCPGSVEAPAAGAGKSVCVMDAAGPLGHALVDRLLRRGYTVHAATYGRGEAEEESAAAAAGALLKHLSRGGCGDAYGHRLKVFRADPFDYHAIADAVRGCAGVFCMFNTPDDQAQCDEVTVETEVRAAHNVLEACAQTDAMERVVFTSSATAVVWGSDATATAGGGREERLAVDEKCWSDLAFCRKFKLWHALAKTLSEKTAWALAMDRGVDMVAINAGLLTAPGLTAAHPYLKGAPDMYGAGVLATVDADFLADAHVAAFESPTAYGRYLCFDNAVCRPEDAVKLAQMLSPAAPRSPPSDELKVIPQRIQNKKLNKLMLEFSSGVYGELD

SEQ ID NO: 68376 - protein, 52 aa, Setaria italica
  Transcript Sequence Number=SeqID_2402
QWHRRAQSELQCSSLVSAERAGQVSMITTATYSIVHSCLCVSDGCDKCSLHF

SEQ ID NO: 68377 - protein, 291 aa, Setaria italica
  Transcript Sequence Number=SeqID_2403
  Gene Ontology: Mol. function=general RNA polymerase II transcription factor activity; Cellular component=core TFIIH complex; Biological process=regulation of transcription, DNA-dependent
  Homolog annotation: Hit_ID=B9T3X9; Match level="QueryCoverage=87%, HitCoverage=96%, E-value=3e-62, Identity=50%"; Hit description=RNA polymerase II transcription factor B subunit, putative
  Pfam annotation: Domain name=Tfb4; Domain location=12-273; Score =315.4; E_value=1.2e-91; Accession=PF03850.6; Description =Transcription factor Tfb4
MSSAHSKLYSDDVSLVVIVVDTNPFFWAAAALPFADFFANLVHFVNSLLLLNHLNRVVVIAAGVSSCSYIFDSSDASAAGGVGVTATFDKASRKVEEFIAQDARATAGNGSVVSGNAASLLSGALSLALCYIQRIFRSGTRHPQPRILCLQGSPDGPEQYVAVMNSIFSAQRSMVPIDSCIVGTQDSAFLQQASYITGGVYLKPQELNGLFQYLAVVFATDLHSRTFLRLPKTLGVDFRASCFCHKKTIDMGYVCSVCLSIFCKNQKKCSTCGSEFSRVMPDLNSMPDQSK

SEQ ID NO: 68378 - protein, 138 aa, Setaria italica
  misc_feature (118)..(118): Xaa can be any naturally occurring amino acid
  Transcript Sequence Number=SeqID_2404
  Gene Ontology: Mol. function=protein serine/threonine kinase activity; Biological process=protein amino acid phosphorylation
  Homolog annotation: Hit_ID=B9SS80; Match level="QueryCoverage=84%, HitCoverage=13%, E-value=3e-23, Identity=50%"; Hit description =Serine-threonine protein kinase, plant-type, putative
  Pfam annotation: Domain name=LRRNT_2; Domain location=19-59; Score =55.6; E_value=1.9e-13; Accession=PF08263.4; Description=Leucine rich repeat N-terminal domain
  Pfam annotation: Domain name=LRR_1; Domain location=113-135; Score =9.2; E_value=5.3; Accession=PF00560.25; Description=Leucine Rich Repeat
  Pfam annotation: Domain name=LRR_1; Domain location=65-87; Score=5.1; E_value=32; Accession=PF00560.25; Description=Leucine Rich Repeat
  Pfam annotation: Domain name=LRR_1; Domain location=89-111; Score =8.3; E_value=7.8; Accession=PF00560.25; Description=Leucine Rich Repeat
  Pfam module annotation: Pfam domain module=LRRNT_2::LRR_1::LRR_1::LRR_ 1; Domain location=19-59::113-135::65-87::89-111
LLLHSMCSHASSSLEQQVADGDRRALLAIKLELSDPMGWLSSWNRTSSDVCQWAGVTCSRQHPGRVASLDLSSRQLSGIVSPAIGNLTFLRKLNLESNMLAGEVPLTVGRLRRLRFLXLFNNSFRGEIPREICNCSNL

SEQ ID NO: 68379 - protein, 142 aa, Setaria italica
  Transcript Sequence Number=SeqID_2405
  Gene Ontology: Cellular component=vacuole
  Homolog annotation: Hit_ID=Q7XV19; Match level="QueryCoverage=79%, HitCoverage=25%, E-value=7e-41, Identity=75%"; Hit description =OSJNBa0064H22.7 protein
QLRRISHRYRTFILYGLIIVTISQFTALLAATRPRAQVNLATASELALCSLSLVTGLLVCLYSAAKITHKTQSITSIAAAWHADATINSLDRDQENPRTPSKAYLQQQHAFSPSKAYLQQHAPSSPFSAASASSGEESDDDD

SEQ ID NO: 68380 - protein, 39 aa, Setaria italica
  Transcript Sequence Number=SeqID_2406
QMVSVLDTSGKIIVTSDLQKWNSFTTVTAIEPVQVTNCT

SEQ ID NO: 68381 - protein, 189 aa, Setaria italica
  Transcript Sequence Number=SeqID_2407
MSLEVKKVKVENAELKEDSRRLGENYEARGEELERLSAEVVDLEMLIKEKDKTIEDLRDSAKRDSEVISGLKAKIGQMEPKLGMRAKLLSQIEATLRERFEKVHEAYKNSLGVFGTEPDDCLLNEGCECMFEWLLDEVNSLPEVLEGLNDYSAVFCLESALHLLEQQGCEHIKNISEHNYVAPAAQDIG

SEQ ID NO: 68382 - protein, 186 aa, Setaria italica
  Transcript Sequence Number=SeqID_2408
  Gene Ontology: Mol. function=nucleotide binding; Biological process =defense response
LQESLRELVVYSSDVEEIVADAHVPRLEVIKFGFLTKLRVMAWTHAAASNLREVAMGACHSLTHLTWVQHLPCLESLNLSGCNGLTTLLGGTEDGGAAAEEVVVFPRLRLLALLGLPKLESVRAEGECAFPELRRLQTRGCPRLRKIPMRPGRGQQGTVRIECDKHWWNAVQWAGEDVKACFVPVL

SEQ ID NO: 68383 - protein, 68 aa, Setaria italica
  Transcript Sequence Number=SeqID_2409
NLNCMFLFAHSRHIIHGPVVTVKLFNCASCTCDIIATSSESQHQCMSVPHSIKLSSTACLRTLPMSVP

SEQ ID NO: 68384 - protein, 40 aa, Setaria italica
  Transcript Sequence Number=SeqID_2410
KEKQIVIEVLKRDASALQNDGSNPYQTQCPWELHLPSERS

SEQ ID NO: 68385 - protein, 295 aa, Setaria italica
  Transcript Sequence Number=SeqID_2411
  Gene Ontology: Mol. function=transcription regulator activity; Cellular component=nucleus; Biological process=regulation of transcription, DNA-dependent
  Homolog annotation: Hit_ID=Q8W3M0; Match level="QueryCoverage=94%, HitCoverage=44%, E-value=1e-41, Identity=39%"; Hit description =ETHYLENE-INSENSITIVE3-like 1 protein, putative, expressed
STPRPCSTNAAALPFSASSGEYDVDGADDGEETARNTKPSPNDAPAFVDLSSSMDADATTGNNRFLMPAALMKEEAADAELFQKRSAVPAAVEPELMLSNSFRAYTCGNAQCPHSSCVHGFLDRSARNTHQYACKFNSPAVAPSAATDNNKLLAPSVFLPPGQAVGGFDFDVPVDGQRSLAELMDMYEANVGTSRSLSNTDMVATGGVQVSGQFLTPCLFGNLNQPQQQQQQSAGFYVRDDALPFGGDIAGASPELRFSSGLDGVAVGTSSHYGGALQLQQPQPHKPAAGSNWFY

SEQ ID NO: 68386 - protein, 173 aa, Setaria italica
  Transcript Sequence Number=SeqID_2412
  Pfam annotation: Domain name=DUF581; Domain location=108-161; Score =26.0; E_value=1.6e-05; Accession=PF04570.6; Description=Protein of unknown function (DUF581)
  Pfam annotation: Domain name=zf-FCS; Domain location=115-153; Score =14.6; E_value=0.014; Accession=PF06467.6; Description=MYM-type Zinc finger with FCS sequence mot
  Pfam module annotation: Pfam domain module=DUF581::zf-FCS; Domain location=108-161::115-153
ADGSCCSVHHLGCRSSFLDSIRPFLELVLPKAACGKAASSPGVAATPDEVSAYAADCEEYTCVISRGANPRTTHILAGETLEVRGRGEAGGGGCRKAIFSIEPLSDQQPSTSSPASAAAPGRCRCCIKKLPEKMDIFMYLGKAFCSNECRKGYMEEEIEEAEELMILDSALNL

SEQ ID NO: 68387 - protein, 87 aa, Setaria italica
  misc_feature (71)..(71): Xaa can be any naturally occurring amino acid
  Transcript Sequence Number=SeqID_2413
  Homolog annotation: Hit_ID=B6TBM2; Match level="QueryCoverage=68%, HitCoverage=54%, E-value=1e-20, Identity=76%"; Hit description =Protein yippee-like OJ1003C07.11
  Pfam annotation: Domain name=Yippee; Domain location=1-86; Score =85.3; E_value=2.2e-22; Accession=PF03226.6; Description=Yippee putative zinc-binding protein
STFESLPFCSVYFSILCFVILPHFRVNITLGPNEDREFTTGPHIVNDIYCICCQEIIGWRYEKAYEESQKXKEGKFILERALMCKAP

SEQ ID NO: 68388 - protein, 75 aa, Setaria italica
  Transcript Sequence Number=SeqID_2414
  Homolog annotation: Hit_ID=B6TBM2; Match level="QueryCoverage=100%, HitCoverage=60%, E-value=1e-15, Identity=60%"; Hit description =Protein yippee-like OJ1003C07.11
  Pfam annotation: Domain name=Yippee; Domain location=1-75; Score =12.1; E_value=2.7e-10; Accession=PF03226.6; Description=Yippee putative zinc-binding protein
MGLLFVQVLPRGNGDPGSPAATVLQCRRCRLDAASMGAILSREFQGRIGRGYLFDRVVNITLGPNEDREFTTGPH

SEQ ID NO: 68389 - protein, 96 aa, Setaria italica
  misc_feature (64)..(64): Xaa can be any naturally occurring amino acid
  Transcript Sequence Number=SeqID_2415
  Subcellular localization annotation: CTP_CleavageSite=24; ConfidenceScore=5.13e-01
STEMYHRTNAVLCQSSFTSHPHLSSTAVVHVAMHTTFVLNQVCPATLNYTITYSSCIPWHEIFXGALHIKALSKMNFPSLIFGSPRTLSPAEHHTV

SEQ ID NO: 68390 - protein, 135 aa, Setaria italica
  Transcript Sequence Number=SeqID_2416
GLQATELKTRGMCFRGGSMVWSSQSQTAKLKGARRCGCDKDPHHGRWPLISSSRAGHRSASCSCSLTAASPYPVASGRHSHTSLLPSILPFGTGRTTPLTSPEAHAPRLQLRRLQAPLHVCCCCPSEHRENHIFR

SEQ ID NO: 68391 - protein, 241 aa, Setaria italica
  misc_feature (39)..(39): Xaa can be any naturally occurring amino acid
  Transcript Sequence Number=SeqID_2417
  Gene Ontology: Mol. function=hydrolase activity, acting on glycosyl bonds; Cellular component=beta-galactosidase complex; Biological process=carbohydrate metabolic process
  Homolog annotation: Hit_ID=Q0IZZ8; Match level="QueryCoverage=95%, HitCoverage=25%, E-value=1e-114, Identity=85%"; Hit description=Beta- galactosidase 12
LTYIVIHWLEQIFGRTGASYVLTGYYDEAPMDEYGMCKXPKFGHLRDLHNVIRSYQKAFLTGEHSSEKLGHGYEAHTFELPEDNLCLSFLSNNNTGEDGTVTFRGEKHYVPSRSVSILAGCKNVVYNTKRVFVQHSERSFHTSEVTSKNKSWEMYSEQIPKFHKTKVRTKEPLEQYNQTKDASDYLWYTTSFRLESDDLPFRGDIRPVLQVKSTAHSMVGFANDAFVGSGRGSKQVKGFMF

SEQ ID NO: 68392 - protein, 130 aa, Setaria italica
  Transcript Sequence Number=SeqID_2418
  Homolog annotation: Hit_ID=B9SVM2; Match level="QueryCoverage=71%, HitCoverage=14%, E-value=5e-18, Identity=45%"; Hit description =Protein phosphatase 2c, putative
  Pfam annotation: Domain name=DUF868; Domain location=1-129; Score =10.5; E_value=1.1e-12; Accession=PF05910.4; Description=Plant protein of unknown function (DUF868)
KHIYGKKIYSAKAQFCDNGQFHDIVIECDTIGLKDPCLEIRVDKKPVMQVKHLAWKFRGNQTILIDGLPVEVFWDVHSWLFGSTASNAVFMFQTCQAPEKSLPWSYSQIFRESQLQGLGFSLILHAWKLE

SEQ ID NO: 68393 - protein, 73 aa, Setaria italica
  Transcript Sequence Number=SeqID_2419
  Gene Ontology: Mol. function=zinc ion binding; Cellular component =intracellular
  Homolog annotation: Hit_ID=Q9LG20; Match level="QueryCoverage=97%, HitCoverage=15%, E-value=1e-20, Identity=63%"; Hit description =F14J16.17
  Pfam annotation: Domain name=zf-RanBP; Domain location=1-26; Score =12.4; E_value=0.036; Accession=PF00641.10; Description=Zn-finger in Ran binding protein and others
  Pfam annotation: Domain name=zf-RanBP; Domain location=31-60; Score =15.9; E_value=0.013; Accession=PF00641.10; Description=Zn-finger in Ran binding protein and others
  Pfam module annotation: Pfam domain module=zf-RanBP::zf-RanBP; Domain location=1-26::31-60
WECGACTLLNQPLAPICEVCGTAKPKIAKAKYMTWSCKFCTLENSTKLDKCSACDHWRYSYGPPVATYGPSYD

SEQ ID NO: 68394 - protein, 243 aa, Setaria italica
  Transcript Sequence Number=SeqID_2420
  Gene Ontology: Mol. function=zinc ion binding; Cellular component =intracellular
  Homolog annotation: Hit_ID=Q9LG20; Match level="QueryCoverage=99%, HitCoverage=62%, E-value=3e-45, Identity=37%"; Hit description =F14J16.17
  Pfam annotation: Domain name=WLM; Domain location=1-94; Score=-42.1; E_value=0.00014; Accession=PF08325.2; Description=WLM domain
  Pfam annotation: Domain name=zf-RanBP; Domain location=166-196; Score= 26.3; E_value=0.00012; Accession=PF00641.10; Description=Zn-finger in Ran binding protein and others
  Pfam annotation: Domain name=zf-RanBP; Domain location=201-230; Score= 15.9; E_value=0.013; Accession=PF00641.10; Description=Zn-finger in Ran binding protein and others
  Pfam module annotation: Pfam domain module=WLM::zf-RanBP::zf-RanBP; Domain location=1-94::166-196::201-230
KLWDELRKECEELVSKGITGTGQGFDGTGRRVGGFTIHPPPPSLRQATLAAAQKRARNGALLPSGPRKLGGNNDIMSALSPAQAAAMAAEWRMHDDLWCGSHNQSGIDDSDDVIILEEPPNNMTIKDGKTTKGSCSNTSAESSTSSGIHTAARDGPSSFWTTGDAVDDSKWECGACTLLNQPLAPICEVCGTAKPKIAKAKYMTWSCKFCTLENSTKLDKCSACDHWRYSYGPPVATYGPSYD

SEQ ID NO: 68395 - protein, 79 aa, Setaria italica
  Transcript Sequence Number=SeqID_2421
  Gene Ontology: Mol. function=DNA-directed RNA polymerase activity; Cellular component=mitochondrion; Biological process=transcription
  Homolog annotation: Hit_ID=O82725; Match level="QueryCoverage=100%, HitCoverage=8%, E-value=7e-42, Identity=94%"; Hit description=DNA -directed RNA polymerase
CKEAGLDFAGVHDSFWVHACDVDQMNQILREQFVELYSMPILENLLEEFQTSFPTLEFPPCPPQGNFDVREVLNSTYFF

SEQ ID NO: 68396 - protein, 52 aa, Setaria italica
  Transcript Sequence Number=SeqID_2422
  Subcellular localization annotation: CTP_CleavageSite=15; ConfidenceScore=5.18e-01
PTPTPTPAPTPAPTPAPAPTPTPTPAPTPVPQPPTKTPPPPPKRHRHPKDTS

SEQ ID NO: 68397 - protein, 62 aa, Setaria italica
  Transcript Sequence Number=SeqID_2423
GSDRSYVVQARSITSYTTLAEKLNRARSMAGTGAREILCVVLMLLAAVVQQHACSARAAAAA

SEQ ID NO: 68398 - protein, 168 aa, Setaria italica
  misc_feature (122)..(122): Xaa can be any naturally occurring amino acid
  misc_feature (154)..(154): Xaa can be any naturally occurring amino acid
  Transcript Sequence Number=SeqID_2424
  Gene Ontology: Mol. function=transporter activity; Cellular component= membrane; Biological process=oligopeptide transport
  Homolog annotation: Hit_ID=B9S7C1; Match level="QueryCoverage=82%, HitCoverage=25%, E-value=2e-42, Identity=55%"; Hit description =Peptide transporter, putative
MDIEIQEPLPENSVSERTTGIQGAKRHSGSWRACSYILVTQCFEELAYYGIQFNLVTFLKTVLHESNVTAARSYTNWQGTCYIAPLAGAIIADSYLGRYLTTVAFFTVYLLGMAAMSISASXDNKASSQYAVFFLGLYMMGIGAGGIKPCVSSXFGADQFDDSLVLSP

SEQ ID NO: 68399 - protein, 138 aa, Setaria italica
  Transcript Sequence Number=SeqID_2425
  Gene Ontology: Mol. function=catalytic activity; Biological process =cellular metabolic process
  Homolog annotation: Hit_ID=Q5K591; Match level="QueryCoverage=89%, HitCoverage=36%, E-value=4e-45, Identity=70%"; Hit description =Cinnamoyl-CoA reductase
  Pfam annotation: Domain name=adh_short; Domain location=14-134; Score= -56.6; E_value=0.073; Accession=PF00106.17; Description=short chain dehydrogenase
RTNCPRLLGAATEQLVCVTGAGGFIGSWLVKELLHRGYAVRGTARDPDDCKNAHLHALDGAEERLSLYRADVLDYKSLRPAFSLCDGVFHVASPVSNDPELVQVAIEGTKNVINAAADMGVQRVVFTSSYGAVHMNPK

SEQ ID NO: 68400 - protein, 104 aa, Setaria italica
  Transcript Sequence Number=SeqID_2426
  Gene Ontology: Cellular component=integral to membrane; Biological process=photosynthesis
  Homolog annotation: Hit_ID=B6SX34; Match level="QueryCoverage=95%, HitCoverage=75%, E-value=7e-36, Identity=79%"; Hit description =Photosystem I reaction center subunit psaK
  Pfam annotation: Domain name=PSI_PSAK; Domain location=19-99; Score =141.9; E_value=2e-39; Accession=PF01241.10; Description=Photosystem I psaG  psaK
CSGSGGRKRAQGIRCDYIGSATNQIMVLSTTLMLFAGRFGLAPSANRKATAGLKLESRDSGLQTGDPAGFTLADTLACGAVGHIIGVGIVLGLKNTGALDQIIG

SEQ ID NO: 68401 - protein, 43 aa, Setaria italica
  Transcript Sequence Number=SeqID_2427
MFSRSYTNLLDLANGNLSALDYGGGGGGGGGGGGRPPRARRMQ

SEQ ID NO: 68402 - protein, 37 aa, Setaria italica
  Transcript Sequence Number=SeqID_2428
CISHGHVKYAFLMDMLSIDFLLSKSVSYIPLRASVAV

SEQ ID NO: 68403 - protein, 101 aa, Setaria italica
  Transcript Sequence Number=SeqID_2429
  Pfam annotation: Domain name=DUF2144; Domain location=22-91; Score =4.1; E_value=0.0062; Accession=PF09915.1; Description=Uncharacterized protein conserved in archaea
  Pfam annotation: Domain name=Pcc1; Domain location=18-94; Score=74.3; E_value=4.5e-19; Accession=PF09341.2; Description=Transcription factor Pcc1
  Pfam module annotation: Pfam domain module=DUF2144::Pcc1; Domain location=22-91::18-94
MAAASFPPASSSGGWDFTCNFEVDYGSEEQASIIYKTLAVDKELQPDKVKREMTLSGSKLAVHFAAVEARFLRASFSAFVDLMGLVTKLVEEYGVAKEGHS

SEQ ID NO: 68404 - protein, 113 aa, Setaria italica
  Transcript Sequence Number=SeqID_2430
  Gene Ontology: Cellular component=mitochondrion
  Homolog annotation: Hit_ID=Q338A4; Match level="QueryCoverage=100%, HitCoverage=78%, E-value=1e-50, Identity=42%"; Hit description =Pentatricopeptide, putative, expressed
  Pfam annotation: Domain name=PPR; Domain location=14-48; Score=24.0; E_value=0.0006; Accession=PF01535.12; Description=PPR repeat
  Pfam annotation: Domain name=PPR; Domain location=49-83; Score=52.5; E_value=1.6e-12; Accession=PF01535.12; Description=PPR repeat
  Pfam module annotation: Pfam domain module=PPR::PPR; Domain location =14-48::49-83
YEHMKSKGIVPDVVAGNAVLYSLARSGRLGMAKRVFYELKAMGVSPDTITYTMMIKCCSKASKADEAVKIFSEMVENGCVPDVLTVNSLIDTLYKGGRGNEAWQLFHQLKNEN

SEQ ID NO: 68405 - protein, 95 aa, Setaria italica
  Transcript Sequence Number=SeqID_2431
  Gene Ontology: Mol. function=transferase activity; Cellular component= chloroplast
  Homolog annotation: Hit_ID=B9SM34; Match level="QueryCoverage=97%, HitCoverage=69%, E-value=3e-25, Identity=41%"; Hit description =Pentatricopeptide repeat-containing protein, putative
  Pfam annotation: Domain name=PPR; Domain location=19-53; Score=46.1; E_value=1.4e-10; Accession=PF01535.12; Description=PPR repeat
  Pfam annotation: Domain name=PPR; Domain location=54-88; Score=54.5; E_value=4e-13; Accession=PF01535.12; Description=PPR repeat
  Pfam module annotation: Pfam domain module=PPR::PPR; Domain location =19-53::54-88
RAAEYLSKMRGSGLVPDGVIYTMVIGGFCRAGSMSEALRIRDEMVGCGCLPDVVTYNTLLSGLCKQRKLLDAEELLNEMKERGVTPDLCYFTNKT

SEQ ID NO: 68406 - protein, 114 aa, Setaria italica
  misc_feature (21)..(21): Xaa can be any naturally occurring amino acid
  Transcript Sequence Number=SeqID_2432
  Gene Ontology: Mol. function=nucleotide binding; Biological process =defense response
  Homolog annotation: Hit_ID=Q6AVJ8; Match level="QueryCoverage=76%, HitCoverage=8%, E-value=2e-11, Identity=43%"; Hit description=NB-ARC domain containing protein
REFKDVMYDADDVLDPCQLLXRVGEDPPAPTSAPKTTSRFWDIPKMFFCFRNPVAAHEIGTKIQAINQRLEDLAKRSSRFGFITQAIHSSADSINKASNSLSDETGSVFIRSDV

SEQ ID NO: 68407 - protein, 170 aa, Setaria italica
  Transcript Sequence Number=SeqID_2433
  Gene Ontology: Mol. function=hydrolase activity; Cellular component =integral to membrane; Biological process=lipid catabolic process
  Homolog annotation: Hit_ID=Q2R2X0; Match level="QueryCoverage=100%, HitCoverage=44%, E-value=1e-91, Identity=95%"; Hit description =Patatin, putative, expressed
  Pfam annotation: Domain name=Patatin; Domain location=2-141; Score =3.7; E_value=0.00017; Accession=PF01734.14; Description=Patatin-like phospholipase
YITERTPLAGSSAGAIICAVIASGNTMQDALQVTKDLADNCRSNGTAFRLGAVLRDVLDKFLPDDLHIRCNGRIRVAITQLSWRPRGLLVDQFDSKEDVINAVITSSFIPGYLAPRPATFFRNRLCIDGGLTLFMPPTSASETVRICAFPASRLGLQGIGISPDCNPENR

SEQ ID NO: 68408 - protein, 134 aa, Setaria italica
  misc_feature (12)..(12): Xaa can be any naturally occurring amino acid
  misc_feature (25)..(25): Xaa can be any naturally occurring amino acid
  Transcript Sequence Number=SeqID_2434
  Homolog annotation: Hit_ID=B6UD95; Match level="QueryCoverage=58%, HitCoverage=17%, E-value=2e-28, Identity=84%"; Hit description =CRAL/TRIO domain containing protein
  Subcellular localization annotation: CTP_CleavageSite=62; ConfidenceScore=5.82e-01
RSTAATPPPFPXGGAPLTPSSAAKXQKTAPPQPQQFPRTPRPSFLQSPSMLFAFRKDGQASRVERERESFLPFLRFYRRPYDEISYRAKMRPPLGGLISIVGEKFKQKPVQQPLRRHVGLHQQHHHYYQQHQRI

SEQ ID NO: 68409 - protein, 44 aa, Setaria italica
  Transcript Sequence Number=SeqID_2435
LSFSIENSKVFWVIKFQSLKSLSCSVSIHLMCMYERPHMFSNPR

SEQ ID NO: 68410 - protein, 54 aa, Setaria italica
  Transcript Sequence Number=SeqID_2436
GFFAITACFACHFPCDAAKRRISQMAKPFYDYNSIQAIANVDFTLPALTERMKV

SEQ ID NO: 68411 - protein, 92 aa, Setaria italica
  Transcript Sequence Number=SeqID_2437
  Gene Ontology: Mol. function=unfolded protein binding; Cellular component=prefoldin complex; Biological process=protein folding
  Homolog annotation: Hit_ID=B6SZS5; Match level="QueryCoverage=100%, HitCoverage=63%, E-value=3e-38, Identity=88%"; Hit description =Prefoldin subunit 2
  Pfam annotation: Domain name=Prefoldin_2; Domain location=1-67; Score= 15.3; E_value=0.0064; Accession=PF01920.12; Description=Prefoldin subunit
PLDPSRRCYRMIGGVLVERTIKEVLPAVKRNKEGLEEVIARMHEALERKKKEITEFELKYKIRIRKADNNAEEEGGKKEGTAQGVLVGPAGQ

SEQ ID NO: 68412 - protein, 113 aa, Setaria italica
  Transcript Sequence Number=SeqID_2438
  Gene Ontology: Mol. function=unfolded protein binding; Cellular component=prefoldin complex; Biological process=protein folding
  Homolog annotation: Hit_ID=B6SZS5; Match level="QueryCoverage=100%, HitCoverage=77%, E-value=3e-56, Identity=97%"; Hit description =Prefoldin subunit 2
  Pfam annotation: Domain name=Prefoldin_2; Domain location=16-113; Score=84.5; E_value=3.7e-22; Accession=PF01920.12; Description =Prefoldin subunit
MASKAGGDGKEAINEQVIANTYANMRTEMNQLYTKITELEMEVSEHSLVIGAIEPLDPLRRCYRMIGGVLVERTIKEVLPAVKRNKEGLEEVIARMHEALERKKKEITEFEHK

SEQ ID NO: 68413 - protein, 475 aa, Setaria italica
  misc_feature (36)..(36): Xaa can be any naturally occurring amino acid
  misc_feature (146)..(146): Xaa can be any naturally occurring amino acid
  Transcript Sequence Number=SeqID_2439
  Homolog annotation: Hit_ID=Q5JMX2; Match level="QueryCoverage=90%, HitCoverage=78%, E-value=0.0, Identity=82%"; Hit description =Putative vascular plant one zinc finger protein
PSRLLQLATAEEEDDATSKLVEQQQQRQQQQPPPPXPPPPPPANQNQGHALGCQDMKPEPREESVDVAVAQPQLLGQGVLPNGAPAAAAVFHDQMYYVNQELTVEDFLYDDDYKINLSGSNPDVLNNLEGIGQLEYPQFNFPQELXPNVYLDMSNCGQSTGDVFLHMSDLLTTMTPAPSAFLRPKCALWDCPRPAIGSERWHDYCSMYHADLAVKEEGPPGTMPVIRPRGIDLKDGPLFAALSAKIQGKHVGIPICEGAATSKSPWNAPELFDLYIFEGESIREWLFFDKPRRAFDSGNRKQRSLPDYNGRGWHESRKQVMKDFGGLKRSYYMDPQPSNTYEWHLFEYEINDCDAFALYRLEFKSSDAKKSAKSKIACNPLNEIQQQMVRLSADSPVDIKRTARGRTKANPIDVNSNIYSVPSTTVHANIPNAYQPVSQVDQMTYLNGSVVYGPHLPYGYSTERSDFYWNSNDGT

SEQ ID NO: 68414 - protein, 65 aa, Setaria italica
  Transcript Sequence Number=SeqID_2440
LIYVVFLYGHFVPAYKKMYEYSISYVHSPQSFFLNLPLGECTPTLEFHHEQTRNINQVSHSSYSA

SEQ ID NO: 68415 - protein, 387 aa, Setaria italica
  Transcript Sequence Number=SeqID_2441
  Gene Ontology: Mol. function=RNA polymerase II transcription factor activity; Cellular component=transcription factor TFIIA complex; Biological process=transcription initiation from RNA polymerase II promoter
  Homolog annotation: Hit_ID=B6T3Z3; Match level="QueryCoverage=100%, HitCoverage=100%, E-value=1e-167, Identity=76%"; Hit description =Transcription factor/ transcription initiation factor
  Pfam annotation: Domain name=TFIIA; Domain location=8-387; Score =188.7; E_value=1.7e-53; Accession=PF03153.5; Description =Transcription factor IIA, alphabeta subunit
MASSNVSTVYISVIDDVISKVREDFITYGVGDAVLNELQALWEMKMLHCGAISGNIDRTKAVGASTGGTAGATPPVHDLNVPYEATSEEYATPTADMLFPPTPLQTPIQTPLPGTDAGMYNIPTGPSDYAPSPISDVRNGMVINGADPKTGRPSPYMPPPSPWMNQRPLGVDVNVAYVEGREDPDRGVQPQPLTQDFLMMSSGKRKRDEYPGQLPSGSFVPQQDGSADQIVEFAVSKENAHQLWSSIMNKQETSTKSVTPVIPQRDGIQDDYNDQFFFPGVPTEDYNTPGESAEYRAPTPAVATPKPRNDEGDDDDEPPLNEDDDDDDELDDLEQGEDEPNTQHLVLAQFDKVTRTKNRWKCTLKDGIMHLNGRDVLFNKATGEFDF

SEQ ID NO: 68416 - protein, 65 aa, Setaria italica
  Transcript Sequence Number=SeqID_2442
TQHFNWRSTAYALHSPSNVPCPSIPRALLKILAMLLPLHGQKNLACSVISRKPSGVPHGKHRRTA

SEQ ID NO: 68417 - protein, 95 aa, Setaria italica
  Transcript Sequence Number=SeqID_2443
EKLSAERELRQWRAEHDPQWPRTGLAEISLLDDPDAGDRLGNPHILSPRGRYVPRTELMGSTAEAEAEAEARQRKTTFFPRMVMFLARKRAQSWK

SEQ ID NO: 68418 - protein, 86 aa, Setaria italica
  Transcript Sequence Number=SeqID_2444
  Gene Ontology: Mol. function=hydrolase activity
  Homolog annotation: Hit_ID=B6TI01; Match level="QueryCoverage=96%, HitCoverage=16%, E-value=3e-33, Identity=86%"; Hit description =Hydrolase, alpha/beta fold family protein
YFSVHQVINYLLRGWLKNLESEGSIDLPFLEEPSYAEHGVSRELEFVREGSRKSVSVRLYGSKISLWSQLSSFLNTRASNSRVVSR

SEQ ID NO: 68419 - protein, 491 aa, Setaria italica
  Transcript Sequence Number=SeqID_2445
  Gene Ontology: Mol. function=hydrolase activity
  Homolog annotation: Hit_ID=B6TI01; Match level="QueryCoverage=100%, HitCoverage=100%, E-value=0.0, Identity=86%"; Hit description =Hydrolase, alpha/beta fold family protein
  Pfam annotation: Domain name=Abhydrolase_1; Domain location=155-419; Score=27.7; E_value=3.2e-05; Accession=PF00561.12; Description =alphabeta hydrolase fold
  Pfam annotation: Domain name=DUF2305; Domain location=127-409; Score=- 108.7; E_value=0.017; Accession=PF10230.1; Description=Uncharacterised conserved protein (DUF2
  Pfam module annotation: Pfam domain module=Abhydrolase_1::DUF2305; Domain location=155-419::127-409
  Subcellular localization annotation: CTP_CleavageSite=61; ConfidenceScore=5.19e-01
MEVVSCSHSCSALHQTPRRAWRLRGSGFGLGHAKPRTRRSVILCVGTTSGASNPADSSKVHATQGFSVSDMDVNLQGIPSRKAEEIEKVMIQGLPEGPDSSPISTGFWEWKPKLTVYYERSGTENSKAPAVLFLPGFGVGTFHFEKQLKDLGRDHKVWTMDFLGQGMSLPCEDPAPSTIAGEQSEEAFWGFGQDSQPWAEELVYSVDLWQNQVQHFIEEVIREPVYIVGNSLGGFVAMYLAASSPHLVKGVTLLNATPFWGFFPNPATSPRLSKIFPWVGTFPLPSFVRKLTEAVWQKISDPRSIHDILKQVYADHSTNVDNVFSRIVEITQHPAAAASFASIMFAPRGQISFQEAVSRCQSQGVPISLMYGREDPWVRPIWGIKVKQQVPEAPYYEISPAGHCPHDEVPEVINYLLRGWLKNLESEGSIDLPFLEEPSYAEHGVSRELEFVREGSRKSVSVRLYGSKISLWSQLSSFLNTRASNSRVVSR

SEQ ID NO: 68420 - protein, 76 aa, Setaria italica
  Transcript Sequence Number=SeqID_2446
KFALVLYLFYLGGGGYTDMWWHLWTELPCKTKTKAFKAHLFLEEKLAVSRMHKGKVLNQAKSGLAMERKNAKRKNP

SEQ ID NO: 68421 - protein, 291 aa, Setaria italica
  Transcript Sequence Number=SeqID_2447
  Gene Ontology: Mol. function=protein serine/threonine kinase activity; Cellular component=plasma membrane; Biological process =protein amino acid phosphorylation
  Homolog annotation: Hit_ID=B2KTB0; Match level="QueryCoverage=98%, HitCoverage=50%, E-value=1e-127, Identity=76%"; Hit description =Calcium-dependent protein kinase
  Pfam annotation: Domain name=Pkinase; Domain location=1-112; Score= -45.6; E_value=9e-06; Accession=PF00069.17; Description=Protein kinase domain
  Pfam annotation: Domain name=efhand; Domain location=159-187; Score =35.7; E_value=1.8e-07; Accession=PF00036.24; Description=EF hand
  Pfam annotation: Domain name=efhand; Domain location=195-223; Score =25.5; E_value=0.00021; Accession=PF00036.24; Description=EF hand
  Pfam annotation: Domain name=efhand; Domain location=231-259; Score =25.1; E_value=0.00029; Accession=PF00036.24; Description=EF hand
  Pfam annotation: Domain name=efhand; Domain location=267-291; Score =22.9; E_value=0.0013; Accession=PF00036.24; Description=EF hand
  Pfam module annotation: Pfam domain module=Pkinase::efhand::efhand::ef hand::efhand; Domain location=1-112::159-187::195-223::231-259::267 -291
FFRSFFRPGERFTEIVGSPYYMAPEVLRRNYGPEVDIWSAGVILYILLCGVPPFWAETEQGVARAILRGSLDLQREPWPRISDGAKSLVRQMLQMDPRKRPTAQQVLEHPWLQNARKAPNVPLGDVVRARLQQFSAMNKLKKKAMRVIAEHLSVEEVEVIRDMFALMDADGDGRVTLQELKAGLRKVGSKLAEPEMELLMEAADVNGNGYLDYGEFVAITIHLQRLSNDAHLRTAFLFFDKDSSGYIERAELADALADEAGHTDEAALNNVLREVDTDKDGRISFDEFVAM

SEQ ID NO: 68422 - protein, 159 aa, Setaria italica
  misc_feature (78)..(78): Xaa can be any naturally occurring amino acid
  misc_feature (133)..(133): Xaa can be any naturally occurring amino acid
  misc_feature (143)..(143): Xaa can be any naturally occurring amino acid
  Transcript Sequence Number=SeqID_2448
  Gene Ontology: Mol. function=peptidase activity
  Homolog annotation: Hit_ID=Q2R8S1; Match level="QueryCoverage=89%, HitCoverage=46%, E-value=7e-49, Identity=71%"; Hit description=ATP -dependent protease La, putative
RLRQPRRRRLRQLQPAEVLIPSESKTLHLYEARYIALLEEALNKKKNSFVHFVLDPVVDSSTKASFAVRYGCLVHIEXVQKLEIGALISIRGVCRVNISNLLDMEPYFRGTVSPLIDEHYECIGLGTRISKLXESMCNLHSLXIKLKVPEDEPLQTTSG

SEQ ID NO: 68423 - protein, 150 aa, Setaria italica
  Transcript Sequence Number=SeqID_2449
  Gene Ontology: Mol. function=peptidase activity
  Homolog annotation: Hit_ID=Q2R8S1; Match level="QueryCoverage=89%, HitCoverage=47%, E-value=1e-52, Identity=75%"; Hit description=ATP -dependent protease La, putative
ITSLSSLIQMEPYFRGTVSPLIDEHYECIGLGTRISKLRESMCNLHSLQIKLKVPEDEPLQTNIRASLLWSEKENYEEYNESFIPGFPERLSFAAYQTVSGMSDAELLTLQKYKIQAMDSTDTLERLNNAIEYVEHNIGMIAARLAIQNI

SEQ ID NO: 68424 - protein, 81 aa, Setaria italica
  Transcript Sequence Number=SeqID_2450
  Subcellular localization annotation: CTP_CleavageSite=40; ConfidenceScore=5.53e-01
PTGGTTPPTRKHAPGLPSHLELANWSSVCSGTGSTSSWCRSATASSSGAGCSSYVPLARKDQEEYYQGWKEKAKEEYASAI

SEQ ID NO: 68425 - protein, 89 aa, Setaria italica
  Transcript Sequence Number=SeqID_2451
RSKPTFLLSSQHGMYNHSSCYRLEVKRSFNINNTQFSPAPHLESHKSQMSQLQDIDTKAQNRGAANSGKFWLYFHCDHRPTITDRLNSG

SEQ ID NO: 68426 - protein, 118 aa, Setaria italica
  Transcript Sequence Number=SeqID_2452
  Gene Ontology: Mol. function=transcription cofactor activity; Biological process=regulation of transcription, DNA-dependent
  Homolog annotation: Hit_ID=B9SWU1; Match level="QueryCoverage=68%, HitCoverage=5%, E-value=5e-21, Identity=62%"; Hit description =Transcription cofactor, putative
  Pfam annotation: Domain name=KIX; Domain location=1-80; Score=1.9; E _value=0.034; Accession=PF02172.8; Description=KIX domain
MDADWRSQLQPAARNRIVNKIMETLTKHIPVPPPLPEDLIELRKIAVRFEDKMYAAASSQSDYLRKIALKMLAVETYTKTQHNPGNAQVSPILKPSDPGSSSKGKKGKKLRCHFCKKG

SEQ ID NO: 68427 - protein, 43 aa, Setaria italica
  Transcript Sequence Number=SeqID_2453
  Gene Ontology: Mol. function=glucose-1-phosphate adenylyltransferase activity; Cellular component=chloroplast; Biological process =glycogen biosynthetic process
  Homolog annotation: Hit_ID=P55234; Match level="QueryCoverage=100%, HitCoverage=8%, E-value=2e-10, Identity=79%"; Hit description =Glucose-1-phosphate adenylyltransferase large subunit 2, chloroplastic/amyloplastic
MQFSSVFPLEGKACVSPVRRGSEGSGSERMRIGDCSSIRQNRA

SEQ ID NO: 68428 - protein, 165 aa, Setaria italica
  Transcript Sequence Number=SeqID_2454
  Gene Ontology: Mol. function=glucose-1-phosphate adenylyltransferase activity; Cellular component=chloroplast; Biological process =glycogen biosynthetic process
  Homolog annotation: Hit_ID=P30524; Match level="QueryCoverage=99%, HitCoverage=31%, E-value=3e-84, Identity=89%"; Hit description =Glucose-1-phosphate adenylyltransferase large subunit 1, chloroplastic/amyloplastic
EYLDANMALCEQPPKFEFYDPKTPFFTSPRYLPPTKSDKSRIKDAIISHGCFLRECTIEHSIVGVRSRLNSGCELKNTMMMGADLYETEDEISRLLSEGKVPIGVGENTKISNCIIDMNARVGRNVSITNSEGVQEADRPEEGYYIRSGIVVILKNATIKDGTVI

SEQ ID NO: 68429 - protein, 104 aa, Setaria italica
  Transcript Sequence Number=SeqID_2455
  Subcellular localization annotation: CTP_CleavageSite=28; ConfidenceScore=5.00e-01
GRLLRKHGGSEISVQPFAKWTNRHGRRRASSVCCVRVLFTRCTNDPIPQKLLHLYPASLLRCYYIERLVTILPHLLSLVIQDSSKQPSSSNRSSFICSSSSFED

SEQ ID NO: 68430 - protein, 131 aa, Setaria italica
  Transcript Sequence Number=SeqID_2456
  Gene Ontology: Mol. function=glucose-1-phosphate adenylyltransferase activity; Cellular component=chloroplast; Biological process =glycogen biosynthetic process
  Homolog annotation: Hit_ID=O22593; Match level="QueryCoverage=85%, HitCoverage=38%, E-value=6e-52, Identity=88%"; Hit description =Glucose-1-phosphate adenylyltransferase (Fragment)
SRYLKYVLFYFLLLVLCFLRECTIEHSIVGVRSRLNSGCELKNTMMMGADLYETEDEISRLLSEGKVPIGVGENTKISNCIIDMNARVGRNVSITNSEGVQEADRPEEGYYIRSGIVVILKNATIKDGTVI

SEQ ID NO: 68431 - protein, 506 aa, Setaria italica
  Transcript Sequence Number=SeqID_2457
  Gene Ontology: Mol. function=glucose-1-phosphate adenylyltransferase activity; Cellular component=chloroplast; Biological process =glycogen biosynthetic process
  Homolog annotation: Hit_ID=P30524; Match level="QueryCoverage=99%, HitCoverage=96%, E-value=0.0, Identity=90%"; Hit description=Glucose- 1-phosphate adenylyltransferase large subunit 1, chloroplastic/amylopl astic
  Pfam annotation: Domain name=NTP_transferase; Domain location=76-353; Score=420.3; E_value=3.1e-123; Accession=PF00483.15; Description =Nucleotidyl transferase
KSVSPVRRGSEGSGSERMRIGDCSSIRQNRALRRMCFGARGTASSAQCVLTSDAGPDTLVVRTSFRRNYADPNEVAAVILGGGTGTQLFPLTSTRATPAVPIGGCYRLIDIPMSNCFNSGINKIFVMTQFNSASLNRHIHRTYLGGGINFTDGSVEVLAATQMPGEAGWFQGTADAVRKFIWVLEDYYKHKAIEHILILSGDQLYRMDYMELVQKHVDDNADITLSCAPVGESRASDYGLVKFDSSGRVIQFSEKPKGADLEEMKVDTSFLNFAIDDPSKYPYIASMGVYVFKRDVLLNLLKSRYSQLHDFGSEILPKALHEHNVQAYVFTDYWEDIGTLRSFFDANMALCEQPPKFEFYDPKTPFFTSPRYLPPTKSDKSRIKDAIISHGCFLRECTIEHSIVGVRSRLNSGCELKNTMMMGADLYETEDEISRLLSEGKVPIGVGENTKISNCIIDMNARVGRNVSITNSEGVQEADRPEEGYYIRSGIVVILKNATIKDGTVI

SEQ ID NO: 68432 - protein, 62 aa, Setaria italica
  Transcript Sequence Number=SeqID_2458
HFVVSHNLLLIDTLGYVKLTLSCLLCFKIHLYGGVSIYIVVQNPDSLEAIQLYPEFPACLCI

SEQ ID NO: 68433 - protein, 156 aa, Setaria italica
  Transcript Sequence Number=SeqID_2459
  Gene Ontology: Mol. function=hydrolase activity, hydrolyzing O -glycosyl compounds; Cellular component=extracellular region; Biological process=cell wall organization and biogenesis
  Homolog annotation: Hit_ID=B6TRZ3; Match level="QueryCoverage=91%, HitCoverage=28%, E-value=1e-81, Identity=98%"; Hit description =Endoglucanase 1
  Pfam annotation: Domain name=Glyco_hydro_9; Domain location=1-156; Score=-212.6; E_value=6.6e-05; Accession=PF00759.11; Description =Glycosyl hydrolase family 9
NGGGGERGGGLGGDVAVFEFADKHRGPYSSSLHAAVCPCYCDYSGYQDELLWGAAWLHKASRRREYREYIKRNEVVLGASDAINEFGWDNKHAGINVLISKEVLMGKDEYFQSFRVNADNFMCTLLPGISNHPQIQYSPGGLLFKVGSSNMQHVTQ

SEQ ID NO: 68434 - protein, 70 aa, Setaria italica
  Transcript Sequence Number=SeqID_2460
  Subcellular localization annotation: CTP_CleavageSite=40; ConfidenceScore=5.28e-01
TLPGRRVQVQPPVHRRLSGGGGGRCFASFGRVVSWPRFVRIQAKFAVFFVPRFILISPCIFVFATGVQFI

SEQ ID NO: 68435 - protein, 89 aa, Setaria italica
  Transcript Sequence Number=SeqID_2461
  Subcellular localization annotation: CTP_CleavageSite=68; ConfidenceScore=5.87e-01
RHFGPSNHSAMAASALPSRTFHRLRLPSSATSHPSRETCLPSAVSRRRAAVQLLSAGFLTAVSPPPPSLAARRGRIVVPPEDYLTAPDG

SEQ ID NO: 68436 - protein, 115 aa, Setaria italica
  misc_feature (12)..(12): Xaa can be any naturally occurring amino acid
  Transcript Sequence Number=SeqID_2462
  Gene Ontology: Mol. function=hydrolase activity, acting on acid anhydrides, catalyzing transmembrane movement of substances; Cellular component=integral to membrane; Biological process =metabolic process
  Homolog annotation: Hit_ID=Q5SMI5; Match level="QueryCoverage=100%, HitCoverage=13%, E-value=5e-57, Identity=92%"; Hit description =Plasma membrane H+-ATPase
LYAARASRVENXQDAIDTCIVNMLADPKEARAGIQEVHFLPFNPVEKRTAITYVDGNGDWHRVSKGNPEQIIELCNMGADAEKKVHALIDGYADRGLRSLGVSYQQVPEKSKESA

SEQ ID NO: 68437 - protein, 83 aa, Setaria italica
  Transcript Sequence Number=SeqID_2463
  Gene Ontology: Mol. function=hydrolase activity, acting on glycosyl bonds; Cellular component=extracellular region; Biological process =metabolic process
  Homolog annotation: Hit_ID=Q0DCM5; Match level="QueryCoverage=100%, HitCoverage=18%, E-value=5e-32, Identity=79%"; Hit description =Mannan endo-1,4-beta-mannosidase 6
MGLTVCRTWAFSDGGPGALQISPGRFSEPVFQMLDYVIYEARRNHIRLILCLVNNLDNFGGKALRHARAQAAGANVTNSTDSF

SEQ ID NO: 68438 - protein, 97 aa, Setaria italica
  misc_feature (55)..(55): Xaa can be any naturally occurring amino acid
  Transcript Sequence Number=SeqID_2464
  Subcellular localization annotation: CTP_CleavageSite=61; ConfidenceScore=5.42e-01
RWKAARRASAPARASEAALPRPRAAPPPRRPRAPGPRPAAGGPPLRWPPPSSPPXPGGQPCAPSVTACASCWPPPVLCPPPPQPGDRQGTAPAKAGG

SEQ ID NO: 68439 - protein, 135 aa, Setaria italica
  Transcript Sequence Number=SeqID_2465
  Gene Ontology: Mol. function=nucleotide binding; Biological process =defense response
  Homolog annotation: Hit_ID=B9V0H2; Match level="QueryCoverage=94%, HitCoverage=9%, E-value=8e-16, Identity=36%"; Hit description=NBS -LRR disease resistance protein family-1
KLPALLQASVQGPVKRIKSFKDDLNYMKMTLESIEAAMADAEKRSINDETARLWLKRLKHAAYDISDMFDEFQHGSPQGKLQGPSWFKIMLSGDMAKKMKKMNKRLKQIKEQSKSYGIGWVSSEPKKDAVEEQET

SEQ ID NO: 68440 - protein, 432 aa, Setaria italica
  Transcript Sequence Number=SeqID_2466
  Gene Ontology: Mol. function=metal ion binding; Cellular component =nucleus
  Homolog annotation: Hit_ID=B9RUU8; Match level="QueryCoverage=96%, HitCoverage=19%, E-value=1e-72, Identity=40%"; Hit description=DNA binding protein, putative
  Pfam annotation: Domain name=FYRC; Domain location=23-83; Score=34.1; E_value=5.8e-07; Accession=PF05965.6; Description=FY rich C-terminus
GSGSQNTDGPCNLLARFCSSNGPRIPRFIEKEDDVESACALLKEWLYQDRIGFDLEFVQEIVESLPKSRACSNYQFLRDRTGFNSSLTIASGTLLAVNKSSPSNGDVMSYGRHGSIVTGPQDHAQPSSFSIRELPLGNPFSRKLPPELAGDVFQVLEFLGRFAEIIGLKELPSVEQVEDELINPWPICANQKDIQHYRDHTPPMNSPANVSTSYSNGESGLTTNEETASVFIPVETSTCEAAEDKLAAQTLGRCSGVVLPEIHLALLKVLFTELVPRVAIFVDPRIDSKESKSKRGRKRDTDTLTRELKIDMLTANKLTWPELARRYILVVSSLSGCMDLSDISSREGVKLFRCLQGDGGILCGALPGVVGMEKDALLLAEAETLICNSSANEGNKVFTMDYKDSDIVHSPEQPACDATLPDWVKSLEPVRN

SEQ ID NO: 68441 - protein, 204 aa, Setaria italica
  Transcript Sequence Number=SeqID_2467
  Gene Ontology: Mol. function=nucleic acid binding; Cellular component= chromatin; Biological process=chromatin assembly or disassembly
  Homolog annotation: Hit_ID=B9SCD7; Match level="QueryCoverage=98%, HitCoverage=8%, E-value=1e-92, Identity=81%"; Hit description =Chromodomain helicase DNA binding protein, putative
  Pfam annotation: Domain name=SNF2_N; Domain location=1-177; Score =84.8; E_value=3e-22; Accession=PF00176.15; Description=SNF2 family N- terminal domain
TTYEMVLVDAAYLRSVSWEVLIVDEGHRLKNSSSKLFSLLNSLSFQHRVLLTGTPLQNNIGEMYNLLNFLQPTSFPSLSSFEEKFNDLTTAEKVDELKKLVAPHMLRRLKKDAMQNIPPKTERMVPVELTSIQAEYYRAMLTKNYQVLRNIGKGGAHQSLLNIVMQLRKVCNHPYLIPGTEPESGTPEFLDEMRIKASAKVLNL

SEQ ID NO: 68442 - protein, 841 aa, Setaria italica
  misc_feature (512)..(512): Xaa can be any naturally occurring amino acid
  misc_feature (823)..(823): Xaa can be any naturally occurring amino acid
  Transcript Sequence Number=SeqID_2468
  Gene Ontology: Mol. function=nucleic acid binding; Cellular component= chromatin; Biological process=chromatin assembly or disassembly
  Homolog annotation: Hit_ID=B9N3S4; Match level="QueryCoverage=98%, HitCoverage=40%, E-value=1e-143, Identity=50%"; Hit description =Chromatin remodeling complex subunit
  Pfam annotation: Domain name=Chromo; Domain location=487-539; Score =19.2; E_value=0.0047; Accession=PF00385.16; Description='chromo' (CHRromatin Organisation MOdifier)
  Pfam annotation: Domain name=Chromo; Domain location=553-606; Score =35.0; E_value=3.1e-07; Accession=PF00385.16; Description='chromo' (CHRromatin Organisation MOdifier)
  Pfam annotation: Domain name=DEAD; Domain location=644-822; Score= -5.5; E_value=0.00011; Accession=PF00270.21; Description=DEADDEAH box helicase
  Pfam annotation: Domain name=PHD; Domain location=77-122; Score=69.5; E_value=1.3e-17; Accession=PF00628.21; Description=PHD-finger
  Pfam annotation: Domain name=ResIII; Domain location=640-816; Score= -22.0; E_value=0.0038; Accession=PF04851.7; Description=Type III restriction enzyme, res subunit
  Pfam annotation: Domain name=SNF2_N; Domain location=646-841; Score =91.1; E_value=3.9e-24; Accession=PF00176.15; Description=SNF2 family N-terminal domain
  Pfam module annotation: Pfam domain module=Chromo::Chromo::DEAD::PHD:: ResIII::SNF2_N; Domain location=487-539::553-606::644-822::77 -122::640-816::646-841
MKERSSLCDSAADGNWGLKYKRKRSKLTVSPSNDNEATSPTSDSPRSYGSTKKKLKHDANISPSAKKIRGHDGYFYECVVCDLGGNLLCCDSCPRVYHLECLNPPLKRPPPGKWQCPRCRPKKGSLKLIGNAEADTSKHERTTRMFTSTTSDSPPSHTKSSGGILKGGDPSLKKNEGEKKKTLILHLKKRSTKELSENAKPSTSEFVGEPSEEKIVKHGSVLKLKKHPPRMDSSPNKSKSRRQSSQRDSKRSGTKKLKYSTSDDDSVSSTEPSTSLDNSESPPKRKPSDGKTPSSSTKKGKKKVKFVEKKHPEEQSVVGDKITTPQEDQQVDRILGCRLQMDDMTPCASGGPETSHDMPNRDHDGTQSSSNGTAEEVCADESANHGDENHLPTLETQKETNSKSCKNKGPIKEEQVKKIVSGRSGDQTSIISDDRVVRENVAASINGEDETTSDIPAEKDGAKLPVSEADTMVQTKQEHTAESKLHGKIEELTGKDYNDVGYEFLIKWVGKXSNIHNSWVSESEVKILAKRKLENYKAKYGTSLINICKEQWCQPQRVIALRTSLDDVEEALIKWCGLPYDECTWERLDEPTVMKYSHLVTQFKNFESQALGKDVADDYANTRNRLELNVLVDQPKELQGGMLFPHQLEALNWLRKCWYKSKNVILADEMGLGKTVSACAFLSSLCCEFKINLPCLVLVPLSTMPNWMAEFASWAPHLNVVEYHGSARSRSIIRQYEWHAGDASQIGKTKRPYKFNVLLTTYEMVLVDAAYLRSVSWEVLIVDEGHRLKNSSSKLFSLLNSLSFQHRVFLTGTPLQNNIGEMXYNLLNFLQPTSFPSLSSF

SEQ ID NO: 68443 - protein, 166 aa, Setaria italica
  misc_feature (120)..(120): Xaa can be any naturally occurring amino acid
  misc_feature (157)..(157): Xaa can be any naturally occurring amino acid
  Transcript Sequence Number=SeqID_2469
  Gene Ontology: Mol. function=drug transporter activity; Cellular component=membrane; Biological process=multidrug transport
  Homolog annotation: Hit_ID=Q10A00; Match level="QueryCoverage=96%, HitCoverage=33%, E-value=4e-49, Identity=56%"; Hit description=MATE efflux family protein, expressed
  Pfam annotation: Domain name=MatE; Domain location=1-137; Score=72.3; E_value=1.7e-18; Accession=PF01554.10; Description=MatE
LKTSVLSICLNTGALLYMIPLGLTYSISTRVSNELGAGQHQAAKTATKVVMYMALSEGLVISLTMTLLRNVWGYMYSNENEIVTYIAKMLPILGISFFIDGLHSSLSGVLTGCGKQKVGXAVNLGAFYLLGIPMAVLLAFIFHLNGMGLWLGIVSGXVTKLLFLCL

SEQ ID NO: 68444 - protein, 152 aa, Setaria italica
  Transcript Sequence Number=SeqID_2470
  Gene Ontology: Mol. function=protein binding; Cellular component =extracellular space
  Homolog annotation: Hit_ID=B6TIS3; Match level="QueryCoverage=68%, HitCoverage=99%, E-value=4e-19, Identity=48%"; Hit description =Pollen-specific protein like
  Pfam annotation: Domain name=Rep_fac-A_3; Domain location=48-151; Score=99.0; E_value=1.6e-26; Accession=PF08661.3; Description =Replication factor A protein 3
  Subcellular localization annotation: CTP_CleavageSite=23; ConfidenceScore=5.22e-01
IPSASAHTRFPPNFRPQSLAPLTAAAAAAAARGDSFVQLPIRSPLSDMDPSELPAFANGEILKTMVGRRVRTVVQVQRNNGGVVVGQSTDGHQLTIRGAMDVPVSHFMEVFGTAESDQSICAEVCTDFGNNFDAESFNGLCNFANKVKELFQ

SEQ ID NO: 68445 - protein, 124 aa, Setaria italica
  Transcript Sequence Number=SeqID_2471
  Gene Ontology: Mol. function=zinc ion binding; Cellular component =intracellular
  Homolog annotation: Hit_ID=B6U831; Match level="QueryCoverage=98%, HitCoverage=52%, E-value=3e-28, Identity=60%"; Hit description=Zinc finger protein 7
  Pfam annotation: Domain name=zf-C2H2; Domain location=50-72; Score =19.9; E_value=0.011; Accession=PF00096.18; Description=Zinc finger, C2H2 type
  Subcellular localization annotation: CTP_CleavageSite=37; ConfidenceScore=5.28e-01
PSLDLSLTVAAAAAAESSTTDISNCNSNRGSGGAQAEAAAVAAREPSRVFTCNYCQRKFFSSQALGGHQNAHRRERTLARRALRLDAAAPYGYYADVASLPLYGSGLYPIGIQAHASPAARPED

SEQ ID NO: 68446 - protein, 58 aa, Setaria italica
  Transcript Sequence Number=SeqID_2472
YSPPSVAPLGTVSDKEPAHTSELPSSAEPRKEEANVAAGDQPNVRRGPETTGRHQIKA

SEQ ID NO: 68447 - protein, 412 aa, Setaria italica
  Transcript Sequence Number=SeqID_2473
  Gene Ontology: Mol. function=hydrolase activity, acting on carbon -nitrogen (but not peptide) bonds; Cellular component=cytoplasm; Biological process=nitrogen compound metabolic process
  Homolog annotation: Hit_ID=B4FSZ8; Match level="QueryCoverage=94%, HitCoverage=93%, E-value=0.0, Identity=94%"; Hit description=Beta -ureidopropionase
  Pfam annotation: Domain name=CN_hydrolase; Domain location=96-279; Score=205.2; E_value=1.8e-58; Accession=PF00795.14; Description =Carbon-nitrogen hydrolase
MASSNGKPAQGEEGRAAAEGSIGGYESLHRLLEANLSPELFQEASRLLLGLNCARPLEAISLPEATTTLAETHNFDVQAFRFSADKEFLRQPRVVRVGLIQNSIAVPTTYHFADQKKAIMDKIRHIVDAAGASGVNILCLQEAWTMPFAFCTREKRWCEFAEPVDGESTQFLQELAQKYNMVIVSPILERDVNHGETIWNTAVVIGNNGNIIGIHRKNHIPRVGDFNESTYYMEGNTGHPVFETAYGKIGVNICYGRHHPLNWLAFGLNGAEIVFNPSATVGELSEPMWPIEARNAAIANSYFVGSINRVGTEVFPNPFTSGDGKPQHADFGHFYGSSHFSAPDASCTPSLSRYRDGLIISDMDLNLCRQIKDKWAFRMTARYEMYASLLSEYLKPDFKPQVIVDPLINKRA

SEQ ID NO: 68448 - protein, 171 aa, Setaria italica
  Transcript Sequence Number=SeqID_2474
  Homolog annotation: Hit_ID=Q70KT5; Match level="QueryCoverage=85%, HitCoverage=57%, E-value=2e-16, Identity=35%"; Hit description=TA7 protein (Fragment)
YKDISYEDTTCSNYNAESQQISSINYASPHINTIEKENLQVEDLDGVSYKGPPVHAHEQDQDLQSISHAIVKNSCGHNINISSEMSHPKANTVITDQEETGSIMMIPSNSSSLLPKSSGEQMHLGDFLGVNDQVAKGEKDRWQFVGPLQPHCNPPEGITYDGLGDSEIRQP

SEQ ID NO: 68449 - protein, 38 aa, Setaria italica
  Transcript Sequence Number=SeqID_2475
STQHWITCRLTSGVLFYATKIIETRAINKSTILRCYEG

SEQ ID NO: 68450 - protein, 224 aa, Setaria italica
  misc_feature (59)..(59): Xaa can be any naturally occurring amino acid
  misc_feature (65)..(65): Xaa can be any naturally occurring amino acid
  misc_feature (80)..(80): Xaa can be any naturally occurring amino acid
  misc_feature (190)..(190): Xaa can be any naturally occurring amino acid
  Transcript Sequence Number=SeqID_2476
  Gene Ontology: Cellular component=plasma membrane
  Homolog annotation: Hit_ID=B4F9J2; Match level="QueryCoverage=83%, HitCoverage=34%, E-value=1e-90, Identity=86%"; Hit description=Lipid binding protein
  Pfam annotation: Domain name=C2; Domain location=155-222; Score=55.7; E_value=1.8e-13; Accession=PF00168.22; Description=C2 domain
LSSRRAGELPPNSGGGPSQWPNPGVEILESDDSAITMELELQWDGNPNIVLDIPKQTTXKFTLPXTGVLRLVFKPLVSEXPCFGAVCCSLREKSKVEFTLKVIGGEMTAIPGISDAIEGTIRDTIEDTLTWPNRVIVPIVPGDYSDLELKPVGVLEVKLVEARELKNKDLVGKSDPFAVLYIRPLREKTXKSKTINNDLNPIWNEHYEFIVRCCVDGFKQLTMI

SEQ ID NO: 68451 - protein, 139 aa, Setaria italica
  misc_feature (37)..(37): Xaa can be any naturally occurring amino acid
  misc_feature (57)..(57): Xaa can be any naturally occurring amino acid
  Transcript Sequence Number=SeqID_2477
  Gene Ontology: Cellular component=plasma membrane
  Homolog annotation: Hit_ID=B4F9J2; Match level="QueryCoverage=82%, HitCoverage=15%, E-value=6e-38, Identity=73%"; Hit description=Lipid binding protein
LHLSSKLTVQDLRKLIPPEFYPSWVSFTQKQKLSFCXFLPPTLMFFNTIDTDTLVFXSVQLKWLNQELVKIWPFVNEAASELIKTSVEPVFEQYKSFILASLHFSKLTLGTVAPQFTGTGHWAGLNQGASVSKSICTDF

SEQ ID NO: 68452 - protein, 562 aa, Setaria italica
  Transcript Sequence Number=SeqID_2478
  Gene Ontology: Cellular component=plasma membrane
  Homolog annotation: Hit_ID=B4F9J2; Match level="QueryCoverage=100%, HitCoverage=100%, E-value=0.0, Identity=91%"; Hit description=Lipid binding protein
  Pfam annotation: Domain name=C2; Domain location=264-348; Score =106.8; E_value=7.4e-29; Accession=PF00168.22; Description=C2 domain
  Pfam annotation: Domain name=C2; Domain location=435-517; Score =122.1; E_value=1.9e-33; Accession=PF00168.22; Description=C2 domain
  Pfam module annotation: Pfam domain module=C2::C2; Domain location =264-348::435-517
MAFLFGAFLGLMVGVAVVMAFARLENTRAEQRRELAAIIASFSKLTVQDLRKLIPPEFYPSWVSFTQKQKLKWLNQELVKIWPFVNEAASELIKTSVEPVFEQYKSFILASLHFSKLTLGTVAPQFTGVEILESDDSAITMELELQWDGNPNIVLDIQTTLGISLPVQVKNIGFTGVLRLVFKPLVSEFPCFGAVCCSLREKSKVEFTLKVIGGEMTAIPGISDAIEGTIRDTIEDTLTWPNRVIVPIVPGDYSDLELKPVGVLEVKLVEARELKNKDLVGKSDPFAVLYIRPLREKTKKSKTINNDLNPIWNEHYEFVVEDISTQHLTIKIYDDEGLQSSEIIGCARVDLADLLPGKVKDLWLDLVKDLEIERDKKPRGQVHLELLYYPYSKHEGVSNPFANQIQLTSLEKVLKTESNGYDINQRKNVIMRGVLSVTVVSAEDLPPMDIGGKADPFVVLYLKKGESKKKTRVVTDTLNPIWNQTFDFVVEDALHDLLMVEVWDHDTFGKDYIGRCILTLTRVLLEGEFQDTFFLQGAKSGRLNLHFKWTPQPIYRDRERDQ

SEQ ID NO: 68453 - protein, 329 aa, Setaria italica
  Transcript Sequence Number=SeqID_2479
  Gene Ontology: Mol. function=sugar:hydrogen symporter activity; Cellular component=endoplasmic reticulum membrane; Biological process=carbohydrate transport
  Homolog annotation: Hit_ID=B6TKZ4; Match level="QueryCoverage=100%, HitCoverage=91%, E-value=1e-163, Identity=90%"; Hit description =Solute carrier family 35 member B1
  Pfam annotation: Domain name=BCCT; Domain location=2-320; Score= -448.3; E_value=0.1; Accession=PF02028.9; Description=BCCT family transporter
  Pfam annotation: Domain name=TPT; Domain location=166-316; Score= -28.1; E_value=0.028; Accession=PF03151.8; Description=Triose -phosphate Transporter family
  Pfam annotation: Domain name=UAA; Domain location=5-322; Score=398.4; E_value=1.2e-116; Accession=PF08449.3; Description=UAA transporter family
  Pfam module annotation: Pfam domain module=BCCT::TPT::UAA; Domain location=2-320::166-316::5-322
RVAVLAFCVAGIWSAYIYQGVLQETLSTKRFGPEARRFEHLAFLNFAQNVMCFVWSFIMIKLWSGGSSSTGRAPLWKYWGVSVTNTIGPTMGIEALKYISYPAQVLAKSSKMIPVMLMGTLLYGVKYTFPEYLCTFLVAGGVSSFALLKTSSKTIKKLANPNAPLGYALCFLNLAFDGYTNSTQDLIKSRFPKTNPWDIMLGMNLWGTIYNALIMFVAPLLFSNWPYANGFEAVKFCQENPEVAWDIFLFCLCGAVGQNFIFLTISRFGSLTNTTITTTRKFMSIVVSSVISGNPLSLKQWGSVVMVFSGLSIQIFLKWKKKKGREHKE

SEQ ID NO: 68454 - protein, 111 aa, Setaria italica
  Transcript Sequence Number=SeqID_2480
TLSITLTSSVLEAFTWCVKEATVSIDSSGINAAFPCETNNSQKEEGGEILAVSGALNVASNSPRMLDAVRTHESEVENIEDKVPEVLSGNNASYVHGGKDDTAEVSENGNG

SEQ ID NO: 68455 - protein, 191 aa, Setaria italica
  Transcript Sequence Number=SeqID_2481
  Gene Ontology: Mol. function=nucleic acid binding
VNENKEKECRIPIEPSETVASFTHQVKASNTLEVSATESEQKESQVPIYSSSSEKIQCPEAPNTAEVAISKFVQSEAGKRSMDLSGKYVGTSDNSVCAPEYLLHDAKPALSKSDFSREVVNTYLQASRDIESTNLSSLDDDPMKDSSGAVNLDNGIGRNTVSQVAELTHLHRTHPSPDNNFSFLHSHDSPS

SEQ ID NO: 68456 - protein, 314 aa, Setaria italica
  Transcript Sequence Number=SeqID_2482
  Gene Ontology: Mol. function=transporter activity; Cellular component= mitochondrial inner membrane; Biological process=transport
  Homolog annotation: Hit_ID=B9S1F6; Match level="QueryCoverage=100%, HitCoverage=100%, E-value=1e-112, Identity=67%"; Hit description =Protein dif-1, putative
  Pfam annotation: Domain name=Mito_carr; Domain location=103-220; Score=91.2; E_value=3.6e-24; Accession=PF00153.19; Description =Mitochondrial carrier protein
  Pfam annotation: Domain name=Mito_carr; Domain location=229-314; Score=85.6; E_value=1.8e-22; Accession=PF00153.19; Description =Mitochondrial carrier protein
  Pfam annotation: Domain name=Mito_carr; Domain location=3-98; Score =86.1; E_value=1.3e-22; Accession=PF00153.19; Description =Mitochondrial carrier protein
  Pfam module annotation: Pfam domain module=Mito_carr::Mito_carr::Mito_ carr; Domain location=103-220::229-314::3-98
MGDVAKDLAAGTVGGAAQLVVGHPFDTIKVKLQSQPTPPPGRPPLYAGAGDAVRQTLAAEGARGLYKGMGAPLATVAAFNAVLFTIRGQMEAVLRSEPGVPLTVGQQVVAGAGAGVAVSFLACPTELIKCRLQAQSALAAAAPAAAAAGAGGAAAATVAAPAVAVKYGGPMEVARHVLRSEGGTRGLFKGLFPTLAREVPGNAIMFGMYEAIKQALAGGQDTSQLGRGSLILAGGLAGASFWGPVYPADVVKSVLQVDDYKNPKYSGSMDAFRKILAADGVKGLYKGFGPAMLRSMPANGACFLAYEVTRSALG

SEQ ID NO: 68457 - protein, 75 aa, Setaria italica
  misc_feature (62)..(62): Xaa can be any naturally occurring amino acid
  Transcript Sequence Number=SeqID_2483
  Gene Ontology: Mol. function=electron carrier activity; Cellular component=integral to membrane; Biological process=oxidation reduction
  Homolog annotation: Hit_ID=B2D0P0; Match level="QueryCoverage=92%, HitCoverage=8%, E-value=3e-33, Identity=95%"; Hit description =Respiratory burst oxidase-like protein J
  Pfam annotation: Domain name=NAD_binding_6; Domain location=1-75; Score=-20.3; E_value=0.0038; Accession=PF08030.4; Description=Ferric reductase NAD binding domain
KIWLLQNVIEMHNYLTSVYEEGDARSALIAMVQSLQHAKNGVDIVSGSRIRTHFARPNWRKXFSDLANAHRNSRI

SEQ ID NO: 68458 - protein, 217 aa, Setaria italica
  Transcript Sequence Number=SeqID_2484
  Gene Ontology: Mol. function=electron carrier activity; Cellular component=integral to membrane; Biological process=oxidation reduction
  Homolog annotation: Hit_ID=Q0MRQ8; Match level="QueryCoverage=100%, HitCoverage=25%, E-value=1e-113, Identity=89%"; Hit description =Respiratory burst oxidase protein A
  Pfam annotation: Domain name=NAD_binding_6; Domain location=33-200; Score=241.5; E_value=2.1e-69; Accession=PF08030.4; Description =Ferric reductase NAD binding domain
TTVVADAQIEDTRFPRVYIDGPYGAPAQNYKKYDILLLIGLGIGATPFISILKDMLNNLKSNEEVESIHGSEIGSFKNNGPGRAYFYWVTREQGSFEWFKGVMNDVAESDHSNVIEMHNYLTSVYEEGDARSALIAMVQSLQHAKNGVDIVSGSRIRTHFARPNWRKVFSDLANAHRNSRIGVFYCGSPTLTKQLKELSKEFSQTTTTRFHFHKENF

SEQ ID NO: 68459 - protein, 748 aa, Setaria italica
  Transcript Sequence Number=SeqID_2485
  Gene Ontology: Mol. function=electron carrier activity; Cellular component=integral to membrane; Biological process=oxidation reduction
  Homolog annotation: Hit_ID=Q0MRQ8; Match level="QueryCoverage=96%, HitCoverage=84%, E-value=0.0, Identity=89%"; Hit description =Respiratory burst oxidase protein A
  Pfam annotation: Domain name=FAD_binding_8; Domain location=498-622; Score=168.2; E_value=2.4e-47; Accession=PF08022.4; Description=FAD -binding domain
  Pfam annotation: Domain name=Ferric_reduct; Domain location=300-457; Score=150.7; E_value=4.5e-42; Accession=PF01794.11; Description =Ferric reductase like transmembrane component
  Pfam annotation: Domain name=NADPH_Ox; Domain location=41-142; Score =215.3; E_value=1.6e-61; Accession=PF08414.2; Description=Respiratory burst NADPH oxidase
  Pfam annotation: Domain name=NAD_binding_6; Domain location=628-748; Score=66.1; E_value=1.3e-16; Accession=PF08030.4; Description=Ferric reductase NAD binding domain
  Pfam annotation: Domain name=efhand; Domain location=143-171; Score =24.2; E_value=0.00054; Accession=PF00036.24; Description=EF hand
  Pfam annotation: Domain name=efhand; Domain location=187-215; Score =3.3; E_value=9.1; Accession=PF00036.24; Description=EF hand
  Pfam module annotation: Pfam domain module=FAD_binding_8::Ferric _reduct::NADPH_Ox::NAD_binding_6::efhand::efhand; Domain location=498- 622::300-457::41-142::628-748::143-171::187-215
  Subcellular localization annotation: CTP_CleavageSite=34; ConfidenceScore=5.02e-01
YFKFKLRYYWYCYLVFVRVRQFASRVSMKVPEGVAGMRPGRMTRMQSSAQMGLRGLRFLDKTSGGKEGWKAVERRFDEMTKGSGRLQKESFGKCIGMGDSKEFAGELFVSLARRRNVEPEDGITKEQLKEFWEEMTDQNFDSRLRIFFDMCDKNGDGMLTEDEVKEVIILSASANKLAKLKGHAATYASLIMEELDPDDRGYIEIWQLETLLRGMVSAQAPEKLKRTTSSLARTMIPSRYRSPLKRHLSKTADFIHENWKRIWLVTLWLVVNLALFVFKFEQYKRRTSFQVMGYCVCVAKGAAETLKLNMALILLPVCRNTLTTLRSTALNHVIPFDDNINFHKIMALSIAIATAIHTLAHVTCDFPRLTSYPMDKFMATLGSNFHYKQPTYSDLLQSIPGVTGILMIIIMSFSFTLATHSFRRSVVKLPSPLHHLAGFNAFWYAHHLLVLAYILLVVHSYFIFLTREWYKKTTWMYLIVPVLFYACERTIRKVRENNYRVSILKASIYPGNVLSIHMKKPPGFKYKSGMYLFVKCPDVSPFEWHPFSITSAPGDDYLSVHIRTLGDWTSELRNHFGKACEAQVTSKKATLTRLETTVVADAQIEDTRFPRVYIDGPYGAPAQNYKKYDILLLIGLGIGATPFISILKDMLNNLKSNEEVESIHGSEIGSFKNNGPGRAYFYWVTREQGSFEWFKGVMNDVAESDHSNVIEMHNYLTSVYEEGDARSALIAMVQSFNLQNNRQTLYRT

SEQ ID NO: 68460 - protein, 77 aa, Setaria italica
  Transcript Sequence Number=SeqID_2486
  Gene Ontology: Mol. function=protein serine/threonine kinase activity; Cellular component=beta-catenin destruction complex; Biological process=protein amino acid phosphorylation
  Homolog annotation: Hit_ID=Q39010; Match level="QueryCoverage=55%, HitCoverage=10%, E-value=1e-18, Identity=97%"; Hit description =Shaggy-related protein kinase zeta
LSSEEIANISYICSRYYRAPELIFGATEYTTSIDIWSAGCVLAELLLGQVSALVTHLYWLTSLKIFYIIAMRFLRQG

SEQ ID NO: 68461 - protein, 83 aa, Setaria italica
  Transcript Sequence Number=SeqID_2487
  Gene Ontology: Mol. function=protein serine/threonine kinase activity; Biological process=protein amino acid phosphorylation
  Homolog annotation: Hit_ID=B6THZ7; Match level="QueryCoverage=86%, HitCoverage=18%, E-value=4e-33, Identity=94%"; Hit description =Shaggy-related protein kinase eta
ADEKHVATVMGGNDAVTGHIISTTIGGKNGEPKRTISYMAERVVGTGSFGVVFQAKCIETGETVAIKKVLQDNTRNGQQKVVL

SEQ ID NO: 68462 - protein, 88 aa, Setaria italica
  Transcript Sequence Number=SeqID_2488
  Subcellular localization annotation: CTP_CleavageSite=13; ConfidenceScore=5.03e-01
FISPHQATADHPTAAARGPSNSIKLPADLRSPEDGVIRVSSAEFSTPKPEAQASAEPAEPTEEEVAEALYSHHRGHRRLPIFRDICPE

SEQ ID NO: 68463 - protein, 66 aa, Setaria italica
  Transcript Sequence Number=SeqID_2489
HEGNCHCTMEYFLELRYQVCKAQSLHQPINERKMAADSSTNSYQDSPPSNDKQNGSIADLLKYSII

SEQ ID NO: 68464 - protein, 139 aa, Setaria italica
  Transcript Sequence Number=SeqID_2490
  Gene Ontology: Mol. function=protein serine/threonine kinase activity; Biological process=protein amino acid phosphorylation
  Homolog annotation: Hit_ID=B6THZ7; Match level="QueryCoverage=100%, HitCoverage=34%, E-value=2e-75, Identity=95%"; Hit description =Shaggy-related protein kinase eta
PGESAVDQLVEIIKVLGTPTREEIRCMNPNYTEFKFPQIKACPWHKIFHKRMPPEAIDLVSRLLQYSPNLRCSALEACAHSLFDELREPHARLPNGRPFPPLFNFKQELANAPPELISKLLPEHARRHSGFNSLFGSGP

SEQ ID NO: 68465 - protein, 384 aa, Setaria italica
  Transcript Sequence Number=SeqID_2491
  Gene Ontology: Mol. function=protein serine/threonine kinase activity; Biological process=protein amino acid phosphorylation
  Homolog annotation: Hit_ID=B6THZ7; Match level="QueryCoverage=93%, HitCoverage=89%, E-value=0.0, Identity=96%"; Hit description=Shaggy -related protein kinase eta
  Pfam annotation: Domain name=Pkinase; Domain location=62-346; Score =312.5; E_value=9e-91; Accession=PF00069.17; Description=Protein kinase domain
  Pfam annotation: Domain name=Pkinase_Tyr; Domain location=62-326; Score=-8.8; E_value=3.9e-13; Accession=PF07714.9; Description =Protein tyrosine kinase
  Pfam module annotation: Pfam domain module=Pkinase::Pkinase_Tyr; Domain location=62-346::62-326
MATAPGGGPLPAADAMEVDPPRASADEKHVATVMGGNDAVTGHIISTTIGGKNGEPKRTISYMAERVVGTGSFGVVFQAKCIETGETVAIKKVLQDKRYKNRELQIMRSIDHCNVISLKHCFFSTTSRDELFLNLVMEFVPESLYRVLKHYKDMKQRMPLIYVKLYMYQIFRGLAYIHNAPGVCHRDIKPQNILVDPLSHQVKVCDFGSAKILVKGEANISYICSRYYRAPELIFGATEYTTSIDIWSAGCVLAELLLGQPLFPGESAVDQLVEIIKVLGTPTREEIRCMNPNYTEFKFPQIKACPWHKIFHKRMPPEAIDLVSRLLQYSPNLRCSALEACAHSLFDELREPHARLPNGRPFPPLFNFKQELAGRQTRNNNEQY

SEQ ID NO: 68466 - protein, 71 aa, Setaria italica
  Transcript Sequence Number=SeqID_2492
  Subcellular localization annotation: CTP_CleavageSite=40; ConfidenceScore=5.42e-01
MEAAAAAPHLLHCGGFGRVAHLPALPGRRRRRGQQLPRVRAVATEPKPSTSTSSSRPRTRNDLSNTTGWWG

SEQ ID NO: 68467 - protein, 86 aa, Setaria italica
  Transcript Sequence Number=SeqID_2493
  Gene Ontology: Mol. function=aspartyl esterase activity; Cellular component=cell wall; Biological process=cell wall modification
  Pfam annotation: Domain name=Pectinesterase; Domain location=1-70; Score=-159.0; E_value=1.5e-09; Accession=PF01095.11; Description =Pectinesterase
MESTIADFIKPEGYMPWNGDFGLKTLYYAEYNNRGPGAGTSQRVKWPGYRGVITRQEAEQFTAGPFIDGATWLKFTGTPNILGFKF

SEQ ID NO: 68468 - protein, 94 aa, Setaria italica
  misc_feature (14)..(14): Xaa can be any naturally occurring amino acid
  misc_feature (17)..(17): Xaa can be any naturally occurring amino acid
  Transcript Sequence Number=SeqID_2494
  Gene Ontology: Mol. function=binding; Cellular component=chloroplast
  Homolog annotation: Hit_ID=B9RW52; Match level="QueryCoverage=100%, HitCoverage=9%, E-value=8e-19, Identity=47%"; Hit description =Pentatricopeptide repeat-containing protein, putative
  Pfam annotation: Domain name=PPR; Domain location=29-63; Score=31.3; E_value=3.9e-06; Accession=PF01535.12; Description=PPR repeat
LLKEQKDWRRAVEXFYXFRRERGHELNVIHYNVVLCAVGRARRWDLVLSLWHEMHSCGVAPDNSTYGTLIDVCCKGGRERMTLLWLGDMCKRGL

SEQ ID NO: 68469 - protein, 50 aa, Setaria italica
  Transcript Sequence Number=SeqID_2495
YGLTSIRPPAHKHESTNSAVNFPNKLEITLVVAHKLQNPRTCQTASEPPS

SEQ ID NO: 68470 - protein, 276 aa, Setaria italica
  Transcript Sequence Number=SeqID_2496
IYKKVTAEMQECASAPLIDGQGTVCDASVLPEFYKILGVSSNKEQLQKITGAAENDGRIEEVVGTRSENSTGPGMMGRPFNAIEPGDTLNTSMKKLSSVPGHVECPSVSEQEEPDAASPGHDKLQDAVQTQPEDVVQDGVDAVQNQIFQENAKDPIENGPWQKPVATPAEDLLISSAGEITQRSVNSVTGEGNNTIGREESAGNEDLGNPVPNELSKRRKLTIPSHENSEFCLTIEATKMGTTKTDEKTDQNVRSGSGQLIAFTRRKRKALMQSSP

SEQ ID NO: 68471 - protein, 185 aa, Setaria italica
  Transcript Sequence Number=SeqID_2497
  Homolog annotation: Hit_ID=B5UA05; Match level="QueryCoverage=33%, HitCoverage=25%, E-value=4e-10, Identity=54%"; Hit description=Pi21 protein
CRAKISKVLNCLKEEFCIEKIEFEDKNKKVVVRGKFDAEKLCKKVWCKAGKFVKEIVIAEVWPMPPPPKPCKPCKEEPKSDPGKAAKPVKCDCDHCCKVKAEKCEPESCKPKTKSEQEKTKPPTAPKTEYKLVPYPYPYPLSYYPAMCPSWPRQCPPQQQCQGCQKPPPPPPPCSCSNHGSCGCH

SEQ ID NO: 68472 - protein, 382 aa, Setaria italica
  misc_feature (26)..(26): Xaa can be any naturally occurring amino acid
  misc_feature (40)..(40): Xaa can be any naturally occurring amino acid
  misc_feature (362)..(362): Xaa can be any naturally occurring amino acid
  Transcript Sequence Number=SeqID_2498
  Gene Ontology: Cellular component=vacuole; Biological process=protein localization
  Homolog annotation: Hit_ID=Q6K796; Match level="QueryCoverage=98%, HitCoverage=9%, E-value=0.0, Identity=86%"; Hit description=Vacuolar protein sorting 13C protein-like
VESLIKFTFQSYSVEDEDFEGHNYSXTGQLSAVRIVFLYXFVQEFTSYFMELATPHTEEAIKFIDKVGGFEWLIQKYEIDGASAIKLDLSLDTPIIIVPKNSQSEDYIQLDLGQLKVRNEFSWHGGEETDPSAVRLDVLHAEINGINMAVGVNGTLGKCMIRDGHGINIEVRRSLRDIFRKVPILSMKVQIGLLHAVMSDKEYNVITNCISTNLSETPNLPPSFRENVNRTKESIRLLADKVNLSNHPLLSRTVVVMTVDVQYALLELRNGPDAESPLAELAVEGLWVSYRTTSMLEMDLYLSILKFSIHDIRPDTKSEMRLMLGSYSETANLCTEDSSIDAGVSNLTMLILDYRWRSSFNXVIRIQQPRILVVLDFCFLLL

SEQ ID NO: 68473 - protein, 167 aa, Setaria italica
  Transcript Sequence Number=SeqID_2499
  Gene Ontology: Mol. function=protein serine/threonine kinase activity; Biological process=protein amino acid phosphorylation
  Homolog annotation: Hit_ID=Q8SAE5; Match level="QueryCoverage=100%, HitCoverage=35%, E-value=6e-58, Identity=63%"; Hit description =Ankyrin-kinase
  Pfam annotation: Domain name=Pkinase_Tyr; Domain location=53-167; Score=-148.9; E_value=0.00079; Accession=PF07714.9; Description =Protein tyrosine kinase
TAVADAKFYGHSRVYDLWKAQWCKNSENKRTPMMVSTPGEVPEYELNPGEVQFRRGHDVTPGMYHIAKWNGTKVSVKILDREGCSDQDAANSFRHELTVLEKVRHPNVVQFVGAVTQHIPMMIVSELHEEKDLTACIQKKGKLHGQKVLRYGLDIARGMAYLHQCKP

SEQ ID NO: 68474 - protein, 83 aa, Setaria italica
  Transcript Sequence Number=SeqID_2500
  Gene Ontology: Mol. function=structural constituent of ribosome; Cellular component=intracellular; Biological process=translation
  Homolog annotation: Hit_ID=Q10JD1; Match level="QueryCoverage=95%, HitCoverage=5%, E-value=1e-41, Identity=100%"; Hit description =Retrotransposon protein, putative, Ty1-copia subclass
  Pfam annotation: Domain name=Ribosomal_S19e; Domain location=1-83; Score=106.9; E_value=6.9e-29; Accession=PF01090.11; Description =Ribosomal protein S19e
IARKIYLRQGIGVGGFQKIYGGRQRNGSRPPHFCKSSGAISRNILQQLQKMGIIDVDPKGGRLITSQGRRDLDQVAGRVAVEA

SEQ ID NO: 68475 - protein, 145 aa, Setaria italica
  Transcript Sequence Number=SeqID_2501
  Gene Ontology: Mol. function=structural constituent of ribosome; Cellular component=ribonucleoprotein complex; Biological process =translation
  Homolog annotation: Hit_ID=Q10JD1; Match level="QueryCoverage=97%, HitCoverage=9%, E-value=5e-79, Identity=99%"; Hit description =Retrotransposon protein, putative, Ty1-copia subclass
  Pfam annotation: Domain name=Ribosomal_S19e; Domain location=7-145; Score=359.6; E_value=5.9e-105; Accession=PF01090.11; Description =Ribosomal protein S19e
MAASTARTVKDVNPHEFVKAYSAHLKRSGKMELPEWVDIVKTARFKELPPYDPDWYYTRAASIARKIYLRQGIGVGGFQKIYGGRQRNGSRPPHFCKSSGAISRNILQQLQKMGIIDVDPKGGRLITSQGRRDLDQVAGRVAVEA

SEQ ID NO: 68476 - protein, 215 aa, Setaria italica
  Transcript Sequence Number=SeqID_2502
  Homolog annotation: Hit_ID=B4G0U8; Match level="QueryCoverage=100%, HitCoverage=100%, E-value=1e-112, Identity=91%"; Hit description =Coiled-coil domain-containing protein 25
  Pfam annotation: Domain name=DUF814; Domain location=7-99; Score =106.2; E_value=1.1e-28; Accession=PF05670.5; Description=Domain of unknown function (DUF814)
MVFYFKARPEAGDYTIFMGLDKYENEDLIKYGFPEDIWFHVDKMSSAHVYVRLNKGQTMDDMSEGLLEDCAQLVKANSIQGNKVNNIDVVYTPWYNLKKTPSMDVGQVGFHNPKLVRTIKVEKRINEIVNRLNKTKVERKPDLKAEREAVSAAEKAERKAQLRDKKRREEMERLEKEKQAEIRSYKGLMVQEKMTSNKQIASGSKTLQELEEDFM

SEQ ID NO: 68477 - protein, 165 aa, Setaria italica
  Transcript Sequence Number=SeqID_2503
  Gene Ontology: Mol. function=receptor activity; Biological process =protein amino acid phosphorylation
  Pfam annotation: Domain name=LRR_1; Domain location=119-141; Score =14.3; E_value=0.51; Accession=PF00560.25; Description=Leucine Rich Repeat
  Pfam annotation: Domain name=LRR_1; Domain location=14-36; Score =14.7; E_value=0.39; Accession=PF00560.25; Description=Leucine Rich Repeat
  Pfam annotation: Domain name=LRR_1; Domain location=143-165; Score =22.7; E_value=0.0015; Accession=PF00560.25; Description=Leucine Rich Repeat
  Pfam annotation: Domain name=LRR_1; Domain location=38-60; Score =12.0; E_value=1.5; Accession=PF00560.25; Description=Leucine Rich Repeat
  Pfam annotation: Domain name=LRR_1; Domain location=95-117; Score =7.8; E_value=9.8; Accession=PF00560.25; Description=Leucine Rich Repeat
  Pfam module annotation: Pfam domain module=LRR_1::LRR_1::LRR_1::LRR _1::LRR_1; Domain location=119-141::14-36::143-165::38-60::95-117
ENNQIFVYKSYLKNLEMLLLHNNQLAGQIPAWIKSLKLLFHLDISENNLTGEIPADLTEMPMLTTENTATDLDERVFLLLVYRGTSFEYRVTTAFPKMLNLGRNNFTGVIPKEIGRLKSLAILNFSSNRLSGEIPSQLHSLTNLQVLDLSNNHLTGAIPVELNNL

SEQ ID NO: 68478 - protein, 72 aa, Setaria italica
  Transcript Sequence Number=SeqID_2504
  Gene Ontology: Mol. function=sequence-specific DNA binding; Cellular component=intracellular; Biological process=regulation of transcription, DNA-dependent
  Homolog annotation: Hit_ID=P25209; Match level="QueryCoverage=59%, HitCoverage=24%, E-value=4e-16, Identity=97%"; Hit description =Nuclear transcription factor Y subunit B
  Pfam annotation: Domain name=CBFD_NFYB_HMF; Domain location=1-51; Score=39.3; E_value=1.5e-08; Accession=PF00808.15; Description =Histone-like transcription factor (CBFNF-Y) and archaeal histone
ISRIMKKAIPANGMIAKDAKETVQECVSEFISFITSEASDKCQRRPCRSASRSSSPSSPARRATSATVSRPR

SEQ ID NO: 68479 - protein, 173 aa, Setaria italica
  misc_feature (26)..(26): Xaa can be any naturally occurring amino acid
  Transcript Sequence Number=SeqID_2505
  Gene Ontology: Mol. function=sequence-specific DNA binding; Cellular component=intracellular; Biological process=regulation of transcription, DNA-dependent
  Homolog annotation: Hit_ID=P25209; Match level="QueryCoverage=87%, HitCoverage=83%, E-value=6e-80, Identity=95%"; Hit description =Nuclear transcription factor Y subunit B
  Pfam annotation: Domain name=CBFD_NFYB_HMF; Domain location=29-94; Score=128.4; E_value=2.3e-35; Accession=PF00808.15; Description =Histone-like transcription factor (CBFNF-Y) and archaeal histone
TRRRVRHESGSPRGGGGGGGGGVREXQDRFLPIANISRIMKKAIPANGKIAKDAKETVQECVSEFISFITSEASDKCQREKRKTINGDDLLWAMATLGFEDYIEPLKVYLQKYREMEGDSKLTAKAGDGSIKKDVLGHGGASSSATQGMGQQGAYNQGMGYMQPQYHNGDISN

SEQ ID NO: 68480 - protein, 151 aa, Setaria italica
  Transcript Sequence Number=SeqID_2506
HIQFLLMKSAQVYEKLGSRSSSNRIIQNRTAHTPLAIPYRNHFALTDWSPSAKLSCGITPRPHHPRMETTEPRSHRGVGIGGTRPRWTPALAHSRSPALALHTHLYAQHSTDSPAHRSDQLQLTGGCCCCWTTAAAARRAARGGRRWRRRP

SEQ ID NO: 68481 - protein, 182 aa, Setaria italica
  misc_feature (11)..(11): Xaa can be any naturally occurring amino acid
  misc_feature (127)..(127): Xaa can be any naturally occurring amino acid
  Transcript Sequence Number=SeqID_2507
  Gene Ontology: Mol. function=binding
  Homolog annotation: Hit_ID=UPI0001A7B3D0; Match level="QueryCoverage =89%, HitCoverage=7%, E-value=3e-40, Identity=53%"; Hit description =binding
VFQYVLPYAKXLSKTGLVKLRRVLRAIRKHFPQPPYDLLVNNPIDNFLDGPDSCEKILSEICESNGSREAILNVLFPGERGYEAFKKLSTASSEPYSDVYGNLYYYIAQAEDISATDKHAGFVLKKXGEEFVEQSANIFKYDLLYNPLRFESWQKLSNLYDEEVDLLLNDGSKTIIKTILRN

SEQ ID NO: 68482 - protein, 72 aa, Setaria italica
  Transcript Sequence Number=SeqID_2508
CCSSQYHSQACYQTIPSTHVSLHYSKCPSKQHSIDLDCNSCIFVIQTVELQANFSSSFFCSPLERGQFQLNS

SEQ ID NO: 68483 - protein, 87 aa, Setaria italica
  Transcript Sequence Number=SeqID_2509
  Gene Ontology: Mol. function=protein serine/threonine kinase activity; Cellular component=integral to membrane; Biological process=protein amino acid phosphorylation
  Homolog annotation: Hit_ID=B9RXS7; Match level="QueryCoverage=96%, HitCoverage=20%, E-value=1e-14, Identity=50%"; Hit description =Serine/threonine-protein kinase PBS1, putative
NCAEPLKFSLTQLVDATNKFSDQNQIGQGSFGCVYKGQLHDGLVVAVKRCFHLPSSPNQLDVQDLEFQNEIYFLTKLQHTNIVKLLG

SEQ ID NO: 68484 - protein, 136 aa, Setaria italica
  Transcript Sequence Number=SeqID_2510
  Gene Ontology: Cellular component=integral to membrane; Biological process=peroxisome organization and biogenesis
  Homolog annotation: Hit_ID=B6TV18; Match level="QueryCoverage=83%, HitCoverage=47%, E-value=1e-31, Identity=64%"; Hit description =Peroxisomal biogenesis factor 11 family protein
  Pfam annotation: Domain name=PEX11; Domain location=25-136; Score= -45.0; E_value=0.00082; Accession=PF05648.6; Description=Peroxisomal biogenesis factor 11 (PEX11)
MASSSESSKPKPAPAPSRPPSRDFLAHLEAYLARRDGVDKLLKISRYSARLALSAGPPLPPSASARLKSFESSVGLSRKAFRLGKFVQSLNALRAHPHPPPALAVLACGGEGVYYFVEQFVWLAKAGLLPAHLLPR

SEQ ID NO: 68485 - protein, 149 aa, Setaria italica
  Transcript Sequence Number=SeqID_2511
  Subcellular localization annotation: CTP_CleavageSite=70; ConfidenceScore=5.76e-01
SDPSTPPSIRPPPPPRVAQRPSPTFQRSPPRRASPQSPPFPPRKRPWTGRGADSVGYSATPLSHSSARPSLEELSVGAPSAEPHSSPLLTPTPQHGPGSGRPAHRVTSPGVVVAPHALGRLTLPGACLPTGCERVGGREQGRRHEGRRG

SEQ ID NO: 68486 - protein, 107 aa, Setaria italica
  Transcript Sequence Number=SeqID_2512
KEATNQFQNSYMLHGIACPLYTSVNDGRMWRKILMLILQALKRIHRCKSVNQGFGCAPTLCAHGEIRLWKHHTYAESLNIKTKLLSLVVTLLHRLPVIYVHVSSLQL

SEQ ID NO: 68487 - protein, 72 aa, Setaria italica
  Transcript Sequence Number=SeqID_2513
  Subcellular localization annotation: CTP_CleavageSite=40; ConfidenceScore=5.64e-01
MAMAAPYRDPSALAPAPAPVAVVSPQFCAPRTVPLTVTKMAMSFSGGDFTVTGADGAVVLRVEGSVSASATD

SEQ ID NO: 68488 - protein, 81 aa, Setaria italica
  Transcript Sequence Number=SeqID_2514
RNRTYRVGTKKRNPSTNWHEKFVHIPSHPHQKEKKDFSVNTYSRAVGSTGPQQQPQPSSLQCRQRLLAASQKTRKPLLLAV

SEQ ID NO: 68489 - protein, 154 aa, Setaria italica
  Transcript Sequence Number=SeqID_2515
  Gene Ontology: Mol. function=DNA-directed DNA polymerase activity; Cellular component=zeta DNA polymerase complex; Biological process =nucleobase, nucleoside, nucleotide and nucleic acid metabolic process
  Homolog annotation: Hit_ID=B9FUS4; Match level="QueryCoverage=100%, HitCoverage=8%, E-value=6e-77, Identity=90%"; Hit description=DNA polymerase
RVESMLLRLAHTQNYLAISPGNQQVASQPAMECLPLVMEPESAFYPDPVVVLDFQSLYPSMIIAYNLCYSTCLGKVFPSKSNVLGVSSYSADPHTLVDLKNQLLLTPNGVLYVQPEIRKGVLPRLLEEILSTRIMVKQAMKKLGPSEQVLHRIF

SEQ ID NO: 68490 - protein, 64 aa, Setaria italica
  Transcript Sequence Number=SeqID_2516
VIDSEVVSVEPLRHGSGASSCSFCWPSISIGSTGSSSLPHPQIKNSPCLTVTGLEAGWSLRSRR

SEQ ID NO: 68491 - protein, 63 aa, Setaria italica
  Transcript Sequence Number=SeqID_2517
HLMTDGTRSRRCIAKGIYFHCQPGEIIIRWEKRYVLYPPRALPLLRCNTDTISISPNIHILVD

SEQ ID NO: 68492 - protein, 199 aa, Setaria italica
  Transcript Sequence Number=SeqID_2518
  Gene Ontology: Mol. function=6-phosphofructokinase activity; Cellular component=6-phosphofructokinase complex; Biological process=glycolysis
  Homolog annotation: Hit_ID=B6SKL0; Match level="QueryCoverage=100%, HitCoverage=37%, E-value=1e-111, Identity=95%"; Hit description =Pyrophosphate--fructose 6-phosphate 1-phosphotransferase
AHSAFHGIGLVKLMGRSSGFITMHASLSSGQVDVCLIPEVPFTLDGPNGVLRHLEHLIETKGFALVCVAEGAGQEYLQKSNATDASGNMVLSDIGVHLQQKIKSHFSNIGVHSDIKYIDPTYMLRAVRANASDAILCTVLGQNAVHGAFAGFSGITTGVCNTHNVYLPIPEVIKSARFVDPNSRMWHRCLTSTGQPDFH

SEQ ID NO: 68493 - protein, 248 aa, Setaria italica
  Transcript Sequence Number=SeqID_2519
  Gene Ontology: Mol. function=aspartic-type endopeptidase activity; Cellular component=cell wall; Biological process=proteolysis
  Homolog annotation: Hit_ID=B6TDX6; Match level="QueryCoverage=100%, HitCoverage=54%, E-value=1e-121, Identity=87%"; Hit description =Aspartic proteinase nepenthesin-1
LAVANDVVKAYTFGCLQRATGTAAPPQGLLGLGRGPLSFLSQTKDIYGATFSYCLPSFKSMNFSGTLRLGRNGQPQRIKTTPLLANPHRSSLYYVNMTGIRVGRKVVPIPAAALAFDPATGAGTVLDSGTMFTRLVAPAYAAVRDEVRRRVGAPVSSLGGFDTCFNDPAVKWPAVTLLFDGMQVTLPEENVVIHSTYGTTSCLAMAAAPDGVNTVLNVIASMQQQNHRVLFDVPNGRVGFARERCTAA

SEQ ID NO: 68494 - protein, 329 aa, Setaria italica
  misc_feature (19)..(19): Xaa can be any naturally occurring amino acid
  Transcript Sequence Number=SeqID_2520
  Gene Ontology: Mol. function=Rab GTPase activator activity; Cellular component=intracellular; Biological process=regulation of Rab GTPase activity
  Homolog annotation: Hit_ID=A0B9X8; Match level="QueryCoverage=99%, HitCoverage=72%, E-value=1e-138, Identity=71%"; Hit description =OSIGBa0135C09.4 protein
  Pfam annotation: Domain name=TBC; Domain location=61-296; Score=3.9; E_value=7.7e-08; Accession=PF00566.10; Description=TBC domain
CLGVPDGGAGVRPVVWKCXLLLGYLPTDRGLWPYELEKKRSQYSAYKEEFLLNPSEKLRRIEESKLSRKKELNIERIGLLPRLEVTNEEHPLSSGKSSLWNQYFQESEILEQIDRDVKRTHPDISFFSAKSNQESLRCILIIFSKLNPRIRYVQGMNEVLAPLFYVFKNDPDPSSSASAEADTYFCFVELLSGFKDNYCKHLDNSSVGIRSTLSKLSQLLKRHDEELWRHMEVTTKVYPQYYAFRWITLLLTMEFSFNVCIHIWDAILGDPEGPPDTLMRICCAMLILVRKRLLAGDFTANIQLLQHYPATNIDHLLHIANRLRGTVAS

SEQ ID NO: 68495 - protein, 101 aa, Setaria italica
  Transcript Sequence Number=SeqID_2521
VSCVCLVCTLKLYFTRICSDFFCFGSFSWTSYLASSVEELCGKKSVQHCSVQYKARYRALPLSGKLSCSEMGVVVYNVCYRYAPSLSFVPQVVGTPPVLFL

SEQ ID NO: 68496 - protein, 179 aa, Setaria italica
  Transcript Sequence Number=SeqID_2522
  Gene Ontology: Mol. function=metal ion binding; Cellular component =integral to membrane; Biological process=ubiquitin-dependent protein catabolic process
  Homolog annotation: Hit_ID=Q8GT74; Match level="QueryCoverage=94%, HitCoverage=70%, E-value=2e-42, Identity=45%"; Hit description=RING -H2 finger protein ATL2B
  Pfam annotation: Domain name=zf-C3HC4; Domain location=127-168; Score= 28.3; E_value=3.2e-05; Accession=PF00097.17; Description=Zinc finger, C3HC4 type (RING finger)
MGRSTESGMLRGAGVGAVSGAVFSIEAVESCIEIWRSSHSGKYSILFVLDIISSLFSGRIVWEKVSPALQRAVQSQMSLLSTPFMDNNDLFETGSTGGMSRELIDRIPKMRFVAASNCNQETDSSCCSVCLQDFGAQQFVRALPQCQHVFHVRCIDNWLLRQASCPLCRSGVHIDDIHM

SEQ ID NO: 68497 - protein, 131 aa, Setaria italica
  misc_feature (122)..(122): Xaa can be any naturally occurring amino acid
  Transcript Sequence Number=SeqID_2523
  Gene Ontology: Mol. function=endonuclease activity; Cellular component=integral to membrane
  Homolog annotation: Hit_ID=Q33A97; Match level="QueryCoverage=100%, HitCoverage=43%, E-value=1e-49, Identity=74%"; Hit description =Endonuclease/exonuclease/phosphatase family protein, putative, expressed
  Pfam annotation: Domain name=efhand; Domain location=28-56; Score =29.3; E_value=1.6e-05; Accession=PF00036.24; Description=EF hand
DDHITYSSFYQALSQLGMVHADRLNSEEIEDLWGEADRDGDGVIDYKEFQCIWSPNCCSQEEDDTEIDITDERIDTFEANDGAFGFTVKEAVLFPPEVERGMWPENYSLSDHAPLTVVFSPXRMPCSPRTP

SEQ ID NO: 68498 - protein, 184 aa, Setaria italica
  misc_feature (22)..(22): Xaa can be any naturally occurring amino acid
  misc_feature (34)..(34): Xaa can be any naturally occurring amino acid
  misc_feature (90)..(90): Xaa can be any naturally occurring amino acid
  Transcript Sequence Number=SeqID_2524
  Gene Ontology: Mol. function=endonuclease activity; Cellular component=integral to membrane
  Homolog annotation: Hit_ID=Q33A97; Match level="QueryCoverage=99%, HitCoverage=60%, E-value=5e-74, Identity=76%"; Hit description =Endonuclease/exonuclease/phosphatase family protein, putative, expressed
IWLLNPDKCRKPLKTSWNEAVXGIIKYLLLQVAXLSEENAFALLKADSPDDHITYSSFYQALSQLGMVHADRLNSEEIEDLWGEADRDGXEYMDNKVSNSCIWSPNCCSQEEDDTEIDITDERIDTFEANDGAFGFTVKEAVLFPPEVERGMWPENYSLSDHAPLTVVFSPVRMPCSPRTPGTL

SEQ ID NO: 68499 - protein, 90 aa, Setaria italica
  Transcript Sequence Number=SeqID_2525
  Homolog annotation: Hit_ID=B6T3I5; Match level="QueryCoverage=81%, HitCoverage=19%, E-value=7e-15, Identity=72%"; Hit description =Glioma tumor suppressor-like protein
MGKASKGSRKGKKAWRANISTDDIGDFFEKQTRDAHAGAAAIPSLPSDSLFYVDKPAASTSAAGASDTTTKDIPAKRKIEKKREKVLYHE

SEQ ID NO: 68500 - protein, 81 aa, Setaria italica
  Transcript Sequence Number=SeqID_2526
EELRVFLILYWAQEKGFFCLFLVSILLFLYRSKNHFSSYLFCQRLLVILYSGLSFGLPLFRFGRGSGQTEGKKVWRGTNLF

SEQ ID NO: 68501 - protein, 307 aa, Setaria italica
  misc_feature (84)..(84): Xaa can be any naturally occurring amino acid
  misc_feature (265)..(265): Xaa can be any naturally occurring amino acid
  Transcript Sequence Number=SeqID_2527
  Gene Ontology: Mol. function=cation transmembrane transporter activity; Cellular component=membrane; Biological process=cation transport
  Homolog annotation: Hit_ID=A4ZUV2; Match level="QueryCoverage=88%, HitCoverage=68%, E-value=1e-118, Identity=75%"; Hit description =Metal tolerance protein
  Pfam annotation: Domain name=Cation_efflux; Domain location=121-307; Score=-6.2; E_value=1.2e-08; Accession=PF01545.13; Description =Cation efflux family
AWGGGGGRWRRGEELLLLSAVEAGNGGGGAHAAAEESWRLNFEGFRPPEAHQQERPPTGALHHCLGVLAQGPEDVVAEYYQQQXEMLEGFNEMDTLTDRGFLPGMSKEEREKVARSETLAIRLSNFANMVLFAAKVYASVRSGSLAIIASTLDSLLDLLSGFILWFTAFSMQTPNPYRYPIGKKRMQPLGILVFASVMATLGLQIILESVRSLVSDGDEFSLTSQQEKWVVDIMLSVTLVKLALVIYCRSFTNEIVKAYAQDHFXDVITNVIGLVAALLANYIDGWIDPVGAIILAIYTIRTWSMTV

SEQ ID NO: 68502 - protein, 237 aa, Setaria italica
  Transcript Sequence Number=SeqID_2528
  Gene Ontology: Mol. function=cation transmembrane transporter activity; Cellular component=membrane; Biological process=cation transport
  Homolog annotation: Hit_ID=A4ZUV2; Match level="QueryCoverage=92%, HitCoverage=55%, E-value=1e-107, Identity=83%"; Hit description =Metal tolerance protein
  Pfam annotation: Domain name=Cation_efflux; Domain location=1-228; Score=79.0; E_value=1.7e-20; Accession=PF01545.13; Description =Cation efflux family
ILQLFFTLLFIVIFFSGNTVFASVMATLGLQIILESVRSLVSDGDEFSLTSQQEKWVVDIMLSVTLVKLALVIYCRSFTNEIVKAYAQDHFFDVITNVIGLVAALLANYIDGWIDPVGAIILAIYTIRTWSMTVLENVHSLVGQSASPEYLQKLTYLCWNHHKAVRHIDTVRAYTFGSHYFVEVDIVLPSDMPLREAHDIGEALQEKLERLPEIERAFVHLDYEFTHRPEHALSHEN

SEQ ID NO: 68503 - protein, 207 aa, Setaria italica
  Transcript Sequence Number=SeqID_2529
  Gene Ontology: Mol. function=transferase activity, transferring groups other than amino-acyl groups
  Homolog annotation: Hit_ID=B6TXA0; Match level="QueryCoverage=99%, HitCoverage=47%, E-value=4e-74, Identity=70%"; Hit description =Anthranilate N-benzoyltransferase protein 1
  Pfam annotation: Domain name=Transferase; Domain location=1-206; Score=-167.7; E_value=0.0091; Accession=PF02458.7; Description =Transferase family
SPFFEPARLRDALARALVPFYPLAGRLAAGPGGRIEIDCTGEGALFAVARADFAGDEVFRDFEPSPEARRLLVPFAESGEPPCVLAMVQITFLKCGGVTVGTGMHHVTMDGAGAFQFIRTWTALARGESPPTVPPFHDRTLLRSRSPPHVPFEHPVYSPCYLNGAPRPFVTRVYAVPPKLLADIRSQCAPGASTYCAVTAHLWRAMC

SEQ ID NO: 68504 - protein, 35 aa, Setaria italica
  Transcript Sequence Number=SeqID_2530
MGGTLEYLSDLLGGGGGSRRRYKKRKQFQTVELEG

SEQ ID NO: 68505 - protein, 157 aa, Setaria italica
  Transcript Sequence Number=SeqID_2531
  Gene Ontology: Mol. function=heat shock protein binding
  Homolog annotation: Hit_ID=B6TYB9; Match level="QueryCoverage=84%, HitCoverage=33%, E-value=2e-46, Identity=67%"; Hit description=Heat shock protein binding protein
TLVGRALKCPNEGCRRGFVAAEIPTAPTIVPGTEMYQCAWGFFPLGFPNAADMGGNWKPFYKMFPWNTAPSGEGSGGRSQGNRGGRQPQTGSARGGSSRGRIKKTTARKKVGAGLRRRSFGGGVESGIDSTMLGQEGWAGDEDGGDGRAEEGRGINI

SEQ ID NO: 68506 - protein, 161 aa, Setaria italica
  Transcript Sequence Number=SeqID_2532
  Gene Ontology: Mol. function=aspartyl esterase activity; Cellular component=cell wall; Biological process=cell wall modification
  Pfam annotation: Domain name=Pectinesterase; Domain location=2-161; Score=-239.7; E_value=0.0021; Accession=PF01095.11; Description =Pectinesterase
CTIDGGQGVRYDQSGLHYFKSSVIKGTIDFIFGSAKSFYEDCSIVSVNKEITTLPMAPLQQQQRDKTIKAAPGESGFSFKTCTFKGDGQNIYLGRVGTPFVFSYSQIDKELMAIISDGGRVQLAERIGSTYYADFKSYGPGLAKMLTKDLTYAEAKPFLGV

SEQ ID NO: 68507 - protein, 74 aa, Setaria italica
  Transcript Sequence Number=SeqID_2533
  Subcellular localization annotation: CTP_CleavageSite=42; ConfidenceScore=5.60e-01
GRRSHRARPPPCRAPRRRRPPPSRPARGPWRPRTCRARGGARARRRTGGRRPPPRPPPGPACPRRLPPRSSPRT

SEQ ID NO: 68508 - protein, 139 aa, Setaria italica
  misc_feature (45)..(45): Xaa can be any naturally occurring amino acid
  misc_feature (67)..(67): Xaa can be any naturally occurring amino acid
  misc_feature (86)..(86): Xaa can be any naturally occurring amino acid
  misc_feature (97)..(97): Xaa can be any naturally occurring amino acid
  misc_feature (117)..(117): Xaa can be any naturally occurring amino acid
  Transcript Sequence Number=SeqID_2534
  Gene Ontology: Mol. function=protein dimerization activity
  Pfam annotation: Domain name=hATC; Domain location=40-131; Score= -4.1; E_value=0.099; Accession=PF05699.6; Description=hAT family dimerisation domain
MMSKKLLFMMCKNLWMKLIFWLRCKNFVETFSHDNSFDVKINDYXSELKMLQVTLLDSLMSALEILXFVIAAYCYPNVSVVYQILXLTVVVTVASAXRSFSKIEFVEELFEMNCHNXKLNGLTTCTIKRDILNTVDLNT

SEQ ID NO: 68509 - protein, 129 aa, Setaria italica
  Transcript Sequence Number=SeqID_2535
  Homolog annotation: Hit_ID=UPI0001A8937A; Match level="QueryCoverage =100%, HitCoverage=18%, E-value=1e-51, Identity=75%"; Hit description= integral membrane single C2 domain protein
MDITEVTVVHHAALVLAALWAAASAGWAHPALFLVALLYIFAVNERYTMRLRRRLQYEERKCSNQRKLLSDAETVRWLNYAVEKIWPVCMERVASQQFLLPIFPWFLEKFQPWTYRKAVIQSLYLGRNP

SEQ ID NO: 68510 - protein, 117 aa, Setaria italica
  Transcript Sequence Number=SeqID_2536
KNWLESPRAAVVRIEVLVVIVSTSMVFLAAIGSLRRQRRNFVTQKLVLAAYLSSSLVTYTLGSMQSSLVKSTMYPFWAVSLYILSCSADSITAYSLDDNSRGMERIYQSFLSMFMWV

SEQ ID NO: 68511 - protein, 160 aa, Setaria italica
  misc_feature (82)..(82): Xaa can be any naturally occurring amino acid
  Transcript Sequence Number=SeqID_2537
  Gene Ontology: Mol. function=oxidoreductase activity, acting on NADH or NADPH, quinone or similar compound as acceptor; Cellular component=integral to membrane; Biological process=ATP synthesis coupled electron transport
  Homolog annotation: Hit_ID=P0C325; Match level="QueryCoverage=99%, HitCoverage=31%, E-value=1e-70, Identity=87%"; Hit description =NAD(P)H-quinone oxidoreductase chain 4, chloroplastic
LDFHWRLGIDGLSLGSILLTGFITTLATLAAWPVTRNSRLFYFLMLAMYSGQIGLFSSRDLLLFFIMWELELIPVYLLLSMXWGGKRRLYSATKFILYTAGGSIFFLIGVLGMGLYGSNEPGLDLERLINQSYPATLEILLYFGFLIAYAVKLPIIPLHT

SEQ ID NO: 68512 - protein, 48 aa, Setaria italica
  Transcript Sequence Number=SeqID_2538
GYHTKMKLLVMPFMFIYDDILYTTYITHVYYPYNREKVLVVYELILTV

SEQ ID NO: 68513 - protein, 52 aa, Setaria italica
  misc_feature (40)..(40): Xaa can be any naturally occurring amino acid
  Transcript Sequence Number=SeqID_2539
PGSDVQSLVLEIITTFYLMFVISGVATDNRAIGELAGLAXGATILLNVLIAG

SEQ ID NO: 68514 - protein, 281 aa, Setaria italica
  Transcript Sequence Number=SeqID_2540
  Gene Ontology: Mol. function=transporter activity; Cellular component= integral to membrane; Biological process=transport
  Homolog annotation: Hit_ID=Q9ATN4; Match level="QueryCoverage=92%, HitCoverage=92%, E-value=1e-121, Identity=85%"; Hit description =Aquaporin NIP1-1
  Pfam annotation: Domain name=MIP; Domain location=33-247; Score =268.1; E_value=2e-77; Accession=PF00230.12; Description=Major intrinsic protein
MAGGGDNSTNGARDQRAMEEGRKEEFATDQGCAALSVPFIQKIIAEIFGTYFLIFAGCGAVTINASRNGQITFPGVAIVWGLAVMVMVYAVGHISGAHFNPAVTFAFATCGRFPWRQLPAYVLAQMLGATLASGTLRLMFGGRHEHFPGTLPTGSDVQSLVLEIITTFYLMFVISGVATDNRAIGELAGLAVGATILLNVLIAGPVSGASMNPARSVGPALVSGQYRSIWVYVVGPVVGAVAGAWAYNLIRFTNKPLRDDHPVHALEEGGALGDLAEGRVG

SEQ ID NO: 68515 - protein, 420 aa, Setaria italica
  misc_feature (17)..(17): Xaa can be any naturally occurring amino acid
  Transcript Sequence Number=SeqID_2541
  Gene Ontology: Mol. function=acyl carrier activity; Cellular component=chloroplast; Biological process=fatty acid biosynthetic process
  Homolog annotation: Hit_ID=Q39514; Match level="QueryCoverage=86%, HitCoverage=85%, E-value=1e-106, Identity=56%"; Hit description=FatB2
  Pfam annotation: Domain name=Acyl-ACP_TE; Domain location=134-402; Score=516.6; E_value=3.2e-152; Accession=PF01643.9; Description=Acyl- ACP thioesterase
  Subcellular localization annotation: CTP_CleavageSite=66; ConfidenceScore=5.17e-01
SAFFPCPGASPAAAAKXSKNMAGELPETLSVRGIVAKPGAPSGNMQVKAQAQALPKVNGTKVNLKNASADKEEVIPYSAPKTFYNQLPDWSMLLAAVTTIFLAAEKQWTLLDWKPKKPDMLVDTFGFGRIIQDGLVFRQNFLIRSYEIGADRTASIETLMNHLQETALNHVKTAGLLGDGFGATPEMSKRNLIWVVSKIQLLVEQYPSWGDMVQVDTWVAAAGKNGMRRDWHVRDYNSGRTILRATSVWVMMNKNTRRLSKMPDEVRAEIGPYFNGRTAISEDQSEKLAKPGSASDGDAAKQFMRKGLTPRWGDLDVNQHVNNVKYIGWILESAPISILEKHELASMTLDYRKECGRDSILQSLTTVAGECVDGADSTIQCDHLLQLESGADIVKAHTEWRPKRVHGGEGNMGFFPAESA

SEQ ID NO: 68516 - protein, 122 aa, Setaria italica
  Transcript Sequence Number=SeqID_2542
HLYLTLCANSYAHVWHAADYPQLVLRNGQRNHTSLHRPCRLHSMDLTSLLSVNQPELLSSYHPGDAQTPEIVMNKKPGIDFARVLLKLLNFDVPPLQCQPHQRTKDIAVMLSSTIVTLPLAS

SEQ ID NO: 68517 - protein, 553 aa, Setaria italica
  misc_feature (7)..(7): Xaa can be any naturally occurring amino acid
  Transcript Sequence Number=SeqID_2543
  Gene Ontology: Mol. function=hydrolase activity, acting on glycosyl bonds; Cellular component=beta-galactosidase complex; Biological process=carbohydrate metabolic process
  Homolog annotation: Hit_ID=Q8W0A1; Match level="QueryCoverage=99%, HitCoverage=66%, E-value=0.0, Identity=89%"; Hit description=Beta -galactosidase 2
  Pfam annotation: Domain name=Gal_Lectin; Domain location=475-552; Score=144.8; E_value=2.6e-40; Accession=PF02140.10; Description =Galactose binding lectin domain
VFAKFIXKGGSFVNYYMYHGGTNFGRTAGGPFIATSYDYDAPIDEYGLLREPKWGHLRELHKAIKLCEPALVAGDPIVTSLGNAQQASVFRSSTGACVAFLENNDKVSYARVAFNGMHYGLPPWSISILPDCKTTVYNTARVGSQISQMKMEWAGALTWQSYNEDINSLGEESFMTIGLLEQINVTRDKTDYLWYTTYVEIAQDEQFLSNGKNPTLTVMSAGHALHIFINGQLTGTVYGNVEDPRLTYRGSVKLWPGSNTVSCLSIAVGLPNVGEHFETWNAGILGPVTLDGLNEGRRDLTWQKWTYQVGLKGETLSLHSLSGSSSVEWGEPVQKQPLTWYKAFFNAPDGDEPLALDMSSMGKGQIWINGQGIGRYWPGYKASGTCGNCDYRGEYDEKKCQTNCGDSSQRWYHVPRSWLNPTGNLLVIFEEWGGDPTGISMVKRTTGSICADVSEWQPSMKSWHTKDYEKAKVHLQCDHGRKITEIKFASFGTPQGSCGSYSEGTCHAHKSYDIFWKNCIGQERCGVSVVPDVFGGDPCPGTMKRAVVEAICG

SEQ ID NO: 68518 - protein, 202 aa, Setaria italica
  misc_feature (176)..(176): Xaa can be any naturally occurring amino acid
  misc_feature (189)..(189): Xaa can be any naturally occurring amino acid
  misc_feature (194)..(194): Xaa can be any naturally occurring amino acid
  Transcript Sequence Number=SeqID_2544
  Gene Ontology: Mol. function=RNA binding
  Homolog annotation: Hit_ID=B9SKB5; Match level="QueryCoverage=100%, HitCoverage=69%, E-value=2e-52, Identity=56%"; Hit description =Nucleic acid binding protein, putative
  Subcellular localization annotation: CTP_CleavageSite=39; ConfidenceScore=5.01e-01
MDERIPPPPFFQHSPSGVHSSPHRHNPMWSSSSDRERYLAELLAERQKLAPFVQVLPFCTRLLNQEILRASSLPPNQNFIEPERIDHGSPLRLAGQSMNGQAMDLDGWSGMQTEHLGVLQSPSMVWNGTPGVVGSPVVKKVVRIDVPVDKYPNYNFVGRLLGPRGNSLKRVETSYXCRVYIRGRGSVKXSVKEXLRDKPGYE

SEQ ID NO: 68519 - protein, 85 aa, Setaria italica
  Transcript Sequence Number=SeqID_2545
  Gene Ontology: Mol. function=catalytic activity; Biological process =metabolic process
  Homolog annotation: Hit_ID=Q01HQ1; Match level="QueryCoverage=75%, HitCoverage=31%, E-value=3e-27, Identity=90%"; Hit description =OSIGBa0115K01-H0319F09.1 protein
GTGLEEALRRAGAEEVVVCGVMTNLCCETTARDAFVRGFRVFFSADATATASRDLHEATLANMAYGFAYIVDCMRFEAALGKVAK

SEQ ID NO: 68520 - protein, 77 aa, Setaria italica
  Transcript Sequence Number=SeqID_2546
KIVALCYTHAGEKLIRWCNTIDKIKLVQLGREYPIHRMIGVCVSKESYHTIANTIRACLLAVRVSCSKLLDSQISRP

SEQ ID NO: 68521 - protein, 216 aa, Setaria italica
  Transcript Sequence Number=SeqID_2547
  Gene Ontology: Mol. function=5'-3' exonuclease activity; Cellular component=nucleus; Biological process=nucleobase, nucleoside, nucleotide and nucleic acid metabolic process
  Homolog annotation: Hit_ID=B6U7X8; Match level="QueryCoverage=100%, HitCoverage=62%, E-value=1e-111, Identity=88%"; Hit description=DNA polymerase I
  Pfam annotation: Domain name=5_3_exonuc; Domain location=97-204; Score=32.2; E_value=2.3e-07; Accession=PF01367.12; Description=5'-3' exonuclease, C-terminal SAM fold
  Pfam annotation: Domain name=5_3_exonuc_N; Domain location=1-95; Score=-47.9; E_value=5e-06; Accession=PF02739.8; Description=5'-3' exonuclease, N-terminal resolvase-like domain
  Pfam module annotation: Pfam domain module=5_3_exonuc::5_3_exonuc_N; Domain location=97-204::1-95
YKAHRARGAGTGADSRVVDVLRECNVPVVRVDGYEADDVVATLTEQVLQKGYRVVIASPDKDFKQLISDDVQLVMPIPEIGRWSFYTLRHYVAQYKCDPTADLSLRCFMGDEADGVPGIQHLVPGFGRKTAVKLLQKHGSLENLLKTAAVRTVAKDYAQDALTKHADYLRKNYEVLSLKRDVNVQLDDSWLSARNTCNDTSVLSDFILKFSNEVRS

SEQ ID NO: 68522 - protein, 93 aa, Setaria italica
  Transcript Sequence Number=SeqID_2548
  Gene Ontology: Mol. function=catalytic activity; Biological process =metabolic process
  Subcellular localization annotation: CTP_CleavageSite=61; ConfidenceScore=5.65e-01
VSAGRQTANLSRAPPHEPMPPSPLFPRLSPTPPPPLRARARGVGALPSTGRRRPALLAVIRAKGKDEASFTDRILDYIEGGPKLRRWYGAPDL

SEQ ID NO: 68523 - protein, 55 aa, Setaria italica
  Transcript Sequence Number=SeqID_2549
MILVAIVAELMEEYMVLVARVLEQLLHGAPFPRRMRFLMLRSLPFAAPPLPPPPP

SEQ ID NO: 68524 - protein, 97 aa, Setaria italica
  misc_feature (4)..(4): Xaa can be any naturally occurring amino acid
  Transcript Sequence Number=SeqID_2550
SPRXKTPDGDPIRSSPGSSGQETGGGWMRRRCYKGEGEGDGIMTRMSAAVATALSIGYGGRGSGMGGDLVLSSLLFPSPHPSLLGIYISHHSISSLC

SEQ ID NO: 68525 - protein, 31 aa, Setaria italica
  Transcript Sequence Number=SeqID_2551
IPLGVVLAIPPFNYPVNLAVSKIGPALIALV

SEQ ID NO: 68526 - protein, 498 aa, Setaria italica
  Transcript Sequence Number=SeqID_2552
  Gene Ontology: Mol. function=glyceraldehyde-3-phosphate dehydrogenase (NADP+) activity; Cellular component=cytoplasm; Biological process =oxidation reduction
  Homolog annotation: Hit_ID=Q43272; Match level="QueryCoverage=100%, HitCoverage=100%, E-value=0.0, Identity=96%"; Hit description=NADP -dependent glyceraldehyde-3-phosphate dehydrogenase
  Pfam annotation: Domain name=Aldedh; Domain location=26-486; Score =630.0; E_value=2.4e-186; Accession=PF00171.14; Description=Aldehyde dehydrogenase family
  Pfam annotation: Domain name=LuxC; Domain location=86-466; Score= -143.0; E_value=0.066; Accession=PF05893.6; Description=Acyl-CoA reductase (LuxC)
  Pfam module annotation: Pfam domain module=Aldedh::LuxC; Domain location=26-486::86-466
MALAGTGVFAEILDGEVYKYYADGEWHVSGSGKSVAIVNPTTRKTQYKVQACTQEEVNKVMDAAKVAQKAWARTPLWKRAELLHKAAAILKEHKAPIAECLVKEIAKPAKDAVSEVVRSGDLVSYTAEEGVRVLGEGKLLVSDSFPGNERNKYCLSSKIPLGVVLAIPPFNYPVNLAVSKIGPALIAGNSLVLKPPTQGAVAALHMVHCFHLAGFPKGLISCVTGKGSEIGDFLTMHPGVNCISFTGGDTGIAISKKAGMVPLQMELGGKDACIVLEDADLDLVAANIVKGGFSYSGQRCTAVKVVLIMESIADAVVQKVNAKLAKLKVGPPEDDSDITPVVTESSANFIEGLVMDAKEKGATFCQEYRREGNLIWPLLLDHVRPDMRIAWEEPFGPVLPVIRINSVEEGIHHCNASNFGLQGCVFTRDINKAILISDAMETGTVQINSAPARGPDHFPFQGLKDSGIGSQGITNSINMMTKVKSTVINLPSPSYTMG

SEQ ID NO: 68527 - protein, 166 aa, Setaria italica
  misc_feature (71)..(71): Xaa can be any naturally occurring amino acid
  Transcript Sequence Number=SeqID_2553
  Gene Ontology: Mol. function=nucleoside-triphosphatase activity; Cellular component=chloroplast; Biological process=protein metabolic process
  Homolog annotation: Hit_ID=Q01L44; Match level="QueryCoverage=92%, HitCoverage=16%, E-value=6e-43, Identity=64%"; Hit description =H0502B11.7 protein
PNRLKYSLDENDTDDNVNTEVIDEDKIASPLTPPTSVDEPILVDSEEIWQESHHYGQGIPVQKLTADETKXLLVGLDDELRKRVIGQDDAVVAISKAVKRSRVGLNDPDRPIATLLFCGPTGVGKTELTKALAASYFGSVGYAFLLTYSIVIYRVYDMFHGIYCSL

SEQ ID NO: 68528 - protein, 85 aa, Setaria italica
  Transcript Sequence Number=SeqID_2554
  Gene Ontology: Mol. function=nucleoside-triphosphatase activity; Cellular component=chloroplast; Biological process=protein metabolic process
  Homolog annotation: Hit_ID=Q01L44; Match level="QueryCoverage=100%, HitCoverage=9%, E-value=3e-38, Identity=89%"; Hit description =H0502B11.7 protein
  Pfam annotation: Domain name=ClpB_D2-small; Domain location=1-68; Score=45.4; E_value=2.3e-10; Accession=PF10431.1; Description=C -terminal, D2-small domain, of ClpB pr
LGIGLEISDSMKNLISQQGYDRSYGARPLRRAVTQLVEDAISEAILFGQFKPGDTILMDTDATGKPCLSRLNDQTVQLSDPATTL

SEQ ID NO: 68529 - protein, 690 aa, Setaria italica
  Transcript Sequence Number=SeqID_2555
  Gene Ontology: Mol. function=nucleoside-triphosphatase activity; Cellular component=chloroplast; Biological process=protein metabolic process
  Homolog annotation: Hit_ID=Q01L44; Match level="QueryCoverage=99%, HitCoverage=73%, E-value=0.0, Identity=86%"; Hit description =H0502B11.7 protein
  Pfam annotation: Domain name=AAA; Domain location=52-258; Score=12.3; E_value=2e-06; Accession=PF00004.21; Description=ATPase family associated with various cellular activities (AAA)
  Pfam annotation: Domain name=AAA_2; Domain location=402-577; Score =349.1; E_value=8.4e-102; Accession=PF07724.6; Description=ATPase family associated with various
  Pfam annotation: Domain name=AAA_5; Domain location=406-548; Score =20.6; E_value=1.9e-05; Accession=PF07728.6; Description=ATPase family associated with various
  Pfam annotation: Domain name=Arch_ATPase; Domain location=31-261; Score=-66.3; E_value=0.055; Accession=PF01637.10; Description =Archaeal ATPase
  Pfam annotation: Domain name=ClpB_D2-small; Domain location=583-673; Score=119.3; E_value=1.3e-32; Accession=PF10431.1; Description=C -terminal, D2-small domain, of ClpB pr
  Pfam annotation: Domain name=Sigma54_activat; Domain location=376 -571; Score=-177.6; E_value=0.018; Accession=PF00158.18; Description =Sigma-54 interaction domain
  Pfam annotation: Domain name=Torsin; Domain location=360-612; Score= -172.9; E_value=0.015; Accession=PF06309.3; Description=Torsin
  Pfam module annotation: Pfam domain module=AAA::AAA_2::AAA_5::Arch _ATPase::ClpB_D2-small::Sigma54_activat::Torsin; Domain location=52 -258::402-577::406-548::31-261::583-673::376-571::360-612
TFSYVISEKSALAQFCVDLTMRASGGLIDPVIGRKEEIERVVQIICRRTKNNPILLGEAGVGKTAIAEGLALKIANGDVPIFLVGKRILSLDVALLMAGAKERGELEARITSLLREVRKAGDVMLFIDEVHTLIGSGIAGRGSKGAGLDIANLLKPALARGELQCIASTTLDEHRLHFEKDKALARRFQPVFVNEPSQEDAVKILLGLRDKYETYHKCKYTLEGINAAVYLSARYIPDRHLPDKAIDLIDEAGSRARMESFKKKKEEQCSILSKSPDEYWQEIRAVQSMHEVALTNRLKYSLDENDTDDNVNTEVIDEDKIASPLTPPTSVDEPILVDSEEIARVTSLWSGIPVQKLTADETKLLVGLDDELRKRVIGQDDAVVAISKAVKRSRVGLNDPDRPIATLLFCGPTGVGKTELTKALAASYFGSESAMVRLDMSEYMERHTVSKLIGSPPGYMGFGEGGTLTEAVRRKPFTVVLLDEIEKAHPDIFNILLQVFEDGHLTDSQGRRVSFKNTLIVMTSNVGSASISSGRRSIGFSTQKDTEDTTYASMKSLVMEELKAFFRPELLNRMDEVVVFRPLEKTQMMAILNIILQEVKSRLLALGIGLEISDSMKNLISQQGYDRSYGARPLRRAVTQLVEDAISEAILFGQFKPGDTILMDTDATGKPCLSRLNDQTVQLSDPATTL

SEQ ID NO: 68530 - protein, 82 aa, Setaria italica
  Transcript Sequence Number=SeqID_2556
  Gene Ontology: Mol. function=aminoacyl-tRNA ligase activity; Cellular component=cytoplasm; Biological process=tRNA aminoacylation for protein translation
  Homolog annotation: Hit_ID=B9RP10; Match level="QueryCoverage=89%, HitCoverage=12%, E-value=9e-25, Identity=67%"; Hit description =Cysteinyl-tRNA synthetase, putative
KQINWGKDPFSLSKRFSDDFLSDMANLQCLPPSMEPRVSDHIDQIINMIKQILDNNCAYVVGGDVYFSVDNFPEYGELFLVR

SEQ ID NO: 68531 - protein, 386 aa, Setaria italica
  misc_feature (24)..(24): Xaa can be any naturally occurring amino acid
  Transcript Sequence Number=SeqID_2557
  Gene Ontology: Mol. function=aminoacyl-tRNA ligase activity; Cellular component=cytoplasm; Biological process=tRNA aminoacylation for protein translation
  Homolog annotation: Hit_ID=B9RP10; Match level="QueryCoverage=95%, HitCoverage=64%, E-value=1e-151, Identity=68%"; Hit description =Cysteinyl-tRNA synthetase, putative
  Pfam annotation: Domain name=DALR_2; Domain location=241-310; Score =14.6; E_value=0.0005; Accession=PF09190.3; Description=DALR domain
  Pfam annotation: Domain name=tRNA-synt_1e; Domain location=4-200; Score=210.5; E_value=4.3e-60; Accession=PF01406.11; Description=tRNA synthetases class I (C)
  Pfam module annotation: Pfam domain module=DALR_2::tRNA-synt_1e; Domain location=241-310::4-200
QLDFFVFLELFFEQILDNNCAYVXGGDVYFSVDNFPEYGELSGRKLDDNRAGERVAVDERKRNPADFALWKAAKDGEPWWDSPWGPGRPGWHIECSAMSAHYLGHSFDIHGGGEDLIFPHHENEIAQSRAACCDSSISYWIHNGFVNVNSQKMSKSLGNFVTIRKVIEMYHPLALRMFLLGTHYRSPINYTIEQLNVASDRLYYTYQTLHDCEESCQQQQDNSGDSLPANTLNYIQKLHDEFETSMSDDLHTSVALAAISEPLKVMNDLLHTRKGKKQEKRLESLAALEEKIRVVLSVLGLLPSSYHEALQQLREKALRRASITEEHVLQKIEERTAARKAKQYGKSDEIRKELAAVGIALMDGPDGTTWRPSVPLSEEEGVVVKT

SEQ ID NO: 68532 - protein, 153 aa, Setaria italica
  Transcript Sequence Number=SeqID_2558
  Gene Ontology: Mol. function=electron carrier activity; Cellular component=integral to membrane; Biological process=oxidation reduction
  Homolog annotation: Hit_ID=B6SWK0; Match level="QueryCoverage=92%, HitCoverage=28%, E-value=5e-75, Identity=93%"; Hit description =Cytochrome P450 CYP90B14v2
KHFKPVENGRCVEDYKVMVFTQCVINETLRLGNVVRFLHRKVIRDVHYNGYDIPRGWKILPVLAAVHLDSSLYEDPNQFNPWRWKSNAPSSFMPYGGGPRLCAGSELAKLEMAIFLHHLVLNFRWELAEPDRAFVYPFVDFPKGLPIRVQRIA

SEQ ID NO: 68533 - protein, 165 aa, Setaria italica
  Transcript Sequence Number=SeqID_2559
  Gene Ontology: Mol. function=transferase activity, transferring glycosyl groups; Cellular component=integral to membrane; Biological process=cell wall organization and biogenesis
  Homolog annotation: Hit_ID=Q2QNS6; Match level="QueryCoverage=100%, HitCoverage=14%, E-value=2e-74, Identity=83%"; Hit description =Cellulose synthase-like protein D4
EWWRNEQFWVIGGTSAHPAAVLQGLLKVIAGVDISFTLTSKPGTGDDGEEDAFAELYEVRWSFLMVPPVTIMMVNAVAVAVASARTLYSEFPQWSKLLGGAFFSFWVLCHLYPFAKGLLGRRGRVPTIVFVWSGLISMTISLLWVYINPPAGAKERIGGGGFSFP

SEQ ID NO: 68534 - protein, 66 aa, Setaria italica
  Transcript Sequence Number=SeqID_2560
TNSILTYCQRSCLCCMQDMVMQVSKLRNIRQIKNTVLCCFSRKRQIFMIWSLVHENMKSNLQYGYG

SEQ ID NO: 68535 - protein, 160 aa, Setaria italica
  Transcript Sequence Number=SeqID_2561
  Gene Ontology: Mol. function=diaminohydroxyphosphoribosylaminopyrimidi ne deaminase activity; Biological process=riboflavin biosynthetic process
  Homolog annotation: Hit_ID=B6TRH4; Match level="QueryCoverage=100%, HitCoverage=40%, E-value=3e-67, Identity=80%"; Hit description =Riboflavin biosynthesis protein ribD
ISSDLAKMSTLPVSHEAGANQPQYIIIAQGESSRLHIPSLSEEHASKAIVLADSPITVEPAGVEVAVLRQIDLDSILQLLAQRGLCSVLVDFREAGESFASLLNDFQEEKLVQKVVVEVLPVWLASEGLNNLAFGGSQSFPLKNVEHREVNGSVLLEGYV

SEQ ID NO: 68536 - protein, 154 aa, Setaria italica
  Transcript Sequence Number=SeqID_2562
  Homolog annotation: Hit_ID=Q84ZI5; Match level="QueryCoverage=74%, HitCoverage=23%, E-value=1e-10, Identity=42%"; Hit description =P0483E09.5 protein
MFMQPMIPMVSHMQQLELPACERATRIDLAGINFALNLPAAGAFTALRVLRINVAQLVRGDVGHLVSTQCPRLRELEMCDVATVTAGLSISSASLERLVLRRASLGMKGRIDVAAPRLYYLALDNCGNRSAAATITTTMLAELIWNHAYKPLLT

SEQ ID NO: 68537 - protein, 98 aa, Setaria italica
  Transcript Sequence Number=SeqID_2563
  Gene Ontology: Cellular component=integral to Golgi membrane; Biological process=intra-Golgi vesicle-mediated transport
  Homolog annotation: Hit_ID=Q53RI9; Match level="QueryCoverage=81%, HitCoverage=11%, E-value=3e-37, Identity=91%"; Hit description=CASP C terminal, putative
  Pfam annotation: Domain name=CASP_C; Domain location=1-90; Score= -79.5; E_value=0.00026; Accession=PF08172.4; Description=CASP C terminal
DYSHDKIVSRGPKKYAEDIESGSSDVEAKYKKMYEDDINPFAAFSKKEKDQRYKELGLRDKITLSSGRFLLGNKYNTLFFPLCKTQSLSFCFCFNSVC

SEQ ID NO: 68538 - protein, 236 aa, Setaria italica
  Transcript Sequence Number=SeqID_2564
  Gene Ontology: Mol. function=transcription repressor activity; Cellular component=integral to Golgi membrane; Biological process =intra-Golgi vesicle-mediated transport
  Homolog annotation: Hit_ID=Q53RI9; Match level="QueryCoverage=95%, HitCoverage=32%, E-value=3e-98, Identity=81%"; Hit description=CASP C terminal, putative
  Pfam annotation: Domain name=CtIP_N; Domain location=99-209; Score= -42.5; E_value=0.085; Accession=PF10482.1; Description=Tumour -suppressor protein CtIP N-term
RNTTYDRLRPYASSLVLFCNFWKDFDLEKERSGLDEQGLKIAENQETSQKNRRKLAENTRDFKKASSDEKLSLFNSLLKSYQEEVDKLTKRAKFGENAFLNIYQKLYEAPDPYPALASMADQDQKLSELETENRKMKLELEEYRAEAAHLKNQQATIRRLEERNRQLEQQMEEKVREMVEMKQRSMAEDSQKTLEALKDRERSLQDQLRQATESVKNMQKLHESAQSQLFELRTQS

SEQ ID NO: 68539 - protein, 484 aa, Setaria italica
  Transcript Sequence Number=SeqID_2565
  Gene Ontology: Mol. function=transcription repressor activity; Cellular component=integral to Golgi membrane; Biological process =intra-Golgi vesicle-mediated transport
  Homolog annotation: Hit_ID=Q53RI9; Match level="QueryCoverage=95%, HitCoverage=66%, E-value=0.0, Identity=82%"; Hit description=CASP C terminal, putative
  Pfam annotation: Domain name=CASP_C; Domain location=231-464; Score =351.4; E_value=1.7e-102; Accession=PF08172.4; Description=CASP C terminal
VPFKDRERSLQDQLRQATESVKNMQKLHESAQSQLFELRTQSEEDRTAKEAEVSLLMDEVERAQARLVSLEREKGDLRSQLQTTNEDASKSSDYLESSDILESSLNAKEKIISELNAELRNIESTLSNEREMHVNELKKLTALLTEKESALMELKKELQERPTRKLVDDLKKKVQILQAVGYNSIEAEDWELATNGEEMSKLEALLLDKNRKMEHELTQLKVKISEKTSLLEEAEKRIAELTSKVEEQQKLILKLEDDILKGYSSTDRRGSLLNDWDLQEIGTSEASEGTDPRHASPDQDQNSMLKVICNQRDRFRARLRETEEELRKLKEKYEMVTVELEKTKADNVQLYGKIRYVQDYSHDKIVSRGPKKYAEDIESGSSDVEAKYKKMYEDDINPFAAFSKKEKDQRYKELGLRDKITLSSGRFLLGNKYARTFIFFYSIGLHLLVFTLLYRMSALSYLHMTPGHDESILDAGNQTLSHML

SEQ ID NO: 68540 - protein, 173 aa, Setaria italica
  Transcript Sequence Number=SeqID_2566
  Gene Ontology: Mol. function=nucleotide binding; Cellular component =nucleus; Biological process=defense response
  Homolog annotation: Hit_ID=Q2R8K0; Match level="QueryCoverage=96%, HitCoverage=15%, E-value=5e-48, Identity=59%"; Hit description =Nitrate-induced NOI protein, expressed
SLTFSSAKYATKPDGIALSELRSLTFYGLVNCLPSIMEFKLLRVLILEFWGDKEELDIIGINKLFQLRYLRIRTDMTVKLPASMQELLCLETLEMYARVTTFPSDAFVLPRLLHLCLHDVINVPEGIGHMRSLRTLQCFDLSRISNGIVWSLNEMTNLRDLRLTCTTASREHH

SEQ ID NO: 68541 - protein, 302 aa, Setaria italica
  Transcript Sequence Number=SeqID_2567
  Homolog annotation: Hit_ID=B4FWY5; Match level="QueryCoverage=99%, HitCoverage=99%, E-value=1e-108, Identity=70%"; Hit description=BSD domain containing protein
  Pfam annotation: Domain name=BSD; Domain location=141-201; Score =55.8; E_value=1.6e-13; Accession=PF03909.9; Description=BSD domain
MDLWERARAFAGEAAKRSQELSAEAAKRSSALVSETAKKSKEIFSETASKSREIAAEATKQADLLAGQIKHLASDLPVPSIPPIPAIPPIPSAAAPEPDAEELERYGITDDLREFVKGMTISTFRDFPLQDEPEMSDVPTVSNVRQDLNEWQAKHATLVLSSVKEISKFRYELCPRYMKERKFWRVYFLLVNSYIAPFEKKYFEELKVKAEEEKKDSQKEASQSQASQATTAEQKDSKAPSKTSTSTNPEHDLDVFLLGDLGSDDEGPDGGDDGDDFDKIDATSGLESDDDDKNRGKAEDAK

SEQ ID NO: 68542 - protein, 590 aa, Setaria italica
  Transcript Sequence Number=SeqID_2568
  Gene Ontology: Mol. function=ATPase activity, coupled to transmembrane movement of substances; Cellular component=integral to membrane; Biological process=transport
  Homolog annotation: Hit_ID=Q7XTT6; Match level="QueryCoverage=100%, HitCoverage=36%, E-value=0.0, Identity=87%"; Hit description =OSJNBa0058K23.17 protein
  Pfam annotation: Domain name=ABC_membrane; Domain location=1-237; Score=22.8; E_value=0.00023; Accession=PF00664.15; Description=ABC transporter transmembrane region
  Pfam annotation: Domain name=ABC_tran; Domain location=313-496; Score= 161.8; E_value=2.1e-45; Accession=PF00005.19; Description=ABC transporter
  Pfam annotation: Domain name=MMR_HSR1; Domain location=314-403; Score= -16.7; E_value=0.035; Accession=PF01926.15; Description=GTPase of unknown function
  Pfam annotation: Domain name=SMC_N; Domain location=302-500; Score= -112.1; E_value=0.0023; Accession=PF02463.11; Description=RecFRecNSMC N terminal domain
  Pfam module annotation: Pfam domain module=ABC_membrane::ABC _tran::MMR_HSR1::SMC_N; Domain location=1-237::313-496::314-403::302 -500
GYYNLIYGILSFGQVLVTLSNSYWLIISSLRAAKRLHDAMLRSILRAPMVFFHTNPLGRIINRFSKDLGDVDRNVAVFVNMFMAQISQLLSTFVLIGFVSTMSLWAIMPLLILFYAAYLYYQTTSREVKRLDSITRSPVYAQFSEALNGLSTIRAYKAYDRMANINGRSMDNNIRFTLVNMSSNRWLAIRLETLGGIMIWFTATFAVMQNQRAENQKAFASTMGLLLTYTLNITNLLTAVLRLASLAENSLNAVERVGTYIELPSEAPPVIEDHRPPPGWPSSGVIKFEDVVLRYRPELPPVLHGISFIINGSEKVGIVGRTGAGKSSMLNALFRIVELERGRILIDDCDTSKFGIWDLRKVLGIIPQAPVLFSGSVRFNLDPFNEHNDADLWEALERAHLKDVIRRNALGLDAEVSEAGENFSVGQRQLLSLARALLRRAKILVLDEATAAVDVRTDALIQKTIREEFKSCTMLIIAHRLNTVIDCDRLLILSAGKVLEFDSPENLLSNEDSAFSKMVQSTGPSNAEYLKSLVFGSGEERSRREEIKLQDIQRRWVASNRWAEAAQFALARSLTSSHSDLLALEAAEGN

SEQ ID NO: 68543 - protein, 203 aa, Setaria italica
  Transcript Sequence Number=SeqID_2569
  Gene Ontology: Mol. function=ATPase activity, coupled to transmembrane movement of substances; Cellular component=integral to membrane; Biological process=transport
  Homolog annotation: Hit_ID=Q7XTT6; Match level="QueryCoverage=100%, HitCoverage=12%, E-value=2e-92, Identity=85%"; Hit description =OSJNBa0058K23.17 protein
EEFKSCTMLIIAHRLNTVIDCDRLLILSAGKVLEFDSPENLLSNEDSAFSKMVQSTGPSNAEYLKSLVFGSGEERSRREEIKLQDIQRRWVASNRWAEAAQFALARSLTSSHSDLLALEAAEGNNILRRTKDAVITLQSVLEGKHNSEIDESLNQYQVPADRWWSSLYKVIEGLATMSRLGRNRLQQPSYNFENNGSIDWDQM

SEQ ID NO: 68544 - protein, 80 aa, Setaria italica
  Transcript Sequence Number=SeqID_2570
  Gene Ontology: Mol. function=RNA binding; Cellular component =ribonucleoprotein complex; Biological process=mRNA processing
  Homolog annotation: Hit_ID=O82221; Match level="QueryCoverage=98%, HitCoverage=98%, E-value=3e-35, Identity=91%"; Hit description =Probable small nuclear ribonucleoprotein G
  Pfam annotation: Domain name=LSM; Domain location=8-72; Score=92.5; E_ value=1.4e-24; Accession=PF01423.14; Description=LSM domain
MSRSGQPPDLKKYMDKKLQIKLNANRVVIGTLRGFDQFMNLVVDNTVEVNGNDKTDIGMVVIRGNSVVMIEALEPVAKSQ

SEQ ID NO: 68545 - protein, 81 aa, Setaria italica
  Transcript Sequence Number=SeqID_2571
  Gene Ontology: Mol. function=RNA binding; Cellular component =ribonucleoprotein complex; Biological process=mRNA processing
  Homolog annotation: Hit_ID=O82221; Match level="QueryCoverage=98%, HitCoverage=100%, E-value=1e-34, Identity=87%"; Hit description =Probable small nuclear ribonucleoprotein G
  Pfam annotation: Domain name=LSM; Domain location=8-72; Score=91.6; E_ value=2.8e-24; Accession=PF01423.14; Description=LSM domain
MSRSGQPPDLKKYMDKKLQIKLNANRVVIGTLRGFDQFMNLVVDNTVEVNGNDKNDIGMVVIRGNSVVMIEALEPVAKAAQ

SEQ ID NO: 68546 - protein, 68 aa, Setaria italica
  Transcript Sequence Number=SeqID_2572
MAWPSRQLLLAMLCVVAASVLAAQAAGADDARTKKVGVYELRMGDFCVKVTNWGARLMSVVVPDSKGN

SEQ ID NO: 68547 - protein, 363 aa, Setaria italica
  Transcript Sequence Number=SeqID_2573
  Gene Ontology: Mol. function=carbohydrate binding; Biological process= carbohydrate metabolic process
  Homolog annotation: Hit_ID=Q7XV00; Match level="QueryCoverage=92%, HitCoverage=92%, E-value=1e-155, Identity=77%"; Hit description =OSJNBa0036B21.19 protein
  Pfam annotation: Domain name=Aldose_epim; Domain location=33-360; Score=361.1; E_value=2e-105; Accession=PF01263.12; Description =Aldose 1-epimerase
MARRELLLALLCGLIAASAQLATAGAGARKMVGVYELRKGDFSVKVTNFGARVMSIVFPDSKGNLADVVLGMDTIAEYVNDASYFGPITGRIAQRVARGRFVLDGKVYHMYKNDGNNTIHGGGRGFSKSIWTVKEYVGGGDSPYITFYYRSFDGEEGLPGNVDAYVTYRMSGPYTLGVHMNGTALDKATPVNFLLHAYWNLGGHGSGDVLGHTLRLHASRHAVLDEELLPSSGRIEPVAGTPLDFRTPVAIGARIRRVTSGKVIGYDTNYIIDGEGMRPVAHARDGASGRALELWANQPTMQLYTGNYLNHIKGKDGKVYEKHGGFCLETMGYVDAVNHPEFPSQTLRPGQVYKHDMVFKFSF

SEQ ID NO: 68548 - protein, 102 aa, Setaria italica
  misc_feature (1)..(31): Xaa can be any naturally occurring amino acid
  Transcript Sequence Number=SeqID_2574
XXXXXXXXXXXXXXXXXXXXXXXXXXXXXXXFLRNNVTIISQMIEFGMNKQAVTLHLITPTFTQERDAQLQISRDTCGTQQVAGKYHQKRKLLTSLSSFSEQ

SEQ ID NO: 68549 - protein, 75 aa, Setaria italica
  Transcript Sequence Number=SeqID_2575
ILRNQNSRLREHLKLKASLIDSLNDAFNLRSSLCAEKGEVEEKISALTSQYMDLQTASEERASREMPSLQKQFAG

SEQ ID NO: 68550 - protein, 464 aa, Setaria italica
  misc_feature (68)..(68): Xaa can be any naturally occurring amino acid
  Transcript Sequence Number=SeqID_2576
  Gene Ontology: Mol. function=DNA binding; Cellular component=nuclear matrix
  Homolog annotation: Hit_ID=Q9M7J3; Match level="QueryCoverage=78%, HitCoverage=91%, E-value=5e-58, Identity=40%"; Hit description=MAR -binding protein MFP1 homolog (Fragment)
  Pfam annotation: Domain name=EzrA; Domain location=12-447; Score= -392.6; E_value=0.077; Accession=PF06160.4; Description=Septation ring formation regulator, EzrA
  Pfam annotation: Domain name=Flagellar_rod; Domain location=68-328; Score=-118.1; E_value=0.047; Accession=PF05149.4; Description =Paraflagellar rod protein
  Pfam module annotation: Pfam domain module=EzrA::Flagellar_rod; Domain location=12-447::68-328
EKDVLADKDDLKLKASLIDSLNEKVQTLCAEKGEVEEKISALTSQYMDLQTASEERASRDSQLLSEKXDKVNQLEEKLSAALSDSSKDRTRIAELNNELDTTRTMLDNEVVARKSLSDLVHSTEEALKDSRNEVFKLSEDLDEVKRSNQDLMAQISKLTDEAIEVRQALAKKVEEAESVSTTLSDELASVREVLRRSQEELEVISNQLVSVSEAHSDLNKELLDAYKKLEFTTNELVKERKINATLNRELEALVKQSAIESEARKALQVDLDEATRSLNEVNQGTLSLSKQLETTNSKISAIKEEKEMLSKALEEQKKSTVEAQGNMEDAQNTIQRLGTERESFETRSKQLEDELATAKGEILRLRRQISTSGSENTEVVLETGATPNTSQSLKEQPVNDRVQNTNSAGAVARSRKRVYRRRKRQTSGLSSEHYLNAKARITILSFPLFSHVFRTNIELSSFKE

SEQ ID NO: 68551 - protein, 54 aa, Setaria italica
  Transcript Sequence Number=SeqID_2577
  Gene Ontology: Mol. function=cytochrome-c oxidase activity; Cellular component=mitochondrial respiratory chain; Biological process =oxidation reduction
  Homolog annotation: Hit_ID=Q9SXX7; Match level="QueryCoverage=98%, HitCoverage=84%, E-value=2e-21, Identity=90%"; Hit description =Cytochrome c oxidase subunit 5C
  Pfam annotation: Domain name=COX5C; Domain location=1-54; Score =132.6; E_value=1.2e-36; Accession=PF05799.4; Description=Cytochrome c oxidase subunit Vc (COX5C)
IFKGPSVVKEIFIGLTLGLIAGGMWKMHHWNEQRKTRSFYDMLDKGQISVVVEE

SEQ ID NO: 68552 - protein, 158 aa, Setaria italica
  Transcript Sequence Number=SeqID_2578
HGHVQIFMMEEIQTKSGVLKWLCLFFKTNLHSIHFVMLSREFQKQLGENNFRLDAWKLLLDNDADLALVQHVVEGSSLPLLVPVVHLPHAASNQPQGESNEDLLHHTRALEGGMCNPATCHLLAVEVRCQMPCRRWRRWGCAAAAAREGNRAFPFRSG

SEQ ID NO: 68553 - protein, 144 aa, Setaria italica
  Transcript Sequence Number=SeqID_2579
  Gene Ontology: Mol. function=protein serine/threonine phosphatase activity; Cellular component=protein serine/threonine phosphatase complex; Biological process=protein amino acid dephosphorylation
  Homolog annotation: Hit_ID=Q9FYN7; Match level="QueryCoverage=90%, HitCoverage=32%, E-value=3e-46, Identity=70%"; Hit description =Probable protein phosphatase 2C 2
ETAPGSTQLAASPKAVVEVAVEVSDLELKRSSNAGSSVSAEPLQFVPSIRSGSFADIGPRRYMEDEHIRIDDLSGHLGSLLMFSAPSAFYGVFDGHGGSDAAAYMKKHAMRLFFEDAEFPQASQDDEMFAESVEDSVRKAFLRA

SEQ ID NO: 68554 - protein, 101 aa, Setaria italica
  Transcript Sequence Number=SeqID_2580
  Gene Ontology: Mol. function=transferase activity, transferring glycosyl groups; Cellular component=chloroplast
  Homolog annotation: Hit_ID=B6UEE3; Match level="QueryCoverage=98%, HitCoverage=12%, E-value=3e-38, Identity=77%"; Hit description =Phosphoribosylanthranilate transferase
  Pfam annotation: Domain name=C2; Domain location=1-66; Score=18.2; E _value=0.0033; Accession=PF00168.22; Description=C2 domain
RHGAIDPFVEVKLGNFKGTTPVKAASHSPAWQQVFAFSASHLQAHVLEVAVKAKDLGGDDLVGRVGFDLAEVPVRVPPDSPLAPQWYRLETKRGEKLPHGE

SEQ ID NO: 68555 - protein, 136 aa, Setaria italica
  misc_feature (13)..(13): Xaa can be any naturally occurring amino acid
  Transcript Sequence Number=SeqID_2581
  Gene Ontology: Mol. function=protein serine/threonine kinase activity; Biological process=protein amino acid phosphorylation
  Homolog annotation: Hit_ID=B9RHT2; Match level="QueryCoverage=100%, HitCoverage=17%, E-value=8e-61, Identity=80%"; Hit description=ATP binding protein, putative
FRIAADIATGLFXLHQAKPEPLVHRDLKPANILLDHNFVSKISDVGLARLVPQSAADVTQYRMTSTAGTFCYIDPEYQQTGMLTTMSDIYSLGIMLLQIITARSPMGLTHHVENAIERGTFQEILDPMVTDWPVEE

SEQ ID NO: 68556 - protein, 42 aa, Setaria italica
  Transcript Sequence Number=SeqID_2582
  Gene Ontology: Mol. function=transferase activity, transferring glycosyl groups; Cellular component=integral to membrane; Biological process=protein amino acid glycosylation
MKKWHGGFVVVSLFIILMLRYVILDSPLAENSLRYVFQQNRT

SEQ ID NO: 68557 - protein, 255 aa, Setaria italica
  Transcript Sequence Number=SeqID_2583
  Gene Ontology: Mol. function=protein phosphatase type 2A regulator activity; Cellular component=protein phosphatase type 2A complex; Biological process=signal transduction
  Homolog annotation: Hit_ID=B6SWG5; Match level="QueryCoverage=29%, HitCoverage=9%, E-value=3e-20, Identity=66%"; Hit description=Signal transducer
  Pfam annotation: Domain name=WD40; Domain location=204-242; Score =40.2; E_value=8.5e-09; Accession=PF00400.24; Description=WD domain, G-beta repeat
LLRTYDEEGSSTASPAHSPGQALPWSGSLDSVWQRRERFMRSMGLECSPSPRKADAAATVGDVEKEEVVPEFGRLWSQSDENDCSMSSWSTEDTGSYEDGASDDNSMSGSSRDDASSKVGRSFSSLSFIQRLVSRSGKLSGVPKAVERRRNGWLRRLGLRASVLDHGGDEASTSSSESEQNRGGRYERVKVRCYRKRSKELSAVYQGQVIKAHDGAILTMKFSPDGQFLASGGEDGVVRIWGVTQSEDCKIPMDD

SEQ ID NO: 68558 - protein, 174 aa, Setaria italica
  Transcript Sequence Number=SeqID_2584
  Gene Ontology: Mol. function=ATP-dependent helicase activity; Cellular component=intracellular; Biological process=cellular metabolic process
  Homolog annotation: Hit_ID=Q7XQB6; Match level="QueryCoverage=88%, HitCoverage=13%, E-value=5e-36, Identity=54%"; Hit description =OSJNBa0088K19.8 protein
  Pfam annotation: Domain name=HRDC; Domain location=3-45; Score=7.1; E_ value=0.016; Accession=PF00570.15; Description=HRDC domain
TYQKDSLKEMSIRVPRTKEELLEINGIGKAKVKKYGDRVLATIEDFLSKHPNPRRNSSGSGSNEHTEAKKRRGFTASYAGSIADDDFEERTAQSKKRAAKTRSTKQGVSDATSMVHGARCMDADLDGVEVLDDELCSIQKPVASGRVLPKWAPAKAKGSSVPPSNLFQEFGYVK

SEQ ID NO: 68559 - protein, 62 aa, Setaria italica
  Transcript Sequence Number=SeqID_2585
  Gene Ontology: Mol. function=translation initiation factor activity; Biological process=biosynthetic process
  Homolog annotation: Hit_ID=O49733; Match level="QueryCoverage=83%, HitCoverage=7%, E-value=7e-14, Identity=67%"; Hit description =Initiation factor-2Bepsilon-like protein
  Pfam annotation: Domain name=W2; Domain location=1-57; Score=5.1; E _value=0.0026; Accession=PF02020.10; Description=eIF4-gammaeIF5eIF2 -epsilon
FEEMCQETTKEFSPLFAKILPFLYDTEVVSEGAILRWAEEKEHADESDKIFVIPLLHRPPLR

SEQ ID NO: 68560 - protein, 124 aa, Setaria italica
  Transcript Sequence Number=SeqID_2586
  Gene Ontology: Mol. function=translation initiation factor activity; Cellular component=cytosol; Biological process=biosynthetic process
  Homolog annotation: Hit_ID=O49733; Match level="QueryCoverage=85%, HitCoverage=14%, E-value=9e-40, Identity=74%"; Hit description =Initiation factor-2Bepsilon-like protein
QLHNDMEDCYIDICSPEVLSLFTDNFDYQHLRRHFVKGLLVDDIMGYKIYTHELRSGYAARIDNFRSYDTVSKDVIQRWTYPMVPDVISNRDCSESRLHRQGIYKASVRQASETTAKYKFSYWE

SEQ ID NO: 68561 - protein, 187 aa, Setaria italica
  misc_feature (172)..(172): Xaa can be any naturally occurring amino acid
  Transcript Sequence Number=SeqID_2587
  Gene Ontology: Mol. function=translation initiation factor activity; Cellular component=eukaryotic translation initiation factor 2B complex; Biological process=biosynthetic process
  Homolog annotation: Hit_ID=B9REW1; Match level="QueryCoverage=84%, HitCoverage=35%, E-value=4e-37, Identity=48%"; Hit description =Eukaryotic translation initiation factor 2b, epsilon subunit, putative
  Pfam annotation: Domain name=W2; Domain location=125-185; Score=32.7; E_value=1.5e-06; Accession=PF02020.10; Description=eIF4-gammaeIF5eIF2- epsilon
ELQHAVCEDDASEDESNNPILPDKDGSSDSAVEDDDPFSKFEKEVEETFQRAMGGGVNRDNLILEINGLRLAYSLQHADCAGAVFYSVMKSALVAAQSTNDTLLKTTAEALGKWKDLLRNYTKTVDEEMEILLKFEEMCQETTKEFSPLFAKILPFLYDTEVVSEDAILRWXEEKEHADESDIVRGI

SEQ ID NO: 68562 - protein, 145 aa, Setaria italica
  Transcript Sequence Number=SeqID_2588
  Gene Ontology: Mol. function=translation initiation factor activity; Biological process=biosynthetic process
  Homolog annotation: Hit_ID=O49733; Match level="QueryCoverage=65%, HitCoverage=13%, E-value=2e-25, Identity=54%"; Hit description =Initiation factor-2Bepsilon-like protein
  Pfam annotation: Domain name=W2; Domain location=62-144; Score=98.2; E_value=2.9e-26; Accession=PF02020.10; Description=eIF4 -gammaeIF5eIF2-epsilon
KLYSGGDPHCEICNLLGVYFFFLFLLWAKYFISCVLLYTLLKTTAEALGKWKDLLRNYTKTVDEEMEILLKFEEMCQETTKEFSPLFAKILPFLYDTEVVSEDAILRWAEEKEHADESDKIFVKQSEAFIQWLKEAEEEDDEEEE

SEQ ID NO: 68563 - protein, 606 aa, Setaria italica
  Transcript Sequence Number=SeqID_2589
  Gene Ontology: Mol. function=translation initiation factor activity; Cellular component=cytosol; Biological process=biosynthetic process
  Homolog annotation: Hit_ID=O49733; Match level="QueryCoverage=99%, HitCoverage=82%, E-value=1e-162, Identity=50%"; Hit description =Initiation factor-2Bepsilon-like protein
  Pfam annotation: Domain name=Hexapep; Domain location=285-302; Score =13.6; E_value=0.84; Accession=PF00132.16; Description=Bacterial transferase hexapeptide (th
  Pfam annotation: Domain name=Hexapep; Domain location=308-325; Score =16.5; E_value=0.11; Accession=PF00132.16; Description=Bacterial transferase hexapeptide (th
  Pfam annotation: Domain name=Hexapep; Domain location=326-342; Score =1.8; E_value=99; Accession=PF00132.16; Description=Bacterial transferase hexapeptide (th
  Pfam annotation: Domain name=Hexapep; Domain location=348-365; Score =4.6; E_value=46; Accession=PF00132.16; Description=Bacterial transferase hexapeptide (th
  Pfam annotation: Domain name=Hexapep; Domain location=366-383; Score =6.2; E_value=29; Accession=PF00132.16; Description=Bacterial transferase hexapeptide (th
  Pfam module annotation: Pfam domain module=Hexapep::Hexapep::Hexapep:: Hexapep::Hexapep; Domain location=285-302::308-325::326-342::348 -365::366-383
MPMIEYTLTWLESAGVDEAFVFCCAHSHQVKEYLERSGWAGKAGAGSMAVTAVESHDAISAGDALRVIYERGVIRGDFVLISGDTISNMSLKDALQEHMDRKKKDPLAVMTMIIKHSKPSILTHQTRLGNDEIVMAVDPETKELLYYEDRADNSHLYVTIDKDILTNNPTLQLHNDMEDCYIDICSPEVLSLFTDNFDYQHLRRHFVKGLLVDDIMGYKIYTHELRSGYAARIDNFRSYDTVSKDVIQRWTYPMVPDVISNRDCSESRLHRQGIYKASDVTLSYSAQIGANSVVGSATSIGDHCKVLNSVIGEGCKIGKNVLINGSYIWDNVIIEDGCKVSNSLVCDGVHLRAGAIVEPGCVLSFNVEVGKNVVVPAHSKVSLLPQPSNEDSDEELEYADTNSGITDSPPFSSMRSNGDQATVPSEDELGTSETGTCGVVGYIWTSGDTGILEEWRQSIAPIAKEKLEELQHAVCEDDASEDESNNPILPDKDGSSDSAVEDDDPFSKFEKEVEETFQRAMGGGVNRDNLILEINGLRLAYSLQHADCAGAVFYSVMKSALVAAQSTNDTLLKTTAEALGKWKDLLRNYTKTVDEEMEILLKFVVS

SEQ ID NO: 68564 - protein, 63 aa, Setaria italica
  Transcript Sequence Number=SeqID_2590
  Gene Ontology: Mol. function=structural constituent of ribosome; Cellular component=ribonucleoprotein complex; Biological process =translation
  Homolog annotation: Hit_ID=B6TKD3; Match level="QueryCoverage=90%, HitCoverage=25%, E-value=1e-21, Identity=92%"; Hit description=60S ribosomal protein L13a
GELSKEVGWNYHDTIRELDEKRKEKAKVAYERRKQLAKLRVKAEKTAEEKLGSQLEILAPIKY

SEQ ID NO: 68565 - protein, 135 aa, Setaria italica
  Transcript Sequence Number=SeqID_2591
  Gene Ontology: Mol. function=dihydroneopterin aldolase activity; Biological process=folic acid and derivative metabolic process
  Homolog annotation: Hit_ID=B4FPQ2; Match level="QueryCoverage=90%, HitCoverage=91%, E-value=8e-56, Identity=87%"; Hit description =Dihydroneopterin aldolase
  Pfam annotation: Domain name=FolB; Domain location=17-132; Score =164.3; E_value=3.5e-46; Accession=PF02152.10; Description =Dihydroneopterin aldolase
MAEEEAAAAMGPGGDKLILRGLQFHGFHGVKQEEQTLGQKFVVDIDAWMDLTAAGESDSIADTVSYTDIYGIAKDVVQGSPHNLLESVAHSIAVATLVKFPQISAVRVKVGKPHVAVQGVLDYLGVEIMRRRKKA

SEQ ID NO: 68566 - protein, 207 aa, Setaria italica
  misc_feature (107)..(107): Xaa can be any naturally occurring amino acid
  misc_feature (114)..(114): Xaa can be any naturally occurring amino acid
  Transcript Sequence Number=SeqID_2592
  Gene Ontology: Mol. function=structural constituent of ribosome; Cellular component=ribonucleoprotein complex; Biological process =translation
  Homolog annotation: Hit_ID=B6TKD3; Match level="QueryCoverage=97%, HitCoverage=90%, E-value=9e-92, Identity=84%"; Hit description=60S ribosomal protein L13a
  Pfam annotation: Domain name=Ribosomal_L13; Domain location=11-128; Score=142.8; E_value=1e-39; Accession=PF00572.10; Description =Ribosomal protein L13
MVSGSGVCAKRIVVDARHHMLGRLSSIIAKELLNGQKVVVVRCEEICLSGGLVRQKMKYLRFLRKWMNTKPSHGPIHFRSPAKILWRTIRGMIPHKTKRGEAALARXKTYEGVXPPPYDRTKRMVIPDALKVLRLQPGHKYCLLGELSKEVGWNYHDTIRELEEKRKEKAKVAYERRKQLAKLRVKAEKTAEEKLGSQLEILAPIKY

SEQ ID NO: 68567 - protein, 56 aa, Setaria italica
  Transcript Sequence Number=SeqID_2593
LLCKTTVVWLYLVESTRYIFGYIIPQQLLPVHIGLFPLTKPPGIDALLWTCSSLFY

SEQ ID NO: 68568 - protein, 39 aa, Setaria italica
  Transcript Sequence Number=SeqID_2594
LQSKRCLYVSWALIISVSLYFTNTSIGTWKCQCSTLSKS

SEQ ID NO: 68569 - protein, 131 aa, Setaria italica
  Transcript Sequence Number=SeqID_2595
  Gene Ontology: Mol. function=structural constituent of ribosome; Cellular component=intracellular; Biological process=metabolic process
  Homolog annotation: Hit_ID=Q7XQJ6; Match level="QueryCoverage=100%, HitCoverage=28%, E-value=8e-41, Identity=61%"; Hit description =OSJNBa0017B10.12 protein
  Pfam annotation: Domain name=Plant_tran; Domain location=1-64; Score =80.5; E_value=6.2e-21; Accession=PF04827.6; Description=Plant transposon protein
KDKLYAEHQGGARKDVERAFGVLQARFAILRNPARMWQMRSLAEIMYACVILHNMIVEDERDTYKVRYDHDYNSEYDQTSTAPLSGYGHGPIHEFYKVLEIEEDIRDQDMHRRLKDDLVEHIWQRFRGNQS

SEQ ID NO: 68570 - protein, 75 aa, Setaria italica
  Transcript Sequence Number=SeqID_2596
  Gene Ontology: Mol. function=nucleic acid binding; Cellular component= nucleus; Biological process=protein amino acid phosphorylation
  Homolog annotation: Hit_ID=A6MZ96; Match level="QueryCoverage=89%, HitCoverage=32%, E-value=2e-26, Identity=88%"; Hit description =Splicing factor (Fragment)
  Pfam annotation: Domain name=RRM_1; Domain location=14-75; Score =58.8; E_value=2.1e-14; Accession=PF00076.14; Description=RNA recognition motif. (a.k.a. RRM, RBD, o
MPRYDDRYGGNTRLYVGRLSSRTRTEDLEDIFSRYGRVRYVDLKHEFAFVEFSDPRDADDARYNLDGREFDGSRI

SEQ ID NO: 68571 - protein, 155 aa, Setaria italica
  misc_feature (45)..(45): Xaa can be any naturally occurring amino acid
  Transcript Sequence Number=SeqID_2597
  Gene Ontology: Mol. function=nucleic acid binding
  Homolog annotation: Hit_ID=A6MZ96; Match level="QueryCoverage=76%, HitCoverage=55%, E-value=6e-56, Identity=90%"; Hit description =Splicing factor (Fragment)
  Pfam annotation: Domain name=RRM_1; Domain location=18-66; Score=3.4; E_value=0.095; Accession=PF00076.14; Description=RNA recognition motif. (a.k.a. RRM, RBD, o
  Pfam annotation: Domain name=zf-CCHC; Domain location=117-134; Score =29.2; E_value=7.3e-06; Accession=PF00098.15; Description=Zinc knuckle
  Pfam annotation: Domain name=zf-CCHC; Domain location=95-112; Score =30.9; E_value=3.9e-06; Accession=PF00098.15; Description=Zinc knuckle
  Pfam module annotation: Pfam domain module=RRM_1::zf-CCHC::zf-CCHC; Domain location=18-66::117-134::95-112
FKFLLTGDPFIFSLLDGVTVSGNHFRRVRYVDLKHEFAFVEFSDXRDADDARYNLDGREFDGSRIIVEFAKGVPRGTGGSRDREYMGRGPPPGSGRCFNCGIDGHWARDCKAGDWKNRCYRCGDRGHIERDCRNSPKNLSYSRSPSYHGSFHDEG

SEQ ID NO: 68572 - protein, 230 aa, Setaria italica
  misc_feature (91)..(91): Xaa can be any naturally occurring amino acid
  Transcript Sequence Number=SeqID_2598
  Gene Ontology: Mol. function=nucleic acid binding; Cellular component= nucleus
  Homolog annotation: Hit_ID=A6MZ96; Match level="QueryCoverage=39%, HitCoverage=54%, E-value=6e-34, Identity=68%"; Hit description =Splicing factor (Fragment)
  Pfam annotation: Domain name=RRM_1; Domain location=16-64; Score=4.9; E_value=0.069; Accession=PF00076.14; Description=RNA recognition motif. (a.k.a. RRM, RBD, o
  Pfam annotation: Domain name=zf-CCHC; Domain location=90-107; Score =29.3; E_value=7.2e-06; Accession=PF00098.15; Description=Zinc knuckle
  Pfam module annotation: Pfam domain module=RRM_1::zf-CCHC; Domain location=16-64::90-107
FLLTGDPFIFSLLDGVTVSGNHFRRVRYVDLKHEFAFVEFSDPRDADDARYNLDGREFDGSRIIVEFAKGVPRGTGGSRDREYMGRGPPPXCYRCGDRGHIERDCRNSPKNLRRGRSYSRSPSPRRGRSRDRSYSRSRSRSYSRSRSPRRDSRGERRSMSPRDSHSPMRSPRDSHSPRRNPRDSRSPRRSPSPSKGRDRSPSRSPAPRELNGDHSMSPRRADSRKPKQDQ

SEQ ID NO: 68573 - protein, 300 aa, Setaria italica
  Transcript Sequence Number=SeqID_2599
  Gene Ontology: Mol. function=nucleic acid binding; Cellular component= nucleus; Biological process=nuclear mRNA splicing, via spliceosome
  Homolog annotation: Hit_ID=A6MZ96; Match level="QueryCoverage=46%, HitCoverage=66%, E-value=3e-67, Identity=90%"; Hit description =Splicing factor (Fragment)
  Pfam annotation: Domain name=RRM_1; Domain location=14-75; Score =53.5; E_value=8.3e-13; Accession=PF00076.14; Description=RNA recognition motif. (a.k.a. RRM, RBD, o
  Pfam annotation: Domain name=zf-CCHC; Domain location=104-121; Score =30.9; E_value=3.9e-06; Accession=PF00098.15; Description=Zinc knuckle
  Pfam annotation: Domain name=zf-CCHC; Domain location=126-143; Score =29.2; E_value=7.3e-06; Accession=PF00098.15; Description=Zinc knuckle
  Pfam module annotation: Pfam domain module=RRM_1::zf-CCHC::zf-CCHC; Domain location=14-75::104-121::126-143
MPRYDDRYGGNTRLYVGRLSSRTRTEDLEDIFSRYGMRYVDLKHEFAFVEFSDPRDADDARYNLDGREFDGSRIIVEFAKGVPRGTGGSRDREYMGRGPPPGSGRCFNCGIDGHWARDCKAGDWKNRCYRCGDRGHIERDCRNSPKNLRRGRSYSRSPSPRRGRSRDRSYSRSRSRSYSRSRSPRRDSRGERRSMSPRDSHSPRRSPRDSHSPRRNPRDSRSPRRSPSPSKGRDRSPSRSPAPRELNGDHSMSPRRADSRSPADHERRDISPAANGRSPSPGDYKENGNQRPSPRGSASP

SEQ ID NO: 68574 - protein, 248 aa, Setaria italica
  Transcript Sequence Number=SeqID_2600
  Gene Ontology: Mol. function=aspartic-type endopeptidase activity; Biological process=DNA integration
  Homolog annotation: Hit_ID=Q7XM06; Match level="QueryCoverage=76%, HitCoverage=12%, E-value=5e-50, Identity=52%"; Hit description =OSJNBa0086O06.3 protein
QLRAEIVAEKGEEVLEEEEEEEEEVKSQRTPPRDRRRSQSPLRDRRRRGGARYESPQGRVVYRDSGSGTTWPMLDKTNYYEWSQTMKLRMQARDLWDAVEGGPVQYRDDRRALEVIVASVPKEMGLPLLDKATAKEAWDAIAATRIGVDRVRRATLQRLRREWENIDVKPGEQVEDFALRLSTLHQQLVLHGDRDIDEARVVEKFLRTVPAKYAQIVVAIEQFLDFEALTLEEVTGRLKAVDDREAQA

SEQ ID NO: 68575 - protein, 144 aa, Setaria italica
  misc_feature (108)..(108): Xaa can be any naturally occurring amino acid
  misc_feature (132)..(132): Xaa can be any naturally occurring amino acid
  Transcript Sequence Number=SeqID_2601
  Gene Ontology: Mol. function=transferase activity, transferring phosphorus-containing groups; Cellular component=chloroplast; Biological process=phosphorylation
  Homolog annotation: Hit_ID=C5IHD0; Match level="QueryCoverage=100%, HitCoverage=16%, E-value=3e-68, Identity=88%"; Hit description =Cytosolic orthophosphate dikinase
  Pfam annotation: Domain name=PEP-utilizers_C; Domain location=1-144; Score=-25.6; E_value=2.7e-12; Accession=PF02896.10; Description=PEP -utilising enzyme, TIM barrel domain
LGTPQELGNQVALIRETANKVFAALGKTIDYKIGTMIEIPRAALVADEIAEQAEFFSFGTNDLTQMTFGYSRDDVGKFLPIYLSQGILQHDPFEVLDQRGVGELVKLXTERGRKARPNLKVGICGEHGGEPXSSVAFFASRAGL

SEQ ID NO: 68576 - protein, 97 aa, Setaria italica
  Transcript Sequence Number=SeqID_2602
  Gene Ontology: Mol. function=DNA binding; Cellular component=nucleus; Biological process=regulation of transcription
  Homolog annotation: Hit_ID=Q9ZRZ2; Match level="QueryCoverage=97%, HitCoverage=27%, E-value=6e-35, Identity=72%"; Hit description=GRAB2 protein
  Pfam annotation: Domain name=NAM; Domain location=19-97; Score=102.3; E_value=1.6e-27; Accession=PF02365.7; Description=No apical meristem (NAM) protein
MSDVSATMNLGEEESPLVLPPGFRFHPTDGELIVDYLTRKALNRRFSCIVITEVDLNKTEPWDLPGKAKMGEKEWYFFCHKDRKYPTGARTNRATPT

SEQ ID NO: 68577 - protein, 73 aa, Setaria italica
  Transcript Sequence Number=SeqID_2603
LILMCVVYDGLPINASVIPVNVIDVMFSCIYSLPTVHAISSIKANNDVLPCYSILYRWTPPLPSTPRPVMMRL

SEQ ID NO: 68578 - protein, 83 aa, Setaria italica
  Transcript Sequence Number=SeqID_2604
ISSSNAKLSSYYIHVTYTQVFISTCVGLEMRNLHLYVILSEGLNIYHCHHKSCSLMKIGHISSKFICSGEQTGIYIAQGIRKN

SEQ ID NO: 68579 - protein, 81 aa, Setaria italica
  Transcript Sequence Number=SeqID_2605
  Subcellular localization annotation: CTP_CleavageSite=34; ConfidenceScore=5.23e-01
GTNQALQLAMASPPARSDSVPFFSSLLRFVAEFTARQVRDGDAFQHARRDQDSPNEGMILQVPKTIVARLEQGAKEDETKF

SEQ ID NO: 68580 - protein, 921 aa, Setaria italica
  misc_feature (422)..(422): Xaa can be any naturally occurring amino acid
  Transcript Sequence Number=SeqID_2606
  Gene Ontology: Mol. function=protein kinase activity; Cellular component=integral to membrane; Biological process=protein amino acid phosphorylation
  Homolog annotation: Hit_ID=B9T1C2; Match level="QueryCoverage=100%, HitCoverage=86%, E-value=0.0, Identity=54%"; Hit description =Receptor protein kinase, putative
  Pfam annotation: Domain name=LRR_1; Domain location=112-133; Score =11.3; E_value=2.1; Accession=PF00560.25; Description=Leucine Rich Repeat
  Pfam annotation: Domain name=LRR_1; Domain location=135-158; Score =6.7; E_value=16; Accession=PF00560.25; Description=Leucine Rich Repeat
  Pfam annotation: Domain name=LRR_1; Domain location=160-181; Score =8.4; E_value=7.6; Accession=PF00560.25; Description=Leucine Rich Repeat
  Pfam annotation: Domain name=LRR_1; Domain location=182-201; Score =8.7; E_value=6.6; Accession=PF00560.25; Description=Leucine Rich Repeat
  Pfam annotation: Domain name=LRR_1; Domain location=203-224; Score =7.6; E_value=11; Accession=PF00560.25; Description=Leucine Rich Repeat
  Pfam annotation: Domain name=LRR_1; Domain location=227-249; Score =3.3; E_value=71; Accession=PF00560.25; Description=Leucine Rich Repeat
  Pfam annotation: Domain name=LRR_1; Domain location=251-270; Score =13.0; E_value=0.99; Accession=PF00560.25; Description=Leucine Rich Repeat
  Pfam annotation: Domain name=LRR_1; Domain location=275-297; Score =7.7; E_value=10; Accession=PF00560.25; Description=Leucine Rich Repeat
  Pfam annotation: Domain name=LRR_1; Domain location=299-322; Score =12.8; E_value=1.1; Accession=PF00560.25; Description=Leucine Rich Repeat
  Pfam annotation: Domain name=LRR_1; Domain location=332-354; Score =14.1; E_value=0.58; Accession=PF00560.25; Description=Leucine Rich Repeat
  Pfam annotation: Domain name=LRR_1; Domain location=34-56; Score=0.0; E_value=3e+02; Accession=PF00560.25; Description=Leucine Rich Repeat
  Pfam annotation: Domain name=LRR_1; Domain location=356-378; Score =10.7; E_value=2.8; Accession=PF00560.25; Description=Leucine Rich Repeat
  Pfam annotation: Domain name=LRR_1; Domain location=380-401; Score =15.0; E_value=0.31; Accession=PF00560.25; Description=Leucine Rich Repeat
  Pfam annotation: Domain name=LRR_1; Domain location=402-424; Score =8.9; E_value=6; Accession=PF00560.25; Description=Leucine Rich Repeat
  Pfam annotation: Domain name=LRR_1; Domain location=58-80; Score =12.7; E_value=1.1; Accession=PF00560.25; Description=Leucine Rich Repeat
  Pfam annotation: Domain name=LRR_1; Domain location=86-110; Score =6.4; E_value=18; Accession=PF00560.25; Description=Leucine Rich Repeat
  Pfam annotation: Domain name=LRR_1; Domain location=9-32; Score=12.6; E_value=1.1; Accession=PF00560.25; Description=Leucine Rich Repeat
  Pfam annotation: Domain name=Pkinase; Domain location=640-916; Score =1.7; E_value=1.4e-08; Accession=PF00069.17; Description=Protein kinase domain
  Pfam annotation: Domain name=Pkinase_Tyr; Domain location=638-916; Score=-83.1; E_value=3.3e-08; Accession=PF07714.9; Description =Protein tyrosine kinase
  Pfam module annotation: Pfam domain module=LRR_1::LRR_1::LRR_1::LRR _1::LRR_1::LRR_1::LRR_1::LRR_1::LRR_1::LRR_1::LRR_1::LRR_1::LRR _1::LRR_1::LRR_1::LRR_1::LRR_1::Pkinase::Pkinase_Tyr; Domain location= 112-133::135-158::...
  Pfam module annotation: Domain location=160-181::182-201::203 -224::227-249::251-270::275-297::299-322::332-354::34-56::356 -378::380-401::402-424::58-80::86-110::9-32::640-916::638-916
PGRLSDLNGLVHLNLSHNNFSNGFPTDGIRQLQNLRRIDVRNNSFWGNAGDLLKELRNAEHIDLSDNLFTGSVDLELDNLTSIGNTVKYLNLSHNKLGGGFFRNETVGAFKNLAVLDLSNNGLGGTVPRLDAWFSLEIFRVSGNGLFGMMPEALLQNSMRLIEVDLSRNGFSGSLPIVNSTTLKVLNLSTNVLSGSLPATVGKCTSVDLSGNQFSGELAKLRSWDGIVEVIDLSSNKLEGSYPNDAAQFQNLVSLKLRNNSLSGSLPSVLGTYQKLSVLDLSLNALEGSVLPTFFMSPALTVLNLSGNRFTGTIPFQSTHSTESILLSSQPALKIVDLSSNSLNGPLPPDISNLQKLEFLILAMNELSGEIPSEISKLQALEYLDLSHNHLTGRIPDMPQNGLKLFNVSYNNLQGTVPKSVXKFPLSCFRPGNDLLVFPDGLPAGNDDYTGVGQSRTSHGHKAGVRVALIVGCIGAILLVIFIALALYVVRSQELCGRNGFRGQITIRDLKGRISRPNLFKSPKDNVIPSKTSFSNDHLLTAAARSMSAQKELLAEAAVEYGYTDPKEVAQSTSSGVAETSAAVQARESSPQAALPTSPHFDSRFHEEPVAFEVYSPDRLVGELIFVDSTLVFTAEDLSRAPAEVLGRSSHGTTYKAVLQSGHVLTVKWLRVGLVKHKKEFIKEVKRIGTISHPNIVSWRAFYWGPKEQERLIISDYISGDSLALYLYESTPRRYSRLSVSQRLRIAIELARCLQFLHHEKGLPHGNLKPTNIFLTGPDLSPKLVDYGLHRFMAPSGTAEQILNLGALGYRAPELANAAKPAPSFKADVYAFGVIVMEMLTRKSAGDIISGQSGAVDLTDWIQMCNREGRGTDCFDRDITGLEESPRIMDELLAISLRCILPVNERPNMKTVCDDLCSITV

SEQ ID NO: 68581 - protein, 105 aa, Setaria italica
  Transcript Sequence Number=SeqID_2607
SDKPLPGTVRVIGNVCCYKKERMVTNEHGERTKIAASKVQSNYSMSQTCLEPTTADCFEHFKNKPTSFYFPWFCPGLPETKTILVSKTQDQLPMLDRVEIRYIID

SEQ ID NO: 68582 - protein, 56 aa, Setaria italica
  misc_feature (2)..(2): Xaa can be any naturally occurring amino acid
  Transcript Sequence Number=SeqID_2608
NXKILILSSDEGVILFFSKVRLPVSLLFPDGKTFFQQIVDLTVWECGRQPYLPFPL

SEQ ID NO: 68583 - protein, 152 aa, Setaria italica
  Transcript Sequence Number=SeqID_2609
  Gene Ontology: Mol. function=protein binding
  Homolog annotation: Hit_ID=Q8S8F2; Match level="QueryCoverage=100%, HitCoverage=15%, E-value=2e-30, Identity=43%"; Hit description=LRR and BTB/POZ domain-containing protein FBL11
LSGCKLLDSSSQEIISSGWPNLVLLHLEDCGQVTVQGVSSILNCKALEDVLLRHTGRGIGRSIIDDAIRELPLLRKLALDLCDACEEGYESPNNAEGKMIRAVRMSRCKTLRGSCLELPRGSGGASKPVHKDTVVLEWSSTRLTTTIVKERV

SEQ ID NO: 68584 - protein, 51 aa, Setaria italica
  Transcript Sequence Number=SeqID_2610
MDHRPDCSLLLHSIIAVTSNQGDDLLHGWGKDKQNSEVFSPNLNELKINLV

SEQ ID NO: 68585 - protein, 131 aa, Setaria italica
  Transcript Sequence Number=SeqID_2611
  Gene Ontology: Mol. function=exonuclease activity; Cellular component= intracellular
  Homolog annotation: Hit_ID=Q2QWN8; Match level="QueryCoverage=93%, HitCoverage=20%, E-value=1e-57, Identity=89%"; Hit description =Exonuclease family protein, putative, expressed
  Pfam annotation: Domain name=Exonuc_X-T; Domain location=1-130; Score= 43.3; E_value=9.8e-10; Accession=PF00929.16; Description=Exonuclease
TLVDIRGTVMLDKLVKPANPIIDYNTRFSGITAEMLADVSTTLQEIQEEFVGLVHKETILVGHSLENDLTALRISHGLIIDTAVLYKYNRGARCKIALRVLTKKFLGREIQNTGSGHDSVEDARAALELAI

SEQ ID NO: 68586 - protein, 92 aa, Setaria italica
  Transcript Sequence Number=SeqID_2612
  Subcellular localization annotation: CTP_CleavageSite=73; ConfidenceScore=5.59e-01
WRVRSHAVSHPRACRSPPSALHPTPPPPAPTDTVKPSPYSPSMAPRSKQRRRLAANPGVAGVDPARFGPGRCSAEARGGPGRAGRRAAARGQ

SEQ ID NO: 68587 - protein, 290 aa, Setaria italica
  Transcript Sequence Number=SeqID_2613
  Homolog annotation: Hit_ID=B6TFF5; Match level="QueryCoverage=95%, HitCoverage=66%, E-value=1e-146, Identity=88%"; Hit description =Adenyl cyclase
MASQWLCEKSVHYQMATAHFSTEASEVDHPTAHVTEAVEEMYQKMLKSVEAETMPPNAWLWSMISSCSNKEDIKLLFQILQKLRVFRLSNLRINANFNDHLCMKVTEACARVGTLDYGLKALWKHNVYGITPTIGSAHYLLQHAKELNDTKLMESIMQVLRRNSLPLQPGTADIVFSICYNADRWDLLSKYADRFVKAGVKLHRTAFDIWMEFAAKVGDSQSIWNINSLRGKSVKHYTLATGFACAKGSLLDRKPENAAAMIKLLYKHLPDQKKPFVQSRQRIETTTKTK

SEQ ID NO: 68588 - protein, 69 aa, Setaria italica
  Transcript Sequence Number=SeqID_2614
NNVNHMIVIVEENSANITGQYKNDRIFLRLGPKKKHQSHHDTRLMYPLQEVYSDSFCSKLKGNMRDEFP

SEQ ID NO: 68589 - protein, 83 aa, Setaria italica
  Transcript Sequence Number=SeqID_2615
  Homolog annotation: Hit_ID=B6TT75; Match level="QueryCoverage=100%, HitCoverage=21%, E-value=1e-22, Identity=72%"; Hit description=F-box domain containing protein
  Pfam annotation: Domain name=DUF295; Domain location=1-48; Score =49.5; E_value=1.3e-11; Accession=PF03478.10; Description=Protein of unknown function (DUF295)
DLGWNALFLGRNRAFALSPAEFPACRANCIYLVDRQGHPDGVVRVVDMESQWARREETICPDDGPRGSSSAGWARRGWFFPNY

SEQ ID NO: 68590 - protein, 73 aa, Setaria italica
  misc_feature (42)..(42): Xaa can be any naturally occurring amino acid
  Transcript Sequence Number=SeqID_2616
  Gene Ontology: Mol. function=hydrolase activity; Cellular component =plasma membrane; Biological process=metabolic process
  Homolog annotation: Hit_ID=Q336Q4; Match level="QueryCoverage=100%, HitCoverage=25%, E-value=1e-32, Identity=84%"; Hit description =Haloacid dehalogenase-like hydrolase family protein, putative, expressed
DGTLCDSDPIHFCAFRELLQQIGFNGGVPITEEFYSANISGXHNDHLARSLFPDMDHEKAMQFMDDKEALFRK

SEQ ID NO: 68591 - protein, 274 aa, Setaria italica
  Transcript Sequence Number=SeqID_2617
  Gene Ontology: Mol. function=hydrolase activity; Cellular component =plasma membrane; Biological process=metabolic process
  Homolog annotation: Hit_ID=Q336Q4; Match level="QueryCoverage=92%, HitCoverage=88%, E-value=1e-114, Identity=78%"; Hit description =Haloacid dehalogenase-like hydrolase family protein, putative, expressed
  Pfam annotation: Domain name=Hydrolase; Domain location=46-235; Score= 108.4; E_value=2.4e-29; Accession=PF00702.18; Description=haloacid dehalogenase-like hydrolase
LVRYGANVIASSRGEEKKRRRISWTRSAATPADMATDSALTKLAPLEAILFDIDGTLCDSDPIHFCAFRELLQQIGFNGGVPITEEFYSANISGGHNDHLARSLFPDMDHEKAMQFMDDKEALFRKLAPGQLKAVDGLHDLCKWIEGRNLKRAAVTNAPRANAELMLSLLGLADFFPVLIIGSECDRAKPFPDPYLKALELIGASPDHTFIFEDSASGIRAGVAAGVPVVGLTTRNPGKALNDAGASLLIKDFQDPKLLSMLEELKPATANGRV

SEQ ID NO: 68592 - protein, 135 aa, Setaria italica
  misc_feature (6)..(6): Xaa can be any naturally occurring amino acid
  Transcript Sequence Number=SeqID_2618
  Gene Ontology: Mol. function=receptor activity
  Homolog annotation: Hit_ID=B9S5Q0; Match level="QueryCoverage=99%, HitCoverage=13%, E-value=2e-36, Identity=57%"; Hit description =Exportin-T, putative
IDPVYXGHLDVLDKIGKEEEDLMAEQRKDLIALFRSICRVAPAAAQLFIRGLLVTALSSAEVSVEDVEVTLTLFYRLGEAVGEEEIRTGAGLLGELVPMLLAARFSCHTHRLVALVYLETVTRYMKFMQEHVQYV

SEQ ID NO: 68593 - protein, 121 aa, Setaria italica
  Transcript Sequence Number=SeqID_2619
  Homolog annotation: Hit_ID=B6TJW7; Match level="QueryCoverage=100%, HitCoverage=100%, E-value=3e-47, Identity=81%"; Hit description =Rhodanese-like family protein
MGPVTLLKKWVHFGYIGLWTGQAFTKMNHRFVDDVAAAVAGDGGKDAKLLVACGEGLRSLIAVRMLHDDGYRNLAWLAGGFSKSADGDFPGVEGESKLQYATIGGVSYIFLQILLLLGVVK

SEQ ID NO: 68594 - protein, 227 aa, Setaria italica
  Transcript Sequence Number=SeqID_2620
  Gene Ontology: Mol. function=metal ion binding
  Homolog annotation: Hit_ID=B6SWB7; Match level="QueryCoverage=92%, HitCoverage=31%, E-value=1e-111, Identity=90%"; Hit description =Ankyrin-like protein
  Pfam annotation: Domain name=DUF248; Domain location=1-223; Score =82.8; E_value=1e-30; Accession=PF03141.8; Description=Putative methyltransferase
DNPDDVWYVNLKACISRLPEIGEGPTPAQWPARLMDPPKRLQGVEMDAYSSKNELFKAETKFWEDILEGYIRVFKWRKFKLRNVMDMRAGFGGFAAALINRKFDCWVMNVVPVTEPNTLPVIYDRGLLGVAHDWCEPFDTYPRTYDLLHAFGLFSKEQKRCNISSILLEMDRILRPGGRAYIRDRKEVIQEIKEITNAMGWRGTIRDTAEGPYASRKVLMCDKPMVH

SEQ ID NO: 68595 - protein, 43 aa, Setaria italica
  Transcript Sequence Number=SeqID_2621
NVFCTGGFHPIKSAAHFGLIWLCFTVVLHDAFETFLVLYDIAQ

SEQ ID NO: 68596 - protein, 156 aa, Setaria italica
  misc_feature (147)..(147): Xaa can be any naturally occurring amino acid
  Transcript Sequence Number=SeqID_2622
  Gene Ontology: Mol. function=protein serine/threonine kinase activity; Cellular component=chloroplast envelope; Biological process=protein amino acid phosphorylation
  Homolog annotation: Hit_ID=Q6RS98; Match level="QueryCoverage=94%, HitCoverage=25%, E-value=1e-64, Identity=77%"; Hit description =Protein kinase
  Pfam annotation: Domain name=Pkinase; Domain location=1-156; Score= -51.9; E_value=2.1e-05; Accession=PF00069.17; Description=Protein kinase domain
  Pfam annotation: Domain name=Pkinase_Tyr; Domain location=1-156; Score=-100.2; E_value=4.5e-07; Accession=PF07714.9; Description =Protein tyrosine kinase
  Pfam module annotation: Pfam domain module=Pkinase::Pkinase_Tyr; Domain location=1-156::1-156
VNFLRSYLSTDSNQRILVYEYMPKGSLEDHLLDLPPNWKPLPWHTRMQIAVGAAKGIEYLHEVANPPVIYRDLKASNILLDRDFNAKLSDFGLAKLGPMGDQSHVSTRVMGTYGYCAPEYAMTGKLTKMSDIYSFGVVLLELITGRXRAIDISRPS

SEQ ID NO: 68597 - protein, 120 aa, Setaria italica
  misc_feature (112)..(112): Xaa can be any naturally occurring amino acid
  Transcript Sequence Number=SeqID_2623
  Gene Ontology: Mol. function=zinc ion binding
  Homolog annotation: Hit_ID=Q9SY66; Match level="QueryCoverage=99%, HitCoverage=17%, E-value=4e-42, Identity=68%"; Hit description =Protein FAR1-RELATED SEQUENCE 11
  Pfam annotation: Domain name=SWIM; Domain location=69-105; Score =39.2; E_value=1.6e-08; Accession=PF04434.9; Description=SWIM zinc finger
GEQETMQQNLQNISLKTASPIEGHAAALLTPYAFSKLQDELVEAAHYASFHLEENIFLVRHHTEAVGGYSVTWNQREELISCSCQMFECLGILCRHALRVLSTLNYLQVPDXYLPVRWRR

SEQ ID NO: 68598 - protein, 69 aa, Setaria italica
  Transcript Sequence Number=SeqID_2624
GSYGSFLCCAGLFTWCAFADCYSVTLCLRGSSFLISNMDTQVKINNTKTVTRDALKWHPYTTYITLQTH

SEQ ID NO: 68599 - protein, 1132 aa, Setaria italica
  Transcript Sequence Number=SeqID_2625
  Gene Ontology: Mol. function=microtubule motor activity; Cellular component=microtubule associated complex; Biological process =microtubule-based movement
  Homolog annotation: Hit_ID=Q9FKP4; Match level="QueryCoverage=100%, HitCoverage=88%, E-value=0.0, Identity=62%"; Hit description =Similarity to kinesin heavy chain
  Pfam annotation: Domain name=Kinesin; Domain location=1-303; Score =187.9; E_value=2.9e-53; Accession=PF00225.15; Description=Kinesin motor domain
DEGSSVVEFPDDFTIRVNTGDESLTNPKKDYEFDRVYGPHIGQGELFHDVQPFVQSALDGYNISIFAYGQSRSGKTHTLEGSSHDRGLYLRSFEELFDLSNSDTTSTAHFNFYFTACELYNDQVRDLLSESSSTVPKVRMGVQESFVELVQEKVENPLEFSGALKTALQNRSVNSPKAMVSHLIITIHIHYRNYVTGEHLYSKLSLVDLPASECLLEEDAGRDNVTDFLHVSKSLSALGDAFASLSAKKEPVLSGNSRITQILADSLGSSSKILLIVHVSPSASNLSRTLSTLSFSARARNAELSLGNRDTIKKWKDVANDSRKELHDKEKEVLDLRQEVLGLKHSLKEANDQCMLLFNEVQKAWRVSSTLQADLKSENLMLAEKHKIEKEQNNELRDQISHLLKVEQEQKLKLQERDLTIQSLQAKLKSIESQLNEALNASDARSTIGSEAASVISSPKVTESTAESSSVTKRLEEELAKRDALIEKLHEENEKLFDRLTEKSGLGSAPQASSPSANKPANAQGREIGRSDSSKSRSPDVFASPTSQDKTGISGAIVKSSNELAKTTPAGEYLTSALMDFDPDQFEGFAAIADGANKLLMLVLAAVIKAGAAREHEILAEIRDAVFSFIRKMEPRKVMDAMLVSRVRILYIRSLLARSPELQSIKVFPVERFLEKSNTGRSRSSSRGSSPGRSPVYHHDHGSRTALVDEHVHGFKVNIKQERKSKFSSIVLKLRGVEEETWRQHVTGGKLREITEEAKAFSIGNKALAALFVHTPAGELQRQIRAWLAENFEFLSVTGGDAAGGATGQLELLSTAIMDGWMAGLGTAQPPTTDALGQLLSEYTKRVYTSQLQHLKDIAGTLATEEADDPAHVSKLRSALESVDHKRRKIMQQMRTDTALLTKEEGGSPIRNPPTAVEDARLASLISLDNILKQVKEVMRQSATRPMRKSKRKALLESLNDLLTQMPSLLDIDHPCAQKQIMEARKVVESLEEDPDDPVPQSNALGESEVSQWNVLQFNTGTTAPFIIKCGANSSSELVIKADLRVQEPKGGEVIRVVPRPSVLADLSFEEIKGVFEQLPEAVSLLALARTADGTRARYSRLYRTLASKVPALKEIVVEMERGGVFKDVRSS

SEQ ID NO: 68600 - protein, 504 aa, Setaria italica
  Transcript Sequence Number=SeqID_2626
  Homolog annotation: Hit_ID=Q01K45; Match level="QueryCoverage=97%, HitCoverage=91%, E-value=1e-107, Identity=47%"; Hit description =OSIGBa0158F13.2 protein
  Pfam annotation: Domain name=F-box; Domain location=35-82; Score =21.3; E_value=0.0041; Accession=PF00646.25; Description=F-box domain
RQVQAPDGLITSRAKSKGSPCLQDDDSQSGEIQIYSGPSLPEDILCHIHSLMPMRDAAQAACVSRAFLHSWRSHPNLDFSKKTLGSNKKTYGNGEVARDFSSKVDHILRKHSGIGVKKLKIHMPEFCNAKDSCYLDSWLQIAVIPGIEDLVLALSWRAKYNFPYSLLSNGSGDSIRSLHLAGCSFRPTSELGGLRTLTRLHLRDVCIKGGELGSLLSSSLTLEQLEIMYCDGIVCLKVPCLLQRLSDLKVFECRTLRVIDSKAPNISRFSFTGDHRVKLSLGEALQMNNLFMCFSGAVHYARVELPSSMPNLETATIYSGSEIVDTPMLHSKYAHLKNLSIALRAFTFPPTYDYFSLASFFDACPSLEIFLLDVSQRKMEHVSILGDPSGLRHLRGQHHHKIKSVKILGFTSSKSLVELTCHVVENITSLELLTLEAHQSTVRCSVPAHNCRKCSPLPIDVLMEAERALFAIRAFIEPKVSSKVKLNIVEPCRQCHAAELARIG

SEQ ID NO: 68601 - protein, 53 aa, Setaria italica
  Transcript Sequence Number=SeqID_2627
GTYKRSPMDLKCLTAGGDPVRCRDPGCADGSHPGDARVRTCRGNSDYQVIFCP

SEQ ID NO: 68602 - protein, 76 aa, Setaria italica
  Transcript Sequence Number=SeqID_2628
DARGGARPCTEPSTRARGRSLGTSIDREAKRLQPLDDRATRLEELVLPTRRNLDLAMFECIVALIKFLLHYILFPM

SEQ ID NO: 68603 - protein, 257 aa, Setaria italica
  misc_feature (187)..(187): Xaa can be any naturally occurring amino acid
  Transcript Sequence Number=SeqID_2629
  Gene Ontology: Mol. function=nucleoside-triphosphatase activity; Cellular component=mitochondrial matrix; Biological process=ATP -dependent proteolysis
  Homolog annotation: Hit_ID=P93648; Match level="QueryCoverage=99%, HitCoverage=24%, E-value=1e-104, Identity=76%"; Hit description=Lon protease homolog 2, mitochondrial
  Pfam annotation: Domain name=LON; Domain location=1-141; Score=26.8; E_value=1.7e-06; Accession=PF02190.8; Description=ATP-dependent protease La (LON) domain
KGTELLKRLHDVGTLAQITRIQGNLVVLLGHHRVRITEMVAEDPLTVKVDHLKEVPYDKDDDVIKATSFEVISTLRDVLKISSLWKDQVQTYTQHMGDFNYPRLADFGAAISGANKLLCQKVLEELDVCKRLKLTLELVKRELEISKLQESIAKTIEEKVTGEQRRYLLNELLKAIKKLLTLSPDDXTALSGLFLKNCHFFVPTQNRLAIFYVAEKFRKRIEAKKDKCPPHVLQVIEEELTKLQLLEASSSEFSVEP

SEQ ID NO: 68604 - protein, 240 aa, Setaria italica
  misc_feature (11)..(11): Xaa can be any naturally occurring amino acid
  Transcript Sequence Number=SeqID_2630
  Gene Ontology: Mol. function=metal ion binding
  Homolog annotation: Hit_ID=UPI0001505866; Match level="QueryCoverage =53%, HitCoverage=9%, E-value=3e-39, Identity=59%"; Hit description =EDM2; transcription factor
CNNATCGHFYXTPNCVAKQLHPNNRNEATELEKNITEGFSFTCPIHWCFRCKGLEDRTQEPLQFAVCRRCPKSYHRKCLPREISFQDIEEEEIITRAWELSKRILIYCQDHEINSEIDTPVRDHIEFPKIRKPAQGAKLLVKKKKSVFSEAVLDQPSIDTGKMKGMVRVQKSEQIKQTSREVSTKSFTEDLVFKPEKKKVKLLKEKIQPEPRVSSPKPVKEQELVSFAFICYKEDSPEFI

SEQ ID NO: 68605 - protein, 527 aa, Setaria italica
  misc_feature (153)..(153): Xaa can be any naturally occurring amino acid
  Transcript Sequence Number=SeqID_2631
  Gene Ontology: Mol. function=protein tyrosine kinase activity; Cellular component=integral to membrane; Biological process =regulation of transcription, DNA-dependent
  Homolog annotation: Hit_ID=Q6R2K3; Match level="QueryCoverage=41%, HitCoverage=28%, E-value=1e-73, Identity=63%"; Hit description =Protein STRUBBELIG-RECEPTOR FAMILY 3
  Pfam annotation: Domain name=LRRNT_2; Domain location=39-79; Score =18.9; E_value=0.011; Accession=PF08263.4; Description=Leucine rich repeat N-terminal domain
  Pfam annotation: Domain name=LRR_1; Domain location=105-124; Score =9.4; E_value=4.9; Accession=PF00560.25; Description=Leucine Rich Repeat
  Pfam annotation: Domain name=LRR_1; Domain location=127-149; Score =15.2; E_value=0.28; Accession=PF00560.25; Description=Leucine Rich Repeat
  Pfam annotation: Domain name=LRR_1; Domain location=176-198; Score =11.6; E_value=1.8; Accession=PF00560.25; Description=Leucine Rich Repeat
  Pfam annotation: Domain name=LRR_1; Domain location=200-221; Score =12.0; E_value=1.5; Accession=PF00560.25; Description=Leucine Rich Repeat
  Pfam annotation: Domain name=LRR_1; Domain location=222-244; Score =8.1; E_value=8.6; Accession=PF00560.25; Description=Leucine Rich Repeat
  Pfam module annotation: Pfam domain module=LRRNT_2::LRR_1::LRR_1::LRR_ 1::LRR_1::LRR_1; Domain location=39-79::105-124::127-149::176 -198::200-221::222-244
MRRAPGGHRGGGGRLPLLLLLLALQALAAAPRLAGAVTDAADVSAINGLYVALGSPTLPGWTGNGGDPCGELWQGVVCTGSTITGITMNAANLGGQLGSLGNFTSIITIDLSNNNIGGTIPEDLPVTLQSLFLSANQLTGSIPSSLSKIKNLXTAMSVNGNHLNGDLPDAFDSLSRLVNLDISSNNMTGVLPSSMKSLASLTTLHMQDNQLSGTLNVLQDLPLKDLNIENNMFSGPVPASLLNIPNFKKDGNPFNTSIAPSASPPSPSTGMAPTPTPAGPKPAPTPASAPTSSNSTPVPAPPSPASRAPPPSKTTSNTSEGSTTRDSTSPSRKHSTSTLKIVGFVLLGVVLFIIMVLLVLFCLSKYEERQTRYDHNRSQLARVHHRVEPQIKPPPVQQRDDVKKGQSEGLDRRGRELSSSAAAVPKKSPENQKEHVINFDRTESDLFPVLPPPPPPPLPSIERVAANPIVPPEKRYSPPPRTSTPTSATPFSVASLQQYTNSFSEENVIRESRLGKVYLAELPDGKL

SEQ ID NO: 68606 - protein, 70 aa, Setaria italica
  misc_feature (15)..(15): Xaa can be any naturally occurring amino acid
  Transcript Sequence Number=SeqID_2632
  Gene Ontology: Mol. function=diaminohydroxyphosphoribosylaminopyrimidi ne deaminase activity; Biological process=riboflavin biosynthetic process
  Homolog annotation: Hit_ID=Q6K6I4; Match level="QueryCoverage=61%, HitCoverage=6%, E-value=1e-12, Identity=76%"; Hit description =Putative riboflavin biosynthesis protein ribD
FIKVCAFVAPKIVGXVNAPTPVGELGMSQMTQAISFIDVTYEQVNSCSSSDTFHSMHISETDRVDSLHFY

SEQ ID NO: 68607 - protein, 324 aa, Setaria italica
  Transcript Sequence Number=SeqID_2633
  Gene Ontology: Mol. function=diaminohydroxyphosphoribosylaminopyrimidi ne deaminase activity; Biological process=riboflavin biosynthetic process
  Homolog annotation: Hit_ID=Q6K6I4; Match level="QueryCoverage=100%, HitCoverage=52%, E-value=1e-169, Identity=86%"; Hit description =Putative riboflavin biosynthesis protein ribD
  Pfam annotation: Domain name=DUF1768; Domain location=156-312; Score =263.1; E_value=6.3e-76; Accession=PF08719.3; Description=Domain of unknown function (DUF1768)
  Pfam annotation: Domain name=RibD_C; Domain location=2-121; Score =5.8; E_value=1.5e-06; Accession=PF01872.9; Description=RibD C -terminal domain
  Pfam module annotation: Pfam domain module=DUF1768::RibD_C; Domain location=156-312::2-121
WNVNEAYTIVATQRGARRDFQKKLAMKGVEVVEFDMLNPRDVMSYCYDRGYLSVLWECGGTLAASAISASVIHKVCAFVAPKIVGGVNAPTPVGELGMSQMTQAISFIDVTYEQIDRDMLISGFIQPIPDLSPVIPSVDKIPSIDPEVSPYETDIISFYKTWDTFGAFSNFSSHPIHMPDDNGDYFTWPTVEHYYQAHKFVGVDNPQARTIIQEIKLAKSPEEAARIGRTRQKEFPELVRTDWETKKIDVMYRAIKCKFATYPSLTNMLLSTAGSVLVEASPHDLFWGGGREGEGLNYLGRLLMQLRSEILGTFPASVKAEDAA

SEQ ID NO: 68608 - protein, 167 aa, Setaria italica
  Transcript Sequence Number=SeqID_2634
  Gene Ontology: Mol. function=DNA binding; Cellular component=nucleus; Biological process=regulation of transcription
  Homolog annotation: Hit_ID=Q6Z535; Match level="QueryCoverage=100%, HitCoverage=51%, E-value=2e-72, Identity=79%"; Hit description =Putative typical P-type R2R3 Myb protein
  Pfam annotation: Domain name=Myb_DNA-binding; Domain location=14-61; Score=42.1; E_value=2.2e-09; Accession=PF00249.23; Description=Myb -like DNA-binding domain
  Pfam annotation: Domain name=Myb_DNA-binding; Domain location=67-112; Score=47.4; E_value=5.5e-11; Accession=PF00249.23; Description=Myb -like DNA-binding domain
  Pfam module annotation: Pfam domain module=Myb_DNA-binding::Myb_DNA -binding; Domain location=14-61::67-112
MGRPPCCDKVGVKKGPWTPEEDLMLVSYVQEHGPGNWRAVPTNTGLMRCSKSCRLRWTNYLRPGIKRGNFTDQEEKLIIHLQALLGNRWAAIASYLPERTDNDIKNYWNTHLKKKLKKMQAGGEGDGGDDGGGGDAGGRTGAGGGKRPAVPKGQWERRLQTDIHTAR

SEQ ID NO: 68609 - protein, 174 aa, Setaria italica
  Transcript Sequence Number=SeqID_2635
  Gene Ontology: Mol. function=metal ion binding
  Homolog annotation: Hit_ID=Q8H5Z8; Match level="QueryCoverage=44%, HitCoverage=28%, E-value=3e-12, Identity=57%"; Hit description=RING -H2 zinc finger protein-like
VECARRRRLRQGGSSSGAAEAPCGTRRPSFCLYAGGHGRTHLGSSAVASSKERSGVCKEMMMARAWALDSNAREAKERLDQKLRGQRESTVKRHQMSTGTVRPLTAAKPPHATSTDASSNNLQHSATAAEPGATPRELQREVFSFSKPASGGGAAARRRRFSWRRLGRCSTPSS

SEQ ID NO: 68610 - protein, 228 aa, Setaria italica
  Transcript Sequence Number=SeqID_2636
  Gene Ontology: Mol. function=triacylglycerol lipase activity; Biological process=lipid metabolic process
  Homolog annotation: Hit_ID=Q10B43; Match level="QueryCoverage=99%, HitCoverage=58%, E-value=1e-65, Identity=57%"; Hit description =Lipase family protein, expressed
VQDHFHHGLFANISQGVAFVKSHMLSISHSTGKIADHGSNISEPLLKDAADVIQSAANGHSIDCSGQQVVTSEEGLALVNKEDVTCVSSAGSGFTSQEDSDTSGSLDTQQPSSPPYEGKEALNQNGARNDKQKELISASCSRQFFPPGRIIHMVALAPPDSNPGEGTSSSEIIEIYETPRDLYGKIRLAPNMIKEHYMPSYISTMESLLEQLQKDDDDNSVCTTSNDL

SEQ ID NO: 68611 - protein, 88 aa, Setaria italica
  Transcript Sequence Number=SeqID_2637
SESLTFAINSVLILFLQPIDTPSLSYFWIGPQSVKINKLVLNGQSCGHLSQKPNKQSNESGVSVKLLAVLNDDFKVIDLFFEVNKVFY

SEQ ID NO: 68612 - protein, 57 aa, Setaria italica
  Transcript Sequence Number=SeqID_2638
  Gene Ontology: Mol. function=Rab GDP-dissociation inhibitor activity; Biological process=regulation of GTPase activity
  Homolog annotation: Hit_ID=Q8LBY8; Match level="QueryCoverage=84%, HitCoverage=10%, E-value=1e-17, Identity=89%"; Hit description=GDP dissociation inhibitor
FHYIIYLQVEFDMEGKVCGVTSEGETAKCKKVVCDPSYLPNKVRKIGKVARAIAIYC

SEQ ID NO: 68613 - protein, 40 aa, Setaria italica
  Transcript Sequence Number=SeqID_2639
MHCIVAQTIFCYKFSSRHHSKVQSLMGATFSAKGRFTRSL

SEQ ID NO: 68614 - protein, 162 aa, Setaria italica
  Transcript Sequence Number=SeqID_2640
  Gene Ontology: Mol. function=Rab GDP-dissociation inhibitor activity; Cellular component=cytoplasm; Biological process=regulation of GTPase activity
  Homolog annotation: Hit_ID=Q706C9; Match level="QueryCoverage=100%, HitCoverage=36%, E-value=3e-82, Identity=88%"; Hit description=GDP dissociation inhibitor
  Pfam annotation: Domain name=GDI; Domain location=1-162; Score=-5.0; E_value=3.4e-16; Accession=PF00996.10; Description=GDP dissociation inhibitor
KRRARNFFIYVQDYNEADPKTHQGLDLTMVTTRELIAKYGLSDDTVDFIGHALALHRDDRYLDEPALDTVKRMKLYAESLARFQGGSPYIYPLYGLGELPQGFARLSAVYGGTYMLNKPECKVEFDMEGKVCGVTSEGETAKCKKVVCDPSYLLNKVRKIGR

SEQ ID NO: 68615 - protein, 65 aa, Setaria italica
  Transcript Sequence Number=SeqID_2641
  Gene Ontology: Mol. function=Rab GDP-dissociation inhibitor activity; Biological process=regulation of GTPase activity
  Homolog annotation: Hit_ID=Q8LBY8; Match level="QueryCoverage=64%, HitCoverage=9%, E-value=6e-14, Identity=80%"; Hit description=GDP dissociation inhibitor
MFRNQLSSCNSCEIQPLMCYWISFIVIVSAEAETDNPQSELRPGIDLLGQVDELFFDMYDRYEPV

SEQ ID NO: 68616 - protein, 445 aa, Setaria italica
  Transcript Sequence Number=SeqID_2642
  Gene Ontology: Mol. function=Rab GDP-dissociation inhibitor activity; Cellular component=cytoplasm; Biological process=regulation of GTPase activity
  Homolog annotation: Hit_ID=Q706C9; Match level="QueryCoverage=96%, HitCoverage=96%, E-value=0.0, Identity=86%"; Hit description=GDP dissociation inhibitor
  Pfam annotation: Domain name=GDI; Domain location=1-438; Score =1081.3; E_value=0; Accession=PF00996.10; Description=GDP dissociation inhibitor
MDEEYDVIVLGTGLKECILSGLLSVDGLKVLHMDRNDYYGGDSTSLNLNQLWKKFRGEDKPPAHLGASRDYNVDMVPKFMMANGTLVRTLIHTDVTKYLSFKAVDGSYVFSKGKIHKVPATDMEALKSPLMGLFEKRRARNFFVYVQNYNEADPVTHQGLDLTRITTRELISKHGLSDDTVDFIGHALALHRDDCYLNEPALDTVKRMKLYAESLARFQGGSPYIYPLYGLGELPQAFARLSAVYGGTYMLNKPECKVEFDMEGKVCGVTSEGETAKCKKVVCDPSYLPNKVRKIGKVARAIAIMSHPIPNTNDSHSVQIILPQKQLGRKSDMYVFCCSYTHNVAPKGKFIAFVSAEAETDNPQSELRPGIDLLGQVDELFFDMYDRYEPVNEPSLDNCFVSTSYDATTHFETTVTDVLSMYTAITGKTVDLSVDLSAASAAEEY

SEQ ID NO: 68617 - protein, 445 aa, Setaria italica
  Transcript Sequence Number=SeqID_2643
  Gene Ontology: Mol. function=Rab GDP-dissociation inhibitor activity; Cellular component=cytoplasm; Biological process=regulation of GTPase activity
  Homolog annotation: Hit_ID=Q706C9; Match level="QueryCoverage=96%, HitCoverage=96%, E-value=0.0, Identity=85%"; Hit description=GDP dissociation inhibitor
  Pfam annotation: Domain name=GDI; Domain location=1-438; Score =1083.1; E_value=0; Accession=PF00996.10; Description=GDP dissociation inhibitor
MDEEYDVIVLGTGLKECILSGLLSVDGLKVLHMDRNDYYGGDSTSLNLNQLWKRFRGEDKPPTHLGASRDYNVDMVPKFMMANGTLVRTLIHTDVTKYLSFKAVDGSYVFSKGKIYKVPATDMEALKSPLMGLFEKRRARNFFIYVQDYNEADPKTHQGLDLTMVTTRELIAKYGLSDDTVDFIGHALALHRDDRYLDEPALDTVKRMKLYAESLARFQGGSPYIYPLYGLGELPQGFARLSAVYGGTYMLNKPECKVEFDMEGKVCGVTSEGETAKCKKVVCDPSYLLNKVRKIGRVVRAIAIMSHPIPNTNESHSVQIILPQKQLGRRSDMYVFCCSYTHNVAPRGKFIAFVSAEAETDNPQSELKPGLDLLGSVDEIFYDIYDRYEPVNEPSLDNCFVSTSYDATTHFETTVTDVLNMYTMITGKTVDLSVDLSAASAAEEY

SEQ ID NO: 68618 - protein, 179 aa, Setaria italica
  Transcript Sequence Number=SeqID_2644
QAASSAAAAVRDKIADAKAAVAEAERLERTIISAGAGGDAGGMVIVTLVAKITTSVLSMFVLQALTSPSSLDAGGVQPALASSAVDVPELEPWRESLSLIHDRFPSRATVAEHEKVATVVRDLVNGKDDGGGRHGSHQQDELARGHVELLRARSGELREEVEMFDCVLDEVFDEVIRGR

SEQ ID NO: 68619 - protein, 108 aa, Setaria italica
  misc_feature (94)..(94): Xaa can be any naturally occurring amino acid
  Transcript Sequence Number=SeqID_2645
  Gene Ontology: Cellular component=plastid inner membrane
  Homolog annotation: Hit_ID=B6TEI2; Match level="QueryCoverage=98%, HitCoverage=26%, E-value=3e-49, Identity=97%"; Hit description =Maltose excess protein 1-like
IFAKKKETEAVIVQTLGVISTYAVLVQLAMAESMPVPQFVATSVVVAAGLVLNFLNYFGWIPGTLWLLWEDFITVGGLAVLPQVMWSTFVPFIXPNSVLPGIISGSLA

SEQ ID NO: 68620 - protein, 39 aa, Setaria italica
  Transcript Sequence Number=SeqID_2646
  Gene Ontology: Mol. function=DNA binding; Cellular component=nucleus; Biological process=regulation of transcription, DNA-dependent
  Homolog annotation: Hit_ID=Q8LT05; Match level="QueryCoverage=100%, HitCoverage=8%, E-value=1e-12, Identity=89%"; Hit description =Transcription factor PCF7
LKLEEDKNQLSKGLDPWGNNPTATTSTLHYLLQEKERAQ

SEQ ID NO: 68621 - protein, 92 aa, Setaria italica
  misc_feature (67)..(67): Xaa can be any naturally occurring amino acid
  Transcript Sequence Number=SeqID_2647
  Homolog annotation: Hit_ID=B6TTY2; Match level="QueryCoverage=92%, HitCoverage=32%, E-value=3e-16, Identity=55%"; Hit description=DNA binding protein
  Pfam annotation: Domain name=Remorin_C; Domain location=1-92; Score =66.8; E_value=8.2e-17; Accession=PF03763.5; Description=Remorin, C -terminal region
LNNRFKREEVVINGWEGDQVEKASAWLKKYERKLEEKRAKAMEKAQNEVAKARRKAEEKRASAEAKXGTKVARVLELANFMRAVGEGAPPPS

SEQ ID NO: 68622 - protein, 131 aa, Setaria italica
  Transcript Sequence Number=SeqID_2648
  Homolog annotation: Hit_ID=B6TTY2; Match level="QueryCoverage=80%, HitCoverage=40%, E-value=4e-27, Identity=61%"; Hit description=DNA binding protein
  Pfam annotation: Domain name=Remorin_C; Domain location=17-129; Score= 137.8; E_value=3.3e-38; Accession=PF03763.5; Description=Remorin, C -terminal region
HGHAGGGGEGGVSVGQVKKEEVESKIAAWQIAEVAKLNNRFKREEVVINGWEGDQVEKASAWLKKYERKLEEKRAKAMEKAQNEVAKARRKAEEKRASAEAKRGTKVARVLELANFMRAVGRAPSTKRSFF

SEQ ID NO: 68623 - protein, 144 aa, Setaria italica
  Transcript Sequence Number=SeqID_2649
  Gene Ontology: Mol. function=prephenate dehydrogenase (NADP+) activity; Biological process=tyrosine biosynthetic process
  Homolog annotation: Hit_ID=B9N704; Match level="QueryCoverage=97%, HitCoverage=70%, E-value=2e-49, Identity=56%"; Hit description =Arogenate dehydrogenase
ADHGIRFFGSVDALCEERPDVLLICSSILSTESVVSAIPFHKLRPDTIVADVLSVKQFPRNLLLEILPPGFGIVCTHPMFGPESGKHGWGKLPFVYDKVRVAEGGDQATKCDQFLSIFEQEDGRMVEMSCAEHDRYAAGSQFIT

SEQ ID NO: 68624 - protein, 56 aa, Setaria italica
  Transcript Sequence Number=SeqID_2650
HGERRQRHPVPQAPPRHHRRRRALRQAVPPQPPPRDLLPTNAILQCSSETKLLVAG

SEQ ID NO: 68625 - protein, 200 aa, Setaria italica
  Transcript Sequence Number=SeqID_2651
  Gene Ontology: Mol. function=structural constituent of ribosome; Cellular component=ribonucleoprotein complex; Biological process =translation
  Homolog annotation: Hit_ID=B9S526; Match level="QueryCoverage=100%, HitCoverage=100%, E-value=1e-82, Identity=71%"; Hit description=60S ribosomal protein L13a, putative
  Pfam annotation: Domain name=Ribosomal_L13; Domain location=5-121; Score=144.4; E_value=3.5e-40; Accession=PF00572.10; Description =Ribosomal protein L13
MVSGCVVVDARGHMMGRLASAVAKELLKGQRVAVLRCEEMTLSGGLVRQKSRFLRFLRKRMNTKPSHGPVHHRSPARIFWRAVRGMVPHKTARGEAALARLQAFDGVPPPYDRTKRMVIPDALKVLRLQKGHKYCLLGDLSKEVGWNYQDTIRELEEKRKEKAKVAYDRKKQLAKLRVKAEKVAEEKLGSQLDVLAPVTY

SEQ ID NO: 68626 - protein, 47 aa, Setaria italica
  Transcript Sequence Number=SeqID_2652
VILTDHHYRTPIHHYHSDSVILNFWLSNGVGCILHFITNECIFCSRD

SEQ ID NO: 68627 - protein, 120 aa, Setaria italica
  Transcript Sequence Number=SeqID_2653
  Gene Ontology: Mol. function=acid phosphatase activity
  Homolog annotation: Hit_ID=Q53Q74; Match level="QueryCoverage=100%, HitCoverage=21%, E-value=1e-56, Identity=86%"; Hit description =Ser/Thr protein phosphatase family protein, expressed
HQGEGERMRLAMERMLYEARVDVVFAGHVHAYEPLRKIYDNEADSRGPMYITIGDGGNREGLALRFIEDHKSAHLSVFREASFGHGRLRIVNETSAVWTWHRNDDEYATVRDEVWLESLA

SEQ ID NO: 68628 - protein, 513 aa, Setaria italica
  Transcript Sequence Number=SeqID_2654
  Gene Ontology: Mol. function=acid phosphatase activity
  Homolog annotation: Hit_ID=Q53Q74; Match level="QueryCoverage=97%, HitCoverage=91%, E-value=0.0, Identity=81%"; Hit description=Ser/Thr protein phosphatase family protein, expressed
  Pfam annotation: Domain name=Metallophos; Domain location=213-407; Score=56.9; E_value=7.9e-14; Accession=PF00149.20; Description =Calcineurin-like phosphoesterase
VARNILLMCKIARVAAALIRVLYLVAVAAPVKSLLAVAKVAFSLVNAPCLRYMNQAALGRSCTGTFCGDLLVGAMAHSWRMLVQGLTSLMFFCAHADEYVRPPPSPLVLMAHDKPASHPQQVHISVVGANHMRISWVTDDRNAPSVVEYGTSPGKYTASATGNHTTYHYFFYKSGAIHHVTIGPLEPVMTYYYRCGRAGDEFSFRTPPATLPIEFVVIGDLGQTGWTASTLSHIGGGDYDMLLLPGDLSYADTQQPLWDSFGRLVQPLASARPWMVTEGNHEMETLPIVEFAPFAAYNARWRMPHEESGSRSNLYYSFDAAGGAAHVVMLGSYAAFGEGSEQHRWLEADLARVDRRRTPWLLVLLHAPWYNTNQAHQGEGERMRLAMERMLYEARVDVVFAGHVHAYERFTRIYDNEADSRGPMYITIGDGGNREGLALRFIEDHKSAHLSVFREASFGHGRLRIVNETSAVWTWHRNDDEYATVRDEVWLESLAAAKPSLATTTAGRHTDEL

SEQ ID NO: 68629 - protein, 144 aa, Setaria italica
  Transcript Sequence Number=SeqID_2655
MAGLQRSATTFRRSGSSGLVWDERFLTEAEADAEAKAGDGAAEEPQPELRHSRSVGSIGMLRRGGAGGNGDNKKAKAKAKDQKKGHKEDARSNQQVFRTKDVAPDVDPPSPRVSGCILCSIFGGSSGSGSGAGTARRRSKPRKK

SEQ ID NO: 68630 - protein, 553 aa, Setaria italica
  Transcript Sequence Number=SeqID_2656
  Gene Ontology: Mol. function=two-component response regulator activity; Cellular component=nucleus; Biological process=two -component signal transduction system (phosphorelay)
  Homolog annotation: Hit_ID=B6UC09; Match level="QueryCoverage=99%, HitCoverage=95%, E-value=0.0, Identity=83%"; Hit description=Two -component response regulator ARR11
  Pfam annotation: Domain name=Myb_DNA-binding; Domain location=172 -222; Score=46.9; E_value=7.9e-11; Accession=PF00249.23; Description =Myb-like DNA-binding domain
  Pfam annotation: Domain name=Response_reg; Domain location=1-101; Score=60.7; E_value=5.5e-15; Accession=PF00072.16; Description =Response regulator receiver domain
  Pfam module annotation: Pfam domain module=Myb_DNA-binding::Response _reg; Domain location=172-222::1-101
INLEKMLRKCSYEVTTCGLASVALQILRERRNKFDIVISDVNMPDMDGFKLLEHIGLEMDLPVIMMSIDGETSRVMKGVQHGACDYLLKPVRMKELRNIWQHVYRKKMHEVKEIEGNDSCDDLQIFRNGCEGLEERGLFMRADSDTMRKRKDVDKDHADQDSSDGATVKKARVVWSVDLHQKFVNAVNQIGFDKVGPKKILDLMNVPGLTRENVASHLQKYRLYLSRLQKQNEERILGATRQDFSHKGPPDNLNLRNSFQEQPSNGANGFQHTSQKIQAQSNMLDPHLEDTKIVVPLKVSDKNGTPVSDVIDPQNVPSASPLGGVLSFERMPLNQDRKPSETMILECQSWSGNVPPKQFMQYPKHNHERCDLLGDYSCLPKPDLEHPITPGNLYVPPPLVSMSCSMEGDVRDFSDVKRDLLGCMKSLSPALTCTVDSVSAQLSDSVVTSTNNDPKFSSVEGLSSSKECLFDPARNQTTLLNSEEASIICGTDLACLPDDLSGYQLQGIGLNNIDLFQCNDAMMLHGLQNNWYDDPELSSEIMEFPLLDECLFA

SEQ ID NO: 68631 - protein, 185 aa, Setaria italica
  Transcript Sequence Number=SeqID_2657
  Homolog annotation: Hit_ID=O49432; Match level="QueryCoverage=98%, HitCoverage=38%, E-value=1e-56, Identity=62%"; Hit description =Polygalacturonase QRT3
YNKATGFGGTGIYFKSPGLTQAWISNCYMDYTSIVAEDPVLLHVSGSFFLGDANVVLKAVNGVARGVQVVGNIFSGRDKGVDIVQLDGKFATVDQVYVQQNSATGMTVKSTAARGSAEGNGSSWTVDFADVLLFPDRIGHVQYSLVAGNEFPGHTLRNVSGNQVVVATDKAVSATVHVLVDQNTN

SEQ ID NO: 68632 - protein, 610 aa, Setaria italica
  misc_feature (60)..(60): Xaa can be any naturally occurring amino acid
  Transcript Sequence Number=SeqID_2658
  Gene Ontology: Mol. function=nucleic acid binding
  Homolog annotation: Hit_ID=B6UDM7; Match level="QueryCoverage=87%, HitCoverage=80%, E-value=1e-172, Identity=63%"; Hit description=Zinc finger C-x8-C-x5-C-x3-H type family protein
  Pfam annotation: Domain name=zf-CCCH; Domain location=35-59; Score =8.5; E_value=0.12; Accession=PF00642.16; Description=Zinc finger C -x8-C-x5-C-x3-H type (and similar)
  Pfam annotation: Domain name=zf-CCCH; Domain location=93-118; Score =27.6; E_value=5.1e-05; Accession=PF00642.16; Description=Zinc finger C-x8-C-x5-C-x3-H type (and similar)
  Pfam module annotation: Pfam domain module=zf-CCCH::zf-CCCH; Domain location=35-59::93-118
ARRRRNTTASLLPRLPLTCNKGSECDFRHSDAARMNPRDCWYWFNGNCANPKCSFRHPPXDNLLGAPTTPRAPQQPAPQVSAPAQAHGSVPAKQAVPCYYFQKGMCAKGDRCAFSHGPESAGNPAPQPVAPAKVFTPALHPNPQLKNSWTKPSPSPQQNTPAGIPDKSKLSAHDAKPLQKQHVTSRVDHLSRIFQNHSNSYAQSGSTKHHKPQPPVQDDLTEDGMEVGEFVREPSAASGVLVGGVNDDSEHSFKGNRSSYHHRTNGTGITRQTHGGYEPERSHRGSAERLSSEKRISHREPMPAVAASSSDLRHRLLKQRKLNNNSRSTEAPDANDAYLEGERNDQHRWRREEHDGPLSRSRLRDRIRLPGETSLDRLGSRSEKEWDRGPRGRLSPPKHSDLRGKLHERLKARSAEEIPGNSAKSLVVKASTVEDAESLNFAGPKSLAELKAKKGVGSSSGEDAIVKGISSSRMTSGIIPSREPAPFEGPKPLSAILKRKREVASENAAAHSGSIQEDDDAAGVDEESQILANDKVGENMEGNIEEEEAEEEAFHPEDDVAYDDEAADQELEEHQNVEAAAEDYDYEAADVNAAAGQELEEHQDVEAAAE

SEQ ID NO: 68633 - protein, 185 aa, Setaria italica
  Transcript Sequence Number=SeqID_2659
  Gene Ontology: Mol. function=protein disulfide oxidoreductase activity; Cellular component=extracellular region; Biological process=electron transport chain
  Homolog annotation: Hit_ID=B6SKU5; Match level="QueryCoverage=100%, HitCoverage=100%, E-value=1e-85, Identity=82%"; Hit description=Grx _S15.1-glutaredoxin subgroup II
  Pfam annotation: Domain name=Glutaredoxin; Domain location=89-153; Score=89.5; E_value=1.1e-23; Accession=PF00462.16; Description =Glutaredoxin
  Subcellular localization annotation: CTP_CleavageSite=18; ConfidenceScore=5.45e-01
MARLVSTALVRGLMRSSRASSAAAVSRPAIQQFMNYSSGLGGAPSANGDSMTTRVAADPDTHQDFQPTSKSSEMSFDDIVAQDIKEHPVLIYMKGYPDAPRCGFSALAVKVLQQYGVPISARDILSDLKLKESVKAYSNWPTFPQVFIKGEFVGGSDIILTMHQKGELKDLLGDIAPKGEQNGSS

SEQ ID NO: 68634 - protein, 141 aa, Setaria italica
  Transcript Sequence Number=SeqID_2660
  Gene Ontology: Mol. function=hydrolase activity, hydrolyzing O -glycosyl compounds; Biological process=carbohydrate metabolic process
  Homolog annotation: Hit_ID=B9S175; Match level="QueryCoverage=53%, HitCoverage=26%, E-value=6e-31, Identity=81%"; Hit description =Hydrolase, hydrolyzing O-glycosyl compounds, putative
  Pfam annotation: Domain name=X8; Domain location=39-123; Score=179.2; E_value=1.2e-50; Accession=PF07983.5; Description=X8 domain
  Subcellular localization annotation: CTP_CleavageSite=42; ConfidenceScore=5.67e-01
DVTSPLGHRPGGDPTVTTPTAMPTATPATQTPSLASGGSWCVASPSASSTSLQVALDYACGQGGADCSAIQQGGSCFNPDTVRDHASYAFNSYYQKNPVQTSCDFGGTAVLTSTDPSSSSCQYPSSSGGGQTMMPPPSPTT

SEQ ID NO: 68635 - protein, 198 aa, Setaria italica
  misc_feature (188)..(188): Xaa can be any naturally occurring amino acid
  Transcript Sequence Number=SeqID_2661
  Gene Ontology: Mol. function=electron carrier activity; Biological process=oxidation reduction
  Homolog annotation: Hit_ID=Q6F4F2; Match level="QueryCoverage=96%, HitCoverage=36%, E-value=3e-67, Identity=66%"; Hit description=P450
RNLRRVAAVQLLSAHRVACMTPVISTEVRAMVRRMDHAAVAAPGGAARVQLKRRLFELSLSVLMETIAQSKTSRTEANADTDMSPEAQVYKQIMDDVLPHLSTANLWDYLPVLRWFDVFGAINKLVAAVSRRDVFLRRLIDAERQREDGGGGGDSEKKSMIAVLLSLQKLDPKFYTDTMITSLCSNMXGAGTETTSTR

SEQ ID NO: 68636 - protein, 58 aa, Setaria italica
  Transcript Sequence Number=SeqID_2662
FKSTILVATCVLVLYLITIRFGGTLLTNTVCTIVTLESKCHCPSDLAVMLCFGSRGWG

SEQ ID NO: 68637 - protein, 129 aa, Setaria italica
  misc_feature (8)..(8): Xaa can be any naturally occurring amino acid
  misc_feature (13)..(13): Xaa can be any naturally occurring amino acid
  Transcript Sequence Number=SeqID_2663
  Gene Ontology: Mol. function=oxidoreductase activity; Biological process=amino acid metabolic process
  Homolog annotation: Hit_ID=Q14VG8; Match level="QueryCoverage=100%, HitCoverage=36%, E-value=3e-36, Identity=62%"; Hit description =Putative NADP-specific glutatamate dehydrogenase (Fragment)
PDQDFPAXEDIGXLGPREMGYLFGQYRRLSGHFQGNFTGPKIFWSGSSFRTEATGYGLDFFARVLLAEMNKELKGLRFLTEIRLVYQCYNLTMYLHTVHIFCRCVISGSGKIAMHVLEKLLPCGAIPIT

SEQ ID NO: 68638 - protein, 211 aa, Setaria italica
  misc_feature (55)..(55): Xaa can be any naturally occurring amino acid
  Transcript Sequence Number=SeqID_2664
  Gene Ontology: Mol. function=oxidoreductase activity; Biological process=amino acid metabolic process
  Homolog annotation: Hit_ID=B9RQ63; Match level="QueryCoverage=99%, HitCoverage=32%, E-value=4e-98, Identity=77%"; Hit description =Glutamate dehydrogenase, putative
  Pfam annotation: Domain name=ELFV_dehydrog; Domain location=92-211; Score=-50.3; E_value=5.8e-07; Accession=PF00208.13; Description =GlutamateLeucinePhenylalanineValin
  Pfam annotation: Domain name=ELFV_dehydrog_N; Domain location=1-76; Score=-3.2; E_value=2.8e-07; Accession=PF02812.10; Description =GluLeuPheVal dehydrogenase, dimeri
  Pfam module annotation: Pfam domain module=ELFV_dehydrog::ELFV _dehydrog_N; Domain location=92-211::1-76
EHTLKNALSLYKLGGAAGGSDFDPKGKSDNEIMRFCQSFMDELYRYLGPDQDFPXEDIGVGPREMGYLFGQYRRLSGHFQGNFTGPKIFWSGSSFRTEATGYGLVFFARVLLAEMNKELKGLRCVISGSGKIAMHVLEKLLPCGAIPVTVSDSKGYLLDEDGFDYMKYSLLRDIKAQQKSLKEYLKSYPHAKYIDDAKPWSEQCDLAFPVP

SEQ ID NO: 68639 - protein, 376 aa, Setaria italica
  misc_feature (138)..(138): Xaa can be any naturally occurring amino acid
  misc_feature (159)..(159): Xaa can be any naturally occurring amino acid
  misc_feature (301)..(301): Xaa can be any naturally occurring amino acid
  misc_feature (374)..(374): Xaa can be any naturally occurring amino acid
  Transcript Sequence Number=SeqID_2665
  Gene Ontology: Mol. function=oxidoreductase activity; Biological process=amino acid metabolic process
  Homolog annotation: Hit_ID=B9RQ63; Match level="QueryCoverage=100%, HitCoverage=62%, E-value=1e-157, Identity=65%"; Hit description =Glutamate dehydrogenase, putative
  Pfam annotation: Domain name=ELFV_dehydrog; Domain location=146-374; Score=156.0; E_value=1.1e-43; Accession=PF00208.13; Description =GlutamateLeucinePhenylalanineValin
  Pfam annotation: Domain name=ELFV_dehydrog_N; Domain location=4-134; Score=179.0; E_value=1.4e-50; Accession=PF02812.10; Description =GluLeuPheVal dehydrogenase, dimeri
  Pfam module annotation: Pfam domain module=ELFV_dehydrog::ELFV _dehydrog_N; Domain location=146-374::4-134
LLEPERCFIFRVPWIDDRGEAHVNRGFRVQFSQALGPCRGGLRFHPSMSLSVAKFLAFEHTLKNALSLYKLGGAAGGSDFDPKGKSDNEIMRFCQSFMDELYRYLGPDQDFPAEDIGVGPREMGYLFGQYRRLSGHFXGPKIFWSGSSFRTEATGYGLXCVISGSGKIAMHVLEKLLPCGAIPVTVSDSKGYLLDEDGFDYMKYSLLRDIKAQQKSLKEYLKSYPHAKYIDDAKPWSEQCDLAFPCASHNEIDQGEAVAIINSGCRVLIECSNMPCTVQAVDILRKSKVLVAPAKATAAGXALGELELNPEFNLMQLSVEDFENKIQDAIKKTYERSIKAAQDYGIMKENPESLVHGANICAFLNIAQAMTDQXCV

SEQ ID NO: 68640 - protein, 57 aa, Setaria italica
  Transcript Sequence Number=SeqID_2666
CCCICCCCCWSGICCCCCCCWCCIGCICCCWCCMGCICCCWCCICCCWCCIGCICCG

SEQ ID NO: 68641 - protein, 66 aa, Setaria italica
  Transcript Sequence Number=SeqID_2667
CFLEFTGSIQGMQCVFMDWIKEDMFLWAPTIASNAFCHYMHQDKLCLLQLRIHWNPPRENGSCKAN

SEQ ID NO: 68642 - protein, 68 aa, Setaria italica
  Transcript Sequence Number=SeqID_2668
SSHFSSVGYSCSALFFNHILLISESNYYKSMVFDKLLHFEVSSNCTEQICRLISIGRFSISYRHHIRR

SEQ ID NO: 68643 - protein, 373 aa, Setaria italica
  Transcript Sequence Number=SeqID_2669
  Gene Ontology: Mol. function=protein binding; Cellular component =integral to membrane; Biological process=G-protein coupled receptor protein signaling pathway
  Homolog annotation: Hit_ID=A2Q1H6; Match level="QueryCoverage=50%, HitCoverage=76%, E-value=3e-86, Identity=78%"; Hit description=EXS, C-terminal
  Pfam annotation: Domain name=EXS; Domain location=64-372; Score =333.6; E_value=3.8e-97; Accession=PF03124.6; Description=EXS family
HRPGGAGGEMKGATIPAVAIMPSPLFLWRFKAILFLLWGLCCCKIGWDSVMRMSADLRDLFLYEAFLYYNPLLLVALMIWLWGVNLWVFAQSSVNYAKVFDLAQTHLSHREIWRCATWLTLIVPTSMTAYLYLYSHGEVSLAASQPVLLYAILLIILFSPFDMFYISSRFYFLRTVLRIILPLQAITFPDFFLADIFTSMSKVFSDLERSVCRMVNRQVATIAWFEADSICGSHSIAIPLVLVFPYLCRFFQCLRQYRDTKEKACLLNALKYSTAVPVIFLSALKYHVFPEQWVGFYRPLWLISSVINSLYSFYWDIKRDWDLSILTRIFMFKNPSIWTNLLYGQNWVFYWVLGSNLVLRCTWTYKLSAHLRH

SEQ ID NO: 68644 - protein, 439 aa, Setaria italica
  Transcript Sequence Number=SeqID_2670
  Gene Ontology: Mol. function=protein binding; Cellular component =integral to membrane
  Homolog annotation: Hit_ID=A2Q1H6; Match level="QueryCoverage=56%, HitCoverage=98%, E-value=1e-104, Identity=72%"; Hit description=EXS, C-terminal
  Pfam annotation: Domain name=EXS; Domain location=72-411; Score =443.5; E_value=3.3e-130; Accession=PF03124.6; Description=EXS family
DRPLARRAHRPGGAGGEMKGATIPAVAIMPSPLFLWRFKAILFLLWGLCCCKIGWDSVMRMSADLRDLFLYEAFLYYNPLLLVALMIWLWGVNLWVFAQSSVNYAKVFDLAQTHLSHREIWRCATWLTLIVPTSMTAYLYLYSHGEVSLAASQPVLLYAILLIILFSPFDMFYISSRFYFLRTVLRIILPLQAITFPDFFLADIFTSMSKVFSDLERSVCRMVNRQVATIAWFEADSICGSHSIAIPLVLVFPYLCRFFQCLRQYRDTKEKACLLNALKYSTAVPVIFLSALKYHVFPEQWVGFYRPLWLISSVINSLYSFYWDIKRDWDLSILTRIFMFKNPSIWTNLLYGQNWVFYWVLGSNLVLRCTWTYKLSAHLRHNYLTLFTIAALEILRRWQWVFFRVENEWNKMTAKQNLEMSSDMPSEGDRLLDSSNHTV

SEQ ID NO: 68645 - protein, 124 aa, Setaria italica
  Transcript Sequence Number=SeqID_2671
  Gene Ontology: Mol. function=oxidoreductase activity, acting on CH-OH group of donors
  Homolog annotation: Hit_ID=Q8W5N7; Match level="QueryCoverage=98%, HitCoverage=15%, E-value=1e-57, Identity=87%"; Hit description =Putative alcohol oxidase
SDGITKKLRIEAKVSIAACGALMTPPLLRNSGLKNRHIGRNLHLHPVSMAWGYFPENRQDPQLTGKSYEGGIITSMHRVTERTIIETPALGPGAFAAMVPWESGRDMKERMRRYSRTAHAFALV

SEQ ID NO: 68646 - protein, 180 aa, Setaria italica
  Transcript Sequence Number=SeqID_2672
  Homolog annotation: Hit_ID=B6UAY8; Match level="QueryCoverage=90%, HitCoverage=42%, E-value=4e-72, Identity=77%"; Hit description=F-box protein
RIRLGHSKLPPGEESFVTDENENQKAIADENYVWTYTSPEFPMLQENVLQTFKLPRPVLCVGGVVKIELLGRIQKQATDDKYYICVCHAQVMGRSLSPEFMVDISDPADYSILKYLPGASNLRVEDIMNSDTKDSTEWHSLVARYRQMRHRAMLNMLLGPVHFMDEDDDVGAVTDDDIYM

SEQ ID NO: 68647 - protein, 106 aa, Setaria italica
  Transcript Sequence Number=SeqID_2673
LNSPSAALSMLEDLPYLLICYIWKDRTLQLQQPRWELLLEHTCLRNRLRREVGDPGQQHGVWPLLPWCSQAQNLEEENGGLQKERNDDAEEGRRPWPLVPAVARPP

SEQ ID NO: 68648 - protein, 73 aa, Setaria italica
  Transcript Sequence Number=SeqID_2674
YKKSMPVLIVARHKKRLPEAATTSSMPCRSVHAKATQSSAGHSSTGHQEPHRHLYLLFRTGMKVQNSVIVLEW

SEQ ID NO: 68649 - protein, 93 aa, Setaria italica
  Transcript Sequence Number=SeqID_2675
ELLKVISEYSEYVPSGCDDVSTSTIQELLPNLDLYICPKQKVICLKRFGDLCMSCFILLLPFSFHFKRSGSLALSAVCIYVTSSLAILYEVVY

SEQ ID NO: 68650 - protein, 132 aa, Setaria italica
  misc_feature (40)..(40): Xaa can be any naturally occurring amino acid
  Transcript Sequence Number=SeqID_2676
  Gene Ontology: Mol. function=transposase activity; Biological process= transposition, DNA-mediated
  Homolog annotation: Hit_ID=Q10PZ8; Match level="QueryCoverage=74%, HitCoverage=11%, E-value=1e-22, Identity=52%"; Hit description =Transposon protein, putative, Mutator sub-class
GWGAKDIKGGNLSQKLVDRHSYSLLQLVDFIGEHCVGFEXYISFWRSVEDACIEIKSDENLLQWFDLNQESRVVHIDTQINVFEGPLQFSPTKRRCHPAVRNKVVQSPTPPPLLDLPVDPSQPTQDMREPIN

SEQ ID NO: 68651 - protein, 70 aa, Setaria italica
  Transcript Sequence Number=SeqID_2677
QCLESTHGSTRIDAYHMGCMHTYKNELYSCEHEDIFSIGVTNCLRYKKSTCYFIQYTSENAGVSCDVYNS

SEQ ID NO: 68652 - protein, 373 aa, Setaria italica
  Transcript Sequence Number=SeqID_2678
  Homolog annotation: Hit_ID=UPI0001A7B04F; Match level="QueryCoverage =100%, HitCoverage=28%, E-value=6e-85, Identity=45%"; Hit description= REF4 (REDUCED EPIDERMAL FLUORESCENCE 4)
IHILSLYGMVPDVAAALMPLCEAFGSIAPPPNHKSTILGETSVYSVFSCAFLCLLRLWKFYKPPQEYCLAGRGGSVRLELTLDYLLLMRNNRIDLSNSSAPSRDSYNNMSSVNEVPAQPVYIDSFPKLRAWYFQNQACIASTLSGLCNKNPVHQVANKILSMICRKMNKGGVPSGNLSSTSSSSVSGSSVNASDDSFQRLAVPAWEFLEAVPFVLEAVLTACAHGRLSSRDLTTSLRDLVDFLPASLAAIVSYFSAEITRGIWKPVPMNGIEWPSPGASLHSIEAEIKEILASAGVQIHSCYPRGVPPMLPLPMAALVSLTITFKLDRSLDCIQGVIGQALENCAGGSSWPSMPIIGALWTQKVRRWHDFIVL

SEQ ID NO: 68653 - protein, 51 aa, Setaria italica
  Transcript Sequence Number=SeqID_2679
EENDRLRAILGEWSARAAKLERALEAERVSNVELRKNIAKFRGHLYKEQEA

SEQ ID NO: 68654 - protein, 355 aa, Setaria italica
  Transcript Sequence Number=SeqID_2680
MPHERGGAASTSAAAPTSEEDALFIDLLHEAPLSGHREPRSIVGGTLYCILLVGFAAVAISAPWIFLFAPDMISPLLCSSNVILLVLTGIFQQYWVHQVRKVRLQGYYEFSQKLKRIARLPFATIACGTALMLLIMVWQPLVHILSVLLLLRIAIVVEVTCTGCFMGLYLWHIHRYNSLDGQPDILRSLYSALQPSNTFEDRRYYDARLSDQQMALLQYQRENIHYLSEEVLRLQECLSKYQRTDAGTTPQVDLAHLLASRDQELRALTAEMNQVHSELQLARGLIDEKETEIQRIRVSNNQYVEENDRLRAILGEWSARAAKLERALEAERVSNVELRKNIAKFRGHLYKEQEA

SEQ ID NO: 68655 - protein, 81 aa, Setaria italica
  Transcript Sequence Number=SeqID_2681
  Subcellular localization annotation: CTP_CleavageSite=43; ConfidenceScore=5.54e-01
LNSAVFNRRNTIVYIFKSVKTCTSNYAYSTNHKSSFFFSITLMHMHRRTVTCPSRNQFQFVPLNPDRVALLSKTCVDRLEF

SEQ ID NO: 68656 - protein, 58 aa, Setaria italica
  Transcript Sequence Number=SeqID_2682
  Homolog annotation: Hit_ID=B6UDE8; Match level="QueryCoverage=100%, HitCoverage=19%, E-value=2e-09, Identity=60%"; Hit description=AP2 domain containing protein
LPAFDFIYGELGEIGAAAAPSSKAAAAEFDWLPWWEGEDFVTATGLTPSAGAAAVSVV

SEQ ID NO: 68657 - protein, 113 aa, Setaria italica
  Transcript Sequence Number=SeqID_2683
  Subcellular localization annotation: CTP_CleavageSite=58; ConfidenceScore=5.68e-01
AAVAAVGGGGAGTGRGGTSPGTPAPPRGSSWPSFAHPWAGRISMWPFQATGGEPRPPTAMLAGAVPAAPVAPPWALPPGASPGPVGWDPTALARSFGTMTLTPPVSQDWIADS

SEQ ID NO: 68658 - protein, 181 aa, Setaria italica
  misc_feature (35)..(35): Xaa can be any naturally occurring amino acid
  Transcript Sequence Number=SeqID_2684
PRPVGAGTGRGGGGAGGRHRRGGGRVGGVWGHTGXTPAPPRGSPWPSFTHPWSGRISMWPFQATGEPRPPAAMLAGAVPAAQFASPWAPPQFASPWAPPPGASPGPVGWDPTALARSFGTMALTPPVGQDWIADSGATFHTTPDPGILTSVHPPSSSHPSSIMVANGSCLPVQPMGTAHTP

SEQ ID NO: 68659 - protein, 228 aa, Setaria italica
  Transcript Sequence Number=SeqID_2685
  Gene Ontology: Cellular component=integral to membrane
  Homolog annotation: Hit_ID=UPI0001A8937A; Match level="QueryCoverage =96%, HitCoverage=31%, E-value=1e-118, Identity=92%"; Hit description= integral membrane single C2 domain protein
TARKAVIQSLYLGRNPPMFTDIRVVRQSTDDDHLVLEIGMNFLAADDMDARMAVQLRKRVGFGITANMHITGMHVEGKVLVGVRFLQQWPFIGRVRVCFVEPPYFQMTVKPLFGHGLDVTELPGISGWLDRMLDVAFGQTLVEPNMLVIDLEKFASEPTENWFSVDEKPPIAHARVEILEGADMKPSDPNGLADPYVKGHLGPYHFQTKILPENSNYLNPKIGLEGSL

SEQ ID NO: 68660 - protein, 194 aa, Setaria italica
  Transcript Sequence Number=SeqID_2686
MSDSEASPAEQPAPPTAAPAASFESSPTPSPARKEELLPVGEKISELNESQSELLGRLRGLKEDLQNWRSNLDTQVTKYKVELSDIKSALNNEIEQLRSDFQELRTTLKKQQEDVSLSLKNLGLQDATENDGSKGSGEENTNEDLSANLGSLKLGDASENHDESRDAKDDKTEESPAADGAANKGTKEGTQSDE

SEQ ID NO: 68661 - protein, 158 aa, Setaria italica
  Transcript Sequence Number=SeqID_2687
  Gene Ontology: Mol. function=metal ion binding
  Homolog annotation: Hit_ID=Q2RA96; Match level="QueryCoverage=53%, HitCoverage=11%, E-value=6e-19, Identity=48%"; Hit description=PHD -finger family protein, expressed
LPRLKVWPKRWDESRPLNGSIGLYFFPLTMRPDKSYDQLLKEVMENDLALRAIIGDTEMLMFPSTLLPQRYKTFQMKHYLWGVFKPKEVDGKHCAAQHQPDHTTGATAFAANSTATGIATDAASIPTEDAPTAPANHGRTDSSSMGAPPGRIVFVLLF

SEQ ID NO: 68662 - protein, 391 aa, Setaria italica
  Transcript Sequence Number=SeqID_2688
  Gene Ontology: Mol. function=metal ion binding
  Homolog annotation: Hit_ID=Q2R2B0; Match level="QueryCoverage=92%, HitCoverage=91%, E-value=1e-130, Identity=69%"; Hit description=RING- H2 finger protein RHF2a, putative, expressed
  Pfam annotation: Domain name=zf-C3HC4; Domain location=33-73; Score =31.4; E_value=3.7e-06; Accession=PF00097.17; Description=Zinc finger, C3HC4 type (RING finger)
MGSLVDEKAKMESLTSPAAFVEGGIQDACDDACSICLEAFCESDPSALTSCKHEFHLQCILEWCQRSSQCPMCWQAISMKDPTSQELLEAVERERNIRTNQTRNTTIFHHPALGDFELQHLPVVGNDAELEERILQHLAAAAAMGRAHHLGRREGHRGRSGSHGRPQFLVFSAHPNSPSAGTISSSSAHVDGDNDSNPVTPRASESSPRAIRIGEAGNQSPGMLTYDAEQDAVVSSGNSTPVSSPRFFNRRHSTGQSTPDRAGPSDVQSFSDSLKSRLNAVSMKYKESITKSTRGWKERLFSRNSSVADLGSEVRREVNAGIASVSRMMERLETRGSGRTGDSPTASTSEVPPTESSNERATDSISATSTTATSTSTSNTPTPCVTTSGSN

SEQ ID NO: 68663 - protein, 57 aa, Setaria italica
  Transcript Sequence Number=SeqID_2689
MASELLLRELMSSPLAESQAAASARRGWWLPRQALSPRPAAATATSSDASLHRVPHC

SEQ ID NO: 68664 - protein, 98 aa, Setaria italica
  Transcript Sequence Number=SeqID_2690
  Gene Ontology: Mol. function=transferase activity, transferring glycosyl groups; Cellular component=integral to membrane; Biological process=protein amino acid glycosylation
  Homolog annotation: Hit_ID=B6TEC2; Match level="QueryCoverage=100%, HitCoverage=28%, E-value=2e-36, Identity=79%"; Hit description=Beta -1,3-galactosyltransferase sqv-2
MQIREVPARRPAPSAAGALRSPMSAMMLAMFATMASFYVAGRLWQDAQNRVYLIKELDRRTGQGQSAISVDDTLKVVACSQQGKRLASLEMELAAAKH

SEQ ID NO: 68665 - protein, 260 aa, Setaria italica
  Transcript Sequence Number=SeqID_2691
RRLWHQGAGTPMRSGDDKDKATMQQCYESETEKYHASETVSVPRTSSLPPSPPYRAVGMHGTPRYPADQSMLLQKSKVHHQHVPRSEDDENMNHVGKGNVDKWLHMLMDNQQEGQAVYHCSDEQHDDEEENASEEQHMQSRIDEESCRNEITECSDEIAEVEGDIASDQGTALCRDSFGIKEREEKKIWFPRSDNSRGFRSLPSSPSKILGMRRGVECIGRKPKVAGEDDCRYGYEDAVSTSSSKFLSRCKQAIKKAVNK

SEQ ID NO: 68666 - protein, 122 aa, Setaria italica
  Transcript Sequence Number=SeqID_2692
FSACCQFYPQLCSATCSSNNHMPYSWKELAAIGSTINLSKFGTAVEERDEHGCSGRKWFRNKGGAGLPTNDTKQGAEVDGQKTEKDALLSFLYQALSKAYSKACHSSMVCRMVRWSFSRSCS

SEQ ID NO: 68667 - protein, 95 aa, Setaria italica
  Transcript Sequence Number=SeqID_2693
  Gene Ontology: Mol. function=DNA binding; Cellular component=nucleus; Biological process=regulation of transcription, DNA-dependent
  Homolog annotation: Hit_ID=Q6Z1Z3; Match level="QueryCoverage=100%, HitCoverage=26%, E-value=1e-42, Identity=85%"; Hit description=B3 domain-containing protein IDEF1
  Pfam annotation: Domain name=B3; Domain location=3-95; Score=39.1; E _value=1.7e-08; Accession=PF02362.13; Description=B3 DNA binding domain
KVVLRKELTKSDVANVGRIVLPKKDAEASLPPLVQGDPLILQMDDMVLPVTWKFKYRFWPNNKSRMYILEAAGEFVKTHGLQAGDALIIYKNSVP

SEQ ID NO: 68668 - protein, 159 aa, Setaria italica
  misc_feature (16)..(16): Xaa can be any naturally occurring amino acid
  misc_feature (108)..(108): Xaa can be any naturally occurring amino acid
  Transcript Sequence Number=SeqID_2694
MGQMGGPDGDGGGAAXHPHPYHHYHYQALLAAVQNPDQSLHPSFPLPFHHVPLHHPAPPGAPAAGPGADAAAAAPSTHNAAPHSQPSRGFSDWSASNSAFASVAAQPXAPATTTTTPFHYNLSQSYALWTHYMLNKNALPYTSYPAAPQDENSHPPHHT

SEQ ID NO: 68669 - protein, 258 aa, Setaria italica
  Transcript Sequence Number=SeqID_2695
  Gene Ontology: Mol. function=DNA binding; Cellular component=nucleus; Biological process=regulation of transcription, DNA-dependent
  Homolog annotation: Hit_ID=Q6Z1Z3; Match level="QueryCoverage=95%, HitCoverage=68%, E-value=1e-90, Identity=68%"; Hit description=B3 domain-containing protein IDEF1
  Pfam annotation: Domain name=B3; Domain location=150-253; Score=46.5; E_value=1e-10; Accession=PF02362.13; Description=B3 DNA binding domain
PAPATTTTTPFHYNLSQSYALWTHYMLNKNALPYTSYPAAPQDENSHPLHHTHIPPDKDSGSASSLGFDSFTTMSLGPNICAHMSPMEGSISANEADNSEDLPTVVTNSDEMDTRNSDEVHPDSVATLPESKPSHESCTTKFNSGEYQVVLRKELTKSDVANVGRIVLPKKDAEASLPPLVQGDPLILQMDDMVLPVTWKFKYRFWPNNKSRMYILEAAGEFVKTHGLQAGDALIIYKNSVPGKFIIRGEKAIQQTNP

SEQ ID NO: 68670 - protein, 228 aa, Setaria italica
  Transcript Sequence Number=SeqID_2696
  Gene Ontology: Mol. function=3'-5'-exoribonuclease activity; Cellular component=exosome (RNase complex); Biological process=RNA processing
  Homolog annotation: Hit_ID=B9SVB2; Match level="QueryCoverage=62%, HitCoverage=79%, E-value=1e-65, Identity=83%"; Hit description =Exosome complex exonuclease RRP41, putative
  Pfam annotation: Domain name=RNase_PH; Domain location=14-139; Score =63.8; E_value=6.5e-16; Accession=PF01138.13; Description=3' exoribonuclease family, domain 1
ETRTPTPNGRSFHDCRPAFMQTGPTTAASGSAYAEFGKTKVIVSVFGPRESKKAMMYSDVGRLNCNVSYTTFATPVRGQGADNKEYSSMLHKALEGAVMLHTFPKTTVDVFALVLESGGSDLPIIISCASLALADAGIMMYDLVTSVSVSCFGKNIIIDPTSDEEAWQDGSLMVAFMPARKEITQLTLTGEWSDGKITNAVELCMDACSKLGEILRDRLKDTATLTNE

SEQ ID NO: 68671 - protein, 100 aa, Setaria italica
  Transcript Sequence Number=SeqID_2697
SSPRSSPDLLRWRPALRRRGRGFGREDGEGAAEEEEPGELRQTRRGRAPPPRLEKQLPQGHFLIHPARKLVVPRTTRFYSLPSSNPAAVFSTIVHRPRNP

SEQ ID NO: 68672 - protein, 250 aa, Setaria italica
  misc_feature (39)..(39): Xaa can be any naturally occurring amino acid
  Transcript Sequence Number=SeqID_2698
  Gene Ontology: Mol. function=hydrolase activity, acting on ester bonds; Cellular component=cellular_component; Biological process =lipid metabolic process
  Homolog annotation: Hit_ID=B9SVM4; Match level="QueryCoverage=99%, HitCoverage=65%, E-value=6e-42, Identity=37%"; Hit description=Alpha- L-fucosidase 2, putative
  Pfam annotation: Domain name=Lipase_GDSL; Domain location=1-250; Score=154.4; E_value=3.4e-43; Accession=PF00657.14; Description=GDSL- like LipaseAcylhydrolase
  Subcellular localization annotation: CTP_CleavageSite=51; ConfidenceScore=5.17e-01
PYLQSIGSDFRRGANFATLASTALLPNTSVFVTGISPFXLAIQLNQMKELRDRAISSDGNNGQLPPLDIFGHALYTIDIGQNDFTSNLGSLGVETVKQSLPSVVNQISWTIQDLYNIGARNFMVFNMAPIGCYPAFLTELPHSSNDLDEFGCMTTYNSGVVYYNELLNNSMAEVRKKLHDASIVYVDKHTVTLELFRHPDAHGLEYGTKACCGYGGGAYNFNQNVYCGNSKTVNGQTVAATACGDPQNYV

SEQ ID NO: 68673 - protein, 502 aa, Setaria italica
  Transcript Sequence Number=SeqID_2699
  Gene Ontology: Mol. function=4 iron, 4 sulfur cluster binding; Cellular component=nucleus; Biological process=base-excision repair
  Homolog annotation: Hit_ID=B3W6G6; Match level="QueryCoverage=100%, HitCoverage=24%, E-value=4e-57, Identity=33%"; Hit description =Putative transcriptional activator DEMETER
AAFGFHDSPDYSDVLAIGKKREHNAISGHQISFRIDFETSNRATQFYSDDPLSTGSYTSYYPETCKRMRPENHSNRLNGATFSDSWNTNKTSAVNPGICTLADVQRLMALEKSRAYQQIIDFGASGNNMVQQQVEPAQQNIIGKEFIALPDKQFRSFTAQNIPLPGSTMSPLGESNILRNGVHQIQSWEITSRQDHCSNNFTLPDKWSGYLTAGHTQLSSSIVNPSIENYIQSNAIHQHQSLENVMPKEPVLSETHNTSSKEAHNYSIAAATDEQIRTTSDPVVRSLSQPTSQSTRRGNCHLDSTRLTAENSTEKPKKRGRPRKEAKPNREPKQRGTKGKQNVGHAKPTSPKGACTDSFKTNDITYASEPSTGIAPRMANVDSKISDHDKYSGITSKPTDGGIIPQATAPSVDPLDGIIQKIKLLSINRADDIVAEVPQNALVPYEGEFGALVAFEGKAKKSRSRAKVNIDPVTTMMWNLLMGPDMGDGAEGLDKDKEKWLD

SEQ ID NO: 68674 - protein, 410 aa, Setaria italica
  Transcript Sequence Number=SeqID_2700
  Gene Ontology: Mol. function=4 iron, 4 sulfur cluster binding; Cellular component=nucleus; Biological process=base-excision repair
  Homolog annotation: Hit_ID=Q6K6R4; Match level="QueryCoverage=98%, HitCoverage=22%, E-value=5e-61, Identity=40%"; Hit description =Putative transcriptional activator DEMETER
MQEGLGQGVHVPHGINLCFSTSSVPFQMNSSIELGTGDVTPPVTFEKLSANPQPVRDDAGVVEGIDMNGKSVQKPKRKKHRPKVIKEGQSAKLQKPKTPKPPKEKGNQPTGKRKYVRRKGLSTPTEQPPSGGADTHTRAETGVVQRCLNFDAGEQHGHLDLVPQTQATDIHTGPGDAQPSISGVERSNVQVACHWGGTSSGICSVDPMANLQELRVDNMPKRVNFDLNNSIVNQMPTNYSNLMDSSGQFFQFGLRDNIQTNQLLDSHSSLPVRCVSHLTRSVDHMQHPSANFDQYISTPQACTENSHRNYQMFNGFRMPENMTAASQHIERVPMRGNFNPETCVGEGVISKMPQCYRMPETPLVPPKHSERNAMNGVLNEFSVKNDHLKFATNDNYQTGAAFGFHDSPDY

SEQ ID NO: 68675 - protein, 83 aa, Setaria italica
  Transcript Sequence Number=SeqID_2701
  Gene Ontology: Mol. function=manganese ion binding; Cellular component=oxygen evolving complex; Biological process=photosystem II stabilization
  Homolog annotation: Hit_ID=B4F9R9; Match level="QueryCoverage=97%, HitCoverage=25%, E-value=7e-29, Identity=85%"; Hit description =Oxygen-evolving enhancer protein 1
  Subcellular localization annotation: CTP_CleavageSite=47; ConfidenceScore=5.47e-01
MAASLQAAATLMQPAKIGGRASASLPSRQASHVARAFGVDAGAGRISCSLQSDVREVASKCIDAAKLAGFALATSALLVSGDE

SEQ ID NO: 68676 - protein, 97 aa, Setaria italica
  Transcript Sequence Number=SeqID_2702
  Gene Ontology: Mol. function=calcium ion binding; Cellular component =oxygen evolving complex; Biological process=photosynthesis
PKDSWDLVGRDIRLKATFLYIDLSRVIACCEGEEHKKALNVLANRFFYSMDELGDAVESRSLPLTQVRYSDTADALREVVAVLAPSLQLGPCGDPEE

SEQ ID NO: 68677 - protein, 67 aa, Setaria italica
  Transcript Sequence Number=SeqID_2703
GFGGRHGCGCGGERGVSTRLSFGGKNRRRIWGFSNMSLPFNTYARCTSVIKSVICAGLYPNVAASLE

SEQ ID NO: 68678 - protein, 125 aa, Setaria italica
  Transcript Sequence Number=SeqID_2704
  Gene Ontology: Mol. function=nucleic acid binding
  Homolog annotation: Hit_ID=B9SSN0; Match level="QueryCoverage=97%, HitCoverage=8%, E-value=3e-32, Identity=52%"; Hit description=ATP -dependent RNA helicase, putative
KDEKQNVEKAKATLLNENLDGSTSATDNKQSDHLLMVIAYDKWSRILLQHGTKSARQFCHSFYLNSTVMHMIRDMRLQFGTLLADIGLIDLPKDSMRPKEGSRKSNLESWFSNMSLPFNTYARCT

SEQ ID NO: 68679 - protein, 127 aa, Setaria italica
  Transcript Sequence Number=SeqID_2705
  Gene Ontology: Mol. function=nucleic acid binding
  Homolog annotation: Hit_ID=B9SSN0; Match level="QueryCoverage=91%, HitCoverage=7%, E-value=2e-29, Identity=52%"; Hit description=ATP -dependent RNA helicase, putative
MLIHSSYLIRYIFLCRDMRLQFGTLLADIGLIDLPKDSMRPKEGSRKSNLESWFSNMSLPFNTYARCTSVIKSVICAGLYPNVAASLEGVDPGALGGRKPSDILFSKDRPRWYDGRREVHIHPSSVN

SEQ ID NO: 68680 - protein, 80 aa, Setaria italica
  Transcript Sequence Number=SeqID_2706
GVRIKLAHDQVQFLCLCWQMHSFCILKPVCFNHSAAISIVKLLNPVVSWYHPVGNIFSMQSCDLMISSHTSQTYEKFKKC

SEQ ID NO: 68681 - protein, 256 aa, Setaria italica
  Transcript Sequence Number=SeqID_2707
  Gene Ontology: Mol. function=nucleic acid binding; Cellular component= intracellular
  Homolog annotation: Hit_ID=B9SSN0; Match level="QueryCoverage=87%, HitCoverage=14%, E-value=2e-73, Identity=57%"; Hit description=ATP -dependent RNA helicase, putative
  Pfam annotation: Domain name=DUF1605; Domain location=35-184; Score =86.4; E_value=1e-22; Accession=PF07717.8; Description=Domain of unknown function (DUF1605)
YVDSLQLFNQVYFSCSPNSFYLNSTVMHMIRDMRLQFGTLLADIGLIDLPKDSMRPKEGSRKSNLESWFSNMSLPFNTYARCTSVIKSVICAGLYPNVAASLEGVDPGALGGRKPSDILFSKDRPRWYDGRREVHIHPSSVNHSLKAVQYPFLVFLEKVETTKVFLRDTSVISPYSLLLFGGSMVIQHQTGVVVIDGWLRLSAAAQTAVLFKQLRITLDAVLKELTRKPEMATFVDNEVVRSIIHLLLEEDKAQLA

SEQ ID NO: 68682 - protein, 79 aa, Setaria italica
  Transcript Sequence Number=SeqID_2708
  Homolog annotation: Hit_ID=Q5YJP8; Match level="QueryCoverage=97%, HitCoverage=32%, E-value=4e-13, Identity=45%"; Hit description =Pentatricopeptide repeat protein-like protein (Fragment)
  Pfam annotation: Domain name=PPR; Domain location=28-62; Score=33.0; E_value=1.2e-06; Accession=PF01535.12; Description=PPR repeat
LCCNVGSLDYALGMLDGMPLNGVFANAVTYNAILEGFIKHRKAREAESFLKEMSKNEQLPTACNCAAAISLFFKEFNPS

SEQ ID NO: 68683 - protein, 139 aa, Setaria italica
  misc_feature (20)..(20): Xaa can be any naturally occurring amino acid
  Transcript Sequence Number=SeqID_2709
  Gene Ontology: Biological process=DNA repair
  Homolog annotation: Hit_ID=B6TI43; Match level="QueryCoverage=98%, HitCoverage=31%, E-value=5e-60, Identity=82%"; Hit description=Auxin response factor 75
LFHAGDPVDVTFGVKELKAXFLTFCEGCEVEILLFFEKTGEPVLLVPRFGFDDGSASDFEATLVLATMTVSQLADSNDAQQPAISAQHNGEPRAATTPSVLNHTKIWSELSGNTPKSFEANRETHAQKKSNASTSMLND

SEQ ID NO: 68684 - protein, 76 aa, Setaria italica
  Transcript Sequence Number=SeqID_2710
  Gene Ontology: Cellular component=chloroplast
  Homolog annotation: Hit_ID=B6SV26; Match level="QueryCoverage=94%, HitCoverage=12%, E-value=6e-33, Identity=94%"; Hit description=Amino acid permease
SRPTPDIGHAAFGTAGRIIISIILYMELYACCIEYLILESDNLSKLFPNAHLTIGSLTLDSHVLFAILTALIVMPT

SEQ ID NO: 68685 - protein, 96 aa, Setaria italica
  Transcript Sequence Number=SeqID_2711
  Gene Ontology: Cellular component=chloroplast
  Homolog annotation: Hit_ID=B6SV26; Match level="QueryCoverage=98%, HitCoverage=16%, E-value=2e-45, Identity=93%"; Hit description=Amino acid permease
LISIILYMELYACCIEYLILESDNLSKLFPNAHLTIGSLTLDSHVLFAILTALIVMPTTWLRDLSCLSFVSAGGVIASIVIVSCLFWVGLVDHVGP

SEQ ID NO: 68686 - protein, 72 aa, Setaria italica
  Transcript Sequence Number=SeqID_2712
  Subcellular localization annotation: CTP_CleavageSite=55; ConfidenceScore=5.05e-01
SDNFELIKIKNVSMSCSKISKGQLHHSLLDTTQHSNLHLLPFLISSSTTNNGTTVVSAKRARWSSQPHQWWF

SEQ ID NO: 68687 - protein, 121 aa, Setaria italica
  Transcript Sequence Number=SeqID_2713
  Gene Ontology: Mol. function=hydrolase activity, hydrolyzing O -glycosyl compounds; Biological process=carbohydrate metabolic process
  Homolog annotation: Hit_ID=B6TQV4; Match level="QueryCoverage=81%, HitCoverage=81%, E-value=3e-46, Identity=90%"; Hit description =Glucan endo-1,3-beta-glucosidase 4
  Pfam annotation: Domain name=X8; Domain location=37-120; Score=135.5; E_value=1.7e-37; Accession=PF07983.5; Description=X8 domain
MGRGAQPSASLLLFSLGLVLLCFTAGGIVGVAAAQKTWCIAKPSASNEILAQNLDYACSQVSCAVIQKGGPCYYPDSLVSRAAVAMNLYYAYSGRHPWNCYFNSSALVVQSDPSYGSCTYY

SEQ ID NO: 68688 - protein, 90 aa, Setaria italica
  Transcript Sequence Number=SeqID_2714
PKSKLNCAPKHLYLEVPLDCSRTKKSSVAVFAAYALTWQELILAFIRLSLSWSTDVPGNHEVVPVDGANGPRATVALAVSLGLNPMSQCV

SEQ ID NO: 68689 - protein, 262 aa, Setaria italica
  misc_feature (203)..(203): Xaa can be any naturally occurring amino acid
  Transcript Sequence Number=SeqID_2715
  Gene Ontology: Cellular component=mitochondrion
  Homolog annotation: Hit_ID=B9S7R3; Match level="QueryCoverage=95%, HitCoverage=55%, E-value=1e-72, Identity=48%"; Hit description =Pentatricopeptide repeat-containing protein, putative
  Pfam annotation: Domain name=PPR; Domain location=100-134; Score =33.4; E_value=9.3e-07; Accession=PF01535.12; Description=PPR repeat
  Pfam annotation: Domain name=PPR; Domain location=135-169; Score =16.8; E_value=0.088; Accession=PF01535.12; Description=PPR repeat
  Pfam annotation: Domain name=PPR; Domain location=170-204; Score =17.8; E_value=0.045; Accession=PF01535.12; Description=PPR repeat
  Pfam annotation: Domain name=PPR; Domain location=206-240; Score =19.7; E_value=0.013; Accession=PF01535.12; Description=PPR repeat
  Pfam annotation: Domain name=PPR; Domain location=30-64; Score=26.4; E_value=0.00012; Accession=PF01535.12; Description=PPR repeat
  Pfam annotation: Domain name=PPR; Domain location=65-99; Score=39.2; E_value=1.7e-08; Accession=PF01535.12; Description=PPR repeat
  Pfam module annotation: Pfam domain module=PPR::PPR::PPR::PPR::PPR::PP R; Domain location=100-134::135-169::170-204::206-240::30-64::65-99
LLPLARARLFPHLWSLASDMRGLGLPLSPATFSAVISSYGHSRLPDQAVEVFNRLPRFGCPQTAEVYNALLDALCANGNFAGAYKLLRRMARKGVAPDRATFSTLVDSWCAAGKLQEAQAFLDDMASRGFRPPVRGRDLLVDGLVRAGRLEEAKAFALRMTKEGVLPDVATFNSLAEALCTAGDVQFAVALLADASARGLCPXDISTYKVMLPAVAKAGLIEEAFRLFYAAVEDGHQPFPSLYAAIIKALCKAGGALQMLSL

SEQ ID NO: 68690 - protein, 73 aa, Setaria italica
  misc_feature (21)..(21): Xaa can be any naturally occurring amino acid
  Transcript Sequence Number=SeqID_2716
  Homolog annotation: Hit_ID=B4FMX3; Match level="QueryCoverage=61%, HitCoverage=12%, E-value=3e-10, Identity=73%"; Hit description =Membrane protein
MSNADVEAGGPARAAPATRGXQAPPGRYNMTAGNGNGSAPYMPPSPFYYDNAAAHERHHWAWLVPLVVIANVA

SEQ ID NO: 68691 - protein, 331 aa, Setaria italica
  misc_feature (3)..(3): Xaa can be any naturally occurring amino acid
  misc_feature (6)..(6): Xaa can be any naturally occurring amino acid
  Transcript Sequence Number=SeqID_2717
  Gene Ontology: Mol. function=transcription factor activity; Cellular component=nucleus; Biological process=regulation of transcription
  Homolog annotation: Hit_ID=B9RGK2; Match level="QueryCoverage=99%, HitCoverage=38%, E-value=1e-104, Identity=54%"; Hit description=Gc -rich sequence DNA-binding factor, putative
  Pfam annotation: Domain name=GCFC; Domain location=1-312; Score =304.4; E_value=2.4e-88; Accession=PF07842.4; Description=GC-rich sequence DNA-binding factor-li
  Pfam annotation: Domain name=TFP11; Domain location=23-249; Score= -89.8; E_value=0.00013; Accession=PF08697.3; Description=Tuftelin interacting protein 11
  Pfam module annotation: Pfam domain module=GCFC::TFP11; Domain location=1-312::23-249
TAXVSXRDELLRTADVVFSDASEEYSSLQIVKDKFEGWKTQYPSAYRDAHVALSAPSVFTPYVRLELLKWDPLHKTIDFFDMDWHKVLFDYDVKDNESASGGSTDTDVVPVLVEKVALPILHHRIKHCWDVLSSKRTENAVDAIRMVIGYLPASSKDLHQLLASVKSRLTQAIADLSVPAWGSMVTRTVPGATQYAAYRFGVATRLLRNVCLWKDILADHVVEELALDGLLTGKILPHMKSIILDFHDAITRAERIAASLSGVWSKQSQKLQPFVNLVVELGNKLERRHTSGISEEETRGLARRLKTILAGLNEYDKARAISKNFQLREAI

SEQ ID NO: 68692 - protein, 209 aa, Setaria italica
  misc_feature (186)..(186): Xaa can be any naturally occurring amino acid
  Transcript Sequence Number=SeqID_2718
  Gene Ontology: Mol. function=protein serine/threonine kinase activity; Biological process=protein amino acid phosphorylation
  Homolog annotation: Hit_ID=Q6RS98; Match level="QueryCoverage=100%, HitCoverage=36%, E-value=1e-107, Identity=87%"; Hit description =Protein kinase
  Pfam annotation: Domain name=Pkinase; Domain location=1-203; Score =66.6; E_value=9.2e-17; Accession=PF00069.17; Description=Protein kinase domain
  Pfam annotation: Domain name=Pkinase_Tyr; Domain location=1-199; Score=3.9; E_value=5.5e-14; Accession=PF07714.9; Description=Protein tyrosine kinase
  Pfam module annotation: Pfam domain module=Pkinase::Pkinase_Tyr; Domain location=1-203::1-199
RGYIPDTMEVIAVKQLDKDGLQGNREFLVEVLMLSLLHHPNLVTLLGYSTDCDQRILVYEFMPLGSLQEHLLDVTPNSQPLSWHTRMKIAVGTARGIEYLHEVANPPVIYRDLKASNILLDGSFNAKLSDFGLAKLGPSGDKSHVSTRVMGTYGYCAPEYAMTGKLTKTSDIYSFGVVLLELITGXRAIDTTKPTREQILVHWAAPFFK

SEQ ID NO: 68693 - protein, 85 aa, Setaria italica
  misc_feature (85)..(85): Xaa can be any naturally occurring amino acid
  Transcript Sequence Number=SeqID_2719
  Gene Ontology: Mol. function=RNA-directed DNA polymerase activity; Cellular component=chromatin; Biological process=RNA-dependent DNA replication
  Homolog annotation: Hit_ID=Q7XKK3; Match level="QueryCoverage=78%, HitCoverage=6%, E-value=2e-17, Identity=56%"; Hit description =OSJNBa0038O10.4 protein
ACQVGLFSVGFNQHDLSSLDSPFSEEEIKEAIHNMPSDRVLGPDGFMGLFLKSCWDIIKQDVMAAVNAFYCLRCNSLQLINTGKX

SEQ ID NO: 68694 - protein, 129 aa, Setaria italica
  Transcript Sequence Number=SeqID_2720
  Homolog annotation: Hit_ID=Q01JP4; Match level="QueryCoverage=84%, HitCoverage=10%, E-value=3e-19, Identity=39%"; Hit description =OSIGBa0139P06.4 protein
SSRREINSAIDRLCEFTGTKVIFWDLQQPFIDNIYRNSVQQARLDSIMEVLDMVLNQLCDVIVEQLRDRVVTGLLQASLDGLLRVILNGGSTRVFSPNDAPYLEEDLETLKVISFVKFIFACFVVNYFP

SEQ ID NO: 68695 - protein, 538 aa, Setaria italica
  Transcript Sequence Number=SeqID_2721
  Homolog annotation: Hit_ID=P93812; Match level="QueryCoverage=50%, HitCoverage=24%, E-value=8e-36, Identity=32%"; Hit description =F19P19.6 protein
  Pfam annotation: Domain name=DUF810; Domain location=198-538; Score= -63.1; E_value=2.2e-12; Accession=PF05664.3; Description=Protein of unknown function (DUF810)
MDEENVVELLQRYRRDRQVLLNYILSGNLIKKVVMPPGAISLDDVDIDQVSVDYVLNCAKKGEPLDLGDAIRLFHDSLDYPYVNNTGAVEEFYLLTKPEYSGPAPTREPPPVPATTPSPVVIPPPVVESAPVTVSSPVAATNLTKSQSFDSPSEKELTLDDIEDFEDDEDEFDSRRASRRHQTDASDLSLRLPLFETGITDDDLRETAYEILVAAAGASGGLIVPQKEKKKEKRHRLMRKLGRSKSESVDAHTQRQPGLVGLLETMRAQLEITESMDIRTRQGLLNAMAGKVGKRMDNLLIPLELLCCISRAEFSDMKAYLRWQKRQLNMLEEGLINHPVVGFGELGRKVNELRNLFRKIEESESLPPSAAEVQRTECLRSLREVATSLSERPARGDLTGEVCHWADGYHLNVALYEKMLGSVFDILDEGKLTEEVEEILELLKSTWRILGITETVHDTCYAWVLFRQFVFTGEQGLLKVVIDHLRKIPLKEQRGPQERLHLKSLRSSVDAEGSYQDFTFFQSFLSPIQKWVDKKLNV

SEQ ID NO: 68696 - protein, 674 aa, Setaria italica
  Transcript Sequence Number=SeqID_2722
  Homolog annotation: Hit_ID=Q01JP4; Match level="QueryCoverage=99%, HitCoverage=68%, E-value=5e-96, Identity=30%"; Hit description =OSIGBa0139P06.4 protein
  Pfam annotation: Domain name=DUF810; Domain location=1-671; Score =981.1; E_value=4.9e-292; Accession=PF05664.3; Description=Protein of unknown function (DUF810)
  Pfam annotation: Domain name=Membr_traf_MHD; Domain location=517-627; Score=-19.2; E_value=0.0036; Accession=PF10540.1; Description=Munc13 (mammalian uncoordinated) homol
  Pfam module annotation: Pfam domain module=DUF810::Membr_traf_MHD; Domain location=1-671::517-627
EVEEILELLKSTWRILGITETVHDTCYAWVLFRQFVFTGEQGLLKVVIDHLRKIPLKEQRGPQERLHLKSLRSSVDAEGSYQDFTFFQSFLSPIQKWVDKKLNDYHLHFSEGPSLMADVVTVAMLTRRILGEENDKALESPDRDQIDRYITSSVKSAFLKMAHSVEFKADTTHEPVLASLAEETKKLLKKDTTIFMPVLSKWHPQAAVVSASLIHKLYGNKLRPFLDHAEHLTEDVVSVFPAADALEQYIMSVMASVAGEDGLDSICRQTIAPYQIESKSGTLVLRWVNGQLERIETWVKRAADQEVWDPISPQQRHGSSIVEVYRIIEETTDQFFAFKVPMRDGELNSLCRGLDKAFQVYTQLVTAPLVDIEDLAPPVPILTRYKKELGIKAFVKKEVQEVKTVDERKAAEITQLTMPKLCVRLNSLYYGISQLSKLEDSINERWARKKTENINIRRSTSEKSKSAIPNQKNQFDGSRREINSAIDRLCEFTGTKVIFWDLQQPFIDNIYRNSVQQARLDSIMEVLDMVLNQLCDVIVEQLRDRVVTGLLQASLDGLLRVILNGGSTRVFSPNDAPYLEEDLETLKEFFISGGDGLPRGTVENLVSRVRPVINLIKQETRVLIDDLREVTQGGKSKFGTDSKTLLRVLCHRNDSEASHYVKKQFKIPSSAPNT

SEQ ID NO: 68697 - protein, 285 aa, Setaria italica
  Transcript Sequence Number=SeqID_2723
  Gene Ontology: Mol. function=hydrolase activity, hydrolyzing O -glycosyl compounds; Cellular component=anchored to membrane; Biological process=carbohydrate metabolic process
  Homolog annotation: Hit_ID=B6TJF7; Match level="QueryCoverage=95%, HitCoverage=65%, E-value=1e-121, Identity=79%"; Hit description =Glucan endo-1,3-beta-glucosidase 7
  Pfam annotation: Domain name=Glyco_hydro_17; Domain location=1-219; Score=126.1; E_value=1.2e-34; Accession=PF00332.10; Description =Glycosyl hydrolases family 17
YLLPAMQCLHDALAQAGLDKQIAVTTAHNLGVLATSYPPSSAYFRKDLLPTLCPILDFHARAGSPFLVNAYPYFAYAEEPTGVDLEYALLEPGHAGVADPGSGLHYTNMLAAQVDAVYHAIAAANSAAARAVEVRVSETGWPSAGDANETGATPQNAARYNGNVMRLVAQGKGTPLRPATPMRVYMFALFNENMKPGPTSERNYGLFRPDGTPAYELSYRLPQDNTPSSSGGGGITGGGVYNAHGYGSDNGGYYSISAAGKATMGWWRWTQGAVAACVAVLVMAL

SEQ ID NO: 68698 - protein, 135 aa, Setaria italica
  misc_feature (64)..(64): Xaa can be any naturally occurring amino acid
  Transcript Sequence Number=SeqID_2724
  Gene Ontology: Mol. function=protein binding; Biological process =apoptosis
DADTCAAAAQGAMGLAAAHNFEKTVSINIQALHHARDLPLLPQEILCYILRECIHQLSTTGGGXAEEKNPWKAFEDREKTCEEIWGNIDRLNIYDKINQVKSKVGAVRITIAKAESKKTEETKRFKATSGITLDE

SEQ ID NO: 68699 - protein, 87 aa, Setaria italica
  Transcript Sequence Number=SeqID_2725
SSSRLRPPARNRSASFAGELGRAQRAPRMAGAGAGPSHTAARACACPLRHGRDRGAGEAGEEASTRRQARANTAQHEDQRLVCLGWG

SEQ ID NO: 68700 - protein, 122 aa, Setaria italica
  misc_feature (61)..(61): Xaa can be any naturally occurring amino acid
  Transcript Sequence Number=SeqID_2726
  Gene Ontology: Cellular component=vacuole
  Homolog annotation: Hit_ID=B9RHR0; Match level="QueryCoverage=99%, HitCoverage=16%, E-value=3e-43, Identity=71%"; Hit description =Protein regulator of cytokinesis, putative
EAGAVDPALVLEQIEAHIATVKEEAFSRKDILEKVERWLNACEEEAWLEDYNKDDNRYNAXGRGAHLTLKRAEKARILVKTSTGMVDVLTTKILAWQKEREKEFTYDGVRLLSMLEEYMIVR

SEQ ID NO: 68701 - protein, 117 aa, Setaria italica
  Transcript Sequence Number=SeqID_2727
GKYTQDLFAIVVHLHLYNLTQNMSYRDVMLVFAALIENLDPSIEQFRLISSRISSPRQGRSSEGLVHEMIYGLQSFRQCISYFTIPPLVAIWQSAKFDMAPFLLKKCKPHMLQFHLK

SEQ ID NO: 68702 - protein, 278 aa, Setaria italica
  misc_feature (29)..(29): Xaa can be any naturally occurring amino acid
  misc_feature (52)..(52): Xaa can be any naturally occurring amino acid
  misc_feature (71)..(71): Xaa can be any naturally occurring amino acid
  misc_feature (107)..(107): Xaa can be any naturally occurring amino acid
  misc_feature (199)..(199): Xaa can be any naturally occurring amino acid
  misc_feature (211)..(211): Xaa can be any naturally occurring amino acid
  misc_feature (224)..(224): Xaa can be any naturally occurring amino acid
  Transcript Sequence Number=SeqID_2728
  Homolog annotation: Hit_ID=Q9FI62; Match level="QueryCoverage=83%, HitCoverage=10%, E-value=9e-26, Identity=32%"; Hit description =Nuclear pore protein-like
MDGPKFSIKAPKTGITSLYVSIRQHSGQXLGLVVKVEVYKRLQIHPDTRGAXFVLFVKGGPKLEFIFRVKXLNVKIVKVQNATWKQYAKAMGNFTVRAAILANGGTXVCQVFGRVEVDIPVAMILNTQNDHLYFGCSMPIDPCLPKVDLILICYLLICTYLFSFYETCQSNSWMMADEKLDIGITEYRLGQGLYSEGKXNYPWFSSGSSNXFINNMIGRSAGKXKVSILDTCDFLLPGTTYNFISNALDSTGGGTGSMIRLESIPVYVGAESGIQICW

SEQ ID NO: 68703 - protein, 73 aa, Setaria italica
  Transcript Sequence Number=SeqID_2729
HLYMTCFESGYKGGGVQRLQIDPEYIYLTRGATFVVIINNLLSPKNLCQLYIHPFKFYVSSGDGSASSLACCC

SEQ ID NO: 68704 - protein, 161 aa, Setaria italica
  misc_feature (20)..(20): Xaa can be any naturally occurring amino acid
  misc_feature (76)..(76): Xaa can be any naturally occurring amino acid
  Transcript Sequence Number=SeqID_2730
  Homolog annotation: Hit_ID=B9S651; Match level="QueryCoverage=92%, HitCoverage=6%, E-value=3e-17, Identity=33%"; Hit description=RNA binding protein, putative
KVTGSAHALFVKGFYIKEPXKLNLAPSCNHSTITIGGNTDVELFWNAKDLLSVSRVDSNENKGVPSQIIYRVSHNXKVEALKRQPFSEKVTIILPVTGQTEEIEISYDTGEKAEPSSSWGLTTFAVILTCIVVPVATIAFFMKSLERPSRRAPSRNTAAST

SEQ ID NO: 68705 - protein, 182 aa, Setaria italica
  Transcript Sequence Number=SeqID_2731
  Homolog annotation: Hit_ID=B9S651; Match level="QueryCoverage=97%, HitCoverage=8%, E-value=2e-40, Identity=43%"; Hit description=RNA binding protein, putative
  Pfam annotation: Domain name=Big_2; Domain location=104-181; Score =20.1; E_value=0.0094; Accession=PF02368.10; Description=Bacterial Ig- like domain (group 2)
RVANVDWIQIIAEEHIKKVNGSTKDFQILAGTQDGQTFGDSQFKYMGIELHLGDKILELISPSDSIDGPKFSIKAAKTGITSLYVSTRQHSGQRVLSQVVKVEVYKPLQIHPGYIYLTPGASFVLSVKGGPKTGVYIEYSSLNMEVVEVQNATGKLSAKAVGNSTVRAAILANGGTLVCEAF

SEQ ID NO: 68706 - protein, 165 aa, Setaria italica
  Transcript Sequence Number=SeqID_2732
  Gene Ontology: Cellular component=chloroplast
  Homolog annotation: Hit_ID=B9RP84; Match level="QueryCoverage=81%, HitCoverage=51%, E-value=1e-29, Identity=34%"; Hit description =Pentatricopeptide repeat-containing protein, putative
  Pfam annotation: Domain name=PPR; Domain location=103-137; Score =48.7; E_value=2.3e-11; Accession=PF01535.12; Description=PPR repeat
  Pfam annotation: Domain name=PPR; Domain location=33-67; Score=42.0; E_value=2.3e-09; Accession=PF01535.12; Description=PPR repeat
  Pfam annotation: Domain name=PPR; Domain location=68-102; Score=41.0; E_value=4.7e-09; Accession=PF01535.12; Description=PPR repeat
  Pfam module annotation: Pfam domain module=PPR::PPR::PPR; Domain location=103-137::33-67::68-102
NCFITGYKDLKMMEEASKFYYSMIKEEIVADTATYTTLIDGFSKAGNIAFALDLYSEMLAMGNFPDDKTFTALTHGLCRNGDIDGAKKLLDEMRRLDVRPNIFIYNMLINACIRNGKLQEAFQLHDEMLNSGLVPDDTTDDLLVSLKPVEASRADSGNPILNSAS

SEQ ID NO: 68707 - protein, 1114 aa, Setaria italica
  misc_feature (228)..(228): Xaa can be any naturally occurring amino acid
  misc_feature (234)..(234): Xaa can be any naturally occurring amino acid
  misc_feature (284)..(284): Xaa can be any naturally occurring amino acid
  misc_feature (298)..(298): Xaa can be any naturally occurring amino acid
  Transcript Sequence Number=SeqID_2733
  Gene Ontology: Mol. function=protein binding; Cellular component =endoplasmic reticulum membrane
  Homolog annotation: Hit_ID=B9S651; Match level="QueryCoverage=99%, HitCoverage=48%, E-value=0.0, Identity=38%"; Hit description=RNA binding protein, putative
PDRLQAPAVVISNGRNIRLAAVGIHGNGRFFANSSSLCLRWETIGCEGLAYFAETKSAEMLDESAWERFLVLQNSTGVCTVRATVAGLSTKFAGQTHEEEHTFHSLTDAIQLQLVSSLRVTPEYVMLVFHPDAQENLIVSGGTCSLDASTNDTHVVQIVKHPGKSLCSQLILGAKGLGKAIVTIQDVGLPPKATTYSLARVANVDWIQIIAEEHISLMEGSTKDFQIXAGTQDXQPFGDECHLNLATSPRLGDEILELISLNCSMDGSKFSIKAAKTSITSLYXHVLSQVIKVEVYNXLQIDPEYIYLTRGATFFYLPQLSIKGGPKTGVYIEYLNLNMKIVKVQNATWKLSAKAVGNSTVRAAILANGGTLVCEAFGRVEVDIPLAMILNTQSDRLCIGCSMPIYPSLPKGDLFSFYETCQSYSWMIADEKVVIFQSAKSWQYRLGQGSEGKNNPWFSNGSSNSFTNHMIGRSAGKTKVSISVTCDFLLAGTTGSVVSYNASKTILVVPDPPLALVLPITWLFPPFYTTTSLLPRSANSLGEPDSLDLESSVGYSLLRGSGRGGSAIQDASIIDGSKIRTGESNAVDCIQAKDYSTGRTEIASCLRVAEVAQARLAAAESSVQIAYLSVNDRVELDIKYADELGYIFHEAHGVAPVKVETNYPDVVSILMPRDFNGTHGTHERFVLQARSHGTALIRLRINHIPNKADFIMVSVGAQMYPRDVILHSGQHLNFTVIGDGMETRGSGHWLSSNEKIVHVNRVTGEAQARSEGVAEVIFKGSNLKLQTTVSVLKVNQIVVDAPAETLTNAAGPPDGYKFSVRFSDSTEHSSGSSVSPIDVPFECKVDPSFVGYVEPWTDHAAKKSYCLFHPYPPAQLLAVKLNQKEGFLHILVRANLKEDLKVTGSAHALFVKGFYIKEPGKLNLAPSCNHSTITIGGNTDVELFWNAKDLLSVSRVDSNENKGVPSQIIYRVEALKRQPFSEKVTIILPVTGQTEEIEISYDTGEKAEPSSSWGLTTFAVILTCIVVPVATIAFFMKSLERPSRRAPSRNTAASTPARTPVASPAAMADPASPANGQLSPRTPQPFMEYVRRTIDDTPYYKRDGRRRFNPQNTY

SEQ ID NO: 68708 - protein, 78 aa, Setaria italica
  Transcript Sequence Number=SeqID_2734
NTSTIEAILSTGWRAYQCMLVPRVESKFAGDLGRCCRLLSEEARCSGADPISTTKLWWNYGEQTLVLLNQNYGDWRIG

SEQ ID NO: 68709 - protein, 101 aa, Setaria italica
  misc_feature (1)..(24): Xaa can be any naturally occurring amino acid
  Transcript Sequence Number=SeqID_2735
XXXXXXXXXXXXXXXXXXXXXXXXSCNQIFILQYMKLRMTNIYTSTNRFWLPYCFPGQPRTLIWHHVKKGLTIFNANYLTLSSLGSVISQLMDRRKAAVQK

SEQ ID NO: 68710 - protein, 39 aa, Setaria italica
  Transcript Sequence Number=SeqID_2736
  Homolog annotation: Hit_ID=B5RHS7; Match level="QueryCoverage=94%, HitCoverage=8%, E-value=3e-11, Identity=86%"; Hit description =Ribophorin I family protein
FINPIFMLAEPLMLVSAVLLFFVACIAYLHMDLSIGKSS

SEQ ID NO: 68711 - protein, 124 aa, Setaria italica
  Transcript Sequence Number=SeqID_2737
  Gene Ontology: Mol. function=metal ion binding; Cellular component =cytoplasm; Biological process=ubiquitin-dependent protein catabolic process
  Homolog annotation: Hit_ID=A0ELV2; Match level="QueryCoverage=75%, HitCoverage=79%, E-value=3e-47, Identity=96%"; Hit description=RBX1 -like protein
  Pfam annotation: Domain name=zf-C3HC4; Domain location=58-113; Score =7.4; E_value=0.014; Accession=PF00097.17; Description=Zinc finger, C3HC4 type (RING finger)
MSAMETDINAPPPPAPAGEGSSAAGPSSSSSRKPNKRFEIKKWNAVALWAWDIVVDNCAICRNHIMDLCIECQANQASATSEECTVAWGVCNHAFHFHCISRWLKTRQVCPLDNSEWEFQKYGH

SEQ ID NO: 68712 - protein, 112 aa, Setaria italica
  Transcript Sequence Number=SeqID_2738
  Gene Ontology: Mol. function=metal ion binding; Cellular component =cytoplasm; Biological process=ubiquitin-dependent protein catabolic process
  Homolog annotation: Hit_ID=A0ELV2; Match level="QueryCoverage=79%, HitCoverage=76%, E-value=1e-46, Identity=98%"; Hit description=RBX1 -like protein
  Pfam annotation: Domain name=zf-C3HC4; Domain location=46-101; Score =7.4; E_value=0.014; Accession=PF00097.17; Description=Zinc finger, C3HC4 type (RING finger)
MDKGGVAVAPTPAGSSAAAGKKAKRFDIKKWNAVSLWAWDIVVDNCAICRNHIMDLCIECQANQASATSEECTVAWGVCNHAFHFHCISRWLKTRQVCPLDNSEWEFQKYGH

SEQ ID NO: 68713 - protein, 113 aa, Setaria italica
  misc_feature (68)..(68): Xaa can be any naturally occurring amino acid
  Transcript Sequence Number=SeqID_2739
  Gene Ontology: Mol. function=sulfotransferase activity; Cellular component=cytoplasm
  Homolog annotation: Hit_ID=Q2R3S9; Match level="QueryCoverage=92%, HitCoverage=31%, E-value=1e-18, Identity=46%"; Hit description =Sulfotransferase domain containing protein
  Pfam annotation: Domain name=Sulfotransfer_1; Domain location=1-102; Score=-72.2; E_value=0.0095; Accession=PF00685.19; Description =Sulfotransferase domain
DEMMAQPAKHVRMLAEFLGVPFTVEEESGGVVEEVVRLCSFQNLRDLPVNSDGVVAGRIGAMPTKNSXFFRKGKVGDWENYLTEEMARKLDCIIEEKLRGSGLTFSQSVCHST

SEQ ID NO: 68714 - protein, 151 aa, Setaria italica
  Transcript Sequence Number=SeqID_2740
  Homolog annotation: Hit_ID=P10580; Match level="QueryCoverage=35%, HitCoverage=21%, E-value=6e-15, Identity=68%"; Hit description =Uncharacterized 29 kDa protein in mitochondrial S-1 DNA
KINHTISHKVTQCVVHVVTSQSLSGVRYVYGNLLALVKLGCFTTVWYNYTECAPDFLSSGMLPDQFVDFFKDVSDVPGSEDLLLLDTKDDTTQSIVESGKLLKDTMLIVGEELAEGLPDEDIPIEDSNWISVGVPVCIICIFVVTVTYFMK

SEQ ID NO: 68715 - protein, 152 aa, Setaria italica
  Transcript Sequence Number=SeqID_2741
  Gene Ontology: Mol. function=nucleic acid binding
  Pfam annotation: Domain name=Alba; Domain location=39-108; Score =81.5; E_value=2.9e-21; Accession=PF01918.13; Description=Alba
MVVEEITEGVKNLSVAGDAAASGAGNGGEGQKRGGSGGSSNRIQVSNTKKPLFFYVNLAKRYMQQHGDVELSALGMAIATVVTVAEILKNNGFAIEKKIRTSTVEINDESRGRPFQKAKIEIVLGKSDKFDELMAAAAEERGEVKDGEEQQA

SEQ ID NO: 68716 - protein, 87 aa, Setaria italica
  Transcript Sequence Number=SeqID_2742
CCCCCELWRGRCRRSIHALDDIAGGEGRALQLQKRHGRIKERATRQDACPRRGTLLRAQLLDLQWSNLSLSEPELSLSFSLSSLQGL

SEQ ID NO: 68717 - protein, 80 aa, Setaria italica
  Transcript Sequence Number=SeqID_2743
  Gene Ontology: Mol. function=transporter activity; Cellular component= membrane; Biological process=oligopeptide transport
  Homolog annotation: Hit_ID=Q9ZTX4; Match level="QueryCoverage=100%, HitCoverage=12%, E-value=7e-19, Identity=62%"; Hit description=LeOPT1
DEFAFLDKAAVVADSDLEEVTDADAAGSSSWRLCTVTQVEELKILLRLMPIWATSIVLSAAYAQLNTTFVQQGGAMDMRV

SEQ ID NO: 68718 - protein, 528 aa, Setaria italica
  Transcript Sequence Number=SeqID_2744
  Gene Ontology: Cellular component=integral to membrane; Biological process=protein transport
  Homolog annotation: Hit_ID=Q3T8Z1; Match level="QueryCoverage=99%, HitCoverage=60%, E-value=0.0, Identity=81%"; Hit description =Autophagy protein 9
  Pfam annotation: Domain name=APG9; Domain location=50-418; Score =651.3; E_value=9e-193; Accession=PF04109.8; Description=Autophagy protein Apg9
VPFTLPKMITVGSMVILTSYGLTNFLKFFVQLRSTLNVRQFYYDSLKVDDLEIQTISWPRIIEKVVLLQKSQKLCVVRDLSEHDIIMRIMRKENYLIGMVNKGILSFPIRSWVPGAGPTVRSHKHGRRNHLILPKALEWTLNWCIFQSMFDSKFCVRKEFLTSPDVLKKRLIFVGIAMLILSPCLMIFPLVYVILRHAEEIYNHPSAASSRRWSNLSRWIFREYNEVDHFFRHRMNNSAVHSLNYLKQFPTPLVSIMAKFVSFVSGGLAGALIIIGFVGESILEGHIFGRNLLWYTIVFGTIAAISRKVVADELQVIDPEGAMCLAVHQTHHMPKRWRGKESSELVRREYETLFQYTIIMLLEEMASIFITPYLFIFEVPKRVDDILRFISDFTVYVDGVGDVCSLSLFDFKRHGNRNYGSPFNAPKSLRSSQGKMEKSFLSFQSVYPSWEPDADGKQFLSNLHKFKERQLRQQALAQYQAMEASGFVAGTRGQMDDTFQQHQSATLPPVYNIGPLGLLDTDQRTSPI

SEQ ID NO: 68719 - protein, 297 aa, Setaria italica
  Transcript Sequence Number=SeqID_2745
  Homolog annotation: Hit_ID=Q3T8Z1; Match level="QueryCoverage=98%, HitCoverage=33%, E-value=1e-129, Identity=76%"; Hit description =Autophagy protein 9
MVAFSFQSVYPSWEPDADGKQFLSNLQKFKERQLRQQALAQYQAMEASGFVAGTRGQMDDTFQQHQSATLPPVYNIGPLGLLDTDQRTHPYILDWYYMCHPPHSDTVETPQFEQAFPETGVSTSPPARETSEIEEVGNWDYELYERVQSHLGASTSSALFQNTPVKHHDIEENSNSPWCAHVPAYSGDPQGSFLEPPEFGNRYMTDPRSSRHSGGISEGSTEDLEQSNSRSSSGWRSPQALSKTRYMDDSDIEEGLSLHFADAHHKDEDHRHLVADHQDPMPGGLHVRIIPRSSDPV

SEQ ID NO: 68720 - protein, 140 aa, Setaria italica
  misc_feature (96)..(96): Xaa can be any naturally occurring amino acid
  Transcript Sequence Number=SeqID_2746
  Gene Ontology: Mol. function=catalytic activity; Cellular component =nucleus; Biological process=ribosome biogenesis
  Homolog annotation: Hit_ID=Q10AR1; Match level="QueryCoverage=92%, HitCoverage=10%, E-value=9e-28, Identity=55%"; Hit description =Pentatricopeptide, putative, expressed
GCTTILTSASLVRNRRDESKIHENLRIDVLLSDKQHTEGTLQHCHLHYNVAIVSFKANTSVAADIYSPRSYRYSGEVVAVGRVFESGMLMATREDXLTRRRSERRFDCINLVYSSCEITKAGIGAPLVNLMEFVGTTSMM

SEQ ID NO: 68721 - protein, 149 aa, Setaria italica
  Transcript Sequence Number=SeqID_2747
  Gene Ontology: Mol. function=hydrolase activity, hydrolyzing O -glycosyl compounds; Biological process=carbohydrate metabolic process
  Homolog annotation: Hit_ID=Q7XSK2; Match level="QueryCoverage=93%, HitCoverage=26%, E-value=1e-46, Identity=59%"; Hit description =OSJNBa0004N05.24 protein
  Pfam annotation: Domain name=Glyco_hydro_1; Domain location=5-149; Score=-286.2; E_value=0.00028; Accession=PF00232.10; Description =Glycosyl hydrolase family 1
RLLNKGGGCWNSTLPTGGRFGHVNPNGVAFYNALINALLQRGIQPFVTICHYDIPYELDKRYGGWLSPEIRKDYSYLADVCFRMFGDRVKYWITFNEPNMFTKSSYMYGRYPPGHCSRPYGNCAFGDSSTDPYIVGHNIVLSHANVVSI

SEQ ID NO: 68722 - protein, 114 aa, Setaria italica
  Transcript Sequence Number=SeqID_2748
  Gene Ontology: Mol. function=transporter activity; Cellular component= integral to membrane; Biological process=transport
  Homolog annotation: Hit_ID=B6TB19; Match level="QueryCoverage=63%, HitCoverage=12%, E-value=4e-15, Identity=66%"; Hit description =Patellin-5
MAVEAVSGNRGEAVAPAKEVSAKEAVAVSKNASFREESNFLDDLKESERKALAELRDKVEAAIVEGKLFDDGKPEVKEKEDAKKKAEKAPEEKKEEEEVKNEPEAEEKEEEEGR

SEQ ID NO: 68723 - protein, 138 aa, Setaria italica
  Transcript Sequence Number=SeqID_2749
  Gene Ontology: Mol. function=protein tyrosine kinase activity; Cellular component=integral to membrane; Biological process=protein amino acid phosphorylation
  Homolog annotation: Hit_ID=Q9LDG0; Match level="QueryCoverage=98%, HitCoverage=21%, E-value=2e-66, Identity=88%"; Hit description =Putative receptor-like kinase
TARSRSLGYCAPEVTDTRKASQASDVYSFGVFILELLTGKSPVQITGGGNEFVHLVRWVQSVVREEWTAEVFDGELLRYPNIEEEMVEMLQIAMACVSRTPERRPRMADVVRTIEEVRRGDTGTRPSTEASTPAVEAA

SEQ ID NO: 68724 - protein, 232 aa, Setaria italica
  Transcript Sequence Number=SeqID_2750
  Gene Ontology: Mol. function=calcium ion binding
MKREGWQQGTVRINRSKLLRVAAAANCEETAVGAMAHGKAPVKPTNASKTTGKCRRPRSASCHYHPVSKARDKTKGAHKLHACDVALNHRLVSWRVVDGGSAGSSGIPDYKGTSASSLLAYLAGSGSSWHEDDEDGGSLETAPLVNGGLPDLYDIIVGRRADVTMLGRQEADLARATDIAVGDTDAIEEQEQDSDDVKEDGDEEDMGFCMVGITIAVEFSDGEEDWIVVDEI

SEQ ID NO: 68725 - protein, 148 aa, Setaria italica
  Transcript Sequence Number=SeqID_2751
  Gene Ontology: Mol. function=protein serine/threonine kinase activity; Cellular component=plasma membrane; Biological process =protein amino acid phosphorylation
  Homolog annotation: Hit_ID=B9T4Z1; Match level="QueryCoverage=50%, HitCoverage=9%, E-value=5e-26, Identity=64%"; Hit description=ATP binding protein, putative
RRFSVWAYEEYEKGKIFDIIDKKLPGEDIDMAQVERALQVSFWCIQEQPAQRPSMGKVVQMLEGIMDLERPPPPKSSDSFLSTTTGSTGIGSGVSTSIVSSTVASSAPIAPTTSPNLEQEMALARSTSATNRERVSRQLLSPQPYMTM

SEQ ID NO: 68726 - protein, 243 aa, Setaria italica
  misc_feature (163)..(163): Xaa can be any naturally occurring amino acid
  Transcript Sequence Number=SeqID_2752
RDGLLLLRLSLQSKDKISVLRLCVCDLLAGKRDLLPPLDVACFGDEGVRGYAVLSAADHGAGPHRPSSGYSTFFQVLLTGVYHEDGRGRVLIPKFSSAASASRSWSCIQGSLAGPFGNRVAVVTGGTARWLFHSNSGNPNGPSLNTLDVGISTGSVSATELPXDMLPRIMRMDRTNVWLCLSMDERLSLIYLHNNYLWILTQKDGGLGGTGTAWLCTQSVPVGVELGLFGIESLSMISIGEKS

SEQ ID NO: 68727 - protein, 43 aa, Setaria italica
  Transcript Sequence Number=SeqID_2753
LGLSVRSTSFLTTGDPDETAVSVTDVGAANSKVFSQLSSGEGR

SEQ ID NO: 68728 - protein, 115 aa, Setaria italica
  Transcript Sequence Number=SeqID_2754
  Homolog annotation: Hit_ID=B6UFN8; Match level="QueryCoverage=97%, HitCoverage=12%, E-value=4e-45, Identity=78%"; Hit description=ALG2 -interacting protein X
AINLGSISHDDLFKKEIAKYDSICAEIADNIMAQEQLLLQIQAQNEQFAAVFNLEDYKAARERCYKQIAAAVAKYREIKKNINEGLNFYVTLQEAIGKIKQQCSDFIMTRNIQCR

SEQ ID NO: 68729 - protein, 621 aa, Setaria italica
  misc_feature (6)..(6): Xaa can be any naturally occurring amino acid
  Transcript Sequence Number=SeqID_2755
  Gene Ontology: Mol. function=protein binding; Biological process =positive regulation of JNK cascade
  Homolog annotation: Hit_ID=B6UFN8; Match level="QueryCoverage=100%, HitCoverage=71%, E-value=0.0, Identity=67%"; Hit description=ALG2 -interacting protein X
  Pfam annotation: Domain name=BRO1; Domain location=1-152; Score= -141.4; E_value=0.0038; Accession=PF03097.10; Description=BRO1-like domain
HFDKSXVSHVQLKAAQFYADACYRYSLDLHEKEEIAEEIARLKIGMSALADAKKAAKGVAAQLLDSVNKLESNMKTNLERAMKENDRVYLMRVPAAGSLGALPAASLVKPTSLAEALDASKERLFSSLVPDGSMKALSKYTEMVDNIIRTQAEKLQQASEIARVRFKEMDLPDSILSLEGNITLPFDLKEDVEAVQISGGPAALESELQQLRDLRRVNQELLVQTEELLQKEANEDAQFRTQFGSRWTRPQSSTLTKNIQDRLNLFAANLKKAADSDSLIERGVKENYPLMSILDKRPIESALPSISRPIMSLDGNEDAIVGALKQSLRQLESLGAQRAGLEDMLKEMKRKDDILPKLMAGVGSHDDLFKKEIAKYDSICAEIADNIMAQEQLLLQIQAQNEQFAAVFNLEDYKAARERCYKQIAAAVAKYREIKKNINEGLNFYVTLQEAIGKIKQQCSDFIMTRNIQCREMIEDVQRKLAGFNFSSSSHSSMQRNASVPPDQSSPSPPPHAQAPIGGDSRPGYSQPEPRPAYSQPYPPPYGAPPQQPPYGAPHPGQYQQPPHQPPPGHDYGQPAYPGWRGPYYNAHQPQPQQPGPYPQPPYNAPGAYPPHQSNNYYRPQ

SEQ ID NO: 68730 - protein, 207 aa, Setaria italica
  misc_feature (181)..(181): Xaa can be any naturally occurring amino acid
  misc_feature (184)..(184): Xaa can be any naturally occurring amino acid
  Transcript Sequence Number=SeqID_2756
  Gene Ontology: Mol. function=transferase activity, transferring groups other than amino-acyl groups
  Homolog annotation: Hit_ID=C3PTS7; Match level="QueryCoverage=95%, HitCoverage=46%, E-value=1e-31, Identity=34%"; Hit description =Hydroxycinnamoyl-CoA:quinate hydroxycinnamoyltransferase
  Subcellular localization annotation: CTP_CleavageSite=34; ConfidenceScore=5.05e-01
GGSKAPFDSAILPVSRAQVDALKGGKKLSTFKAVVAHVWRCACRARGLAAAEDTRLYMTADARSRVTPPLPDGYLGNAIFRASAVAKVGDVVSGSLDAAADMISGATARLDDEYVRSLVDHLEQVVSDAAGLRKGEWVMPETDLWVISWQGLPIYDADFGWGRPAFMSRACLQFSGLVYLXPGXDGDGRLDVVVAMEPKSLARFKEL

SEQ ID NO: 68731 - protein, 119 aa, Setaria italica
  Transcript Sequence Number=SeqID_2757
  Gene Ontology: Mol. function=molecular_function; Cellular component =cellular_component; Biological process=biological_process
  Homolog annotation: Hit_ID=B3TLN5; Match level="QueryCoverage=98%, HitCoverage=57%, E-value=4e-55, Identity=84%"; Hit description =Thioredoxin family Trp26-like protein
  Pfam annotation: Domain name=DUF1000; Domain location=56-119; Score =5.2; E_value=4.2e-05; Accession=PF06201.5; Description=Domain of Unknown Function (DUF1000)
MACLHDHSCEDHNCAADWSLYNHVDTPKVVALNESVPGSVKSVFKPWEQRLDTSGGFLESNDGDPELLIFIPFTSDVKIKSISVVGGADGTSPSRMRAFINREGIDFSDAQNMQPVQAR

SEQ ID NO: 68732 - protein, 139 aa, Setaria italica
  Transcript Sequence Number=SeqID_2758
  Gene Ontology: Mol. function=molecular_function; Cellular component =cellular_component; Biological process=biological_process
  Homolog annotation: Hit_ID=B3TLN5; Match level="QueryCoverage=94%, HitCoverage=64%, E-value=1e-63, Identity=87%"; Hit description =Thioredoxin family Trp26-like protein
  Pfam annotation: Domain name=DUF1000; Domain location=7-103; Score =120.4; E_value=5.9e-33; Accession=PF06201.5; Description=Domain of Unknown Function (DUF1000)
MYSVGCRFTSDVKIKSISVVGGADGTSPSRMRAFINREGIDFSDAQNMQPVQEWELAENLQGTLEYQTRYSRFQGVANLTLHFSDNFGGDTTKIYYIGLRGEATQNKRDVVATIVYEVMPNPSDHKTKSETGGGFSHVE

SEQ ID NO: 68733 - protein, 46 aa, Setaria italica
  Transcript Sequence Number=SeqID_2759
SVEPKSDTVTEFQIYPGEGIYGEIDGEGVYIGNKRILSRASCETGW

SEQ ID NO: 68734 - protein, 99 aa, Setaria italica
  Transcript Sequence Number=SeqID_2760
  Gene Ontology: Mol. function=hydrolase activity, acting on acid anhydrides, catalyzing transmembrane movement of substances; Cellular component=integral to membrane; Biological process=copper ion transport
  Homolog annotation: Hit_ID=A9NIX0; Match level="QueryCoverage=92%, HitCoverage=8%, E-value=4e-39, Identity=82%"; Hit description =Putative ATPase-like zinc transporter
CLLVSLFEHFWRPLKWFALGAVAAGILPILMRSFAAARRLTLDVNILMLIAVSGAIALKDYSEAGFIVFLFTTAEWLETRASHKATAGMSSLMSMAPQK

SEQ ID NO: 68735 - protein, 918 aa, Setaria italica
  misc_feature (906)..(906): Xaa can be any naturally occurring amino acid
  Transcript Sequence Number=SeqID_2761
  Gene Ontology: Mol. function=hydrolase activity, acting on acid anhydrides, catalyzing transmembrane movement of substances; Cellular component=integral to membrane; Biological process=metal ion transport
  Homolog annotation: Hit_ID=A9NIX0; Match level="QueryCoverage=99%, HitCoverage=82%, E-value=0.0, Identity=62%"; Hit description =Putative ATPase-like zinc transporter
  Pfam annotation: Domain name=E1-E2_ATPase; Domain location=3-212; Score=197.3; E_value=4.2e-56; Accession=PF00122.12; Description=E1 -E2 ATPase
  Pfam annotation: Domain name=Hydrolase; Domain location=216-442; Score=110.6; E_value=5.3e-30; Accession=PF00702.18; Description =haloacid dehalogenase-like hydrolase
  Pfam module annotation: Pfam domain module=E1-E2_ATPase::Hydrolase; Domain location=3-212::216-442
MSMLTSRVSLRATAGMSSLMSMAPQKAVLAETGQVVAAQDVKVNTIIAVKAGEIIPIDGIVVDGRSEVDESTLTGESFPVAKQPESQVWAGTLNIDGYIAVRTTAMADNSAVAKMARLVEEAQNSRSNTQRLIDTCAKYYTPAVVVMAAAVAVIPVVIRAHNLKHMFQLALVLLVSACPCALVLSTPIATFCALLTAARTGLLIKGGDVLESLAKIKIAAFDKTGTITRGEFCVEEFKVVGGRVSIQQLLYWVSSIESRSSHPMASVLVDYAQSKSVEPKSDTVTEFQIYPGEGIYGEIDGEGVYIGNKRILSRASCETVPDIEDMKGVTVGYVACKRELIGVFTLSDSCRTGSAEAIKELRSLGIKSVMLTGDSAAAAAYAQEQLGNILDEVRSELLPEDKVRIVDELKAKHGPTLMIGDGMNDAPALAKADVGVSMGVSGSAVAMETSHITLMSNDIRRIPKAVQLARRTHRTIIVNIIFSVITKLAIVGLAIGGHPLIWAAVLADVGTCLLVIMYSMLLLRSKSDRKAKKCCASSQHGSHAKKHCVSGHCSDGPCKSTGSCKESSSGKHGCHDHGHSHSHCIEPSNQQPTEKHACHDHDHSHSHCKEPSNQVVTEKHACHDHGYTHNHRKEPGNQVLTENHGCHDHGHTHDHCKELSSSHIINKHDCHDNEHSHCKEAHASQHSDSNSTCHEHEHSHCEEHNHSHSAGEHEHSHCEEHKHSHSTVEHACHDHDHEHEHHCHAEQPLVHIADTHHYHDHEHGHDHGEIEESETDCHAEVQHHHSHCCHEPHVQEKKIAAEPVQEVSISISSLPDENHEQHNQCSHRSDEHKVADCTNHLKAKDCVPPPADLVSRNCCSVTSSNKGCGSKGKDICSSWQAVCARETSRCCRSYVKCPRTSSCCSXHPMLKLPEIVVE

SEQ ID NO: 68736 - protein, 191 aa, Setaria italica
  Transcript Sequence Number=SeqID_2762
  Homolog annotation: Hit_ID=Q9SGX1; Match level="QueryCoverage=84%, HitCoverage=28%, E-value=3e-34, Identity=46%"; Hit description =F1N19.1
DPSLPRLIAATAVASAAVGTTLNQVVLPEIQKLPQKAVDIVAVRQQLLSQYDILQSRLKDLKQFAQKEVWMLARMCQLDNKILAVGEPSYRARRGRVKRVRESLESTLLARIELMESYAKLCSMIEIEVEMDSDVIAAEAASSAERISEQIQQLMEIDSLEEQWRIQAEANDEAERLLSSDSSETLPAGRV

SEQ ID NO: 68737 - protein, 134 aa, Setaria italica
  Transcript Sequence Number=SeqID_2763
  Pfam annotation: Domain name=DUF177; Domain location=27-128; Score= -19.5; E_value=0.045; Accession=PF02620.9; Description=Uncharacterized ACR, COG1399
GRSSRYADEELIFVLPDFQHTQFGMSIKGRVLTSFRKNCDSCSSPYCTNIDEQFNLTVLSSSRRDQSGLPYLGDSDPSVIYVRPGEEVDLDSVIQETVRLTASAKSSCSEACEKSTVVWQSKRLLKLSALIFSW

SEQ ID NO: 68738 - protein, 207 aa, Setaria italica
  Transcript Sequence Number=SeqID_2764
  Pfam annotation: Domain name=DUF177; Domain location=85-199; Score= -0.5; E_value=0.00098; Accession=PF02620.9; Description =Uncharacterized ACR, COG1399
EDDEPLKKVQITQGVRRSRRRGTGGARQSLVSVGTARGGGDQWSSDFDLTMRQLHLDDLIEDGQRDADVLVHLVVQQHTQFGMSIKGRVLTSFRKNCDSCSSPYCTNIDEQFNLTVLSSSRRDQSGLPYLGDSDPSVIYVRPGEEVDLDSVIQETVRLTASAKSSCSEACEKSTVVWQNGSNQRKKISSQRWSKLLDLKKTLDKAPK

SEQ ID NO: 68739 - protein, 126 aa, Setaria italica
  Transcript Sequence Number=SeqID_2765
  Gene Ontology: Mol. function=oxidoreductase activity
  Subcellular localization annotation: CTP_CleavageSite=59; ConfidenceScore=5.82e-01
MALAFATAAASASASGLRLAPFSLPPPHPLRTSPSRGLLHAAGTSFPRPRRCGCGPVVRCAKRTGKRRYPSEKKRLDKRHKELLRQAAPEEGSEGRESGYWRLSKLAVPASDDPGKDFTGISLPLL

SEQ ID NO: 68740 - protein, 152 aa, Setaria italica
  Transcript Sequence Number=SeqID_2766
  Gene Ontology: Mol. function=ribonuclease activity; Cellular component=nucleus; Biological process=tRNA processing
  Homolog annotation: Hit_ID=B9RHJ9; Match level="QueryCoverage=92%, HitCoverage=99%, E-value=1e-50, Identity=62%"; Hit description =Lipoate-protein ligase B, putative
  Pfam annotation: Domain name=RNase_P_Rpp14; Domain location=7-116; Score=78.9; E_value=1.9e-20; Accession=PF01900.11; Description=Rpp14 family
MVHFKNRYMVMEVYIDAGRGEQDPVILTQFNITKVIRDSIQLNFGECGLAASLGSLQVKYVNPVTKLCIIRVSRDDHQKVWAAITMVRCIGKIPVSFNLLDMSGSIRACKKAALECDEAKFEQYKVVAGDRITQEIIQSVQSCFEKIRGLES

SEQ ID NO: 68741 - protein, 188 aa, Setaria italica
  misc_feature (26)..(26): Xaa can be any naturally occurring amino acid
  misc_feature (50)..(50): Xaa can be any naturally occurring amino acid
  Transcript Sequence Number=SeqID_2767
  Pfam annotation: Domain name=Methyltransf_11; Domain location=34-114; Score=28.8; E_value=2.2e-05; Accession=PF08241.4; Description =Methyltransferase domain
AWRTRQWRRAVEYHAALLADHLAQGXLAPASRAVCLGGAQEALAMRELGXAAAVAVHKKRSPPLVVAGHDTRLPFNTNSVDFVFAGRALDTAKRPADLATEAARILKPQAHLVLLTSSATDAYSLRSLQALLPALRLLRSRQINAQDDASTLRELVFQKITSSSTGGTSGNNNCSIGDHKLQLLKHAE

SEQ ID NO: 68742 - protein, 150 aa, Setaria italica
  misc_feature (47)..(47): Xaa can be any naturally occurring amino acid
  Transcript Sequence Number=SeqID_2768
  Gene Ontology: Mol. function=protein serine/threonine kinase activity; Cellular component=cytoplasm; Biological process=protein amino acid phosphorylation
  Homolog annotation: Hit_ID=B9T5C5; Match level="QueryCoverage=96%, HitCoverage=12%, E-value=4e-55, Identity=73%"; Hit description =Eif2alpha kinase, putative
  Pfam annotation: Domain name=Pkinase; Domain location=1-150; Score= -93.3; E_value=0.0062; Accession=PF00069.17; Description=Protein kinase domain
GSRTAESSIFSYDDISLSDAGGGNKQESTYLYIQMEYCPRTLRQDFXETYSSSFNVDHAWHLFRQIVEGLAHVHSQGIIHRDLTPSNIFFDVRNDIKIGDFGLAKFLKLEQLDHDQYLPTEAMGVSMDGTGQVGTYFYTAPEVEQKWPQI

SEQ ID NO: 68743 - protein, 66 aa, Setaria italica
  Transcript Sequence Number=SeqID_2769
  Gene Ontology: Mol. function=protein serine/threonine kinase activity
  Homolog annotation: Hit_ID=Q9LX30; Match level="QueryCoverage=90%, HitCoverage=4%, E-value=7e-15, Identity=61%"; Hit description =Probable serine/threonine-protein kinase GCN2
ASDHDIKCLVFITESGVSQTDLVKVRHLDFKREKDVKREELIKFLSEAICSQFKNPTIWSLTSGPP

SEQ ID NO: 68744 - protein, 61 aa, Setaria italica
  Transcript Sequence Number=SeqID_2770
IETKIFPRKSIYNHSSIVLQVHIESFGWPFDMVGWVWRSMIIYLTRHDVTRKITYSTNPSV

SEQ ID NO: 68745 - protein, 110 aa, Setaria italica
  Transcript Sequence Number=SeqID_2771
  Gene Ontology: Mol. function=protein serine/threonine kinase activity
  Homolog annotation: Hit_ID=Q9LX30; Match level="QueryCoverage=97%, HitCoverage=9%, E-value=9e-20, Identity=46%"; Hit description =Probable serine/threonine-protein kinase GCN2
KPSLSYVLRMIQTPEDTYVYDRVISTIFNEERMIAKMQCQHESSKKSTDNSELLDTIIEVAKEVFKRHCAKRFQISPLHTLEGNFTENRGKTVKILTQGGEMLELCYELR

SEQ ID NO: 68746 - protein, 720 aa, Setaria italica
  Transcript Sequence Number=SeqID_2772
  Gene Ontology: Mol. function=protein serine/threonine kinase activity; Cellular component=cytosolic ribosome; Biological process =regulation of translational initiation
  Homolog annotation: Hit_ID=Q9LX30; Match level="QueryCoverage=98%, HitCoverage=54%, E-value=0.0, Identity=53%"; Hit description =Probable serine/threonine-protein kinase GCN2
  Pfam annotation: Domain name=HGTP_anticodon; Domain location=607-702; Score=18.6; E_value=0.00086; Accession=PF03129.12; Description =Anticodon binding domain
  Pfam annotation: Domain name=Pkinase; Domain location=2-177; Score= -20.5; E_value=2.9e-07; Accession=PF00069.17; Description=Protein kinase domain
  Pfam annotation: Domain name=Pkinase_Tyr; Domain location=1-176; Score=-178.1; E_value=0.07; Accession=PF07714.9; Description=Protein tyrosine kinase
  Pfam annotation: Domain name=tRNA-synt_2b; Domain location=234-388; Score=-51.6; E_value=0.06; Accession=PF00587.17; Description=tRNA synthetase class II core domain (G, H, P, S and T)
  Pfam module annotation: Pfam domain module=HGTP_anticodon::Pkinase::Pk inase_Tyr::tRNA-synt_2b; Domain location=607-702::2-177::1-176::234 -388
TVCLNVDHAWHLFRQIVEGLAHVHSQGIIHRDLTPSNIFFDVRNDIKIGDFGLAKFLKLEQLDHDQYLPTEAMGVSMDGTGQVGTYFYTAPEVEQKWPQINEKVDMYSLGVIFFELWHPFATAMERHLVLSDLKQKGDLPKSWAAQFPGQLNLLRRLLSSSPSDRPSAVEVLQSELPPRMEDEWLNDVLRMIQTPEDTYVYDRVISTIFNEERMIAKMQCQHESSKKSTDNSELLDTIIEVAKEVFKRHCAKRFQISPLHTLEGNFTENRGKTVKILTQGGEMLELCYELRTPFVMSIARNETSSFKRYEISWVHRRAVGHSTPYRFLQGDFDIIGGASPIPEAEIIKVALDLRTRFYDSKALVIRLNHGKLAEAICSWAGVSQERRQNVAEFLSSTLVQYWPNNADRKSQWSLIRGQLLQDLRLSEEVVEKLHKADQRFCGSADQVLARLRGTLFYGSDTSLNLCCIRCLNLETGIFNCCYCEFLVVDKSACKALDDLSALLKCLRVWLVDEPITIDVLMPPSECYYTDLFFQVYSKEGNHGPSFHEKLLAVGGRYDWLMEQAWDKAYKSKPPGAVGVSIALEKFLPNNPSSDLGLPRLLSRIEPSISVLVCSRGGGGLLNERMELVAELWTANIKAQFVPQEDPSLQEQYEYASDHDIKCLVFITESGVSQTDLVKVRHLDFKREKDVKREELIKFLSEAICSQFKNPTIWSLTSGPP

SEQ ID NO: 68747 - protein, 48 aa, Setaria italica
  Transcript Sequence Number=SeqID_2773
FLFKISTTKSTYNCCHLKGTAKCKVYRGKGNSSIGNLWQQTAAGTVTM

SEQ ID NO: 68748 - protein, 54 aa, Setaria italica
  Transcript Sequence Number=SeqID_2774
  Gene Ontology: Mol. function=protein serine/threonine kinase activity; Biological process=protein amino acid phosphorylation
  Homolog annotation: Hit_ID=Q5N8C4; Match level="QueryCoverage=87%, HitCoverage=4%, E-value=8e-09, Identity=68%"; Hit description =Putative receptor-like protein kinase 2
LLGCCRNLASNLQSGMVPDLINATQLNYLDLSNNNFARSPAPGWFSTLTSLNTP

SEQ ID NO: 68749 - protein, 129 aa, Setaria italica
  Transcript Sequence Number=SeqID_2775
  Gene Ontology: Mol. function=nucleic acid binding; Cellular component= nucleus; Biological process=regulation of transcription from RNA polymerase II promoter
  Homolog annotation: Hit_ID=B9RH81; Match level="QueryCoverage=97%, HitCoverage=24%, E-value=9e-47, Identity=66%"; Hit description =Splicing factor U2AF-associated protein, putative
  Pfam annotation: Domain name=RRM_1; Domain location=40-95; Score =24.1; E_value=0.00058; Accession=PF00076.14; Description=RNA recognition motif. (a.k.a. RRM, RBD, o
MLGWGGHDDKKVMIPTTVILRHMFTPAELRADEELLSELEADVREECIKFGPVDNVKVCENHPQGVILVKFKDRKDGAKCIEKMNGRWFGGRQIHASEDDGSVNHTLIRDYDAEVSRLDRFGEELEEST

SEQ ID NO: 68750 - protein, 407 aa, Setaria italica
  Transcript Sequence Number=SeqID_2776
  Gene Ontology: Mol. function=nucleic acid binding; Cellular component= nucleus; Biological process=regulation of transcription from RNA polymerase II promoter
  Homolog annotation: Hit_ID=B9RH81; Match level="QueryCoverage=97%, HitCoverage=76%, E-value=1e-117, Identity=54%"; Hit description =Splicing factor U2AF-associated protein, putative
  Pfam annotation: Domain name=RRM_1; Domain location=165-245; Score =41.6; E_value=3.2e-09; Accession=PF00076.14; Description=RNA recognition motif. (a.k.a. RRM, RBD, o
  Pfam annotation: Domain name=RRM_1; Domain location=318-373; Score =19.5; E_value=0.0031; Accession=PF00076.14; Description=RNA recognition motif. (a.k.a. RRM, RBD, o
  Pfam module annotation: Pfam domain module=RRM_1::RRM_1; Domain location=165-245::318-373
QSEQVAPDAEDDFEKFQKEVIEAEAEVSALKGSAEDGDVNQLDDERPATPPDGEEEFTDDDGTIYKWDRTLRAWVPQNDTSGKEEDYAVEEMTFALEEEVFQAPDIPGTSAVEEVNTLDENKNKELDKVEKRGDKKRKSSEKTAEKKEANKPPDSWFDLKVNTHVYVNGLPDDVTVEEIVEVFSKCGIIKEDPETKKPRVKIYTDKETGRKKGDALVTYLKEPSVALAVQLLDGTSFRPGGKILMSVSPAKFEQKGDVFIAKKTDKQKKRKTKKVEDKMLGWGGHDDKKVMIPTTVILRHMFTPAELRADEELLTELEADVREECVKFGPVDNVKVCENHPQGVMLVKFKDRKDGAKCIEKMNGRWFGGRQIHASEDDGSVNHTLIRDYDAEVSRLDRFGEELEEST

SEQ ID NO: 68751 - protein, 203 aa, Setaria italica
  misc_feature (199)..(199): Xaa can be any naturally occurring amino acid
  Transcript Sequence Number=SeqID_2777
  Gene Ontology: Mol. function=protein binding
  Homolog annotation: Hit_ID=Q7XQP6; Match level="QueryCoverage=92%, HitCoverage=18%, E-value=7e-28, Identity=40%"; Hit description =OSJNBa0084A10.9 protein
TEVLNPQSTSARAIRFMMHRVMSLHVHDSCSITTIIPKHIASATGQEIHYSALKWCRVEKCPKLEVVFHTNYDGDTYYWFNHLETFWAANLLMARSIWSRGRPYGATDSVSFARLRAIHLHMCPRLQFVLPLSWGHTLSSLETIHIVYCRDLKQVFPVASRFLERVATRHPNGMLKFPKLQHLYLHDLSCLQQICEAKXFAPK

SEQ ID NO: 68752 - protein, 99 aa, Setaria italica
  Transcript Sequence Number=SeqID_2778
  Gene Ontology: Mol. function=oxidoreductase activity; Cellular component=cytoplasm; Biological process=oxidation reduction
  Homolog annotation: Hit_ID=B9STI7; Match level="QueryCoverage=85%, HitCoverage=20%, E-value=2e-25, Identity=60%"; Hit description =Desacetoxyvindoline 4-hydroxylase, putative
  Pfam annotation: Domain name=2OG-FeII_Oxy; Domain location=24-99; Score=51.0; E_value=4.5e-12; Accession=PF03171.12; Description=2OG -Fe(II) oxygenase superfamily
GVLELLSESLGLPGDRLREMGCAQGLNVVSHYYPPCPEPHLTLGTTRHTDANFITVLLQDDMGGLQVLLDRAGAGGGRRWVDVPPLPGALIINIGDLLQ

SEQ ID NO: 68753 - protein, 129 aa, Setaria italica
  Transcript Sequence Number=SeqID_2779
  Gene Ontology: Mol. function=oxidoreductase activity; Biological process=oxidation reduction
  Homolog annotation: Hit_ID=Q6ZBF0; Match level="QueryCoverage=94%, HitCoverage=31%, E-value=2e-33, Identity=64%"; Hit description =Putative 2-oxoglutarate-dependent oxygenase
MSATRAAAGVGGYDRQRELHAFDDTKAGVKGLVDAGVTAVPAIFHHAPDPLPVLQQASGDSNVARTTIPVIDLSCARRDDLVRGVKAAAETVGFFQVVNHGVAGGLLAETLAAVLRFNEAPAEAKRPYY

SEQ ID NO: 68754 - protein, 255 aa, Setaria italica
  misc_feature (246)..(246): Xaa can be any naturally occurring amino acid
  Transcript Sequence Number=SeqID_2780
  Gene Ontology: Mol. function=oxidoreductase activity; Cellular component=cytoplasm; Biological process=oxidation reduction
  Homolog annotation: Hit_ID=B6TBU1; Match level="QueryCoverage=92%, HitCoverage=62%, E-value=2e-60, Identity=50%"; Hit description=1 -aminocyclopropane-1-carboxylate oxidase
MSTEPAAAGAATPGGYDRRRELQAFDDTKAGVKGLVDAGVTAVPTIFRHHPDSLDLEATSSSTDDVAAIPVVDLSGAPREEVVARVRHAAETVGFFQVVNHGVPGELMAAMLAGVRRFNEGPAEAKRRAYTRDNARKVRFSSNFDLFQSAAANWRDTLFCDLAPEPPRPEELPEAVRHVMVEFGDAVRALAERLLELLSESLGLARDHLREMGCVEGLGVASNYYPPCPEPDLTTTTDRTTKDNFXTVLVQDTWA

SEQ ID NO: 68755 - protein, 90 aa, Setaria italica
  Transcript Sequence Number=SeqID_2781
  Gene Ontology: Mol. function=zinc ion binding; Cellular component =intracellular
  Homolog annotation: Hit_ID=B6U5J2; Match level="QueryCoverage=100%, HitCoverage=46%, E-value=7e-27, Identity=77%"; Hit description=Zinc finger protein 7
  Subcellular localization annotation: CTP_CleavageSite=53; ConfidenceScore=5.02e-01
AQRMIVGLPLQAHAALMHSLRVNPASSAIQKAAAPVRTAARFLEDGVAWGTIACEEAPSSAWPGSFRLRAQHPEHEQASEQSKIDLNLRL

SEQ ID NO: 68756 - protein, 97 aa, Setaria italica
  misc_feature (57)..(57): Xaa can be any naturally occurring amino acid
  Transcript Sequence Number=SeqID_2782
  Gene Ontology: Mol. function=fructose 1,6-bisphosphate 1-phosphatase activity; Cellular component=chloroplast; Biological process =reductive pentose-phosphate cycle
  Homolog annotation: Hit_ID=O64422; Match level="QueryCoverage=98%, HitCoverage=25%, E-value=5e-38, Identity=78%"; Hit description =Fructose-1,6-bisphosphatase, chloroplastic
MEEDVPVAVEESYSGNYIVEWVEHDGSSNIDAAVSTGSIFGIYAPNDECLADVENSXTRCVVSVCQPGSNLLAAGYCMYSSSVIFVLTLGAGVYVFN

SEQ ID NO: 68757 - protein, 406 aa, Setaria italica
  Transcript Sequence Number=SeqID_2783
  Gene Ontology: Mol. function=fructose 1,6-bisphosphate 1-phosphatase activity; Cellular component=chloroplast; Biological process =reductive pentose-phosphate cycle
  Homolog annotation: Hit_ID=O64422; Match level="QueryCoverage=84%, HitCoverage=84%, E-value=0.0, Identity=93%"; Hit description =Fructose-1,6-bisphosphatase, chloroplastic
  Pfam annotation: Domain name=FBPase; Domain location=71-406; Score =483.8; E_value=2.4e-142; Accession=PF00316.12; Description=Fructose -1-6-bisphosphatase
  Subcellular localization annotation: CTP_CleavageSite=47; ConfidenceScore=5.72e-01
MAAAAATSSHLLLLSRQQAASLRCRLSFLGQSRRPASRGAASGASVRCMAAVDTAPAATEASSTKSSYEIVTLTTWLLKQEQAGVIDNEMTIVLASISTACKQIAALVQRAPISNLTGVQGAVNVQGEDQKKLDVVSNEVFSNCLKSSGRTGVIASEEEDVPVAVEESYSGNYIVVFDPLDGSSNIDAAVSTGSIFGIYAPNDECLADVENSGTLDSVEQRCVVSVCQPGSNLLAAGYCMYSSSVIFVLTLGAGVYVFTLDPMYGEFVLTQEKVQIPKAGKIYAFNEGNYALWDDKLKKYMDSLKEPGDSGKPYSARYIGSLVGDFHRTLLYGGIYGYPRDRKSKNGKLRLLYECAPMSFIVEQAGGKGSDGHQRILDITPTEIHQRVPLYIGSVEEVDKVEKFLA

SEQ ID NO: 68758 - protein, 166 aa, Setaria italica
  misc_feature (155)..(155): Xaa can be any naturally occurring amino acid
  Transcript Sequence Number=SeqID_2784
  Gene Ontology: Mol. function=ATP binding
  Homolog annotation: Hit_ID=B9T5Z0; Match level="QueryCoverage=90%, HitCoverage=25%, E-value=3e-58, Identity=73%"; Hit description=Zinc finger protein, putative
  Pfam annotation: Domain name=HATPase_c; Domain location=62-152; Score= 0.5; E_value=0.088; Accession=PF02518.18; Description=Histidine kinase-, DNA gyrase B-, and HSP90-like ATPase
MPVAMAGVSSGGGGRVLDCRSFWKAGASEAPAAPTHDLQVALETGDFDRARVHPKFLHTNATSHKWAFGAIAELLDNAVDEISNGATFIKVDKIINLKDNSPMLLFQDDGGGMDPEGVRRCMSLGFSTKKSKTTIGQYGNGFKTSTMRLGADAIXVFTRAIRGSNV

SEQ ID NO: 68759 - protein, 76 aa, Setaria italica
  Transcript Sequence Number=SeqID_2785
  Subcellular localization annotation: CTP_CleavageSite=24; ConfidenceScore=5.15e-01
LNKEYSKIQRSQGSLRSLRPSQFRTETISSDRNTITSFLPRLAQLCSALLTHSSTRHFLSLLSPPQLELLRWVILP

SEQ ID NO: 68760 - protein, 123 aa, Setaria italica
  Transcript Sequence Number=SeqID_2786
  Gene Ontology: Mol. function=carbon-carbon lyase activity; Cellular component=chloroplast; Biological process=cellular aromatic compound metabolic process
  Homolog annotation: Hit_ID=A6MD18; Match level="QueryCoverage=100%, HitCoverage=35%, E-value=3e-46, Identity=77%"; Hit description =Putative dehydroxydec aldolase
VQMGPLDLSASMGYLWDPGNRKVRATLREAEKKVLEARKKKVAAALDGNAAYLGGFAMQNDPPEQLKLRGYHMVAGAVDIAMFRKAALDDVKRFREAVMEIGEEGDDEEGEKEEKENDGYWSE

SEQ ID NO: 68761 - protein, 44 aa, Setaria italica
  misc_feature (26)..(26): Xaa can be any naturally occurring amino acid
  misc_feature (29)..(29): Xaa can be any naturally occurring amino acid
  Transcript Sequence Number=SeqID_2787
  Homolog annotation: Hit_ID=B6TQK3; Match level="QueryCoverage=97%, HitCoverage=19%, E-value=4e-15, Identity=95%"; Hit description=AT -rich element binding factor 3
QVWSLVRRFDQPQLFKPFVSRCEMKXGNXEIGSVREVNVKSGLP

SEQ ID NO: 68762 - protein, 135 aa, Setaria italica
  Transcript Sequence Number=SeqID_2788
  Homolog annotation: Hit_ID=B6TQK3; Match level="QueryCoverage=98%, HitCoverage=61%, E-value=9e-61, Identity=86%"; Hit description=AT -rich element binding factor 3
PGLWRLVDERCDLRAMESEYVRRFHRHEPRDHQCSSAVAKHIKAPVHLVWSLVRRFDQPQLFKPFVSRCEMKGNIEIGSVREVNVKSGLPATRSTERLELLDDNEHILSVKFVGGDHRLQVCSVLDLYCPMFILQ

SEQ ID NO: 68763 - protein, 155 aa, Setaria italica
  misc_feature (86)..(86): Xaa can be any naturally occurring amino acid
  misc_feature (126)..(126): Xaa can be any naturally occurring amino acid
  Transcript Sequence Number=SeqID_2789
  Homolog annotation: Hit_ID=B6TQK3; Match level="QueryCoverage=77%, HitCoverage=55%, E-value=7e-62, Identity=95%"; Hit description=AT -rich element binding factor 3
  Subcellular localization annotation: CTP_CleavageSite=48; ConfidenceScore=5.21e-01
KTKPTPPRKRKAKTPPPPLPVPCFSSSPSINRGCARFHRHEPRDHQCSSAVAKHIKAPVHLVWSLVRRFDQPQLFKPFVSRCEMKXNIEIGSVREVNVKSGLPATRSTERLELLDDNEHILSVKFXGGDHRLQNYSSILTVHPEVIDGRPGTLVI

SEQ ID NO: 68764 - protein, 79 aa, Setaria italica
  Transcript Sequence Number=SeqID_2790
  Homolog annotation: Hit_ID=B6TQK3; Match level="QueryCoverage=92%, HitCoverage=33%, E-value=3e-32, Identity=93%"; Hit description=AT -rich element binding factor 3
RSCHLPLQNYSSILTVHPEVIDGRPGTLVIESFVVDVPDGNTKDETCYFVEALLKCNLKSLAEVSENRVTGDQTEPLDR

SEQ ID NO: 68765 - protein, 211 aa, Setaria italica
  Transcript Sequence Number=SeqID_2791
  Homolog annotation: Hit_ID=B6TQK3; Match level="QueryCoverage=90%, HitCoverage=87%, E-value=1e-101, Identity=93%"; Hit description=AT -rich element binding factor 3
  Pfam annotation: Domain name=Polyketide_cyc2; Domain location=53-198; Score=54.1; E_value=5.3e-13; Accession=PF10604.1; Description =Polyketide cyclase  dehydrase and li
MVEMDGAVGVGGGGQAPAPAPRLWRLVDERCDLRAMESEYVRRFHRHEPRDHQCSSAVAKHIKAPVHLVWSLVRRFDQPQLFKPFVSRCEMKGNIEIGSVREVNVKSGLPATRSTERLELLDDNEHILSVKFVGGDHRLQNYSSILTVHPEVIDGRPGTLVIESFVVDVPDGNTKDETCYFVEALLKCNLKSLAEVSENRVTGDQTEPLDR

SEQ ID NO: 68766 - protein, 78 aa, Setaria italica
  Transcript Sequence Number=SeqID_2792
YVIIELAKCLRSLSIWVSISSSGVSLDMSYGSTFPASSMVLENLEIKGQLKDGGIRELGKLQGLRSLRLGINSYSEKY

SEQ ID NO: 68767 - protein, 105 aa, Setaria italica
  Transcript Sequence Number=SeqID_2793
  Homolog annotation: Hit_ID=Q7XXD1; Match level="QueryCoverage=93%, HitCoverage=17%, E-value=3e-52, Identity=97%"; Hit description =OSJNBa0039G19.7 protein
VFVKVRLVLIEQRYVPDTRYVLHDIDQEAKEQALLYHSERLAIAYGLISTPARTPLRIIKNLRICGDCHNAIKIMSRIVGRELIVRDNKRFHHFKDGKCSCGDYW

SEQ ID NO: 68768 - protein, 330 aa, Setaria italica
  misc_feature (27)..(27): Xaa can be any naturally occurring amino acid
  Transcript Sequence Number=SeqID_2794
  Homolog annotation: Hit_ID=Q7XXD1; Match level="QueryCoverage=99%, HitCoverage=59%, E-value=1e-165, Identity=85%"; Hit description =OSJNBa0039G19.7 protein
  Pfam annotation: Domain name=PPR; Domain location=130-164; Score=0.5; E_value=7.8; Accession=PF01535.12; Description=PPR repeat
  Pfam annotation: Domain name=PPR; Domain location=60-93; Score=30.9; E_value=5.3e-06; Accession=PF01535.12; Description=PPR repeat
  Pfam annotation: Domain name=PPR; Domain location=94-128; Score=6.6; E_value=1.5; Accession=PF01535.12; Description=PPR repeat
  Pfam module annotation: Pfam domain module=PPR::PPR::PPR; Domain location=130-164::60-93::94-128
ACSNRKLLDELRKVHDFFLRSPFRGDXLRINNKLLEMYAKCAAMPHARRTFDNMPDRDMESWHIMIDGYSVNGLGDEALRLFELMKECMAPTSHTYVLVLNACANSEAIEEAFLYFDAMSRDHGMEPGVEHYVGIIEVLGKSGHLNEAMEYIEKLPFEPSAMVWESVLNLARMNGDIDLEDRAEELLVSLDPSKANPKKLPTPPPKRRLGINMLDGRNKLAEYRLPPKIEKKVVNEQRYVPDTRYVLHDIDQEAKEQALLYHSERLAIAYGLISTPARTPLRIIKNLRICGDCHNAIKIMSRIVGRELIVRDNKRFHHFKDGKCSCGDYW

SEQ ID NO: 68769 - protein, 137 aa, Setaria italica
  Transcript Sequence Number=SeqID_2795
  Gene Ontology: Mol. function=structural constituent of ribosome; Cellular component=intracellular; Biological process=translation
  Homolog annotation: Hit_ID=Q8LDI6; Match level="QueryCoverage=99%, HitCoverage=100%, E-value=1e-47, Identity=69%"; Hit description=30S ribosomal protein S16
  Pfam annotation: Domain name=Ribosomal_S16; Domain location=9-70; Score=92.5; E_value=1.5e-24; Accession=PF00886.11; Description =Ribosomal protein S16
MVVRIRLARFGCRNRPFYRVMAADSRSPRDGKHLEVLGYYNPLPGQDGGKRMGLKFDRVKYWLSVGAQPSDPVQRILFRAGLLPPPPMLAMTPKGGPRDRRPIHPMTGKPLDLEGITIVDSDAPEGDAEEHKDEVAS

SEQ ID NO: 68770 - protein, 380 aa, Setaria italica
  misc_feature (326)..(326): Xaa can be any naturally occurring amino acid
  Transcript Sequence Number=SeqID_2796
  Gene Ontology: Mol. function=translation elongation factor activity; Cellular component=intracellular; Biological process=translational elongation
  Homolog annotation: Hit_ID=B4FHF0; Match level="QueryCoverage=99%, HitCoverage=99%, E-value=0.0, Identity=84%"; Hit description =Elongation factor Ts
  Pfam annotation: Domain name=EF_TS; Domain location=111-362; Score =281.5; E_value=1.9e-81; Accession=PF00889.11; Description=Elongation factor TS
  Pfam annotation: Domain name=UBA; Domain location=58-95; Score=29.8; E_value=1.1e-05; Accession=PF00627.23; Description=UBATS-N domain
  Pfam module annotation: Pfam domain module=EF_TS::UBA; Domain location=111-362::58-95
  Subcellular localization annotation: CTP_CleavageSite=55; ConfidenceScore=5.40e-01
MAWGQGARKPIMGLLFRAQQQAARGYSSSAFQTHILGVDAPQNGMFLRRFSSQVSSSEQMSLIKQLRERTCAPIKDVKASLVSCNWDIEAAQKDLRKRGVVLAAKKSSRTAAEGLLAIAQDEKRAAVIELNCETDFVARNDVFQYLASSVAKMALSAQGPGQLFLPFGPEYLENMSINLDHPKLSGETTVQSAVTEVAAMVGENVKLRRGFILSTTAHGVVSSYVHTCPQPGLGRIAGLVTLEAEDSSASLDALKTVGSSIAMHIVATKPLFLSKELVSAAALENEREILRTQAESSGKSQMAMDKMVEGRLRKYFEEVVLMEQKXYVLNDSTNIKTVLNDLSKEVGSKVTIGNFFRMQVGEGIERHEAADGSEPVANAA

SEQ ID NO: 68771 - protein, 445 aa, Setaria italica
  Transcript Sequence Number=SeqID_2797
  Gene Ontology: Mol. function=ATP-dependent helicase activity; Cellular component=intracellular; Biological process=RNA processing
  Homolog annotation: Hit_ID=Q5N870; Match level="QueryCoverage=100%, HitCoverage=27%, E-value=0.0, Identity=71%"; Hit description =Endoribonuclease Dicer homolog 3a
  Pfam annotation: Domain name=Ribonuclease_3; Domain location=79-191; Score=149.5; E_value=1e-41; Accession=PF00636.18; Description=RNase3 domain
  Pfam annotation: Domain name=dsrm; Domain location=218-281; Score =19.7; E_value=0.012; Accession=PF00035.17; Description=Double -stranded RNA binding motif
  Pfam annotation: Domain name=dsrm; Domain location=350-434; Score =2.9; E_value=1.4; Accession=PF00035.17; Description=Double-stranded RNA binding motif
  Pfam module annotation: Pfam domain module=Ribonuclease _3::dsrm::dsrm; Domain location=79-191::218-281::350-434
GELRAVVSVLKWLQIEIETEEDLIVKAMSSASVWNYLPKVDVVELLEAKIGYAFSVKGLLIEALTHPSQQESGATYCYQRLEFLGDAVLDILLTRHLFLSHKDIDEGELTDLRSASVNNENFAQVAVKYNLHHFLQHSSGLLQDQINEYVNGLEGSSMDRTSLLSSGPSRGPKVLGDIVESIAGAVLIDTKLDLDLVWGVFKPLLSPIVTPENLELPPFRELHEWCDKSGYFLGIKCENRGDNIMAILNLQLKDLLLARQGHGKNKVDAKAHAASLLLRDLEEKGLVIPKNASRTEQSDSPKHHSNLLDAMDTQNIAPPRQKELTVSSTVPGSVIDEPLVVKVKLSKGGPRISLYESCKKLQWPMPTFEYVKVKPSVCPSSDGSSQKAAPQGFAFSSIITLHIPNGDVISLTGDGRADKKSSQDSAALLMLYELQRRGRFQVQEV

SEQ ID NO: 68772 - protein, 147 aa, Setaria italica
  misc_feature (64)..(64): Xaa can be any naturally occurring amino acid
  Transcript Sequence Number=SeqID_2798
  Gene Ontology: Mol. function=nucleotide binding; Cellular component =plasma membrane; Biological process=small GTPase mediated signal transduction
  Homolog annotation: Hit_ID=A9SI73; Match level="QueryCoverage=90%, HitCoverage=61%, E-value=8e-59, Identity=85%"; Hit description =Rab8/RabE-family small GTPase
  Pfam annotation: Domain name=Arf; Domain location=1-147; Score= -100.0; E_value=0.067; Accession=PF00025.13; Description=ADP -ribosylation factor family
  Pfam annotation: Domain name=MMR_HSR1; Domain location=16-131; Score =2.5; E_value=0.00059; Accession=PF01926.15; Description=GTPase of unknown function
  Pfam annotation: Domain name=Miro; Domain location=17-131; Score =90.8; E_value=4.9e-24; Accession=PF08477.5; Description=Miro-like protein
  Pfam annotation: Domain name=Ras; Domain location=17-147; Score =238.1; E_value=2.2e-68; Accession=PF00071.14; Description=Ras family
  Pfam module annotation: Pfam domain module=Arf::MMR_HSR1::Miro::Ras; Domain location=1-147::16-131::17-131::17-147
MAAPPARARADYDYLIKLLLIGDSGVGKSCLLLRFSDGSFTTSFITTIGIDFKIRTIELDGKRXKLQIWDTAGQERFRTITTAYYRGAMGILLVYDVTDESSFNNIRNWIRNIEQHASDNVNKILVGNKADMDESKRAVPTAKGQAL

SEQ ID NO: 68773 - protein, 210 aa, Setaria italica
  Transcript Sequence Number=SeqID_2799
  Gene Ontology: Mol. function=nucleotide binding; Cellular component =plasma membrane; Biological process=small GTPase mediated signal transduction
  Homolog annotation: Hit_ID=P28186; Match level="QueryCoverage=95%, HitCoverage=87%, E-value=3e-77, Identity=74%"; Hit description=Ras -related protein ARA-3
  Pfam annotation: Domain name=Arf; Domain location=2-163; Score=-73.1; E_value=0.00063; Accession=PF00025.13; Description=ADP-ribosylation factor family
  Pfam annotation: Domain name=GTP_EFTU; Domain location=10-165; Score=- 88.6; E_value=0.021; Accession=PF00009.19; Description=Elongation factor Tu GTP binding domain
  Pfam annotation: Domain name=MMR_HSR1; Domain location=6-117; Score= -20.1; E_value=0.071; Accession=PF01926.15; Description=GTPase of unknown function
  Pfam annotation: Domain name=Miro; Domain location=11-117; Score =61.6; E_value=3e-15; Accession=PF08477.5; Description=Miro-like protein
  Pfam annotation: Domain name=Ras; Domain location=11-165; Score =324.9; E_value=1.6e-94; Accession=PF00071.14; Description=Ras family
  Pfam module annotation: Pfam domain module=Arf::GTP_EFTU::MMR _HSR1::Miro::Ras; Domain location=2-163::10-165::6-117::11-117::11-165
TLPLFFFCYIGVGKSCLLLRFSDGSFTTSFITTIGIDFKIRTIELDGKRVKLQIWDTAGQERFRTITTAYYRGAMGILLVYDVTDESSFNNIRNWIRNIEQHASDNVNKILVGNKADMDESKRAVPTAKGQALADEYGIKLSETSAKTNLNVEQVFFSIARDIKQRLSETDSKPEDKVVNIRQDQGAEDKVVNIRQDQGAEASSSQKSAC

SEQ ID NO: 68774 - protein, 214 aa, Setaria italica
  Transcript Sequence Number=SeqID_2800
  Gene Ontology: Mol. function=nucleotide binding; Cellular component =plasma membrane; Biological process=small GTPase mediated signal transduction
  Homolog annotation: Hit_ID=P28186; Match level="QueryCoverage=93%, HitCoverage=93%, E-value=6e-88, Identity=81%"; Hit description=Ras -related protein ARA-3
  Pfam annotation: Domain name=Arf; Domain location=1-177; Score=-64.1; E_value=0.00013; Accession=PF00025.13; Description=ADP-ribosylation factor family
  Pfam annotation: Domain name=GTP_EFTU; Domain location=13-179; Score=- 72.0; E_value=0.00091; Accession=PF00009.19; Description=Elongation factor Tu GTP binding domain
  Pfam annotation: Domain name=MMR_HSR1; Domain location=16-131; Score =2.3; E_value=0.00061; Accession=PF01926.15; Description=GTPase of unknown function
  Pfam annotation: Domain name=Miro; Domain location=17-131; Score =88.8; E_value=1.9e-23; Accession=PF08477.5; Description=Miro-like protein
  Pfam annotation: Domain name=Ras; Domain location=17-179; Score =372.8; E_value=6.3e-109; Accession=PF00071.14; Description=Ras family
  Pfam module annotation: Pfam domain module=Arf::GTP_EFTU::MMR _HSR1::Miro::Ras; Domain location=1-177::13-179::16-131::17-131::17 -179
MAAPPARARADYDYLIKLLLIGDSGVGKSCLLLRFSDGSFTTSFITTIGIDFKIRTIELDGKRVKLQIWDTAGQERFRTITTAYYRGAMGILLVYDVTDESSFNNIRNWIRNIEQHASDNVNKILVGNKADMDESKRAVPTAKGQALADEYGIKFFETSAKTNLNVEQVFFSIARDIKQRLSETDSKPEDKVVNIRQDQGAEASSSQKSACCGS

SEQ ID NO: 68775 - protein, 65 aa, Setaria italica
  Transcript Sequence Number=SeqID_2801
FELTIVPHSMTVFLSAVHKLWAWVVQKWYRIRCPCVWLVPVGIWTHITVVNHVEKSMDGNPNRQS

SEQ ID NO: 68776 - protein, 64 aa, Setaria italica
  Transcript Sequence Number=SeqID_2802
LEHCVEDCWQFTSCCSVGYWPILLRQTHSNQIFFHPSIFKALRYNIVLRCILTSNAQTQQEFIY

SEQ ID NO: 68777 - protein, 166 aa, Setaria italica
  misc_feature (121)..(121): Xaa can be any naturally occurring amino acid
  Transcript Sequence Number=SeqID_2803
  Gene Ontology: Mol. function=molecular_function; Cellular component =cellular_component; Biological process=biological_process
  Homolog annotation: Hit_ID=Q00XP5; Match level="QueryCoverage=90%, HitCoverage=34%, E-value=9e-25, Identity=37%"; Hit description=[S] KOG2625 Uncharacterized conserved protein
  Pfam annotation: Domain name=DUF974; Domain location=3-166; Score =249.1; E_value=1.1e-71; Accession=PF06159.5; Description=Protein of unknown function (DUF974)
VRSRHQGRNTKRRRQRILLLDTSKSPVESIRSGGRYDFIVEHDVKELGAHTLVCTALYNDADGERKYLPQFFKFSVSNPLSVRTKVRTIKDITYLEACIENHTKSNLYMDQVDFEPAQQWXATRLEADEHPSAVKSEIGDLCKQPILIRAGEGIYNYLYQLRSSSE

SEQ ID NO: 68778 - protein, 203 aa, Setaria italica
  Transcript Sequence Number=SeqID_2804
  Gene Ontology: Mol. function=molecular_function; Cellular component =cellular_component; Biological process=biological_process
  Homolog annotation: Hit_ID=Q00XP5; Match level="QueryCoverage=45%, HitCoverage=19%, E-value=1e-23, Identity=57%"; Hit description=[S] KOG2625 Uncharacterized conserved protein
  Pfam annotation: Domain name=DUF974; Domain location=83-203; Score =169.6; E_value=9.4e-48; Accession=PF06159.5; Description=Protein of unknown function (DUF974)
FRVMRLSRPSLQPDPTALLRFDPRDVFLPEDALTGPDPSAAADFLHGLLHPPDSTAAVPGDFTFRDRFFLRDHADALALPGLLVLPQSFGAIYLGETFCSYISINNSSSFEARDVVIKAEIQTERQRILLLDTSKSPVESIRSGGRYDFIVEHDVKELGAHTLVCTALYNDADGERKYLPQFFKFSVSNPLSVRTKVRTIKVG

SEQ ID NO: 68779 - protein, 36 aa, Setaria italica
  misc_feature (21)..(21): Xaa can be any naturally occurring amino acid
  Transcript Sequence Number=SeqID_2805
DDLFKKTQVHPRIYYMPLSEXEVSAKLAARNNVKRR

SEQ ID NO: 68780 - protein, 430 aa, Setaria italica
  misc_feature (24)..(24): Xaa can be any naturally occurring amino acid
  misc_feature (107)..(107): Xaa can be any naturally occurring amino acid
  misc_feature (206)..(206): Xaa can be any naturally occurring amino acid
  misc_feature (234)..(234): Xaa can be any naturally occurring amino acid
  Transcript Sequence Number=SeqID_2806
  Gene Ontology: Mol. function=electron carrier activity; Cellular component=transcription factor complex; Biological process=chromatin modification
  Homolog annotation: Hit_ID=Q6YYZ1; Match level="QueryCoverage=99%, HitCoverage=56%, E-value=1e-176, Identity=73%"; Hit description =Lysine-specific histone demethylase 1 homolog 2
  Pfam annotation: Domain name=Amino_oxidase; Domain location=3-264; Score=-26.2; E_value=0.0006; Accession=PF01593.16; Description =Flavin containing amine oxidoreductase
SLAHWDQDDPYEMGGGSLLLAGGXRLIHALCDGVPVLYEKTVKRIEHGEDGVSVTVEGGQVFQADMVLCTVPLGVLKSGSIVFDPELPEQKLGAIQRLVFGLLNKVXAMVFPHVFWDEDIDTFGCLNKESSKRGEYFLFYSYHTVSGGAVLIALVAGEAALEFEKVDPVVALHRVLVILRGIYGPKGVTVPEPIQSVCTRWGSDPXCSGSYSHIRVGSSGADYDILAESVNDRXGMARDEPNRAYPATMHGALLSGLREASKIHRATESILNSDQKKYSIPKSMRPPNGALEDIFSEPDLAFGRFSFVFSSVTPDDPEALGLARVSLGMLMPPKDHEPKEDQKDQDPAADKIVIETFHLYATVSREQADRLRNSGSDDKSGLGLLCEDLSAKLMGYDSTCDTCSDMISSILSAKKARKRLQRPKNFKISQ

SEQ ID NO: 68781 - protein, 154 aa, Setaria italica
  Transcript Sequence Number=SeqID_2807
  Subcellular localization annotation: CTP_CleavageSite=40; ConfidenceScore=5.43e-01
PAARVLGSLTYVPSFVLLQRRWGARVQGSRHARTVTAPPPASPSSEGRESHKSRRARPTVRQSPAPISDRHDTCPGSKVYSKAHGALCGQDNGQSHRRCTLARTRRAGALARLTRRHKPTTHHAMVTRPLRRAAVALGQEGTAGPSRGGSVGEQ

SEQ ID NO: 68782 - protein, 490 aa, Setaria italica
  misc_feature (253)..(253): Xaa can be any naturally occurring amino acid
  Transcript Sequence Number=SeqID_2808
  Gene Ontology: Mol. function=ribonuclease activity; Cellular component=exosome (RNase complex); Biological process=cellular response to stress
  Homolog annotation: Hit_ID=B9RJ60; Match level="QueryCoverage=99%, HitCoverage=44%, E-value=1e-134, Identity=51%"; Hit description=RNA binding protein, putative
  Pfam annotation: Domain name=RNB; Domain location=1-239; Score=102.0; E_value=2.1e-27; Accession=PF00773.11; Description=RNB-like protein
SIIFSCCKLSYDLVQDLICSEASQSRSAVSSLQVHGIFEQDDVIKSLRSLYEVSKNLKEIRFKGGALSLDTAKLMILFDEDGAPCDSYRYIRNDACFIVEELMLLANMSAAEVISNAFPDCALLRRHPEPNLRKFREFEAFCAKNGFELDASSSGQLHLSLSRIKEKLQDDPVLFDILMFYASKQMQSAEYFCTGDLISKKDDWAHYALSVPLYTHFTSPLRRYTDIIVHRTLNAVIEAEQMYMKQKEIFHRXNGVKASCELMDRCFTGLQFSKDAAVSEEGKRALSAAAEKFKVPSSENLGEVAEHCNERKWAGRRAEEAGRKLYMWALIKNKEIVVCNARVLGLGPRFMSVYVPKLAMERRIYYDEVEGLSVEWLEATGTLVLDACRNKPARGTQMKSRPIEEVAMVVNPSEAMLSEEDEESGATEAGGCTAKSVLLSGDAVKAQAAPAVLPLVIHYLSDIPVVLHATGGEDCAVDIGVRLYMASYFK

SEQ ID NO: 68783 - protein, 49 aa, Setaria italica
  misc_feature (3)..(3): Xaa can be any naturally occurring amino acid
  Transcript Sequence Number=SeqID_2809
  Gene Ontology: Mol. function=transporter activity; Cellular component= mitochondrial inner membrane; Biological process=transport
  Homolog annotation: Hit_ID=B6TZ69; Match level="QueryCoverage=100%, HitCoverage=13%, E-value=4e-16, Identity=85%"; Hit description =Protein brittle-1
RAXKKKSLSRPELLVIGAVSGLTASTISFPLEVARKRLMVGAIRGKCPP

SEQ ID NO: 68784 - protein, 266 aa, Setaria italica
  Transcript Sequence Number=SeqID_2810
  Gene Ontology: Mol. function=transporter activity; Cellular component= mitochondrial inner membrane; Biological process=transport
  Homolog annotation: Hit_ID=B6TZ69; Match level="QueryCoverage=98%, HitCoverage=70%, E-value=1e-119, Identity=75%"; Hit description =Protein brittle-1
  Pfam annotation: Domain name=Mito_carr; Domain location=1-54; Score =1.9; E_value=0.0022; Accession=PF00153.19; Description=Mitochondrial carrier protein
  Pfam annotation: Domain name=Mito_carr; Domain location=172-263; Score=75.2; E_value=2.4e-19; Accession=PF00153.19; Description =Mitochondrial carrier protein
  Pfam annotation: Domain name=Mito_carr; Domain location=80-166; Score= 78.2; E_value=3e-20; Accession=PF00153.19; Description=Mitochondrial carrier protein
  Pfam module annotation: Pfam domain module=Mito_carr::Mito_carr::Mito_ carr; Domain location=1-54::172-263::80-166
DQKHIFGSFVEIIEQNGWQGLWAGNTINMLRIIPTQAIELGTFECVKRSMASAQEKWKEDGCPKIQLGNLKIELPFHLLSPIAIGGAVAGIASSLACHPLEVLKDRMTVNREAYPSIVIAFNKIYRADGIGGLYAGLCPTLVGMLPYSTCYYFMYETIKTSYCRAQKKKSLSRPELLVIGAVSGLTASTISFPLEVARKRLMVGAIRGKCPPHMIAALAEVVQEEGFKGLFRGWAASSLKVMPTSGVTWMFYEAWKEILLAPQLHA

SEQ ID NO: 68785 - protein, 549 aa, Setaria italica
  misc_feature (56)..(56): Xaa can be any naturally occurring amino acid
  Transcript Sequence Number=SeqID_2811
  Gene Ontology: Mol. function=phosphoprotein phosphatase activity; Biological process=actin cytoskeleton organization and biogenesis
  Homolog annotation: Hit_ID=Q84ZL0; Match level="QueryCoverage=79%, HitCoverage=27%, E-value=0.0, Identity=80%"; Hit description=Formin -like protein 5
  Pfam annotation: Domain name=FH2; Domain location=112-485; Score =447.8; E_value=1.6e-131; Accession=PF02181.15; Description=Formin Homology 2 Domain
  Subcellular localization annotation: CTP_CleavageSite=18; ConfidenceScore=5.44e-01
GGGGGAPRPGAPPPPPPPGSRPGAPPPPPPPGSRPGAPPPPPPPGGGGRAPPPPPXAPGGRLGGPPPPPPPGGRAPGAPAPPRAPGVPPPPGSNPSLGRGRGAARPLGSAYGAAASRKSTLKPLHWVKVTRALQGSLWEELQRNDDSQSVSEFDLSELESLFPAAVPKSDDSSKSERRKSLGSKPEKVHLIELRRANNTEIMLTKVKMPLSDLVSAALALDQLTLDVDQVENLIKFCPTKEEMELLKNYTGNKDNLGKCEQFFLELMKVPRMESKLRVFSFKIQFGSQVADLRKSLNIIDSSCNEIRSSIKLKEIMKKILLLGNTLNQGTARGAAVGFRLDSLLKLTDTRATNNKMTLMHYLCKVLAARSPQLLNFYVDLVSLDAASKIQLKMLAEEMQAVSKGLEKVQLEYDASERDGPVSEIFRKKLKEFTDNAGADVQSLSSLFSEVGKKADALIKYFGEDPVRCPFEQVISTLLTFVTTFRKAHEENLKQAELEKKKAEKEAEAEKAKSAQLTSKNDAKPSNPSRQAKQTIERTRSASRRGRDVG

SEQ ID NO: 68786 - protein, 47 aa, Setaria italica
  Transcript Sequence Number=SeqID_2812
SCSLSIRQTKVIKSELIYPCLAPRVSLGSLGIVKGFTSSALQSRFFS

SEQ ID NO: 68787 - protein, 57 aa, Setaria italica
  Transcript Sequence Number=SeqID_2813
QNWRSEVVVRKVVCRTYKNLTFLIVASSSMHLKFVLYSCWFPFSAAYIPSLLKTRRQ

SEQ ID NO: 68788 - protein, 124 aa, Setaria italica
  misc_feature (31)..(31): Xaa can be any naturally occurring amino acid
  Transcript Sequence Number=SeqID_2814
MGRRRRFTQLDDDDDDDDVVPVKSKPSGGAXSSGANSRKPQPPPQQQQQRRRVPADDDEDDDEELEEEEEDEKDLEAMRRAEEEERREQEAETQTRRRRGRPKRRREPESEDEEPEEEEPQEEE

SEQ ID NO: 68789 - protein, 61 aa, Setaria italica
  Transcript Sequence Number=SeqID_2815
FCSMCFYLLEQKGKVMKATSPTRRVHPCPWLFGWLPVRAVRVQRRKGTDVTSRDVIYGPRN

SEQ ID NO: 68790 - protein, 112 aa, Setaria italica
  Transcript Sequence Number=SeqID_2816
  Subcellular localization annotation: CTP_CleavageSite=28; ConfidenceScore=5.32e-01
LITFAVQLQINIHTQSAKLSDNNNVGLSARYRGSITVQTLGKYIARRAVSNSSQLQVVVLILVHLEDLRASGQSNILLESQSIRHTNIRGHTIVAGEGKNKGTLLPEPRTTS

SEQ ID NO: 68791 - protein, 170 aa, Setaria italica
  Transcript Sequence Number=SeqID_2817
  Gene Ontology: Mol. function=intramolecular transferase activity, phosphotransferases; Cellular component=extracellular space; Biological process=metabolic process
  Homolog annotation: Hit_ID=B6SJ40; Match level="QueryCoverage=82%, HitCoverage=81%, E-value=4e-65, Identity=82%"; Hit description =Pollen-specific protein C13
  Pfam annotation: Domain name=Pollen_Ole_e_I; Domain location=38-158; Score=152.3; E_value=1.4e-42; Accession=PF01190.9; Description =Pollen proteins Ole e I family
  Subcellular localization annotation: CTP_CleavageSite=65; ConfidenceScore=5.41e-01
MASLRASLLLAAALCVLAASGAAASRDLRPLRSASFVVRGRVWCDTCRAGFETPVSTYIAGAKVRVECRSKTTGLKSCTYEGHTDRTGTYNILVTDEHEDELCESVLISSPDMRCATTVPGRERAPVFLTSNNGVASNVRMANALGFQKDVALPRCAQVLKMYEDEDDHL

SEQ ID NO: 68792 - protein, 108 aa, Setaria italica
  misc_feature (87)..(87): Xaa can be any naturally occurring amino acid
  Transcript Sequence Number=SeqID_2818
  Gene Ontology: Mol. function=alpha-N-arabinofuranosidase activity; Biological process=L-arabinose metabolic process
  Homolog annotation: Hit_ID=Q10M79; Match level="QueryCoverage=100%, HitCoverage=16%, E-value=7e-44, Identity=76%"; Hit description=Alpha- L-arabinofuranosidase C-terminus family protein, expressed
GVYNPGYWGMNIEKGKVYKVSLHIRSSDAVSLTVSLTSSDGLQKLAAHTITGSKKSFAKWTKIEFHLKSSQNNTNSRLQLTTSKSGXIWLDQVSVMPLDTYMGHGFRK

SEQ ID NO: 68793 - protein, 121 aa, Setaria italica
  Transcript Sequence Number=SeqID_2819
  Subcellular localization annotation: CTP_CleavageSite=71; ConfidenceScore=5.10e-01
FALPQIQYKVSDTSHRQEPAHRTTSKTNRLLGCPLLPATTETRALAQGNPAMPNYSCCNPATFYQKSKASSASAERVRRSRETLGQGNGRRLIGGLACRLRPAASRQQGTAERNEEDDDSS

SEQ ID NO: 68794 - protein, 111 aa, Setaria italica
  Transcript Sequence Number=SeqID_2820
  Gene Ontology: Mol. function=alpha-N-arabinofuranosidase activity; Biological process=L-arabinose metabolic process
  Homolog annotation: Hit_ID=Q10M79; Match level="QueryCoverage=78%, HitCoverage=12%, E-value=2e-29, Identity=74%"; Hit description=Alpha- L-arabinofuranosidase C-terminus family protein, expressed
  Subcellular localization annotation: CTP_CleavageSite=44; ConfidenceScore=5.14e-01
TPRGRPPLVLPPPGTTTLRQRARAASLLHALVVGCVLCWTLSARCVEGQSQTGQLSVDASPQNVRKIPDKMFGIFFEEINHAGAGGLWAELVSNRGFEAGGPNTPSNIDPW

SEQ ID NO: 68795 - protein, 236 aa, Setaria italica
  Transcript Sequence Number=SeqID_2821
  Gene Ontology: Mol. function=alpha-N-arabinofuranosidase activity; Biological process=L-arabinose metabolic process
  Homolog annotation: Hit_ID=Q10M79; Match level="QueryCoverage=91%, HitCoverage=32%, E-value=3e-96, Identity=80%"; Hit description=Alpha- L-arabinofuranosidase C-terminus family protein, expressed
HGFRKDLASMLANLKPRFLKFPGGNYVMGNYLVNSFRWSETVGPWEERPGHFNDAWAYWTDDGLGFFEFLQLAEDLGASPVWVVNDGASLNEEVSTATIASLVKDVVNGIEFARGGPKTPWGSVRVAMGHPQPFKLDYVSIGNQECWMLYYRGNYQKFYSAIKAAYPDINIISSCDRSTISPSNPADLYDVHVYTSSSNMFSRTSMFDNTPRSAPKVPTLLLIPQLSSLQVVSNSL

SEQ ID NO: 68796 - protein, 254 aa, Setaria italica
  misc_feature (93)..(93): Xaa can be any naturally occurring amino acid
  Transcript Sequence Number=SeqID_2822
  Gene Ontology: Mol. function=alpha-N-arabinofuranosidase activity; Biological process=L-arabinose metabolic process
  Homolog annotation: Hit_ID=Q10M79; Match level="QueryCoverage=88%, HitCoverage=33%, E-value=1e-103, Identity=79%"; Hit description =Alpha-L-arabinofuranosidase C-terminus family protein, expressed
  Pfam annotation: Domain name=Alpha-L-AF_C; Domain location=51-238; Score=222.7; E_value=9.2e-64; Accession=PF06964.4; Description=Alpha- L-arabinofuranosidase C-terminus
  Subcellular localization annotation: CTP_CleavageSite=66; ConfidenceScore=5.10e-01
RRSSICNNSCFCKVLFCNKSVLPIYTSSGDMFSKSRMFDNTARSGPKAIVSEYAVTGNDAGKGTLVAALAEAAFLIGLERNSDVVEMASCAPXFVNDNDRRWNPDAIVFNSWQHYGCPNYWMLHFFKDSSGAALHPTTIQISNYDQLVASAITWQNAKDKSTYLRIKVVNFGSRAVDLNVSVAGLANGIKKSGSKQTVLTSSSPLDENSFQQPEKVVPVSSPLANAKQQMGVSVRPYSLTSFDLLLEPSKHASI

SEQ ID NO: 68797 - protein, 271 aa, Setaria italica
  Transcript Sequence Number=SeqID_2823
  Gene Ontology: Mol. function=alpha-N-arabinofuranosidase activity; Biological process=L-arabinose metabolic process
  Homolog annotation: Hit_ID=Q10M79; Match level="QueryCoverage=96%, HitCoverage=39%, E-value=1e-121, Identity=78%"; Hit description =Alpha-L-arabinofuranosidase C-terminus family protein, expressed
  Pfam annotation: Domain name=CBM_4_9; Domain location=72-234; Score= -4.2; E_value=0.007; Accession=PF02018.9; Description=Carbohydrate binding domain
MGIPRACSFYWLFDVLVLVCGLCQILYIGSVAAQTAQLSVDASPHNAQVIPGNMFGIFFEEINHAGAGGLWAELVSNRGFEAGGANTPSNIDPWLIIGDESNIIVATDRSSCFAGNPIALRMEVLCEASGCPSGGVGIYNPGYWGMNIERTKVYRATMYIRSSEAVELTVSLTSSDGLQNLASHTITGDKEDFVEWTKVEFDLESNDRNTNSRLQLTTTKSGIIWFDQVSLMPEDTYMGHGFRKDLASMLANLKPRFLKFPGLSPSILSYF

SEQ ID NO: 68798 - protein, 375 aa, Setaria italica
  Transcript Sequence Number=SeqID_2824
  Gene Ontology: Mol. function=alpha-N-arabinofuranosidase activity; Biological process=L-arabinose metabolic process
  Homolog annotation: Hit_ID=Q10M79; Match level="QueryCoverage=92%, HitCoverage=51%, E-value=1e-163, Identity=83%"; Hit description =Alpha-L-arabinofuranosidase C-terminus family protein, expressed
  Pfam annotation: Domain name=Alpha-L-AF_C; Domain location=170-357; Score=215.8; E_value=1.1e-61; Accession=PF06964.4; Description=Alpha- L-arabinofuranosidase C-terminus
LKGKNLKGKFFKEKLNLKFLQLAEDLGACPVWVVNDGASLNEEVPSATIAAFVKDVVNGIEFARGDPQTAWGSVRAAMGHPEPFQLYYVSVGNQECSKYYYKDNYVKFYSAIKASYPDIKIISSCDRSAISPVNPADLYDVHVYTSSGDMFSKSRMFDNTARSGPKAIVSEYAVTGNDAGRGTLIAALAEAAFLIGLERNSDVVEMASCAPLFVNDNDRRWNPDAIVFNSWQHYGCPNYWMLHFFKDSSGGALHPSTIQLSNYDQLVTSAITWNNSQDGNTYLKIKVVNFGSKAVNLNISVTGLETDIRTFGSIKTVLTSGWLRDENSFQQPDKVVPAASPITNAGEQMGVLLDSYSLTSFDLLLGSSQAMHSST

SEQ ID NO: 68799 - protein, 102 aa, Setaria italica
  Transcript Sequence Number=SeqID_2825
PFVPSFKAMDHRASNRPTKVSLCVDFHILQEVIFQGDIFMPVASAGKELISCWESMHGGVTFCTDLLHIMARPQISWFVLVAVVIYVRLVMQSYDRAGTIFK

SEQ ID NO: 68800 - protein, 58 aa, Setaria italica
  Transcript Sequence Number=SeqID_2826
EEQASSAILYCILTAYNAYFNLVTLLCFTILSHYYVQLTYYLLPVFSLLFLSWFCRPL

SEQ ID NO: 68801 - protein, 249 aa, Setaria italica
  misc_feature (29)..(29): Xaa can be any naturally occurring amino acid
  Transcript Sequence Number=SeqID_2827
  Gene Ontology: Mol. function=DNA binding; Cellular component=nucleus; Biological process=regulation of transcription
  Homolog annotation: Hit_ID=Q7XVZ6; Match level="QueryCoverage=100%, HitCoverage=24%, E-value=1e-59, Identity=54%"; Hit description =OSJNBa0020I02.14 protein
WSQVQDTFKQMDTASTELKCFQELQKQEXLAASYRTLNLTEEVNKQKALERTLQSRYGDLLSGFQRIQEQLEERKRQLKIQEAKEAENCAQEEEVAAQNRAAEEEERKSRSIEEDGQTNKATDGEAAAGSKGTTEDQMDVDNGNVDGELIGPIPPAPDTEGDNIDVSIQENAFNAQSSETASTNDEAGKTDPAKSEGQHKADDSMAVDAGRQEERKDELATVGASISEGHAAVSSDHGVSNEDNGASPE

SEQ ID NO: 68802 - protein, 204 aa, Setaria italica
  Transcript Sequence Number=SeqID_2828
  Gene Ontology: Mol. function=DNA binding; Cellular component=nucleus; Biological process=regulation of transcription
  Homolog annotation: Hit_ID=Q5NKH5; Match level="QueryCoverage=79%, HitCoverage=43%, E-value=3e-70, Identity=78%"; Hit description=MYB26 protein (Fragment)
EEAEERIEEDMSDRLARERAEEQARQEALLRKRSKVLQRSLPRPPAASVEVLRQSLIKGGESRSRSTFVPPTSLEQADDLIHEELLRLLEHDNAKYPLDDKTQKEKKKGNKRQANAAAVPEIEDFDEYELKEASSLVEEEIQYLRVAMGHESESFDDFVKAHDACQEDLMYFPANNSYGLASVAGNADKISALQNCSFVNLLLS

SEQ ID NO: 68803 - protein, 727 aa, Setaria italica
  Transcript Sequence Number=SeqID_2829
  Gene Ontology: Mol. function=DNA binding; Cellular component=nucleus; Biological process=regulation of transcription
  Homolog annotation: Hit_ID=Q7XVZ6; Match level="QueryCoverage=99%, HitCoverage=73%, E-value=0.0, Identity=69%"; Hit description =OSJNBa0020I02.14 protein
DIEAQLRKQDIARNKILQRQDAPAAIMQANKLNDPEAVTRRSKLMLPPPQISDHELEEIAKMGNAGDPGLNEELGEGSTATRTLLASYSQTPRLGMTPLRTPQRTPAGKGDAIMMEAENLARLRESQTPLLGGDNPDLHPSDFSGVTPRKKEIQTPNPMATPLALASPGPGATPRIGMTPSRDGNNFGLTPKATPFRDELRINEEVELQDSTKLELRRQAELRRSLRSGFASIPQPKNEYQIVMPPITEDEKEEAEERIEEDMSDRLARERAEEQARQEALLRKRSKVLQRSLPRPPTASVEIIRQSLIKGGESRSRSTFVPPTSLEQADELINEELLRLLEHDNAKYPLDDKTQKDKKKGSKRQQNGGSLVPEIDDFDEDELKEAGYMVEEEIQYLRVAMGHENESFEDFVKAHDACQEDLMYFPANNSYGLASVAGNADKISALQNEFDIVKKRMDDEAKKASRLEQKIKLLTQGYQVRAGKLWSQVQDTFKQMDTAATELECFQELQKQEQLAASYRVRNLTEEVDKQKALERTLQSRYGDLVSIYHRMQEQLEEHKIQLRKQEAIEAENRAREEAAAQNRADEEENERRRNVEEGKEQTNSVPDEVPAGSKQINEDQMDVDSSNVDGEFVGPIPPAPDTQGDSTEASVQENSSNAQSGDDVTTNGEACDMVDASKLESQDNSNGSLPVDAVNQEDNKSNLPLVGASEGNTALSSDGDDAVTNE

SEQ ID NO: 68804 - protein, 455 aa, Setaria italica
  misc_feature (273)..(273): Xaa can be any naturally occurring amino acid
  misc_feature (295)..(295): Xaa can be any naturally occurring amino acid
  misc_feature (393)..(393): Xaa can be any naturally occurring amino acid
  Transcript Sequence Number=SeqID_2830
  Gene Ontology: Mol. function=serine-type endopeptidase activity; Cellular component=cell wall; Biological process=negative regulation of catalytic activity
  Homolog annotation: Hit_ID=Q43546; Match level="QueryCoverage=98%, HitCoverage=53%, E-value=1e-127, Identity=56%"; Hit description =Serine proteinase (Fragment)
  Pfam annotation: Domain name=Inhibitor_I9; Domain location=44-139; Score=17.6; E_value=0.0031; Accession=PF05922.8; Description =Peptidase inhibitor I9
  Pfam annotation: Domain name=Peptidase_S8; Domain location=142-454; Score=-8.8; E_value=3e-06; Accession=PF00082.14; Description =Subtilase family
  Pfam module annotation: Pfam domain module=Inhibitor_I9::Peptidase _S8; Domain location=44-139::142-454
  Subcellular localization annotation: CTP_CleavageSite=55; ConfidenceScore=5.21e-01
EFWKGFIQSSSDTTIMAFFKPSLVFCSVLTFLSLNCGPSHVFAKVYMVVMEDDPVISYKVNRKHVMRGEEAQKYKQVATTKHDSFLDSFLPMGSYKKLYSYTHLINGFALHAESEKTVRILSRAKGVRLIQEDIKMVKMTTHTPNYIGASGVWPLLGGAENSGDGVVIGMIDTGIDPKNPSFVSSNLSSQAKSPPSSFKGTCRAGNRFPPDSCNGKIVGARWFARAAQATGEFNATVHYASPYDSDGHGSHTASIAAGNFHTPVISGGYSFGXASGMAPGARLAIYKAAYPFGGXYMSDVIAAVDQAVEDGVDVISLSMAPSAVSSGPASFLNLLEAQLLLATKAGVSVVQAVGNAGPDENTIVSFSPWILSVAASTTDRKYRKSIIIGNGKXFSCGALSAPTPGETMYPLAWADDVIVENSTDDGWYNKYRDPRIFIKPLVQGKLIVCMFDSSD

SEQ ID NO: 68805 - protein, 99 aa, Setaria italica
  Transcript Sequence Number=SeqID_2831
MSGISLAVAPRSDPEHGSERQPTTMMGGVMGSLRVIELQLVAFIMVFSASGLVPLIDLAFPVATTLYLLAISRLAFPPLHSKLDAAGGSPAASQEIFRG

SEQ ID NO: 68806 - protein, 68 aa, Setaria italica
  Transcript Sequence Number=SeqID_2832
  Homolog annotation: Hit_ID=Q652J9; Match level="QueryCoverage=88%, HitCoverage=28%, E-value=9e-11, Identity=51%"; Hit description =Harpin-induced family protein-like
AGDCAARQVLLRLVILGQVRYRSGLFRTAWRDLFMRCDVTTGLGMDAAAGGGAGGVPLIEYPQCFVDA

SEQ ID NO: 68807 - protein, 125 aa, Setaria italica
  Transcript Sequence Number=SeqID_2833
  Gene Ontology: Mol. function=peptidase activity; Cellular component =plasma membrane
  Homolog annotation: Hit_ID=B9RZ23; Match level="QueryCoverage=100%, HitCoverage=31%, E-value=1e-56, Identity=80%"; Hit description =Protein bem46, putative
GPTLHLASRLPRLRGVVLHSAILSGLRVVCHVNFTFCFLFLQNVKKIKKVKCPVLVIHGTDDDVVNWSHGKELWKLAREPYDPLWIKGGGHCNLELYPDFIRHLSRFIREMETITTKIRLKKIRQ

SEQ ID NO: 68808 - protein, 214 aa, Setaria italica
  Transcript Sequence Number=SeqID_2834
  Gene Ontology: Mol. function=peptidase activity; Cellular component =plasma membrane
  Homolog annotation: Hit_ID=B9RZ23; Match level="QueryCoverage=97%, HitCoverage=55%, E-value=3e-76, Identity=65%"; Hit description =Protein bem46, putative
MLSGCSVSSLAARFAFFPPEPATYAVRKDEATGRLVASGVPRDNALDVLLVDTRRGSKVVAFYFRNPCARLTLLYSHGNAADLGQLYDLFVQLKVNLKVNLMGYDYSGYGASTGKPSEENTYADIEAVYQCLETEYGISQEDIILYGQSVGSGPTLHLASRLPRLRGVVLHSAILSGLRVVCHVNFTFRFDIYKNVKKIKKVKCPVLVIHGTVL

SEQ ID NO: 68809 - protein, 147 aa, Setaria italica
  Transcript Sequence Number=SeqID_2835
  Gene Ontology: Mol. function=cysteine-type endopeptidase activity; Biological process=proteolysis
  Homolog annotation: Hit_ID=B6TG95; Match level="QueryCoverage=100%, HitCoverage=40%, E-value=2e-55, Identity=70%"; Hit description =Vignain
  Pfam annotation: Domain name=Peptidase_C1; Domain location=22-147; Score=75.4; E_value=2.1e-19; Accession=PF00112.15; Description =Papain family cysteine protease
PAPSKKLAGFKYENFTLSDHDEQVDWRQRGAVTGVKNQGQCGCCWAFSAVCAVEQRNQIATGNLVSLSEQQLLDCAVYGGNQGCNGGFMDSAFQYIIDNGGITTEDAYQYSAAEGTCQSVQPVVTINGYQDVPSGDEGALASAVTNQ

SEQ ID NO: 68810 - protein, 163 aa, Setaria italica
  misc_feature (9)..(9): Xaa can be any naturally occurring amino acid
  misc_feature (33)..(33): Xaa can be any naturally occurring amino acid
  misc_feature (120)..(120): Xaa can be any naturally occurring amino acid
  Transcript Sequence Number=SeqID_2836
  Subcellular localization annotation: CTP_CleavageSite=43; ConfidenceScore=5.24e-01
QQAAMLGFXGAQQQAFAQPNAMLAMIAAMQNPXAALGMTPAMLAAMNPAFAAAALGAGGQQAHTAGLTGFGAQGFGTQAFGAGGAAFPNAAGVQAAAAAYQGAGAPPGFQGPPFQVGQAXTQTSTAAAAAAAAANAAGYQAGAAGQGQVSGAQIGGTGFQGGY

SEQ ID NO: 68811 - protein, 348 aa, Setaria italica
  Transcript Sequence Number=SeqID_2837
  Gene Ontology: Mol. function=nucleic acid binding; Cellular component= nucleolus
  Homolog annotation: Hit_ID=B6SXV2; Match level="QueryCoverage=50%, HitCoverage=33%, E-value=1e-53, Identity=63%"; Hit description=RNA -binding protein AKIP1
  Pfam annotation: Domain name=RRM_1; Domain location=56-125; Score =48.4; E_value=2.7e-11; Accession=PF00076.14; Description=RNA recognition motif. (a.k.a. RRM, RBD, o
  Subcellular localization annotation: CTP_CleavageSite=62; ConfidenceScore=5.88e-01
SSCTGLRAASGPAPPASQSQNPSSNANTNTNSNSNSGTTSNVSGSSSQPDNMPRKIFVGNVHADVDVDRLYEYFSQFGEIEEGPLGFDKNTGKPKGFALFVYKSVESARRALEEPVRNFDGKMLNIQKAIDGRTKGSSGTNANANSNATTASAAAAAQMTAPASAAISPYDASAYGAAAVPDLGFAQQAAMLGLGAQQQAFAQPNAMLAMIAAMQNPAALGMTPAMLAAMNPAFAAAALGAGGQQAHTAGLTGFGAQGFGTQAFGAGGAAFPNAAGVQAAAAAYQGAGAPPGFQGPPGFQVGQATTQTSTAAAAAAAAANAAGYQAGAAGQGQVSGAQIGGTGFQGGY

SEQ ID NO: 68812 - protein, 79 aa, Setaria italica
  Transcript Sequence Number=SeqID_2838
MFVATRIVPNILRDKWYLSPLLSTTADAYARAAVRWIGHGAICNPNLSHQLQRCLLAIVPEAALDWCLLQFVRRLRAER

SEQ ID NO: 68813 - protein, 272 aa, Setaria italica
  Transcript Sequence Number=SeqID_2839
  Gene Ontology: Mol. function=oxidoreductase activity; Biological process=oxidation reduction
  Homolog annotation: Hit_ID=A1C0M0; Match level="QueryCoverage=94%, HitCoverage=75%, E-value=9e-72, Identity=55%"; Hit description =Putative b-keto acyl reductase
  Pfam annotation: Domain name=adh_short; Domain location=1-162; Score=- 23.1; E_value=0.00046; Accession=PF00106.17; Description=short chain dehydrogenase
VALELARRGLNLVLLDIDAANLRETSDTIRSRHAVKTRTLVFDLSLVATPQGDESMRRLRAAIDGLDVGLLVNNAGMANPFLAYFHEADVEAWLRMVRVNLWALTEVAAAVLPGMVERGRGAVLNMGSASSEGMPSFPLNTIYASTKKYVAVFSRSLYVEYRSKGIDVQCQAPMFVATRIVPNILRDKWYLSPLLSTTADAYARAAVRWIGHGAICNPNLSHQLQRCLLAIVPEAALDWCLLQFVRRLRAESRGVLARVGAVGNGTDRKNSM

SEQ ID NO: 68814 - protein, 67 aa, Setaria italica
  Transcript Sequence Number=SeqID_2840
  Subcellular localization annotation: CTP_CleavageSite=42; ConfidenceScore=5.60e-01
QRMQHQTSIATMSTTASAAAAPPKAPSSICTSTFTFRWRRVGAQEGPQGIISKLNHHLLLLLTNWSK

SEQ ID NO: 68815 - protein, 162 aa, Setaria italica
  misc_feature (48)..(48): Xaa can be any naturally occurring amino acid
  Transcript Sequence Number=SeqID_2841
  Gene Ontology: Mol. function=mismatched DNA binding; Biological process=mismatch repair
VEKWVGEQVRRTSLDANPPAALSSRTSNIPEFNLPLETNSLKQQSHDXFCICEADVSPQHSEPPNTVICGAKVLSPCDVLTPEPDVEEQHDRCLSISGAPNKHSEVEHLNTLKDSPLPDAHDSDNDAAVYSASVQYPIVQFTVADLRRRRKNGFMTSRANKA

SEQ ID NO: 68816 - protein, 58 aa, Setaria italica
  Transcript Sequence Number=SeqID_2842
  Gene Ontology: Mol. function=transferase activity; Cellular component= chloroplast; Biological process=metabolic process
  Homolog annotation: Hit_ID=Q53NI2; Match level="QueryCoverage=86%, HitCoverage=5%, E-value=3e-17, Identity=80%"; Hit description =Probable NAD kinase 2, chloroplastic
PGILALVSDGGKKPLYLHSKEGVSRTNAMVSRWKQYVTRSERLAIQNRSLSGNGKPLA

SEQ ID NO: 68817 - protein, 242 aa, Setaria italica
  misc_feature (216)..(216): Xaa can be any naturally occurring amino acid
  Transcript Sequence Number=SeqID_2843
  Gene Ontology: Mol. function=transferase activity; Cellular component= chloroplast; Biological process=metabolic process
  Homolog annotation: Hit_ID=Q53NI2; Match level="QueryCoverage=93%, HitCoverage=22%, E-value=1e-127, Identity=96%"; Hit description =Probable NAD kinase 2, chloroplastic
  Pfam annotation: Domain name=NAD_kinase; Domain location=36-242; Score=-16.7; E_value=0.00015; Accession=PF01513.13; Description=ATP -NAD kinase
TDGFSCTREKVTESSLAFTHPSTQQQMLMWKSPPKTVLLLKKLGDELMEQAKEVASFLHHQEKMNVLVEPDVHDIFARIPGYGFVHTFYTQDTSDLHERVDFVTCLGGDGVILHASNLFRTSVPPVVSFNLGSLGFLTSHDFEGFRQDLRAVIHGNNTLGVYITLRMRLRCEIFRNGKAMPGKVFDVLNEVVVDRGSNPYLSKIECYEHDHLITKXGQGDGVIVATLCILSLGDCKTVHHNV

SEQ ID NO: 68818 - protein, 243 aa, Setaria italica
  Transcript Sequence Number=SeqID_2844
  Gene Ontology: Mol. function=transferase activity; Cellular component= chloroplast; Biological process=metabolic process
  Homolog annotation: Hit_ID=Q53NI2; Match level="QueryCoverage=98%, HitCoverage=24%, E-value=1e-136, Identity=96%"; Hit description =Probable NAD kinase 2, chloroplastic
  Pfam annotation: Domain name=NAD_kinase; Domain location=1-217; Score= 142.7; E_value=1.2e-39; Accession=PF01513.13; Description=ATP-NAD kinase
VCIFVHMLGGDGVILHASNLFRTSVPPVVSFNLGSLGFLTSHDFEGFRQDLRAVIHGNNTLGVYITLRMRLRCEIFRNGKAMPGKVFDVLNEVVVDRGSNPYLSKIECYEHDHLITKVQGDGVIVATPTGSTAYSTAAGGSMVHPNVPCMLFTPICPHSLSFRPVILPDSACLELKIPNDARSNAWVSFDGKRRQQLSRGDSVRISMSQYPLPTVNKSDQTGDWFRSLIRCLNWNERLDQKAL

SEQ ID NO: 68819 - protein, 526 aa, Setaria italica
  misc_feature (517)..(517): Xaa can be any naturally occurring amino acid
  Transcript Sequence Number=SeqID_2845
  Gene Ontology: Mol. function=transferase activity; Cellular component= chloroplast; Biological process=metabolic process
  Homolog annotation: Hit_ID=Q53NI2; Match level="QueryCoverage=100%, HitCoverage=53%, E-value=0.0, Identity=80%"; Hit description =Probable NAD kinase 2, chloroplastic
  Pfam annotation: Domain name=DUF442; Domain location=54-161; Score= -39.9; E_value=0.064; Accession=PF04273.5; Description=Protein of unknown function (DUF442)
PSEPRGLDIWRKLQRLKNACYDAGFPRGDGYPCPTLFANWFPVYYSTASDDSGTEELEVAFWRGGQVSEEGLAWLLEKGFKTIVDLREEDVKDDLYLSAVQEAVSSGKIEVVNMPVEIGTSPSAEQVQQFAALVSDGGKKPLYLHSKEGVSRTNAMVSRWKQYVTRSERLAIQNRSLSGNGKPLANDKTEQHTGSPSSSTNVTKNGTPAESDRTMNNGESCEIDIETARHNLEVTNALSSDQSTEQGELPGTRSELLSNFTLETNPLKAQFPACDVFSRKEMTNFFRSKKVYPKSVLNSRRRSSSSVVSRRKQNLSEEHNGAIDYEAAEFAVSKSSNGKAFDNDYILSVASGITNGKPSNGASTLLQEKERETSVVTVDTRASPSSSNGNVQVASQKSAEKNGTPYLERNKSDAVDGNMCASATGVVRLQSRRKAEMFLVRTDGFSCTREKVTESSLAFTHPSTQQQMLMWKSPPKTVLLLKKLGDELMEQAKEVASFLHHQEKMNVLVEPDVVDIXARIPGYGFV

SEQ ID NO: 68820 - protein, 122 aa, Setaria italica
  misc_feature (81)..(81): Xaa can be any naturally occurring amino acid
  Transcript Sequence Number=SeqID_2846
  Homolog annotation: Hit_ID=B6TY80; Match level="QueryCoverage=91%, HitCoverage=22%, E-value=5e-42, Identity=76%"; Hit description=DTW domain containing protein
VNGESNHISEGMVNDCNGIGVEKVEVGADLGQDWTMKSMDKCTIAFTEKELRIDIERGVKPKIRWLSRGLLGEAAVSNGFXVTKIQMKKCKLTGEITEFEEFSITIPPKSALLFPCQRAISI

SEQ ID NO: 68821 - protein, 124 aa, Setaria italica
  Transcript Sequence Number=SeqID_2847
  Gene Ontology: Mol. function=protein phosphatase type 2A regulator activity; Cellular component=protein phosphatase type 2A complex; Biological process=signal transduction
  Homolog annotation: Hit_ID=B6T9B2; Match level="QueryCoverage=98%, HitCoverage=24%, E-value=5e-51, Identity=77%"; Hit description =Transposon protein
  Pfam annotation: Domain name=B56; Domain location=1-123; Score= -181.6; E_value=0.074; Accession=PF01603.12; Description=Protein phosphatase 2A regulatory B subunit (B56 family)
KEVMFLSEIEEVLEATNMVEFQKCMVLLFRRIAHCINSSHFQVAERALFMWNNDHIISLVAQNRQAIVPIVTPALEENIQNHWNVSVLNLTANVKKMLSEMDEELFSACLAKHKRRREAGVAGT

SEQ ID NO: 68822 - protein, 290 aa, Setaria italica
  misc_feature (22)..(22): Xaa can be any naturally occurring amino acid
  Transcript Sequence Number=SeqID_2848
  Gene Ontology: Mol. function=nucleotide binding; Cellular component =myosin complex; Biological process=signal transduction
  Homolog annotation: Hit_ID=Q7Y1D5; Match level="QueryCoverage=99%, HitCoverage=20%, E-value=2e-99, Identity=64%"; Hit description =Putative myosin heavy chain
  Pfam annotation: Domain name=IQ; Domain location=115-135; Score=14.3; E_value=0.52; Accession=PF00612.19; Description=IQ calmodulin-binding motif
  Pfam annotation: Domain name=IQ; Domain location=140-160; Score=28.1; E_value=3.6e-05; Accession=PF00612.19; Description=IQ calmodulin -binding motif
  Pfam annotation: Domain name=IQ; Domain location=163-183; Score=25.3; E_value=0.00025; Accession=PF00612.19; Description=IQ calmodulin -binding motif
  Pfam annotation: Domain name=IQ; Domain location=44-64; Score=28.0; E_ value=4e-05; Accession=PF00612.19; Description=IQ calmodulin-binding motif
  Pfam annotation: Domain name=IQ; Domain location=67-87; Score=22.6; E_ value=0.0016; Accession=PF00612.19; Description=IQ calmodulin-binding motif
  Pfam annotation: Domain name=IQ; Domain location=92-112; Score=26.5; E_value=0.00011; Accession=PF00612.19; Description=IQ calmodulin -binding motif
  Pfam module annotation: Pfam domain module=IQ::IQ::IQ::IQ::IQ::IQ; Domain location=115-135::140-160::163-183::44-64::67-87::92-112
MKLTATNMLLEKVNLTGYQIGXTKVFLRAGQMAELDALRTEVLGRSATKIQRKVRSYLARKNFIQLRISATQLQAVCRGQIARHYYEDLRREAASLTIQTCYRMHFARKNYRNLCSASTTIQSGLRGMAARKELHFRLQTKAAVIIQSFWRSYAARSRYMSLKKASITTQCAWRGRVARKELRKLKMAAKETGALQAAKNKLEKQVEELTWRLQLEKRIRSDMEEAKTQENRKLQQQLQELQLQSKETKDLLKREQENAKEALEKAALVPEVQVDTTLVDKLTAENENLK

SEQ ID NO: 68823 - protein, 84 aa, Setaria italica
  Transcript Sequence Number=SeqID_2849
INVHLNPIDVQFFDHLEKTLLHRLAFCDGEMRMNLIVTICDTVTSGITFWIPTMIFQELNIYGLHACVDCARVGHYPDSRTLKS

SEQ ID NO: 68824 - protein, 85 aa, Setaria italica
  Transcript Sequence Number=SeqID_2850
  Gene Ontology: Mol. function=protein binding
  Homolog annotation: Hit_ID=B6T176; Match level="QueryCoverage=77%, HitCoverage=25%, E-value=9e-21, Identity=75%"; Hit description=LAP4 protein
  Pfam annotation: Domain name=LRR_1; Domain location=45-66; Score =18.2; E_value=0.034; Accession=PF00560.25; Description=Leucine Rich Repeat
MGCCSSRSSDSPASRATRWRSTGIVALRDARLKELPNEVLQVGNSLRTLDLTNNKLVEIPKELGDLLYSVFYGQITVTKTNFISC

SEQ ID NO: 68825 - protein, 132 aa, Setaria italica
  Transcript Sequence Number=SeqID_2851
  Gene Ontology: Mol. function=DNA binding; Cellular component=nucleus; Biological process=regulation of transcription, DNA-dependent
  Homolog annotation: Hit_ID=B4FVC8; Match level="QueryCoverage=82%, HitCoverage=22%, E-value=2e-43, Identity=81%"; Hit description =ATSWI3B
MNSIKIFAKCLMHACLLTLLFSSESSHTNGLSVNDLLKEAATNARAQLEKERSNIEQSLSDIVDVQMKEIQDKICRFEHKEMLMEKERQQLRCLRDLLFADQLTVMQHHRRPQAVATESKLDEKPKPVVNIS

SEQ ID NO: 68826 - protein, 403 aa, Setaria italica
  Transcript Sequence Number=SeqID_2852
  Gene Ontology: Mol. function=DNA binding; Cellular component=nucleus; Biological process=regulation of transcription, DNA-dependent
  Homolog annotation: Hit_ID=B4FVC8; Match level="QueryCoverage=100%, HitCoverage=81%, E-value=0.0, Identity=81%"; Hit description=ATSWI3B
  Pfam annotation: Domain name=Myb_DNA-binding; Domain location=157 -202; Score=40.9; E_value=5e-09; Accession=PF00249.23; Description =Myb-like DNA-binding domain
  Pfam annotation: Domain name=SWIRM; Domain location=1-73; Score=40.8; E_value=5.2e-09; Accession=PF04433.9; Description=SWIRM domain
  Pfam module annotation: Pfam domain module=Myb_DNA-binding::SWIRM; Domain location=157-202::1-73
RLLPEFFEGEAAAASGCRGPGAYKYYRDTLIRRFRARPGRRLTLTEARRGLVGDVGSVRRVFDFLEEWGLINYGALPSGSKQAKEKREEAAPQPSLPSGATAPRKLCTGCRSVCGLAYYACDKADISLCARCFVCNNYRPGLTAANFKRIEITEDAKSDWTDKETLHLLEAVLHYGEDWKKVSEYVGSRSEKDCIARFIRLPFGEQFMGPKEDRMGFENDGDITDEPGAHVSKRLRLTPLADASNPIMGQVAFLSAIVGSDAASAAAQAAISAQSHVDLNDGEIDSSINSAMEEESSHTNGLSVNDLLKEAATNARAQLEKERSNIEQSLSDIVDVQMKEIQDKICRFEHKEMLMEKERQQLRCLRDLLFADQLTVMQHHRRPQAVATESKLDEKPKPVVNIS

SEQ ID NO: 68827 - protein, 122 aa, Setaria italica
  misc_feature (105)..(105): Xaa can be any naturally occurring amino acid
  Transcript Sequence Number=SeqID_2853
  Gene Ontology: Mol. function=binding
FLCLQLAATSALGHSHLEVCETMFGELSAFLEEVSSEAEGKPKWKNPRSRREDLRTHVANIHRMIAEKVWPGMLSRKPVLRLHFIKFIEETYRQINMSLPDSFQXLQPLRYALASVLRYLGP

SEQ ID NO: 68828 - protein, 802 aa, Setaria italica
  misc_feature (13)..(13): Xaa can be any naturally occurring amino acid
  misc_feature (25)..(25): Xaa can be any naturally occurring amino acid
  misc_feature (30)..(30): Xaa can be any naturally occurring amino acid
  misc_feature (386)..(386): Xaa can be any naturally occurring amino acid
  misc_feature (796)..(796): Xaa can be any naturally occurring amino acid
  Transcript Sequence Number=SeqID_2854
  Gene Ontology: Mol. function=binding
  Homolog annotation: Hit_ID=O94915; Match level="QueryCoverage=33%, HitCoverage=10%, E-value=9e-13, Identity=26%"; Hit description =Protein furry homolog-like
LDSVTSQLLTVLXKKGLLTQDVQHXKLVEXFCVTLAQSNLDFAMNHMILELLKPDSLSEAKVVGLRALLEIVVSPSNQQVGLDVLQVFGIGHYIPKVKSAIESILRSCNKAYSLALLTSSKATIDNVTKDKSQGSLFRSVLKCIPHLIEEVGRNDKMTEIIPQHGISIDPGVREEAVQVLNRIVRFLPNRRFAVLKGMANFILKLPDEFPLLIQTSLGRLVELMRLWRVCLSEEVLAKDIQNVRRSSIGGDALQRSPFHRPRDVSEFRASEMDAVGLVFLSSADVQIRLTALELLRCVRALKNDLRDYSANEWGDNKLKLEPEPIFIIDIIEENGEDIVQSCYWDPGRPYDLRREMDPIPLDVTLQSILESVDKSRWARYLSEIVXYAAELCPSSVQDARVEVIRRLEQITPVELGGKAQQSQDTETKLDQWLIYAMFACSCPPDNREELPLRASREVFHMIFPSLRHGSEGYALAATSALGHSHLEVCETMFGELSAFLEEVSSEAEGKPKWKNPRSRREDLRTHVANIHRMIAEKVWPGMLSRKPVLRLHFIKFIEETYRQINMSLPDSFQDLQPLRYALASVLRYLGPEFIDAKSERFDNRMRKRLFDLLLTWSEDSGSSWGQESSSDYRREIERYKTSQHTRSRESLDKLAFDREMAEQLEAINWASMNAVASLLYGPCFDDNARKMTGRVISWINSLFMEPSTRAPFGHSPVDPRTPSYSKHTDGGRFGGRDKQSTSHFRVLLAKTALKNILQTNLDLFPACIDQCYSPDPLIADGYFSVLAEVYMRQEIXPKCEIQ

SEQ ID NO: 68829 - protein, 135 aa, Setaria italica
  misc_feature (126)..(126): Xaa can be any naturally occurring amino acid
  Transcript Sequence Number=SeqID_2855
  Gene Ontology: Mol. function=microtubule motor activity; Cellular component=microtubule associated complex; Biological process =microtubule-based movement
  Homolog annotation: Hit_ID=Q9FME7; Match level="QueryCoverage=99%, HitCoverage=10%, E-value=3e-30, Identity=54%"; Hit description =Kinesin-like protein
KSDTSVLKQHYEKKLNELEQEKKALQKEIENLRHALTNISSSTDESAQKLKENYIQKLNALESQVSELKKKQEAQQQLLRQKQKSDEAAKRLQEDIQRIKSQKVQLQQKIKQESEQFRSWKAAREXEVLQLKKEG

SEQ ID NO: 68830 - protein, 92 aa, Setaria italica
  Transcript Sequence Number=SeqID_2856
MPGRRAIEVRLQPGAAGDASAPPKWRMSLLENTFAGFLQGAGADAAARAVFAEGSLFSPFLFGKFFDPADAFPLWEFEPEVLLAALRRSAAR

SEQ ID NO: 68831 - protein, 122 aa, Setaria italica
  Transcript Sequence Number=SeqID_2857
  Gene Ontology: Mol. function=transcription regulator activity; Cellular component=nucleus; Biological process=regulation of transcription
  Homolog annotation: Hit_ID=B6SSA8; Match level="QueryCoverage=100%, HitCoverage=37%, E-value=5e-35, Identity=63%"; Hit description=Helix- loop-helix DNA-binding domain containing protein
LKARILGHDAGRQCVKVQFEVDEPASAVDSMISALRRLKGMDVRARGIRSTMSGRRLWTEMNVETTIAAGEVEKAVEEALMQEVERKQPAEAGSGGPGFPGTSSSGGRGWGPQASSHVQNVF

SEQ ID NO: 68832 - protein, 214 aa, Setaria italica
  Transcript Sequence Number=SeqID_2858
  Gene Ontology: Mol. function=transcription regulator activity; Cellular component=nucleus; Biological process=regulation of transcription
  Homolog annotation: Hit_ID=B6SSA8; Match level="QueryCoverage=63%, HitCoverage=45%, E-value=4e-66, Identity=88%"; Hit description=Helix- loop-helix DNA-binding domain containing protein
  Pfam annotation: Domain name=HLH; Domain location=21-67; Score=22.6; E_value=0.00068; Accession=PF00010.18; Description=Helix-loop-helix DNA-binding domain
PRQQRRQEPAGATVESSRGFRHMMRERQRREKLSQSYADLYAMVAARSKGDKNSIVQSAAIYIHELRGAREQLRRRNEELKARILGHDAGRQCVKVQFEVDEPASAVDSMISALRRLKGMDVRARGIRSTMSGRRLWTEMNVETTVSALTACFSRRISRGLFVVIHMSKNSENLPFEKSKIILNSFASSADNSWSGHLGWKKDAQAVEWPTTTT

SEQ ID NO: 68833 - protein, 174 aa, Setaria italica
  Transcript Sequence Number=SeqID_2859
  Gene Ontology: Mol. function=protein serine/threonine kinase activity; Biological process=protein amino acid phosphorylation
  Homolog annotation: Hit_ID=B6SY15; Match level="QueryCoverage=100%, HitCoverage=26%, E-value=3e-55, Identity=64%"; Hit description =Protein kinase
LRATGRFRLPSAAASEACLDGVSELVSGAPAGLPGSSLVPKCFPDPDQLAITPSYCAGVSTVAEFEAAVGNDSVQALNSSCGPDLSSPATCSQCYAAGVAATAHLTTAAANDSKSESCFYLSVLYAAGVSNAAGPTYPPTAACAFGLGLSSLPSSPSKSNNAVIYATTIPIAFV

SEQ ID NO: 68834 - protein, 49 aa, Setaria italica
  Transcript Sequence Number=SeqID_2860
LNNYPLHVLQTGDSYWLVEMQELSERAKISLPPFPEPSSVLSSLLVSNA

SEQ ID NO: 68835 - protein, 220 aa, Setaria italica
  Transcript Sequence Number=SeqID_2861
EHGSINTPAENAEVQETPTEDGKRSSISTSTENDEAEERQTIGSGCASINTSTENAKVDETQTTCSEHGSINTSTENAEVEERRTAGSELVNDQHPQRRRRLDLESVAQLEQLEVDMRELQEDMRLHLDCRRLELENRTWRLNSVIENLKFRSCFKELSERAKISLPPFPEPSSVLSSLLATSRTGDSPVNLGDNGAASGHVDSSKDHGVNGASSAHADS

SEQ ID NO: 68836 - protein, 99 aa, Setaria italica
  Transcript Sequence Number=SeqID_2862
  Subcellular localization annotation: CTP_CleavageSite=37; ConfidenceScore=5.26e-01
YSIQLSSTSLQKPKITCLTIVHVPSNRRLAAGLRNISLLTVVGRQWVVWAPRHSISIILLPMRVTASPWLFEAPSSSVHCNCKHGKGERNGTRTGAAFI

SEQ ID NO: 68837 - protein, 328 aa, Setaria italica
  Transcript Sequence Number=SeqID_2863
  Gene Ontology: Mol. function=ligase activity
  Homolog annotation: Hit_ID=Q0WZC2; Match level="QueryCoverage=99%, HitCoverage=29%, E-value=1e-159, Identity=82%"; Hit description=RNA ligase isoform 1
FSFKCYLNYHKTDSLSNDNLCYRMVVHVHHDSVFKRYQQEMRKNKGLWPLYRGFFVDVNLFKATNKKAAELAKNGDALLKNINGAMDSSSSTVDGLADEDSNLMVKLKFLTYKLRTFLIRNGLSTLFKDGPLAYRTYYLRQMKIWGTSPSKQTELSRMLDEWAVYIRRKYGNKPLSSSTYLSEAEPFLEQYAKRSPSNQALIGAAGNLVQTENFLAILDAEKDEEGDLRAEHGAAPSSPASTSADVVPKTEGLIVFFPGIPGCAKSALCKEILDTPGGLGDNRPLHSLMGDLIKGRYWQKVADERRKKPARITLADKNAPNEEVWRQY

SEQ ID NO: 68838 - protein, 341 aa, Setaria italica
  misc_feature (14)..(14): Xaa can be any naturally occurring amino acid
  Transcript Sequence Number=SeqID_2864
  Gene Ontology: Mol. function=ligase activity
  Homolog annotation: Hit_ID=Q0WZC2; Match level="QueryCoverage=100%, HitCoverage=30%, E-value=1e-177, Identity=85%"; Hit description=RNA ligase isoform 1
LFMYAGHHGGAYAXKNSFGNVYTAVGVFVLGRLFREAWGKEAPKMQAEFNDFLERNRISISMELVTAVLGDHGQRPKDDYAVVTAVTELGHGKPKFYSTPEVIAFCRKWRLPTNHVWLFSTRKSASSFFAAYDALCEEGTATPVCKALDEIADISAPGSKDHVKVQGEILEGLVARIVTRESSAQMEEVLRNFPQPPIDGVDLDLGPSLREICAANRSDEKQQIKALLENVGASMCPDFSDWFGHSGLDAQSKSTDKSVVPKFLQAHPTDYATKKLQEMIRLMKQRHFSAAFKCYLNYHKTDSLSNDNLCYRMVVHVHHDSVFKRYQQEMRKNKGLWPLYR

SEQ ID NO: 68839 - protein, 95 aa, Setaria italica
  Transcript Sequence Number=SeqID_2865
  Subcellular localization annotation: CTP_CleavageSite=35; ConfidenceScore=5.31e-01
LLPTEKGGLWPGQPTNSGIGRRPAGRQLGLERACRCFSGSVTAARREMTRRSPFPNQPGASDPLHFHCAAGLLISAGSSRGTIRSKAAPFHPRTL

SEQ ID NO: 68840 - protein, 459 aa, Setaria italica
  Transcript Sequence Number=SeqID_2866
  Gene Ontology: Mol. function=metal ion binding; Cellular component =plasma membrane
  Homolog annotation: Hit_ID=B9SHJ0; Match level="QueryCoverage=89%, HitCoverage=95%, E-value=2e-90, Identity=45%"; Hit description =Ubiquitin-protein ligase, putative
  Pfam annotation: Domain name=zf-C3HC4; Domain location=284-342; Score= 14.2; E_value=0.0024; Accession=PF00097.17; Description=Zinc finger, C3HC4 type (RING finger)
MDPTEPRWRINSSFSPPTSRRWDCRYSSDGLPHRVHDAPHDAPPYVSSLSSHSKGSRSAFGSDQYLNHHHSVSDGALSYFGSPADSLQAPRWTPSLQRFDLGEFSTPAGGSRPETSDYPQSSERQLTATSSFSSASPFSESSQLASSSKQPAPYLPRNQMGRRSFMSKPVYPLVFRNPVSETEASRMPEVTNAGRTTPSDDSQASPLWRRSLASPELKFHNALSELGKMEASPEPNTSSRREGFRWSNASSYDFGYDGDAIDISDHISIESQRSPTNSVRFLKCGLCERFLRQKSPWTSNRIVRNTDMPVAAVLPCRHVFHADCLEESTPKTELHEPPCPLCTRATDDEGHVSFSEPLHVALRSARRNLSLGGGAGGSSSSANPPHSDHGLKRNHSAIVPRRSGSSLFRNRFKKQFPFKARIGKDLFGGRIFNKVGSSSSSGQQDDHGQPAAKHDPSMK

SEQ ID NO: 68841 - protein, 24 aa, Setaria italica
  Transcript Sequence Number=SeqID_2867
DVFMGAYHTIFDYGKMRVGFADSA

SEQ ID NO: 68842 - protein, 212 aa, Setaria italica
  Transcript Sequence Number=SeqID_2868
  Gene Ontology: Mol. function=aspartic-type endopeptidase activity; Cellular component=lysosome; Biological process=sphingolipid metabolic process
  Homolog annotation: Hit_ID=Q42456; Match level="QueryCoverage=96%, HitCoverage=41%, E-value=8e-61, Identity=54%"; Hit description =Aspartic proteinase oryzasin-1
  Pfam annotation: Domain name=Asp; Domain location=23-211; Score= -129.9; E_value=7.1e-06; Accession=PF00026.15; Description=Eukaryotic aspartyl protease
  Pfam annotation: Domain name=SapB_1; Domain location=84-122; Score =35.2; E_value=2.6e-07; Accession=PF05184.7; Description=Saposin-like type B, region 1
  Pfam annotation: Domain name=SapB_2; Domain location=26-60; Score =41.3; E_value=3.9e-09; Accession=PF03489.9; Description=Saposin-like type B, region 2
  Pfam module annotation: Pfam domain module=Asp::SapB_1::SapB_2; Domain location=23-211::84-122::26-60
TRFLDRVPQVAIAQIHEQIGAAGVVNHECKQVVAGYGQQMLELLKAQTQSAQVCSKIGLCTFDGKHGIGAGIESEAGSVDGMSDAICKACEMIVFWMRSELNPNKTKEGTLEYVDRLCENMPDPVGSHVDCRHVDSLQTVAFSIGGRAFELQPEQYVLKVGEGFMAHCISGFTALDIPPPIGPLWILGDVFMGAYHTIFDYGKMRVGFADSA

SEQ ID NO: 68843 - protein, 191 aa, Setaria italica
  misc_feature (104)..(104): Xaa can be any naturally occurring amino acid
  Transcript Sequence Number=SeqID_2869
  Gene Ontology: Mol. function=zinc ion binding
NRIYKQGPTTYLRKELYEALRERTSTGELSYLQHVPGTGVDPDAVAAIRRQRLSEISSWFNPHNSHIAVSQGHVDQPPLSPTNNSVLEHSVVAARRVHTRWSLXSTGVLVAIGLAVIVLAWLVAPHVGKKAAVIGLHMLLGGLCALTLVISLRFVFPRIQYGSMQYWAILFVSWFLVFGVWASRTRSIRSS

SEQ ID NO: 68844 - protein, 77 aa, Setaria italica
  Transcript Sequence Number=SeqID_2870
AKEGVYTYGGPLKGDMYLLFMLCNMNPMPWSIFPLESSLTTYPFGFENFPVGVSPHIQPRSMKVLTLRFIDQTRHHV

SEQ ID NO: 68845 - protein, 83 aa, Setaria italica
  Transcript Sequence Number=SeqID_2871
AVKRNEARETTKVLQDGSRDLEDSMLTTNGFAGSYDTKQDTISCFVEPIVQLVNYRLDQRSLHFEEMFHMLVLPLMQMLIVRT

SEQ ID NO: 68846 - protein, 83 aa, Setaria italica
  Transcript Sequence Number=SeqID_2872
  Subcellular localization annotation: CTP_CleavageSite=28; ConfidenceScore=5.40e-01
MAATAVAARSRALARAVSYSLLHRSCLPASRRASCINRLPLVSDGLLSALPLHSAVASARLQSAIASESRSWCLVPQGNSMPL

SEQ ID NO: 68847 - protein, 56 aa, Setaria italica
  Transcript Sequence Number=SeqID_2873
IDLSYFFRNRIAERNKNLTIQYIIAPKLFGQTHYKKGGTAIIKAWSFLPRERNKLK

SEQ ID NO: 68848 - protein, 93 aa, Setaria italica
  Transcript Sequence Number=SeqID_2874
  Subcellular localization annotation: CTP_CleavageSite=37; ConfidenceScore=5.51e-01
SAGPRRPAPASPPRPRPHPPHLPPPPSAPLPPPLLPRPQSVPPPPLRPPREPPPDRRNPFCSAPWRILLALAAPASRSPGAPQIGGGSCEDFC

SEQ ID NO: 68849 - protein, 151 aa, Setaria italica
  Transcript Sequence Number=SeqID_2875
  Gene Ontology: Mol. function=protein serine/threonine kinase activity; Biological process=defense response
  Homolog annotation: Hit_ID=Q7XJ79; Match level="QueryCoverage=98%, HitCoverage=95%, E-value=5e-43, Identity=60%"; Hit description=High light protein
  Pfam annotation: Domain name=Jacalin; Domain location=16-150; Score =76.7; E_value=8.4e-20; Accession=PF01419.9; Description=Jacalin-like lectin domain
MSSSAVKVGTWGGDRGSPVDITAAPRRLESISLRWGKVIDWISFTYRDGDGNLHTAGPWGGAAKGQGEGDENITLDASEYVTEVAGTIGPIGDAPHTISSLKFVTNRATYGPFGRGAGTPFNVPLDNASVVAMFARAGDYLDAIGFYVLPL

SEQ ID NO: 68850 - protein, 567 aa, Setaria italica
  Transcript Sequence Number=SeqID_2876
  Homolog annotation: Hit_ID=B9SX29; Match level="QueryCoverage=91%, HitCoverage=99%, E-value=2e-32, Identity=43%"; Hit description=Ubx domain-containing, putative
  Pfam annotation: Domain name=UBX; Domain location=348-429; Score =61.4; E_value=3.4e-15; Accession=PF00789.12; Description=UBX domain
  Subcellular localization annotation: CTP_CleavageSite=36; ConfidenceScore=5.60e-01
RSKRFPSPSSSSVDLVYSADRCSPLPPPSSSPSFSSAATGDPDRPLAMERTINSLTYKGSIPDAINESRREKKLFVVYISGEDEASSSLEQSTLVDENVVEMIGRCCIFLHLEQGNVDASQFSAIYPQKSVPSISVIGLNGVMLWNHEGHISSENLKESIEKAWGALHLQETAATLLTASLASRNAESVNTTTALPQQGGSSTSENPSVSSSAPDISGASGVAHSAELVSQLPSSTNHDELIEIKEKKGEGSKSDSGDRSFEKLESASTEIECDLPVSSMGSNTGSSIDPKEDTTPSLKRKNKDDGSLAAVPMVAAPSTIISRGVSSQVLVQQDITTSSAPVEPVFNSAKSDDIQLSIRMPSGNRLEIELTKQDVLRKVKNFVDENKGSGLGSYDLSLVYPKRIFSEQDMETTLCELGIQNRHAMIVVPHRQPVQVSRLQSSSSSSPYHAGDSSGGGGYFGYLRTIMSYVNPLSYLGGNTTTSRQEQEPNEGPQQLGHRSGPWSERHPLPGNRGQETTDESSANMLRRRARPFGANVHTLGSEQGPSDDRNVFWNGNSTEFGGDDRK

SEQ ID NO: 68851 - protein, 164 aa, Setaria italica
  Transcript Sequence Number=SeqID_2877
MVKTDYRDLCGLPPLRDILHQSPSSPSDLVDSLENEMDPCVTPDNGGSGTDGNGGCFAHTLSQRRRLQSSSPTGSQLMSEFDATANGRGSESSSPLSSSTSCDLELDESHNSHNIHRVNPEDSPTPSPVQHLLLVSSVHTQVSTDDDVLVMDGVLVDDGLRTPL

SEQ ID NO: 68852 - protein, 72 aa, Setaria italica
  Transcript Sequence Number=SeqID_2878
IVAKSVCSPNRYASTTAIALSHIDIISWTSVSIQLYILACTIHIPTHLQKYVIETQQTMSKHANYWISHTKS

SEQ ID NO: 68853 - protein, 97 aa, Setaria italica
  Transcript Sequence Number=SeqID_2879
TTLFLLDNGEDDSSIGTGGTWGDHCHCKLHLNGLLDTTTWHCDRQSGTALLSSLASSFPSRVLSWANLFAVNSCSSAIVVLSLTMFNFQCAGVSWQR

SEQ ID NO: 68854 - protein, 198 aa, Setaria italica
  misc_feature (58)..(58): Xaa can be any naturally occurring amino acid
  Transcript Sequence Number=SeqID_2880
  Gene Ontology: Mol. function=metal ion binding
  Homolog annotation: Hit_ID=B6TEE7; Match level="QueryCoverage=98%, HitCoverage=50%, E-value=1e-30, Identity=41%"; Hit description=VIP2 protein
  Pfam annotation: Domain name=zf-C3HC4; Domain location=18-64; Score =39.3; E_value=1.5e-08; Accession=PF00097.17; Description=Zinc finger, C3HC4 type (RING finger)
MEMDLDATPPTVPEVTACSICLDPVVAASDGARSVTSLLCGHKFHLDCIASVFNAKGXMQCPNCRNIENGNWLNANTHQPSTDSYSDFGTAVTREAYQAIIEHMQQFTAERIIVNRVTTETHQLLSNLLQQSTAGSSLTLLNSVFRNLELQSASYRSNSEAMPFYHHATGMEGGPTADLSNIHIFDGSEPRNYEIEQR

SEQ ID NO: 68855 - protein, 64 aa, Setaria italica
  Transcript Sequence Number=SeqID_2881
TYSSLNLTSATTELCTLYSVNSNVQAQAVYSVVVGTQALPDCRHSSRFLIPYPKAVQFDPQYVG

SEQ ID NO: 68856 - protein, 50 aa, Setaria italica
  Transcript Sequence Number=SeqID_2882
FTFTPKLSCLNSQCTLLFNHHQPNQNQVSCKFSHLMKWLLIEFDLSHPTL

SEQ ID NO: 68857 - protein, 98 aa, Setaria italica
  Transcript Sequence Number=SeqID_2883
CYGSCTILRSVRLQREVHHQQAPYGAATGAMPLWPAGADQSLFMFTWPFFSITSGSPRADRKAGRASSVRGQDGASSWLTNVASVVRPAVQLCTVLPL

SEQ ID NO: 68858 - protein, 74 aa, Setaria italica
  Transcript Sequence Number=SeqID_2884
  Subcellular localization annotation: CTP_CleavageSite=49; ConfidenceScore=5.59e-01
MSTQFWGDFSDYISFFSTTRRVFSQTFFFSLSNRILNPGWLGNLLKPVSQGATRKLVSPGFDPGWPSQLKVLIS

SEQ ID NO: 68859 - protein, 101 aa, Setaria italica
  Transcript Sequence Number=SeqID_2885
DVGWVRWRGGCPESKETKSNKGGLPDQVEGSFLNGTELNGSSHVVSLLAWTGSLRQAAAATAIWPLDVVQCIMFDESYSSLVLTLPVQETDPDCYSSCSLC

SEQ ID NO: 68860 - protein, 90 aa, Setaria italica
  Transcript Sequence Number=SeqID_2886
  Gene Ontology: Mol. function=Rab GTPase activator activity; Cellular component=intracellular; Biological process=regulation of Rab GTPase activity
  Homolog annotation: Hit_ID=Q5QMF8; Match level="QueryCoverage=72%, HitCoverage=7%, E-value=3e-26, Identity=93%"; Hit description =RabGAP/TBC domain-containing protein-like
DKLIHLRFDHFFREVTEDARICAEQDAAAQKYASHVLQEKYEEAMASLAQMENRAVMAETMLEATLQYQSSQQKAQLLEERRSAVLLSCL

SEQ ID NO: 68861 - protein, 184 aa, Setaria italica
  Transcript Sequence Number=SeqID_2887
  Gene Ontology: Mol. function=Rab GTPase activator activity; Cellular component=intracellular; Biological process=regulation of Rab GTPase activity
  Homolog annotation: Hit_ID=Q5QMF8; Match level="QueryCoverage=90%, HitCoverage=19%, E-value=1e-64, Identity=78%"; Hit description =RabGAP/TBC domain-containing protein-like
DARLLVSLQTRRPIASKLYNFKRDTEPLVSLSEEQSNDSTDGDKNQETSSGNMNDMYRGLTVNSEIDSLPDPKDQVIWLKGELCQLLEERRSAVLRADELETALMEMVKQDNRRELSAKVEQLEQELSELRQALSDKQEQEQAMLQVLMRVEQEQKVTEDARICAEQDAAAQKYASHVLQVNSV

SEQ ID NO: 68862 - protein, 681 aa, Setaria italica
  Transcript Sequence Number=SeqID_2888
  Gene Ontology: Mol. function=Rab GTPase activator activity; Cellular component=intracellular; Biological process=regulation of Rab GTPase activity
  Homolog annotation: Hit_ID=Q5QMF8; Match level="QueryCoverage=97%, HitCoverage=77%, E-value=0.0, Identity=81%"; Hit description =RabGAP/TBC domain-containing protein-like
  Pfam annotation: Domain name=TBC; Domain location=95-331; Score =164.0; E_value=4.3e-46; Accession=PF00566.10; Description=TBC domain
IRPSLGHIEEMMNARVQKQQSSSVKEGYTGDELHPGNPEESKPSEDSDDEFYDVEKVDPSQEVSAADIANADSGTNRGADQEDYYPWKEELECLVRDGLPMALRGELWQAFIGIGARRVKGYYEGLLAAEGEREDSKCSDSPTTEGGDGKPKASQPFSSEKWKGQIEKDLPRTFPGHPALDEDGRNALRRLLTAYARHNPSVGYCQAMNFFAGLLLLLMSEENAFWALTGIMDDYFDGYFSEEMIESQVDQLVLEELVRERFPKLVNHLDYLGVQVAWVTGPWFLSIFMNMLPWESVLRVWDVLLFEGNRVMLFRTALALMELYGPALVTTKDAGDAVTLLQSLAGSTFDSSQLVLTACMGYQAVGEVRLQELRNKHRPSVISSMEQRARGLRVWRDTNSLASKLYNFKRDTEPLVSLSEEQSNDSTDGDKNQETSSGNMNDMYRGLTVNSEIDSLPDPKDQVIWLKGELCQLLEERRSAVLRADELETALMEMVKQDNRRELSAKVEQLEQELSELRQALSDKQEQEQAMLQVLMRVEQEQKVTEDARICAEQDAAAQKYASHVLQEKYEEAMASLAQMENRAVMAETMLEATLQYQSSQQKAQLPSPSPSPRTPTRDGTPGQVSQDSSQEFQPRRISLLAPFSLGWRDKNKVLSFGRWIMIDWILYKPFYFSAVVHLHW

SEQ ID NO: 68863 - protein, 207 aa, Setaria italica
  Transcript Sequence Number=SeqID_2889
  Gene Ontology: Mol. function=Rab GTPase activator activity; Cellular component=intracellular; Biological process=regulation of Rab GTPase activity
  Homolog annotation: Hit_ID=Q5QMF8; Match level="QueryCoverage=85%, HitCoverage=21%, E-value=3e-54, Identity=62%"; Hit description =RabGAP/TBC domain-containing protein-like
MAYAKIWVFLLLRMKQVNTSLFNVMICCLYIRLCIQEKYEEAMASLAQMENRAVMAETMLEATLQYQSSQQKAQLPSPSPSPRTPTRDGTPGQVSQDSSQEFQPRRISLLAPFSLGWRDKNKGKQNGTDESTNGKLNINTERVETPKKDDEKQGGSPKEGEQRVETPKRDSEPRLETPKMDGDIPSAERSANDMDGQEDQLEEIKLD

SEQ ID NO: 68864 - protein, 51 aa, Setaria italica
  Transcript Sequence Number=SeqID_2890
ADYNMDGEALGIANMTELRSLQIFGCSFTKFGEALGIANMTELRSLLDLWL

SEQ ID NO: 68865 - protein, 104 aa, Setaria italica
  misc_feature (8)..(8): Xaa can be any naturally occurring amino acid
  Transcript Sequence Number=SeqID_2891
MSSLIDIXWTLERERMARTRGAQAFSWSVAGGARKGRGTARRPQSCGSSSAATICDGVGVPAADGALVVMNAAEKQAAAASGGGAPAFVQEDAFLSILVDCFGQ

SEQ ID NO: 68866 - protein, 194 aa, Setaria italica
  Transcript Sequence Number=SeqID_2892
  Gene Ontology: Mol. function=pyruvate kinase activity; Cellular component=chloroplast; Biological process=glycolysis
  Homolog annotation: Hit_ID=B8A0X1; Match level="QueryCoverage=78%, HitCoverage=39%, E-value=2e-62, Identity=79%"; Hit description =Pyruvate kinase
  Pfam annotation: Domain name=PK_C; Domain location=103-185; Score= -42.7; E_value=0.036; Accession=PF02887.8; Description=Pyruvate kinase, alphabeta domain
VADVSEAVRQYADAVMLSAESAIGAYPQKALSVLRAASERMECWSREENMQKLLPQHQLAIALPDRISEQICNSAVEMGNLLFPCLKHGKQYFLFCSHHVTFSAANNLAVDAIFVYTKHGHMASLLSRNRPNPPIFAFTDDANSRKSMNLYWGYAPIADSADSITASAYCRTASETSATSARVGVGYSTIDSRS

SEQ ID NO: 68867 - protein, 186 aa, Setaria italica
  Transcript Sequence Number=SeqID_2893
  Gene Ontology: Mol. function=pyruvate kinase activity; Cellular component=chloroplast; Biological process=glycolysis
  Homolog annotation: Hit_ID=B8A0X1; Match level="QueryCoverage=100%, HitCoverage=58%, E-value=2e-98, Identity=93%"; Hit description =Pyruvate kinase
  Pfam annotation: Domain name=PK_C; Domain location=75-182; Score =22.6; E_value=4e-07; Accession=PF02887.8; Description=Pyruvate kinase, alphabeta domain
PTPTRAEVADVSEAVRQYADAVMLSAESAIGAYPQKALSVLRAASERMECWSREENMQKLLPQHQLAIALPDRISEQICNSAVEMANNLAVDAIFVYTKHGHMASLLSRNRPNPPIFAFTDDANSRKSMNLYWGVIPLHLLLSDSMEDNFKKTISLMKSKGSVKPGDTILLVSDSDLNRPCAAASV

SEQ ID NO: 68868 - protein, 306 aa, Setaria italica
  Transcript Sequence Number=SeqID_2894
  Gene Ontology: Mol. function=pyruvate kinase activity; Cellular component=chloroplast; Biological process=glycolysis
  Homolog annotation: Hit_ID=B4FRW5; Match level="QueryCoverage=100%, HitCoverage=56%, E-value=1e-166, Identity=92%"; Hit description =Pyruvate kinase
  Pfam annotation: Domain name=HpcH_HpaI; Domain location=46-259; Score= -88.8; E_value=0.089; Accession=PF03328.6; Description=HpcHHpaI aldolase family
  Pfam annotation: Domain name=PK; Domain location=1-300; Score=87.3; E_ value=2e-26; Accession=PF00224.13; Description=Pyruvate kinase, barrel domain
  Pfam module annotation: Pfam domain module=HpcH_HpaI::PK; Domain location=46-259::1-300
RLNEEEGFCVSLMVDTEGSQLLVADHGGATSVKAEDESEWLFTSKKTDEAHPYTMHVNFEKFSDGILVGDELVIDGGMATFEVTKKIGNDLRCKCTDPGLLLPRAKLSFWRNGKLVERNFGLPTLSAKDWADIEFLVAEGVDCIALSFVKDDNDIKQLKAYLSRRSLEHIKIFAKIESLESLKNLKDIIVASDGVMVARGDLGVQIPLEQIPAIQESIVTLCRHLNKPVIVASQLLESMVEYPTPTRAEVADVSEAVRQYADAVMLSAESAIGAYPQKALSVLRAASERMECWSREENMQKLLPQH

SEQ ID NO: 68869 - protein, 105 aa, Setaria italica
  Transcript Sequence Number=SeqID_2895
IEEKTAELYVMGISLVFMVSIFFGLFVWLEFRFVLGPRGGKLKLQLCDVLLNFHFPQNFLLYKMLLFRFFLSFSCIFTFLVCSSSSIHSLHSPRFVFAIHFFTTF

SEQ ID NO: 68870 - protein, 193 aa, Setaria italica
  misc_feature (5)..(5): Xaa can be any naturally occurring amino acid
  Transcript Sequence Number=SeqID_2896
  Gene Ontology: Mol. function=metal ion binding
  Homolog annotation: Hit_ID=B6TN60; Match level="QueryCoverage=92%, HitCoverage=77%, E-value=1e-55, Identity=65%"; Hit description =Protein binding protein
  Pfam annotation: Domain name=PHD; Domain location=137-181; Score=0.8; E_value=0.022; Accession=PF00628.21; Description=PHD-finger
  Pfam annotation: Domain name=zf-C3HC4; Domain location=138-178; Score= 33.4; E_value=9.1e-07; Accession=PF00097.17; Description=Zinc finger, C3HC4 type (RING finger)
  Pfam module annotation: Pfam domain module=PHD::zf-C3HC4; Domain location=137-181::138-178
TRRPXFCLYAAGHGGHPAAGHGGAGSSGKRSSVMEMLHGWTLDSHAREAKERLDQKLRSKREAAIKRHHSTGSIKLSRPHHHGGAGAAGAAGADERGESSAASAMCGVQREVYSRKGVMRRLMRWSRPRWAAAEQAECAVCLDDFRAGDVLAHLPCGHRFHWACAAPWLEGTSRCPFCRAAVDANPPQPAAGA

SEQ ID NO: 68871 - protein, 184 aa, Setaria italica
  Transcript Sequence Number=SeqID_2897
  Gene Ontology: Cellular component=chloroplast envelope
GLLGSLPDNAFQKNILGQDWSIKQRIAAVLVGGLKLASVGFISSVGAGVSSDLVYAARGIVKPSEKVEARRKRSPIWKSAAVYSCFLGTSANLRYQIIAGLVEYRLGESLVTYYNQPLIAGLLSFVARTLNSYWGTQQWVDLARYTGLQKSEEKPPGEASTPPESWLQKSEEKPPSGEASTPPE

SEQ ID NO: 68872 - protein, 67 aa, Setaria italica
  Transcript Sequence Number=SeqID_2898
  Gene Ontology: Mol. function=hydrolase activity, hydrolyzing O -glycosyl compounds; Biological process=carbohydrate metabolic process
  Homolog annotation: Hit_ID=Q9AXL6; Match level="QueryCoverage=98%, HitCoverage=11%, E-value=1e-14, Identity=54%"; Hit description=Beta -glucosidase (Fragment)
LLLAHASAVSLYREKYQAEQSGQIGITLLAFWFEPATQKLDDVEAAARMSDFTLGWLISTLLNNLYH

SEQ ID NO: 68873 - protein, 52 aa, Setaria italica
  Transcript Sequence Number=SeqID_2899
FTLHIQPNNNIVNNLHTEHSTSHVFGEVIPKEFKMLALDHLGGLLLPKRLKS

SEQ ID NO: 68874 - protein, 186 aa, Setaria italica
  misc_feature (82)..(82): Xaa can be any naturally occurring amino acid
  Transcript Sequence Number=SeqID_2900
  Gene Ontology: Mol. function=cholestenol delta-isomerase activity; Cellular component=endoplasmic reticulum; Biological process=steroid biosynthetic process
  Homolog annotation: Hit_ID=Q2TU57; Match level="QueryCoverage=99%, HitCoverage=83%, E-value=3e-90, Identity=85%"; Hit description =Sterol-8,7-isomerase
  Pfam annotation: Domain name=EBP; Domain location=25-186; Score =233.3; E_value=5.9e-67; Accession=PF05241.4; Description=Emopamil binding protein
MGHPYTPAELQLPGYVPLQLSQGQIVAPYLGTSLFVTLVVWLISGRCRALSKTDRLLMCWWAFTGLTHIIIEGTFVFAPNFXKKENPNYFDEVWKEYSKGDSRYVARDTATVTVEGITAVLEGPASLLAVYAIASRKSYSHILQITVCLGQLYGCLVYFITAYLDGFNFWVSPFYFWAYFIFANSI

SEQ ID NO: 68875 - protein, 138 aa, Setaria italica
  Transcript Sequence Number=SeqID_2901
NTNEVRSLLISALSENPKGMSLKALEKAVADVFPNASKKIESIIKNIANYQAPGRYVLKPGLEVENSKRHTSEEGRSINENVEEFPPSLKIDDPDIFESIDVVDSPAATAGDGKVNNGSEDKARTSSESASDSDSDSD

SEQ ID NO: 68876 - protein, 157 aa, Setaria italica
  Transcript Sequence Number=SeqID_2902
PAQPAGRDEAFRLESSGPPALAAIIRLTPDLIDEIRRAEEAGGGARIKFNPSVYNSSDNVIDVSGKEFKFSWAPEQSELCDIYEERQSGEDGNGLLLECGSAWRKVNVQRILDESAKNLVKMRSEEAERLSKSRKSIVLDPANPSVKNQAKAMTAAV

SEQ ID NO: 68877 - protein, 645 aa, Setaria italica
  misc_feature (24)..(24): Xaa can be any naturally occurring amino acid
  misc_feature (212)..(212): Xaa can be any naturally occurring amino acid
  misc_feature (595)..(595): Xaa can be any naturally occurring amino acid
  Transcript Sequence Number=SeqID_2903
  Subcellular localization annotation: CTP_CleavageSite=73; ConfidenceScore=5.52e-01
KNKAAVTRPTKSVSKVKLSLKVPXSSTISPAPSPEQPGANIPSFPVGSDANNEVITPFDSNKGGNSKTEKATSSKMSKGINRRASAHSASVDDNTNEVRSLLISALSENPKGMSLKALEKAVADVFPNASKKIESIIKNIANYQAPGRYVLKPGLEVENSKRHTSEEGRYSLFSYYNQIRGPFYLAGNDLSCLLPKLCTISLHVCNSSATPXQSIADRSINENVEEFPPSLKIDDPDIFESIDVVDSPAATAGDGKVNNGSEDKARTSSESASDSDSDSDSSDSGSDSGSQSRSAAESGSGSSSDSDSDASSSSKEGSDAFVDITSDDDKANTAQTKVGDDLNLSSPPRDLTRLDVDDEQIDIGTNMDYTTTSPHIDLNNFNTHDDDAEAGGLAAGNLKKPSEITGSKNIPSTRMEPTRVDSKYNEMSYEDDLFDDSLRTISENLPNEEADQFTKQHANRRKSTSKDGSNHGSMSTIDKSAKPKLKRSSGNENSTAKPESAKKVKVDAASPGVTGSFSEHKKSLLPEKHMNDRLNKETGSVSRIASRDSSPAMKGRPLASGNIQKIDQSPNLPIPTMHSERPKENIEKSSLKKKXDKMQKPWHGTDGDFGTHGDGHHASFDGSDDSSTRKRSRHGDSLSDGKMLK

SEQ ID NO: 68878 - protein, 130 aa, Setaria italica
  Transcript Sequence Number=SeqID_2904
  Gene Ontology: Mol. function=drug transporter activity; Cellular component=membrane; Biological process=multidrug transport
  Homolog annotation: Hit_ID=Q9LE20; Match level="QueryCoverage=100%, HitCoverage=25%, E-value=2e-25, Identity=46%"; Hit description =F14O23.25 protein
  Pfam annotation: Domain name=MatE; Domain location=1-130; Score=43.4; E_value=8.7e-10; Accession=PF01554.10; Description=MatE
AGGALAIGLTNITGHSVLFGLASGLEPLCAQAFGSRNHDLLTLSLQRAMLLLFLAALPIALLWLNVGPILVALGQDPAISAPAAAYARFALPDLAASVVLQPLRVYLRSQGITRPMAACSAIAVALHVPL

SEQ ID NO: 68879 - protein, 299 aa, Setaria italica
  Transcript Sequence Number=SeqID_2905
  Gene Ontology: Mol. function=galactosylgalactosylxylosylprotein 3 -beta-glucuronosyltransferase activity; Cellular component=membrane
  Homolog annotation: Hit_ID=Q7XHJ6; Match level="QueryCoverage=88%, HitCoverage=96%, E-value=1e-128, Identity=82%"; Hit description =Beta3-glucuronyltransferase (Fragment)
  Pfam annotation: Domain name=Glyco_transf_43; Domain location=62-277; Score=212.3; E_value=1.2e-60; Accession=PF03360.8; Description =Glycosyltransferase family 43
SQSSHTPHIQPTVSPNNPAVTTDFPIVRLQDDDDTNTNRKKLLIVVTPTRARAAQAYYLSRMGQTLRLVDPPVLWVVVEAGKPTPEAAAALRRTAVMHRYVGCCDKLNASDSSSIDLRPHQMNAALELVENHRLDGIVYFAHEEGVYSLELFQRLRQIRRFGTWPVPVISEDRKDGVVLEGPVCKQNQVVGWHTSEDSSKLRRFHVAMSGFAFNSTMLWDPKLRSHLAWNSIRHQDTVKEGFQGTTFVEQLVEDESQMEGIPADCSHIMNWHVPFGSENLAYPKGWRVGTNLDVIIPLK

SEQ ID NO: 68880 - protein, 100 aa, Setaria italica
  misc_feature (14)..(14): Xaa can be any naturally occurring amino acid
  misc_feature (29)..(29): Xaa can be any naturally occurring amino acid
  Transcript Sequence Number=SeqID_2906
  Gene Ontology: Mol. function=methylenetetrahydrofolate reductase (NADPH) activity; Cellular component=cytosol; Biological process =methionine metabolic process
  Homolog annotation: Hit_ID=A6XMY8; Match level="QueryCoverage=76%, HitCoverage=13%, E-value=2e-31, Identity=86%"; Hit description =Methylenetetrahydrofolate reductase
QLVEKIKAFPSLTXIAVNKYGVSASNIPXNAVNAVTWGVFPGKEIIQPTVVDSGSFMVWKDEAFEIWTAGWACLFPEEDSSSKELLKKVLLNHFERDAVK

SEQ ID NO: 68881 - protein, 133 aa, Setaria italica
  Transcript Sequence Number=SeqID_2907
  Gene Ontology: Mol. function=methylenetetrahydrofolate reductase (NADPH) activity; Cellular component=cytosol; Biological process =methionine metabolic process
  Homolog annotation: Hit_ID=Q9SE94; Match level="QueryCoverage=85%, HitCoverage=19%, E-value=1e-49, Identity=82%"; Hit description =Methylenetetrahydrofolate reductase 1
YLEFFCAKEKLDQLVEKIKAFPSLTFIAVNKYGVSASNIPANAVNAVTWGVFPGKEIIQPTVVDSGSFMVWKDEAFEIWTAGWACLFPEEDSSSKELLKKVQDNYYLVSLVDNNNTDCVRASSDLLEGSKQIP

SEQ ID NO: 68882 - protein, 164 aa, Setaria italica
  misc_feature (14)..(14): Xaa can be any naturally occurring amino acid
  misc_feature (34)..(34): Xaa can be any naturally occurring amino acid
  misc_feature (80)..(80): Xaa can be any naturally occurring amino acid
  Transcript Sequence Number=SeqID_2908
  Gene Ontology: Mol. function=methylenetetrahydrofolate reductase (NADPH) activity; Cellular component=cytosol; Biological process =methionine metabolic process
  Homolog annotation: Hit_ID=Q9SE94; Match level="QueryCoverage=78%, HitCoverage=21%, E-value=1e-62, Identity=86%"; Hit description =Methylenetetrahydrofolate reductase 1
IPAEITDALEPIKXNEEAVKEYGVHLGTEMCKKXLASGIKTLHLYTLNMEKSAIEILKRLGLIEEFKVSRPLPWRPPTNXFRVKEDVRPIFWANRPKSYIRRTLGWDQYPHGRWGDSRNPSYGALTDHQVISVSFCSSLPFLCLLPFFNLTYAVCNIFVTLSGL

SEQ ID NO: 68883 - protein, 289 aa, Setaria italica
  misc_feature (75)..(75): Xaa can be any naturally occurring amino acid
  Transcript Sequence Number=SeqID_2909
  Gene Ontology: Mol. function=methylenetetrahydrofolate reductase (NADPH) activity; Cellular component=cytosol; Biological process =methionine metabolic process
  Homolog annotation: Hit_ID=Q9SE94; Match level="QueryCoverage=98%, HitCoverage=47%, E-value=1e-137, Identity=83%"; Hit description =Methylenetetrahydrofolate reductase 1
VQGSRPLPWRPPTKFFRVKEDVRPIFWANRPKSYIRRTLGWDQYPHGRWGDSRNPSYGALTDHQFTRPRGRGKKXLQEEWAVPLKSVEDISERFTNFCRGKLTSSPWSELDGLQPETKELIRIEPRLGSKNLTNPSPAVNGEKSDSPTVGWGGPGGYVYQKAYLEFFCAKEKLDQLVEKIKAFPSLTFIAVNKYGVSASNIPANAVNAVTWGVFPGKEIIQPTVVDSGSFMVWKDEAFEIWTAGWACLFPEEDSSSKELLKKVQDNYYLVSLVDNDYIHGDLFAAFKEI

SEQ ID NO: 68884 - protein, 596 aa, Setaria italica
  misc_feature (519)..(519): Xaa can be any naturally occurring amino acid
  Transcript Sequence Number=SeqID_2910
  Gene Ontology: Mol. function=methylenetetrahydrofolate reductase (NADPH) activity; Cellular component=cytosol; Biological process =methionine metabolic process
  Homolog annotation: Hit_ID=Q9SE94; Match level="QueryCoverage=99%, HitCoverage=99%, E-value=0.0, Identity=91%"; Hit description =Methylenetetrahydrofolate reductase 1
  Pfam annotation: Domain name=MTHFR; Domain location=6-301; Score =628.8; E_value=5.5e-186; Accession=PF02219.9; Description =Methylenetetrahydrofolate reductase
MKVIEKIQQAAADGRTAFSFEYFPPKTEEGVENLFERMDRMVAHGPSFCDITWGAGGSTADLTLDIANRMQNMVCVESMMHLTCTNMPVEKIDHALETIKSNGIQNVLALRGDPPHGQDKFVQVEGGFACALDLVKHIRAKYGDYFGITVAGYPEAHPDAIQGEGGATPEAYNNDLAYLKRKVDAGADLIVTQLFYDTDIFLKFVDDCRQIGITCPIVPGIMPINNYKGFIRMTGFCKTKIPAEITDALEPIKENEEAVKEYGVHLGTEMCKKILASGIKTLHLYTLNMEKSAIEILKRLGLIEEFKVSRPLPWRPPTNVFRVKEDVRPIFWANRPKSYIRRTLGWDQYPHGRWGDSRNPSYGALTDHQFTRPRGRGKKLQEEWAVPLKSVEDISERFTNFCRGKLTSSPWSELDGLQPETKIIDDQLVKINQKGFLTINSQPAVNGEKSDSPTVGWGGPGGYVYQKAYLEFFCAKEKLDQLVEKIKAFPSLTFIAVNKYGVSASNIPANAVNAVTWGXVFPGKEIIQPTVVDSGSFMVWKDEAFEIWTAGWACLFPEEDSSSKELLKKVQDNYYLVSLVDNDYIHGDLFAAFKEI

SEQ ID NO: 68885 - protein, 121 aa, Setaria italica
  Transcript Sequence Number=SeqID_2911
SSVYSACCCRPHPEGCVRWLPFLLRLCGLGSTSRPMALPRAKPPLPAVAMAGPLGGGDPSEEPRDGGWQGSQAMRVRKGRHRAAGIAKSEARHPAVLNDDERAASPDGAVDGGEMRRAAAP

SEQ ID NO: 68886 - protein, 153 aa, Setaria italica
  Transcript Sequence Number=SeqID_2912
  Gene Ontology: Mol. function=transferase activity
  Homolog annotation: Hit_ID=B6UFI8; Match level="QueryCoverage=87%, HitCoverage=19%, E-value=3e-33, Identity=51%"; Hit description =Glycosyltransferase
RRPRRRPPVAPAQGRRRRGNEGHARMADASALVNSFDAMVAVHGSGLTNLMFLPMNAVVVQVVPLGRMESLAMDEYGVPPRDMNMRYLQYNITAEESTLSDAYPRTHPVLLDPMPIHKQSWSLVKDIYLGQQDVRLDLRRFRPVLEKVIRLLR

SEQ ID NO: 68887 - protein, 76 aa, Setaria italica
  Transcript Sequence Number=SeqID_2913
DNPGSLIPPKNKFKYWFIITQLEQLSKNYPTLRSYIKIIQVEQGARHTLNRTHHIYILKVHSICVLNMKVKVVCIG

SEQ ID NO: 68888 - protein, 61 aa, Setaria italica
  Transcript Sequence Number=SeqID_2914
MENNSNSQPPPPPGYPTASGAEQQGGRKGRRGKTTSRGEKGFIEGCIAALCCCWICEMCCD

SEQ ID NO: 68889 - protein, 68 aa, Setaria italica
  Transcript Sequence Number=SeqID_2915
  Gene Ontology: Mol. function=endonuclease activity; Biological process=DNA repair
MGDEQGYQEEGDDYDLVLQKQEWIKTQDMLKSKIILEDDFVWSLPSVGSSSGEDARGKLKYIGGTDIS

SEQ ID NO: 68890 - protein, 484 aa, Setaria italica
  Transcript Sequence Number=SeqID_2916
  Gene Ontology: Mol. function=serine-type carboxypeptidase activity; Cellular component=extracellular region; Biological process =proteolysis
  Homolog annotation: Hit_ID=B6UB57; Match level="QueryCoverage=91%, HitCoverage=91%, E-value=0.0, Identity=90%"; Hit description =Lysosomal protective protein
  Pfam annotation: Domain name=Peptidase_S10; Domain location=46-475; Score=700.9; E_value=1e-207; Accession=PF00450.14; Description =Serine carboxypeptidase
MAPARCSLLLALALSLICFFSAAAAAAQVDAVAAAQQAADRVAGLPGQPAVGFAQYAGYVTVNETHGRALFYWFFEATAAPDKKPLVLWLNGGPGCSSIGYGEAEELGPFLVQKGKPELKWNNYSWNTEANLMFLESPVGVGFSYTNTSSDLQNLGDKITADDAYVFLLNWFKRFPQYKSHDFYIAGESYAGHYVPQLSEKIFDGNKAGPRENYINFKGLMVGNALMDDETDQTGMIDYAWDHAVISDRVYGDVKARCNFSMVKVTGACDAALQEYFAVYRLIDMYSLYTPVCTDGSGSTASRGGHRKVAVHGAAPRIFSKYRGWIMKPAGYDPCTAEYAEVYFNRPDVQAALHANVTKIGYNWTHCSDVISTWNDAAFSTLPIIRKLIAGGLKVWVFSGDTDGRIPVTATRLTLNKLGLKTVQEWTPWYDHLQVGGWTIVYEGLTFVTIRGAGHEVPMHAPRQALTLFSNFLAGTKMPPTAFP

SEQ ID NO: 68891 - protein, 199 aa, Setaria italica
  Transcript Sequence Number=SeqID_2917
  Gene Ontology: Mol. function=nucleotidyltransferase activity; Cellular component=cytoplasm; Biological process=NAD biosynthetic process
  Homolog annotation: Hit_ID=B6TP31; Match level="QueryCoverage=100%, HitCoverage=79%, E-value=1e-100, Identity=89%"; Hit description =Nicotinamide-nucleotide adenylyltransferase 1
  Pfam annotation: Domain name=CTP_transf_2; Domain location=1-164; Score=28.6; E_value=2.9e-06; Accession=PF01467.18; Description =Cytidylyltransferase
NELQQRGYCVLGGYMSPVNDAYKKKDLLPAAHRIRFCELACKSSSFVMVDPWEAMQKGYQRTLTVLSRIRNSLCKDGLADQGSLKVMLLCGSDLLESFSTPGVWIPDQVRTICKNFGVICIRREGKDVGKLIAGSDILQECRDNIISVDEIVPNQISSSRVRDCIKRCLSIKYLTCDEVIEYIREHSLFMEAEGGDTRL

SEQ ID NO: 68892 - protein, 156 aa, Setaria italica
  misc_feature (87)..(87): Xaa can be any naturally occurring amino acid
  Transcript Sequence Number=SeqID_2918
  Gene Ontology: Mol. function=nucleotidyltransferase activity; Cellular component=nucleus; Biological process=NAD biosynthetic process
  Homolog annotation: Hit_ID=B6TP31; Match level="QueryCoverage=100%, HitCoverage=59%, E-value=1e-70, Identity=86%"; Hit description =Nicotinamide-nucleotide adenylyltransferase 1
  Pfam annotation: Domain name=CTP_transf_2; Domain location=32-154; Score=20.7; E_value=1.6e-05; Accession=PF01467.18; Description =Cytidylyltransferase
MEEVGVDVPLPTEKLSIEPSRDGGTRGGVVLVATGSFNPPTYMHLRMFELAKDELQQRGYCVLGGYMSPVNDAYKKKDLLPAGPLTXAHRIRFCELACKSSSFVMVDPWEAMQKGYQRTLTVLSRIRNSLCKDGLADQGSLKVMLLCGSDLLESFS

SEQ ID NO: 68893 - protein, 451 aa, Setaria italica
  Transcript Sequence Number=SeqID_2919
  Subcellular localization annotation: CTP_CleavageSite=40; ConfidenceScore=5.03e-01
AAAANGTCDPDAPLNCSDPRVLAAVKAFNAKAFFRKSIVFLSYEAPVPGPKPGQCDVAWRFRNRREKSWRRYRDYRRFSLTSGDGCALDIVKVGKFRSGTNAARRPYRKGGKGPKNPLVMAPPVDADINDTIPVVGSEAEFKKGKYLYYMRGGDHCKSMNQFIWSFLCGLGEAKFLNRTFVMDLNLCLSGAHTVDGKDVDGKDFRYYFDFEHLKESVSVVEEGDFLKDWKRWDKKKGPGRITVRKVPSYKVTPMQLKRDKSSIIWRQFDGQEPENYWYRVCEGRAAKVIQRPWYAIWKSKRLMNIVTEIAGRMDWDYDGLHVVRGWKAQNKQMYPNLDADTSPDALVNKVTKLVKPMRNLYIATNEPFYNYFDKLRSHYHVHLLDDYKQLWSNTSEWYNETTTLSGGKPVPFDAYMRVIVDTEVFYRSKTQVETFNNLTRDCKDGINTCNL

SEQ ID NO: 68894 - protein, 105 aa, Setaria italica
  Transcript Sequence Number=SeqID_2920
PLLPLRRPGREGGRQARPPIPPPPAAIAAAGDPSLPRLAQSEHGRRAVPPSLPRPPSAGPSTRRGASAGLPGPLLLVTAPEAPLRSRESSADGDPYGGSGRALPV

SEQ ID NO: 68895 - protein, 139 aa, Setaria italica
  Transcript Sequence Number=SeqID_2921
  Gene Ontology: Mol. function=metalloendopeptidase activity; Cellular component=cytoplasm; Biological process=proteolysis
  Homolog annotation: Hit_ID=Q9FXD5; Match level="QueryCoverage=91%, HitCoverage=12%, E-value=3e-38, Identity=55%"; Hit description =F12A21.16
TNLPTRFKACVLPRMVSPSEDVRKASAEAENRLDSHFVMCRQREDVYRVIKAFAVKGERIGPEATRFLQCLVKEFERNGVKLSQHKRKEMEKLKSHIDELNLKYLQNLNDFTKFLLLSEDELAGMPFEFLKGILGKRSC

SEQ ID NO: 68896 - protein, 167 aa, Setaria italica
  misc_feature (12)..(12): Xaa can be any naturally occurring amino acid
  Transcript Sequence Number=SeqID_2922
  Gene Ontology: Mol. function=secondary active sulfate transmembrane transporter activity; Cellular component=integral to membrane; Biological process=sulfate transport
  Homolog annotation: Hit_ID=Q8LR58; Match level="QueryCoverage=100%, HitCoverage=25%, E-value=6e-61, Identity=62%"; Hit description =Sulfate transporter 2-like
  Pfam annotation: Domain name=Sulfate_transp; Domain location=1-167; Score=-42.5; E_value=2.2e-08; Accession=PF00916.12; Description =Sulfate transporter family
DFLSRSTITGFXGGTAAIIILQQLKGMLGMKHFTPKTDLISVVRAIFHYRHEWKWQSAVLGICFLLFLLSSKHLRKKKPNLFWVSAIAPFMVVIIGGIFAFLVKGNEHGIPIVGDLKKGINPLSISQLTFTDKHVNTAVKAGFLSGILALAEGIAVGRSLALIKNEQ

SEQ ID NO: 68897 - protein, 125 aa, Setaria italica
  misc_feature (30)..(30): Xaa can be any naturally occurring amino acid
  Transcript Sequence Number=SeqID_2923
  Gene Ontology: Mol. function=secondary active sulfate transmembrane transporter activity; Cellular component=integral to membrane; Biological process=sulfate transport
  Homolog annotation: Hit_ID=Q8LR58; Match level="QueryCoverage=87%, HitCoverage=15%, E-value=1e-33, Identity=56%"; Hit description =Sulfate transporter 2-like
MKHFTPKTDLISVVRAIFHYRHVTSTRACXWKWQSAVLGICFLLFLLSSKHLRKKKPNLFWVSAIAPFMVVIIGGIFAFLVKGNEHGIPIVGDLKKGINPLSISQLTFRGWIPIVGDLKKGIKPY

SEQ ID NO: 68898 - protein, 110 aa, Setaria italica
  Transcript Sequence Number=SeqID_2924
  Gene Ontology: Mol. function=secondary active sulfate transmembrane transporter activity; Cellular component=integral to membrane; Biological process=sulfate transport
  Homolog annotation: Hit_ID=B0B547; Match level="QueryCoverage=75%, HitCoverage=50%, E-value=6e-28, Identity=69%"; Hit description =Sulphate transporter (Fragment)
  Pfam annotation: Domain name=STAS; Domain location=1-91; Score=16.1; E_value=0.0014; Accession=PF01740.13; Description=STAS domain
MAIISSSPISSLFKFRPQVFSLTTCLNIAGVSSIDNTGIGMLLEVHQNLDRRGIRVALTNPKLQVTEKLVLSGYIKDKIGEEWVFLTVKDAVTACRYALQRSRSKDDGEV

SEQ ID NO: 68899 - protein, 411 aa, Setaria italica
  misc_feature (101)..(101): Xaa can be any naturally occurring amino acid
  Transcript Sequence Number=SeqID_2925
  Gene Ontology: Mol. function=secondary active sulfate transmembrane transporter activity; Cellular component=integral to membrane; Biological process=sulfate transport
  Homolog annotation: Hit_ID=Q8LR58; Match level="QueryCoverage=95%, HitCoverage=62%, E-value=1e-138, Identity=58%"; Hit description =Sulfate transporter 2-like
  Pfam annotation: Domain name=STAS; Domain location=274-392; Score =112.0; E_value=2e-30; Accession=PF01740.13; Description=STAS domain
  Pfam annotation: Domain name=Sulfate_transp; Domain location=1-251; Score=251.3; E_value=2.2e-72; Accession=PF00916.12; Description =Sulfate transporter family
  Pfam module annotation: Pfam domain module=STAS::Sulfate_transp; Domain location=274-392::1-251
MFICTSFSCVQWKWQSAVLGICFLLFLLSSKHLRKKKPNLFWVSAIAPFMVVIIGGIFAFLVKGNEHGIPIVGDLKKGINPLSISQLTFTDKHVNTAVKAXEGIAVGRSLALIKNEQIDGNKEMIAFGIMNIAGSCTSCYLTTGPFSKSAVNFHAGCRTPMSNVVMSVCIMLVLLFLAPLFKYTPLVALSAIIVVAMIGLIKVKEFSHLYRVDKFDFCICMVAFIGVVFFTMVIGLGASVGLSVIRALLHVARPNTCKLGSIAGGDIFRDVRHYPHARNIPNVLVLQLGSPIYFVNAGYLRERILRWVEDEENACKVDGQDLQCVVLDLGGVSSIDNTGIGMLLEVHQNLDRRGIRVALTNPKLQVTEKLVLSGYIKDKIGEEWVFLTVKDAVTACRYALQRSRSKDDGEV

SEQ ID NO: 68900 - protein, 161 aa, Setaria italica
  Transcript Sequence Number=SeqID_2926
RSNPDAAAAAVRAYPLPSGLPNSASSEYLVEEEVQVVLKPSPHAAVGSSDPPSQQNQQPQPQQLAAVERGQPSSSTLGLTPTASFRSTAERWSSRWSNRWSSRWSSGRWSSRYDAGTVTAAATAEWWWDMDGGAAPAGRRREADDGSASFYGFVRWLTGAY

SEQ ID NO: 68901 - protein, 89 aa, Setaria italica
  misc_feature (15)..(15): Xaa can be any naturally occurring amino acid
  misc_feature (28)..(28): Xaa can be any naturally occurring amino acid
  Transcript Sequence Number=SeqID_2927
  Gene Ontology: Mol. function=heat shock protein binding
  Homolog annotation: Hit_ID=B6TYB9; Match level="QueryCoverage=100%, HitCoverage=22%, E-value=1e-28, Identity=75%"; Hit description=Heat shock protein binding protein
SGIDSTMLGQEGWAXGDEDGGDGRAEEXRGININEAAQATDGSGRVNASGAGGVEDMSNFHIDVDATEDILGNLHNLPFLRVDNLGRML

SEQ ID NO: 68902 - protein, 196 aa, Setaria italica
  Transcript Sequence Number=SeqID_2928
  Gene Ontology: Mol. function=protein serine/threonine kinase activity; Biological process=protein amino acid phosphorylation
  Homolog annotation: Hit_ID=B9S1Z3; Match level="QueryCoverage=99%, HitCoverage=15%, E-value=1e-73, Identity=69%"; Hit description=ATP binding protein, putative
  Pfam annotation: Domain name=Arm; Domain location=120-159; Score =19.9; E_value=0.011; Accession=PF00514.15; Description=Armadillobeta- catenin-like repeat
  Pfam annotation: Domain name=Arm; Domain location=36-76; Score=18.4; E_value=0.031; Accession=PF00514.15; Description=Armadillobeta -catenin-like repeat
  Pfam annotation: Domain name=HEAT; Domain location=125-161; Score =0.3; E_value=45; Accession=PF02985.14; Description=HEAT repeat
  Pfam annotation: Domain name=HEAT; Domain location=41-78; Score=19.2; E_value=0.017; Accession=PF02985.14; Description=HEAT repeat
  Pfam annotation: Domain name=HEAT; Domain location=84-120; Score =16.7; E_value=0.097; Accession=PF02985.14; Description=HEAT repeat
  Pfam module annotation: Pfam domain module=Arm::Arm::HEAT::HEAT::HEAT; Domain location=120-159::36-76::125-161::41-78::84-120
EGLLYPSRVAGLLEGPIAKETLLDFLMIVSDLARMSKDFYVPIDKAGLVGFLKSYLSNDDPDIRAKACSAIGNMCRHSSYFYSPLAANKVIQLVVDRCSDPDKRTRKFACFAVGNAAYHNDMLYEELRRSIPQLTTLLLGPEEDKTKGNAAGALSNLVRNSDILCEDIVSQGAIQALLKMVGSYSTVALSPSRRDA

SEQ ID NO: 68903 - protein, 281 aa, Setaria italica
  misc_feature (30)..(30): Xaa can be any naturally occurring amino acid
  Transcript Sequence Number=SeqID_2929
  Gene Ontology: Mol. function=protein serine/threonine kinase activity; Biological process=protein amino acid phosphorylation
  Homolog annotation: Hit_ID=Q2QAV0; Match level="QueryCoverage=94%, HitCoverage=20%, E-value=3e-71, Identity=53%"; Hit description=Fused
FESFLVLRDGSIGLLETRLKWGGPLAIEQXACSVGIPQLLIRLLTDGFSKETSDGKDGSMSRSGLSPLGVVWTLSALSQCLPGGVFREILYRREHLKLLTDLLSDIHLKALAAWTGLGGGKRGVRELINSVVDILAFPFVAVQSSPNMPSASASINSGFLLNVASPGGRIGTENKEMLKTIEQNMPQYIQVLLEVGIPGCMLRCLDYVGLEDLARPLAIVAKMAGYRPLALQLLKEGLLYPSRVAGLLEGPIAKETLLDFLMIVSDLARMSKVCHSLASLG

SEQ ID NO: 68904 - protein, 416 aa, Setaria italica
  misc_feature (27)..(27): Xaa can be any naturally occurring amino acid
  Transcript Sequence Number=SeqID_2930
  Gene Ontology: Mol. function=pyridoxal phosphate binding; Cellular component=mitochondrion; Biological process=cysteine biosynthetic process from serine
  Homolog annotation: Hit_ID=B6U9G4; Match level="QueryCoverage=95%, HitCoverage=88%, E-value=0.0, Identity=88%"; Hit description =Cysteine synthase
  Pfam annotation: Domain name=PALP; Domain location=18-384; Score =276.3; E_value=7e-80; Accession=PF00291.17; Description=Pyridoxal -phosphate dependent enzyme
RTARPSRTSGRRTRRRGLVEAIGNTPXIRINSLSDATGCEILGKAEFLNPGGSVKDRVAVKIIEEALESGDLSYGGTVTEGSAGSTAISLATVAPAYGCRCHVVIPDDAAIEKSQIIEALGATVERVRPVSITHRDHFVNIARRRALEANKLAAAQRESNETQTNGLAHVNSRDKLETMQRESKKTQNNDPAHGSTGMPHRGKYDPSSDSKGGFFADQFENMANYRAHYEWTGPEIWEQTKGSLHAFIAAAGTGGTIAGVSCYLKEKNRNIKCFLMDPPGSGLFNKVTRGVMYTKEEAEGKRLKNPFDTITEGIGINRVTRNFMMAELDGAYRGTDREAVEMSRFLLKNDGLFVGSSSAMNCVGAVRVARDLGPGHTIVTILCDSGMRHLSKFFNDQYLADHGLTPTATGLEFLDK

SEQ ID NO: 68905 - protein, 61 aa, Setaria italica
  Transcript Sequence Number=SeqID_2931
  Gene Ontology: Mol. function=pyridoxal phosphate binding; Biological process=cysteine biosynthetic process from serine
  Homolog annotation: Hit_ID=B6U9G4; Match level="QueryCoverage=80%, HitCoverage=10%, E-value=2e-19, Identity=95%"; Hit description =Cysteine synthase
SFYHSQALESGDLSYGGTVTEGSAGSTAISLATVAPAYGCRCHVVIPDDAAIEKVGKLYNF

SEQ ID NO: 68906 - protein, 79 aa, Setaria italica
  misc_feature (60)..(60): Xaa can be any naturally occurring amino acid
  Transcript Sequence Number=SeqID_2932
  Homolog annotation: Hit_ID=B6SU55; Match level="QueryCoverage=92%, HitCoverage=33%, E-value=8e-11, Identity=46%"; Hit description=Seven- transmembrane-domain protein 1
  Pfam annotation: Domain name=MtN3_slv; Domain location=9-79; Score =26.3; E_value=4.4e-05; Accession=PF03083.8; Description=MtN3saliva family
  Subcellular localization annotation: CTP_CleavageSite=27; ConfidenceScore=5.26e-01
FLDQPPRQLFIGGVSMASLISMFASPLAVMGLVIRTECVEFMPFYLSLSTFLMSASFTMXPNGIGVILGAMQLVLYAYY

SEQ ID NO: 68907 - protein, 59 aa, Setaria italica
  Transcript Sequence Number=SeqID_2933
  Pfam annotation: Domain name=MtN3_slv; Domain location=1-49; Score= -7.8; E_value=0.019; Accession=PF03083.8; Description=MtN3saliva family
MNSTFLMSASFTMYGLLLRDFFIYVPNGIGVILGAMQLVLYAYYSRKWKSSEPSAPLLA

SEQ ID NO: 68908 - protein, 230 aa, Setaria italica
  Transcript Sequence Number=SeqID_2934
  Gene Ontology: Cellular component=chloroplast
  Homolog annotation: Hit_ID=B6SU55; Match level="QueryCoverage=92%, HitCoverage=84%, E-value=2e-39, Identity=43%"; Hit description=Seven- transmembrane-domain protein 1
  Pfam annotation: Domain name=MtN3_slv; Domain location=10-100; Score =78.5; E_value=2.5e-20; Accession=PF03083.8; Description=MtN3saliva family
  Pfam annotation: Domain name=MtN3_slv; Domain location=134-220; Score= 96.4; E_value=1e-25; Accession=PF03083.8; Description=MtN3saliva family
  Pfam module annotation: Pfam domain module=MtN3_slv::MtN3_slv; Domain location=10-100::134-220
  Subcellular localization annotation: CTP_CleavageSite=36; ConfidenceScore=5.10e-01
MSSLYDISCFAAGVAGNIFALALFLSPVPTFKRVVKAKSTERFDGLPYLLSLLNCCICLWYGLPWVSDGGRTLVATVNGTGALFQLAYISLFIFYADSRSTRLKITGILLLEVFVFAFVAHASIAFLDQPARQLFIGGVSMASLISMFASPLAVMGLVIRTECVEFMPFYLSLSTFLMSASFTMYGLLLRDFFIYVPNGIGVILGAMQLVLYAYYSRKWKSSEPSAPLLA

SEQ ID NO: 68909 - protein, 137 aa, Setaria italica
  Transcript Sequence Number=SeqID_2935
  Gene Ontology: Mol. function=nucleic acid binding; Cellular component= nucleus; Biological process=regulation of transcription, DNA-dependent
  Homolog annotation: Hit_ID=Q67W65; Match level="QueryCoverage=80%, HitCoverage=6%, E-value=2e-38, Identity=66%"; Hit description =Transcription initiation factor TFIID subunit 1
  Pfam annotation: Domain name=Bromodomain; Domain location=63-137; Score=59.8; E_value=1e-14; Accession=PF00439.17; Description =Bromodomain
GIHEKREKGLRKAKQKIMEKRKPESGGDALLDHRPYINERRVPERHRASKRRRGGEVELSNILEKVVDQLRRNTAISYLFLKPVMKKDAPDYFDIVKRPMDLATIRDKVRKMEYRNRQSFRLDVAQIAVNAHAYNDN

SEQ ID NO: 68910 - protein, 74 aa, Setaria italica
  misc_feature (63)..(63): Xaa can be any naturally occurring amino acid
  Transcript Sequence Number=SeqID_2936
TGFQQVNAAIASQHALPDHQHDLAAGTTAATATAAASAPLRMQHFMAQDYAGLLQDMFPSFFXNNDDGDTHHHH

SEQ ID NO: 68911 - protein, 161 aa, Setaria italica
  misc_feature (55)..(55): Xaa can be any naturally occurring amino acid
  misc_feature (139)..(139): Xaa can be any naturally occurring amino acid
  Transcript Sequence Number=SeqID_2937
MEAAGAAAKFCALAAELAAKSSHVAELEARVSLLEAENERLREALARREGAGDPXSGRLAAGLRRSKHEEAEKLGGGAACDIIELSDYEEGPAAVDANEGQSPEEGVVAAPTPRNRVVSSESEDEADAEDAEGGGGSNXKNGAGLEDEDVSVTPRVRGGRR

SEQ ID NO: 68912 - protein, 136 aa, Setaria italica
  Transcript Sequence Number=SeqID_2938
  Gene Ontology: Mol. function=molecular_function; Cellular component =cellular_component; Biological process=biological_process
  Homolog annotation: Hit_ID=O22929; Match level="QueryCoverage=72%, HitCoverage=64%, E-value=2e-31, Identity=65%"; Hit description =Biogenesis of lysosome-related organelles complex 1 subunit 1
  Pfam annotation: Domain name=GCN5L1; Domain location=23-136; Score =36.9; E_value=3.5e-08; Accession=PF06320.5; Description=GCN5-like protein 1 (GCN5L1)
MDGAKPPAAAVGKQGLEEALLQIVQQHHHQSLRQRQQTERAKKDALRSAGHVADLLVDTVDGGVQELFVNEKRIELEARALLSTIARHRKQTDRWLAATNEINSVLKEIGDFENWMKVMDFDCKSINAAIRNIHQS

SEQ ID NO: 68913 - protein, 116 aa, Setaria italica
  misc_feature (29)..(29): Xaa can be any naturally occurring amino acid
  Transcript Sequence Number=SeqID_2939
QKKAFFEEYYKRARHLKAQGAMQQTEATXEERNDESTLGHSRQADAVMLENPVANAPSSSSEPSTEANSSDERKCQELGYLTFNPLFSQTAVLQNIEEEERPSSGQKQNLDQEFPC

SEQ ID NO: 68914 - protein, 336 aa, Setaria italica
  Transcript Sequence Number=SeqID_2940
  Gene Ontology: Mol. function=ATPase activity, coupled to transmembrane movement of substances; Cellular component=integral to membrane; Biological process=transport
  Homolog annotation: Hit_ID=Q7XTT6; Match level="QueryCoverage=99%, HitCoverage=20%, E-value=1e-167, Identity=84%"; Hit description =OSJNBa0058K23.17 protein
WFCWFIYVLIGEAAMFNLVLSVRQYYSSSSIFYLYCSEIVCQFLFGILMVVYLPSLDPYPGYTPIRNEELVDNTDYEPLPSGEQICPERHANIFSRIFFSWMTPLMQQGYKRPITDKDIWKLDTWDETETLYSRFQKCWNDELRKPKPWLLRALHSSLWGRFWLGGFFKIGNDASQFVGPLILNLLLESMQKGDPSWSGYIYAFSIFAGVSLGVLAEAQYFQNVMRVGFRLRSTLIAAVFRKSLRLTNDSRRKFASGRITNLISTDAESLQQVCQQLHSLWSAPFRIVISMILLYAQLGPAALVGALMLVLLFPIQTVIISQNCLKTLPKVGVCLK

SEQ ID NO: 68915 - protein, 79 aa, Setaria italica
  Transcript Sequence Number=SeqID_2941
  Subcellular localization annotation: CTP_CleavageSite=37; ConfidenceScore=5.60e-01
PIRLPLDRQKLKGNISISKSTRRCFSSTNSYTKLHSPSMTKASNLSISSDDLFMSRQANTNLHAGTITPHSHNNTEINI

SEQ ID NO: 68916 - protein, 44 aa, Setaria italica
  Transcript Sequence Number=SeqID_2942
PVRAAEAEAFRAPVRAGAHQPCGHRLHLSTQLVPVDDAATLGAS

SEQ ID NO: 68917 - protein, 227 aa, Setaria italica
  misc_feature (15)..(15): Xaa can be any naturally occurring amino acid
  Transcript Sequence Number=SeqID_2943
  Gene Ontology: Mol. function=nucleic acid binding
  Homolog annotation: Hit_ID=C1ZJF1; Match level="QueryCoverage=69%, HitCoverage=72%, E-value=6e-20, Identity=35%"; Hit description =Uncharacterized conserved protein
  Pfam annotation: Domain name=DUF1990; Domain location=31-214; Score =240.5; E_value=4.1e-69; Accession=PF09348.2; Description=Domain of unknown function (DUF1990)
MAWGGLFLSLGRPTXEQQKSCLAEAGGFNYDAALHGATRPKPASTSTSEAAAADTSDKALTERGFFVNRSRVLIGSGADTFLHAKSALLSWRHLALGWANVEPDTPVKVGTRFCICYRELMPWVMLPLQIAYVSDGDGRSSDKSKGTMFAFGSGTLQGHLLAGEERFSVEVDEEYRVWYEVVSFSKPAHVLATLCYPYVQLRQKHFAHRSGQALINHVATASTSAPN

SEQ ID NO: 68918 - protein, 50 aa, Setaria italica
  Transcript Sequence Number=SeqID_2944
RSTRQKERKKKTNSPRRCMVIDQEGSMARKLRMHSNLDETTMHQVARNKV

SEQ ID NO: 68919 - protein, 109 aa, Setaria italica
  Transcript Sequence Number=SeqID_2945
  Subcellular localization annotation: CTP_CleavageSite=57; ConfidenceScore=5.41e-01
LTCLSISPAKRKSAPAPDLPNGSDQSLYPRVALILTKSSSLKRLTEFSYFLGSKDLSSSSTSAATSSFSRSIGLASPSFFSFAWLASPVITSGILRVSFTVCSTARNPS

SEQ ID NO: 68920 - protein, 91 aa, Setaria italica
  Transcript Sequence Number=SeqID_2946
LPRGCCSRAAVERRMRAGSVAAVVGTSVELLAIPSLRLRITLAPTALPHFLRTTVPRRCLLSGSPLWGCSCLPLPHRDLPTSSRRNPPPPP

SEQ ID NO: 68921 - protein, 47 aa, Setaria italica
  Transcript Sequence Number=SeqID_2947
TKHAIYSGGKQMKHIHTGAKHSESYTAIPTSSLPDLPTYLTNTRKTK

SEQ ID NO: 68922 - protein, 154 aa, Setaria italica
  Transcript Sequence Number=SeqID_2948
  Gene Ontology: Mol. function=sequence-specific DNA binding; Cellular component=nucleus; Biological process=regulation of transcription, DNA-dependent
  Homolog annotation: Hit_ID=A6MD12; Match level="QueryCoverage=89%, HitCoverage=35%, E-value=4e-27, Identity=55%"; Hit description=Heat shock factor
RYASSQQLDASAALSSVVNCSGESSEALPPPPPLPPAILDLMPSCPSLATAAAGLVADADPEQAARLFGVSIGLKRTREDDDTGEEPADHGSAGAEVKTEASDPHQHRGSSSKEPSPDQHPWPIYRPTPVYHSMRCNAPDQGAAGSDQDGSNSR

SEQ ID NO: 68923 - protein, 78 aa, Setaria italica
  misc_feature (43)..(43): Xaa can be any naturally occurring amino acid
  Transcript Sequence Number=SeqID_2949
  Gene Ontology: Mol. function=hydrolase activity, hydrolyzing O -glycosyl compounds; Biological process=carbohydrate metabolic process
  Homolog annotation: Hit_ID=Q8L6H7; Match level="QueryCoverage=100%, HitCoverage=11%, E-value=2e-30, Identity=82%"; Hit description =Glycosyl hydrolase family 1 protein, putative, expressed
GAWPGGDPNAIEMATSALPTGVYNQALHWMALAHAEAYDYIHXRVHLSVDSKNKRKAIVGVAHHVSFTRPYGLFDVAA

SEQ ID NO: 68924 - protein, 286 aa, Setaria italica
  misc_feature (116)..(116): Xaa can be any naturally occurring amino acid
  Transcript Sequence Number=SeqID_2950
  Gene Ontology: Mol. function=hydrolase activity, hydrolyzing O -glycosyl compounds; Biological process=carbohydrate metabolic process
  Homolog annotation: Hit_ID=B6ST01; Match level="QueryCoverage=99%, HitCoverage=44%, E-value=1e-140, Identity=84%"; Hit description=SFR2
GLATAPAHVEDRLEDAWLQFAIEHSCDDKEAMRDQMTADAVMASAAGDGGAQLASRSRGEEKAGEGERRKPLKVAMEAMLRGFEMFAEGGESGSGDNCSHNVAAWHNVPCPQEGLXWSDPDTELKLAKETGISVFRMGIDWTRVMPKEPTDEEFKSSVNFAALERYRWIIQKVHEYGMKVMLTLFHHSLPPWAGEYGGWKMEKTVKYFMDFVRLVVDCVSDLVDYWVVFNEPHVFVMLTYCAGAWPGGDPNAIEMATSALPTGVYNQALHWMALAHAEAYDYIHLE

SEQ ID NO: 68925 - protein, 176 aa, Setaria italica
  Transcript Sequence Number=SeqID_2951
  Gene Ontology: Mol. function=molecular_function; Cellular component =cellular_component; Biological process=biological_process
  Homolog annotation: Hit_ID=B0W729; Match level="QueryCoverage=69%, HitCoverage=41%, E-value=2e-17, Identity=37%"; Hit description =HSPC164
  Pfam annotation: Domain name=DUF602; Domain location=35-176; Score =67.3; E_value=5.8e-17; Accession=PF04641.4; Description=Protein of unknown function, DUF602
YYLTSGGRPLAPSSRVAALPPSASVHLRLRALRGGGGDGGATGAESRDCYLSMYLAKKPDKADPNEARLSRFTCCALSGEPLAAPAVADRLGNLYNKEALVEALLHKRLPKALSHIRGLRDMIPIHLHPRPDADAAGEEVRFECPVTGLEFNGKYQFLALRGCGHVLSVKALKEVK

SEQ ID NO: 68926 - protein, 57 aa, Setaria italica
  Transcript Sequence Number=SeqID_2952
LMVLSSGRVLIPICLQNVPRYTKVGRVAIWLAESHILELFSFAVHSRDSLENVRFYC

SEQ ID NO: 68927 - protein, 485 aa, Setaria italica
  misc_feature (78)..(78): Xaa can be any naturally occurring amino acid
  Transcript Sequence Number=SeqID_2953
  Gene Ontology: Mol. function=ATP-dependent helicase activity; Cellular component=spliceosome; Biological process=mRNA processing
  Homolog annotation: Hit_ID=Q2R6C2; Match level="QueryCoverage=100%, HitCoverage=67%, E-value=0.0, Identity=91%"; Hit description =Helicase associated domain family protein, expressed
  Pfam annotation: Domain name=DUF1605; Domain location=314-428; Score =75.8; E_value=1.5e-19; Accession=PF07717.8; Description=Domain of unknown function (DUF1605)
  Pfam annotation: Domain name=HA2; Domain location=188-280; Score =92.6; E_value=1.4e-24; Accession=PF04408.15; Description=Helicase associated domain (HA2)
  Pfam annotation: Domain name=Helicase_C; Domain location=26-125; Score=35.7; E_value=1.9e-07; Accession=PF00271.23; Description =Helicase conserved C-terminal domain
  Pfam module annotation: Pfam domain module=DUF1605::HA2::Helicase_C; Domain location=314-428::188-280::26-125
LIFMTGKDDIDKMVSKLEERIQNLEEGSCMDALVLPLHGSLPPELQVRVFAPAPPNCRRFIVATNVAETSLTVDGVVXAANQFVIDCGYVKQRQYNPSSGMYSLDVVQISRVQADQRAGRAGRTRPGKCYRLYPMSIYQKEFLEATVPEIQRSSLAGSVLYLKSLNLPDINILKFDFLDPPSRESLEDALRQLYLIDAIDENGQITDVGRIMAELPLEPSLSRTLIEANELGCLSQALTVAAILSAEITLRSTRSKDMEGKRKRQELPDGSGWGDHIQLLQIFESWDQTGYDPRWCSDHDLQVRGMKLSKDVRNQLCQIIQKIAKGPTDVHARKSRKSDPDYRKLRRALCVGYGNQLAERMLHHNGYHTVGYRTQLVQVHPSSVLEGDEYGKFPMYVVYHELISTTRPYMRNICAVDQAWVEPILKKLEKLDINRLSGGSALKDSEPLEDKQVNMPKKAVDVKQSEVDSKIQAARERYLARKGKK

SEQ ID NO: 68928 - protein, 87 aa, Setaria italica
  Transcript Sequence Number=SeqID_2954
VTCPRVHTKGELSCQLNSYLSDIKGPACSAAPHRGCLFLYVLLVWAVSPEGLLPPHAPLQPPGEPVVFRSMVILPDPQVTSEPGMAS

SEQ ID NO: 68929 - protein, 304 aa, Setaria italica
  Transcript Sequence Number=SeqID_2955
  Gene Ontology: Mol. function=acetylglucosaminyltransferase activity; Cellular component=membrane
  Homolog annotation: Hit_ID=B6UCX5; Match level="QueryCoverage=100%, HitCoverage=74%, E-value=1e-157, Identity=86%"; Hit description=BGGP Beta-1-3-galactosyl-O-glycosyl-glycoprotein
  Pfam annotation: Domain name=Branch; Domain location=1-183; Score =180.3; E_value=5.3e-51; Accession=PF02485.13; Description=Core-2I -Branching enzyme
EAFVRAQEAPRRYGNVRVALAGEWGAVSRRGPTELAATLHAAAVLLREFEGWSWFINLSASDYPLMPQDDILHIFSYIPRDLNFIEHTSNIGWKEYQRARPIIVDPALQVPNKTEVITTKEKRSLPSAFKIFVGSSWVVLSRSFLEFCLLGWDNLPRTLLMYFTNFLSSSEGYFHTVICNSEYYQNTTINSDLRFMAWDNPPRTHPVNLTTEHFDSMANSGAPFAHSFANDNSALDMIDAKLLGRAPDRFTPGGWCLGSSVDGKDPCTFSGRSFVLRPSKGSAKLEKLLLKLLEPDNFRPKQCK

SEQ ID NO: 68930 - protein, 568 aa, Setaria italica
  misc_feature (217)..(217): Xaa can be any naturally occurring amino acid
  Transcript Sequence Number=SeqID_2956
  Gene Ontology: Mol. function=zinc ion binding; Cellular component =COPII vesicle coat; Biological process=ER to Golgi vesicle-mediated transport
  Homolog annotation: Hit_ID=B9RTF3; Match level="QueryCoverage=99%, HitCoverage=71%, E-value=0.0, Identity=64%"; Hit description=Protein transport protein sec23, putative
  Pfam annotation: Domain name=Gelsolin; Domain location=472-562; Score= 66.2; E_value=1.2e-16; Accession=PF00626.14; Description=Gelsolin repeat
  Pfam annotation: Domain name=Sec23_BS; Domain location=249-350; Score= 158.9; E_value=1.5e-44; Accession=PF08033.4; Description=Sec23Sec24 beta-sandwich domain
  Pfam annotation: Domain name=Sec23_helical; Domain location=363-463; Score=153.0; E_value=8.8e-43; Accession=PF04815.7; Description =Sec23Sec24 helical domain
  Pfam annotation: Domain name=Sec23_trunk; Domain location=1-238; Score=136.6; E_value=8e-38; Accession=PF04811.7; Description =Sec23Sec24 trunk domain
  Pfam module annotation: Pfam domain module=Gelsolin::Sec23_BS::Sec23 _helical::Sec23_trunk; Domain location=472-562::249-350::363-463::1 -238
ARVRRVVQGLPEGVRVALVTFAASVWVHDLGFEGCARVVVINGERELESDKIQELLGVHRSRYNKLAMPRSTEAQRFLLPVSECEFNITSAIEDLSSMSACPRGHRPLRATGAAISTAIALLEGCCSPSNGGRIMVFTSGPATVGPGLVVETDLGKAIRSHRDIFNSSAPLADKAREFYKKVAKRLTDHALVLDLFACSLDQVGAAELRNPIEVSGXLMVHTESFESEQFKSCFRHMFKREGTDYLNMNFNATIEIVTSKEVKICGALGPCISLRRKNSSVSDKEIGEGGTNYWKTSSLSSKTCIAFFFRVDCSHKAEPPTVFFIQFMTRYRHGDSSYRLRVTTVARRWAAPRSPEIAAGFDQEAAAAVMARLAVYRAETYHVRDVIRWLDKMLIRFTAKFGNYVPEDPSTFRLSPNFSLYPQFMYYLRRSQFIDVFNSSPDETAFFRLMLNREGVVGSLIMIQPTLFQYSFDGPPIPVLLDVSSISPDVILLFDSYFYIVIHYGSKIAQWRKLGYHKDPNHENLRKLLEAPEVDAEALMVDRFPVPKLIKCDQHGSQARFLLARLNP

SEQ ID NO: 68931 - protein, 96 aa, Setaria italica
  Transcript Sequence Number=SeqID_2957
AEKKDAAAVEEKKEEAPAGEKKEEAAPAAEEEKKEEAAPAAATEETAAETAPAADAAAAEPAAEAAPAPEAAAEAAVTPAAEPEAAAEAAVTPAAA

SEQ ID NO: 68932 - protein, 66 aa, Setaria italica
  Transcript Sequence Number=SeqID_2958
RNGETNEGSNIIVQPRSLSIPYPSLMSPMSASAWSPAELCTNHGQSRIIDPGCHPRIGGTLLKLLG

SEQ ID NO: 68933 - protein, 70 aa, Setaria italica
  misc_feature (30)..(30): Xaa can be any naturally occurring amino acid
  Transcript Sequence Number=SeqID_2959
  Gene Ontology: Mol. function=aspartic-type endopeptidase activity; Cellular component=chromatin
  Homolog annotation: Hit_ID=Q8SA93; Match level="QueryCoverage=81%, HitCoverage=2%, E-value=7e-12, Identity=60%"; Hit description =Putative polyprotein
GFAKLITKLLANRLAQKLQDMVANTKSVFXRTMHNFILVQQTARYLHQQKLPHILLKSDNLLMLGSCCIM

SEQ ID NO: 68934 - protein, 94 aa, Setaria italica
  misc_feature (66)..(66): Xaa can be any naturally occurring amino acid
  Transcript Sequence Number=SeqID_2960
  Homolog annotation: Hit_ID=B9RV37; Match level="QueryCoverage=76%, HitCoverage=38%, E-value=2e-12, Identity=50%"; Hit description =Lactoylglutathione lyase, putative
MAMECIPVEEPAAGPAVPLVRLNHVSFQCASVEESVGFYQRVLGFELVKRPASLDFGGAWQNIIAXLHKYGMGIHLLQRGSDSNAPAAARPPAI

SEQ ID NO: 68935 - protein, 129 aa, Setaria italica
  misc_feature (80)..(80): Xaa can be any naturally occurring amino acid
  Transcript Sequence Number=SeqID_2961
  Gene Ontology: Mol. function=hydrolase activity
  Homolog annotation: Hit_ID=B9SLY7; Match level="QueryCoverage=77%, HitCoverage=23%, E-value=4e-31, Identity=55%"; Hit description =Catalytic, putative
NFKESCLLSWLLIFFIFLIICRHGSATLDSRSGGNMKDYFETTYKFLDLSPHVLIPMHGRINLWPKHMLCGYLRYGKLIXNSDVDRKLWIPASFNVRLHVDHLNSQNKLPKDFSLEMFSRSCDDFFSSL

SEQ ID NO: 68936 - protein, 191 aa, Setaria italica
  Transcript Sequence Number=SeqID_2962
  Gene Ontology: Mol. function=hydrolase activity
  Homolog annotation: Hit_ID=B9SLY7; Match level="QueryCoverage=83%, HitCoverage=30%, E-value=3e-61, Identity=65%"; Hit description =Catalytic, putative
GHTDGHMGLLHVNTNTLIVGDHCVGHGSATLDSRSGGNMKDYFETTYKFLDLSPHVLIPMHGRINLWPKHMLCGYLRNRRSREASILQSIQNGGLTLFEIVSKTYSDVDRKLWIPASFNVRLHVDHLNSQNKLPKYFSLENFKASCGAHFIFRWAVAYVQSRSSPAILAVAASALAGGLAIACALRRNNGK

SEQ ID NO: 68937 - protein, 483 aa, Setaria italica
  Transcript Sequence Number=SeqID_2963
  Gene Ontology: Mol. function=hydrolase activity; Cellular component =mitochondrion
  Homolog annotation: Hit_ID=B9SLY7; Match level="QueryCoverage=95%, HitCoverage=88%, E-value=1e-137, Identity=51%"; Hit description =Catalytic, putative
  Pfam annotation: Domain name=Lactamase_B; Domain location=226-391; Score=51.4; E_value=3.5e-12; Accession=PF00753.19; Description =Metallo-beta-lactamase superfamily
MGSPSYRLAAAITVPSTGEFLVVRQPRPPSPPAEDEDYRRFVDSDLYDLPSAPLKPLAGEPRSEVAVSGADSVTRLDLSRLDVSAALDQIFYQFGLPDGMRGEWRLLKYVEEAEFGPDAGVNTVFIIGSLESKLDALQESCKWMTKDCALGLLSEVKPGSDRIGSNAYIGLLNSELPSNSTAVPALPSQEYPPGIILVPMKSKTLHPFRTTNLVVIRATNGAGGSTCSDFFACGDALLLDPGCSSQVHAELADLVNSLPKKLLVLVTHHHHDHIEGLSVVQRCNPDAVLLTHQNTMNRIGKGNWQIEYTSVTGGEKICIGDQELQVVFAPGHTDGHMGLLHVNTNTLIVGDHCVGHGSATLDSRSGGNMKDYFETTYKFLDLSPHVLIPMHGRINLWPKHMLCGYLRNRRSREASILQSIENGGRTLFEIVSKTYSDVDRKLWIPASFNVRLHVDHLNSQNKLPKDFSLEMFSRSCDDFFSSL

SEQ ID NO: 68938 - protein, 124 aa, Setaria italica
  Transcript Sequence Number=SeqID_2964
  Gene Ontology: Mol. function=aspartic-type endopeptidase activity; Biological process=DNA integration
  Homolog annotation: Hit_ID=Q5KQE8; Match level="QueryCoverage=95%, HitCoverage=6%, E-value=9e-47, Identity=73%"; Hit description =Putative polyprotein
VSREFEMFMMGELTFFLRLQIKQSNDGTFVHQGKYTKDVLRKFDMADAKPLSTAMATTTALDTNEDGEQVDRKEKRSMIGSLLYLTATRPDIHFAVCLCACFQASPRTSHCQAVKMIMRMRHGG

SEQ ID NO: 68939 - protein, 75 aa, Setaria italica
  Transcript Sequence Number=SeqID_2965
STLPTTLRSGESSSRIAARQGVLYDNNQHNFFLSQRYHFLRQPDHRFFLKCANLTIHEKNAKPTFHAYKVIILIK

SEQ ID NO: 68940 - protein, 79 aa, Setaria italica
  Transcript Sequence Number=SeqID_2966
SLHRSRERDKERMSEAVVEQLPSCIALRSKSNGKFLRYVHEHGEEKYRQLELSGEDALNLFTRFDVEPVPAARRPRAHP

SEQ ID NO: 68941 - protein, 50 aa, Setaria italica
  Transcript Sequence Number=SeqID_2967
AGGASLLENKLEERVSERVEEKLEREDSYGGGGGYGGGYDDYGGGYDDDY

SEQ ID NO: 68942 - protein, 335 aa, Setaria italica
  Transcript Sequence Number=SeqID_2968
  Gene Ontology: Mol. function=oxidoreductase activity; Cellular component=anchored to membrane; Biological process=oxidation reduction
  Homolog annotation: Hit_ID=Q1EPX7; Match level="QueryCoverage=94%, HitCoverage=52%, E-value=1e-158, Identity=86%"; Hit description=C -terminal peptide-binding protein 1
  Pfam annotation: Domain name=Cu-oxidase; Domain location=155-310; Score=217.6; E_value=3.2e-62; Accession=PF00394.14; Description =Multicopper oxidase
  Pfam annotation: Domain name=Cu-oxidase_3; Domain location=29-145; Score=199.2; E_value=1.1e-56; Accession=PF07732.7; Description =Multicopper oxidase
  Pfam module annotation: Pfam domain module=Cu-oxidase::Cu-oxidase_3; Domain location=155-310::29-145
MRRLLALVAALLALRPALATDPYAFFDWDVSYVTAAPLGVKQQVIGINGKFPGPVVNITTNWNVVVNVLNDLDEPLLITWNGIQHRKNCWQDGVLGTNCPIPSGWNWTYEFQVKDQIGSFFYFPSTGLQRAAGGFGGIVVNNRDVIAVPFGRPDGDITILIGDWYNKNHTDLRKMLDKGKDLGMPDGVLINGKGPYRYNDSLVPAGIEYETFNVHPGRTYRIRVHNVGTSTSLNFRIQGHNMLLVETEGSYTTQQNYTNLDVHVGQSYSFLVTTDQNASSDYYIVASARQVNESLWRRVTGVAVLRYSNSGGPASGPLPDPPQDRDDRTFSMNQA

SEQ ID NO: 68943 - protein, 120 aa, Setaria italica
  Transcript Sequence Number=SeqID_2969
  Homolog annotation: Hit_ID=Q9SGZ8; Match level="QueryCoverage=47%, HitCoverage=35%, E-value=5e-10, Identity=52%"; Hit description =F28K19.24
  Pfam annotation: Domain name=DUF581; Domain location=34-92; Score =94.3; E_value=4.2e-25; Accession=PF04570.6; Description=Protein of unknown function (DUF581)
MAGLSVVLETTHKNHPGKKPPAQIISKATLLIHGPKQKHVSPPPPASSFLQRCCLCHRELAEGRDIYMYRGDRAFCSEECRRQQIFMDEDAGSSCCANGAGAATARGSRRVAGGGGSVAY

SEQ ID NO: 68944 - protein, 95 aa, Setaria italica
  Transcript Sequence Number=SeqID_2970
  Subcellular localization annotation: CTP_CleavageSite=29; ConfidenceScore=5.54e-01
LMLSWISGSAQSNSLAALNSSRTAVQSVRDGAAAASDSPGGFFPGWFLWVVSSTTLSPAMVPERREYVDYRSGWILDAESSFFPPFSFTSSFPLT

SEQ ID NO: 68945 - protein, 109 aa, Setaria italica
  Transcript Sequence Number=SeqID_2971
LFVLYSFGLKHASLPSGDAMNLGLRRMPEAIEVDRKLPVHGMQVGQQPSQSNMNMRDMDGVALSQSSVTTLPMPHEIAVGALSKEHYSRPHMLEGFANDDAQLKSNVVN

SEQ ID NO: 68946 - protein, 142 aa, Setaria italica
  Transcript Sequence Number=SeqID_2972
  Subcellular localization annotation: CTP_CleavageSite=91; ConfidenceScore=5.39e-01
SASVASPALPILASPPNLAAVRRLQPRRRRHLKQTGDVLASDPIPPPPSPPARTPGTPLPPIQSRRHRRLQHADWGMPSSPALTPVPPSSPAFAPRPATPPIPPRRRCLLSQTGATIASNPTLAPPLPPTPPRRRRRLQHAR

SEQ ID NO: 68947 - protein, 44 aa, Setaria italica
  Transcript Sequence Number=SeqID_2973
  Gene Ontology: Mol. function=hydrolase activity
  Homolog annotation: Hit_ID=B6TDQ3; Match level="QueryCoverage=93%, HitCoverage=10%, E-value=9e-14, Identity=90%"; Hit description =Catalytic/ hydrolase
RYISEKLPWVVYHELPKSGHLFPIADGMADAIVKSLLLGHDGST

SEQ ID NO: 68948 - protein, 133 aa, Setaria italica
  Transcript Sequence Number=SeqID_2974
  Gene Ontology: Mol. function=protein tyrosine kinase activity; Biological process=protein amino acid phosphorylation
  Homolog annotation: Hit_ID=B6SNZ9; Match level="QueryCoverage=100%, HitCoverage=24%, E-value=4e-51, Identity=78%"; Hit description =Serine/threonine-protein kinase NAK
  Subcellular localization annotation: CTP_CleavageSite=60; ConfidenceScore=5.42e-01
STSSRLPEPEVHVPSLQSAPPSFRNRAKISQSANKVSNSRARVLSAPSTLIVVDQFGFPYAEYKDQDDSRDKEGSTKGHRFSNPLPLPLPSPEGAPLRNSCSFKASNVSGPLEISGPLPLPLEKYIGLRIFSY

SEQ ID NO: 68949 - protein, 873 aa, Setaria italica
  misc_feature (24)..(24): Xaa can be any naturally occurring amino acid
  Transcript Sequence Number=SeqID_2975
  Gene Ontology: Mol. function=cysteine-type peptidase activity; Cellular component=integral to membrane; Biological process =ubiquitin-dependent protein catabolic process
  Homolog annotation: Hit_ID=B9RNQ1; Match level="QueryCoverage=52%, HitCoverage=72%, E-value=1e-151, Identity=59%"; Hit description =Cysteine-type endopeptidase, putative
  Pfam annotation: Domain name=UCH; Domain location=46-353; Score =171.2; E_value=3e-48; Accession=PF00443.21; Description=Ubiquitin carboxyl-terminal hydrolase
VEANSKKSSGFGRISLVPTSKKIXKGQLLFSYDEFLKLYNWKDFDYIPCGLMNCGNSCFANVVLQCLSCTRPLVAYLLGKDHSRECSTKHEDWCFLCELQFHIQRASESIHPFSPMNILSHLPNIGGNLGYGRQEDAHEFMRFAIDKMQSACLAEYGGEKAVDLSTQETTIIQHIFGGRLQSQVQCTACGMVSNRYDNMMDLTVEIQGDAESLEKCLDQFTAVEWLDGDNKYKCDGCNDYVKARKHLSVHQAPNILTITLKRFQSGRFGKLNKRVTFPMELDLTPYMSSTDGSDLYDLYAVVVHLDMLNASFFGHYICYIKGSRGNWYKIDDCKVMTVDEEEVHAQGAYMLLYSRRTARPRPLATVEEPVKQQQQCKVLPLNGQNHMIPEDATLNCESPLESSVDLLQQDSESNNKSLHKMDIKDQESDLDLHTSIEAEKFVSTEVDLLGSPVSDVLEDTRVPCSPLEASTSLRSVPLSPPVEGGPTTMSSVEFGNSMSEASSVHSFAEQREEPTSCIDSVDYMDVDTEAGTEVERCDEQQPALDGSIRRMDNKTSVPILSNGMAVKPKSTFALGFLDKPSRKRSSFAEEDHVDGNSAGSSRKLNGHCNEYLSGSDQGVLPDSYGNSPSSRSEKCNGDILEKSSNGNYCTVNSDTRSSNSSLHADRRDVPLVSHGFEPRSYSEPSSINKNCSSTSSGKPSKASQGDLSFLPRGFLARPPSRGNSVKVDDRLPFGNGTSSSFENGNSKPSNNIRESVILGTSSDIPMEQKSNGAVVPDHVEERCSDCTINGSLFQVRAATDHLDENSHSIFATNNTSCRQENGSDGTPGVNGMGCQRDDTPSMLVSKKSTGSEHDGLRRRVTSKFFEQNGIDAQ

SEQ ID NO: 68950 - protein, 232 aa, Setaria italica
  Transcript Sequence Number=SeqID_2976
  Gene Ontology: Mol. function=transferase activity; Biological process= auxin mediated signaling pathway
  Homolog annotation: Hit_ID=B6SUR9; Match level="QueryCoverage=96%, HitCoverage=96%, E-value=8e-68, Identity=59%"; Hit description =Glutathione S-transferase
  Pfam annotation: Domain name=GST_C; Domain location=96-198; Score =26.7; E_value=9.6e-05; Accession=PF00043.17; Description=Glutathione S-transferase, C-terminal domain
  Pfam annotation: Domain name=GST_N; Domain location=3-76; Score=73.5; E_value=7.8e-19; Accession=PF02798.12; Description=Glutathione S -transferase, N-terminal domain
  Pfam module annotation: Pfam domain module=GST_C::GST_N; Domain location=96-198::3-76
MGEAVKLIGSGSSPFVHRAAVALRLKGVPYEFIREDMSNKSDLLLQHNPVHKKVPVLLHGGRAVCESLIIVEYVDEAFPGPPLLPADPYDRAAARFWAHFLDDKCLKSLWPALWTEGEAQAASMAVARENLAILEEQLRGKKKKRFFGGDSIGLVDIAGAGLFAHWLGVLEEVAGVRVLSDEEHPALRRWANEYLADEAVKECLPDRDQLVAHFSANRDKCISIAKSMLPPN

SEQ ID NO: 68951 - protein, 74 aa, Setaria italica
  Transcript Sequence Number=SeqID_2977
MVSAAVREKFEEVDRVSRTGSHGRHHGHHGHHGHHGHGHGSGNFVMRETTVEEDFNTCTGEFHERKESYVVRSD

SEQ ID NO: 68952 - protein, 85 aa, Setaria italica
  Transcript Sequence Number=SeqID_2978
MAHYQEVDYSSEEVRSVASPAGFGRHGGVQQHVVKEKFEEVDKVSRTGRHHGHFEARESKFEEDINTRTGEFHERKENFAVRADD

SEQ ID NO: 68953 - protein, 102 aa, Setaria italica
  Transcript Sequence Number=SeqID_2979
MAHYQEVDYCSEEVRSVASPAGFGRHGGVQQHVVREKFEEVDRVSRTGSHGRHHGHHGHHGHHGHGHGSGNFVMRETTVEEDFNTCTGEFHERKESYVVRSD

SEQ ID NO: 68954 - protein, 237 aa, Setaria italica
  Transcript Sequence Number=SeqID_2980
  Gene Ontology: Mol. function=sequence-specific DNA binding; Cellular component=nucleus; Biological process=regulation of transcription, DNA-dependent
  Homolog annotation: Hit_ID=B6TEY5; Match level="QueryCoverage=100%, HitCoverage=100%, E-value=6e-84, Identity=74%"; Hit description =Homeodomain-leucine zipper transcription factor TaHDZipI-1
  Pfam annotation: Domain name=HALZ; Domain location=86-130; Score =31.6; E_value=3.1e-06; Accession=PF02183.10; Description=Homeobox associated leucine zipper
  Pfam annotation: Domain name=Homeobox; Domain location=31-85; Score =70.1; E_value=8e-18; Accession=PF00046.21; Description=Homeobox domain
  Pfam module annotation: Pfam domain module=HALZ::Homeobox; Domain location=86-130::31-85
MEGEDDGPEWMMEVGGGGGKGGKGGGGLDKNKKRFSEEQIKSLESMFATQTKLEPRQKLQLARELGLQPRQVAIWFQNKRARWKSKQLEREYSALRDDYDALLCSYESLKKEKHALLKQLEKLAEMMQEPRGKYGGNAGAVAGEDVRSGVGGMKEEFADAGAGLYSSDGADGGKFAHFTDDDAGALFRPSPQQPAAGFTSSGPPEHQPFQFHSSCWPSSTEQTCSSSQWWEFESLSE

SEQ ID NO: 68955 - protein, 133 aa, Setaria italica
  misc_feature (125)..(125): Xaa can be any naturally occurring amino acid
  Transcript Sequence Number=SeqID_2981
  Gene Ontology: Cellular component=peroxisome
  Homolog annotation: Hit_ID=B6TM66; Match level="QueryCoverage=100%, HitCoverage=28%, E-value=9e-52, Identity=76%"; Hit description =Peroxin Pex14
  Pfam annotation: Domain name=Pex14_N; Domain location=31-128; Score =19.3; E_value=1.2e-06; Accession=PF04695.5; Description=Peroxisomal membrane anchor protein (Pex14p) conserved region
MAEQSPSSAPPDGSSGSESFDNLVIQAPQLMREDYIQNAVNFLSHPKVKGSPVFHRRSFLEKKGLTNEEIDEAFRRVPDPNPNGTDAAAAGSQQANNHNQSVELQSYTEVQPQAATGSVTAGPIXPHAKAQFS

SEQ ID NO: 68956 - protein, 374 aa, Setaria italica
  misc_feature (285)..(285): Xaa can be any naturally occurring amino acid
  Transcript Sequence Number=SeqID_2982
  Gene Ontology: Cellular component=peroxisome
  Homolog annotation: Hit_ID=B6TM66; Match level="QueryCoverage=98%, HitCoverage=79%, E-value=1e-119, Identity=64%"; Hit description =Peroxin Pex14
FLLVPANNHNQSVELQSYTEVQPQAATGSVTAGPIAPHAKAQFSWVNTLLGAGLFLGLGAGAAITLKKWFIPSLKSWTRRVVNEEDGKVKDELTCKLYEEIREAIKVSASAFSDIARTNQEVLASKDEDREVLMKLREAFESQANVFKSLNETILNHIRQNQFSQYNLLEGHVQPVPWNGLVDYQGRASQQTNMYATPPNSSFDPGRHSFMPLPAEPTYGYGSYSGSYTEQRLQRPGYGFQPQMSNDRQNLGLRGNYQGVSSNHHAGNAIDDPAAIAAEFQRRWXPPQPPGVIMPEAAAAIRQPRSVPRQQSQPADGQPSTDVPRPSEPAVASSEQMNSVPGAHGGELASDGGTVTASAGCSVGSEEQQQQEAA

SEQ ID NO: 68957 - protein, 219 aa, Setaria italica
  misc_feature (138)..(138): Xaa can be any naturally occurring amino acid
  Transcript Sequence Number=SeqID_2983
  Gene Ontology: Mol. function=aspartic-type endopeptidase activity; Cellular component=mitochondrion; Biological process=DNA integration
  Homolog annotation: Hit_ID=Q6Z0A7; Match level="QueryCoverage=98%, HitCoverage=72%, E-value=1e-59, Identity=53%"; Hit description=PPR protein-like
  Pfam annotation: Domain name=PPR; Domain location=10-44; Score=35.4; E_value=2.2e-07; Accession=PF01535.12; Description=PPR repeat
  Pfam annotation: Domain name=PPR; Domain location=45-79; Score=29.8; E_value=1.1e-05; Accession=PF01535.12; Description=PPR repeat
  Pfam annotation: Domain name=PPR; Domain location=80-114; Score=35.1; E_value=2.8e-07; Accession=PF01535.12; Description=PPR repeat
  Pfam module annotation: Pfam domain module=PPR::PPR::PPR; Domain location=10-44::45-79::80-114
LSNAVMPGVATYNTILHGLFQYGRFSEAKELYLNMIKSGMQLDIYTYNIILNGLCKYNFVDDAFKMFQSLCSMDSQLNIITFNIMIDALLKSGRKEDAMGMFTAISAHGLVPDVVTYRLVTENLIKQGLLEEFDNLFXLAMEKSGCTPDSGMLNDIIRRLLDRGEIMRAGVYLSKIDEKNFSLEASTTSLLLSVLSREEYWRHAKSLPEKYHCFVDVDK

SEQ ID NO: 68958 - protein, 771 aa, Setaria italica
  Transcript Sequence Number=SeqID_2984
  Gene Ontology: Mol. function=protein binding
  Homolog annotation: Hit_ID=Q10G99; Match level="QueryCoverage=93%, HitCoverage=87%, E-value=1e-103, Identity=36%"; Hit description =Tesmin/TSO1-like CXC domain containing protein, expressed
  Pfam annotation: Domain name=CXC; Domain location=458-499; Score =82.0; E_value=2.1e-21; Accession=PF03638.7; Description=TesminTSO1 -like CXC domain
  Pfam annotation: Domain name=CXC; Domain location=544-585; Score =86.6; E_value=8.5e-23; Accession=PF03638.7; Description=TesminTSO1 -like CXC domain
  Pfam module annotation: Pfam domain module=CXC::CXC; Domain location =458-499::544-585
MDTPDRPRAAAAAGFEDSPVFNFINNLSPIPPPKPSDRAHNVQLFKSSDLAPVSSIFASPHVNPAKEPKILIRDDSVQLPQELHSPSSVRTRVGSSITFRMIRCRDIVSENCNTTCRLNEASIDSSDHTSNSESQLPQSTQNGVGSVETNKDQCADGKTDLTISQECTDLEGMNLDESGPDKMDSSHSGIDLHENQLSEQNKDEPAAYNGDYMITNQPCGDMLTLGLPFGTETQSVNDTQKAENSYPGKSLMNEESSDHYTQNSAHEPHHYWTGAVEGAAVNYTPQALPGALQSQLMPCNKLNEPRDYMPTEQNALSQHLRGMRRRSLFNEKAGASNKGVDKASDHHSVNSTTPKCKTISGDINSKPLRTPPCALPGIGLHLNALAAIPKEKIVSRDIHSTINESSSLPCPAGSSPLPYEQNIINDDFAQTTDIVSAEPSSQGSPKKKRHKFDNGDGTSCKRCSCKKSKCLKLYCECFAAGVYCSEPCTCQGCLNNEIHMETVLSTRQQIESRNPLAFAPKVIHTSEPGLELGDFNNKTPASARHKRGCNCKKSSCLKKYCECFQGGVGCSISCRCEGCKNAFGRREGVAALSIEEPKQASEESNACVKEEKCEIDKQLVIYQATDLAAAENLLTTPSMVECRPLACLPPPSSKKPSSKKPRSSAKSGNPSRLCNSQAPLKTDILLAQFGNYAEMVLGDSTTDTLKGNSSPQTSVKVVSPNKKRVSPPRMGTGLSPICKSGRKLILKSIPSFPSLGGDFNNEDSKSKAPAP

SEQ ID NO: 68959 - protein, 257 aa, Setaria italica
  Transcript Sequence Number=SeqID_2985
  Homolog annotation: Hit_ID=B9SMR8; Match level="QueryCoverage=76%, HitCoverage=61%, E-value=1e-57, Identity=55%"; Hit description =Chitinase, putative
SLESIVVAIDDFNNRNPFFVAGVVFVWLVVIPLVQEYVFKKYKPVSAIDAFRTLRDVPEAQLLDIRRAKSVRFMAPPNLKLVEKSAVQVEFDEEDEKGFVKEVLARFPDPANTVVCVLDNFDGNSLRVAELLIENGFKEAYAIQGGLRGPEGWQAVQENYLPPSVHVFPRKKKGMKLAHTDVSADGADGMKGENEEPLAPPSTTVVNASDESKDVYENPNGSTTSAEHATRRPLSPYPNYPDLKPPSSPTPSKPGLK

SEQ ID NO: 68960 - protein, 205 aa, Setaria italica
  misc_feature (101)..(101): Xaa can be any naturally occurring amino acid
  Transcript Sequence Number=SeqID_2986
SLFPCYFSKHVSMLRDLGFSDYHSVEEDVSTEPEDKQDGEKDTEDRERVSLNRLLEKHQDVSLTGLLEHRNEEMQEACSIEKESKEDQKIDALPFSQSNLXVKNSMRENVWNNPNQLSEEMVRSMKDIFLHLSASSKISPEATFANSSSSAERLSGSTLTSLRASFPLTLYGSKFLTSSVIPSSWCKSTEGLRNTEAITDESDKD

SEQ ID NO: 68961 - protein, 208 aa, Setaria italica
  misc_feature (41)..(41): Xaa can be any naturally occurring amino acid
  misc_feature (72)..(72): Xaa can be any naturally occurring amino acid
  misc_feature (142)..(142): Xaa can be any naturally occurring amino acid
  misc_feature (190)..(190): Xaa can be any naturally occurring amino acid
  Transcript Sequence Number=SeqID_2987
HYQLCHARNERLLAENNPGCLLPIPSDCQPSTACNFTEEEXYHSVEEDVSTEPEDKQDGEKDTEDRERVSLXNRLLEKHQDVSLTGLLEHRNEEMQEACSIEKESKEDQKIDALPFSQSNLKKNSMRENVWNNPNQLSEEMXRLSGSTLTSLSDSSVIASVLRSPSVDLHHDDGITDEVRNFDPYNVNGXEARRDIGSYCSVAEVSWM

SEQ ID NO: 68962 - protein, 367 aa, Setaria italica
  misc_feature (157)..(157): Xaa can be any naturally occurring amino acid
  Transcript Sequence Number=SeqID_2988
  Homolog annotation: Hit_ID=B9RR11; Match level="QueryCoverage=96%, HitCoverage=59%, E-value=1e-107, Identity=54%"; Hit description =Electron transporter, putative
  Pfam annotation: Domain name=DUF547; Domain location=143-281; Score =225.3; E_value=1.6e-64; Accession=PF04784.6; Description=Protein of unknown function, DUF547
KKNSMRENVWNNPNQLSEEMVRSMKDIFLHLSASSKISPEATFANSSSSAERLSGSTLTSLSDSSVIASVLRSPSVDLHHDDGITDEVRNFDPYNVNGKEARRDIGSYCSVAEVSWMYIGNEQLEYASGALKKFRFLVEQLSKVDPTCMDCDERLAXFWINLYNALIMHAYLAYGVPENDIKLFTLMQKACYTVGGQSVSAAEIEFVILKMKTPVHRPQLSLMLALHKFKTSEKLKRYSIDNTEPLILFALCCGMFSSPAVRIFSAANIRQELQESIRDYIRASVGINYKGELIVPKLLQSYAKGIVEDSLLADWICRHLTLEQVAAIQDTSSSHKQRLLGVRSFSVIPFDSRFRYLFLSDNIRCQK

SEQ ID NO: 68963 - protein, 289 aa, Setaria italica
  misc_feature (3)..(3): Xaa can be any naturally occurring amino acid
  misc_feature (16)..(16): Xaa can be any naturally occurring amino acid
  misc_feature (71)..(71): Xaa can be any naturally occurring amino acid
  Transcript Sequence Number=SeqID_2989
  Homolog annotation: Hit_ID=B9RR11; Match level="QueryCoverage=41%, HitCoverage=20%, E-value=3e-12, Identity=35%"; Hit description =Electron transporter, putative
FKXSSKAHELLISIAXLEIAITKLEEDLNHLHYQLCHARNERLLAENNPGCLLPIPSDCQPSTACNFTEEXKHVSMLRDLGFSDYHSVEEDVSTEPEDKQDGEKDTEDRERVSLNRLLEKHQDVSLTGLLEHRNEEMQEACSIEKESKEDQKIDALPFSQSNLKKNSMRENVWNNPNQLSEEMVRSMKDIFLHLSASSKISPEATFANSSSSAERLSGSTLTSLSDSSVIASVLRSPSVDLHHDDGITDEVRNFDPYNVNGKEARRDIGSYCSVAEVSWMYIGNEQLEY

SEQ ID NO: 68964 - protein, 368 aa, Setaria italica
  misc_feature (57)..(57): Xaa can be any naturally occurring amino acid
  Transcript Sequence Number=SeqID_2990
  Gene Ontology: Mol. function=tyrosine decarboxylase activity; Biological process=cellular amino acid and derivative metabolic process
  Homolog annotation: Hit_ID=Q7XHL3; Match level="QueryCoverage=94%, HitCoverage=70%, E-value=0.0, Identity=87%"; Hit description =Tyrosine decarboxylase 1
  Pfam annotation: Domain name=Pyridoxal_deC; Domain location=58-368; Score=446.8; E_value=3.3e-131; Accession=PF00282.11; Description =Pyridoxal-dependent decarboxylase con
SVLPRDGSGSSNEGANGGGEWLRPMDAEQLRECGHRMVDFVADYYKSIETFPVLSQXPGYLKELLPDTAPSKPDTLEALFDDIREKIVPGVTHWQSPNYFAYYPSNSSTAGFLGEMLSAAFNIVGFSWITSPAATELEVIVLDWFAKMLNLPSQFLSSALGGGVIQGTASEAVLVVLLAARDRTLRKHGKTSLEKLVVYASDQTHSSLQKACQIAGIFPENVRVVKADCNKNYAVAPEAIFEAISTDLSSVLIPFFICATVGTTSSSAVDPLPELGQIAKAHDMWLHVDAAYAGSACICPEYRHHLNGIEEADSFNMNAHKWFLTNFDCSLLWVKDRSYLIQSLSTNPEYLKNKASQANSVLDFKDWL

SEQ ID NO: 68965 - protein, 123 aa, Setaria italica
  Transcript Sequence Number=SeqID_2991
  Gene Ontology: Biological process=biosynthetic process
  Homolog annotation: Hit_ID=B9RE01; Match level="QueryCoverage=81%, HitCoverage=10%, E-value=5e-42, Identity=75%"; Hit description =Transferase, transferring glycosyl groups, putative
SNLGICVLSLHKDRHCYSRLLELIVNVWAFHSARRMVYVNPETGAMQEQHQLSGRRGQMSVQWFSYAILKSMDEELAEEFDSDHPDRRWLWPQTGEVFWQGLYERERTMRQQEKERRKQQSRD

SEQ ID NO: 68966 - protein, 260 aa, Setaria italica
  misc_feature (19)..(19): Xaa can be any naturally occurring amino acid
  misc_feature (188)..(188): Xaa can be any naturally occurring amino acid
  misc_feature (196)..(196): Xaa can be any naturally occurring amino acid
  Transcript Sequence Number=SeqID_2992
  Gene Ontology: Biological process=biosynthetic process
  Homolog annotation: Hit_ID=UPI0001A7B0CA; Match level="QueryCoverage =99%, HitCoverage=25%, E-value=5e-74, Identity=53%"; Hit description =transferase, transferring glycosyl groups
YLLFWVRMDQDSRNHANKXFWSFCDATNAGNCRLAVLEAFQRMYGVQLDHELDSLLHMPNDGDTWSVMQSWVMPTRSFLEFVMFSRMFVDALDAQMYDKHHQTGHCVLSLHKDRHCYSRLLELIVNVWAFHSARRMVYVNPETGAMQEQHQLSGRRGQMSVQWFSYAILKSMDEELAEEFDSDHPDRXRTNKTRKXEAYWQGLYERERTMRQQEKERRKQQSRDKIQRIKKRARQKTLGKYIKPPPEDTGGSNHTMTVDL

SEQ ID NO: 68967 - protein, 53 aa, Setaria italica
  Transcript Sequence Number=SeqID_2993
  Gene Ontology: Mol. function=protein binding; Cellular component =cytoskeleton; Biological process=actomyosin structure organization and biogenesis
  Homolog annotation: Hit_ID=P93373; Match level="QueryCoverage=64%, HitCoverage=10%, E-value=1e-11, Identity=100%"; Hit description =Actin-54 (Fragment)
PKANREKMTQIMFETFSVPAMYVAIQAVLSLYASGRTTGTETRNRGSKAHRGI

SEQ ID NO: 68968 - protein, 377 aa, Setaria italica
  Transcript Sequence Number=SeqID_2994
  Gene Ontology: Mol. function=structural molecule activity; Cellular component=actomyosin, actin part; Biological process=actomyosin structure organization and biogenesis
  Homolog annotation: Hit_ID=P53496; Match level="QueryCoverage=100%, HitCoverage=100%, E-value=0.0, Identity=94%"; Hit description=Actin -11
  Pfam annotation: Domain name=Actin; Domain location=4-377; Score =821.2; E_value=6.4e-244; Accession=PF00022.11; Description=Actin
MADAEDIQPLVCDNGTGMVKAGFAGDDAPRAVFPSIVGRPRHTGVMVGMGQKDAYVGDEAQSKRGILTLKYPIEHGIVSNWDDMEKIWHHTFYNELRVAPEEHPVLLTEAPLNPKANREKMTQIMFETFSVPAMYVAIQAVLSLYASGRTTGIVLDSGDGVSHTVPIYEGYALPHAILRLDLAGRDLTDSLMKILTERGYSFTTTAEREIVRDIKEKLAYVALDYEQELETAKSSSSVEKSYELPDGQVITIGAERFRCPEVLFQPSFIGMEAPGIHETTYNSIMKCDVDIRKDLYGNIVLSGGSTMFPGIADRMSKEITALAPSSMKIKVVAPPERKYSVWIGGSILASLSTFQQMWISRAEYEESGPAIVHRKCF

SEQ ID NO: 68969 - protein, 45 aa, Setaria italica
  Transcript Sequence Number=SeqID_2995
ALKFAYVFTLPFPTITWIMVCNILSSSIYNIMRDKSINWLFVFEI

SEQ ID NO: 68970 - protein, 105 aa, Setaria italica
  Transcript Sequence Number=SeqID_2996
  Gene Ontology: Mol. function=hydrolase activity, hydrolyzing O -glycosyl compounds; Cellular component=integral to membrane; Biological process=carbohydrate metabolic process
  Homolog annotation: Hit_ID=B6SWQ5; Match level="QueryCoverage=85%, HitCoverage=14%, E-value=5e-45, Identity=93%"; Hit description =Glycoside transferase, six-hairpin, subgroup
MYSGNQWGGSFEIGDGAAEDDHSRNMDLDRGALSARQHHELDETQQSWLLGPPEAKKKDKYVDLGCVVVKRKVLWWALWCLVGAFVLIGLPIIIAKAIPHKKSPS

SEQ ID NO: 68971 - protein, 112 aa, Setaria italica
  misc_feature (19)..(19): Xaa can be any naturally occurring amino acid
  Transcript Sequence Number=SeqID_2997
IKVGGLFLRDTFSRPPCTXLIQPSMQAVSQEPLPVPDFGQNFCPPIYPFGNQLLEFAAGVPLFSLYCLQITPSPSPPKFASKTVITCQPLTVTLQEQSCLRIASFLADGVMP

SEQ ID NO: 68972 - protein, 146 aa, Setaria italica
  Transcript Sequence Number=SeqID_2998
  Gene Ontology: Mol. function=transition metal ion binding; Cellular component=endoplasmic reticulum membrane; Biological process =electron transport chain
  Homolog annotation: Hit_ID=B6T2D0; Match level="QueryCoverage=100%, HitCoverage=100%, E-value=2e-60, Identity=78%"; Hit description =Cytochrome b5 isoform 2
  Pfam annotation: Domain name=Cyt-b5; Domain location=8-83; Score =71.6; E_value=2.9e-18; Accession=PF00173.20; Description=Cytochrome b5-like HemeSteroid binding doma
MAGEANKLFAASEVALHASRKDCWVVIGGKVYDVTKFLEDHPGGEDVLLHASASGDATEAFEEVGHSTSAISMMDSYLIGTIKGYVRPSASKATDPWGLEPPNSRTMQGNKGPPNPNTFLDFLLPLFVLGLAFSAWYYLTFVSKNH

SEQ ID NO: 68973 - protein, 88 aa, Setaria italica
  Transcript Sequence Number=SeqID_2999
  Gene Ontology: Mol. function=binding; Cellular component=ribosome; Biological process=primary metabolic process
  Homolog annotation: Hit_ID=Q10AC8; Match level="QueryCoverage=70%, HitCoverage=27%, E-value=6e-15, Identity=69%"; Hit description =Plastid-specific 30S ribosomal protein 1, chloroplast, putative, expressed
  Subcellular localization annotation: CTP_CleavageSite=50; ConfidenceScore=5.71e-01
VVSQAAAAAMAPAPPAAAISRHNYHRVSLLAPRRSGFLGRALAAQPRPPVAQVGRRACAVRMAWDGPLSSVRLIMQGRNVKLGENVKE

SEQ ID NO: 68974 - protein, 62 aa, Setaria italica
  Transcript Sequence Number=SeqID_3000
TSEDRVKICACQLRTASFKEIDNRDDGVEELLVLLTRAGPLSLHANANVQCRWLASCCRLRG

SEQ ID NO: 68975 - protein, 254 aa, Setaria italica
  Transcript Sequence Number=SeqID_3001
  Gene Ontology: Mol. function=binding; Cellular component =ribonucleoprotein complex; Biological process=primary metabolic process
  Homolog annotation: Hit_ID=B6TYP8; Match level="QueryCoverage=94%, HitCoverage=79%, E-value=8e-91, Identity=71%"; Hit description =Plastid-specific 30S ribosomal protein 1
  Pfam annotation: Domain name=Ribosomal_S30AE; Domain location=24-126; Score=108.6; E_value=2.2e-29; Accession=PF02482.11; Description=Sigma 54 modulation protein  S30EA ribosomal protein
GTTQVGRRACAVRMAWDGPLSSVRLIMQGRNVKLGENVKEHIEDKVGRAVSKHCHLVREVDVRLSARGGDLGRGPKTSRCEITLFTKRHGVLRAEEDADSTYASIDLAASIVKRKLRKIKEKETEVSHVKDWVDAGGLLLEDTEQDDQEQAAAEQDLTAAVGAEDEDTVLTKVVRTKVFEMPPLGVDEALEQLQNVDHDFYAFRNEDTGEVNILYKRKEGGYGLIIPKEDGHVEKETVIAEPSYAAVRRAGDNN

SEQ ID NO: 68976 - protein, 56 aa, Setaria italica
  Transcript Sequence Number=SeqID_3002
EDKKNKIKANACHSVLYLQYFENIWFSSPTILLNSILLSSQCYKKFIISQNCTTKT

SEQ ID NO: 68977 - protein, 92 aa, Setaria italica
  Transcript Sequence Number=SeqID_3003
  Subcellular localization annotation: CTP_CleavageSite=59; ConfidenceScore=5.46e-01
MLPVLTLTLSRACRLLRLSSPHPEARVLSAAAIRLSFPFSSASTTTARMASPSPSPEWPANRVRKTFVDYFESKSHTRWPSSPVVPVDDPTL

SEQ ID NO: 68978 - protein, 195 aa, Setaria italica
  Transcript Sequence Number=SeqID_3004
  Gene Ontology: Mol. function=hydrolase activity, hydrolyzing O -glycosyl compounds; Biological process=carbohydrate metabolic process
  Homolog annotation: Hit_ID=Q9AXL6; Match level="QueryCoverage=91%, HitCoverage=32%, E-value=4e-46, Identity=50%"; Hit description=Beta -glucosidase (Fragment)
  Pfam annotation: Domain name=Glyco_hydro_1; Domain location=1-193; Score=-213.3; E_value=6.2e-08; Accession=PF00232.10; Description =Glycosyl hydrolase family 1
GDRVKHWVTLNEPNIEPIGSYDQGSQPPRRCSYPFGKNCTGGDSSTEPYIAAHHLLLAHASAVSLYRNKYQPIQGGQIGITLLGWWHEPATNTSEDAAAASRMNDFHIGWFMHPLVYGDYPPVMRSRVGDRLPRLSAEESARARGSFDFVGFNHYLILRVHRPRRRRNWKDYYVDAGVQNPLAITEVRSSSVVVH

SEQ ID NO: 68979 - protein, 149 aa, Setaria italica
  misc_feature (38)..(38): Xaa can be any naturally occurring amino acid
  misc_feature (64)..(64): Xaa can be any naturally occurring amino acid
  misc_feature (126)..(126): Xaa can be any naturally occurring amino acid
  Transcript Sequence Number=SeqID_3005
  Gene Ontology: Mol. function=chitinase activity; Biological process =cell wall catabolic process
  Homolog annotation: Hit_ID=B6TT00; Match level="QueryCoverage=93%, HitCoverage=56%, E-value=3e-29, Identity=49%"; Hit description =Endochitinase PR4
  Pfam annotation: Domain name=Glyco_hydro_19; Domain location=3-148; Score=8.4; E_value=3.1e-09; Accession=PF00182.11; Description =Chitinase class I
YNEDFLESRKNLSKKIKNELAEFCYANEINGSGKNYCXPGQGYYGRGPLQVSWNYNYGPAGAEXSASFDGLRDPGAVVAFQGAALWFWMSYVHEAVVSGSPAGARRHQWRALVCDGKNPTAIRIRXRVWYYLQFCQQLVVDPGSKALVF

SEQ ID NO: 68980 - protein, 116 aa, Setaria italica
  Transcript Sequence Number=SeqID_3006
  Gene Ontology: Mol. function=protein binding; Cellular component =nucleoplasm; Biological process=ubiquitin-dependent protein catabolic process
  Homolog annotation: Hit_ID=B6SNI8; Match level="QueryCoverage=84%, HitCoverage=85%, E-value=5e-39, Identity=78%"; Hit description =Elongin C
  Pfam annotation: Domain name=Skp1_POZ; Domain location=22-84; Score =20.6; E_value=0.00081; Accession=PF03931.7; Description=Skp1 family, tetramerisation domain
MMGKGEAPAPREPEEEEEDTGGVVKLISAEGFEFVVDKKAAMVSNTLRNMLTSPGGFSETRQGEVRFPEISTHVLEKICQYFYWSLHYSSGKETTEFPIEPEITLELMMAANYLDT

SEQ ID NO: 68981 - protein, 181 aa, Setaria italica
  misc_feature (155)..(155): Xaa can be any naturally occurring amino acid
  Transcript Sequence Number=SeqID_3007
  Gene Ontology: Mol. function=structural molecule activity; Cellular component=cytoskeleton; Biological process=multicellular organismal development
  Homolog annotation: Hit_ID=B6TLR0; Match level="QueryCoverage=100%, HitCoverage=45%, E-value=9e-77, Identity=80%"; Hit description=ATARP7
  Pfam annotation: Domain name=Actin; Domain location=4-180; Score= -187.0; E_value=0.00012; Accession=PF00022.11; Description=Actin
MERVVVDAGSKLLKAGIAAPDQSPPLVMPSKMKLEVEDQQLADGAVVEEVVQPVVRGFVKDWDAMEDLLSYVLYRNIGWEIGDEGQILFTEPLFTPKTLREQLVQLMFEKFNVSGFYASEQAVLSLYAVGRISGCTVDIGHGKMWWASNAAVQEXRLPFILPDIAPVCEGAVQHVASKRLE

SEQ ID NO: 68982 - protein, 234 aa, Setaria italica
  Transcript Sequence Number=SeqID_3008
  Gene Ontology: Mol. function=structural molecule activity; Cellular component=cytoskeleton; Biological process=multicellular organismal development
  Homolog annotation: Hit_ID=B6TLR0; Match level="QueryCoverage=95%, HitCoverage=61%, E-value=1e-120, Identity=92%"; Hit description =ATARP7
  Pfam annotation: Domain name=Actin; Domain location=2-234; Score= -99.1; E_value=2.6e-09; Accession=PF00022.11; Description=Actin
WWASNAAVQEGDLAHGKPDIAPVCEGAVQHVASKRLEIGGVDLTNLFAQELKKSNPSVNIDTSDIERLKEQYACCTEDQLAFEGIESSCQPERHTLPDGQVITIEKERYIVGEALFQPSILGLEDYGIVHQLVTSVSNVSSEYHRQLLENTMLCGATASMTGFEDRFQREANLSASAICPSLVKPPEYMPENLARYSAWMGGAILAKVVFPQNQHVTKGEYDETGPSIVHKKCF

SEQ ID NO: 68983 - protein, 215 aa, Setaria italica
  misc_feature (14)..(14): Xaa can be any naturally occurring amino acid
  Transcript Sequence Number=SeqID_3009
  Gene Ontology: Mol. function=exonuclease activity; Cellular component= intracellular
  Homolog annotation: Hit_ID=Q2QWN8; Match level="QueryCoverage=93%, HitCoverage=33%, E-value=4e-93, Identity=81%"; Hit description =Exonuclease family protein, putative, expressed
EDARAALELAILKXKNGPDFGSQPSLSRRKLTSILHESGKKCSLIDDVSVLERYSDTSCNSIAAFSDDDALSRSMKEVKNDKVSFVWTQFSGLISYFRRRVQDPEKLKSCVAEAIALKTCDGKTASKKARRQICPELKEVLCELDKKIRELYGALPDNAMLIVCTGHGDTPLVQRLRKMLHHEENTIESRENIVQALGDLQAQAEVALCFCCVKH

SEQ ID NO: 68984 - protein, 68 aa, Setaria italica
  Transcript Sequence Number=SeqID_3010
MATAAAGSKRGGGRGRKALVAVLDNDANISAGKAAKAGDLSASSAPKAKRAPARSGKAAKAAAAAASV

SEQ ID NO: 68985 - protein, 232 aa, Setaria italica
  misc_feature (14)..(14): Xaa can be any naturally occurring amino acid
  Transcript Sequence Number=SeqID_3011
  Gene Ontology: Mol. function=transporter activity; Biological process= transport
  Homolog annotation: Hit_ID=Q38JB7; Match level="QueryCoverage=100%, HitCoverage=67%, E-value=1e-130, Identity=95%"; Hit description =Chloroplast lipocalin
  Pfam annotation: Domain name=Lipocalin_2; Domain location=11-175; Score=-13.9; E_value=2.7e-05; Accession=PF08212.4; Description =Lipocalin-like domain
MMMRGMTAKNFDPXFGYSGRWFEVASLKRGFAGQGQEDCHCTQGVYSFDEKSRSIQVDTFCVHGGPDGYITGIRGRVQCLSEEDMASAETDLERQEMIRGKCFLRFPTLPFIPKEPYDVLATDYDNYAVVSGAKDTSFIQIYSRTPNPGPEFIEKYKSYASNFGYDPSKINDTPQDCEYMSSDQLALMMSMPGMNEALTNQFPDLKLKAPVALDPFTSVFDTLKKLLELYFK

SEQ ID NO: 68986 - protein, 66 aa, Setaria italica
  Transcript Sequence Number=SeqID_3012
LEIGTLKEEVEGKEFQTDDLNRKLEELQLAVAEAEHSGKNEVWTWLCPATSTVIAAASFIYAARSR

SEQ ID NO: 68987 - protein, 77 aa, Setaria italica
  Transcript Sequence Number=SeqID_3013
  Gene Ontology: Mol. function=small conjugating protein ligase activity; Biological process=ubiquitin-dependent protein catabolic process
  Homolog annotation: Hit_ID=Q337R4; Match level="QueryCoverage=59%, HitCoverage=25%, E-value=6e-16, Identity=91%"; Hit description =Ubiquitin carrier protein
MSSPSKRREMDLMKLMMSDYKVEMVNDGMQEFFVEFRGPNESTDFGAGGRFDSISFVDDCVASDFNLDKLKSEFSGS

SEQ ID NO: 68988 - protein, 108 aa, Setaria italica
  Transcript Sequence Number=SeqID_3014
  Gene Ontology: Mol. function=small conjugating protein ligase activity; Cellular component=cytoplasm; Biological process=ubiquitin- dependent protein catabolic process
  Homolog annotation: Hit_ID=B6UHU0; Match level="QueryCoverage=85%, HitCoverage=54%, E-value=6e-48, Identity=97%"; Hit description =Ubiquitin carrier protein
  Pfam annotation: Domain name=UQ_con; Domain location=1-108; Score =100.8; E_value=4.7e-27; Accession=PF00179.18; Description=Ubiquitin -conjugating enzyme
DDQQHYLKDALLNLIGIYQGGVWRIRVELPDAYPYKSPSIGFINKIYHPNVDEMSGSVCLDVINQTWSPMFDLVNVFEVFLPQLLLYPNPSDPLNGDAAALMMRDRPA

SEQ ID NO: 68989 - protein, 212 aa, Setaria italica
  Transcript Sequence Number=SeqID_3015
  Gene Ontology: Mol. function=small conjugating protein ligase activity; Cellular component=cytoplasm; Biological process=ubiquitin- dependent protein catabolic process
  Homolog annotation: Hit_ID=Q337R4; Match level="QueryCoverage=86%, HitCoverage=100%, E-value=2e-86, Identity=85%"; Hit description =Ubiquitin carrier protein
  Pfam annotation: Domain name=UQ_con; Domain location=36-172; Score =203.3; E_value=6.4e-58; Accession=PF00179.18; Description=Ubiquitin -conjugating enzyme
SLLLPGLSPRAHLQKREGGAERRILVLRRMSSPSKRREMDLMKLMMSDYKVEMVNDGMQEFFVEFRGPNESIYQGGVWRIRVELPDAYPYKSPSIGFINKIYHPNVDEMSGSVCLDVINQTWSPMFDLVNVFEVFLPQLLLYPNPSDPLNGDAAALMMRDRPAYEQKVKEYCEKYAKPEDAGVVPEDKSSDEELSEEEDDSGDEEILGKPDP

SEQ ID NO: 68990 - protein, 227 aa, Setaria italica
  misc_feature (135)..(135): Xaa can be any naturally occurring amino acid
  Transcript Sequence Number=SeqID_3016
  Gene Ontology: Mol. function=protein transporter activity; Cellular component=nuclear pore; Biological process=protein import into nucleus, docking
  Homolog annotation: Hit_ID=Q2QKB7; Match level="QueryCoverage=99%, HitCoverage=23%, E-value=1e-114, Identity=86%"; Hit description =Nuclear transportin
  Pfam annotation: Domain name=IBN_N; Domain location=28-95; Score =20.0; E_value=0.00088; Accession=PF03810.11; Description=Importin -beta N-terminal domain
  Pfam annotation: Domain name=Xpo1; Domain location=100-227; Score =23.9; E_value=9e-05; Accession=PF08389.4; Description=Exportin 1 -like protein
  Pfam module annotation: Pfam domain module=IBN_N::Xpo1; Domain location=28-95::100-227
MEAQATATVKEALAALYHHPDDSIRTAADRWLQEFQHTLDAWQIADSLLHDESSNLETLIFCSQTLRSKVQRDFEELPSGAFRSLQDSLYVLLKKFNKGPPKVRTQICIAIAALAVHVPVEDWGAGGIVNWLSDXMKAHPEFITGFLELLIVLPQETSSYKIAARPERRRQFESDLCSSANVAINLLTACMAIDQLKEQVLEGFSSWLRFCHGISASELASHPLVHM

SEQ ID NO: 68991 - protein, 95 aa, Setaria italica
  Transcript Sequence Number=SeqID_3017
NSINVLRLTESFGFCAASRTKLQLQHCLHWSIYINFNGSLPITPDMVCEQLYSLCLLLRAKQSASVQSPLIKSENTGNKSMTQQPCRVPTMVNVG

SEQ ID NO: 68992 - protein, 75 aa, Setaria italica
  misc_feature (36)..(36): Xaa can be any naturally occurring amino acid
  Transcript Sequence Number=SeqID_3018
LKRPSICSLDVAHTASLAHYQSVLEHSEQSAVANQXLSDWWLQKRERISDDKRKGMDSIFMSVSWRICNQLDGRF

SEQ ID NO: 68993 - protein, 107 aa, Setaria italica
  Transcript Sequence Number=SeqID_3019
  Gene Ontology: Mol. function=RNA-directed DNA polymerase activity; Cellular component=exocyst; Biological process=exocytosis
  Homolog annotation: Hit_ID=B9RAG8; Match level="QueryCoverage=96%, HitCoverage=15%, E-value=4e-17, Identity=41%"; Hit description =Exocyst complex component, putative
LGHECFADVARGSVLQLLGFADAVTVSARATEKLYRTLGMFEALTDVQPELEALFSDDAAREFFAGEVSSTVEQLGSTLRHTIEEFGHAIHGESSRKAVHGGEIHPM

SEQ ID NO: 68994 - protein, 121 aa, Setaria italica
  Transcript Sequence Number=SeqID_3020
  Gene Ontology: Mol. function=phosphatidate cytidylyltransferase activity; Cellular component=membrane; Biological process =phospholipid biosynthetic process
LSRSRLLPADPNGPEEFAYLEMQYWAASISCLGVLAFFLWHLRQSPSNGVSKHLKYGPLLVALYLVTYFLSFLLKTDGGLMVMTNMVYMLCHGVAAVILIKHILEKFPSCSSFGLYLKSKM

SEQ ID NO: 68995 - protein, 53 aa, Setaria italica
  Transcript Sequence Number=SeqID_3021
MEFDEYEYLEKAVEPAAPPANGSGSGEKDRGSRRREGGEDRASKRSRSGEDRD

SEQ ID NO: 68996 - protein, 72 aa, Setaria italica
  Transcript Sequence Number=SeqID_3022
MWGGGGWKWWLCFLAWIFFFLNYAGELRVISLRRELKVQKKGKAPNQSTEHTPTPTPPKHTLNTTQLRLGLT

SEQ ID NO: 68997 - protein, 143 aa, Setaria italica
  misc_feature (75)..(75): Xaa can be any naturally occurring amino acid
  misc_feature (77)..(77): Xaa can be any naturally occurring amino acid
  Transcript Sequence Number=SeqID_3023
  Gene Ontology: Cellular component=integral to membrane
  Homolog annotation: Hit_ID=B6UAE4; Match level="QueryCoverage=82%, HitCoverage=25%, E-value=7e-27, Identity=53%"; Hit description=AAP7
MDATTMLVSNLSKDSFFLFFFVIVYAICRRAIQRANCYHRYGHDAPCSVGGDGYYMLLFGLAQVVLSQIPGFREXTXLSVFAAVMSFFYSFVGVGLGVAKVISNGVIMGGIGGIPMVSTTQKVWRVSQAVGDILFAYPSPWCC

SEQ ID NO: 68998 - protein, 203 aa, Setaria italica
  misc_feature (34)..(34): Xaa can be any naturally occurring amino acid
  Transcript Sequence Number=SeqID_3024
TSATSMRYRRIPPPIFAHGFTHLILHSLLLATCXCLAPGWNAPSIKTKSTVHSFLAETTLSKTELQQDPPHYCLSSSLEVAVAKSSPATERRPRSSSRLHHLSKSKSGFQTLEYCKGSSGREHQLSAPLIRPLVRLHPPIQKTGAQLQVRRRKRRQQPQGRAPRRGNPSAHQRKNPQQTHRTNPRRGPHPDPPGETKSSPPRS

SEQ ID NO: 68999 - protein, 463 aa, Setaria italica
  Transcript Sequence Number=SeqID_3025
  Gene Ontology: Cellular component=integral to membrane
  Homolog annotation: Hit_ID=B6UAE4; Match level="QueryCoverage=96%, HitCoverage=98%, E-value=1e-139, Identity=55%"; Hit description=AAP7
  Pfam annotation: Domain name=Aa_trans; Domain location=32-459; Score =334.4; E_value=2.2e-97; Accession=PF01490.10; Description =Transmembrane amino acid transporter protein
MGTGGSDGGGGDRQAQPLLGKLSESDEHLVKRTGTVWTAMAHIITAVIGSGVLSLAWSVAQLGWAGGPAAMVFFAGVTAVQSSLIADCYISHDPERGVVRNRTYVDAVRLYLGERSHLFCGFFLNFSLFGTGVVYTLTSATSMRAIQRANCYHRYGHDAPCSVGGDGYYMLLFGLAQVVLSQIPGFREMTGLSVFAAVMSFFYSFVGVGLGVAKVISNGVIMGGIGGIPMVSTTQKVWRVSQAVGDILFAYPFSLVLLEIEDTLRSPPPESETMKTATRASIVITAFFYLCCGCLGYAAFGDGTPGNLLTGFGFYEPYWLIGLANLCIVLHLLGGYQVYTQPVFGFADRHFGGAAAEVPVPVPLLGTRRVSVFRLCFRTAYVAATTALAVWFPYFNQVIGLLGAFTFWPLGIYFPVEMYLARNKVAPWSKQWLAIHAFSSVCLLICVFASFGSAVGVFGSETS

SEQ ID NO: 69000 - protein, 268 aa, Setaria italica
  misc_feature (43)..(43): Xaa can be any naturally occurring amino acid
  Transcript Sequence Number=SeqID_3026
  Homolog annotation: Hit_ID=Q9LDG2; Match level="QueryCoverage=91%, HitCoverage=49%, E-value=6e-23, Identity=29%"; Hit description =F28L1.1 protein
  Pfam annotation: Domain name=DUF231; Domain location=90-259; Score =199.0; E_value=1.3e-56; Accession=PF03005.7; Description=Arabidopsis proteins of unknown function
ALRSADDGARKWKRRGAWRGGYFPREDVVVAYHRAVLLAKYTXRQPVEKSKELQKDGIKGTYRVDVDIPADDWVNVTKFYDVLIFNTGHWWDTYKFPKETPLVFYKGGKPMEPPLGMQDGLKVVLNSMASYIEREVPRKTLKLWRTQSPRHFYGGEWDHNGSCVSDRLLEDHELDSWFDPRFGGVNKEARMVNSAIEEALAGTDIQLLNLTYMSEFRADAHPAIWLGKKDAVAVYGQDCMHWCLPGVPDTWVDILAAQILHYLKQEKG

SEQ ID NO: 69001 - protein, 68 aa, Setaria italica
  Transcript Sequence Number=SeqID_3027
  Subcellular localization annotation: CTP_CleavageSite=33; ConfidenceScore=5.57e-01
MASVLGLNTGSGGQSAAAVKQLLSRLRSTWRRRSAARPRRQAVRFGYDLHSYSQNFDDGLASSSRHRL

SEQ ID NO: 69002 - protein, 121 aa, Setaria italica
  Transcript Sequence Number=SeqID_3028
  Gene Ontology: Mol. function=oxidoreductase activity, acting on single donors with incorporation of molecular oxygen, incorporation of two atoms of oxygen; Cellular component=chloroplast; Biological process=fatty acid biosynthetic process
  Homolog annotation: Hit_ID=A1XCI5; Match level="QueryCoverage=96%, HitCoverage=13%, E-value=5e-37, Identity=64%"; Hit description =Lipoxygenase
RFSSEVFVSDIELRHGREPSAVTFNCSSWVTCHAGFNERIFFPLKSYLPSQTPKGVARLRETDLKAKRGDGRGERMLWQRIYDYDVYNDLGDPDKSPALRRPVLGGEEHPYPRRCRTGRPR

SEQ ID NO: 69003 - protein, 101 aa, Setaria italica
  Transcript Sequence Number=SeqID_3029
MALVRISTARLVYLTAALFLVVTIMSCTSPSCQAGNCIGGQCSPPPPPPLKVDCFVPESQFFCSDFYCPGICRGHNIRRHLLVRAYCNFQVNPNECCCEHH

SEQ ID NO: 69004 - protein, 67 aa, Setaria italica
  misc_feature (12)..(12): Xaa can be any naturally occurring amino acid
  Transcript Sequence Number=SeqID_3030
  Subcellular localization annotation: CTP_CleavageSite=54; ConfidenceScore=5.66e-01
QPLLQHPTPQIXAPSFPAPSLPPNFRLQLPPPQALSVLPPNTTESQPADQAATSAARVTNASSAPGA

SEQ ID NO: 69005 - protein, 229 aa, Setaria italica
  Transcript Sequence Number=SeqID_3031
  Gene Ontology: Mol. function=methyltransferase activity; Biological process=metabolic process
  Homolog annotation: Hit_ID=Q9FYL5; Match level="QueryCoverage=85%, HitCoverage=81%, E-value=2e-74, Identity=67%"; Hit description =F21J9.14
  Pfam annotation: Domain name=Methyltransf_11; Domain location=94-175; Score=49.8; E_value=1e-11; Accession=PF08241.4; Description =Methyltransferase domain
  Pfam annotation: Domain name=Methyltransf_8; Domain location=29-227; Score=-118.6; E_value=0.048; Accession=PF05148.7; Description =Hypothetical methyltransferase
  Pfam module annotation: Pfam domain module=Methyltransf _11::Methyltransf_8; Domain location=94-175::29-227
  Subcellular localization annotation: CTP_CleavageSite=35; ConfidenceScore=5.62e-01
PSPSAAATIAIASSTSTTAAVPLTPSPPSPHIRMRAARFRSYDDYLRHQLNKTLDPRLRRVWATRDWRRKVDAFARAFSSLQRQGLLRNASRALCVGARLGQEVAALRQVGVADAVGIDLAPAPPLVVRGDFHAQPFDDATFDFEFSNVFDHALYPDRFAAEIERTLRPGGVAVLHVAVHRRGDKYSANDLLDVQGLVGLFRRCDVVRVSKVDAFGLDTEVILRKKRCA

SEQ ID NO: 69006 - protein, 50 aa, Setaria italica
  Transcript Sequence Number=SeqID_3032
LIHIVHKLYWVATSKKLQYYTMSPHCKLNRFPVYIPTASRRLISTSANVL

SEQ ID NO: 69007 - protein, 347 aa, Setaria italica
  Transcript Sequence Number=SeqID_3033
RSLTVDPLFTGAHAARHPGPSLLAKFRDDEASIHVVDLSGTVVKRIAGPDGHELLCTRLDLACVATKGNSCRVLNPATGAAYALPESPALEHANCENLRDPYTFFASGRVASTGECKVLRVFNRTEFDAFDQQQLFEVFTINGGASNARWRARESHYPFVEANNAAVAGGVVYFLTDCAYDLMLFFGVNTGIHPDCIASFDLVTEEWRRDIQGPISSSLSMDNADATEEYRSIWHKITLTELKGSLVLAYHRRNLSLDLWFLSDFENGLWLKEYSIQTESAIPADEYFVKPLLVSDGGRLVILLASTGILLIYDPRTNTFAEVEMRRLDAVGIYTGNLLSLQCGDMV

SEQ ID NO: 69008 - protein, 158 aa, Setaria italica
  Transcript Sequence Number=SeqID_3034
  Subcellular localization annotation: CTP_CleavageSite=21; ConfidenceScore=5.33e-01
MLGLVAAPAPAAAAPPRGRCGAAAPSEKAGRVALAVPAAATLSLVLWSSPANAGILSGFSGLESRPGPDMPRLEFLEKWNAENQKKYAEFDNRFKNSKVLQDLLEKSKKNKEKNERMIQDKYCLRGAEWGVGDCSTEGMSDQEREDFISELKKRTGAE

SEQ ID NO: 69009 - protein, 246 aa, Setaria italica
  Transcript Sequence Number=SeqID_3035
  Gene Ontology: Mol. function=carboxylesterase activity
  Homolog annotation: Hit_ID=Q680G4; Match level="QueryCoverage=95%, HitCoverage=57%, E-value=2e-88, Identity=65%"; Hit description =Putative LEA protein
  Pfam annotation: Domain name=Abhydrolase_1; Domain location=1-222; Score=7.9; E_value=0.0013; Accession=PF00561.12; Description =alphabeta hydrolase fold
TTPQFYSASFTGDLRQVIDLVLGRYPQSNVYAVGWSLGANILVRYLGEETDKCPLSGAVSLCNPFNLVIADEDFHKGFNNVYDRALANALRTIFKKHALLFEDMEGEYDIPKAANAKTVRDFDEGLTRVSFGFKSVDDYYSNSSSSDSIKNVCIPLLCIQADNDPIAPSRGIPREDIKANPNCLLIVTPKGGHLGWVAGDEAPFGCPWTDPIVMEYLEYLQNEKNSSTKNDISFEQQGVSEASAPH

SEQ ID NO: 69010 - protein, 109 aa, Setaria italica
  Transcript Sequence Number=SeqID_3036
DMGWRGIPREKVVVAHVIRVMGIHQTYHSGFHSLLVVAVREACLDDTYINCFCCFVCFFTYCKFVQFHGSNCPSLLCIVRNHSLKICSLISVLFTCVCYSVCWLICKFA

SEQ ID NO: 69011 - protein, 124 aa, Setaria italica
  Transcript Sequence Number=SeqID_3037
IDHQSIRPSSLNTNLTMERAWAYCLNFNAFLSMLEFMLAICYGPGKLNRNENGLEEKTGEMAREPEEEERKKAKNSKNRTAGETVSVRSLFPVRKQTCLYTAYRAESWAHTRTQPAQQLCTWSL

SEQ ID NO: 69012 - protein, 46 aa, Setaria italica
  Transcript Sequence Number=SeqID_3038
IQSTSKFINYVLPCCIFEMRRSKMRSSYDLKYLCLLIHPFVVFKVL

SEQ ID NO: 69013 - protein, 102 aa, Setaria italica
  misc_feature (26)..(26): Xaa can be any naturally occurring amino acid
  Transcript Sequence Number=SeqID_3039
  Gene Ontology: Mol. function=zinc ion binding; Cellular component =intracellular
  Homolog annotation: Hit_ID=B6U9W9; Match level="QueryCoverage=79%, HitCoverage=23%, E-value=7e-31, Identity=80%"; Hit description =Cys2/His2 zinc-finger transcription factor
  Pfam annotation: Domain name=zf-C2H2; Domain location=30-52; Score =19.0; E_value=0.02; Accession=PF00096.18; Description=Zinc finger, C2H2 type
  Subcellular localization annotation: CTP_CleavageSite=37; ConfidenceScore=5.08e-01
RAGAVAVPPPTPPTAPPSKARRVETXPVIHQCPFCFRVFESGQALGGHKRTHMPYAGAPAPSTPAKCGDSSGSIDLNVPAAVDDDFELSAVYDAEFGSSTRQ

SEQ ID NO: 69014 - protein, 187 aa, Setaria italica
  Transcript Sequence Number=SeqID_3040
  Gene Ontology: Mol. function=DNA-directed DNA polymerase activity; Cellular component=intracellular; Biological process=DNA replication
  Homolog annotation: Hit_ID=Q6L9M0; Match level="QueryCoverage=97%, HitCoverage=33%, E-value=4e-86, Identity=84%"; Hit description=DNA polymerase lambda
  Pfam annotation: Domain name=DNA_pol_lambd_f; Domain location=111 -164; Score=101.6; E_value=2.7e-27; Accession=PF10391.1; Description =Fingers domain of DNA polymerase lamb
PRITVASHGTFDIEEASSGGPSIYAPADLNRNITSIFGRLIDIYRALGEDRRSFSYYKAIPVIEKLPFKIESAEQVKDLPTIGKSLRDHINEIVTTGKLSKLEHFENDEKVRTISLFGEVWGVGPATAVKLYEKGHRTLDDLRKDESLTNAQRIGLKYFDDIKQRIPRHEVSEMEKILQDVGKDYLA

SEQ ID NO: 69015 - protein, 108 aa, Setaria italica
  Transcript Sequence Number=SeqID_3041
  Gene Ontology: Mol. function=receptor activity
  Homolog annotation: Hit_ID=B6UAZ2; Match level="QueryCoverage=92%, HitCoverage=25%, E-value=9e-45, Identity=89%"; Hit description =Systemin receptor SR160
  Pfam annotation: Domain name=LRR_1; Domain location=18-40; Score =11.4; E_value=2; Accession=PF00560.25; Description=Leucine Rich Repeat
  Pfam annotation: Domain name=LRR_1; Domain location=42-61; Score=4.3; E_value=46; Accession=PF00560.25; Description=Leucine Rich Repeat
  Pfam annotation: Domain name=LRR_1; Domain location=65-87; Score=6.1; E_value=20; Accession=PF00560.25; Description=Leucine Rich Repeat
  Pfam module annotation: Pfam domain module=LRR_1::LRR_1::LRR_1; Domain location=18-40::42-61::65-87
GPHRFSGSLPESLRSLHLLHEIDVSNNQLTGPFPSQLLCLPNVQYVDIRFNNFCGEVPAAIFEKKIDALFINNNHFEFTLPESFTNSTASVIVLANLPRAGCRRRCRC

SEQ ID NO: 69016 - protein, 157 aa, Setaria italica
  Transcript Sequence Number=SeqID_3042
  Gene Ontology: Mol. function=receptor activity; Cellular component =cell wall
  Homolog annotation: Hit_ID=B6UAZ2; Match level="QueryCoverage=56%, HitCoverage=22%, E-value=3e-44, Identity=94%"; Hit description =Systemin receptor SR160
  Pfam annotation: Domain name=LRRNT_2; Domain location=57-96; Score =16.9; E_value=0.017; Accession=PF08263.4; Description=Leucine rich repeat N-terminal domain
  Subcellular localization annotation: CTP_CleavageSite=32; ConfidenceScore=5.07e-01
MQERAARPAMTRMSLTAAAVVFLVLAVAWPLLASAQPAPSMPPPSPPAAAATNNSRLEKAYVALQALKRAITDDPKKLTKNWCGPDVCNYFGVYCAAAPDDSCQRTVAGVDLNHGDLAGTLPEELGLLSDLAVFHLNSNRFSGSLPESLRSLPPPRD

SEQ ID NO: 69017 - protein, 359 aa, Setaria italica
  Transcript Sequence Number=SeqID_3043
  Gene Ontology: Mol. function=receptor activity; Cellular component =cell wall
  Homolog annotation: Hit_ID=B6UAZ2; Match level="QueryCoverage=91%, HitCoverage=83%, E-value=1e-179, Identity=91%"; Hit description =Systemin receptor SR160
  Pfam annotation: Domain name=LRRNT_2; Domain location=14-53; Score =13.6; E_value=0.037; Accession=PF08263.4; Description=Leucine rich repeat N-terminal domain
  Pfam annotation: Domain name=LRR_1; Domain location=111-133; Score =11.4; E_value=2; Accession=PF00560.25; Description=Leucine Rich Repeat
  Pfam annotation: Domain name=LRR_1; Domain location=135-154; Score =4.3; E_value=46; Accession=PF00560.25; Description=Leucine Rich Repeat
  Pfam annotation: Domain name=LRR_1; Domain location=158-180; Score =6.1; E_value=20; Accession=PF00560.25; Description=Leucine Rich Repeat
  Pfam annotation: Domain name=LRR_1; Domain location=207-229; Score =4.9; E_value=35; Accession=PF00560.25; Description=Leucine Rich Repeat
  Pfam annotation: Domain name=LRR_1; Domain location=231-253; Score =18.1; E_value=0.036; Accession=PF00560.25; Description=Leucine Rich Repeat
  Pfam annotation: Domain name=LRR_1; Domain location=255-277; Score =12.0; E_value=1.5; Accession=PF00560.25; Description=Leucine Rich Repeat
  Pfam annotation: Domain name=LRR_1; Domain location=87-109; Score =10.2; E_value=3.5; Accession=PF00560.25; Description=Leucine Rich Repeat
  Pfam module annotation: Pfam domain module=LRRNT_2::LRR_1::LRR_1::LRR_ 1::LRR_1::LRR_1::LRR_1::LRR_1; Domain location=14-53::111-133::135 -154::158-180::207-229::231-253::255-277::87-109
VPLLAAGGHDNSRLEKAYVALQAMKRAITEDPKKLTKNWCGPDVCNYFGVYCAAAPDDSCQRTVAGVDLNHGDLAGTLPEELGLLSDLAVFHLNSNRFSGSLPESLRSLHLLHEIDVSNNQLTGPFPSQLLCLPNVQYVDIRFNNFCGEVPAAIFEKKIDALFINNNHFEFTLPESFTNSTASVIVLANLPRVGGCLPSSIGDMAGTLNELILLNSGISSCIPPEIGKLDKLTVLDLSFNSITGTLPDTIGNMRALEQLDVAHNQLAGEIPESICELPHLKNFTYSYNFFCGEPHRCLEVPRIDDRQNCIAGRPDQRPGEECISFLHRPKAHCDAHGCVAPPSPPPPPPPVHAHPPPAY

SEQ ID NO: 69018 - protein, 96 aa, Setaria italica
  Transcript Sequence Number=SeqID_3044
  Homolog annotation: Hit_ID=Q7XRV0; Match level="QueryCoverage=90%, HitCoverage=12%, E-value=1e-13, Identity=48%"; Hit description =OSJNBa0055C08.4 protein
  Subcellular localization annotation: CTP_CleavageSite=48; ConfidenceScore=5.38e-01
WFTVSKTNQPRGKRKQGGLPLSSRATLAAWPCSTNVTDGGEQGISMPRAVNSSRPTGLGTIWPCSTNVTNGGEQGISIPRAVNSSHPTGLGNTFPG

SEQ ID NO: 69019 - protein, 61 aa, Setaria italica
  Transcript Sequence Number=SeqID_3045
VTLSASLVVFLSVGVKGAKASGAKAVAVPSLQSQRKHYYIADIILYSLLDFDPELWGLPPF

SEQ ID NO: 69020 - protein, 204 aa, Setaria italica
  Transcript Sequence Number=SeqID_3046
  Gene Ontology: Mol. function=hydrolase activity; Biological process =metabolic process
  Homolog annotation: Hit_ID=B9SFB1; Match level="QueryCoverage=96%, HitCoverage=51%, E-value=1e-42, Identity=45%"; Hit description =Riboflavin kinase/fmn adenylyltransferase, putative
  Pfam annotation: Domain name=Hydrolase; Domain location=7-192; Score =121.7; E_value=2.4e-33; Accession=PF00702.18; Description=haloacid dehalogenase-like hydrolase
MAAAHQVSAVIFDLDGTLLDTERATRDVLNEFLASYEKVPDPEKEEKRLGQMYMESTTGIIRDYGLPLTVEEYSKAMHPLYLKRWQKAKPLPGVKRLVKHLYKNGVPLALASNSIRRNIDHKLPKLEDWGECFSVILGGDQVPNGKPSPDIFLEAAKRLGVNPSSCLVIEDSVVGVKGAKASGAKAVAVPSLQSQRKHYYIADI

SEQ ID NO: 69021 - protein, 85 aa, Setaria italica
  misc_feature (15)..(15): Xaa can be any naturally occurring amino acid
  Transcript Sequence Number=SeqID_3047
  Gene Ontology: Mol. function=nucleotide binding; Biological process =small GTPase mediated signal transduction
QGLFFSEASALTGDXNVERAFLTLLEEVFAVVSRRALELDEARRMRGEQGDGGGGEVLSLKGTAVDVGSIMETSAMKRTSQCACS

SEQ ID NO: 69022 - protein, 88 aa, Setaria italica
  Transcript Sequence Number=SeqID_3048
ILEANKNRRGAERRGDNRAPEKQPSRVSTSALPSLSRSTQAASVSAIAAAARAPASSHRDGAAADAPVLLRGAGGAALLAGPGVRDSE

SEQ ID NO: 69023 - protein, 903 aa, Setaria italica
  Transcript Sequence Number=SeqID_3049
MDLEELLKQKTFTRTEFEYLAELLWSRTIGSNSLKPEDGSFSKMPMSEQDNGSRHSSLPVDFSITRYSVADQVASPAEIAKAYMGSKSSKGSPLRLRLHDPSSIPIKSTEASMIQKTKPPTIPLLQSSRLHVSKTSGRPESNFTTPNRSAIYKMSSSPYFKSGVSSKDISSTVSSPYQTPSSVHTFGRQVLKRKSSAVNNEIVSVGPVRRMHQRYNRTSPLLETRPGYCRYLGGHGSNVDEGSEQLAQTQKRRCVSRVGDATLGSIDDKVHANSFGQAPAQSAEMAAKILKQLDTLVPAQNENMSELREKHGNAMDARNLISQEKEVSAQSNHLEPSPSEVKDTPASGTEKMVDATSNKSDNKKPSTSLRSQAPNLVLSSKIDRNKMPVPSNGFTFPIQAGLGAHSVAPPTPTLASAPILPVEKQQSSALFRANTSNESHPRILQSVSEEGSMVHKVDNKLNADAKPMPFKNSGQGASFTSNPVFKVVNSKPTSLSNGPGHMSNSTVSALQPSSGSTNSASFQSAGLTISIAALKSTQSSSTGGSFTFPNTSMGSFATSNVFVGTTSRSVAAPSLASSGTGSPSTPFGSSPLFGTASSSASLDKSKALSSSTPFSTSQQVSIASSSAAQDKSKAVGSSNHFGFSQQYGTASSSTSQDISVSQPAVLFGNQNGHLGNSNSQFTQNSVNNLSFVSPEKSENGSSQSFADSQVCSAPLCSGPFNSGTVFPWAAGSASAFAATAPPSTTSLGFGSSQASSASPMLGSKLSTPVPASFGLPNTGSATSLLSPPPSAVFSFPSSTPSIPNPSPTTPFGGPTLQINGGNMAADGNGSPFPTASPFLLPSSSPSTPTFSTPATQFSSSTSSSPGIFGFGQQSQASSGGFSMGPGGGNDKSGRRIIRVKKRK

SEQ ID NO: 69024 - protein, 361 aa, Setaria italica
  Transcript Sequence Number=SeqID_3050
  Homolog annotation: Hit_ID=Q9LPT5; Match level="QueryCoverage=100%, HitCoverage=51%, E-value=3e-71, Identity=45%"; Hit description =F11F12.2 protein
DELAKEIADDKAEVEALKHESMKVRDEVEEERKMLQMAEVWREERVQMKLVDAKLTLDSKYSQLSELQANLEAFLSFHQGSSVDKETLRDGERLRDAICSMKFHGKEFSYKPPPPSEDIFAVFEELRQREDTNEKEIGECNGDTPISHATKIHTVSPETDIFLEKPANKCSTQPCAGNEDEDDSGWETVSHAEEQGSSNSPDGSEPSVNGFCGGNDASASGTDWEEDNCENCRSNSGISGVCSTTGEKYRKKGSSLSRLWRSSNGEGRRKTGSELLNGRLSSSRMSNAALSPDPKNGEVCQVSPSVGDWSPDLLNPHVVRAMKGRVEWPQGAQKHNLKSKLLDARTNGRKVQLRQALEQKI

SEQ ID NO: 69025 - protein, 96 aa, Setaria italica
  Transcript Sequence Number=SeqID_3051
  Subcellular localization annotation: CTP_CleavageSite=33; ConfidenceScore=5.51e-01
MQSMAPPAALHRAPLLLPCRVAAPSAAATARARAASLVAVRAQPDTTAAAASTSSPDPPQPPEFKPPPGFKPPEPKKFAVREGQQGGVLGASLAIP

SEQ ID NO: 69026 - protein, 329 aa, Setaria italica
  Transcript Sequence Number=SeqID_3052
  Gene Ontology: Mol. function=protein disulfide oxidoreductase activity; Biological process=cell redox homeostasis
  Homolog annotation: Hit_ID=B4FN60; Match level="QueryCoverage=81%, HitCoverage=77%, E-value=1e-135, Identity=88%"; Hit description =Glutathione S-transferase, N-terminal domain containing protein
  Pfam annotation: Domain name=GST_N; Domain location=127-203; Score =8.6; E_value=0.12; Accession=PF02798.12; Description=Glutathione S -transferase, N-terminal domain
  Pfam annotation: Domain name=GST_N; Domain location=246-321; Score =6.9; E_value=0.18; Accession=PF02798.12; Description=Glutathione S -transferase, N-terminal domain
  Pfam annotation: Domain name=Glutaredoxin; Domain location=129-189; Score=8.6; E_value=0.034; Accession=PF00462.16; Description =Glutaredoxin
  Pfam module annotation: Pfam domain module=GST_N::GST_N::Glutaredoxin; Domain location=127-203::246-321::129-189
  Subcellular localization annotation: CTP_CleavageSite=28; ConfidenceScore=5.42e-01
AIHGSSRRAAPRASPPPSSRVRAQPDTTAAAASTSSPDPPQPPEFKPPPGFKPPEPKKFAVREGQQGGVLGASLAIPLRLGTGVFVLGYSPSLVSPSEIPSDQYALELGAWKVKEESKIGQCKRPEKPIEIYEFEGCPFCRKVREMVSVLDLDVLFYPCPQKGPTFRPKVLEMGGKKQFPYMVDPNTRVAMYESDDIIQYLADTYGDGTVPIMLKLGLLTAITAGLAMLGRIGKGNSYTASKVPPQPIEIWAYEGSPFCKLVRETLVELELPHLLHSCARGSPRRQEFFKKMGTFQAPYIEDPNTGVKMFESAEIIEYLKATYALYPSS

SEQ ID NO: 69027 - protein, 108 aa, Setaria italica
  Transcript Sequence Number=SeqID_3053
  Gene Ontology: Mol. function=protein serine/threonine kinase activity; Cellular component=integral to membrane; Biological process=protein amino acid phosphorylation
  Homolog annotation: Hit_ID=B9S154; Match level="QueryCoverage=100%, HitCoverage=57%, E-value=3e-25, Identity=45%"; Hit description =Leucine-rich repeat transmembrane protein kinase, putative
  Pfam annotation: Domain name=LRR_1; Domain location=4-27; Score=15.3; E_value=0.26; Accession=PF00560.25; Description=Leucine Rich Repeat
  Pfam annotation: Domain name=LRR_1; Domain location=54-76; Score=9.6; E_value=4.4; Accession=PF00560.25; Description=Leucine Rich Repeat
  Pfam annotation: Domain name=LRR_1; Domain location=78-101; Score =16.8; E_value=0.09; Accession=PF00560.25; Description=Leucine Rich Repeat
  Pfam module annotation: Pfam domain module=LRR_1::LRR_1::LRR_1; Domain location=4-27::54-76::78-101
GLDQLLTLDLSHNRLTGGIPGAVIGKMSSLQMYLDLSSNMFMGPIPPEIGGLTMVQAIDLSNNRLSGGVPATLAGCKNLYSLDLSANNLTGALPAGLFPQLDVLTSLN

SEQ ID NO: 69028 - protein, 340 aa, Setaria italica
  Transcript Sequence Number=SeqID_3054
  Gene Ontology: Mol. function=receptor activity; Cellular component =integral to membrane
  Homolog annotation: Hit_ID=B9RL98; Match level="QueryCoverage=99%, HitCoverage=43%, E-value=1e-133, Identity=68%"; Hit description =Xenotropic and polytropic murine leukemia virus receptor pho1, putative
  Pfam annotation: Domain name=EXS; Domain location=1-319; Score=394.0; E_value=2.6e-115; Accession=PF03124.6; Description=EXS family
MVAWRRCRVNYGFIFASSPAAAGGELRPRDVFLTCAASMAAVAGAMFAHLALVLRGYHASPHVQAIPGFLLLVFLLLLFCPLNVAYRSSRFRFLRIMRNIILSPLYKVVMVDFFMADQLCSQVPMLRSLEYLACYYISGSYMTQDHGYCINTKQIRDLAYAVSFLPYYWRAMQCARRWFDEWDTSHLVNLGKYVSAMLAAGAKVAYEKDKGLASLSLLVAVSSTATVYQLYWDFVKDWGLLQPNSKNPWLRNDLILKRKSVYYLSMGLNLVLRLAWLQTVIHPNFGSLDSRVTSFFLAALEVIRRGHWNFYRLENEHLNNAGKFRAVKTVPLPFHEVDED

SEQ ID NO: 69029 - protein, 126 aa, Setaria italica
  Transcript Sequence Number=SeqID_3055
SPRSNDAERQIQPRGAARRCSIIPFLNSVAEVRCPAPPTPLLLIHFSCSPRNSASSTPDLSPPLPSNFPLATRFISSLFRRCCAPGRSLLSSGGVSVLRLYWCWTAVGWRSAWISSFLVCCWCENE

SEQ ID NO: 69030 - protein, 391 aa, Setaria italica
  Transcript Sequence Number=SeqID_3056
  Gene Ontology: Mol. function=kinase activity; Cellular component =intracellular; Biological process=intracellular protein transport
  Homolog annotation: Hit_ID=B9S215; Match level="QueryCoverage=95%, HitCoverage=95%, E-value=1e-154, Identity=71%"; Hit description =Protein transporter, putative
  Pfam annotation: Domain name=ENTH; Domain location=45-162; Score= -36.1; E_value=0.053; Accession=PF01417.12; Description=ENTH domain
  Pfam annotation: Domain name=GAT; Domain location=221-316; Score =10.5; E_value=0.00015; Accession=PF03127.6; Description=GAT domain
  Pfam annotation: Domain name=VHS; Domain location=42-179; Score=57.1; E_value=6.6e-14; Accession=PF00790.11; Description=VHS domain
  Pfam module annotation: Pfam domain module=ENTH::GAT::VHS; Domain location=45-162::221-316::42-179
MSDNLMDKVSAFGERLKITGTEVSKKMTAGMSSMSFKMKELFQGQTPADKIVEDATSENLDGPDWNSNLEICDLVNTEKVNSVELIRGIKKRIMLKDARIQYLSLILLETIVKNCEKAFSEVAAERVLDEMVRLIDDPQTVVNNRNKALMLIEAWGESGDELRYLPVYEETYKSLKSRVRFPGRDNESLAPIFTPPRSVAEADIDANLQQQAFEDVHVHTYTAEETKEAFDVARNSIELLSTVLSSSPEQDALQDDLTSTLVQQCHQSQHTIQRIIETVGDNEAVLFEALSVNDEIQKVLSKYEEMKQPRASENAEQRPVVIPIATEHEDSAAVGNEDALVRKPAAARARSGGDDDILDDLDEMIFGKKGGSSSQEAPKKPDPKKDDLISF

SEQ ID NO: 69031 - protein, 265 aa, Setaria italica
  Transcript Sequence Number=SeqID_3057
  Gene Ontology: Mol. function=transferase activity; Cellular component= plasma membrane; Biological process=aromatic compound catabolic process
  Homolog annotation: Hit_ID=B9S2T7; Match level="QueryCoverage=100%, HitCoverage=100%, E-value=1e-98, Identity=62%"; Hit description =Ganglioside-induced differentiation-associated protein 1, 2 gdap, putative
  Pfam annotation: Domain name=GST_C; Domain location=136-230; Score =38.6; E_value=2.5e-08; Accession=PF00043.17; Description=Glutathione S-transferase, C-terminal domain
  Pfam annotation: Domain name=GST_N; Domain location=1-74; Score=41.5; E_value=3.3e-09; Accession=PF02798.12; Description=Glutathione S -transferase, N-terminal domain
  Pfam module annotation: Pfam domain module=GST_C::GST_N; Domain location=136-230::1-74
MQLYHHPYSLDSQKVRMALEEKGIDYTSYHINPLTGKNMNVDFFRMNPSAKLPVFQNGAHVIYRAIDIIQYLDRLAVHLSGEIPPVNTEVHQWMQKVDAWNPKMFTLTHTPVKYRAFVSKFIRRVLIARMAEAPDLASMYHVKLREAYETEDKVKDPDIMKQSEEELSKLLDDVEAQLSKTKYLAGDEFSPADSMFVPILARITLLDLDEEYISCRPKILDYYNLVKHRSSYKIAIGKYFNGWKKYRTLFKTSFFLCVRTLFRRY

SEQ ID NO: 69032 - protein, 222 aa, Setaria italica
  Transcript Sequence Number=SeqID_3058
  Gene Ontology: Cellular component=mitochondrion
  Homolog annotation: Hit_ID=B9RXW7; Match level="QueryCoverage=77%, HitCoverage=74%, E-value=7e-35, Identity=38%"; Hit description =Pentatricopeptide repeat-containing protein, putative
  Pfam annotation: Domain name=PPR; Domain location=101-135; Score=2.0; E_value=5.2; Accession=PF01535.12; Description=PPR repeat
  Pfam annotation: Domain name=PPR; Domain location=31-65; Score=26.4; E_value=0.00012; Accession=PF01535.12; Description=PPR repeat
  Pfam annotation: Domain name=PPR; Domain location=66-100; Score=46.5; E_value=1e-10; Accession=PF01535.12; Description=PPR repeat
  Pfam module annotation: Pfam domain module=PPR::PPR::PPR; Domain location=101-135::31-65::66-100
LLNGFYNNGCFDDAKKVWEMMKERNVEPDAKSYNAKLRGLVSKGSTEDAIALIERMQKDGPKPDTVSYNELIRGYCKEGRLDEAKKVYDDLVKNECAPNSGTFHTLVPHFLEAGDLDLALKCCHEIFSGKCRVQSSLLQSVVTALVAASRVEEAKRIVELGRKNYYPRKGLRMSPRTGDNMGLKMPPPTGEDIDAEAKTDLEDSAPDEEGEGCEEGEDSKNA

SEQ ID NO: 69033 - protein, 98 aa, Setaria italica
  misc_feature (16)..(16): Xaa can be any naturally occurring amino acid
  Transcript Sequence Number=SeqID_3059
  Gene Ontology: Mol. function=protein serine/threonine kinase activity; Cellular component=plasma membrane; Biological process =protein amino acid phosphorylation
  Homolog annotation: Hit_ID=Q2RBQ5; Match level="QueryCoverage=100%, HitCoverage=10%, E-value=1e-30, Identity=62%"; Hit description =Leucine-rich repeat family protein, putative, expressed
NAFEIYKYIRIELGSXDAPVMASLASRYPLADWAMEGGDPCLPSPWSWVKCTSEAQPRVISINLSGKNLTGNVPPEVGALPCLAEIGLANNMLTGPTP

SEQ ID NO: 69034 - protein, 67 aa, Setaria italica
  Transcript Sequence Number=SeqID_3060
PMAQWSVLSQLLLQTHDPYSGAATSIFCIVCVYAVQQSSSGYNHVKLKPFQVHFENNCLGKLKKKKN

SEQ ID NO: 69035 - protein, 212 aa, Setaria italica
  misc_feature (133)..(133): Xaa can be any naturally occurring amino acid
  misc_feature (190)..(190): Xaa can be any naturally occurring amino acid
  misc_feature (201)..(201): Xaa can be any naturally occurring amino acid
  Transcript Sequence Number=SeqID_3061
KVELLGLSEKAVQDEFVRDNLRKDLSELQEKLAEKTEESRHYHEMDTEIHKLLNLVQNTLQDGSDSEISSGDTSAVLCLGKLLRKLLDDYGTLLSKSTEGNFTERDIQLEDIKPSNDASTLVTGTSDKEIELXSLNNELDYARNNLALVEQQRNEAVEKTQSLMLEIETLHAQAQINKLQESDAEQMQKXQSLVLELESVXKQRDNLQEQLN

SEQ ID NO: 69036 - protein, 128 aa, Setaria italica
  Transcript Sequence Number=SeqID_3062
  Homolog annotation: Hit_ID=Q9FRR0; Match level="QueryCoverage=85%, HitCoverage=57%, E-value=1e-10, Identity=35%"; Hit description =F22O13.28
  Pfam annotation: Domain name=DUF1685; Domain location=2-95; Score =71.5; E_value=3e-18; Accession=PF07939.3; Description=Protein of unknown function (DUF1685)
RGMRRGGSALRRVRSVTDDDLDELRGCIDLGFGFEPPAARTGCPACGGAGRSRLLETLPALDLYYAVHGGGGGGAEGCSCGAASEVSSEESPLGSPMSILAPGDTPETVKMRLKQWAQVVALSMLTRH

SEQ ID NO: 69037 - protein, 70 aa, Setaria italica
  Transcript Sequence Number=SeqID_3063
KQHGKKEAPAEAPQPLSPPAPAAPSPADLEDVSGPAPSAFDVNASSRQHQHWGVAVLQTAMAALLLSLAW

SEQ ID NO: 69038 - protein, 81 aa, Setaria italica
  Transcript Sequence Number=SeqID_3064
  Subcellular localization annotation: CTP_CleavageSite=24; ConfidenceScore=5.39e-01
MAISAACSICLHAAPPTRRGGSVVASAVRFDRRSAVLLLLSAAGAATPALTAPPANAAGIGLFGIRKKLERAEEAAAEAVR

SEQ ID NO: 69039 - protein, 35 aa, Setaria italica
  misc_feature (20)..(20): Xaa can be any naturally occurring amino acid
  Transcript Sequence Number=SeqID_3065
MADEYGRSGYGRSGAGEDYXGGYNRSGGDDYGRGE

SEQ ID NO: 69040 - protein, 167 aa, Setaria italica
  Transcript Sequence Number=SeqID_3066
  Gene Ontology: Mol. function=protein serine/threonine kinase activity; Biological process=protein amino acid phosphorylation
  Homolog annotation: Hit_ID=Q2R915; Match level="QueryCoverage=96%, HitCoverage=56%, E-value=1e-36, Identity=39%"; Hit description =Leucine Rich Repeat family protein, expressed
  Pfam annotation: Domain name=LRR_1; Domain location=103-126; Score =10.3; E_value=3.2; Accession=PF00560.25; Description=Leucine Rich Repeat
  Pfam annotation: Domain name=LRR_1; Domain location=128-150; Score =16.2; E_value=0.14; Accession=PF00560.25; Description=Leucine Rich Repeat
  Pfam annotation: Domain name=LRR_1; Domain location=30-52; Score=2.9; E_value=86; Accession=PF00560.25; Description=Leucine Rich Repeat
  Pfam annotation: Domain name=LRR_1; Domain location=54-76; Score =16.0; E_value=0.16; Accession=PF00560.25; Description=Leucine Rich Repeat
  Pfam annotation: Domain name=LRR_1; Domain location=6-28; Score=1.1; E_value=1.9e+02; Accession=PF00560.25; Description=Leucine Rich Repeat
  Pfam annotation: Domain name=LRR_1; Domain location=78-101; Score =15.4; E_value=0.24; Accession=PF00560.25; Description=Leucine Rich Repeat
  Pfam module annotation: Pfam domain module=LRR_1::LRR_1::LRR_1::LRR _1::LRR_1::LRR_1; Domain location=103-126::128-150::30-52::54-76::6 -28::78-101
SHHRQRVTALWLVDVPLHGPLSPHLGNLSFLTMLNLTRIGVAGHIPAELGRLRRLRFLDLYENGLSGTIPSTIGNLTRLEFLRLRDNTLSGQIPPRLLQSMRNLQSFSLEWNELSGNIPLYLFNNTPCLEYINLENNSLSGPIPNGLGSLPMLEYLSLGYNQSSNLS

SEQ ID NO: 69041 - protein, 342 aa, Setaria italica
  Transcript Sequence Number=SeqID_3067
  Gene Ontology: Mol. function=ATPase activity, coupled to transmembrane movement of substances; Cellular component=integral to membrane; Biological process=transport
  Homolog annotation: Hit_ID=Q7GBY1; Match level="QueryCoverage=96%, HitCoverage=51%, E-value=1e-164, Identity=86%"; Hit description =Tonoplast ABC transporter IDI7
  Pfam annotation: Domain name=ABC_membrane; Domain location=1-194; Score=46.1; E_value=1.3e-10; Accession=PF00664.15; Description=ABC transporter transmembrane region
YNKTKEIRQFFRIVTRTGELLSRLSEDTQIIKNAATTNLSEALRNITTTAIGLGFMFSTSWKLTLLALVIVPVISVAVRSFGRFLRELSHQTQAAAAVASSIAEESFGAIRTVRSFAQESHEISRYGEKVEETLKLGLKQAKVVGLFSGGLNAASTLSVVIVVIYGANLTINGYMTTGSLTSFILYSLTVGSSVSALSGLYTTVMKASGASRRVFQLLDRVSSMPNSGDQCPTNEQDGEVELDDVWFAYPSRPNHMILKGITLKLAPGSKVALVGPSGGGKTTIANLIERFYDPLKGRILLNRVPLVEISHQYLHNKVSIVSQEPTLFNCTIEENIDYGLEN

SEQ ID NO: 69042 - protein, 278 aa, Setaria italica
  Transcript Sequence Number=SeqID_3068
  Gene Ontology: Mol. function=ATPase activity, coupled to transmembrane movement of substances; Cellular component=integral to membrane; Biological process=transport
  Homolog annotation: Hit_ID=Q7GBY1; Match level="QueryCoverage=85%, HitCoverage=37%, E-value=1e-127, Identity=90%"; Hit description =Tonoplast ABC transporter IDI7
  Pfam annotation: Domain name=ABC_tran; Domain location=41-226; Score =224.1; E_value=3.6e-64; Accession=PF00005.19; Description=ABC transporter
VLSFFLRVKFVVFVLYCSWFAYPSRPNHMILKGITLKLAPGSKVALVGPSGGGKTTIANLIERFYDPLKGRILLNRVPLVEISHQYLHNKVSIVSQEPTLFNCTIEENIAYGLEGKTNFADVESAAKMANAHNFICSFPDQYKTVVGERGIRLSGGQKQRIAIARALLMNPRVLLLDEATSALDAESEYLVQDAMDSLMKGRTVLVIAHRLSTVKSADTVAVISDGQIVESGTHDELLARDGIYTALVKRQLQGPKFEATSSISEASEIEAEASSNGQ

SEQ ID NO: 69043 - protein, 132 aa, Setaria italica
  misc_feature (67)..(67): Xaa can be any naturally occurring amino acid
  misc_feature (78)..(78): Xaa can be any naturally occurring amino acid
  misc_feature (132)..(132): Xaa can be any naturally occurring amino acid
  Transcript Sequence Number=SeqID_3069
  Gene Ontology: Mol. function=pyridoxal phosphate binding; Biological process=metabolic process
  Homolog annotation: Hit_ID=Q9SX74; Match level="QueryCoverage=97%, HitCoverage=31%, E-value=2e-21, Identity=46%"; Hit description =F11A17.2 protein
SYCSIVGGSNSLGTWGYIEVIREIEQQIQQSADAHFDDIVVACGRIKIEQLKGKSTIYPSLLCILLXSSQTNHGLVRXVHAFSVCDDPEYFYDYVQGLIDGLQSGLNSHDIVSIEMLRVSYAMNTAEELKCX

SEQ ID NO: 69044 - protein, 170 aa, Setaria italica
  Transcript Sequence Number=SeqID_3070
  Gene Ontology: Mol. function=pyridoxal phosphate binding; Biological process=metabolic process
  Homolog annotation: Hit_ID=Q8GV33; Match level="QueryCoverage=100%, HitCoverage=74%, E-value=1e-56, Identity=66%"; Hit description =Putative 1-aminocyclopropane-1-carboxylate deaminase (Fragment)
LMADAVAQGADCIITVGGIQSNHCRATAVAAKYLNLDCYLILRTSKLLVDKDPGLVGNLLVERLVGAHIDLVSKEEYGKIGSVALADLLKKRLLEEGRKPYVIPVGGSNSLGTWGYIEVIREIEQQIQQSADAHFDDIVVACGSGGTIAGLALGSRLSSLKAKVHAFSVC

SEQ ID NO: 69045 - protein, 243 aa, Setaria italica
  Transcript Sequence Number=SeqID_3071
  Gene Ontology: Mol. function=pyridoxal phosphate binding; Biological process=metabolic process
  Homolog annotation: Hit_ID=B9SNW9; Match level="QueryCoverage=98%, HitCoverage=56%, E-value=6e-79, Identity=59%"; Hit description=1 -aminocyclopropane-1-carboxylate deaminase, putative
EELGRGWGRHIDLVSKEEYGKIGSVALADLLKKRLLEEGRKPYVIPVGGSNSLGTWGYIEVIREIEQQIQQSADAHFDDIVVACGSGGTIAGLALGSRLSSLKAKVHAFSVCDDPEYFYDYVQGLIDGLQSGLNSHDIVSIENAKGLGYAMNTAEELKFVKDIAAATGIVLDPVYSGKAAYGLLKDMSGNPAKWKGRKILFVHTGGLLGLYDKADQLSSLAGSWRRMNLEDSISRKDGTGKMF

SEQ ID NO: 69046 - protein, 217 aa, Setaria italica
  Transcript Sequence Number=SeqID_3072
  Gene Ontology: Mol. function=pyridoxal phosphate binding; Biological process=metabolic process
  Homolog annotation: Hit_ID=B2MWN0; Match level="QueryCoverage=69%, HitCoverage=35%, E-value=9e-78, Identity=88%"; Hit description=D -cysteine desulfhydrase
  Subcellular localization annotation: CTP_CleavageSite=41; ConfidenceScore=5.04e-01
MVLVGLLRPALPVTSTLPLLYLFAAVRHRSLGAAAGMAGVPATYSSATAQIGGFLSKKPYAPPSWATHLSPMPSHTFSLGHFPTPIHKWNLPNLPEGTEVWIKRDDLSGMQLSGNKVRKLEFLMADAVAQGADCIITVGGIQSNHCRATAVAAKYLNLDCYLILRTSKLLVDKDPGLVGNLLVERLVGAHIDLVSKEEYGKIGSVVSFSPYFIPSLL

SEQ ID NO: 69047 - protein, 126 aa, Setaria italica
  Transcript Sequence Number=SeqID_3073
  Gene Ontology: Mol. function=nucleic acid binding; Cellular component= nucleus; Biological process=response to stress
  Homolog annotation: Hit_ID=Q99070; Match level="QueryCoverage=62%, HitCoverage=47%, E-value=9e-35, Identity=86%"; Hit description =Glycine-rich RNA-binding protein 2
  Pfam annotation: Domain name=RRM_1; Domain location=12-82; Score =99.8; E_value=9.2e-27; Accession=PF00076.14; Description=RNA recognition motif. (a.k.a. RRM, RBD, o
KGDAAADVEYRCFVGGLAWATDSESLQLAFASYGDVVDSKVITDRETGRSRGFGFVTFSTEQSMLEAIENMNGKELDGRNITAGEEKKEDKEEDSTAAAVDKVEEKLKEMSTEVPHKHAEAVAAKN

SEQ ID NO: 69048 - protein, 241 aa, Setaria italica
  Transcript Sequence Number=SeqID_3074
  Gene Ontology: Mol. function=protein binding; Cellular component =apoplast
  Pfam annotation: Domain name=DUF538; Domain location=25-141; Score =185.2; E_value=1.8e-52; Accession=PF04398.4; Description=Protein of unknown function, DUF538
MTLTIPEDVRAKAEIYVGDAAGQEKTRLLLEETGLPSGLLPLKDIVECGYVEETGFVWLKQRRKVDHYFAKAGRHVSYGAEVSAVAEKGRLKKITGVKAKEMLIWVTLHEICVDDPPQGKLHCKAIGGLSRTFPVEAFEADGPPPVAAAAAAARAGGVVANGNGNGAAAKEEVVADKKEGAEEGKKEEPKKEAPAAAAGEEKKEDKEEDSTAAAVDKVEEKLKEMSTEVPHKHAEAVAAKN

SEQ ID NO: 69049 - protein, 195 aa, Setaria italica
  Transcript Sequence Number=SeqID_3075
  Gene Ontology: Mol. function=zinc ion binding; Cellular component =COPII vesicle coat; Biological process=ER to Golgi vesicle-mediated transport
  Homolog annotation: Hit_ID=Q013K2; Match level="QueryCoverage=78%, HitCoverage=21%, E-value=2e-13, Identity=27%"; Hit description =Vesicle coat complex COPII, subunit SEC24/subunit SFB2 (ISS)
  Pfam annotation: Domain name=Sec23_trunk; Domain location=1-144; Score=-72.2; E_value=2e-05; Accession=PF04811.7; Description =Sec23Sec24 trunk domain
DVAANTAEGQDHVLHHTRGFGVALDVLVNYLGSEYGNSFELARIFAFLSGPPNYGAGQLDTSEEQNAGKAGDADHILLQEQTSFYKNLATSAVQAGVCVDLFAITNEYTDLTSLKVLSVESGGSLFLYSSTDESTLPQDIYKMLSNPYAFGCVMRLRTSSQFKIADSYGHFFPDPQYMHVQHINCCDASATYSYD

SEQ ID NO: 69050 - protein, 428 aa, Setaria italica
  Transcript Sequence Number=SeqID_3076
  Gene Ontology: Mol. function=zinc ion binding; Cellular component =COPII vesicle coat; Biological process=ER to Golgi vesicle-mediated transport
  Homolog annotation: Hit_ID=A8IZS6; Match level="QueryCoverage=89%, HitCoverage=45%, E-value=6e-52, Identity=35%"; Hit description=COP -II coat subunit
  Pfam annotation: Domain name=Sec23_BS; Domain location=68-175; Score =2.0; E_value=0.00052; Accession=PF08033.4; Description=Sec23Sec24 beta-sandwich domain
SYIASGADKFLQKSGVCVDLFAITNEYTDLTSLKVLSVESGGSLFLYSSTDESTLPQDIYKMLSNPYAFGCVMRLRTSSQFKIADSYGHFFPDPQYMHVQHINCCDASATYSYDFEFEKDSQFSRKSSPPIIQIAFKYTVLVHNGDTSDAPNSGSRSKYSLERRLRVRTIQYNTTANIWDLYDFVDPDVVLTILVHQVILSSLSDVLETRLWLQDWLVAVIAQYNKAYKNVTSGGGTGMYDIDVNFSHCSQLQPLSRFVFAVLLSPLLQVNSELIHPDYVTFLQCLFSALEPASLRQAIWPSLISYFSPDVEAEVHQSLSRTVFTSESPIFLLDAYKDLLVYYSPTASSEIPFPPPRDCLLRSTIDRLKQERNITPRLVLIHGARDDTTEFEKYLVEDQSLDGSWLSSSTGFSSFLDEVRSKVAEHGI

SEQ ID NO: 69051 - protein, 157 aa, Setaria italica
  misc_feature (99)..(99): Xaa can be any naturally occurring amino acid
  misc_feature (109)..(109): Xaa can be any naturally occurring amino acid
  Transcript Sequence Number=SeqID_3077
  Gene Ontology: Mol. function=catalytic activity
AARCLDYFKKFKEELPWLHIRGHAIHMLDLPVLENMCCKFAKLPSGILVEKICGVSPENCGGIKVGDVISELDGVVLSSVAQFTSMFLDKMDIAVGTRXTVTLQGIIKXAFVQRPTDQTTFVSNLNAWEVSSNKCDETFQNRWALRRKKLCDGLCEH

SEQ ID NO: 69052 - protein, 78 aa, Setaria italica
  Transcript Sequence Number=SeqID_3078
LVLPLLIWLIFLVSSKYYCGVSPENCGGIKVGDVISELDGVVLSSVAQVYLCFFLMQCYTVLRVSRKKGCQFVNLDFE

SEQ ID NO: 69053 - protein, 154 aa, Setaria italica
  misc_feature (6)..(6): Xaa can be any naturally occurring amino acid
  Transcript Sequence Number=SeqID_3079
  Gene Ontology: Mol. function=electron carrier activity; Biological process=oxidation reduction
  Homolog annotation: Hit_ID=B6SSZ4; Match level="QueryCoverage=98%, HitCoverage=28%, E-value=1e-54, Identity=68%"; Hit description =Cytochrome P450 CYP709C14
THDMLXKLKLMSLFVLETLRLYSPVPLIRRRTRTAVELGGIVVPGDAILTLPIATMHRDKEVWGDDAGEFNPLRFDGGVTKTAPKNLSALLAFSSGPRSCIGQNFAMVEVRAVVAAILQRFMLTLSPEYVHAPTDVITLRPKHGLPMIVTRADA

SEQ ID NO: 69054 - protein, 83 aa, Setaria italica
  Transcript Sequence Number=SeqID_3080
HRRHTWIGYASHARYLPPRSIRRRPKHSSIALLASAAAIHLMIRSTWTPASRHTAGSCTAALGASARGRKEEREQDRGLVGKD

SEQ ID NO: 69055 - protein, 202 aa, Setaria italica
  Transcript Sequence Number=SeqID_3081
  Gene Ontology: Mol. function=protein serine/threonine kinase activity; Biological process=protein amino acid phosphorylation
  Homolog annotation: Hit_ID=Q6Z8M4; Match level="QueryCoverage=72%, HitCoverage=26%, E-value=1e-14, Identity=43%"; Hit description =Lectin-like protein kinase-like
  Pfam annotation: Domain name=Lectin_legB; Domain location=45-202; Score=-115.2; E_value=0.016; Accession=PF00139.11; Description =Legume lectin domain
MVPACGGDGRGRSPLSPLLGCLVFLLLIFAVCGAEAQLQPLPALEVASYNYTSFDEGNSRELAELVYSREARISQGALQVTPDTANLVVRDEILANKSGSVLLRRRFTLWRRVDGDKGGQPAATAVPPQPRGGTGNANGTAPRVQVVSFNTTFSINVFQLTAQRPGEGLTFVIAPSRDDPPPGSHGGYLGLTNATLQKAGPA

SEQ ID NO: 69056 - protein, 234 aa, Setaria italica
  Transcript Sequence Number=SeqID_3082
  Gene Ontology: Mol. function=tRNA (guanine-N2-)-methyltransferase activity; Biological process=tRNA processing
  Homolog annotation: Hit_ID=Q9LYL0; Match level="QueryCoverage=97%, HitCoverage=51%, E-value=4e-53, Identity=45%"; Hit description=N2, N2-dimethylguanosine tRNA methyltransferases-like protein
  Pfam annotation: Domain name=TRM; Domain location=1-234; Score= -187.8; E_value=0.00074; Accession=PF02005.8; Description=N2,N2 -dimethylguanosine tRNA methyltransferase
TDDDYRYLAQVGADFVWANDASEALRPVIVANLSRFERGSPPAEAGRRRWVVSHNDATRLLAERYLRREYFDVIDVDSFGGDAAYVRAALLALKIGGLLYLTSTDWRSARGYGSRSSLSSYGAYVRPMPYPNEVGLRMVIGGAAREAALLGFHITPVFSYFAYHGPIYRVMVKLCNGKDDGISNYGFICHCKSCGQSQTFGFDELGQISCGCTYRTDADSISVVGPLWTGPLHD

SEQ ID NO: 69057 - protein, 212 aa, Setaria italica
  Transcript Sequence Number=SeqID_3083
  Gene Ontology: Mol. function=protein binding; Biological process =protein amino acid phosphorylation
  Homolog annotation: Hit_ID=Q2R0Z9; Match level="QueryCoverage=99%, HitCoverage=84%, E-value=4e-46, Identity=41%"; Hit description =Leucine Rich Repeat family protein
  Pfam annotation: Domain name=LRR_1; Domain location=128-150; Score =4.7; E_value=39; Accession=PF00560.25; Description=Leucine Rich Repeat
  Pfam annotation: Domain name=LRR_1; Domain location=153-175; Score =13.4; E_value=0.81; Accession=PF00560.25; Description=Leucine Rich Repeat
  Pfam annotation: Domain name=LRR_1; Domain location=177-199; Score =9.2; E_value=5.4; Accession=PF00560.25; Description=Leucine Rich Repeat
  Pfam annotation: Domain name=LRR_1; Domain location=56-78; Score=7.7; E_value=10; Accession=PF00560.25; Description=Leucine Rich Repeat
  Pfam annotation: Domain name=LRR_1; Domain location=80-102; Score =12.6; E_value=1.2; Accession=PF00560.25; Description=Leucine Rich Repeat
  Pfam module annotation: Pfam domain module=LRR_1::LRR_1::LRR_1::LRR _1::LRR_1; Domain location=128-150::153-175::177-199::56-78::80-102
PASALTTWSNSSLDFCRWHGVWCSWRNGPTPRVVALRLEEEGLTGKIPACISNLTYLKHIHLPVNELSGPVPPELGNLGRLRYVNLSFNALSGVIPAELASCSGLRIIALKKNNLDGGIPTFLVNSSLIQKIDLRMNNLSGPIPPLLTTSYTSLKFLALTRNSLSGVIPSSLGNLSSLAVLIAAENQLTGGIPASLARLSNIQLLDLTYNIC

SEQ ID NO: 69058 - protein, 103 aa, Setaria italica
  Transcript Sequence Number=SeqID_3084
  Gene Ontology: Mol. function=protein kinase activity; Cellular component=integral to membrane; Biological process=protein amino acid phosphorylation
  Homolog annotation: Hit_ID=B9SLY9; Match level="QueryCoverage=98%, HitCoverage=26%, E-value=3e-36, Identity=74%"; Hit description =Receptor kinase, putative
NGGTRRFELEELLRASAEMLGKGGSGTAYKAVLDDGTVVAVKRLRDATAAAAASKKDFEHHMAVLGRLRHPNIVPLTAYYYARDEKLLVYEYMPNGSLFSLLH

SEQ ID NO: 69059 - protein, 151 aa, Setaria italica
  Transcript Sequence Number=SeqID_3085
LYSSDRLTAPARVQTALDSILYTRYITQAAGSKPPGQLGGGDRSRPAARRAGTGSGIRQAKPPKSQTNTGARARRPLGAGTTSPSVTTHPQLDRSAAASVTRPGRAAGGTRRRDSGSGPARRAAAPRRRCHPPRRTGRGVRAPGARRRPSA

SEQ ID NO: 69060 - protein, 55 aa, Setaria italica
  Transcript Sequence Number=SeqID_3086
KHNYYACFLLVSPSVSIEPSIPFNFTPVGWLLACITLAFVFPCFILKKIYSALSI

SEQ ID NO: 69061 - protein, 70 aa, Setaria italica
  Transcript Sequence Number=SeqID_3087
  Gene Ontology: Mol. function=metal ion binding
  Homolog annotation: Hit_ID=B6SIM5; Match level="QueryCoverage=65%, HitCoverage=26%, E-value=4e-15, Identity=87%"; Hit description=RING -H2 finger protein ATL2K
  Subcellular localization annotation: CTP_CleavageSite=48; ConfidenceScore=5.12e-01
RAMSSPSSWLFSDNSRYSTRARLLFMGLSFAIGILTFLLYLALWYACSSSRRRRQQQRRGVVGVAGALGI

SEQ ID NO: 69062 - protein, 257 aa, Setaria italica
  misc_feature (210)..(210): Xaa can be any naturally occurring amino acid
  misc_feature (230)..(230): Xaa can be any naturally occurring amino acid
  Transcript Sequence Number=SeqID_3088
  Gene Ontology: Mol. function=DNA binding; Cellular component=nucleus; Biological process=regulation of transcription
  Homolog annotation: Hit_ID=B9S295; Match level="QueryCoverage=98%, HitCoverage=49%, E-value=4e-54, Identity=46%"; Hit description =Myb124, putative
  Pfam annotation: Domain name=Myb_DNA-binding; Domain location=20-65; Score=40.7; E_value=5.8e-09; Accession=PF00249.23; Description=Myb -like DNA-binding domain
QEARQCRRRWYNYLNSECKKGGWSREEDMLLCEAQKLLGNRWTEIAKVVSGRTDNAVKNRFSTLCKRRAKDDEPFQENGTPCSNTNAKRVLTQTGCVTPGAASSSAPMKQMRSCSSDLKENIVPNMRLFGQEKGTHQDARQPLATLSSNNQQNVNTVKSHNLVTTTTKPLLGPEQHCVKQEGNFMNKDDPKVAILLQQADLLCSLATKFXTDDTSQSMDEAWQQLQHHLXEKKDDNGMSENSESGIASLLEELDDLM

SEQ ID NO: 69063 - protein, 177 aa, Setaria italica
  Transcript Sequence Number=SeqID_3089
  Gene Ontology: Mol. function=zinc ion binding
  Homolog annotation: Hit_ID=Q8RZI5; Match level="QueryCoverage=100%, HitCoverage=46%, E-value=2e-28, Identity=48%"; Hit description =OJ1485_B09.11 protein
MRTRSGSLYSNNGGEVAVGQKRKRSAPTLGQSAVAGECAGQGRRKRLAGGPDYLDVLPDDLVLSILSKLAASASAPSDLLSVHLTCKRLNELGGHDMVFAKASPASLAVKAAAWSEPAQRFLKRCADAGNLEACYILGMIRFYCLGSRSGGAALLARAAVGGHAAALYSLAVIQFNG

SEQ ID NO: 69064 - protein, 171 aa, Setaria italica
  misc_feature (162)..(162): Xaa can be any naturally occurring amino acid
  Transcript Sequence Number=SeqID_3090
  Homolog annotation: Hit_ID=B9RUY4; Match level="QueryCoverage=92%, HitCoverage=67%, E-value=4e-23, Identity=30%"; Hit description =Pentatricopeptide repeat-containing protein, putative
  Pfam annotation: Domain name=PPR; Domain location=55-89; Score=27.5; E_value=5.5e-05; Accession=PF01535.12; Description=PPR repeat
RRYKEYGRQIHCHAIKVINQMNVVLETELIDMYAKCGCIEISQLLFLRMNERNLISWNTLLSGYVDDGQPVATINIYRQMELAYVRPDHYTLAGLLNLCRFQGLLQYGRQIHARLIKTGSEMNVVLQTLLVHMYFKCRRWRDAHNVCTLIRERNSHVYEAFXKVYGDDYLI

SEQ ID NO: 69065 - protein, 151 aa, Setaria italica
  Transcript Sequence Number=SeqID_3091
  Gene Ontology: Mol. function=2 iron, 2 sulfur cluster binding; Cellular component=chloroplast; Biological process=electron transport chain
  Homolog annotation: Hit_ID=P27788; Match level="QueryCoverage=100%, HitCoverage=100%, E-value=4e-58, Identity=73%"; Hit description =Ferredoxin-3, chloroplastic
  Pfam annotation: Domain name=Fer2; Domain location=62-137; Score =105.6; E_value=1.7e-28; Accession=PF00111.19; Description=2Fe-2S iron-sulfur cluster binding domain
  Subcellular localization annotation: CTP_CleavageSite=52; ConfidenceScore=5.69e-01
MMASTLSTSCTLRGNFGIQVSVAAVKSPLSASFLSHPSVTSSLKTSRKLGLAAMAVYKVKLVSPEGDVHEFEAQDDTYILDSAESAGVELPYSCRAGACSTCAGKIEAGIVDQSDGSFLDDSQQAEGYLLTCVSYPRSDCVIHTHKEGELY

SEQ ID NO: 69066 - protein, 170 aa, Setaria italica
  misc_feature (46)..(46): Xaa can be any naturally occurring amino acid
  Transcript Sequence Number=SeqID_3092
QKVVMSKPPAAVKAADGRAERMEKVRDGAPDVAKKEDKKSDRHEKXKRKEKDKHKEKKKEKEAKKEKAEHNHKEHDKLKDNSINYPIDSLQLKPSAPPLAPPVDDGKSKSVVPDEKKRKSHETNGYLQNIHDMRPTKLPRPALPNNRVENGNASHVAAPLSSVKPEAVNT

SEQ ID NO: 69067 - protein, 147 aa, Setaria italica
  misc_feature (110)..(110): Xaa can be any naturally occurring amino acid
  Transcript Sequence Number=SeqID_3093
GRKAEHNHKEHDKLKDNSINYPIDSLQLKPSAPPLAPPVDDGKSKSVVPDEKKRKSHETNGYLQNIHDMRPTKLPRPALPNNRVENGNASHVAAPLSSVKPEAVNTEKGXRLHKKEEKFNGNQQAQQQPPVDPVAAYENGMPSRKSP

SEQ ID NO: 69068 - protein, 297 aa, Setaria italica
  Transcript Sequence Number=SeqID_3094
  Homolog annotation: Hit_ID=B9SYL2; Match level="QueryCoverage=57%, HitCoverage=36%, E-value=3e-16, Identity=35%"; Hit description=DNA binding protein, putative
RLPQPNISTDQKVVMSKPPAAVKAADGRAERMEKVRDGAPDVAKKEDKKSDRHEKKKRKEKDKHKEKKKEKEAKKEKAEHNHKEHDKLKDNSINYPIDSLQLKPSAPPLAPPVDDGKSKSVVPDEKKRKSHETNGYLQNIHDMRPTKLPRPALPNNRVENGNASHVAAPLSSVKPEAVNTEKAERLHKKEEKFNGNQQAQQQPPVDPVAAYENGMPSRKSPHPDCKYLSQIYSIPEAPQMTEWSEHEGEDWLFDQGSSTQLRKSDSELEADGAPQVWAQALKIDPADVIALPYVIPF

SEQ ID NO: 69069 - protein, 49 aa, Setaria italica
  Transcript Sequence Number=SeqID_3095
LSFKIKQGKKTEVEDPISWVQRQLYGNSVVEPHANCQNIENLLLTSNFL

SEQ ID NO: 69070 - protein, 151 aa, Setaria italica
  Transcript Sequence Number=SeqID_3096
  Gene Ontology: Mol. function=metal ion binding
  Pfam annotation: Domain name=zf-C3HC4; Domain location=15-49; Score =18.8; E_value=0.00073; Accession=PF00097.17; Description=Zinc finger, C3HC4 type (RING finger)
HAHSHLRPSLSSYSCLRYWSFPGAEACAHLYHSSCIVTWLELHNSCPVCRFRIPSAAGPEEAVAPSEPDSPTTRITIRFTTSTRRRSRVLYGDAAVVVPVSASPTQLAQAVTGDGAGGPANSGETVSSEWPRHPESDAVMSEAREEDGSFD

SEQ ID NO: 69071 - protein, 92 aa, Setaria italica
  Transcript Sequence Number=SeqID_3097
KFQAPTSYSNLQKVAPLFSFLLEFLILLLLLLHKPRIRISAQLFSGQFGALFRPIGGKVVCVVSTCRPFLGELNLGASCSSQYFIELDSDTR

SEQ ID NO: 69072 - protein, 75 aa, Setaria italica
  Transcript Sequence Number=SeqID_3098
KFQAPTSYSNLQKVNSGLYLGQLVGRLCVWFQPAGRFLATARNWACHHLKSVPRWVKQKDSLMGDAMGVSTLQAP

SEQ ID NO: 69073 - protein, 39 aa, Setaria italica
  Transcript Sequence Number=SeqID_3099
  Gene Ontology: Cellular component=plasma membrane; Biological process= ubiquitin-dependent protein catabolic process
  Homolog annotation: Hit_ID=B9HY64; Match level="QueryCoverage=89%, HitCoverage=8%, E-value=1e-13, Identity=97%"; Hit description=F-box family protein
FSVWKIGKDLFTMDYRYPISAFQAFAICLSSFDTKIACE

SEQ ID NO: 69074 - protein, 400 aa, Setaria italica
  Transcript Sequence Number=SeqID_3100
  Gene Ontology: Cellular component=plasma membrane; Biological process= ubiquitin-dependent protein catabolic process
  Homolog annotation: Hit_ID=B6T7S6; Match level="QueryCoverage=100%, HitCoverage=100%, E-value=0.0, Identity=88%"; Hit description=Tubby protein
  Pfam annotation: Domain name=F-box; Domain location=48-103; Score =20.5; E_value=0.0071; Accession=PF00646.25; Description=F-box domain
  Pfam annotation: Domain name=Tub; Domain location=114-394; Score =484.7; E_value=1.2e-142; Accession=PF01167.10; Description=Tub family
  Pfam module annotation: Pfam domain module=F-box::Tub; Domain location=48-103::114-394
MSFRSLIQDMRDEFGSISRHTLRSRSHRSAGNASRAAVAEPSEAMDQSCWAQLPPELLREVLVRIEASESWWPARKDVVSCAGVCRTWRGIMKEAVCVPEVSGKLTFPISLKQPGPRDGTLKCFIRRNRTTQTYYLYIGLTEALADDGKFLLAARKCRKPTCTDYLISLDKVDMSKGSSTYIGKLRSNFLGTKFTVYDAHPPYDGAVVSKSRSARVVGLNQVSPRIPAGNYPVSHISYELNVLGSRGPRRMNCVMDSIPASAVEEGGKAPTQTEFPLSSLDSFPSIPFFRSKSARIDTTSQSSTQKEDRLVLKNKSPRWHEQLQCWCLNFRGRVTVASVKNFQLVASEDNGSGNQENDKVILQFGKIGKDLFTMDYRYPISAFQAFAICLSSFDTKIACE

SEQ ID NO: 69075 - protein, 56 aa, Setaria italica
  Transcript Sequence Number=SeqID_3101
NQVYSFPHFCASPNAVSDKNAGSAGDVLEDNPVGRLKVYVYDPPQQIQQELLKKDS

SEQ ID NO: 69076 - protein, 112 aa, Setaria italica
  misc_feature (100)..(100): Xaa can be any naturally occurring amino acid
  Transcript Sequence Number=SeqID_3102
  Gene Ontology: Mol. function=transferase activity; Cellular component= membrane
  Homolog annotation: Hit_ID=B6TD30; Match level="QueryCoverage=100%, HitCoverage=26%, E-value=1e-56, Identity=93%"; Hit description =Secondary cell wall-related glycosyltransferase family 47
PLPFKSPRMMRSAIELIATNWPYWNRSEGADHFFVTPHDFGACFHYQEEKAIGRGILPLLQRATLVQTFGQKNHVCLKDGSITIPPFAPPQKCRLTLIPXDTPRSIFVYFRG

SEQ ID NO: 69077 - protein, 51 aa, Setaria italica
  Transcript Sequence Number=SeqID_3103
  Gene Ontology: Mol. function=transferase activity; Cellular component= membrane
  Homolog annotation: Hit_ID=B6TD30; Match level="QueryCoverage=98%, HitCoverage=11%, E-value=4e-21, Identity=90%"; Hit description =Secondary cell wall-related glycosyltransferase family 47
PFKSPRMMRSAIELIATNWPYWNRSEGADHFFVTPHDFGACFHYQVQSLVH

SEQ ID NO: 69078 - protein, 74 aa, Setaria italica
  Transcript Sequence Number=SeqID_3104
VKNIQKCTFGFRSALCSHGNSKAHVYYHVLKSCFFQKVLELCQMLPRLQVTRWSSGPVQDPPARALRRRCHRAG

SEQ ID NO: 69079 - protein, 125 aa, Setaria italica
  misc_feature (103)..(103): Xaa can be any naturally occurring amino acid
  Transcript Sequence Number=SeqID_3105
  Gene Ontology: Mol. function=transferase activity; Cellular component= membrane
  Homolog annotation: Hit_ID=B6TD30; Match level="QueryCoverage=79%, HitCoverage=23%, E-value=1e-47, Identity=92%"; Hit description =Secondary cell wall-related glycosyltransferase family 47
MGKGSAWALALALAVLLACSDVAVVTAQDTERIEGSAGDVLEDNPVGRLKVYVYDLPSKYNKKLLKKDPRCLNHMFAAEIFMHRFLLSSAVRTFNPEEADWFXYTPVYTTCDLTPSGLPLPFKSP

SEQ ID NO: 69080 - protein, 409 aa, Setaria italica
  Transcript Sequence Number=SeqID_3106
  Gene Ontology: Mol. function=transferase activity; Cellular component= membrane
  Homolog annotation: Hit_ID=B6TD30; Match level="QueryCoverage=96%, HitCoverage=93%, E-value=0.0, Identity=95%"; Hit description =Secondary cell wall-related glycosyltransferase family 47
  Pfam annotation: Domain name=Exostosin; Domain location=39-337; Score= 376.6; E_value=4.5e-110; Accession=PF03016.7; Description=Exostosin family
LGRLRRDYLRPRLPNVAVVTAQDTERIEGSAGDVLEDNPVGRLKVYVYDLPSKYNKKLLKKDPRCLNHMFAAEIFMHRFLLSSAVRTFNPEEADWFYTPVYTTCDLTPSGLPLPFKSPRMMRSAIQLIATNWPYWNRSEGADHFFVTPHDFGACFHYQEEKAIGRGILPLLQRATLVQTFGQKNHVCLKDGSITIPPFAPPQKMQTHLIPPDTPRSIFVYFRGLFYDTGNDPEGGYYARGARASVWENFKNNPLFDISTDHPPTYYEDMQRSVFCLCPLGWAPWSPRLVEAVVFGCIPVIIADDIVLPFADAIPWEEIGVFVAEEDVPRLDSILTSIPTDVILRKQRLLANPSMKQAMLFPQPAQPGDAFHQILNGLARKLPHGDNVFLKPGERILNWTAGPPGDLKPW

SEQ ID NO: 69081 - protein, 415 aa, Setaria italica
  Transcript Sequence Number=SeqID_3107
  Gene Ontology: Mol. function=transferase activity; Cellular component= membrane
  Homolog annotation: Hit_ID=B6TD30; Match level="QueryCoverage=95%, HitCoverage=94%, E-value=0.0, Identity=98%"; Hit description =Secondary cell wall-related glycosyltransferase family 47
  Pfam annotation: Domain name=Exostosin; Domain location=45-343; Score= 378.0; E_value=1.6e-110; Accession=PF03016.7; Description=Exostosin family
MRRRALAIAILVAALFLGAEAQAVQQGHQTERISGSAGDVLEDNPVGRLKVYVYDLPSKYNKKLLKKDPRCLNHMFAAEIFMHRFLLSSAVRTFNPEEADWFYTPVYTTCDLTPSGLPLPFKSPRMMRSAIELIATNWPYWNRSEGADHFFVTPHDFGACFHYQEEKAIGRGILPLLQRATLVQTFGQKNHVCLKDGSITIPPFAPPQKMQAHLIPPDTPRSIFVYFRGLFYDTSNDPEGGYYARGARASVWENFKNNPLFDISTDHPPTYYEDMQRSVFCLCPLGWAPWSPRLVEAVVFGCIPVIIADDIVLPFADAIPWEEIGVFVAEEDVPKLDSILTSIPTDVILRKQRLLANPSMKQAMLFPQPAQAGDAFHQILNGLARKLPHGDNVFLKPGQRVLNWTAGPPGDLKPW

SEQ ID NO: 69082 - protein, 182 aa, Setaria italica
  misc_feature (125)..(125): Xaa can be any naturally occurring amino acid
  misc_feature (140)..(140): Xaa can be any naturally occurring amino acid
  misc_feature (145)..(145): Xaa can be any naturally occurring amino acid
  Transcript Sequence Number=SeqID_3108
  Gene Ontology: Mol. function=serine-type endopeptidase inhibitor activity; Cellular component=extracellular region
  Homolog annotation: Hit_ID=B6UE14; Match level="QueryCoverage=80%, HitCoverage=83%, E-value=7e-52, Identity=65%"; Hit description =Bowman-Birk type bran trypsin inhibitor
  Pfam annotation: Domain name=Bowman-Birk_leg; Domain location=146 -168; Score=12.0; E_value=0.095; Accession=PF00228.12; Description =Bowman-Birk serine protease inhibitor family
  Pfam annotation: Domain name=Bowman-Birk_leg; Domain location=55-80; Score=9.0; E_value=0.28; Accession=PF00228.12; Description=Bowman -Birk serine protease inhibitor family
  Pfam annotation: Domain name=Bowman-Birk_leg; Domain location=82-105; Score=8.1; E_value=0.39; Accession=PF00228.12; Description=Bowman -Birk serine protease inhibitor family
  Pfam module annotation: Pfam domain module=Bowman-Birk_leg::Bowman -Birk_leg::Bowman-Birk_leg; Domain location=146-168::55-80::82-105
MKSSGAMGTTTPTVVLATMLVVALHVGLAAATHSDTDTIIRLPTGVRGDDSPWECCDFIERDPSFRPPRWQCNDVLGECSANCKKCEEALAGDGYVCRDWVTSIVQPPVCTPRPWDCCDFAVCTXGVRPHLLVRRQGGQXAPATXKDCSEVEKDPRRYRCLDRFLGYPGPKCTPWSSKEEGN

SEQ ID NO: 69083 - protein, 145 aa, Setaria italica
  misc_feature (35)..(35): Xaa can be any naturally occurring amino acid
  Transcript Sequence Number=SeqID_3109
  Homolog annotation: Hit_ID=B9S1X8; Match level="QueryCoverage=75%, HitCoverage=7%, E-value=1e-21, Identity=44%"; Hit description =Pentatricopeptide repeat-containing protein, putative
CISQGAKLLKKACLQGYKPDIKSLRSIMDAYVTTXKQEEGLSLLECIREHVSSSHDLISEFSVMLLCRKQTSIAAYEEYNRMQMFKYESFGRNCNLYEYLITCLEEAEFFSEACQVYCDMQFIGIEASKNIYESMISTYCKLGFP

SEQ ID NO: 69084 - protein, 77 aa, Setaria italica
  Transcript Sequence Number=SeqID_3110
  Gene Ontology: Mol. function=microtubule motor activity; Cellular component=microtubule associated complex; Biological process =microtubule-based movement
  Homolog annotation: Hit_ID=B6U192; Match level="QueryCoverage=100%, HitCoverage=10%, E-value=1e-24, Identity=75%"; Hit description=ATP binding protein
STPSSAQRKVKRSILAGHCFNTPDSKRPAADNAKVGELQRKVKTLEAEIEKMKKEHILQLKQKDEFIRGLINRKGPN

SEQ ID NO: 69085 - protein, 134 aa, Setaria italica
  Transcript Sequence Number=SeqID_3111
  Gene Ontology: Mol. function=phosphopantetheine binding; Cellular component=chloroplast; Biological process=fatty acid biosynthetic process
  Homolog annotation: Hit_ID=B6TNW4; Match level="QueryCoverage=99%, HitCoverage=99%, E-value=5e-62, Identity=90%"; Hit description=Acyl carrier protein
  Pfam annotation: Domain name=PP-binding; Domain location=56-123; Score=63.6; E_value=7.3e-16; Accession=PF00550.17; Description =Phosphopantetheine attachment site
  Subcellular localization annotation: CTP_CleavageSite=47; ConfidenceScore=5.41e-01
MASLAGSALSFARPVKAINIKSVSFSGLRKDNVAFRLQPVPQRFAVCCPAKKETVDQVCDIVKKQLALADDTEVSGSSKFQDLGADSLDTVEIVMGLEEAFGISVEESSAQSIATVEDAANLIDDLVATGAKSS

SEQ ID NO: 69086 - protein, 131 aa, Setaria italica
  Transcript Sequence Number=SeqID_3112
RPRRRPLPPPEWSGNSPGLGLTSLADHMVPSESQIVVEKNPSTSVDAKEQIITLVSSKDKEVSTTIVRGASSLESPKGAQEEASFMGKGGEQQFGYQPNVYGSQPQTLFSGGYLNHLGQWEEYPYVASVER

SEQ ID NO: 69087 - protein, 152 aa, Setaria italica
  Transcript Sequence Number=SeqID_3113
  Gene Ontology: Mol. function=aspartic-type endopeptidase activity; Cellular component=chromatin; Biological process=RNA-dependent DNA replication
  Homolog annotation: Hit_ID=Q8SA91; Match level="QueryCoverage=93%, HitCoverage=5%, E-value=6e-60, Identity=70%"; Hit description =Putative gag-pol polyprotein
  Pfam annotation: Domain name=rve; Domain location=1-130; Score=58.7; E_value=2.3e-14; Accession=PF00665.18; Description=Integrase core domain
ILVVVDRFTKYGHFIPLAHPFTAAMIARVFFDNIYKLHGLPDSIVSDRDKIFTSHFWKELFKLVKVSLNMSTSYHPQTDGQTERVNQCLETFLRCYVHACPTKWLDWLSHAEFWYNTSSHSALGCSPFEALYGYTPKTLGILPSSHQHTPAR

SEQ ID NO: 69088 - protein, 51 aa, Setaria italica
  Transcript Sequence Number=SeqID_3114
CLFLISFTSILFLPLLFLLQSMFSFIILGLALSSMVLLRKAQKTVFPKGSD

SEQ ID NO: 69089 - protein, 95 aa, Setaria italica
  Transcript Sequence Number=SeqID_3115
  Gene Ontology: Mol. function=nucleic acid binding; Cellular component= nucleus; Biological process=mRNA processing
  Homolog annotation: Hit_ID=Q7XWP1; Match level="QueryCoverage=96%, HitCoverage=6%, E-value=5e-37, Identity=78%"; Hit description =Probable cleavage and polyadenylation specificity factor subunit 1
TFVHGYIEPVLVILHEQEPTCAGRISSKNQTCMISAFSISMSLKQHPMIWSAAKLPHDAYQLLAVPPPISGILVICANIMHVWFFDEQEPTCAGR

SEQ ID NO: 69090 - protein, 262 aa, Setaria italica
  misc_feature (58)..(58): Xaa can be any naturally occurring amino acid
  misc_feature (153)..(153): Xaa can be any naturally occurring amino acid
  misc_feature (164)..(164): Xaa can be any naturally occurring amino acid
  Transcript Sequence Number=SeqID_3116
  Gene Ontology: Mol. function=nucleic acid binding; Cellular component= nucleus; Biological process=mRNA processing
  Homolog annotation: Hit_ID=Q7XWP1; Match level="QueryCoverage=89%, HitCoverage=16%, E-value=1e-113, Identity=84%"; Hit description =Probable cleavage and polyadenylation specificity factor subunit 1
  Pfam annotation: Domain name=CPSF_A; Domain location=1-217; Score= -4.2; E_value=1.9e-08; Accession=PF03178.7; Description=CPSF A subunit region
VLLLKVVVKGCLVILVLFVLLLQGHLLIASGPKITLNKWTGSELTAVAFYDAPLHVVXLNIVKNFVLFGDIHKSIYFLSWKEQGSQLSLLAKDFGSLDSFATEFLIDGSTLSLVVSDSDKNVQIFYYAPKMVESWKGQKLLSRYQSLCGQHLXLKNFATLAPTXKLCSGKANRFALVFGTLDGGIGCIAPVDELTFRRLQSLQRKLVDAVPHVCGLNPRSFRHFKSNGKAHRPGPDNIIDFELLSHYEMMSLEEQLDIAQQI

SEQ ID NO: 69091 - protein, 84 aa, Setaria italica
  Transcript Sequence Number=SeqID_3117
LLQDTIFECFLALISLWALGVWTCSNPMPRLKKAWFEKLGSRSIPKPEEWGAGPGHTDYAGLPMNSESNNSSTLVGFTGTWISL

SEQ ID NO: 69092 - protein, 189 aa, Setaria italica
  misc_feature (19)..(19): Xaa can be any naturally occurring amino acid
  misc_feature (30)..(30): Xaa can be any naturally occurring amino acid
  misc_feature (68)..(68): Xaa can be any naturally occurring amino acid
  Transcript Sequence Number=SeqID_3118
  Gene Ontology: Mol. function=nucleic acid binding; Cellular component= nucleus; Biological process=mRNA processing
  Homolog annotation: Hit_ID=Q7XWP1; Match level="QueryCoverage=82%, HitCoverage=10%, E-value=3e-49, Identity=62%"; Hit description =Probable cleavage and polyadenylation specificity factor subunit 1
ELAMHRWSGLFSHPFLLRXLIRNRIGNNFXCYHAYCYEGSESNAQCAPLSPHGSSDLDNASDSRLKNXRFRRVSIDVSSRDDISSFARPRITIFNNVGGYEGLFLSGPRPTWVFVCRQRFRVHPQLCDGPIVAFTVLHNVNCCHGLIYVTSQVKCCLDMHFCKHSTPSVSRCPPYTLDQGSISSKKKAM

SEQ ID NO: 69093 - protein, 92 aa, Setaria italica
  Transcript Sequence Number=SeqID_3119
ADCLSLGYREIGITYNLDYSSIFLLLNSYILQLCDGPIVAFTVTPNKNCSHGLIYVTSQVKCCLDMHFVNIVLPLFHDVHHIHWIKEVLVQR

SEQ ID NO: 69094 - protein, 555 aa, Setaria italica
  misc_feature (536)..(536): Xaa can be any naturally occurring amino acid
  Transcript Sequence Number=SeqID_3120
  Gene Ontology: Mol. function=nucleic acid binding; Cellular component= nucleus; Biological process=mRNA processing
  Homolog annotation: Hit_ID=Q7XWP1; Match level="QueryCoverage=99%, HitCoverage=38%, E-value=0.0, Identity=74%"; Hit description =Probable cleavage and polyadenylation specificity factor subunit 1
TVLQTGDDLGEVTETVDYNVQTNTITAGNLFGRRRVIQVYAKGARVLDGSFMTQELTFTMQTSESSLSSEPLAAASASIADPYVLLKMVDGTIRLLIGDHSTCTISFNAPATFASPSERISSCTLYHDRGPEPWLRKARTDAWLSAGIGEATDGNDSSSHDQSDIYCIICYESGKLEIFEVPSFKCVFSVENFVSGPAILFDDVSHTSTKDAVIVVPDATKVSVKKEESNSIKIVELAMHRWSGLFSHPFLFGLLNDGTFLCYHAYCYEGSESNAQCAPLSPHGSSDLDNASDSRLKNLRFRRVSIDVSSRDDISSFARPRITIFNNVGGYEGLFLSGPRPTWVFVCRQRFRVHPQLCDGPIVAFTVLHNVNCCHGLIYVTSQGFLKICQLPSAYNYDNYWPVQKVPLHATPHQVTYYAEQSLYPLIVSVPVVRPLNQVLSSMADQELGLHTENDVTVGDDLQKVYTVDEFEVRIMELEKASGHWETRVTIPMQPFENALTVRIVTLQNTTTKENETLMAIGTAYVQGEDVAAKGXLLFSFSKSENSQNLVREVY

SEQ ID NO: 69095 - protein, 586 aa, Setaria italica
  misc_feature (77)..(77): Xaa can be any naturally occurring amino acid
  misc_feature (93)..(93): Xaa can be any naturally occurring amino acid
  misc_feature (98)..(98): Xaa can be any naturally occurring amino acid
  misc_feature (106)..(106): Xaa can be any naturally occurring amino acid
  Transcript Sequence Number=SeqID_3121
  Gene Ontology: Mol. function=nucleic acid binding; Cellular component= nucleus; Biological process=mRNA processing
  Homolog annotation: Hit_ID=Q7XWP1; Match level="QueryCoverage=99%, HitCoverage=39%, E-value=0.0, Identity=80%"; Hit description =Probable cleavage and polyadenylation specificity factor subunit 1
ANVLEVYAVRTDAATGAEDGGSSSSTGAVLDGISGARLELVCHYRLHGNIESMAVLSDGTENTRDSITLAFKDAKLXCLEFDDSISGLRTRLXIPDLXSSMHCFEXPDWLHLKRGRESFAWGPVIKADPQGRCGAALVYGLQMVILQAAQVGQSLVGEDEPTRVLSSAAVRIDSSYVINLRLLEINHIKDFTFVHGYIEPVLVILHEQEPTCAGRISSKNQTCMISAFSISMSLKQHPMIWSAAKLPHDAYQLLAVPPPISGILVICANSIHYHSQSTSCSLALNSFSSQPDGSPETPKTSFCVELDAAKATWLSHDIVMFSSKNGEILLLTVVYDGRAVQRLDLMKSKASILSSGATTLGSSFFFLGSRLADSLLVQFSCGVPTSILPDLTDESADIEGDLPFAKRLKRIPSDVLQDVNSVEELSFHNNTVPDSLDSAQKISFVVRDALINVGPLKDFAYSLRTNSDPDAAGIAKQSNYELVCCSGHGKNGTLSALQQSIRPDLITEVELPSCTGIWTVYYKSSRGITTEDNEYHAYLIISLENRTMVLQTGDDLGEVTETVDYNVQTNTITAGNLFGRRTLFYY

SEQ ID NO: 69096 - protein, 360 aa, Setaria italica
  Transcript Sequence Number=SeqID_3122
  Gene Ontology: Mol. function=nucleic acid binding; Cellular component= nucleus; Biological process=mRNA processing
  Homolog annotation: Hit_ID=Q7XWP1; Match level="QueryCoverage=97%, HitCoverage=24%, E-value=0.0, Identity=91%"; Hit description =Probable cleavage and polyadenylation specificity factor subunit 1
  Pfam annotation: Domain name=CPSF_A; Domain location=7-294; Score =188.9; E_value=1.4e-53; Accession=PF03178.7; Description=CPSF A subunit region
HSFNILIGKASGHWETRVTIPMQPFENALTVRIVTLQNTTTKENETLMAIGTAYVQGEDVAAKGRVLLFSFSKSENSQNLVREVYSKESKGAVSAVASLQGHLLIASGPKITLNKWTGSELTAVAFYDAPLHVVSLNIVKNFVLFGDIHKSIYFLSWKEQGSQLSLLAKDFGSLDSFATEFLIDGSTLSLVVSDSDKNVQIFYYAPKMVESWKGQKLLSRAEFHVGANVAKFLRLQMLPTQGLVSEKTNRFALVFGTLDGGIGCIAPVDELTFRRLQSLQRKLVDAVPHVCGLNPRSFRHFKSNGKAHRPGPDNIIDFELLSHYEMMSLEEQLDIAQQIGTTRSQILSNFSDFSLGTSFL

SEQ ID NO: 69097 - protein, 87 aa, Setaria italica
  Transcript Sequence Number=SeqID_3123
  Subcellular localization annotation: CTP_CleavageSite=24; ConfidenceScore=5.50e-01
RAKTGGVGDPRAKPPRRVPGDRRRAARTGSAAPAPRSQTPPVFITPPPAALLRQLDSTTTPRISTSPRRAAPPPPSSRFRLASASGR

SEQ ID NO: 69098 - protein, 147 aa, Setaria italica
  Transcript Sequence Number=SeqID_3124
  Gene Ontology: Mol. function=metal ion binding
  Homolog annotation: Hit_ID=B6TYQ5; Match level="QueryCoverage=45%, HitCoverage=33%, E-value=4e-28, Identity=91%"; Hit description =Protein binding protein
  Pfam annotation: Domain name=zf-C3HC4; Domain location=95-136; Score =24.3; E_value=0.00017; Accession=PF00097.17; Description=Zinc finger, C3HC4 type (RING finger)
MTKPNSLPDDLKVSAILLSMYQRRWSRLIGEREGRATSERRSRRREQQQENAERGVLATAEVWPIPPAPTSAADGGHHHRRRAELTRTLSKVEVCAVCLDEVRERRQRVTRLPCSHKYHSDCVLPWLAIQPDCPCCRALVPAADTLA

SEQ ID NO: 69099 - protein, 119 aa, Setaria italica
  Transcript Sequence Number=SeqID_3125
RGAIRGRWIHPSQQEAEGKIRKRKREFFADGIKMKGGTNKLPFFCHITETMFFFLPPFSPPLAAGGGSRFRFHISERRVPSLRRDGAGGRRWHGRRRRGGGGGGRGGRGRRVAVAVGAA

SEQ ID NO: 69100 - protein, 50 aa, Setaria italica
  Transcript Sequence Number=SeqID_3126
  Gene Ontology: Mol. function=phosphopyruvate hydratase activity; Cellular component=phosphopyruvate hydratase complex; Biological process=glycolysis
  Homolog annotation: Hit_ID=Q8LMD5; Match level="QueryCoverage=72%, HitCoverage=11%, E-value=1e-12, Identity=97%"; Hit description =Enolase (Fragment)
YEAVKMSKHAGWGVMTSHRSGETEDTFIADLAVGLATVSQDLCISSIKRC

SEQ ID NO: 69101 - protein, 44 aa, Setaria italica
  Transcript Sequence Number=SeqID_3127
  Gene Ontology: Mol. function=phosphopyruvate hydratase activity; Cellular component=phosphopyruvate hydratase complex; Biological process=glycolysis
  Homolog annotation: Hit_ID=A6N0G6; Match level="QueryCoverage=77%, HitCoverage=14%, E-value=5e-10, Identity=88%"; Hit description =Enolase (Fragment)
MCPQSHHSCDWSSHPSHRSGETEDTFIADLAVGLATGQIKTGAP

SEQ ID NO: 69102 - protein, 124 aa, Setaria italica
  misc_feature (84)..(84): Xaa can be any naturally occurring amino acid
  Transcript Sequence Number=SeqID_3128
  Gene Ontology: Mol. function=phosphopyruvate hydratase activity; Cellular component=phosphopyruvate hydratase complex; Biological process=glycolysis
  Homolog annotation: Hit_ID=Q42971; Match level="QueryCoverage=100%, HitCoverage=23%, E-value=2e-46, Identity=76%"; Hit description =Enolase
  Pfam annotation: Domain name=Enolase_N; Domain location=1-118; Score =89.6; E_value=1.1e-23; Accession=PF03952.8; Description=Enolase, N -terminal domain
STGVYEALELRDGGSDYLGKGVSKAVNNVNSIIGPALVGKDPTAQTEIDNFMVQQLDGKDPTAQTEIDNFMVQQLDGTKNEWGXWCKQKLGANAILAVSLAVCKAGASIKKIPLYQHIANLAGN

SEQ ID NO: 69103 - protein, 242 aa, Setaria italica
  misc_feature (36)..(36): Xaa can be any naturally occurring amino acid
  misc_feature (114)..(114): Xaa can be any naturally occurring amino acid
  Transcript Sequence Number=SeqID_3129
  Gene Ontology: Mol. function=phosphopyruvate hydratase activity; Cellular component=phosphopyruvate hydratase complex; Biological process=glycolysis
  Homolog annotation: Hit_ID=Q42971; Match level="QueryCoverage=100%, HitCoverage=53%, E-value=1e-128, Identity=93%"; Hit description =Enolase
  Pfam annotation: Domain name=Enolase_C; Domain location=1-239; Score =457.6; E_value=1.9e-134; Accession=PF00113.14; Description=Enolase, C-terminal TIM barrel domain
GRTPTNVGDEGGFAPNIQENKEGLELLKTAIEKAGXQPEKVSTIGMDVAASEFYNDKDKTYDLNFKEENNDGSQKISGDSLKNVYKSFVSEYPIVSIEDPFDQDDWVHYAKMTXRIGEQVQIVGDDLLVTNPTRVAKAIKEKSCNALLLKVNQIGSVTESIEAVKMSKHAGWGVMTSHRSGETEDTFIADLAVGLATGQIKTGAPCRSERLAKYNQLLRIEEELGAAAVYAGAKFRAPVEPY

SEQ ID NO: 69104 - protein, 287 aa, Setaria italica
  misc_feature (33)..(33): Xaa can be any naturally occurring amino acid
  misc_feature (69)..(69): Xaa can be any naturally occurring amino acid
  misc_feature (167)..(167): Xaa can be any naturally occurring amino acid
  misc_feature (183)..(183): Xaa can be any naturally occurring amino acid
  Transcript Sequence Number=SeqID_3130
  Gene Ontology: Mol. function=phosphopyruvate hydratase activity; Cellular component=phosphopyruvate hydratase complex; Biological process=glycolysis
  Homolog annotation: Hit_ID=Q42971; Match level="QueryCoverage=98%, HitCoverage=62%, E-value=1e-154, Identity=96%"; Hit description =Enolase
  Pfam annotation: Domain name=Enolase_C; Domain location=5-284; Score =609.4; E_value=3.7e-180; Accession=PF00113.14; Description=Enolase, C-terminal TIM barrel domain
FSCWNKLAMQEFMILPTGAASFKEAMKMGVEVXYHNLKSVIKKKYGQDATNVGDEGGFAPNIQENKVRXLELLKTAIEKAGYTGKVVIGMDVAASEFYNDKDKTYDLNFKEENNDGSQKISGDSLKNVYKSFVSEYPIVSIEDPFDQDDWVHYAKMTEEIGEQVQIXGDDLLVTNPTRVAKAXIKEKSCNALLLKVNQIGSVTESIEAVKMSKHAGWGVMTSHRSGETEDTFIADLAVGLATGQIKTGAPCRSERLAKYNQLLRIEEELGAAAVYAGAKFRAPVEPY

SEQ ID NO: 69105 - protein, 115 aa, Setaria italica
  misc_feature (108)..(108): Xaa can be any naturally occurring amino acid
  Transcript Sequence Number=SeqID_3131
  Gene Ontology: Mol. function=peptidyl-prolyl cis-trans isomerase activity; Biological process=protein folding
MESTRRASRRLARTGSACSTAGRLVISELARQASNAEEVMVVEATENSSEAAANKQLQDDQRMAANEIASLKLMVSALEDRACSMEAQFNEYCDMKEQESAYQKMHDXCALGIEA

SEQ ID NO: 69106 - protein, 62 aa, Setaria italica
  Transcript Sequence Number=SeqID_3132
  Gene Ontology: Mol. function=transferase activity, transferring groups other than amino-acyl groups; Cellular component=membrane; Biological process=fatty acid biosynthetic process
  Homolog annotation: Hit_ID=B6CEY0; Match level="QueryCoverage=100%, HitCoverage=19%, E-value=2e-20, Identity=77%"; Hit description=3 -ketoacyl-CoA synthase II (Fragment)
  Pfam annotation: Domain name=FAE1_CUT1_RppA; Domain location=1-62; Score=-169.9; E_value=8e-05; Accession=PF08392.4; Description =FAE1Type III polyketide synthase-like
MLLPNCLFRMGAAAILLSNRRREARRAKYRLVHVVRTHKGADDRAYRCVYQEEDDQGFSGIS

SEQ ID NO: 69107 - protein, 81 aa, Setaria italica
  misc_feature (7)..(7): Xaa can be any naturally occurring amino acid
  Transcript Sequence Number=SeqID_3133
  Gene Ontology: Mol. function=transferase activity, transferring groups other than amino-acyl groups; Cellular component=membrane; Biological process=fatty acid biosynthetic process
  Homolog annotation: Hit_ID=A9L9N1; Match level="QueryCoverage=100%, HitCoverage=17%, E-value=1e-37, Identity=87%"; Hit description =Putative very long chain fatty acid condensing enzyme CUT1;1
  Pfam annotation: Domain name=ACP_syn_III_C; Domain location=3-53; Score=-27.3; E_value=0.011; Accession=PF08541.2; Description=3 -Oxoacyl-[acyl-carrier-protein (ACP)
SRMTLHXFGNTSSSSLWYELAYIEAKGRMRRGDRVWMIGFGSGFKCNSAAWECIRPAANADGPWANCIHRYPVHIPDVLKH

SEQ ID NO: 69108 - protein, 136 aa, Setaria italica
  Transcript Sequence Number=SeqID_3134
  Gene Ontology: Mol. function=transferase activity, transferring groups other than amino-acyl groups; Cellular component=membrane; Biological process=fatty acid biosynthetic process
  Homolog annotation: Hit_ID=B9H9R8; Match level="QueryCoverage=100%, HitCoverage=26%, E-value=7e-61, Identity=76%"; Hit description=Beta -ketoacyl-coa synthase family protein
  Pfam annotation: Domain name=FAE1_CUT1_RppA; Domain location=1-136; Score=124.9; E_value=2.6e-34; Accession=PF08392.4; Description =FAE1Type III polyketide synthase-like
FACYKPDDERKCSRARFMNCTEKLGTFTPENIEFQRKIIERSGLGEDTYLPEAVLNIPPNPSMANARREAEMVMFGALDELFAKTGVRPKDIGVLVVNCSLFNPTPSLSAMVINHYKLRGNIASYNLGGMGCSAGL

SEQ ID NO: 69109 - protein, 86 aa, Setaria italica
  Transcript Sequence Number=SeqID_3135
  Gene Ontology: Mol. function=transferase activity, transferring groups other than amino-acyl groups; Cellular component=membrane; Biological process=fatty acid biosynthetic process
  Homolog annotation: Hit_ID=Q5XEP9; Match level="QueryCoverage=100%, HitCoverage=16%, E-value=8e-37, Identity=75%"; Hit description=3 -ketoacyl-CoA synthase 17
  Pfam annotation: Domain name=ACP_syn_III_C; Domain location=1-55; Score=-26.9; E_value=0.01; Accession=PF08541.2; Description=3 -Oxoacyl-[acyl-carrier-protein (ACP)
EPSRMTLHRFGNTSSSSLWYELAYTEAKGRIKKGDRTWQIAFGSGFKCNSAVWKALRSVNPAKEKGFRNPWMEDVDRYPVPVPKVS

SEQ ID NO: 69110 - protein, 59 aa, Setaria italica
  Transcript Sequence Number=SeqID_3136
  Gene Ontology: Mol. function=transferase activity, transferring groups other than amino-acyl groups; Cellular component=membrane; Biological process=fatty acid biosynthetic process
  Homolog annotation: Hit_ID=B6TE12; Match level="QueryCoverage=86%, HitCoverage=8%, E-value=1e-13, Identity=72%"; Hit description =Fiddlehead-like protein
CNKVWGEATYDLATVLAFLAVLAFTISVYIMSRPRPVYLIDFACYKPADELKVRHPASA

SEQ ID NO: 69111 - protein, 180 aa, Setaria italica
  Transcript Sequence Number=SeqID_3137
  Gene Ontology: Mol. function=transferase activity, transferring groups other than amino-acyl groups; Cellular component=membrane; Biological process=fatty acid biosynthetic process
  Homolog annotation: Hit_ID=B6U281; Match level="QueryCoverage=100%, HitCoverage=34%, E-value=2e-98, Identity=95%"; Hit description=Fatty acid elongase
  Pfam annotation: Domain name=FAE1_CUT1_RppA; Domain location=1-180; Score=302.5; E_value=9.1e-88; Accession=PF08392.4; Description =FAE1Type III polyketide synthase-like
PVYLVDFACYKPGPELRCSRDTFMRCSRLTGSFTDASLEFQRKILELSGLGEDTYLPPAVTRVPPNPSMDAARAEAREVMFGAVDELLAKTGVRPKDIGVLIVNCSLFNPTPSLSAMVVNHYKLRGNVVSYNLGGMGCSAGLLSVDLAKDLLQTHPGSYALVISTENITLNWYSGNDRSK

SEQ ID NO: 69112 - protein, 190 aa, Setaria italica
  Transcript Sequence Number=SeqID_3138
  Gene Ontology: Mol. function=transferase activity, transferring groups other than amino-acyl groups; Cellular component=membrane; Biological process=fatty acid biosynthetic process
  Homolog annotation: Hit_ID=B6U281; Match level="QueryCoverage=100%, HitCoverage=36%, E-value=5e-99, Identity=96%"; Hit description=Fatty acid elongase
  Pfam annotation: Domain name=ACP_syn_III_C; Domain location=85-169; Score=4.6; E_value=5.5e-06; Accession=PF08541.2; Description=3 -Oxoacyl-[acyl-carrier-protein (ACP)
  Pfam annotation: Domain name=Chal_sti_synt_C; Domain location=27-171; Score=13.4; E_value=0.00015; Accession=PF02797.7; Description =Chalcone and stilbene synthases, C-te
  Pfam annotation: Domain name=FAE1_CUT1_RppA; Domain location=1-70; Score=-132.6; E_value=4.4e-07; Accession=PF08392.4; Description =FAE1Type III polyketide synthase-like
  Pfam module annotation: Pfam domain module=ACP_syn_III_C::Chal_sti _synt_C::FAE1_CUT1_RppA; Domain location=85-169::27-171::1-70
VRTHKGADDRCFGCVTQEEDGEGNLGVSLSRDLMAVAGDALKTNITTLGPLVLPVSEQLLFMATLAARKLLKMKKVKPYIPDFKLAFEHFCIHAGGRAVLDELESNLALTDWHMEPSRMTLHRFGNTSSSSLWYELAYSEAKGRIRRRDRVWQIAFGSGFKCNSAVWRALRSVNPAEETNPWMDEIDRFP

SEQ ID NO: 69113 - protein, 92 aa, Setaria italica
  Transcript Sequence Number=SeqID_3139
LLCRSRPKVALCSGVIFDHPNGIQRKEHKRKQGKPPIIFFRNGRGKKIPYASVTRNYDGAFYLKKKEKEKEPTEGTWDCRWGTAALHSSQVS

SEQ ID NO: 69114 - protein, 248 aa, Setaria italica
  misc_feature (23)..(23): Xaa can be any naturally occurring amino acid
  misc_feature (34)..(34): Xaa can be any naturally occurring amino acid
  misc_feature (241)..(241): Xaa can be any naturally occurring amino acid
  Transcript Sequence Number=SeqID_3140
  Gene Ontology: Mol. function=transferase activity, transferring groups other than amino-acyl groups; Cellular component=membrane; Biological process=fatty acid biosynthetic process
  Homolog annotation: Hit_ID=B6UF74; Match level="QueryCoverage=97%, HitCoverage=68%, E-value=1e-119, Identity=91%"; Hit description =Senescence-associated protein 15
  Pfam annotation: Domain name=ACP_syn_III; Domain location=46-134; Score=-15.1; E_value=0.03; Accession=PF08545.2; Description=3 -Oxoacyl-[acyl-carrier-protein (ACP)]
  Pfam annotation: Domain name=FAE1_CUT1_RppA; Domain location=1-198; Score=320.5; E_value=3.4e-93; Accession=PF08392.4; Description =FAE1Type III polyketide synthase-like
  Pfam module annotation: Pfam domain module=ACP_syn_III::FAE1_CUT1 _RppA; Domain location=46-134::1-198
RCRGHGSRPRRDVRVLIVNCSLXPTPSLASMVVXTGYRMREDVKSFNLGGMGCSAGLIAVDLARDMLQANPGCYAVVVSTENITLNWYFGNDRSMLLSNCIFRMGGAAGLLSNRAADAGRAKYRLLHTVRTHKGAADECYGCVYQREDGTGRVGVSLARELMAVAGDALKTNITTLGPLVLPLSEQLKFLRSLVLQRLLRISRGGGARPYIPDFRRAFEHFCVHAGGRAVLEEVQRSLGLXRDADMEP

SEQ ID NO: 69115 - protein, 183 aa, Setaria italica
  Transcript Sequence Number=SeqID_3141
  Gene Ontology: Mol. function=transferase activity, transferring groups other than amino-acyl groups; Cellular component=membrane; Biological process=fatty acid biosynthetic process
  Homolog annotation: Hit_ID=B9RBF7; Match level="QueryCoverage=94%, HitCoverage=34%, E-value=1e-90, Identity=89%"; Hit description =Acyltransferase, putative
  Pfam annotation: Domain name=ACP_syn_III_C; Domain location=65-149; Score=15.4; E_value=4.2e-07; Accession=PF08541.2; Description=3 -Oxoacyl-[acyl-carrier-protein (ACP)
  Pfam annotation: Domain name=Chal_sti_synt_C; Domain location=8-151; Score=23.8; E_value=2.1e-05; Accession=PF02797.7; Description =Chalcone and stilbene synthases, C-te
  Pfam annotation: Domain name=FAE1_CUT1_RppA; Domain location=1-51; Score=-214.3; E_value=0.039; Accession=PF08392.4; Description =FAE1Type III polyketide synthase-like
  Pfam module annotation: Pfam domain module=ACP_syn_III_C::Chal_sti _synt_C::FAE1_CUT1_RppA; Domain location=65-149::8-151::1-51
DDEGKTGVSLSKDLMAIAGGALKTNITTLGPLVLPVSEQLLFFATLVAKKLFNAKIKPYIPDFKLAFEHFCIHAGGRAVIDELEKNLQLSPSHVEASRMTLHRFGNTSSSSIWYELAYMEAKGRVRRGNRIWQIAFGSGFKCNSAVWHALRNVKPSPNSPWDDCIDRYPVELVDGVPTHNAQQ

SEQ ID NO: 69116 - protein, 472 aa, Setaria italica
  Transcript Sequence Number=SeqID_3142
  Gene Ontology: Mol. function=transferase activity, transferring groups other than amino-acyl groups; Cellular component=membrane; Biological process=fatty acid biosynthetic process
  Homolog annotation: Hit_ID=B6T9X3; Match level="QueryCoverage=91%, HitCoverage=87%, E-value=0.0, Identity=89%"; Hit description=Fatty acid elongase
  Pfam annotation: Domain name=ACP_syn_III_C; Domain location=338-422; Score=11.4; E_value=1.1e-06; Accession=PF08541.2; Description=3 -Oxoacyl-[acyl-carrier-protein (ACP)
  Pfam annotation: Domain name=Chal_sti_synt_C; Domain location=281 -424; Score=11.9; E_value=0.0002; Accession=PF02797.7; Description =Chalcone and stilbene synthases, C-te
  Pfam annotation: Domain name=Chal_sti_synt_N; Domain location=19-241; Score=-78.2; E_value=0.018; Accession=PF00195.11; Description =Chalcone and stilbene synthases, N-te
  Pfam annotation: Domain name=FAE1_CUT1_RppA; Domain location=35-324; Score=637.0; E_value=1.9e-188; Accession=PF08392.4; Description =FAE1Type III polyketide synthase-like
  Pfam module annotation: Pfam domain module=ACP_syn_III_C::Chal_sti _synt_C::Chal_sti_synt_N::FAE1_CUT1_RppA; Domain location=338 -422::281-424::19-241::35-324
KLLAHGLLRELAALGVSAPALAVACWAAAVAAWAYAVSRPRPVYLVELSGYVAGEHHEASRAKTIAHFGRCGRFSDESMAFQKRMLERSGLGERTHFPSSLVSVPVDMCLRTAREESHAVIFGVVEDVLRRAAVSAADVGVLIFNSSLLSTTPSFTSLIANRYGMRHDVVSHNLSGMGCSAGIIAIDLAKRLLQVHPDTYALVVSTENITLNAYMGNNRPMLVTNTLFRVGGAAILLSNRAADRRRGKYQLIHTVRTHRGAHDQSFGCVTQEEDDAGCVGVSLSKELMVVAGEALRTNITTLGPLVLPMSEQLRFLATVVLNRVFRARVRAYLPDFKLAFEHFCIHAGGRAVLDTIEKNLELSAWHMEPSRMTLCRFGNTSSSSLWYELAYSEAKGRIRKGDRVWQIAFGSGFKCNSAVWKALRTVEGGEEGNPWTPELDVLPIQVPKVSPIDETAYTFPDGVTYKVAAVAG

SEQ ID NO: 69117 - protein, 548 aa, Setaria italica
  misc_feature (480)..(480): Xaa can be any naturally occurring amino acid
  misc_feature (532)..(532): Xaa can be any naturally occurring amino acid
  Transcript Sequence Number=SeqID_3143
  Gene Ontology: Mol. function=transferase activity, transferring groups other than amino-acyl groups; Cellular component=membrane; Biological process=fatty acid biosynthetic process
  Homolog annotation: Hit_ID=O81658; Match level="QueryCoverage=97%, HitCoverage=100%, E-value=0.0, Identity=69%"; Hit description =Senescence-associated protein 15
  Pfam annotation: Domain name=ACP_syn_III_C; Domain location=420-507; Score=-10.2; E_value=0.00019; Accession=PF08541.2; Description=3 -Oxoacyl-[acyl-carrier-protein (ACP)
  Pfam annotation: Domain name=Chal_sti_synt_C; Domain location=364 -509; Score=13.2; E_value=0.00016; Accession=PF02797.7; Description =Chalcone and stilbene synthases, C-te
  Pfam annotation: Domain name=FAE1_CUT1_RppA; Domain location=116-407; Score=693.1; E_value=2.3e-205; Accession=PF08392.4; Description =FAE1Type III polyketide synthase-like
  Pfam module annotation: Pfam domain module=ACP_syn_III_C::Chal_sti _synt_C::FAE1_CUT1_RppA; Domain location=420-507::364-509::116-407
MESAPAAVMERERLTAEMAFRGPDEGRGDGGGEPAPSIVIKIRRRLPDFARNIKLKYVKLGIRHGGSPTSVLPMLCVPALAAAAYSFVRLDVIYYSIDLLTCVAWLGTALLLLTVYYFKRPRPVYLVEFACYKPEDQHKISKAGFLEMTESTGCFNEAALDFQTKITNRSALGDETYLPPGVQARPPRLNMAEARMEAEAVMFGCLDALFKSTGIDPRRDVRILIVNCSLFNPTPSLASMIINHYKMREDVKSFNLGGMGCSAGLIAIDLAKDIVFQANPNSYAVVLSTENITLNWYFGNDRSMLLSNCIFRMGGAAALLSNKRTDASRAKYRLLHTVRTHKGATNECFNCVYQREDEVGKVGVSLARELMAVAGDALKTNITTLGPLVLPLSEQLKFLKSLMMRRVFRVKGVRPYIPDFRRAFEHFCVHAGGRAVLEEVQRSLSLRDTDMEPSKCALHRFGNTSSSSLWYELAYAEAKXGRVRRGHRVWQIGFGSGFKCNSAVWRALRDVPALPVPRSAPPAGTDRKSCCXNPWAEDVDKYPPKAYV

SEQ ID NO: 69118 - protein, 508 aa, Setaria italica
  misc_feature (384)..(384): Xaa can be any naturally occurring amino acid
  Transcript Sequence Number=SeqID_3144
  Gene Ontology: Mol. function=transferase activity, transferring groups other than amino-acyl groups; Cellular component=membrane; Biological process=fatty acid biosynthetic process
  Homolog annotation: Hit_ID=Q2R1V7; Match level="QueryCoverage=93%, HitCoverage=95%, E-value=0.0, Identity=76%"; Hit description=Beta -ketoacyl-CoA synthase, putative, expressed
  Pfam annotation: Domain name=ACP_syn_III_C; Domain location=375-460; Score=-4.3; E_value=4.7e-05; Accession=PF08541.2; Description=3 -Oxoacyl-[acyl-carrier-protein (ACP)
  Pfam annotation: Domain name=Chal_sti_synt_C; Domain location=317 -462; Score=-0.4; E_value=0.0022; Accession=PF02797.7; Description =Chalcone and stilbene synthases, C-te
  Pfam annotation: Domain name=Chal_sti_synt_N; Domain location=64-280; Score=-87.7; E_value=0.073; Accession=PF00195.11; Description =Chalcone and stilbene synthases, N-te
  Pfam annotation: Domain name=FAE1_CUT1_RppA; Domain location=70-360; Score=764.0; E_value=1.1e-226; Accession=PF08392.4; Description =FAE1Type III polyketide synthase-like
  Pfam module annotation: Pfam domain module=ACP_syn_III_C::Chal_sti _synt_C::Chal_sti_synt_N::FAE1_CUT1_RppA; Domain location=375 -460::317-462::64-280::70-360
KNARHRPSALKLCYHVAISNLPYLLLAPFAAALFVRLSRHSPADLAAALTSNPPLTAALAALAAVLVTIYLARRPRAVYLLDFACYKPGPEHVVTRETFMRQSTAAGVFTGDNLAFQRKILERSGLGQETYFPRAVLNAPPNPCMAEARAEAEAVMFGAIDQVLAKTGVRARDIGVVVVNCSLFNPTPSLSAMIVNHYKLRGNVASYNLGGMGCSAGLISIDLAKQLLQVHRNTYALVVSMENITLNWYWGNNRSMLMSNCLFRMGGAAVLLTNRGGADRRRAKYQLMHTVRTHHGADDRAYRCVFQEEDETGRVGVALSKDLMAVAGEALKTNITTLGPLVLPMSEQILFLASLVGRKVFGLRSLKPYIPDFKMAFEHFCIHXAGGRAVLDTIEKNLELSAWHMEPSRMTLYRWGNTSSSSLWYELAYTEAQGRVRRGHRAWQIAFGSGFKCNSAVWRALRTIDPAKEKVGNPWVEEIHRFPVEVPKVESVVVAPAAAAAAAAAAES

SEQ ID NO: 69119 - protein, 549 aa, Setaria italica
  misc_feature (304)..(304): Xaa can be any naturally occurring amino acid
  misc_feature (436)..(436): Xaa can be any naturally occurring amino acid
  Transcript Sequence Number=SeqID_3145
  Gene Ontology: Mol. function=transferase activity, transferring groups other than amino-acyl groups; Cellular component=membrane; Biological process=fatty acid biosynthetic process
  Homolog annotation: Hit_ID=Q10QW0; Match level="QueryCoverage=100%, HitCoverage=100%, E-value=0.0, Identity=79%"; Hit description =Fiddlehead, putative, expressed
  Pfam annotation: Domain name=ACP_syn_III; Domain location=252-349; Score=-17.1; E_value=0.046; Accession=PF08545.2; Description=3 -Oxoacyl-[acyl-carrier-protein (ACP)]
  Pfam annotation: Domain name=ACP_syn_III_C; Domain location=438-524; Score=16.0; E_value=3.7e-07; Accession=PF08541.2; Description=3 -Oxoacyl-[acyl-carrier-protein (ACP)
  Pfam annotation: Domain name=Chal_sti_synt_C; Domain location=384 -526; Score=-9.3; E_value=0.012; Accession=PF02797.7; Description =Chalcone and stilbene synthases, C-te
  Pfam annotation: Domain name=FAE1_CUT1_RppA; Domain location=114-410; Score=644.1; E_value=1.4e-190; Accession=PF08392.4; Description =FAE1Type III polyketide synthase-like
  Pfam module annotation: Pfam domain module=ACP_syn_III::ACP_syn_III _C::Chal_sti_synt_C::FAE1_CUT1_RppA; Domain location=252-349::438 -524::384-526::114-410
MAREQALLSTEIVNRGVEPSGPDAGSPTFSVRVRRRLPDFLQSVNLKYVRLGYHYLISHGVYLATIPVIVLVCGAEVGSLSRDELWNKVWGEATYDLATVLAFLAVLAFTISVYIMSRPRPVYLIDFACYKPADELKVSKAEFIDLARKSGKFDEDSLAFQSRLLAKSGIGDESYMPRCVFEPNVNCATMKEGRAEASTAMFAALDELFDKCRVRPKDVGVLVVNCSLFNPTPSLSAMIVNHYKMRGNILSYNLGGMGCSAGVIAIDLARDMLQASGAGLAVVVSTEAVSFTWYPGKRRSMKTXKKITRNDLTYRAGCAAVLLSNRRRDFHRAKYQLEHVVRTHKGADDRAFRSVYQEEDEQRIKGLSISRDLLDVGGHALKTNITTLGPLVLPFSEQLLFFAGVLFRHLFPSKTSTPPPATTPGTASAAAPYHPXTFKRAFEHFCMHAASRDVLEHLQSNLGLRDGDLEASRAALHRFGNTSSSSIWYELAYLEAKGRVRRGDRVWQLAFGSGFKCNSAVWRAVRRVRRPSRSPWLDCVDQYPARMDA

SEQ ID NO: 69120 - protein, 309 aa, Setaria italica
  misc_feature (24)..(24): Xaa can be any naturally occurring amino acid
  misc_feature (187)..(187): Xaa can be any naturally occurring amino acid
  misc_feature (227)..(227): Xaa can be any naturally occurring amino acid
  misc_feature (248)..(248): Xaa can be any naturally occurring amino acid
  Transcript Sequence Number=SeqID_3146
MDDRSGLLGRHAAEAGGVDVVPGXAVRREAGHEQAGGAVEQRHGALPVVLALLHPQEGGLDEVPPCVAVHGQQVPRVDIVGVGRVPAVGDGGALVPPVEVDACPAVHELRHRRRVERHPWHDVVPVHHPEQLHGHVGAEEGGEDLVPDARLAVGDDGDEAVEDVPLAVERQERREDGGERAAEAVAXGDDEVGLGVLLELVLDDLAELVVGEGLAGVGVGRRLGRPXGVLAVLLLEAQRLEEADADVXPLVAGHGRHGPREVHVRGPVPHVEGLRAAERHHHHARVRLLVRHHERLRRVVANELVPAAC

SEQ ID NO: 69121 - protein, 386 aa, Setaria italica
  misc_feature (342)..(342): Xaa can be any naturally occurring amino acid
  misc_feature (368)..(368): Xaa can be any naturally occurring amino acid
  Transcript Sequence Number=SeqID_3147
  Gene Ontology: Mol. function=triacylglycerol lipase activity; Biological process=lipid metabolic process
  Homolog annotation: Hit_ID=Q65XP3; Match level="QueryCoverage=94%, HitCoverage=69%, E-value=1e-115, Identity=57%"; Hit description =Putative lipase
  Pfam annotation: Domain name=Lipase_3; Domain location=114-278; Score= 150.8; E_value=4e-42; Accession=PF01764.17; Description=Lipase (class 3)
DVLPDDRKRTDERYGEDYYVDVESGECGGASVPLVHQQYVNGRLIRLRTFSIFEVTVMAAKIAYENAAYIENVVKNVWKFNFVGYYSCWNKFVGDHTTQAFVMTDKEADASVVVVSFRGTEPFNMRDWSTDVNLSWLGMGAMGHVHVGFLKALGLQEEDGKDAARAFPKAAPNADAGKPLAYYKLREVIQDQLKKHPKANLVVTGHSLGGALAAIFPALLAFHGERDVLDRLISVVTYGQPRVGDKVFAAFLRANVPVELLRVVYRYDVVPRVPFDAPPVAEFVHGGTCVYFNGWYKCTAIADGGDAPNPNYIDPRYLLSMYGNAWGDLVKAAFLGMKEGKXDYREGAVSLLYRAAGLLVPGLASHSXPRDYVNAARLGSMTAKEA

SEQ ID NO: 69122 - protein, 505 aa, Setaria italica
  misc_feature (107)..(107): Xaa can be any naturally occurring amino acid
  misc_feature (145)..(145): Xaa can be any naturally occurring amino acid
  Transcript Sequence Number=SeqID_3148
  Gene Ontology: Mol. function=transferase activity, transferring groups other than amino-acyl groups; Cellular component=membrane; Biological process=fatty acid biosynthetic process
  Homolog annotation: Hit_ID=Q9XF43; Match level="QueryCoverage=96%, HitCoverage=98%, E-value=0.0, Identity=76%"; Hit description=3 -ketoacyl-CoA synthase 6
  Pfam annotation: Domain name=ACP_syn_III; Domain location=226-317; Score=-15.1; E_value=0.03; Accession=PF08545.2; Description=3 -Oxoacyl-[acyl-carrier-protein (ACP)]
  Pfam annotation: Domain name=ACP_syn_III_C; Domain location=392-476; Score=19.2; E_value=1.7e-07; Accession=PF08541.2; Description=3 -Oxoacyl-[acyl-carrier-protein (ACP)
  Pfam annotation: Domain name=Chal_sti_synt_C; Domain location=335 -478; Score=7.7; E_value=0.00046; Accession=PF02797.7; Description =Chalcone and stilbene synthases, C-te
  Pfam annotation: Domain name=Chal_sti_synt_N; Domain location=71-295; Score=-89.5; E_value=0.096; Accession=PF00195.11; Description =Chalcone and stilbene synthases, N-te
  Pfam annotation: Domain name=FAE1_CUT1_RppA; Domain location=89-378; Score=723.4; E_value=1.7e-214; Accession=PF08392.4; Description =FAE1Type III polyketide synthase-like
  Pfam module annotation: Pfam domain module=ACP_syn_III::ACP_syn_III _C::Chal_sti_synt_C::Chal_sti_synt_N::FAE1_CUT1_RppA; Domain location= 226-317::392-476::335-478::71-295::89-378
AAPREGGGRPWPGGGVFSGSVNLKYVKLGYQYLVNHFLTLLLVPVMAATALELARLGPGELLTLWRSLELDLVHILCSAFLVVFVGTVYVMSRPRPVYLVDYSCYKXPPPSCRVPFATFMEHTRLISDDEKSVRFQTRILERSGXGEDTCLPPANHYIPPNPSMEASRAEAQLVIFSAIDDLVRRTGLKPKDIDILVVNCSLFSPTPSLSAMIINKYKLRSNIRSFNLSGMGCSAGLISIDLARDMLQVHPNSNALVVSTEIITPNFYQGTRRDMLLPNCLFRMGAAAILLSNRRREARRAKYRLVHVVRTHKGADDRAYRCVYQEEDDQGFSGISLSKELMAIAGDALKSNITTIGPLVLPMSEQLLFFFRLVGRKLINKKWKPYIPDFKLAFEHFCIHAGGRAVIDELQKNLQLSARHVEASRMTLHRFGNTSSSSLWYELAYIEAKGRMRRGDRVWQIGFGSGFKCNSAVWKCLRSIKTPTNGPWDDCIDRYPVDIPEVVKL

SEQ ID NO: 69123 - protein, 366 aa, Setaria italica
  misc_feature (301)..(301): Xaa can be any naturally occurring amino acid
  misc_feature (317)..(317): Xaa can be any naturally occurring amino acid
  Transcript Sequence Number=SeqID_3149
  Gene Ontology: Mol. function=transferase activity, transferring groups other than amino-acyl groups; Cellular component=membrane; Biological process=fatty acid biosynthetic process
  Homolog annotation: Hit_ID=Q10QW0; Match level="QueryCoverage=80%, HitCoverage=57%, E-value=1e-147, Identity=90%"; Hit description =Fiddlehead, putative, expressed
  Pfam annotation: Domain name=ACP_syn_III; Domain location=73-164; Score=-11.6; E_value=0.014; Accession=PF08545.2; Description=3 -Oxoacyl-[acyl-carrier-protein (ACP)]
  Pfam annotation: Domain name=FAE1_CUT1_RppA; Domain location=1-225; Score=442.6; E_value=6e-130; Accession=PF08392.4; Description =FAE1Type III polyketide synthase-like
  Pfam module annotation: Pfam domain module=ACP_syn_III::FAE1_CUT1 _RppA; Domain location=73-164::1-225
TETTNVNCATMKEGRAEASTAMFAALDELFDKCRVRPKDVGVLVVNCSLFNPTPSLSAMIVNHYKMRGNILSYNLGGMGCSAGVIAIDLARDMLQASGAGLAVVVSTEAVSFTWYPGKRRSMLIPNAFFRAGCAAVLLSNRRRDFHRAKYQLEHVVRTHKGADDRAFRSVYQEEDEQRIKGLSISRDLLEVGGHALKTNITTLGPLVLPFSEQLLFFAGVLFRHLFPSKTSTPPPATTPGDASAAAPYIPDFKRAFEHFCMHAASRDVLEHLQSNLGLRDGDLEASRAALHRFGNTSSSSXLVRAGVPGGQGPRPQXRPRVAARLRVRVQVQQRRVARRPTRAPPVAQPLARLRRPVPGAHGRLVS

SEQ ID NO: 69124 - protein, 570 aa, Setaria italica
  misc_feature (205)..(205): Xaa can be any naturally occurring amino acid
  misc_feature (275)..(275): Xaa can be any naturally occurring amino acid
  misc_feature (310)..(310): Xaa can be any naturally occurring amino acid
  misc_feature (436)..(436): Xaa can be any naturally occurring amino acid
  misc_feature (532)..(532): Xaa can be any naturally occurring amino acid
  misc_feature (552)..(552): Xaa can be any naturally occurring amino acid
  Transcript Sequence Number=SeqID_3150
  Gene Ontology: Mol. function=triacylglycerol lipase activity; Biological process=lipid metabolic process
  Homolog annotation: Hit_ID=Q65XP3; Match level="QueryCoverage=93%, HitCoverage=96%, E-value=1e-158, Identity=57%"; Hit description =Putative lipase
  Pfam annotation: Domain name=Lipase_3; Domain location=295-463; Score= 130.8; E_value=4.3e-36; Accession=PF01764.17; Description=Lipase (class 3)
GALLLGWCSYHQLLELAPLAVRRPWWRSSSSSPQVAAPKMGAEKLIIRSEKVRFVDILSMLFLRRPITSYPFVEAGDQTAADVGSTPGDMFVLLTQIIQKALAAAYYPAVMIGTVVEFILNFIALNNGILGIFLNIFRCKLVIPLNREAPNFRSMIGMIDGRTELKPLPAGGGPDDRRLQVVGVSGAGKAATVGEDYYVDVESGXVTDGASVPLVHQQYVNGRLIRLRTFSIFEVTVMAAKIAYENAAYIENVVKNVWKFNFVGYYSCWNKFVGXTNTTQAFVMTDKEADASVVVVSFRGTEPFNMRDWXSTDVNLSWLGMGAMGHVHVGFLKALGLPGRRTGKDAARAFPKAAPNADAGKPLAYYKLREVIQDQLKKHPKANLVVTGHSLGGALAAIFPALLAFHGERDVLDRLISVVTYGQPRVGDKVFADLTXPTTNVPVELLRVVYRYDVVPRVPFDAPPVAEFVHGGTCVYFNGWYKCTAIADGGDAPNPNYIDPRYLLSMYGNAWGDLVKAAFLGMKEGKDYREGXVSLLYRAAGLLVPGLASHSXPRDYVNAARLGSMTAKEA

SEQ ID NO: 69125 - protein, 87 aa, Setaria italica
  Transcript Sequence Number=SeqID_3151
  Gene Ontology: Mol. function=zinc ion binding
  Homolog annotation: Hit_ID=B6TQI1; Match level="QueryCoverage=62%, HitCoverage=20%, E-value=7e-09, Identity=56%"; Hit description =Protein binding protein
MGDHVAVDVGELVASRAGEAAGLVPGGKEEAEALIGMVECRICQEEDLAKNLESPCACSGSLKVLAPLFVFKREILVPLHVAYDVCL

SEQ ID NO: 69126 - protein, 150 aa, Setaria italica
  misc_feature (143)..(143): Xaa can be any naturally occurring amino acid
  Transcript Sequence Number=SeqID_3152
  Gene Ontology: Mol. function=zinc ion binding
  Homolog annotation: Hit_ID=Q0KIL9; Match level="QueryCoverage=88%, HitCoverage=69%, E-value=4e-21, Identity=41%"; Hit description=Zinc finger protein, putative
VLFSVVQSYKPGYTAPPQVHHDETTIEISGGDWTISGNHLDLHDPRILAMAAAQHRLLEDEYDEYTATNNNAAAFCRSIFLILMALLLLRHTLTITNSDDEDDASAIFFMMHLLSSRLFLLRAAGFLLPCYIMAWAISIMQRXQRQRQEE

SEQ ID NO: 69127 - protein, 123 aa, Setaria italica
  Transcript Sequence Number=SeqID_3153
  Gene Ontology: Mol. function=zinc ion binding
  Homolog annotation: Hit_ID=B9S8W6; Match level="QueryCoverage=85%, HitCoverage=37%, E-value=3e-17, Identity=47%"; Hit description =Membrane associated ring finger 1,8, putative
FHHDEYDEYTATNNNAAAFCRSIFLILMALLLLRHTLTITNSDDEDDASAIFSLFLLIAAGFLLPCYIMAWAISIMQRQRQRQEEAMLLPTEVAIILHRNGRTMQFAVAPPESPTSPQPEPNQ

SEQ ID NO: 69128 - protein, 85 aa, Setaria italica
  Transcript Sequence Number=SeqID_3154
FFFRKKLQLLTIPYIHLDLCTVTACKEERRRKGTADGDGDVAESEPFLANGICPHLPAPIFVSSRSLQNPDSELAVVLPRSSGPH

SEQ ID NO: 69129 - protein, 89 aa, Setaria italica
  misc_feature (1)..(34): Xaa can be any naturally occurring amino acid
  Transcript Sequence Number=SeqID_3155
XXXXXXXXXXXXXXXXXXXXXXXXXXXXXXXXXXYTSQQNFHYSRSIKQDCESKANPQLNPKFASQEVTWAYPFQLSVCCSLNFFSSIS

SEQ ID NO: 69130 - protein, 125 aa, Setaria italica
  Transcript Sequence Number=SeqID_3156
  Gene Ontology: Mol. function=cysteine-type peptidase activity; Biological process=ubiquitin-dependent protein catabolic process
  Homolog annotation: Hit_ID=Q0J0M6; Match level="QueryCoverage=90%, HitCoverage=10%, E-value=2e-34, Identity=61%"; Hit description =Ubiquitin carboxyl-terminal hydrolase
  Pfam annotation: Domain name=zf-UBP; Domain location=40-110; Score =3.7; E_value=0.05; Accession=PF02148.11; Description=Zn-finger in ubiquitin-hydrolases and other protein
SCEHCREDAPRKKGGAGNKEKGGKKKKGGASKGAAAKAQAKAEKSDMWVCLDCGRHFCGGAVEDTKPYGHARRHAKQDRHWWAARYDDPTVAYCLSCEKELPIEMPKLETVVAAAVDEKVVSVED

SEQ ID NO: 69131 - protein, 26 aa, Setaria italica
  Transcript Sequence Number=SeqID_3157
FVVLNLSPSRSSYVLGWLSLSVLISF

SEQ ID NO: 69132 - protein, 213 aa, Setaria italica
  misc_feature (183)..(183): Xaa can be any naturally occurring amino acid
  Transcript Sequence Number=SeqID_3158
  Gene Ontology: Mol. function=heat shock protein binding
  Homolog annotation: Hit_ID=Q259L0; Match level="QueryCoverage=100%, HitCoverage=72%, E-value=6e-73, Identity=68%"; Hit description =H0701F11.6 protein
  Pfam annotation: Domain name=DnaJ; Domain location=149-211; Score =20.8; E_value=4.2e-05; Accession=PF00226.23; Description=DnaJ domain
VRQKRAEGKKALKDYLLYGKSSPHLQDGSTGSFANSHEIPRFKTFRKGPQSHWSQGVHNQRKSKKDKARFCNFFHEDHYVHPDEIFEAIFGTHRGFTWSHISWDDFRFRDRSFRFRWSGGESQRERIPSDSEDESEEDSRETTSVGSHAHRVILGLPPCGPLTLEDVKTAFRASALRWHPDKXHPGSSQAVAEEKFKLCVNAYNSLCSVLKAA

SEQ ID NO: 69133 - protein, 49 aa, Setaria italica
  Transcript Sequence Number=SeqID_3159
  Homolog annotation: Hit_ID=B6U5M8; Match level="QueryCoverage=95%, HitCoverage=14%, E-value=3e-20, Identity=95%"; Hit description=CCT motif family protein
NATLQKSVSSGCLNSADWMNGPVRPNFLDFQGLDFEAAFGLRRAYSEGD

SEQ ID NO: 69134 - protein, 59 aa, Setaria italica
  Transcript Sequence Number=SeqID_3160
  Homolog annotation: Hit_ID=B6U5M8; Match level="QueryCoverage=100%, HitCoverage=18%, E-value=5e-26, Identity=100%"; Hit description=CCT motif family protein
  Pfam annotation: Domain name=CCT; Domain location=7-51; Score=74.4; E_ value=4.1e-19; Accession=PF06203.6; Description=CCT motif
DLKTEERKQKLSRYRKKKIKRNFGRKIKYACRKALADSQPRVRGRFAKIEECDLLKPSK

SEQ ID NO: 69135 - protein, 137 aa, Setaria italica
  Transcript Sequence Number=SeqID_3161
TIDDQRVQCRQSDSDYNMPSKRGAEFYCHLQAFVQGLDYHFQLFTPLHGCTKGPDIIIRGIEWNAAREKERRSIEQLNEFRRASGASPPPAHKVAHLEASGSQSSIKLALHWIPRKLLPSSTCSASAGRILQSWQPP

SEQ ID NO: 69136 - protein, 325 aa, Setaria italica
  Transcript Sequence Number=SeqID_3162
  Homolog annotation: Hit_ID=B6U5M8; Match level="QueryCoverage=87%, HitCoverage=89%, E-value=1e-126, Identity=80%"; Hit description=CCT motif family protein
  Pfam annotation: Domain name=CCT; Domain location=273-317; Score =74.4; E_value=4.1e-19; Accession=PF06203.6; Description=CCT motif
  Subcellular localization annotation: CTP_CleavageSite=53; ConfidenceScore=5.47e-01
MYADAGFGFAAAYSPALASSQHQPPFDFAFSSAAAGPASMDATASSLPLPEMPAAHLGSMVQPSLVSEYDLGGEGDLFKAPEVIIEEPLLSLDPVAAAISMMSGSESAMDQTIKDADIGTIQNDPLLSEVLYECEKELMEKSAIEETISELLDVKIPMLQVEEIPRQAEQVLIQAELPTFDKEKPAIPECSLQKSVSSGCLNSADWMNGPVRPNFLDFQGLDFEAAFGLRRAYSEGDIQNLGANTPRPAANATNLQTPCERLVTISDLKTEERKQKLSRYRKKKIKRNFGRKIKYACRKALADSQPRVRGRFAKIEECDLLKPSK

SEQ ID NO: 69137 - protein, 178 aa, Setaria italica
  misc_feature (121)..(121): Xaa can be any naturally occurring amino acid
  Transcript Sequence Number=SeqID_3163
  Gene Ontology: Mol. function=cysteine-type peptidase activity; Biological process=ubiquitin-dependent protein catabolic process
  Homolog annotation: Hit_ID=Q0J0M6; Match level="QueryCoverage=90%, HitCoverage=15%, E-value=1e-51, Identity=66%"; Hit description =Ubiquitin carboxyl-terminal hydrolase
PPPVVSLVTENNAQPAFGGDVEQDDYVGFGDMFNEPEVTSEVKKETSKAEDIDVMAWSSNSADDEVDDSNAPVSVEGCLALYTEPELLSEPWLCEHCTNAARLKADKAKMTWRWGDGANEXKDGEETMEGGDGRQDGEKLIMSCNKEDIDQIMTTGGCKKALIRLWQVMIARTMYILM

SEQ ID NO: 69138 - protein, 339 aa, Setaria italica
  Transcript Sequence Number=SeqID_3164
  Gene Ontology: Mol. function=nucleic acid binding; Cellular component= nucleus; Biological process=DNA replication
  Homolog annotation: Hit_ID=Q6WG36; Match level="QueryCoverage=99%, HitCoverage=52%, E-value=1e-139, Identity=66%"; Hit description=RPA 70kDa subunit
  Pfam annotation: Domain name=Rep_fac-A_C; Domain location=263-339; Score=56.6; E_value=9.2e-14; Accession=PF08646.2; Description =Replication factor-A C terminal domai
  Pfam annotation: Domain name=tRNA_anti; Domain location=7-74; Score =18.2; E_value=0.034; Accession=PF01336.17; Description=OB-fold nucleic acid binding domain
  Pfam module annotation: Pfam domain module=Rep_fac-A_C::tRNA_anti; Domain location=263-339::7-74
QSQRRYHNAKGDGKVFSFDLLDSDGGEIRATCFNALVDRFYEAVEVGKVYVVSRGSLKPAKKDYNHLNNEWEIFLESQSTIELCPDENSSIPAQRFSFTLIDKIEDSENNAIVDVIGVVTSVNPSNTIQRKNGMETQKRTITLKDMSGRSVEVTMWGDFCNREGLQLQEMVECGAFPVLAVKAGRVNDYSGKSVGTISSSQLLINPDLAEAQSLRQWFDCGGRDASTQSISRDFTPAASRNEIRRTVAQIKDDGLGMGDKPDWVTVKATVVFFKTDSFCYTACPNVIGERQCNKKVTKSDSGNWLCDKCNQEFPECDYRYLLQLQIQDHSGTAWATAFQ

SEQ ID NO: 69139 - protein, 202 aa, Setaria italica
  Transcript Sequence Number=SeqID_3165
  Subcellular localization annotation: CTP_CleavageSite=60; ConfidenceScore=5.02e-01
SMCVDLELVCSFSVIFFFVARTCLAKSPSSVYSTIFLLVLHQRFRKVSWADGLIRASCWRLASKQVSKGTLALLYSFVGEMLCHPCLLFYVPFVFTPFVPGVCISGGDSWISLATSSSPHPTSRRLLAFLFSRPPAPHLTDSHQVLRSELSERTSHVVPSATSPSLFVWFGPMFAGHSRLSCVLGDEQLLRKRIHGMLRSCL

SEQ ID NO: 69140 - protein, 172 aa, Setaria italica
  misc_feature (12)..(12): Xaa can be any naturally occurring amino acid
  Transcript Sequence Number=SeqID_3166
  Gene Ontology: Cellular component=chloroplast
  Homolog annotation: Hit_ID=B9S8W8; Match level="QueryCoverage=84%, HitCoverage=29%, E-value=2e-39, Identity=53%"; Hit description=Amino acid transporter, putative
VLLICFIICTLXAYGVTGIIGYLMYGESLSSQVTLNLPSKRIASNIAIFTTLINPFTKFALLITPIAEAIEDSLRVGKNRTIGIFIRTALVVSTTIIALVVPFFAYVVALTGSFLSSTVTILLPCVCYLKISSRTSRNLRLELVVCLGIIMIGAGVIVVGTYNSLKQIVHSF

SEQ ID NO: 69141 - protein, 120 aa, Setaria italica
  Transcript Sequence Number=SeqID_3167
  Subcellular localization annotation: CTP_CleavageSite=14; ConfidenceScore=5.24e-01
LLSSFQAKKRRPARREKASSRLPPSVSSLSPELRHGRRWPCRYVPPPSPSLPFCILETSMPKTQREESSHSLCSLLRIHSVRGFFLSSSSRGCRLLRWPSHEPRRPENPATAAVVPVPGC

SEQ ID NO: 69142 - protein, 104 aa, Setaria italica
  Transcript Sequence Number=SeqID_3168
  Subcellular localization annotation: CTP_CleavageSite=42; ConfidenceScore=5.19e-01
KKAYLLNSSHHSKQRNGDRRAGRRRLAACLRPSPRSRRSSVMAEDGPAGYYVGRPMNHDDQKTQPPPPSSQSQAADEQVNAQVPGYYAGRVPGKKATGGEQSSA

SEQ ID NO: 69143 - protein, 84 aa, Setaria italica
  Transcript Sequence Number=SeqID_3169
  Gene Ontology: Mol. function=metal ion binding
  Homolog annotation: Hit_ID=Q2R2A7; Match level="QueryCoverage=100%, HitCoverage=33%, E-value=5e-33, Identity=77%"; Hit description=RING -H2 finger protein RHF2a, putative, expressed
  Pfam annotation: Domain name=zf-C3HC4; Domain location=4-36; Score =16.9; E_value=0.0012; Accession=PF00097.17; Description=Zinc finger, C3HC4 type (RING finger)
EAFFDSDPSAVTSCKHEFHLQCILEWCQRSSQCPMCWQAISMKDPMSQELLEAVVEERNVQENHVPATTIFRHPLLGDFEVQHI

SEQ ID NO: 69144 - protein, 300 aa, Setaria italica
  Transcript Sequence Number=SeqID_3170
  Gene Ontology: Mol. function=metal ion binding
  Homolog annotation: Hit_ID=Q2HT04; Match level="QueryCoverage=98%, HitCoverage=79%, E-value=2e-77, Identity=53%"; Hit description=Zinc finger, RING-type
  Pfam annotation: Domain name=zf-C3HC4; Domain location=2-42; Score =32.0; E_value=2.4e-06; Accession=PF00097.17; Description=Zinc finger, C3HC4 type (RING finger)
ACSICLEAFFDSDPSAVTSCKHEFHLQCILEWCQRSSQCPMCWQAISMKDPMSQELLEAVVEERNVQENHVPATTIFRHPLLGDFEVPVDADDAEIEERIIQHLAAAAAIRRSHRHARREGRRSRSAAHGHPQILVFSTAESTSGGSMSSNSREEGDHEHAPAVISARPLPIVDSTDETAADTSVHDTVLANNGPVMSNNRVSRNQSSPVSQDEAGPSDVQSFSDSLKSRLQSVSTKYKDSITNSTRGWKERWFTQKNTISNLGSEVRREVNAGIAAVSRMMERLETRDGTGPSSTSTTN

SEQ ID NO: 69145 - protein, 72 aa, Setaria italica
  Transcript Sequence Number=SeqID_3171
LVVVNQDIYLSVQSVWLFFLETQKYMTLHLPSDGMLLWHAYMTIKREILDQLFSWYIMDTNAVHYPFVNYDS

SEQ ID NO: 69146 - protein, 142 aa, Setaria italica
  Transcript Sequence Number=SeqID_3172
  Gene Ontology: Mol. function=metal ion binding
  Homolog annotation: Hit_ID=Q2R2B0; Match level="QueryCoverage=64%, HitCoverage=24%, E-value=2e-31, Identity=71%"; Hit description=RING -H2 finger protein RHF2a, putative, expressed
MHGTNTCYIMIWIRVSRNQSSPVSQDEAGPSDVQSFSDSLKSRLQSVSTKYKDSITNSTRGWKERWFTQKNTISNLGSEVRREVNAGIAAVSRMMERLETRDGTGPSSTSTTNIHSASDTNNQGASPPKVVAVVNDASSSAT

SEQ ID NO: 69147 - protein, 73 aa, Setaria italica
  misc_feature (58)..(58): Xaa can be any naturally occurring amino acid
  Transcript Sequence Number=SeqID_3173
MVGGGGRRAATAAALGRWCLVILAVASALGVSGPAFYWRYKKGFSASLSSPAAVSSSXSPACPPCSCDCPPAP

SEQ ID NO: 69148 - protein, 89 aa, Setaria italica
  Transcript Sequence Number=SeqID_3174
KQPQHHHINQKLLHFLFLAGPDPKLNQKKHLQKIELWYEGEEMRNSLSPSHTPQVHFISYGRQLHSHQAAGCRRHNDGVGSKQTRPPEL

SEQ ID NO: 69149 - protein, 41 aa, Setaria italica
  Transcript Sequence Number=SeqID_3175
QPCLSAYSLRPIPPSLEDCILSVPRICLVFKNYPSIHVTFR

SEQ ID NO: 69150 - protein, 570 aa, Setaria italica
  Transcript Sequence Number=SeqID_3176
  Gene Ontology: Mol. function=binding; Cellular component=nucleus; Biological process=regulation of transcription, DNA-dependent
  Homolog annotation: Hit_ID=B3TIK7; Match level="QueryCoverage=77%, HitCoverage=47%, E-value=1e-117, Identity=47%"; Hit description=Slow walker 2
  Pfam annotation: Domain name=CBF; Domain location=72-290; Score =253.6; E_value=4.7e-73; Accession=PF03914.9; Description=CBFMak21 family
GINKVKDSKSHENNEVSSTAGSDLEMDSRILSNYLTGVNRALPYVASSEVDDIVEVQTPILFRLAHAENFNVGVQALMLLFQISTKNQIASDRFYRALYAKLLSPAAVTSSKPELFLGLLVKAMKNDVMLKRVAAFSKRLLQVALQRPPQYACGCLFILSEVLKAKSPLWAIVLQNESVDDGDEHFEDIIESHDDSSIASAVLDKHNDKLAAHEKYNIDAGDGSDSGKQVKLIERDENGENNASADTLRLHALYDPRHREPSYCNADRVSWWELTVLASHVHPSVSTMARTLLSGNNIVYSGDPLTDLSLPAFLDKFMEKKPKGNRIAEGKWHGGSQIAPAKKLDMNHHLIGEELLELAENEVPPEDIVFHRFYMNKSGPIKAKRKDSALDEDTGELLADDASDESEDEMQEFGDGLAEDGEYDYDDLDSNAFDEEKELLGDGSDVELDDISDSASMDGGSGSDDDDIASLAGMDAEALEDAGDFDGNSSDEEMVNAGNGGAKKKVAPQKQKHGVKSGRSPFASLEDYEHLMAGDADETTLKRKRKATGRAGGDKKPKSRSQNKRSRESK

SEQ ID NO: 69151 - protein, 129 aa, Setaria italica
  Transcript Sequence Number=SeqID_3177
CRELRRTHLTHDTGLKKKREKKKLFSCVEREQRANKGDPRLGLNRGCMCMQPACLKKNTRGRRKTRLSWTRLHGCATRRRTLHCSQTASSRLSFAAAAMDAATPPGLAVASPLLRFSAPATLSASALST

SEQ ID NO: 69152 - protein, 78 aa, Setaria italica
  Transcript Sequence Number=SeqID_3178
  Gene Ontology: Mol. function=metal ion binding; Cellular component =integral to membrane; Biological process=ubiquitin-dependent protein catabolic process
  Homolog annotation: Hit_ID=Q9LZV8; Match level="QueryCoverage=84%, HitCoverage=44%, E-value=1e-15, Identity=50%"; Hit description=RING -H2 finger protein ATL5A
  Pfam annotation: Domain name=zf-C3HC4; Domain location=17-58; Score =42.5; E_value=1.7e-09; Accession=PF00097.17; Description=Zinc finger, C3HC4 type (RING finger)
GQQLLPVAKAGTAATECAVCLADFRDGERLRLLPPCLHAFHIDCIDAWLQATANCPLCRAAVVELQPADGIVIDIATS

SEQ ID NO: 69153 - protein, 70 aa, Setaria italica
  Transcript Sequence Number=SeqID_3179
ITNRTNIQMVGQSPQQSTHVAYKWKFGGKKGQSMYQVHDFIFILAKPLSIYLRGEGKDGLMYYSSFPADK

SEQ ID NO: 69154 - protein, 423 aa, Setaria italica
  misc_feature (414)..(414): Xaa can be any naturally occurring amino acid
  Transcript Sequence Number=SeqID_3180
  Gene Ontology: Mol. function=protein serine/threonine kinase activity; Cellular component=integral to membrane; Biological process=multicellular organismal development
  Homolog annotation: Hit_ID=Q40699; Match level="QueryCoverage=100%, HitCoverage=48%, E-value=1e-149, Identity=53%"; Hit description =Leucine-rich repeat/receptor protein kinase
  Pfam annotation: Domain name=LRR_1; Domain location=102-124; Score =16.1; E_value=0.14; Accession=PF00560.25; Description=Leucine Rich Repeat
  Pfam annotation: Domain name=LRR_1; Domain location=126-148; Score =14.9; E_value=0.34; Accession=PF00560.25; Description=Leucine Rich Repeat
  Pfam annotation: Domain name=LRR_1; Domain location=150-172; Score =19.3; E_value=0.016; Accession=PF00560.25; Description=Leucine Rich Repeat
  Pfam annotation: Domain name=LRR_1; Domain location=175-197; Score =9.6; E_value=4.5; Accession=PF00560.25; Description=Leucine Rich Repeat
  Pfam annotation: Domain name=LRR_1; Domain location=199-221; Score =11.2; E_value=2.2; Accession=PF00560.25; Description=Leucine Rich Repeat
  Pfam annotation: Domain name=LRR_1; Domain location=223-242; Score =13.8; E_value=0.68; Accession=PF00560.25; Description=Leucine Rich Repeat
  Pfam annotation: Domain name=LRR_1; Domain location=247-269; Score =7.4; E_value=12; Accession=PF00560.25; Description=Leucine Rich Repeat
  Pfam annotation: Domain name=LRR_1; Domain location=271-293; Score =8.5; E_value=7.1; Accession=PF00560.25; Description=Leucine Rich Repeat
  Pfam annotation: Domain name=LRR_1; Domain location=29-51; Score =16.1; E_value=0.15; Accession=PF00560.25; Description=Leucine Rich Repeat
  Pfam annotation: Domain name=LRR_1; Domain location=318-340; Score =8.9; E_value=6.1; Accession=PF00560.25; Description=Leucine Rich Repeat
  Pfam annotation: Domain name=LRR_1; Domain location=342-364; Score =14.1; E_value=0.59; Accession=PF00560.25; Description=Leucine Rich Repeat
  Pfam annotation: Domain name=LRR_1; Domain location=366-388; Score =14.6; E_value=0.42; Accession=PF00560.25; Description=Leucine Rich Repeat
  Pfam annotation: Domain name=LRR_1; Domain location=390-412; Score =7.8; E_value=9.9; Accession=PF00560.25; Description=Leucine Rich Repeat
  Pfam annotation: Domain name=LRR_1; Domain location=5-26; Score=7.0; E_value=14; Accession=PF00560.25; Description=Leucine Rich Repeat
  Pfam annotation: Domain name=LRR_1; Domain location=53-75; Score =11.6; E_value=1.9; Accession=PF00560.25; Description=Leucine Rich Repeat
  Pfam module annotation: Pfam domain module=LRR_1::LRR_1::LRR_1::LRR _1::LRR_1::LRR_1::LRR_1::LRR_1::LRR_1::LRR_1::LRR_1::LRR_1::LRR _1::LRR_1::LRR_1; Domain location=102-124::126-148::150-172::175 -197::199-221::223-242::...
  Pfam module annotation: Domain location=247-269::271-293::29-51::318 -340::342-364::366-388::390-412::5-26::53-75
PYFPVLELIDMYNNNLSGPLPPFGPRHAGLRYLHLGGNYFNGSIPDSFGDLAALQYLGLNGNWLTGRVPPSLGRLTRLREMYIGYYNQYTGGVPPEFGDLRSLVRLDISSCNLTGPVPPELARLTQLDTLFLSINQLTGEIPPELGDLTSLQSLDLSINELSGEIPSSFANLAGSLKLLNLFRNHLRGEIPEFLGGFLHLEVLQVWDNNLTGHLPAALGRNGRLKNLDVTGNHLTGTIPPDLCAGRKLEMLVLMENGFFGNIPDSLGDCKTLKRVRLGKNFLTGPVPAGLFYLPKADMVELTDNLLTGELPDLIGGDKMTMLMLGNNGIGGRIPPSIGNLPALQTLSLESNNFSGPLPPEIGKLRNLTRLNVSGNALTGGIPLELMGCGSIGAIDLSRNDLTGEIPDAITSLKXVLCTLNVSR

SEQ ID NO: 69155 - protein, 77 aa, Setaria italica
  Transcript Sequence Number=SeqID_3181
QSFSHRRGVRLFLGAKHAYIFQHPLRDTEVTKAVLNSADNSADTEPSRWITLKDGMKRGILNSNDIDVTLDNFPYYE

SEQ ID NO: 69156 - protein, 192 aa, Setaria italica
  Transcript Sequence Number=SeqID_3182
  Gene Ontology: Mol. function=potassium ion transmembrane transporter activity; Cellular component=integral to membrane; Biological process=potassium ion transport
  Homolog annotation: Hit_ID=Q652J4; Match level="QueryCoverage=85%, HitCoverage=21%, E-value=1e-74, Identity=78%"; Hit description =Probable potassium transporter 13
  Pfam annotation: Domain name=K_trans; Domain location=1-192; Score= -449.8; E_value=8.2e-05; Accession=PF02705.8; Description=K+ potassium transporter
PTDLRNTNTRLTYLSACLAKVPHGGWLPLLLSLVTLLTMSTWHYGTKKKEEYELQNKVCLDRFLSLSSGMGLVRVPGVGFIYSSAVNGVPPMFAHFVTNFPAFHRVLIFVSIQTLTVPKVSPDERFLVGRVGPPANRLFRCVVRYGYKEGRWDHFNFENQLLMKVVEFLQLQPQEDAAEPPSDSGESCSVYS

SEQ ID NO: 69157 - protein, 77 aa, Setaria italica
  Transcript Sequence Number=SeqID_3183
  Gene Ontology: Mol. function=DNA binding; Cellular component=nucleus; Biological process=regulation of transcription
  Homolog annotation: Hit_ID=B6UBE4; Match level="QueryCoverage=62%, HitCoverage=19%, E-value=7e-20, Identity=89%"; Hit description=ZF-HD homeobox protein
KEQMLAFAERLGWRMQKQDEALVQQFCEQVGVRRQVFKVWMHNNKHSGSGSRRQPQLPPQEQQSQQQPQPQPQQEQQ

SEQ ID NO: 69158 - protein, 91 aa, Setaria italica
  Transcript Sequence Number=SeqID_3184
  Subcellular localization annotation: CTP_CleavageSite=37; ConfidenceScore=5.26e-01
ANALPVHKLTYHAVKVVFRLKTVTKNAPLHGGSTGCRQSRPTSAPWPPLREKKPKVGWHPTGPDACAEKRFVCVVRVCTAWPAYAASKKWK

SEQ ID NO: 69159 - protein, 101 aa, Setaria italica
  Transcript Sequence Number=SeqID_3185
  Gene Ontology: Mol. function=oxidoreductase activity; Cellular component=extracellular region; Biological process=oxidation reduction
  Homolog annotation: Hit_ID=Q2PAJ0; Match level="QueryCoverage=100%, HitCoverage=17%, E-value=1e-46, Identity=92%"; Hit description =Putative laccase
  Pfam annotation: Domain name=Cu-oxidase; Domain location=1-98; Score =98.8; E_value=1.9e-26; Accession=PF00394.14; Description=Multicopper oxidase
KAGKTYMLRLINAALNDELFFSIANHSLTVVEVDAVYVKPFTVDTLLIAPGQTTNVLLTAKPFYPGANYYMSAAPYSTTRPGTFDNTTVAGILEYEYPDSP

SEQ ID NO: 69160 - protein, 123 aa, Setaria italica
  misc_feature (8)..(8): Xaa can be any naturally occurring amino acid
  Transcript Sequence Number=SeqID_3186
YSNHPSQXGYGSQLPQSGYGFAPHQEQVGFGNQVAHSPPAYVASQSQSSHGTHWSQSGYGSPQGRLGYGSAQGLQHASHLPHHQADFGMPQVQNNNGFPHVQQQSNSVARHGQTAVGTAEGES

SEQ ID NO: 69161 - protein, 114 aa, Setaria italica
  Transcript Sequence Number=SeqID_3187
  Gene Ontology: Mol. function=electron carrier activity; Biological process=response to oxidative stress
  Homolog annotation: Hit_ID=Q9LGU0; Match level="QueryCoverage=76%, HitCoverage=25%, E-value=5e-29, Identity=71%"; Hit description=Class III peroxidase 6
MSSTTRAHQLPVHLVAAAVIVAWACCGFRSSEAQLQVGYYNYTCPGAESLIETIVHAAVRKDAGNGPGLIRLFFHDCFVRGCDASVLLDDPTGTPGNATVEKTAPPNFPSLRGF

SEQ ID NO: 69162 - protein, 399 aa, Setaria italica
  misc_feature (111)..(111): Xaa can be any naturally occurring amino acid
  Transcript Sequence Number=SeqID_3188
  Gene Ontology: Mol. function=ribose phosphate diphosphokinase activity; Cellular component=chloroplast; Biological process =ribonucleoside monophosphate biosynthetic process
  Homolog annotation: Hit_ID=Q6Z2L5; Match level="QueryCoverage=94%, HitCoverage=95%, E-value=0.0, Identity=93%"; Hit description=Ribose -phosphate pyrophosphokinase 1
  Pfam annotation: Domain name=Pribosyltran; Domain location=222-330; Score=104.1; E_value=4.8e-28; Accession=PF00156.19; Description =Phosphoribosyl transferase domain
  Subcellular localization annotation: CTP_CleavageSite=38; ConfidenceScore=5.40e-01
MPLCHSPTPAAVAAAASPIAVRSGGLLRCSRPGPAVVRCKKIDSLRAINGAPPCIPVSDRSLLTPVTLPVFRDPSMRNDTRLRIFSGTANPSLSQEIASYLGLELGKINIXKRFADGEIYVQLQESVRGCDVFLVQPTCPPANENLMELLIMIDACRRASAKNITAVIPYFGYARADRKSQGRESIAAKLVANMITEAGANRVLVCDLHSSQAMGYFDIPVDHVYGQPVILDYLASKTICSNDLVVVSPDVGGVARARAFAKKLSDAPLAIVDKRRHGHNVAEVMNLIGDVRGKVAVMMDDMIDTAGTIAKGAELLHQEGAREVYACCTHAVFSPPAIERLSSGLFQEVIITNTIPLKEEKSFPQLTILSVANLLGETIWRVHDDCSVGHEPYSSLDID

SEQ ID NO: 69163 - protein, 308 aa, Setaria italica
  Transcript Sequence Number=SeqID_3189
  Gene Ontology: Mol. function=ATP-dependent helicase activity; Cellular component=intracellular; Biological process=DNA recombination
  Homolog annotation: Hit_ID=Q2QZT4; Match level="QueryCoverage=98%, HitCoverage=51%, E-value=1e-158, Identity=84%"; Hit description=ATP -dependent DNA helicase, RecQ family protein, expressed
  Pfam annotation: Domain name=Helicase_C; Domain location=149-225; Score=94.5; E_value=3.7e-25; Accession=PF00271.23; Description =Helicase conserved C-terminal domain
PSNLLYITPERIAANYTFMEILRGLAQKGFLARFVVDEAHCISQWGHDFRPDYRGLGCLKQNFSRVPIMALTATATESVCRDILGALRIPNAVILKRSFDRLNLNYEVIGKTRTAQKQLGDLLKERFMNQSGIVYCLSKNECADTAKFLREKYKIKCAHYHAGLAARQRTSVQEKWHSGEVKVICATIAFGMGIDKPDVRFVIHNTMSKSIESYYQESGRAGRDDLPAHCIVLYQKKDFSRVVCMLRNADNFSSESFRAAMEQAKKMQAYCELKAECRRQALLEHFGEHYNRQRCRDGPSPCDNCLKT

SEQ ID NO: 69164 - protein, 112 aa, Setaria italica
  Transcript Sequence Number=SeqID_3190
  Subcellular localization annotation: CTP_CleavageSite=45; ConfidenceScore=5.24e-01
MPANPPPPPPGSSSSAPAGASYFPLPFHLQQHQPQPQPQMPPPIAASSYQQYQQQLHQAHQLFQRDAQTITPEALLSVKAALATSDVLDPAVAASARPSDASTSKKPIPRRA

SEQ ID NO: 69165 - protein, 251 aa, Setaria italica
  Transcript Sequence Number=SeqID_3191
ELMLSSLRIMAKDRAHKKQWSKIRESVRRSGSFVQVKIEAEANSELAVAAEIQEAVADVAALLGSDAGVVLHLKSRAAPSAVAMAKLVGDISREKRLLGVLVDVSSPRRELGEARATAHDEFSPVTNPAATPVTNPVTVPATNPVSNPMSPGFVTVPSTNPGDNGFSTNPNLPPLYPEPTKSATMPDPTTMPPSMVPPLHKPRHRADHAGPRHEPCGPVTNPATTPTQFPGTSPVTNPVTTYPYPQQGGAA

SEQ ID NO: 69166 - protein, 169 aa, Setaria italica
  Transcript Sequence Number=SeqID_3192
  Gene Ontology: Biological process=protein modification process
  Homolog annotation: Hit_ID=B6U0P5; Match level="QueryCoverage=100%, HitCoverage=18%, E-value=1e-72, Identity=78%"; Hit description =Ubiquitin family protein
  Pfam annotation: Domain name=ubiquitin; Domain location=1-62; Score =56.7; E_value=9e-14; Accession=PF00240.15; Description=Ubiquitin family
HKLRVNKNVPVLVLKEKIVDATGVPLDQQRLIFRGRVLKDDHLLSEYHLEDGFTLHLVARRAAEGQSSSGASEGNTHTNVNVAGNGGLLDDISRSVRDLLGSLGVAMSGGVTNAAFSVPLTTAPEGANNVPGRTQPVNPAQPGFSVMNHQIHVTQLQPGGIPRNMVIPD

SEQ ID NO: 69167 - protein, 108 aa, Setaria italica
  Transcript Sequence Number=SeqID_3193
  Gene Ontology: Biological process=protein modification process
  Homolog annotation: Hit_ID=B6U0P5; Match level="QueryCoverage=87%, HitCoverage=10%, E-value=5e-42, Identity=87%"; Hit description =Ubiquitin family protein
  Pfam annotation: Domain name=ubiquitin; Domain location=29-97; Score =79.8; E_value=1e-20; Accession=PF00240.15; Description=Ubiquitin family
MADDNPHGASSSTAKPADDPESTIEINIKTLDSQVHKLRVNKNVPVLVLKEKIVDATGVPLDQQRLIFRGRVLKDDHLLSEYHLEDGFTLHLVATDVDKTRRDQEVTY

SEQ ID NO: 69168 - protein, 154 aa, Setaria italica
  Transcript Sequence Number=SeqID_3194
  Gene Ontology: Mol. function=nucleotide binding; Cellular component =ribonucleoprotein complex; Biological process=nucleosome assembly
  Homolog annotation: Hit_ID=B4FF02; Match level="QueryCoverage=82%, HitCoverage=83%, E-value=1e-47, Identity=78%"; Hit description=60S ribosomal protein L23a
  Pfam annotation: Domain name=Ribosomal_L23; Domain location=72-151; Score=105.2; E_value=2.2e-28; Accession=PF00276.12; Description =Ribosomal protein L23
  Pfam annotation: Domain name=Ribosomal_L23eN; Domain location=13-66; Score=77.7; E_value=4.1e-20; Accession=PF03939.5; Description =Ribosomal protein L23, N-terminal domain
  Pfam module annotation: Pfam domain module=Ribosomal_L23::Ribosomal _L23eN; Domain location=72-151::13-66
  Subcellular localization annotation: CTP_CleavageSite=60; ConfidenceScore=5.36e-01
EAAMAPKAPPKKADTKAQALKVAKAVKSGTTKRKVKKIRTSVTFHRPRTLKKPRDPKYPRISAPGRDKLDQYQILKYPLTTESAMKKIEDNNTLVFIVDLKADKKKIKAAVKKMYDIQAKKVNTLIRPDGKKKAYVKLTPDYDALDVANKIGII

SEQ ID NO: 69169 - protein, 708 aa, Setaria italica
  Transcript Sequence Number=SeqID_3195
  Gene Ontology: Mol. function=translation elongation factor activity; Cellular component=intracellular; Biological process=translational elongation
  Homolog annotation: Hit_ID=B9RBP7; Match level="QueryCoverage=99%, HitCoverage=89%, E-value=0.0, Identity=86%"; Hit description =Translation elongation factor G, putative
  Pfam annotation: Domain name=EFG_C; Domain location=610-698; Score =137.9; E_value=3.1e-38; Accession=PF00679.16; Description=Elongation factor G C-terminus
  Pfam annotation: Domain name=EFG_IV; Domain location=489-608; Score =226.0; E_value=9.6e-65; Accession=PF03764.10; Description=Elongation factor G, domain IV
  Pfam annotation: Domain name=GTP_EFTU; Domain location=18-291; Score =476.0; E_value=5.2e-140; Accession=PF00009.19; Description =Elongation factor Tu GTP binding domain
  Pfam annotation: Domain name=GTP_EFTU_D2; Domain location=334-401; Score=64.2; E_value=5e-16; Accession=PF03144.17; Description =Elongation factor Tu domain 2
  Pfam annotation: Domain name=MMR_HSR1; Domain location=21-148; Score=- 5.1; E_value=0.0029; Accession=PF01926.15; Description=GTPase of unknown function
  Pfam module annotation: Pfam domain module=EFG_C::EFG_IV::GTP _EFTU::GTP_EFTU_D2::MMR_HSR1; Domain location=610-698::489-608::18 -291::334-401::21-148
PRLSVVAMAGSDRQVPLEDYRNIGIMAHIDAGKTTTTERILYYTGRNYKIGEVHEGTATMDWMEQEQERGITITSAATTAFWNKHRINIIDTPGHVDFTLEVERALRVLDGAICLFDSVAGVEPQSETVWRQADKYGVPRICFVNKMDRLGANFFRTRDMIVANLGAKPLVIQLPIGSEDSFQGVVDLVRMKAIVWTGEELGAKFEYQDIPANLQEMAEDYRVQMLETIIELDDEVMEKYLEGIEPDEETVKKLIRKGTISASFVPVLCGSAFKNKGVQPLLDAVVDYLPSPLDLPAMKGTDPDDPELVLERNPSDDEPFSGLAFKIMTDPFVGSLTFVRIYSGKLVAGSYVLNANKDKKERIGRLLEMHANSKEDITVAVTGDIVALAGLKDTITGETLCEPDKPVVLERMEFPDPVIKVAIEPKTKADADKMATGLIKLAQEDPSFHFSRDEETNQTVIEGMGELHLDIIVDRLKREFRVEANVGAPQVNYRESISKVAEVQYVHKKQSGGSGQFADIIVRFEPLEAGSGYEFKSEIKGGSVPKEYVPGVMKGLEESLPNGVLAGYPVVDFRAVLVDGSYHDVDSSVLAFQIAARGAFREGMRKAGPRLLEPIMRVEVVTPEDHLGDVIGDLNSRRGQVNSFGDKPGGLKVVDAFVPLAEMFQYVSTLRGMTKGRASYTMQLAKFDVVPQHIQNQLSAAKTEEAAA

SEQ ID NO: 69170 - protein, 154 aa, Setaria italica
  Transcript Sequence Number=SeqID_3196
  Gene Ontology: Mol. function=DNA binding; Cellular component =chromosome; Biological process=nucleosome assembly
  Homolog annotation: Hit_ID=Q75L11; Match level="QueryCoverage=69%, HitCoverage=68%, E-value=9e-41, Identity=81%"; Hit description =Probable histone H2A.6
  Pfam annotation: Domain name=CBFD_NFYB_HMF; Domain location=33-97; Score=16.8; E_value=0.005; Accession=PF00808.15; Description=Histone- like transcription factor (CBFNF-Y) and archaeal histone
  Pfam annotation: Domain name=Histone; Domain location=27-100; Score =106.2; E_value=1.1e-28; Accession=PF00125.16; Description=Core histone H2AH2BH3H4
  Pfam module annotation: Pfam domain module=CBFD_NFYB_HMF::Histone; Domain location=33-97::27-100
  Subcellular localization annotation: CTP_CleavageSite=26; ConfidenceScore=5.12e-01
MDGGAAKVKKAAVGRKLGGPKKKPVSRSVKAGLQFPVGRIGRYLKKGRYAQRVGSGAPVYLAAVLEYLAAEVLELAGNAARDNKKNRIIPRHVLLAIRNDEELGRLLAGVTIAHGGVLPNINPVLLPKKAAERAEKAEKAAKSPKKAATKSPKK

SEQ ID NO: 69171 - protein, 397 aa, Setaria italica
  Transcript Sequence Number=SeqID_3197
  Gene Ontology: Mol. function=molecular_function; Cellular component =cellular_component; Biological process=biological_process
  Homolog annotation: Hit_ID=B6UEI4; Match level="QueryCoverage=100%, HitCoverage=68%, E-value=0.0, Identity=95%"; Hit description=Appr-1 -p processing enzyme family protein
  Pfam annotation: Domain name=Macro; Domain location=1-65; Score=5.2; E_value=0.00022; Accession=PF01661.13; Description=Macro domain
PARKVIHTVGPKYAVKYHTAAENALSHCYRSCLELLIENGLESIAMGCIYTEAKNYPREPAAHVAIRTVRRFLEKQKGNIAGVVFCTTSSSDTEIYKRLLPLYFPRDKQEEEIAVSKLPADVGDENGETVIDERKIRIRPLPAGVVDRTVTAAPIDLPLSDSGSALKRASFKLDSYLDPSFMSIIKDPDLRRREQWEKSAQAQKGFNYARLLGYGDLGCPSLSAAEEYSLHSRYLAKANSLNLSEIAEMKIIYRGGVDIEGRPVMVVVGAHFLLRCLDLERFVLHVVKEFEPLIQKPYTIVYLHSAASLQPQPDLGFMKRLQQILGRKHQRNLHAIYVLHPTLGLRTAVLAMQMFVDGEVWKKVVYVDRLVQLFRYVPREQLTIPDFVFQHDLEVNG

SEQ ID NO: 69172 - protein, 133 aa, Setaria italica
  Transcript Sequence Number=SeqID_3198
  Gene Ontology: Mol. function=transferase activity, transferring glycosyl groups
  Homolog annotation: Hit_ID=Q2RB54; Match level="QueryCoverage=100%, HitCoverage=19%, E-value=1e-25, Identity=51%"; Hit description =Glycosyl transferase family 8 protein, expressed
MKHKLLKDVSKKAASGSNGISAEMSPRSKSKNHAIKSKAKLKGALYLVELNNDIFKSNGPDMLKRYQRKDLSWRSKESKTVLRHDTVVNGKENHGQETVHEGNPKSCEHEYGSYCLWSTEHREVMKDAIVKKL

SEQ ID NO: 69173 - protein, 186 aa, Setaria italica
  Transcript Sequence Number=SeqID_3199
  Gene Ontology: Mol. function=protein binding; Cellular component =nucleus; Biological process=dendrite development
  Homolog annotation: Hit_ID=B6TCH8; Match level="QueryCoverage=90%, HitCoverage=92%, E-value=6e-68, Identity=79%"; Hit description=SSXT protein
  Pfam annotation: Domain name=SSXT; Domain location=17-84; Score=55.0; E_value=2.9e-13; Accession=PF05030.4; Description=SSXT protein (N -terminal region)
MQQPMPMQPQPPAMTPAAGITTEQIQKYLDENKQLILAILENQNLGKLAECAQYQTQLQKNLLYLAAIADAQPQTAVSRPQMAPPGASPGVGQYMSQVPMFPPRTPLTPQQMQEQQLQQQQAQLLNFSGQMVGRPGMVNGMPQGLQVHQTQTPAAVSKLDAGGAASEPSGTESHRSTGGDNDGGSD

SEQ ID NO: 69174 - protein, 307 aa, Setaria italica
  Transcript Sequence Number=SeqID_3200
  Gene Ontology: Mol. function=isomerase activity; Biological process =cell redox homeostasis
  Homolog annotation: Hit_ID=B6TB09; Match level="QueryCoverage=89%, HitCoverage=90%, E-value=1e-115, Identity=77%"; Hit description =APRL6-Zea mays adenosine 5'-phosphosulfate reductase-like
  Pfam annotation: Domain name=Thioredoxin; Domain location=65-167; Score=-32.3; E_value=0.088; Accession=PF00085.12; Description =Thioredoxin
MAGRLLPFLLLLALLPSPAPAAASARNKAPVEPDSGWCPGLEEGGLPPFAAALRATCPVSAEGYSAEEVNGEELVRMLDGKKEYTAVLFYASWCPFSQRMRPLFDDLSSMFPQIKHLAVEESNVMPAIFSRYAVRTLPSIIITHGSYAFWPLGSKDLDSMANFYTAVTGQEPVAYIGPRKWSAAQNTHYAKFWNSSISEAVKQEPYLAFSILFICLRIFMFFFPKCFALIKGFWTQYFQQINLGILAKLNQLLECVPHAVDVRKVWSKLRLVAGAKNARAWASSLASVSLGGQSSPRAAVGLMGSTF

SEQ ID NO: 69175 - protein, 71 aa, Setaria italica
  Transcript Sequence Number=SeqID_3201
  Homolog annotation: Hit_ID=B3VTB4; Match level="QueryCoverage=91%, HitCoverage=52%, E-value=3e-22, Identity=75%"; Hit description =Putative retroelement protein
KTPKEAHKGLNSLLILVAWELSKHRNACVFEKKRPNIQEVLRSVSLEGGLWCSAGASKLQELVSRSLIFRA

SEQ ID NO: 69176 - protein, 313 aa, Setaria italica
  Transcript Sequence Number=SeqID_3202
  Gene Ontology: Mol. function=sequence-specific DNA binding; Cellular component=intracellular; Biological process=negative regulation of transcription from RNA polymerase II promoter
  Homolog annotation: Hit_ID=B6TRK1; Match level="QueryCoverage=96%, HitCoverage=96%, E-value=1e-110, Identity=69%"; Hit description=Dr1 -associated corepressor
  Pfam annotation: Domain name=CBFD_NFYB_HMF; Domain location=7-71; Score=74.8; E_value=3.2e-19; Accession=PF00808.15; Description =Histone-like transcription factor (CBFNF-Y) and archaeal histone
  Pfam annotation: Domain name=Histone; Domain location=1-72; Score =4.9; E_value=0.03; Accession=PF00125.16; Description=Core histone H2AH2BH3H4
  Pfam module annotation: Pfam domain module=CBFD_NFYB_HMF::Histone; Domain location=7-71::1-72
MRKKLDTRFPAPRIKKIMQADEDVGKIALAVPVLVSKALELFLQDLCDRTYDITIRKGVKTVGSSHLKQCIQTYNVYDFLREVVSKVPDTGTSDAIADDKLGKRRKAEEDGSEEELKRTRNEAESHTSNGRGRGRGRGRGRRGGRGAWKEVVITHEQFVENQSSKPAGLKVEIADEVPDATEAKEATPVSSARASIRNIDLNLDPAEEDDEVAVPPEAQPSAPATDPAAANLGLTAPATSSAAANLGLTTPATSSAATTAGPSVPGLNEGAKLKDLLGGWELPDMNKMDMDPVQFALSSNHKLDDDEDYDNED

SEQ ID NO: 69177 - protein, 363 aa, Setaria italica
  Transcript Sequence Number=SeqID_3203
  Gene Ontology: Mol. function=nucleic acid binding; Cellular component= intracellular
  Homolog annotation: Hit_ID=B9HXB5; Match level="QueryCoverage=97%, HitCoverage=52%, E-value=1e-152, Identity=73%"; Hit description =Chromatin remodeling complex subunit (Fragment)
  Pfam annotation: Domain name=Helicase_C; Domain location=203-281; Score=71.7; E_value=2.7e-18; Accession=PF00271.23; Description =Helicase conserved C-terminal domain
VTSRGFYPINIRICRTNCDLQSQKAQYVILLSGTPALSRPIELFTQLQALYPTVYKNVSEYGNRYCKGGFFGVYQGASNHEELHNLMKATVMIRRLKKDVLSQLPVKRRQQIFLDLSEKDVKYVRALFHELETLKIKIESADSKEMIDSLKFTQKNLITKLYTDSATAKIPAVLDFLGTVIEADCKFLIFAHHQNMVEAIEQYLLKKKVKCIKIDGQTPVTTRQTLVTDFQNKDDIRAAVLSIRAGGYGLTLTAASTVIFAELSWTPGDIIQAEDRAHRIGQVSSVNIYYLLSNDTIDDLMWDAVQGKLENLGQMLDGQENTLDVSQIDSRPSPSKQQKTLDGFLKRCSTSTEGQPSTKHPRF

SEQ ID NO: 69178 - protein, 407 aa, Setaria italica
  Transcript Sequence Number=SeqID_3204
  Gene Ontology: Mol. function=transporter activity; Cellular component= membrane; Biological process=oligopeptide transport
  Homolog annotation: Hit_ID=Q336M5; Match level="QueryCoverage=80%, HitCoverage=69%, E-value=1e-140, Identity=76%"; Hit description=POT family protein, expressed
  Pfam annotation: Domain name=MFS_1; Domain location=7-394; Score= -14.1; E_value=0.082; Accession=PF07690.8; Description=Major Facilitator Superfamily
  Pfam annotation: Domain name=PTR2; Domain location=69-407; Score =263.4; E_value=5.4e-76; Accession=PF00854.13; Description=POT family
  Pfam module annotation: Pfam domain module=MFS_1::PTR2; Domain location=7-394::69-407
WKAPAVILAFEFLESIAYSGIALNLVVYLGTVLHGTTASNAANVDAWNGATFLTPVLGAFLADTYWGKYKTTAISIIFYVVGLLVITASAVIPSLRPASCEGSSCPPATGFQYFVLFASLYLISIGTGGVKSALLPFGADQYNDSNLEESKNKQLFFSWFFIAINLGVFISGTVVVWIQQNVAWSLGFGISCVCLVIATVTFFAGTPFYRVQLPTGSPLKSIVMVFVASFKKRRVAVPDDSSLLFEGDDAESSNTVPNKLEHTDEFRCLDKAAVVLDEQEIKDSHRPWLLCTVTQVEEVKILIRMLPIWFTCVFYAAAMCQTATTFVQQGNAMNTKIGSFSVPAASMNSASVIFMMIWVAFQDSVVIPIARRYTGNIAGLTLLQRMGVGRFLAVPALAAAALMETLR

SEQ ID NO: 69179 - protein, 159 aa, Setaria italica
  Transcript Sequence Number=SeqID_3205
  Gene Ontology: Mol. function=transporter activity; Cellular component= membrane; Biological process=oligopeptide transport
  Homolog annotation: Hit_ID=Q336M5; Match level="QueryCoverage=98%, HitCoverage=32%, E-value=1e-51, Identity=65%"; Hit description=POT family protein, expressed
GNIAGLTLLQRMGVGRFLAVPALAAAALMETLRLRRVRAGGNLSIGWQLPQFVILSCSDVFCGIAQLEFFYAEAPTSMRSLCSAFQFLAMSLAYYVNTLVVSVVAAATTAGGGKGWLPADLNDGHLDYYFWLWTGISAVNYVVYTAFAKRYTVKKVVRQ

SEQ ID NO: 69180 - protein, 52 aa, Setaria italica
  Transcript Sequence Number=SeqID_3206
KHPVRWYRGGALHGHKGLPLIAKDDLPRSFILKDQQSAVCEPLRWLIGSLLG

SEQ ID NO: 69181 - protein, 76 aa, Setaria italica
  Transcript Sequence Number=SeqID_3207
  Gene Ontology: Mol. function=protein serine/threonine kinase activity; Biological process=protein amino acid phosphorylation
  Homolog annotation: Hit_ID=B6UCC0; Match level="QueryCoverage=92%, HitCoverage=9%, E-value=1e-24, Identity=78%"; Hit description=Wall -associated kinase 3
  Pfam annotation: Domain name=EGF_CA; Domain location=40-71; Score =29.4; E_value=1.5e-05; Accession=PF07645.7; Description=Calcium binding EGF domain
GEGERKGGGRCVDSPNGPGYLCNCSKGYEGNPYLDDGCHDVDECNYSPCPSSGGICHNLKGSYRCSCRVGRKFNEQ

SEQ ID NO: 69182 - protein, 297 aa, Setaria italica
  misc_feature (290)..(290): Xaa can be any naturally occurring amino acid
  Transcript Sequence Number=SeqID_3208
  Gene Ontology: Mol. function=ATP-dependent peptidase activity; Cellular component=integral to membrane; Biological process=ATP -dependent proteolysis
  Homolog annotation: Hit_ID=B9RS08; Match level="QueryCoverage=55%, HitCoverage=30%, E-value=1e-52, Identity=63%"; Hit description=ATP -dependent peptidase, putative
  Pfam annotation: Domain name=LON; Domain location=85-268; Score=28.1; E_value=1.4e-06; Accession=PF02190.8; Description=ATP-dependent protease La (LON) domain
SSTVEELNVEVVDEDEEEEEEEQGAGNEEDDDVDAFLRANDGDGVASTSGPFTFNTSLASLHTYLGEVDDTRGRVSLLDGGTVINLPMFYLQGVVLFPGATLPLRVIQSRLVVTIDKALRLADAPCTIGVVLMRRHSNHRHYAALVGTTAEIRQLGRLDDGSLNVVARGQQRFRLRRHWIDVDRVVWGEVQIIEEDIPLRTPRDAFAQLAACNRFNLHTSSSVISLDMSPIKQDHIDSELECDTPSPNASNHSAVDIRLSHLGSQLSDSMKSSSDEEGDLMHQRWRQKRXSMRESGA

SEQ ID NO: 69183 - protein, 85 aa, Setaria italica
  Transcript Sequence Number=SeqID_3209
  Gene Ontology: Mol. function=nucleic acid binding
  Homolog annotation: Hit_ID=B9S9X4; Match level="QueryCoverage=55%, HitCoverage=13%, E-value=1e-12, Identity=68%"; Hit description =Heterogeneous nuclear ribonucleoprotein A1, putative
  Pfam annotation: Domain name=RRM_1; Domain location=1-64; Score=32.5; E_value=1.8e-06; Accession=PF00076.14; Description=RNA recognition motif. (a.k.a. RRM, RBD, o
ALKEDEFKEFFSKFGKVVEHEIIRDHATNRSRGFGFIVFDAEKTVDELLAKKGNMIDLNGSQVRFRVVLSELCKSSFVQLGWQQV

SEQ ID NO: 69184 - protein, 276 aa, Setaria italica
  Transcript Sequence Number=SeqID_3210
  Gene Ontology: Mol. function=nucleic acid binding; Cellular component= ribonucleoprotein complex
  Homolog annotation: Hit_ID=B9S9X4; Match level="QueryCoverage=46%, HitCoverage=36%, E-value=1e-36, Identity=62%"; Hit description =Heterogeneous nuclear ribonucleoprotein A1, putative
  Pfam annotation: Domain name=RRM_1; Domain location=30-101; Score =68.1; E_value=3.3e-17; Accession=PF00076.14; Description=RNA recognition motif. (a.k.a. RRM, RBD, o
EHVINGKPVEIKRTIPKGAAPLKDFKTKKIFVGGLPTALKEDEFKEFFSKFGKVVEHEIIRDHATNRSRGFGFIVFDAEKTVDELLAKKGNMIDLNGSQVEIKKAEPKKPSNPPPRSLDSEPRGRPYAESYDGFGSSYNYGGSFGPYRSPGSFGARPGGYSSVYGPGDYGSGYGAYGGALGAYRGESSLYSSRFGSTYGGSFGAYGGGSYAGGLAGAYGRDPEGYGGSSYGPSYDSSGASAGSGAGYGTGGLYGARTGYGSTGGSGAAGRYHPYGR

SEQ ID NO: 69185 - protein, 106 aa, Setaria italica
  Transcript Sequence Number=SeqID_3211
LYILVITVLQMMCLSCCDHHEFWKYHFHRYGPVLILSSDVGRQLAGREYTHKYSLLAALSAIWSVKHHADSVFIPNDINMRHFALPPTFSGFQHLHVYVHDSLLEN

SEQ ID NO: 69186 - protein, 290 aa, Setaria italica
  misc_feature (201)..(201): Xaa can be any naturally occurring amino acid
  Transcript Sequence Number=SeqID_3212
  Gene Ontology: Mol. function=phosphoenolpyruvate carboxylase activity; Cellular component=cytoplasm; Biological process=carbon utilization by fixation of carbon dioxide
  Homolog annotation: Hit_ID=P29193; Match level="QueryCoverage=100%, HitCoverage=30%, E-value=1e-168, Identity=96%"; Hit description =Phosphoenolpyruvate carboxylase, housekeeping isozyme
NQTVDLVLTAHPTQAVRRSLLQKHGRIRNCLSQLYAKDITPDEKQELDEALQREIQAAFRTDEIRRTPPTPQDEMRAGMSYFHETIWKGVPKFLRRVDTALKNIGINERVPYNAPLIQFSSWMGGDRDGNPRVTPEVTRDVCLLARMMAANLYNAQIEDLMFELSMWRCSDELRVKADQLHRSSKKDTTKHYIEFWKQVPXSEPYRVILSDVRDKLYNTRERARHLLASGYSEIPEEATFTDVEQFLEPLELCYRSLCACGDRSVADGSLLDFLRQVSTFGLSLVRLDIR

SEQ ID NO: 69187 - protein, 94 aa, Setaria italica
  Transcript Sequence Number=SeqID_3213
  Homolog annotation: Hit_ID=Q67VB5; Match level="QueryCoverage=54%, HitCoverage=13%, E-value=2e-14, Identity=72%"; Hit description =Transducin family protein-like
  Pfam annotation: Domain name=WD40; Domain location=45-81; Score=21.2; E_value=0.0043; Accession=PF00400.24; Description=WD domain, G-beta repeat
MSSIRQEETQAQDVSETEHTISFLSQSNRPSLQNSANPSLSSCLYQCIATLKGNSFYVSSLAIDGDSLYIASSNGHIRLWPLDMAMDVRQAEHG

SEQ ID NO: 69188 - protein, 66 aa, Setaria italica
  Transcript Sequence Number=SeqID_3214
  Gene Ontology: Mol. function=ubiquitin protein ligase binding; Cellular component=cullin-RING ubiquitin ligase complex; Biological process=ubiquitin-dependent protein catabolic process
  Homolog annotation: Hit_ID=Q0WL17; Match level="QueryCoverage=89%, HitCoverage=8%, E-value=1e-21, Identity=77%"; Hit description=Cullin 3-like protein
MSGGGPPRKRNFKIEAFKHRVELDPKYAERTWKVLEHAIHEIYNHNASGLSFEELYRSAYNMVLHK

SEQ ID NO: 69189 - protein, 135 aa, Setaria italica
  Transcript Sequence Number=SeqID_3215
  Gene Ontology: Mol. function=catalytic activity
  Homolog annotation: Hit_ID=Q7XTS7; Match level="QueryCoverage=99%, HitCoverage=22%, E-value=2e-60, Identity=85%"; Hit description =OSJNBa0008M17.6 protein
REATSFITDDVWYGIYAGPLPETFVRADGAFIPFADDFDINSVSTSVKGVGVIGDVKAIDLQSPIGSLIGRQVVKVGRSSGLTTGTVVAYALEYNDEKGICFFTDFLVVGENQQTFDLEGDSGSLIILTGQDGEK

SEQ ID NO: 69190 - protein, 298 aa, Setaria italica
  Transcript Sequence Number=SeqID_3216
  Gene Ontology: Mol. function=catalytic activity
  Homolog annotation: Hit_ID=Q7XTS7; Match level="QueryCoverage=88%, HitCoverage=45%, E-value=9e-73, Identity=57%"; Hit description =OSJNBa0008M17.6 protein
VISYSFPLIIIVFCIQLPGVKCVKGVGVIGDVKAIDLQSPIGSLIGRQVVKVGRSSGLTTGTVVAYALEYNDEKGICFFTDFLVVGENQQTFDLEGDSGSLIILTGQDGEKPQPIGIIWGGTANRGRLKLKSGQGPENWTSGVDLGRLLDLLELDLITTSEGLQAALEEQRITLAAAAAAANSTAAESSPVAGPQENDKVDKIYEPLGIFQPIPRDGSATSTDQANENVEEHQFIPNGPNLSGISPTRDGQEGNGELNNLPDLENPADDTNICIGLHLGEREPKRLRSDSTLNIDLQK

SEQ ID NO: 69191 - protein, 85 aa, Setaria italica
  Transcript Sequence Number=SeqID_3217
  Gene Ontology: Mol. function=ATPase activity, coupled to transmembrane movement of substances; Cellular component=integral to membrane; Biological process=transport
  Homolog annotation: Hit_ID=O23998; Match level="QueryCoverage=100%, HitCoverage=6%, E-value=2e-22, Identity=64%"; Hit description=P -glycoprotein homologue
IFLMHSTVFVSGLAFATYFCWRLALISFPLVLLLIIPGLIYGKYLLYLSRQSRHEYANANSLVEQALGSIKTVYSFTAEKRIIQK

SEQ ID NO: 69192 - protein, 317 aa, Setaria italica
  Transcript Sequence Number=SeqID_3218
  Gene Ontology: Mol. function=hydrolase activity; Cellular component =extracellular region
  Homolog annotation: Hit_ID=B6SXU7; Match level="QueryCoverage=94%, HitCoverage=55%, E-value=1e-157, Identity=88%"; Hit description =Heparanase-like protein 3
  Pfam annotation: Domain name=Glyco_hydro_79n; Domain location=1-208; Score=164.3; E_value=3.7e-46; Accession=PF03662.6; Description =Glycosyl hydrolase family 79, N-terminal domain
DELNAFFQKSGAKVVFGLNALNGRVPLPDGSMGGPWDYTIAASLIRYTAYKGYQIHGWELGNELSGSGVGTRIGAGQYAADVIALRRIVDDIYRSNPSKPLVLAPGGFFEPGWFTELIVKTKPNLLNVITHHIYNLGPGRDTHLIEKILDPSVLDGMISTFSNLQGILKSTGTSTVAWVGEAGGAYNSGHHLVTDAFVFSFWFLDQLGMSAKYDTKSYCRQSLIGGNYGLLNTTTFQPNPDYYSALLWHRLMGTKVLATTFTGTNKIRAYAHCARDSPGITLLLINLSGNTKTQVSVTQTAAVAGGAHNHGARRSNT

SEQ ID NO: 69193 - protein, 102 aa, Setaria italica
  Transcript Sequence Number=SeqID_3219
RVRRPRARGVQLQVRRRRPHRPHAGGGRRRERPPGVPAEEVVTAPLHWECQRDDESLGGVISNKNAFSCVLASSRPFFILLAVVVCNVINHATCVLSFSFLF

SEQ ID NO: 69194 - protein, 51 aa, Setaria italica
  Transcript Sequence Number=SeqID_3220
  Gene Ontology: Mol. function=protein serine/threonine kinase activity; Biological process=protein amino acid phosphorylation
  Homolog annotation: Hit_ID=B9S062; Match level="QueryCoverage=80%, HitCoverage=4%, E-value=2e-10, Identity=73%"; Hit description =Serine/threonine-protein kinase PBS1, putative
IKSSNVLLDERLNAKVSDFGLSKPLGEDGRGQVTTQVKGTMVITYLSTTAL

SEQ ID NO: 69195 - protein, 811 aa, Setaria italica
  misc_feature (797)..(797): Xaa can be any naturally occurring amino acid
  Transcript Sequence Number=SeqID_3221
  Gene Ontology: Mol. function=protein serine/threonine kinase activity; Cellular component=plasma membrane; Biological process =protein amino acid phosphorylation
  Homolog annotation: Hit_ID=B9S062; Match level="QueryCoverage=99%, HitCoverage=83%, E-value=0.0, Identity=53%"; Hit description =Serine/threonine-protein kinase PBS1, putative
  Pfam annotation: Domain name=LRR_1; Domain location=119-141; Score =14.6; E_value=0.43; Accession=PF00560.25; Description=Leucine Rich Repeat
  Pfam annotation: Domain name=LRR_1; Domain location=143-166; Score =8.2; E_value=8.1; Accession=PF00560.25; Description=Leucine Rich Repeat
  Pfam annotation: Domain name=LRR_1; Domain location=16-38; Score =15.3; E_value=0.25; Accession=PF00560.25; Description=Leucine Rich Repeat
  Pfam annotation: Domain name=LRR_1; Domain location=168-189; Score =14.2; E_value=0.56; Accession=PF00560.25; Description=Leucine Rich Repeat
  Pfam annotation: Domain name=LRR_1; Domain location=191-214; Score =5.0; E_value=34; Accession=PF00560.25; Description=Leucine Rich Repeat
  Pfam annotation: Domain name=LRR_1; Domain location=216-238; Score =5.6; E_value=26; Accession=PF00560.25; Description=Leucine Rich Repeat
  Pfam annotation: Domain name=LRR_1; Domain location=240-261; Score =3.4; E_value=68; Accession=PF00560.25; Description=Leucine Rich Repeat
  Pfam annotation: Domain name=LRR_1; Domain location=264-286; Score =7.2; E_value=13; Accession=PF00560.25; Description=Leucine Rich Repeat
  Pfam annotation: Domain name=LRR_1; Domain location=40-62; Score =15.8; E_value=0.18; Accession=PF00560.25; Description=Leucine Rich Repeat
  Pfam annotation: Domain name=LRR_1; Domain location=64-85; Score=9.9; E_value=3.9; Accession=PF00560.25; Description=Leucine Rich Repeat
  Pfam annotation: Domain name=LRR_1; Domain location=94-117; Score =2.3; E_value=1.1e+02; Accession=PF00560.25; Description=Leucine Rich Repeat
  Pfam annotation: Domain name=Pkinase; Domain location=542-811; Score =124.0; E_value=4.8e-34; Accession=PF00069.17; Description=Protein kinase domain
  Pfam annotation: Domain name=Pkinase_Tyr; Domain location=542-773; Score=80.1; E_value=8.2e-21; Accession=PF07714.9; Description =Protein tyrosine kinase
  Pfam module annotation: Pfam domain module=LRR_1::LRR_1::LRR_1::LRR _1::LRR_1::LRR_1::LRR_1::LRR_1::LRR_1::LRR_1::LRR_1::Pkinase::Pkinase_ Tyr; Domain location=119-141::143-166::16-38::168-189::191-214::216 -238::240-261::...
  Pfam module annotation: Domain location=264-286::40-62::64-85::94 -117::542-811::542-773
KDLSGPLPSTIGSLSNLQNLILVGCSFSGEIPKELGQLSKLIFLSLNSNKFSGSIPASLGNLSKLYWFDLADNKLTGTLPIFDGTNPGLDNLTNTKHFHFGINQLSGTIPREIFSSKMKLIHLLLDNNNFSGSIPPTLGLLNPLEVLRFDNNPQLGGPVPSNINNLTKLAELHLENCKLTGPLPDLTGMSALSFVDMSNNSFNASDAPNWFTTLPSLTSLFLENLQIGGQLPQALFSLPAVQTLRLRGNRFNGTLTIGSDFSTQLQLIDLQNNQISAITVGGSQYSKTLILVGNPICVPGSTDNYCVAPGHSNPTAAPYSTARNCSAVPTPCLSNQLLSPACICAVPYRGTLFFRSPSFSDLSSPSNFVPLEQDMKTKFAKLNVPVDSIAIHEPFFDSNNNLQMSLELFPSGKVQFSEQDISDVGFILSNQTYKPPAMFGPYYFIGQQYSFANDLLVPSTSKKTNRLPLIIGASAGGAVLAAAVVAIVVCIARRKRTPKRTEDRSQSFVSWDMKSTSASTVPQLRGARMFSFDELRKITNNFSEANDIGNGGYGKVYRGTLPSGQLVAVKRSEQGSLQGSLEFRTEIELLSRVHHKNVVSLVGFCLDQDEQILVYEYVPNGTLKESLTGKSGVRLDWRRRLRVVLGAAKGVAYLHELADPPIVHRDIKSSNVLLDERLNAKVSDFGLSKPLGEDGRGQVTTQVKGTMGYLDPEYYMTQQLTEKSDVYSFGVLMLEVVTARKPLERNRYIVREVKAAVDRSKDMYGLHELVDPVLGAAPSALAGLEQFVDLALRCVEXAGADRPSSGRGRRR

SEQ ID NO: 69196 - protein, 83 aa, Setaria italica
  misc_feature (57)..(57): Xaa can be any naturally occurring amino acid
  misc_feature (65)..(65): Xaa can be any naturally occurring amino acid
  Transcript Sequence Number=SeqID_3222
  Gene Ontology: Mol. function=signal transducer activity; Biological process=regulation of transcription, DNA-dependent
  Homolog annotation: Hit_ID=B9S2C2; Match level="QueryCoverage=61%, HitCoverage=13%, E-value=2e-14, Identity=58%"; Hit description=Twin lov protein, putative
GGWREAVRAQRAHQVAILNYRRDGSPHWVLLHLAPVFQARDGSLLHFLAVQVPIDAXRRRAGAAXGAAGGVLAACREEARGDE

SEQ ID NO: 69197 - protein, 517 aa, Setaria italica
  misc_feature (39)..(39): Xaa can be any naturally occurring amino acid
  Transcript Sequence Number=SeqID_3223
  Gene Ontology: Mol. function=sequence-specific DNA binding; Cellular component=microtubule associated complex; Biological process =microtubule-based movement
  Homolog annotation: Hit_ID=B9T259; Match level="QueryCoverage=94%, HitCoverage=80%, E-value=1e-151, Identity=55%"; Hit description =Osmotic avoidance abnormal protein, putative
  Pfam annotation: Domain name=Kinesin; Domain location=14-322; Score =404.6; E_value=1.7e-118; Accession=PF00225.15; Description=Kinesin motor domain
SAAPSSQPVRVVLRVRPFLPSEATSATAPCISLLGSHPXGEVTVQLKDQHTSRSEHYRLDAFFGQEDDINQIFDREVRAVIPGIFEGINATVFAYGATGSGKTYTMQGTEDSPGLIPLAASTVLALCTGTWCSVEISYYEVYMERCYDLLEPKAKEVMALDDKDGNMQLKGLSWVPVRSMEEFQELYSIGVQRRKVAHTGLNDVSSRSHAVLSLRVSADVVKGKFNLIDLAGSEDNRRTFNEGIRLQESAKINQSLFALSNVISALNKNELRIPYRESKLTRVLQDSLGGSSRSVMIACLNPAEYQESVNTVSLAARSRHVGNFTCSASKQETPKVKVDMEAKLRAWLESKGKTKSIQRMDGLFSPTASKTSFSVSHMKQPASSRISCRAKAMDQDSGKIKKILFDPEPEVHVPIENIPWEHMQNEVNTPKKAVLPSVTPCKEKHEASLRKALSPISSNMEPQTPIETPKVEKIPGATPLDKFNALGSNLKEALVQQYLDFLNEGNKEELQQLKGIG

SEQ ID NO: 69198 - protein, 72 aa, Setaria italica
  misc_feature (54)..(72): Xaa can be any naturally occurring amino acid
  Transcript Sequence Number=SeqID_3224
  Subcellular localization annotation: CTP_CleavageSite=39; ConfidenceScore=5.05e-01
EATKLLDMPTMALSSSSMFSFLIHSPLVFLNGNFYPMICSEQLRLIGPILFLTXXXXXXXXXXXXXXXXXXX

SEQ ID NO: 69199 - protein, 290 aa, Setaria italica
  Transcript Sequence Number=SeqID_3225
  Gene Ontology: Mol. function=nucleotide binding; Cellular component =chromatin; Biological process=defense response
  Homolog annotation: Hit_ID=Q2R8K0; Match level="QueryCoverage=98%, HitCoverage=26%, E-value=7e-80, Identity=56%"; Hit description =Nitrate-induced NOI protein, expressed
MLEIDARESAVPNDIVHLPGLLHLGIRDGTKLPDRIGLITSLQTLKCFDLGCNSEDNVQSLGELINLRDLHLTCSKEVPHEHLKRKLVALASSFGRLANLKSLTLAHGAVGMTMFVDHSSAIFSTPMFLQRLELPPICTFSRLPEWIGKLHKLCVLKIVVRVLLRSDIDILTGLPGLTVLSLYVRQPNAECVVFNSGAFPVLKYFKYRCSALCIAFREEALPNLRRLKVCFNFHRDEIYSHMISGVEHLLNLKEIAVRIGAADGGVEESDRRAVESAFESTIHKHPRFPI

SEQ ID NO: 69200 - protein, 240 aa, Setaria italica
  misc_feature (15)..(15): Xaa can be any naturally occurring amino acid
  misc_feature (17)..(17): Xaa can be any naturally occurring amino acid
  Transcript Sequence Number=SeqID_3226
  Gene Ontology: Mol. function=ribonuclease activity; Cellular component=chloroplast
  Homolog annotation: Hit_ID=B9T6X7; Match level="QueryCoverage=100%, HitCoverage=32%, E-value=7e-62, Identity=52%"; Hit description =Ribonuclease II, putative
IDEFLRKQKIFLDPXVXLECAWMELSEKDKSNTVEEFAEIVYGNKESLESYCAHFLLSRDIVYFVKVESRDYSMYQPRSPPQVEELIRRKLAKEEAEKELEEFVHLLKSAKALPMESKPPKSSWLVDEKVRQKIEALQAYAVDACDDEQRRLAGNILKAMGFTRTSSAALKLLINVGYFPVHVNLDLFKYDVRIRYTEEVLSAAEELLVDRPDSDMHIRKDLSTLKVYAIDVDEADELDD

SEQ ID NO: 69201 - protein, 106 aa, Setaria italica
  Transcript Sequence Number=SeqID_3227
FGPPRPAAQARGRGGGGGGARGPHMQDQPQLGPPYRVPSQMTPPHGAAVFYHPQYGYWYPPDYPFQQALYNPQVLQHYYPQMYGPTSPSGPPYQYMGYMPGWSRSS

SEQ ID NO: 69202 - protein, 74 aa, Setaria italica
  Transcript Sequence Number=SeqID_3228
  Subcellular localization annotation: CTP_CleavageSite=48; ConfidenceScore=5.20e-01
EVLTYIIPKTALGINQSPPPTFRLQLPPHTVSRESDDASGSQSAPPTSSAEATSTNNQEASGPVTSNSDANTSN

SEQ ID NO: 69203 - protein, 158 aa, Setaria italica
  Transcript Sequence Number=SeqID_3229
CTEDVLKLGAAVFYHPQYGYWYPPDYPFQQALYNPQVLQHYYPQMYGPTSPSGPPYQYMGYMPGGPSPRTGFSSSMQQPARPPFFQQPTAQMEGSFPSGSSLPPNFRLQLPPHTVSRESDDASGSQSAPPTSSAEATSTNNQEASGPVTSNSDANTSN

SEQ ID NO: 69204 - protein, 111 aa, Setaria italica
  Transcript Sequence Number=SeqID_3230
  Gene Ontology: Mol. function=indole-3-glycerol-phosphate synthase activity; Cellular component=chloroplast; Biological process =tryptophan metabolic process
  Homolog annotation: Hit_ID=B6UGU8; Match level="QueryCoverage=99%, HitCoverage=28%, E-value=2e-49, Identity=89%"; Hit description =Indole-3-glycerol phosphate synthase
  Pfam annotation: Domain name=IGPS; Domain location=1-104; Score= -115.4; E_value=0.0011; Accession=PF00218.13; Description=Indole-3 -glycerol phosphate synthase
LGMTALVEVHDERELDRVLKIDGVQLIGINNRSLGTFEVDTANTNLLLEKRGDIIRKKQIMVVSESGLFTPADVAYVQNAGVSAVLVGESLVTQEDPGRAIVGLFGKELLH

SEQ ID NO: 69205 - protein, 75 aa, Setaria italica
  misc_feature (41)..(41): Xaa can be any naturally occurring amino acid
  Transcript Sequence Number=SeqID_3231
EDFKPAKRRTPSEAGISDMFGVAPGSIPGDWFSACGGSTAXAGPSSAVTDDEFGLEMQQFMSLLPLSIDEHSWNA

SEQ ID NO: 69206 - protein, 180 aa, Setaria italica
  misc_feature (160)..(160): Xaa can be any naturally occurring amino acid
  Transcript Sequence Number=SeqID_3232
  Gene Ontology: Mol. function=transferase activity; Cellular component= integral to membrane
  Homolog annotation: Hit_ID=B6U3D9; Match level="QueryCoverage=87%, HitCoverage=45%, E-value=3e-36, Identity=60%"; Hit description=Wax synthase isoform 1
PVTLRDPKKSAAARPGLGLVESAAMAALLTAVVSLYRYEERINGYVLLALYSVHMYLALELVLAASAAAARALLGLDLEPQFDRPYLSSSLRDFWGRRWNLSVSALLRQVVFRPVRARLGAAAAGVLAAFAVSGLMHEAMFSYITLRPPTGEATVFFALXGAGVVAEWWWAAHERWLPPA

SEQ ID NO: 69207 - protein, 209 aa, Setaria italica
  misc_feature (119)..(119): Xaa can be any naturally occurring amino acid
  Transcript Sequence Number=SeqID_3233
MGAVSSQSGVEKKEAVDHVRQDNVVMENMVNANEEKIVMTNDDDKGDGVVDRLIDEQIADVALVPACMEGTFDDVINAGKTVEGFAEQSPEEDSGLKDKDMEISVEDEISEDDQVKRCXTMLSDTSDHEFVEKLDRSIEVEHFQQAELKQKLNLMTMVASAYVAVTQPEEKQVHQAEVNQELGSIPIQPREHSGEELEGERTATRLGSW

SEQ ID NO: 69208 - protein, 134 aa, Setaria italica
  misc_feature (37)..(37): Xaa can be any naturally occurring amino acid
  Transcript Sequence Number=SeqID_3234
  Gene Ontology: Mol. function=metalloexopeptidase activity; Cellular component=chloroplast; Biological process=cellular process
  Homolog annotation: Hit_ID=B4FNU5; Match level="QueryCoverage=100%, HitCoverage=35%, E-value=1e-66, Identity=89%"; Hit description =Methionine aminopeptidase
  Pfam annotation: Domain name=Peptidase_M24; Domain location=1-134; Score=-33.2; E_value=9.7e-07; Accession=PF00557.16; Description =metallopeptidase family M24
KSVCTSVNECTCHGIPDSRELQDGDIINIDVTVYLNXHGVLLQGYHGDTSRTYLCGDVDESTKQLVKVTEECMMRGISACRHGASFKEIGQRISEHASKYGYGIDPFVGHGIGRIFHCEPIIWSTYDYEPGFMV

SEQ ID NO: 69209 - protein, 150 aa, Setaria italica
  misc_feature (141)..(141): Xaa can be any naturally occurring amino acid
  Transcript Sequence Number=SeqID_3235
  Gene Ontology: Mol. function=metalloexopeptidase activity; Cellular component=chloroplast; Biological process=cellular process
  Homolog annotation: Hit_ID=B4FNU5; Match level="QueryCoverage=98%, HitCoverage=41%, E-value=5e-73, Identity=89%"; Hit description =Methionine aminopeptidase
  Pfam annotation: Domain name=Peptidase_M24; Domain location=1-150; Score=-41.6; E_value=4.1e-06; Accession=PF00557.16; Description =metallopeptidase family M24
HGVLLQGYHGDTSRTYLCGDVDESTKQLVKVTEECMMRGISACRHGASFKEIGQRISEHASKYGYGIDPFVGHGIGRIFHCEPIIWSTYDYEPGFMVAGQTFTIPTLSMGSTQCVVLDDGWTAVAADGSLSAQFEHTVLVXTRDGVEILT

SEQ ID NO: 69210 - protein, 366 aa, Setaria italica
  misc_feature (73)..(73): Xaa can be any naturally occurring amino acid
  misc_feature (89)..(89): Xaa can be any naturally occurring amino acid
  Transcript Sequence Number=SeqID_3236
  Gene Ontology: Mol. function=metalloexopeptidase activity; Cellular component=chloroplast; Biological process=cellular process
  Homolog annotation: Hit_ID=B4FNU5; Match level="QueryCoverage=100%, HitCoverage=100%, E-value=1e-170, Identity=80%"; Hit description =Methionine aminopeptidase
  Pfam annotation: Domain name=Peptidase_M24; Domain location=130-364; Score=227.3; E_value=4e-65; Accession=PF00557.16; Description =metallopeptidase family M24
  Subcellular localization annotation: CTP_CleavageSite=27; ConfidenceScore=5.58e-01
MAVRVPAAELKQHPSSPFTASRCRSPRDAALPAPLRVASRTPRRPGVSNRIICRCTYTAILPIYAQNLRKSGXAELQGIGGARRREPLXRGAVSARLPVPDHIPRPPYVGADAIPDVCPDRQVHDGESIMLMLDACELAARVLQYAGTLVKPAVTTDEIDRAVHQMIIDAGAYPSPLGYGGFPKSVCTSVNECTCHGIPDSRELQDGDIINIDVTVYLNGYHGDTSRTYLCGDVDESTKQLVKVTEECMMRGISACRHGASFKEIGQRISEHASKYGYGIDPFVGHGIGRIFHCEPIIWSTYDYEPGFMVAGQTFTIEPTLSMGSTQCVVLDDGWTAVAADGSLSAQFEHTVLVTRDGVEILTGCP

SEQ ID NO: 69211 - protein, 157 aa, Setaria italica
  misc_feature (1)..(9): Xaa can be any naturally occurring amino acid
  Transcript Sequence Number=SeqID_3237
XXXXXXXXXNGKSTILYAEPAARNTQFIIFLSNARLGYSDAPRVSRSITMSKCVLTYPGSDEDQVRMKTHHVDKISRNQSSLQRWHNFYLLHLHHRIFIPDQLLVFIKLLMTVLFSITRRPEISRVHGAEVADNLQALLAARTQPFDHPPLLSPKQK

SEQ ID NO: 69212 - protein, 125 aa, Setaria italica
  Transcript Sequence Number=SeqID_3238
IQLPRSPVPASCTCRASLVLLLTWHTDQATPTTPAVHGGLSPTDDLSPPPAPPAQHHSPPAHPAARGRPRKGAHTKPLRVPPLAAGTRNSARLAAKDDGKYRDATTKASQLKAFQNSLALCSTVV

SEQ ID NO: 69213 - protein, 116 aa, Setaria italica
  Transcript Sequence Number=SeqID_3239
CRPVIRERDHKKGEGPGDGGVPVAERDEQAAESGGTRPLAFLILRDFLIVNRPRSSSTVRPKQRKKARGLARSKEIKKAWIYPVVRFQGSHMTDLYWVASAVHLAKLGTVSAEPLL

SEQ ID NO: 69214 - protein, 281 aa, Setaria italica
  misc_feature (237)..(237): Xaa can be any naturally occurring amino acid
  Transcript Sequence Number=SeqID_3240
  Gene Ontology: Cellular component=integral to membrane
  Homolog annotation: Hit_ID=Q5ZA60; Match level="QueryCoverage=99%, HitCoverage=94%, E-value=4e-59, Identity=38%"; Hit description =Embryogenesis transmembrane protein-like
YQAGLTPPGGFWLDDEDEHRAGYPVLYDNYRPRYSIFFYCNAASFMASVAVIVLLVNPNLYRPGIRCYALYVCMVVGMFGLMGAYAAGSSRDLRTSIYVLILVVAVFAFVALEVVIFWVYPYLKKLLSGDVNKESGSSGSNTEQKTGPQSETTGKTPEAQKEKNMREYLMLLGVLAASVTYQSGLKPPGGLWQEDRNGHSSGNPILHDINKGRYYAFFFSNSTSFMASIVVVILLLXMDPAQHKLPLWPMQTAILLDMLGLLGAYAAGSTRDWVTSRNVIY

SEQ ID NO: 69215 - protein, 74 aa, Setaria italica
  Transcript Sequence Number=SeqID_3241
  Homolog annotation: Hit_ID=Q10NX3; Match level="QueryCoverage=95%, HitCoverage=13%, E-value=5e-11, Identity=52%"; Hit description=FAR1 family protein, expressed
  Pfam annotation: Domain name=FAR1; Domain location=34-74; Score= -27.7; E_value=0.05; Accession=PF03101.7; Description=FAR1 family
QNGDPMEKPHSIEMGPVEEPFEGMEFESEEAAKLFYVNYARLNGFRARISRYCRSRRDNSIISRQIVCSKEGFR

SEQ ID NO: 69216 - protein, 90 aa, Setaria italica
  Transcript Sequence Number=SeqID_3242
KIPSFWPSCTRTAGRPSRQNRRETKRGETMEVEERKRTKRDTDGKAEVRQQQGGRAREIGKKENNHLRVTSLSLPLPLSLAHRPPARPRR

SEQ ID NO: 69217 - protein, 312 aa, Setaria italica
  Transcript Sequence Number=SeqID_3243
  Gene Ontology: Mol. function=transcription regulator activity; Cellular component=nucleus; Biological process=regulation of transcription
  Homolog annotation: Hit_ID=Q9FTQ1; Match level="QueryCoverage=50%, HitCoverage=55%, E-value=7e-35, Identity=55%"; Hit description=DNA binding protein-like
  Pfam annotation: Domain name=HLH; Domain location=165-214; Score =50.2; E_value=8e-12; Accession=PF00010.18; Description=Helix-loop -helix DNA-binding domain
SLGTSNRLFLARLALAVPCWDCEETRQEVLILYADRLPPVACHQLKKLCPLTSQLHLLFAGKLQLHCYVLAPCGPSSSFWKLFTTAWALCPSVTPGGLFDGFYGGFGFGGGGHGYEEYGLGQLGGASTSPVVVDGGTEEVDAAASAELEAPERKGDHRAEKVAMALKSHSEAERRRRERINAHLATLRTMVPCTDKMEKAALLAEVITHVKKLKASAARIRTHCAVPADADDVAVELVVPDAAPPSPSHHGAGGGFLVKATLSCDDGADVFADIKSALRPLRLRVVGSEVTTLGGRVRFTFLVSPPPCGAPG

SEQ ID NO: 69218 - protein, 106 aa, Setaria italica
  Transcript Sequence Number=SeqID_3244
  Gene Ontology: Mol. function=transcription regulator activity; Cellular component=nucleus; Biological process=regulation of transcription
  Homolog annotation: Hit_ID=Q9FTQ1; Match level="QueryCoverage=92%, HitCoverage=36%, E-value=6e-27, Identity=67%"; Hit description=DNA binding protein-like
LVKATLSCDDGADVFADIKSALRPLRLRVVGSEVTTLGGRVRFTFLVSPPPCGAPGGDVRGVAESVRHALQSVLDKANSALEFAPRASLLNKRRRVSTFESSSSSS

SEQ ID NO: 69219 - protein, 40 aa, Setaria italica
  Transcript Sequence Number=SeqID_3245
LINTSRDSQPKHNTKFPLSIRNSRRLLKYWSAFSTGSILQ

SEQ ID NO: 69220 - protein, 89 aa, Setaria italica
  Transcript Sequence Number=SeqID_3246
  Gene Ontology: Mol. function=aspartic-type endopeptidase activity; Cellular component=lysosome; Biological process=lipid metabolic process
  Homolog annotation: Hit_ID=Q94IA2; Match level="QueryCoverage=97%, HitCoverage=16%, E-value=2e-30, Identity=70%"; Hit description =Aspartic proteinase 1
  Pfam annotation: Domain name=Asp; Domain location=1-89; Score=-198.4; E_value=0.08; Accession=PF00026.15; Description=Eukaryotic aspartyl protease
VNQRLVQEPVFSFWLNRNPIEGEGGEIVFGGADQQHYKGSHTYTRVTRKGYWQFEMGDFLIGGKSTGICVDGCAAIADSGTSLIAGPLV

SEQ ID NO: 69221 - protein, 178 aa, Setaria italica
  misc_feature (151)..(151): Xaa can be any naturally occurring amino acid
  Transcript Sequence Number=SeqID_3247
  Gene Ontology: Mol. function=aspartic-type endopeptidase activity; Cellular component=lysosome; Biological process=lipid metabolic process
  Homolog annotation: Hit_ID=Q8L6A9; Match level="QueryCoverage=100%, HitCoverage=33%, E-value=3e-66, Identity=68%"; Hit description =Aspartic proteinase
  Pfam annotation: Domain name=Asp; Domain location=1-178; Score=70.8; E_value=5e-18; Accession=PF00026.15; Description=Eukaryotic aspartyl protease
STYKPNGTPASIHYGTGAIAGFYSEDQVTVGNLVVQNQEFIEATHEPGFTFLLAKFDGILGLGFQEISVEGSVPVWYNMVNQRLVQEPVFSFWLNRNPIEGEGGEIVFGGADQQHYKGSHTYTRVTRKGYWQFEMGDFLIGGKSTDNVCHXGICVDGCAAIADSGTSLIAGPLVAIAQ

SEQ ID NO: 69222 - protein, 160 aa, Setaria italica
  Transcript Sequence Number=SeqID_3248
  Subcellular localization annotation: CTP_CleavageSite=44; ConfidenceScore=5.32e-01
GRWIRNSGSTGISAAPSNTQAYLRMPGVTRAPWRHGTRTILGPSCQAKPPRGPPPPNQSGQDRQQHITEAFCVAHVSRGFPSSAFSLRETSAGRINIQVVREMPAFLTPISRATYSRGSIGFSILDSNQAWHIVGVLDKCFLYSPMLAPRNWINWMFFCF

SEQ ID NO: 69223 - protein, 60 aa, Setaria italica
  Transcript Sequence Number=SeqID_3249
  Gene Ontology: Cellular component=monolayer-surrounded lipid storage body
  Homolog annotation: Hit_ID=B6UIA7; Match level="QueryCoverage=93%, HitCoverage=35%, E-value=5e-22, Identity=89%"; Hit description =Oleosin Bn-V
RGAAAGTWMYRYFTGRHPVGADRMDYARSRIADTASHVKDYAREYGGYLHGRSKDAAPGA

SEQ ID NO: 69224 - protein, 151 aa, Setaria italica
  Transcript Sequence Number=SeqID_3250
  Gene Ontology: Mol. function=transcription factor activity; Cellular component=nucleus; Biological process=regulation of transcription, DNA-dependent
  Homolog annotation: Hit_ID=B3U4X0; Match level="QueryCoverage=96%, HitCoverage=26%, E-value=7e-64, Identity=82%"; Hit description=ASGR -BBM-like1
TRIGRVAGNKDLYLGTFSTQEEAAEAYDIAAIKFRGLNAVTNFDMSRYDVKSIIESSSLPVGGTTKRLKDVPDQSDMGRNGHGADSVGHMTATNLLTDGIGSYGPENYGYSGWSPAAMTSIPLQFSNGHDQSRLWCKPEQDSAVVAAAHNL

SEQ ID NO: 69225 - protein, 57 aa, Setaria italica
  Transcript Sequence Number=SeqID_3251
WRHGDDIIVPDQQTKKDHFLFHELFQINTAHQVNFLQDNKHACKGNRPGVKLKKVKT

SEQ ID NO: 69226 - protein, 66 aa, Setaria italica
  Transcript Sequence Number=SeqID_3252
HDCKIEKNRKVSGCLNDLNATSLISGSMIGTVACIIYDLYIITSWTLKRFCWLLSICLLCYYNFIG

SEQ ID NO: 69227 - protein, 167 aa, Setaria italica
  misc_feature (52)..(52): Xaa can be any naturally occurring amino acid
  Transcript Sequence Number=SeqID_3253
  Homolog annotation: Hit_ID=B6TJ62; Match level="QueryCoverage=97%, HitCoverage=28%, E-value=2e-25, Identity=44%"; Hit description=TLD family protein
ISNHCFVFTNVEGRPVISRPTGANNYFTFCSPDYLAMGGGGHFALYLDGDLXSLTFPCIMLHKIPSLHVLLIRDNINGEQANFEAQAHISCFSSYIVLRLTHFAVCYVDLCRLNGSSSTSETFNNPCLSHTQEFKIKDVELWGFVNASKYEEMLTVCRTEKQGIWNL

SEQ ID NO: 69228 - protein, 423 aa, Setaria italica
  Transcript Sequence Number=SeqID_3254
  Homolog annotation: Hit_ID=B6TJ62; Match level="QueryCoverage=83%, HitCoverage=96%, E-value=1e-127, Identity=66%"; Hit description=TLD family protein
  Pfam annotation: Domain name=TLD; Domain location=263-401; Score =128.5; E_value=2.2e-35; Accession=PF07534.8; Description=TLD
  Subcellular localization annotation: CTP_CleavageSite=67; ConfidenceScore=5.21e-01
SPNTPAHSNALEARLGLGSGSTGDGYRAPLARFPDLNPNSTSAGAAQSSCRSVKLLGLPCPVVLGGKAAHLVSDLATVILNPVSERERQRHHPSHLPEATEGKDTLFGDEDSDKNSETPDGPDTSSFRAFLMSFMSSSTSSKDSMETIPEHDLDVEYPTLTPVGKASGGRKGLLSRGKHSIGRIISKAGLSNFKQKPTHSIDGEFIGQIESVAPKFEMKGSKESALHDKLPAMSEPSVLLSEMMRAVLYSSLPVLVQGRNWMLVYSTWRHGISLSTLYRRSRLCAGYSLLIVGDRRGAVFGGLVEAPLQPIIKRKYQGTNDCFVFTNVEGRPVISRPTGANNYFTFCSPDYLAMGGGGHFALYLDGDLLNGSSSTSETFNNPCLSHTQEFKIKDVELWGFVNASKYEEMLTVCRTEKQGIWNL

SEQ ID NO: 69229 - protein, 108 aa, Setaria italica
  Transcript Sequence Number=SeqID_3255
  Gene Ontology: Mol. function=transferase activity; Cellular component= chloroplast
  Homolog annotation: Hit_ID=O80558; Match level="QueryCoverage=68%, HitCoverage=9%, E-value=9e-28, Identity=75%"; Hit description =T22J18.21 protein
  Pfam annotation: Domain name=C2; Domain location=27-107; Score=99.9; E_value=8.8e-27; Accession=PF00168.22; Description=C2 domain
KMGPRAAAAAAAKIASTYDMVEPMSYLYVTVVKARDLPTMDVTGALDPFVEVKLGNFKGVTKHLEKNPNPVWRQTFAFSSEHLQSNQVEVVVKDKDMIKDDFVGRVLF

SEQ ID NO: 69230 - protein, 130 aa, Setaria italica
  misc_feature (108)..(108): Xaa can be any naturally occurring amino acid
  Transcript Sequence Number=SeqID_3256
  Gene Ontology: Mol. function=nucleotide binding; Cellular component =myosin complex; Biological process=signal transduction
  Homolog annotation: Hit_ID=Q8LSS8; Match level="QueryCoverage=93%, HitCoverage=8%, E-value=1e-49, Identity=86%"; Hit description =Putative myosin heavy chain
PSRSSSDTHLSEKANETFRSPLKAFGQRTCMSHIDARYPAMLFKQQLTASLEKIFGLIRDNLKKEISPLLSLCIQAPKLARGGSGRRASSPDVAVQQPISTHWDRIVXLDSLMDRLHKNFVSYSIQMIDV

SEQ ID NO: 69231 - protein, 179 aa, Setaria italica
  Transcript Sequence Number=SeqID_3257
  Pfam annotation: Domain name=DUF974; Domain location=1-64; Score= -115.4; E_value=0.029; Accession=PF06159.5; Description=Protein of unknown function (DUF974)
QPILIRAGGGIYNYLYQLRSSSDEAAQPKSELSSTLGKFQITWRTNLGEPGRLQTQNIHSTPTASKDVDLRAVKVPPIIYAERPFMVNLCLTNQTDKTVGPFEVFLAPSMTGEESAVLVNGLQKLILPLVEAFESIKFDLSMVATQLGVQKISGITMYAVQEKKYYEPLSDIEIFVDAE

SEQ ID NO: 69232 - protein, 105 aa, Setaria italica
  misc_feature (20)..(20): Xaa can be any naturally occurring amino acid
  Transcript Sequence Number=SeqID_3258
  Pfam annotation: Domain name=DUF974; Domain location=1-75; Score= -92.5; E_value=0.0005; Accession=PF06159.5; Description=Protein of unknown function (DUF974)
GFHFSCRDLCKQPILIRAGXGIYNYLYQLRSSSDEAAQPKSELSSTLGKFQITWRTNLGEPGRLQTQNIHSTPTASKDVDLRAVKVPPIIYAERPFMVNLGSHFF

SEQ ID NO: 69233 - protein, 323 aa, Setaria italica
  Transcript Sequence Number=SeqID_3259
  Gene Ontology: Mol. function=protein binding; Cellular component =nucleus; Biological process=ribosome biogenesis
  Homolog annotation: Hit_ID=B6TPN3; Match level="QueryCoverage=100%, HitCoverage=100%, E-value=1e-143, Identity=78%"; Hit description =Brix domain-containing protein 2
  Pfam annotation: Domain name=Brix; Domain location=65-258; Score =214.4; E_value=3e-61; Accession=PF04427.10; Description=Brix domain
MAKKRKRTDAPAKAAVAEKPDDSAPERPPRTLFGFKEPAPDAEPASEAAGSAAAAPFRNKEKVLITCSRRITYRYRHLMQDILSLLPHAKKDSKVESKQSKGNALNELLELRSCSSCLFFECRKQKDLYLWMVKSPGGPSVKFLVNAVHTMEELKLTGNHLKGSRPLLTFSTNFDEQPHWMLVKEMITQIFATPKDHRKVKPFHDHVFAFSIVDGHVWFRNYQISVPHNEIDKVDKGGLDKMTLIEVGPRFCLNPIKIFGGSFGGPTWYENPFYISPNQIRALEKRQKAGKYAKKVKAKVKRKMHEMENTLEPDEFAELWKGE

SEQ ID NO: 69234 - protein, 279 aa, Setaria italica
  Transcript Sequence Number=SeqID_3260
  Gene Ontology: Mol. function=zinc ion binding
  Homolog annotation: Hit_ID=B6TQI1; Match level="QueryCoverage=100%, HitCoverage=100%, E-value=1e-123, Identity=79%"; Hit description =Protein binding protein
  Pfam annotation: Domain name=zf-C3HC4; Domain location=63-108; Score =65.7; E_value=1.7e-16; Accession=PF00097.17; Description=Zinc finger, C3HC4 type (RING finger)
MKDHLMLNVDDLIVPEPNEATGAVKNTSSGEAIAHPPSMAHAILAMGESMVSEEEPLLQMVECRICQEEDSIKNLESPCACTGSLKYAHRACVQRWCNEKGDVTCEICHEPYEHGYTAPPRAHPDETTIDISGGWTITGTAFDLRDPRILAVAQNHILEAEYDDYSATNASTAAFCRSAALVLMALLLLRHALTLTDEDDDDTSAVFSLFLLRAAGFLLPFYIMAWAISILQRRRQRQEAAALAATEVAFILQSGQGRGVHFTIAPDSPATPQHEPPYP

SEQ ID NO: 69235 - protein, 49 aa, Setaria italica
  Transcript Sequence Number=SeqID_3261
GNNSITMVSYPEHMHSLIHLYVYTPMISYWCNKCEIFLYINTFSEIQIS

SEQ ID NO: 69236 - protein, 82 aa, Setaria italica
  Transcript Sequence Number=SeqID_3262
CRCLQACAMHPIRASRSHENRPQSRASCHGRGGGETCICHHVNRWGSHPWIGAGCGFRGEKGGWLLSSSQNDHGMHCRDREG

SEQ ID NO: 69237 - protein, 390 aa, Setaria italica
  Transcript Sequence Number=SeqID_3263
  Homolog annotation: Hit_ID=B6SVE0; Match level="QueryCoverage=100%, HitCoverage=66%, E-value=1e-157, Identity=73%"; Hit description=DNA binding protein
AMCYNSPDTIYYRQARGIQEIAKKDFENLRQDSDASEPEPEPEPEPEPEPEPEEPKPQPRRGRPPNKNNARQKVGRPPAERATADFSGATLANAANSGRHAQPDLDLSRRAMDKAMIADVLRASFANRRNEHNWSGERKSERIEDYSGYGSMWSAKMGKKPILMEDSRRSTYYEAQPSSSIYELPVSSSYNGTKKLLVPVGVQLQQSYSRSLARFAAQLGPIGWEIASRRIERSLPPETKFGPGWVGDGEAPSSFQPPALAAFSETMAPPSNVAASGDQPPNNSGPAAEDCAASSSHLAVSQPHAMPYPSTSTVQRTDSGALASQQRGSIPHIPINRGEHDAEMKGGHNNLHGHPAMQQPVNGFNAVPGPVMFPPAAQLVVNQMQTHTAD

SEQ ID NO: 69238 - protein, 241 aa, Setaria italica
  Transcript Sequence Number=SeqID_3264
  Gene Ontology: Mol. function=metal ion binding
  Homolog annotation: Hit_ID=B6SVE0; Match level="QueryCoverage=77%, HitCoverage=31%, E-value=4e-68, Identity=71%"; Hit description=DNA binding protein
  Pfam annotation: Domain name=Bromodomain; Domain location=94-177; Score=123.8; E_value=5.8e-34; Accession=PF00439.17; Description =Bromodomain
ASRAKFRCISRLVRSLYLVTGAGKRKPHFFCCFFFYPGFFSPILVNIFYVGCFVLVMGLHDGSAKGQKTRKATDGREEPSDSGPTTPLPNKKLLLFILDRLQKKDTYGVFSEPVDPEELPDYHDIIKHPMDFSTIRKKLDKGAYSNLEQFEDDVFLISSNAMCYNSPDTIYYRQARGIQEIAKKDFENLRQDSDASEPEPEPEPEPEPEPEPEEPKPQPRRGRPPNKNNARQKVGRPPAER

SEQ ID NO: 69239 - protein, 59 aa, Setaria italica
  Transcript Sequence Number=SeqID_3265
IYIHGLRGAAEPLQIAPAPEYGQTIAIKLICKVEVQSGLNMFSQTKVSSNHGWKQEDKQ

SEQ ID NO: 69240 - protein, 1181 aa, Setaria italica
  misc_feature (657)..(657): Xaa can be any naturally occurring amino acid
  Transcript Sequence Number=SeqID_3266
  Homolog annotation: Hit_ID=Q84ZW7; Match level="QueryCoverage=71%, HitCoverage=100%, E-value=9e-94, Identity=62%"; Hit description =Putative drought-induced protein
QYISLDSPAWGPDPKQQQQQHWRHPELRRALAADDQADELRRIRASVQDSTGKAKEKVRSLHDAIQKLDKYKNIVTRKRQRTADAGPDKLGSSSGALRMGAQNSSAVMSKRVRSSLADGRVEGRTSVPTRQGPLVSNEKNSPVEKEKSCTRMSATVSVLSEDKLRGLSTGGEGWEKKMKRKRSVGTMLGRGSDADRDVKSVGQHRPANEVRPRSSDGLAYRHGASAGALAGNKLDGTSQQNNIVSRIQSKTDVDYATQPNERRERHTGVDKERTTVKGNKSNTSEDMQNGSLSPLPKAKACRAPRTSSLVMNSSSNFQRSTGGNDEWEEAAPYTNKASPLGGMTNRKRSTHSNASSPPIAWVGQRPQKMSRTRRANVVSPVSNFDEVLSEGSPLDTAARSTPIESGSVLTKNTPTTKMDSISSPAGLSESEGSVATESKSKEKAMDSGEVGNEGANAAHNAMGLIFSSNKNRIPLKEELEDGGVRRQGRSGRGTMHVKGCSSIPKEKLDTAETRKPIKGGRPGSEKNESKLGRPPMKKGSDRKASSWHSQALNCEPTDITGEPEDDQEELLAAVNAARSAIVGAYSGPFWKKMEPMLTFISSENLSFLKNQINLVEELEMSMSCMSDGEHDIIALSDYRRMQKMEEHSSQVLAPSNXSPSQQSKTNGVGAKGSIGCFSPGDENHTVPQKLEADKWFNEMAPMAHRLLSALIIEDDLPDSNGVQRDILVEFPNSHNPYTINRYLENELQASAITSNFGLSVDFTHSNSTSMVHQSMCNGFTASSNFINSNSESSVHSEHLSDGVNFTVYPESGSLHDLMPQISRQCQNPVKDFPCSPYEYQYGQMSVEDKILIELQSIGICPETVPKLEDGEDEDINKMISELRKRLHDQVNQKKCRLHKLDKSIQDTKDLEERSLERHAMNKLVERAYRKLKGGRVGSSHKAGVSKSANKAAKQLALAFAKRTLARCQKFDETGKSCFSEPSLWSVLSAPLPSSDAKSTEGVERLKHQKLDRTPFDQGGTKWKKGERERDHNRDASAKGSGLKSGRHSSGGSGRSGERKNKTKPKQKLAQLSTSGNVLGRVVEPLSSPAVQEPPPEPPSERKTQHPTRNTSSNAAQRGTTDAALPVLPGLDDILDVPGGLDGQGNDISSWFTDGLDDSLQDIDLSGALEIPDDDLTQLGFI

SEQ ID NO: 69241 - protein, 447 aa, Setaria italica
  Transcript Sequence Number=SeqID_3267
  Gene Ontology: Cellular component=nucleus; Biological process=cell division
  Homolog annotation: Hit_ID=B6THL1; Match level="QueryCoverage=95%, HitCoverage=94%, E-value=1e-172, Identity=72%"; Hit description =Cyclin IaZm
  Pfam annotation: Domain name=Cyclin_C; Domain location=321-445; Score= 183.1; E_value=7.8e-52; Accession=PF02984.11; Description=Cyclin, C -terminal domain
  Pfam annotation: Domain name=Cyclin_N; Domain location=194-319; Score= 232.5; E_value=1.1e-66; Accession=PF00134.15; Description=Cyclin, N -terminal domain
  Pfam module annotation: Pfam domain module=Cyclin_C::Cyclin_N; Domain location=321-445::194-319
MATRNHNAAAAAAAPQLHHNRGGVPALGKQKAVAAGRADAMNRRAPLGDIGNYVSVRATDGKPEPQEQVNRPVTRSFGAQLVKNAQANAAANKQNAAIAPARPAPRLERKAPAKPPPPEHVIEISSDSDQSKTQSESSASSVRSRKKVINTLTSVLSARSKAACGIADKPRQAIEDIDKLDVNNELAVVDYIEDIYAFYKTAQHESRPRDYIDAQVEINSKMRAILADWIIEVHHKFELMPETLYLTMYIIDQYLSLQPVLRRELQLVGVSAMLIACKYEEIWAPEVNDFILISDSAYTREQILSMEKGILNRLEWNLTVPTSYMFLVRFLKAASPGIKIDKEMENMVFFFAELSLMQYGLVTHLPSMVAASAVYAARLTLKKSPLWTDTLEHHTGFRESELMECTKMLVSAHLTAPESKLRVVYKKYSSEQFGGVALRPPAVEICK

SEQ ID NO: 69242 - protein, 46 aa, Setaria italica
  Transcript Sequence Number=SeqID_3268
QWKLHLFELEEELKVDPLTTYVLYQVRGPALLILQFSMILHIVIHL

SEQ ID NO: 69243 - protein, 56 aa, Setaria italica
  Transcript Sequence Number=SeqID_3269
  Gene Ontology: Mol. function=pyridoxal phosphate binding; Cellular component=cytoplasm; Biological process=cysteine biosynthetic process from serine
  Homolog annotation: Hit_ID=Q9XEA8; Match level="QueryCoverage=80%, HitCoverage=13%, E-value=5e-17, Identity=97%"; Hit description =Cysteine synthase
YFAFHVNCCQSVLIEPTSGNTGIGLAFMAAAKGYKLILTMPASMSMERRIILKAGL

SEQ ID NO: 69244 - protein, 102 aa, Setaria italica
  Transcript Sequence Number=SeqID_3270
  Subcellular localization annotation: CTP_CleavageSite=72; ConfidenceScore=5.00e-01
MRQIRPCRAQLDPRPRAPPPQLTRPAGGCMLDPVSLKPWTRPSPPHPCSPGSSGWCTPTTTRTRSATTMSPRCATWTSPPSPRRRTPPPPPPPPRRRAARAT

SEQ ID NO: 69245 - protein, 90 aa, Setaria italica
  Transcript Sequence Number=SeqID_3271
AAAGEATRAEPSPPAAGPETRSRPAMESPAKEEAGSELAMEIESSVTAEDWRRALSRVVPSVVVLRTTAPRAFDTEVAGASYATGFVVDN

SEQ ID NO: 69246 - protein, 76 aa, Setaria italica
  misc_feature (1)..(16): Xaa can be any naturally occurring amino acid
  Transcript Sequence Number=SeqID_3272
  Subcellular localization annotation: CTP_CleavageSite=57; ConfidenceScore=5.23e-01
XXXXXXXXXXXXXXXXVAANLNGLSISDKQPSRFQEARSGNPRGGPSVRPSQTKRNRCSTAHNPVPHRRSNHPNQK

SEQ ID NO: 69247 - protein, 161 aa, Setaria italica
  Transcript Sequence Number=SeqID_3273
  Gene Ontology: Mol. function=protein tyrosine kinase activity; Cellular component=microtubule organizing center; Biological process= microtubule cytoskeleton organization and biogenesis
  Homolog annotation: Hit_ID=Q9LMW4; Match level="QueryCoverage=83%, HitCoverage=14%, E-value=2e-32, Identity=52%"; Hit description =F5M15.11
KVRMRSHGIPTLDAFGSSVDSWLKRLREAALKEEEQQFISLNRTITLLGLTDSMSSLSSGAEHLYQVVHGAVPDGFWDSGAQMASSEVSVHILNHLFKKLNEVCLVEDGEGEPYHMLLVLFVGSLLPYLQCLDSWLYDGILDDPYEEMFFYANSAVTIDQP

SEQ ID NO: 69248 - protein, 202 aa, Setaria italica
  misc_feature (195)..(195): Xaa can be any naturally occurring amino acid
  Transcript Sequence Number=SeqID_3274
  Gene Ontology: Mol. function=protein binding; Cellular component =plasma membrane; Biological process=protein amino acid phosphorylation
  Homolog annotation: Hit_ID=B9SEG8; Match level="QueryCoverage=96%, HitCoverage=43%, E-value=5e-39, Identity=45%"; Hit description =Serine-threonine protein kinase, plant-type, putative
  Pfam annotation: Domain name=LRR_1; Domain location=109-131; Score =6.0; E_value=22; Accession=PF00560.25; Description=Leucine Rich Repeat
  Pfam annotation: Domain name=LRR_1; Domain location=12-34; Score=0.5; E_value=2.4e+02; Accession=PF00560.25; Description=Leucine Rich Repeat
  Pfam annotation: Domain name=LRR_1; Domain location=133-155; Score =11.3; E_value=2.1; Accession=PF00560.25; Description=Leucine Rich Repeat
  Pfam annotation: Domain name=LRR_1; Domain location=36-58; Score =17.1; E_value=0.073; Accession=PF00560.25; Description=Leucine Rich Repeat
  Pfam annotation: Domain name=LRR_1; Domain location=60-83; Score =12.8; E_value=1.1; Accession=PF00560.25; Description=Leucine Rich Repeat
  Pfam annotation: Domain name=LRR_1; Domain location=84-107; Score =12.4; E_value=1.3; Accession=PF00560.25; Description=Leucine Rich Repeat
  Pfam module annotation: Pfam domain module=LRR_1::LRR_1::LRR_1::LRR _1::LRR_1::LRR_1; Domain location=109-131::12-34::133-155::36-58::60 -83::84-107
PATLGNPRRHDEQLIVDLSKNHLTGSLPPSLGALRGLLKLDLSNNQLQGGIPPELGGLKSLTLLDLRNNSLTGALPGFVLGMASLQDLLLSNNPLGGTLPASGWERLSGLATLDLSNVGLAGAIPESMAALSGLRFLALDHNRLTGPVPARLAQLPSIGAMYLNGNNLTGALGFAPGFYRRMGRRFASWDNPGLXCYDVAAV

SEQ ID NO: 69249 - protein, 91 aa, Setaria italica
  Transcript Sequence Number=SeqID_3275
  Gene Ontology: Mol. function=nutrient reservoir activity; Cellular component=extracellular region; Biological process=auxin mediated signaling pathway
  Homolog annotation: Hit_ID=B6SZJ3; Match level="QueryCoverage=67%, HitCoverage=30%, E-value=7e-23, Identity=88%"; Hit description=Auxin- binding protein ABP20
AAHPPGADEAGGDGALGDEEELGAGRVGVQRHDAGSGPAVALVAFSSPNPGLQITDFALFANNLPSAVVEKVTFLDDATVKKLKSVLGGSG

SEQ ID NO: 69250 - protein, 110 aa, Setaria italica
  misc_feature (43)..(43): Xaa can be any naturally occurring amino acid
  Transcript Sequence Number=SeqID_3276
  Gene Ontology: Mol. function=nutrient reservoir activity; Cellular component=extracellular region; Biological process=auxin mediated signaling pathway
  Homolog annotation: Hit_ID=B6SZJ3; Match level="QueryCoverage=100%, HitCoverage=55%, E-value=7e-50, Identity=93%"; Hit description=Auxin- binding protein ABP20
  Pfam annotation: Domain name=Cupin_1; Domain location=1-100; Score =1.9; E_value=0.00041; Accession=PF00190.14; Description=Cupin
THPAGSELLFVTQGTVAAGFISSGSNTPYTKTLNAGDIMVFPXQGLLHYQYNAGSGPAVALVAFSSPNPGLQITDFALFANNLPSAVVEKVTFLDDATVKKLKSVLGGSG

SEQ ID NO: 69251 - protein, 212 aa, Setaria italica
  Transcript Sequence Number=SeqID_3277
  Gene Ontology: Mol. function=nutrient reservoir activity; Cellular component=extracellular region; Biological process=auxin mediated signaling pathway
  Homolog annotation: Hit_ID=Q6ZBZ2; Match level="QueryCoverage=89%, HitCoverage=88%, E-value=3e-89, Identity=86%"; Hit description =Germin-like protein 8-14
  Pfam annotation: Domain name=Cupin_1; Domain location=58-202; Score =126.7; E_value=7.2e-35; Accession=PF00190.14; Description=Cupin
  Pfam annotation: Domain name=Cupin_2; Domain location=90-166; Score =44.7; E_value=3.6e-10; Accession=PF07883.3; Description=Cupin domain
  Pfam module annotation: Pfam domain module=Cupin_1::Cupin_2; Domain location=58-202::90-166
MAKMVLLPVLLSFLLLPFASLALTQDFCVADLSCSDTPAGYPCKSSVSANDFYYHGLAGMGKINPLIKAAVTPAFVGQFPGVNGLGISAARLDMEVGGVVPLHTHPAGSELLFVTQGTVAAGFISSGSNTPYTKTLNAGDIMVFPQGLLHYQYNAGSGPAVALVAFSSPNPGLQITDFALFANNLPSAVVEKVTFLDDATVKKLKSVLGGSG

SEQ ID NO: 69252 - protein, 100 aa, Setaria italica
  misc_feature (89)..(89): Xaa can be any naturally occurring amino acid
  Transcript Sequence Number=SeqID_3278
  Gene Ontology: Mol. function=nucleic acid binding
  Homolog annotation: Hit_ID=B6SLI7; Match level="QueryCoverage=75%, HitCoverage=25%, E-value=1e-14, Identity=65%"; Hit description=CCCH transcription factor
VAASKDDGGSPLSLSLSPKSTLASLWESPPVSPVEGRVRWLDAIDEPSDADAEVEELVLAMRELSFRKAAASAPVAAPVLPPVTEEDGXPDLGWVSELVM

SEQ ID NO: 69253 - protein, 43 aa, Setaria italica
  Transcript Sequence Number=SeqID_3279
ASILVLLFFSMSISQPLHSQISLGKQESTAFMTMGEALGITDR

SEQ ID NO: 69254 - protein, 318 aa, Setaria italica
  Transcript Sequence Number=SeqID_3280
  Gene Ontology: Mol. function=phosphatidylinositol binding; Cellular component=clathrin coat; Biological process=clathrin coat assembly
  Homolog annotation: Hit_ID=B9T128; Match level="QueryCoverage=98%, HitCoverage=57%, E-value=1e-65, Identity=48%"; Hit description =Clathrin assembly protein, putative
  Pfam annotation: Domain name=ANTH; Domain location=1-152; Score=-1.1; E_value=3.6e-07; Accession=PF07651.8; Description=ANTH domain
RKKKLESFRVLNYDVEKDPLRTRDLDTVGLLDQLPALQQLLFRLLGCQPQGSSSYNIIIQHALSMVALESVKIQTAINDAILNLVDKFFEMQRDDAIRALDMYKRAISQAEQLSEFYEVCKSIHIGRGERFLKIEQPPASFLAAMEEYVNNAPLASTVQRNQAVLAIEYNIKLEAEEPSTPPPPAPEPEPEPVKEVPPTAEPTDLLGMDESTPDTSEIDQKNASALAIVQQVDNAPKAPAPTSTDSVATSWELALVTAPSSNGIAVTSSKLAGGLDLLTLDSLYNEAHRQAQQAQQNANYNPWETTPASGPMMQQPMH

SEQ ID NO: 69255 - protein, 353 aa, Setaria italica
  Transcript Sequence Number=SeqID_3281
  Gene Ontology: Mol. function=ATP binding; Cellular component=proton -transporting two-sector ATPase complex; Biological process=cellular metal ion homeostasis
  Homolog annotation: Hit_ID=B6TZB7; Match level="QueryCoverage=96%, HitCoverage=86%, E-value=1e-171, Identity=86%"; Hit description =Arsenical pump-driving ATPase
  Pfam annotation: Domain name=ArsA_ATPase; Domain location=29-353; Score=264.5; E_value=2.5e-76; Accession=PF02374.7; Description=Anion- transporting ATPase
  Pfam annotation: Domain name=CbiA; Domain location=31-212; Score= -21.1; E_value=0.0031; Accession=PF01656.15; Description=Cobyrinic acid a,c-diamide synthase
  Pfam module annotation: Pfam domain module=ArsA_ATPase::CbiA; Domain location=29-353::31-212
SAAAAEAAPPAKDGAEELGFQEMTSGTRRRYYMLGGKGGVGKTSCAASLAVRFANDGHPTLVVSTDPAHSLSDSFAQDLTGGSLVQVEGPDAPLFALEINPEKAREEFRTASQKNGGTGVKDFMDSMGLGVLVEQLGELKLGELLDTPPPGLDEAIAISKVMQFLEAQEYSMFSRIVFDTAPTGHTLRLLSLPDFLDASIGKILKLRSKIASATSAIKSVFGQEVQQQDAANKLEQLRERMVKVRELFRDTESTEFIIVTIPTVMAISESSRLHSSLQKESVPVRRLIVNQVLPPSTSDCKFCAIKRKDQTRALDMIRSDPELMGLNIIQAPLVDMEIRGVPALKFLGDIVWK

SEQ ID NO: 69256 - protein, 85 aa, Setaria italica
  Transcript Sequence Number=SeqID_3282
VSQQFCYTTPFIYRLEMHKNWRWLDFCSYKVLDTNKIYLMAFGTSISLRFAYPRIFSYFVMKETKDRQDCISDKANELISKGDRI

SEQ ID NO: 69257 - protein, 109 aa, Setaria italica
  misc_feature (88)..(88): Xaa can be any naturally occurring amino acid
  Transcript Sequence Number=SeqID_3283
  Gene Ontology: Mol. function=glyceraldehyde-3-phosphate dehydrogenase (phosphorylating) activity; Cellular component=cytoplasm; Biological process=glucose metabolic process
  Homolog annotation: Hit_ID=A3M3W3; Match level="QueryCoverage=93%, HitCoverage=30%, E-value=1e-19, Identity=49%"; Hit description =Glyceraldehyde 3-phosphate dehydrogenase
  Pfam annotation: Domain name=Gp_dh_N; Domain location=7-109; Score= -6.2; E_value=4.3e-09; Accession=PF00044.16; Description =Glyceraldehyde 3-phosphate dehydrogenas
MTHTPKLRLAINGFGRIGRMLVRAFLANHENFSCLDIVAINDVADAHTLLHLLKFDSTHGRLNSQAFIQDERLILQKKWTNPCQHLNXLIKKNPALLAWNTLDIDVVLE

SEQ ID NO: 69258 - protein, 111 aa, Setaria italica
  Transcript Sequence Number=SeqID_3284
  Gene Ontology: Mol. function=protein serine/threonine kinase activity; Biological process=protein amino acid phosphorylation
  Homolog annotation: Hit_ID=Q4PLL4; Match level="QueryCoverage=98%, HitCoverage=10%, E-value=7e-39, Identity=74%"; Hit description=SHR5 -receptor-like kinase (Fragment)
MTSRCSTSGGGSHGRLLWLLLAWSCVAAARAQQTARTDPVEAAALNTILRRWGLRASPRWNISGELCSGVAVDDTEVDNNPNINPAIKCVCSYNNATVCHITKLKVYALNV

SEQ ID NO: 69259 - protein, 315 aa, Setaria italica
  Transcript Sequence Number=SeqID_3285
  Homolog annotation: Hit_ID=Q2R360; Match level="QueryCoverage=48%, HitCoverage=36%, E-value=7e-11, Identity=32%"; Hit description=C2 domain containing protein, expressed
MERSPRRRPKPAAIDITWVSCRGVRSSLPFHTPCLYVSVFVAPSSARGVHGHRRPHRVKTPTDRAGGVNPEWDAPLRLYLPDASSPPADEAELAAGKNSKKGDGDDDVLLLRFEIKAEVAVLGDKLTASAAVPVPGLVADGCTRRVSYQLAGPDGRQPNGVISFSYAFHDSRNGGDDDDGHSSDSEPVATPPSPCPTESSSSTSPLAHPLPPTTAAPRLYPAIEWPPAEQIIPIYPPPVTAEAAVTNSRYYPPPVEPVAVYPPSAGTAWSCSLYPPAGEAVPASGMYPTVDLAPVSCYPPAVYGVECGYAAAPPV

SEQ ID NO: 69260 - protein, 112 aa, Setaria italica
  Transcript Sequence Number=SeqID_3286
  Gene Ontology: Mol. function=zinc ion binding; Cellular component =nucleus; Biological process=transcription initiation
  Homolog annotation: Hit_ID=Q7XCX5; Match level="QueryCoverage=86%, HitCoverage=5%, E-value=4e-47, Identity=76%"; Hit description=Plus-3 domain containing protein, expressed
  Pfam annotation: Domain name=PHD; Domain location=23-76; Score=1.3; E_ value=0.019; Accession=PF00628.21; Description=PHD-finger
RGRALVPAPPKPARRKEDEEEVVCFICFDVFDLVVCDRRGCPKVYHPACIKRDEAFFQSRSKWNCGWHICSSCEKAVHYMCYTCTYSLCKVCIKQGKFFSVRGTKGFCDTCF

SEQ ID NO: 69261 - protein, 66 aa, Setaria italica
  Transcript Sequence Number=SeqID_3287
  Subcellular localization annotation: CTP_CleavageSite=20; ConfidenceScore=5.23e-01
RRRHPRGRLICIPSSLAVVVQVGLSGAFCLFFFTCGRCPVSGVKLWSGVLFTSVREKCVRIMESSC

SEQ ID NO: 69262 - protein, 66 aa, Setaria italica
  Transcript Sequence Number=SeqID_3288
NRTVYCMLCEINMSVQCRYLLAKKHQVHIFLTLTHLVLCFISRRVSRSPHSKHSHRRHSPYSSANR

SEQ ID NO: 69263 - protein, 113 aa, Setaria italica
  Transcript Sequence Number=SeqID_3289
  Subcellular localization annotation: CTP_CleavageSite=47; ConfidenceScore=5.38e-01
KKNEKDERSRQMTKRSTNHSRSSRSRSPRGRSRTRKENSSHERGSVSSDEPSDSVKKRKHHSRKNSLSPSPPKSRNRRVSRSPHSKHSHRRHSPYSSANRTRRSRSRTPAKRR

SEQ ID NO: 69264 - protein, 346 aa, Setaria italica
  misc_feature (252)..(252): Xaa can be any naturally occurring amino acid
  Transcript Sequence Number=SeqID_3290
  Homolog annotation: Hit_ID=Q01JK6; Match level="QueryCoverage=57%, HitCoverage=24%, E-value=2e-22, Identity=39%"; Hit description =H0112G12.14 protein
LVSFLSILIIIYFLPCFSSDDDDDDANGGDGKDKIPMSDLSANAGAANAEEGDKSNIGKQRVNQNEKVSSLGKSTQMSTSAEPEQVHIHDTQNGEFPLDAKTFIEPKGAVDKMDDKAHRYAAVDIQNRKTSSGSNTEKYNDLESSHRHLERSSKEDLVKEVQTDDTKELESSTAEKYNNDKYGTYGNVDKKSSFKEGKGSGRIAKHESDRREPHSRGNSKHDGAKEDRKDFPKDTRERDRDTTDRRGGKGKXEKDERSRQMTKRSTNHSRSSRSRSPRGRSRTRKENSSHVRGSVSSDEPSDSVKKRKHHSRKNSLSPSPPKSRNRYLIHAPFCNARNPFSILLGI

SEQ ID NO: 69265 - protein, 118 aa, Setaria italica
  Transcript Sequence Number=SeqID_3291
LLNSSGNHTATPLRSLRLLPAGSNIPQTLLFITPGDLTLEIKGGRTKCQLSGAKATLAMLTPVPRAEAASGKLKQTPLLLLIASHFVRTAGKQYTLAHHKLYKGRSRQSRLGPNTRDQ

SEQ ID NO: 69266 - protein, 148 aa, Setaria italica
  Transcript Sequence Number=SeqID_3292
  Gene Ontology: Mol. function=nucleoside-triphosphatase activity; Cellular component=intracellular; Biological process=regulation of transcription, DNA-dependent
  Homolog annotation: Hit_ID=B9RLP5; Match level="QueryCoverage=97%, HitCoverage=47%, E-value=2e-67, Identity=62%"; Hit description =Activating signal cointegrator 1 complex subunit 3, helc1, putative
  Pfam annotation: Domain name=DEAD; Domain location=2-139; Score=35.2; E_value=1.3e-07; Accession=PF00270.21; Description=DEADDEAH box helicase
KQLQGWHFTIKIEFKIVYVAPMKALAAEVTATFSRRLSPLNLVVRELTGDMQLTKNEIEETQMIVTTPEKWDVITRKSSDMSLSMLVKLIIIDEVHLLNDDRGSVIEALVARTLRQVESMQSMIRIVGLSATLPTYLEVAQFLRVNPE

SEQ ID NO: 69267 - protein, 32 aa, Setaria italica
  Transcript Sequence Number=SeqID_3293
MSMDTIPHLSMPLGNITTLDLSNNNLQVRVFY

SEQ ID NO: 69268 - protein, 358 aa, Setaria italica
  Transcript Sequence Number=SeqID_3294
  Gene Ontology: Mol. function=protein binding; Cellular component =plasma membrane
  Homolog annotation: Hit_ID=B6SU52; Match level="QueryCoverage=100%, HitCoverage=100%, E-value=1e-172, Identity=84%"; Hit description =Leucine-rich repeat-containing protein 40
  Pfam annotation: Domain name=LRR_1; Domain location=103-124; Score =13.3; E_value=0.85; Accession=PF00560.25; Description=Leucine Rich Repeat
  Pfam annotation: Domain name=LRR_1; Domain location=126-144; Score =8.2; E_value=8.2; Accession=PF00560.25; Description=Leucine Rich Repeat
  Pfam annotation: Domain name=LRR_1; Domain location=150-171; Score =8.8; E_value=6.2; Accession=PF00560.25; Description=Leucine Rich Repeat
  Pfam annotation: Domain name=LRR_1; Domain location=173-194; Score =10.2; E_value=3.4; Accession=PF00560.25; Description=Leucine Rich Repeat
  Pfam annotation: Domain name=LRR_1; Domain location=196-219; Score =5.8; E_value=24; Accession=PF00560.25; Description=Leucine Rich Repeat
  Pfam annotation: Domain name=LRR_1; Domain location=221-242; Score =15.9; E_value=0.17; Accession=PF00560.25; Description=Leucine Rich Repeat
  Pfam annotation: Domain name=LRR_1; Domain location=56-78; Score =17.5; E_value=0.056; Accession=PF00560.25; Description=Leucine Rich Repeat
  Pfam annotation: Domain name=LRR_1; Domain location=80-101; Score =12.8; E_value=1.1; Accession=PF00560.25; Description=Leucine Rich Repeat
  Pfam module annotation: Pfam domain module=LRR_1::LRR_1::LRR_1::LRR _1::LRR_1::LRR_1::LRR_1::LRR_1; Domain location=103-124::126-144::150- 171::173-194::196-219::221-242::56-78::80-101
MRDMGEKRRHGGHHVHGVGFGVGHAEHDEKHREPKKLDMSGMSMDTIPHLSMPLGNITTLDLSNNNLQRIPESIIARLLNVVVLDVRSNQLKSLPNSIGCLSKLKVLNVSGNLLQDLPATIEECRALEELNANFNQLTRLPDTLGFELHSLRRLSVNSNKLAYLPSSTDHMTALRSLDARLNCLRSLPDGLENLGSLETLNVSQNFQYLRELPYGIGLLVSLRELDVSYNSISALPDSMGCLTKLARFSAVGNPLVCPPMDVVEQSLDAMRAYLSARMNGTDKDRRKKRSWVPKLVKYGTFTAGMMTPGRATKVHGNAEGLLMSDYRSLNGGGIASPGFLSMLSPRRIFSPRRNSTKH

SEQ ID NO: 69269 - protein, 108 aa, Setaria italica
  Transcript Sequence Number=SeqID_3295
  Subcellular localization annotation: CTP_CleavageSite=86; ConfidenceScore=5.51e-01
VGTLPGPFTGGGGVRASNSNLQCPMRAQKNPRSNPEAAAPGQNQQSLAVEREASVALAHTQTSRRRRLLTRELARLVAASPSSSVVAATTASEERRGREGEVMGPAAA

SEQ ID NO: 69270 - protein, 461 aa, Setaria italica
  Transcript Sequence Number=SeqID_3296
  Gene Ontology: Mol. function=aspartyl esterase activity; Cellular component=cell wall; Biological process=cell wall modification
  Pfam annotation: Domain name=Pectinesterase; Domain location=150-447; Score=764.3; E_value=8.9e-227; Accession=PF01095.11; Description =Pectinesterase
ELLSTTMDDLQATVADLEFRSGRGSGNGSVGARHQTLDHVMTVLSAAITNQYTCLDGFAYQNGGRMRRYIEPTLYHVSRMVSNSLAMAKKLPGAPSPSPSSAQAETKTEATAAPRQPFVGYGQMVKGFPRWVRPGDRRLLQAPASGIKADAVVAKDGSGNFTTVAAAVAAAPTNSRRRYVIYIKAGAYIENVDVGKKHVNLMFVGDGIGKTVIKGSRNVIDGSTTFRSATVAVVGNNFLGRDLTIENSAGPSKHQAVALRVGADLSAFYRCSFVGYQDTLYVHSLRQFFRDCDIYGTIDFIFGNAAVVFQSCNLYARKPLPNQSNIFTAQGREDPNQNTGISIQRCKVAAASDLAGQESSTKTYLGRPWKQYSRTVFLQSELDSLIDPAGWLEWNGNFALDTLYYGEYMNTGAGAGTAGRVKWKGYRVITSAAEASAFTVGSFIDGDVWLAGTSIPFTTGL

SEQ ID NO: 69271 - protein, 109 aa, Setaria italica
  Transcript Sequence Number=SeqID_3297
  Gene Ontology: Cellular component=intracellular; Biological process =RNA processing
  Subcellular localization annotation: CTP_CleavageSite=40; ConfidenceScore=5.03e-01
QQQFVLQMPQLQQDSVQQQQQQLFQQQQQQMMLLQQQFMQQQMQQYLQQQQNQQGPKDQTYNSNPQDGRTKQMEHGQQSEASQSDGSKLRSGEQSELSYPSTPQSRSNR

SEQ ID NO: 69272 - protein, 40 aa, Setaria italica
  Transcript Sequence Number=SeqID_3298
EAARANFTTRAFASRHDLELPVAAMYFNAQREPANRRRNY

SEQ ID NO: 69273 - protein, 46 aa, Setaria italica
  Transcript Sequence Number=SeqID_3299
VSNPWVGVVCYSVKHLLFCKTPAVLFFLRVKLLIVFIIVICSCKYD

SEQ ID NO: 69274 - protein, 58 aa, Setaria italica
  Transcript Sequence Number=SeqID_3300
VSNPWVGVVCYSVKHLLFFFFLRVKLLIVFIIVICSCKLCSFIPLFNVISCLDFLLCC

SEQ ID NO: 69275 - protein, 44 aa, Setaria italica
  Transcript Sequence Number=SeqID_3301
NYDFVHCALAQFCIIGCFVRVLIQTSVNGTRKAEMYHMHEVELV

SEQ ID NO: 69276 - protein, 86 aa, Setaria italica
  Transcript Sequence Number=SeqID_3302
  Subcellular localization annotation: CTP_CleavageSite=58; ConfidenceScore=5.10e-01
GSLLHLHRTRCLQLQCCQGRCSPQLERRRRHQRRRLAAPWLRCTSWWGTPRRPRRRARATYAASATATARRRKASRLLGAPAARPP

SEQ ID NO: 69277 - protein, 102 aa, Setaria italica
  Transcript Sequence Number=SeqID_3303
VTRTRRERGCGVTRPAAYPHHGCCLCWFGRGRGRQAGRREVSLEDGLASLLFREVAADGHSLQWSSCPQKGHQPKPFSDPVVAFIQIDRGWPAAPEENGGLP

SEQ ID NO: 69278 - protein, 126 aa, Setaria italica
  misc_feature (22)..(22): Xaa can be any naturally occurring amino acid
  Transcript Sequence Number=SeqID_3304
  Gene Ontology: Mol. function=nucleic acid binding; Cellular component= nucleus; Biological process=nuclear-transcribed mRNA poly(A) tail shortening
  Homolog annotation: Hit_ID=B6TM95; Match level="QueryCoverage=90%, HitCoverage=58%, E-value=9e-59, Identity=98%"; Hit description =Polyadenylate-binding protein 2
  Pfam annotation: Domain name=RRM_1; Domain location=16-85; Score =73.8; E_value=6.2e-19; Accession=PF00076.14; Description=RNA recognition motif. (a.k.a. RRM, RBD, o
SASTAEAKEQVDARSVYVGNVXDYACTPEEVQQHFQACGTVNRVTILTDKFGQPKGFAYVEFLEQEAVQEALNLNESELHGRQIKVAPKRTNVPGMKQRPPRGYNPYHGYPYRSYGAPYFPPYGYG

SEQ ID NO: 69279 - protein, 154 aa, Setaria italica
  Transcript Sequence Number=SeqID_3305
  Gene Ontology: Mol. function=nucleic acid binding
  Homolog annotation: Hit_ID=B6TM95; Match level="QueryCoverage=100%, HitCoverage=70%, E-value=6e-45, Identity=66%"; Hit description =Polyadenylate-binding protein 2
  Pfam annotation: Domain name=RRM_1; Domain location=88-153; Score =57.2; E_value=6.1e-14; Accession=PF00076.14; Description=RNA recognition motif. (a.k.a. RRM, RBD, o
MDEEEHEVYGQEIPEDGDMDGADVDMAAGGDDAAKLQELDEMKRRLKEMEEEAAALRDMQAKVAKEMQGGDPSASTAEAKEQVDARSVYVGNVDYACTPEEVQQHFQACGTVNRVTILTDKFGQPKGFAYVEFLEQEAVQEALKFEIEILEIRQ

SEQ ID NO: 69280 - protein, 131 aa, Setaria italica
  Transcript Sequence Number=SeqID_3306
LEFFWHSTLSVMKCFSEKAYYLATSLFRNSMIAFLLENDLVLDVFIFLENGNSTGLWDCWMSLLADRIPKLVPNLIIASLLPNAYWFPHNAMRCCEVFHVCFIIILCYQYSSIPLCCPLWSFILCFCALIK

SEQ ID NO: 69281 - protein, 129 aa, Setaria italica
  Transcript Sequence Number=SeqID_3307
  Gene Ontology: Mol. function=nucleic acid binding; Cellular component= nucleus; Biological process=nuclear-transcribed mRNA poly(A) tail shortening
  Homolog annotation: Hit_ID=B6TM95; Match level="QueryCoverage=75%, HitCoverage=50%, E-value=2e-49, Identity=95%"; Hit description =Polyadenylate-binding protein 2
  Pfam annotation: Domain name=RRM_1; Domain location=6-73; Score=57.9; E_value=3.9e-14; Accession=PF00076.14; Description=RNA recognition motif. (a.k.a. RRM, RBD, o
MISPEWCIGVDYACTPEEVQQHFQACGTVNRVTILTDKFGQPKGFAYVEFLEQEAVQEALNLNESELHGRQIKVAPKRTNVPGMKQRPPRGYNPYHGYPYRSYGAPYFPPYGYGRAPRFRRPMRYRPYF

SEQ ID NO: 69282 - protein, 174 aa, Setaria italica
  Transcript Sequence Number=SeqID_3308
NFILEDDLAPDFEVPFLSMDLHALANQLSKLKLSQRLFVEEDLLPEDLADASKDNEILIECDTSVESDAKVSSVGHNFNFEPWKDASHHECAGNTYSDDQMKSERQSQCFEHEATTSPKISTHLVNSDSEEDKTYKRTMDTDPDTGLSKGLKFEVGSAEEELDMLLNSFSGTHL

SEQ ID NO: 69283 - protein, 587 aa, Setaria italica
  misc_feature (23)..(23): Xaa can be any naturally occurring amino acid
  Transcript Sequence Number=SeqID_3309
  Gene Ontology: Mol. function=protein serine/threonine kinase activity; Cellular component=Golgi apparatus; Biological process =protein amino acid phosphorylation
  Homolog annotation: Hit_ID=Q6Y2W8; Match level="QueryCoverage=99%, HitCoverage=85%, E-value=0.0, Identity=83%"; Hit description=GCK -like kinase MIK
  Pfam annotation: Domain name=Pkinase; Domain location=1-169; Score =84.2; E_value=4.6e-22; Accession=PF00069.17; Description=Protein kinase domain
  Pfam annotation: Domain name=Pkinase_Tyr; Domain location=2-169; Score=-48.5; E_value=1.7e-10; Accession=PF07714.9; Description =Protein tyrosine kinase
  Pfam module annotation: Pfam domain module=Pkinase::Pkinase_Tyr; Domain location=1-169::2-169
SFFQAGPPLDEMSIACILRELVXHAIEYLHSEGKIHRDIKAANILLTESGDVKVADFGVSAQLTKTMSRRKTFVGTPFWMAPEVIQNSEGYNEKADIWSLGITAIEMAKGEPPLADIHPMRVLFMIPRENPPQLDEHFSKPMKEFVSLCLRKNPAERPSAKELLKHRFIKNARKTPKLLERIRERPKFAAKHMDATQNGQTHVEEDDVGTGTIKVDRAKDAAPPLSQGTVRKATGWDLPDRSEGTGTVRVVSRPPQAASTKDSRFDTPQSPITPRRTADRENQWRTSYTGSEESLSQRDTQNERGRLQSSTDDNDQSVSGSGTVVLRSPRASEARNHSSKPPSRFSSYEDMSSSGTVVRIQSEDPETPRSSRSRLGIQEKASSSSLEDSAINLAEAKAALQAGLRKGNARERPVVNRYEKESHEHRSSGVNSQELQSEGVDMQKGHKSRQLPDGQSASRASSSVASPAISSLIIPSLKEATGDKFERPAVHAFLDSLMDLELEIPGSCEVLIGRLLHRLGSSKESSLQGLQETAASVFAKKSEPPSEQASNKKLTNTPPLAAPTVSPLARFLLTRWQNQVSQDLNSG

SEQ ID NO: 69284 - protein, 424 aa, Setaria italica
  Transcript Sequence Number=SeqID_3310
  Gene Ontology: Mol. function=transporter activity; Cellular component= intracellular; Biological process=transport
  Homolog annotation: Hit_ID=B6U127; Match level="QueryCoverage=99%, HitCoverage=69%, E-value=1e-105, Identity=49%"; Hit description =Phosphatidylinositol transporter/ transporter
  Pfam annotation: Domain name=CRAL_TRIO; Domain location=1-149; Score =60.7; E_value=5.6e-15; Accession=PF00650.12; Description=CRALTRIO domain
NHVQEFERAFREKFPACSIAAKRHIDTTTTILDVHGVGWKNFSKIARDLVRCMQKIDGDYYPETLHQMFIVNAGPGFKLIWSTVKGLLDPKTSSKIHVLGTKYQSRLLEAIDASQLPEYFGGSCSCPNHGGCLRSNKGPWSDPSIMKLVHSMESLREIGQVSDIEETITGSVRLRALKLPERISDTSNAESGSDIDDLGSPVAPEDVEYPSLAPVREEVRESGSTTYSGSDGTSHMADKVVGSNQRYNTAGNEARQFNTEQRSFVNGALPAPGRRVPNNGGGNADDGILKHLSRKVVAVFLKVLSLLRFFIRRRQHLENVHPHATTVPRNQADLQIIREDRVNPCLERLDRLESVFNQLSRKPPELPQDKDQAIQDSFDRIKSIEFDLEKTKKVLHATVIKQMQMAETLEAVKESDLRRRKFCT

SEQ ID NO: 69285 - protein, 180 aa, Setaria italica
  Transcript Sequence Number=SeqID_3311
  Gene Ontology: Mol. function=4 iron, 4 sulfur cluster binding; Biological process=tRNA processing
  Homolog annotation: Hit_ID=Q8H8N3; Match level="QueryCoverage=100%, HitCoverage=27%, E-value=5e-98, Identity=95%"; Hit description=tRNA wybutosine-synthesizing protein 1 homolog
  Pfam annotation: Domain name=Wyosine_form; Domain location=114-178; Score=124.4; E_value=3.6e-34; Accession=PF08608.4; Description =Wyosine base formation
ALSLVGEPIMYPEINALVDELHRRHISTFLVTNAQFPEKIKTLKPITQLYVSVDAATKESLKAVDRPLFSDFWERFLDSLKSLHEKDQRTVYRLTLVKGWNAEEIDAYAKLLNLGQPDFIEIKGVTYCGSSATSKLTMENVPWHSDVKEFSEVLASKSGGVYEVACEHAHSCCVLLAKVD

SEQ ID NO: 69286 - protein, 49 aa, Setaria italica
  Transcript Sequence Number=SeqID_3312
VVNLIQLTTDDLIPIYTAIRSSVVSCYLIYCLKRDIVFFPVVDHILTGL

SEQ ID NO: 69287 - protein, 85 aa, Setaria italica
  Transcript Sequence Number=SeqID_3313
MADGLRTLQRTIEAFRRGNYSLEYYDVNKSEVMGHIHGYYKEAFDRLPSSLDSLFHEVGVCFGFFDPVSNIIANTAAYGCSSSLV

SEQ ID NO: 69288 - protein, 180 aa, Setaria italica
  misc_feature (140)..(140): Xaa can be any naturally occurring amino acid
  Transcript Sequence Number=SeqID_3314
  Gene Ontology: Mol. function=racemase and epimerase activity, acting on carbohydrates and derivatives; Biological process=carbohydrate metabolic process
  Homolog annotation: Hit_ID=Q1XG32; Match level="QueryCoverage=98%, HitCoverage=48%, E-value=3e-96, Identity=95%"; Hit description=UDP -galactose epimerase
TRGRSIVLLRYFNPIGAHSSGEIGEDPKGVPNNLLPYIQQVAVGRLPELSVYGHDYPTRDGTAIRDYIHVVDLADGHIAALNKLFDTPDIGCVAYNLGTGRGTSVLEMVAAFKKASGKEISTKFCPRRPGDATEVYASTXEKAERELGWRAQYGIEDMCRDQWNWAKKNPFGYCGTAEKK

SEQ ID NO: 69289 - protein, 67 aa, Setaria italica
  Transcript Sequence Number=SeqID_3315
ALCLARHGEGAEGCSVGHGASGAGRRGGSCGGSRGAVLGEAEPVRWWVWAWWWPWARWRAWSWVLEE

SEQ ID NO: 69290 - protein, 77 aa, Setaria italica
  Transcript Sequence Number=SeqID_3316
  Homolog annotation: Hit_ID=Q6L565; Match level="QueryCoverage=90%, HitCoverage=7%, E-value=3e-16, Identity=62%"; Hit description =Putative RNA polymerase sigma factor
SFYRRYLEEPCLWVETNNTTLSLLSSNAEIALGFLLIISLFSWRRSIIQTFMYWQVSYPPNVQPLPFVFHLLLACTG

SEQ ID NO: 69291 - protein, 255 aa, Setaria italica
  misc_feature (61)..(61): Xaa can be any naturally occurring amino acid
  Transcript Sequence Number=SeqID_3317
  Homolog annotation: Hit_ID=Q6L565; Match level="QueryCoverage=100%, HitCoverage=29%, E-value=1e-100, Identity=77%"; Hit description =Putative RNA polymerase sigma factor
  Subcellular localization annotation: CTP_CleavageSite=53; ConfidenceScore=5.57e-01
QRYIDRDLVVEPMSSTGSSQPSRPDVRSSPSPSNENLRARNSGSTSRSAPPPPAQTDSAVXPLRFDARTIHFSINAWVLVVAFLGMLPILPKHLADRACKLSLLGTIFSSGYSLYSTYGKPRAWNMPAIQAWLQSVLATKDFIHLMFSSMFFTSQLHLKIAALPVLCWALDHVARFLRRNFNRSSFYRRYLEQPCLWVETNNTKLSLLSSNAEIALDFLLIISLFLWRRSIIQTFMYFQVLKLMYHAPVTSSYHQ

SEQ ID NO: 69292 - protein, 72 aa, Setaria italica
  Transcript Sequence Number=SeqID_3318
  Homolog annotation: Hit_ID=Q6L565; Match level="QueryCoverage=83%, HitCoverage=6%, E-value=9e-23, Identity=78%"; Hit description =Putative RNA polymerase sigma factor
DVLSFCSCRSRRNIIQTFMYFHLLKLMYHAPVTSGYHQSVWARIGRAVNPYIYRYAPFLNTPISAVQRWWLR

SEQ ID NO: 69293 - protein, 349 aa, Setaria italica
  Transcript Sequence Number=SeqID_3319
  Homolog annotation: Hit_ID=Q6L565; Match level="QueryCoverage=96%, HitCoverage=38%, E-value=1e-137, Identity=71%"; Hit description =Putative RNA polymerase sigma factor
  Pfam annotation: Domain name=UPF0121; Domain location=93-337; Score= -109.4; E_value=0.00042; Accession=PF03661.5; Description =Uncharacterised protein family (UPF0121)
MGEGDASAGGDPQRLKRIAAAAYDYENDARWAGYWSNVLVPPHLASRPDVVDHFKRKFYQRYIDPGLIVEPMSSMNSNQSSRPAARSSATPSRENTRPHDSGSSTRSTGASQQSSAERSANSLRLDGRTIHFSINAWVLVVASLGILPILPNHISSKAYRLSLLGTICSSAYSLYTTYGKPRAWNMPAIQPWLQSIIVAKDFVHLMFSFMMFTSNVHFKIALLPVLCWALDHVARFLRRNFTRSSLYRKYLEDPCLWVETNNTTLSLLCSNAEITLGFLMIISLFSSRRNIIQTFMYFHLLKLMYHAPVTSGYHQSVWARIGRAVNPYIYRYAPFLNTPISAVQRWWLR

SEQ ID NO: 69294 - protein, 345 aa, Setaria italica
  Transcript Sequence Number=SeqID_3320
  Homolog annotation: Hit_ID=Q6L565; Match level="QueryCoverage=91%, HitCoverage=36%, E-value=1e-134, Identity=77%"; Hit description =Putative RNA polymerase sigma factor
  Pfam annotation: Domain name=UPF0121; Domain location=102-333; Score=- 114.2; E_value=0.00095; Accession=PF03661.5; Description =Uncharacterised protein family (UPF0121)
MAGSGADAEQEQKRAAAAAYDYEGDARWSDYWSNVLVPPNLASRPDVVDHFKRKFYQRYIDRDLVVEPMSSTGSSQPSRPDVRSSPSPSNENLRARNSGSTSRSAPPPPAQTDSAVNPLRFDARTIHFSINAWVLVVAFLGMLPILPKHLADRACKLSLLGTIFSSGYSLYSTYGKPRAWNMPAIQAWLQSVLATKDFIHLMFSSMFFTSQLHLKIAALPVLCWALDHVARFLRRNFNRSSFYRRYLEEPCLWVETNNTTLSLLSSNAEIALGFLLIISLFSWRRSIIQTFMYWQVLKLMYHAPVTSSYHQSAWAKIGRVVNPYIHRYAPFLQTPISAIQRWWFR

SEQ ID NO: 69295 - protein, 65 aa, Setaria italica
  Transcript Sequence Number=SeqID_3321
  Gene Ontology: Mol. function=calcium ion binding; Cellular component =integral to membrane
  Homolog annotation: Hit_ID=Q0IKM2; Match level="QueryCoverage=89%, HitCoverage=7%, E-value=3e-12, Identity=66%"; Hit description=Ca2+ binding protein cbp1
LERSSGDSNSEKEQYSVNLTKRNLAGLANGFLRRPAHGIAFSYCGIGRNDFGLPFGARSETRNRG

SEQ ID NO: 69296 - protein, 98 aa, Setaria italica
  Transcript Sequence Number=SeqID_3322
  Gene Ontology: Mol. function=calcium ion binding; Cellular component =integral to membrane
  Homolog annotation: Hit_ID=Q0IKM2; Match level="QueryCoverage=85%, HitCoverage=10%, E-value=2e-31, Identity=83%"; Hit description=Ca2+ binding protein cbp1
  Pfam annotation: Domain name=efhand; Domain location=21-49; Score =17.3; E_value=0.065; Accession=PF00036.24; Description=EF hand
  Pfam annotation: Domain name=efhand; Domain location=57-85; Score =3.5; E_value=8.8; Accession=PF00036.24; Description=EF hand
  Pfam module annotation: Pfam domain module=efhand::efhand; Domain location=21-49::57-85
IEKVDAMLQKLEKEIDDVDAQIGNRWQLLDRDHDGKVTAEEVAAAAAYLKDTIGKEGVQELISNLSKDKEGKILVEDIVKLASQTENNEEEEEEEARQ

SEQ ID NO: 69297 - protein, 721 aa, Setaria italica
  Transcript Sequence Number=SeqID_3323
  Gene Ontology: Mol. function=calcium ion binding; Cellular component =integral to membrane; Biological process=multicellular organismal development
  Homolog annotation: Hit_ID=Q0IKM2; Match level="QueryCoverage=97%, HitCoverage=92%, E-value=0.0, Identity=75%"; Hit description=Ca2+ binding protein cbp1
  Pfam annotation: Domain name=LETM1; Domain location=163-433; Score =551.9; E_value=7.6e-163; Accession=PF07766.5; Description=LETM1-like protein
  Pfam annotation: Domain name=efhand; Domain location=645-673; Score =17.4; E_value=0.062; Accession=PF00036.24; Description=EF hand
  Pfam annotation: Domain name=efhand; Domain location=681-709; Score =3.4; E_value=8.8; Accession=PF00036.24; Description=EF hand
  Pfam module annotation: Pfam domain module=LETM1::efhand::efhand; Domain location=163-433::645-673::681-709
DEFLERSSGDSNSEKEQYSVNLTKRNLAGLANGFLRRPAHGIAFSYCGIGRNDFGLPFGARSMLQSLRASSTATAGQPKLDIGDEQSEDQKQNTKKKEASPEECDQAVEGLSNAKAKAKAKHVPESLKTSQSVIQKFWARLLGIGPALRAVASMSRADWAAKLKHWKDEFVSTLQHYWLGTKLLWADVRISSRLLVKLASGKGLSRRERQQLTRTTADIFRLVPFAVFIIVPFMEFLLPVFLKLFPNMLPSTFQDKMKEQEALKRKLKARMEYAKFLQDTAKEMAKEVQTSRSGDIKQTAEDLDEFLNKVRRGERVSNDEILSFAKLFNDELTLDNMSRPRLVNMCKYMGIRPFGTDNYLRFMLRKKLQDIKKDDKMIQAEGVESLSEEELRQACRERGLLGLLSTEEMRQQLQDWLDLSLNHSVPSSLLILSRAFTVSGRMKPEEAVVATLSSLPDEVVDTVGTVLPSEDSVSERRRKLEFLEMQEELIKEEEKKKEKEEKAKQKREEEAKLKEREAAEEDLALKEMTDATAREELRKAKEHDKEKLCNISRALAVLASASSVSKERQEFLSLVNKEIELYNSMLEKEGTEGEEEAKRAYIAASEEPDHDAEVAAEEKVSSALIEKVDAMLQELEKEIDDVDAEIGNRLQLLDRDHDGKVTPEEVAAAAAYLKDTIGKEGVQELISNLSKDKEGKILVEDIVRLASQTEEHNEEEEEARQ

SEQ ID NO: 69298 - protein, 159 aa, Setaria italica
  Transcript Sequence Number=SeqID_3324
  Gene Ontology: Mol. function=DNA binding
  Homolog annotation: Hit_ID=Q7XR86; Match level="QueryCoverage=55%, HitCoverage=65%, E-value=2e-38, Identity=61%"; Hit description =OSJNBa0011L07.15 protein
LAGGGGSFADHEGSMSAGGDEGERGGPSGNRWPRQETLALLKIRSEMDAAFREAALKGPLWEQVSRKLEAMGYKRSAKKCREKFENVDKYYKRTKDGRAGRGDGKAYRFFSELEALHGASSSPAPHPPPPSSLAPTPVAMAPPATPLPVLQGVPGMAPA

SEQ ID NO: 69299 - protein, 125 aa, Setaria italica
  misc_feature (11)..(11): Xaa can be any naturally occurring amino acid
  Transcript Sequence Number=SeqID_3325
  Homolog annotation: Hit_ID=Q7XBC7; Match level="QueryCoverage=64%, HitCoverage=10%, E-value=4e-27, Identity=63%"; Hit description =Putative transposase protein
TANIDYNPEDXPSAYSNATVHSRLNEYTTMAREVHGPEYDPSTQELDGEVVMRVGKGKKHGRYWIGDSTIDTAITPTLSQIRAKGTSSSPTIRPRPDTTWFQMEALQAQVKEERKRREEMEARME

SEQ ID NO: 69300 - protein, 157 aa, Setaria italica
  misc_feature (142)..(142): Xaa can be any naturally occurring amino acid
  Transcript Sequence Number=SeqID_3326
  Homolog annotation: Hit_ID=Q5W7C5; Match level="QueryCoverage=100%, HitCoverage=13%, E-value=8e-33, Identity=53%"; Hit description =Unknow protein
QKGKLAGDYRSRKDQAGHGLKVKSYKSIEQQANDTRVGSDPRSKISQVKMAGKPSSQFDRIGQKHSRGNAVYSQSEETESDSSEQFEGGGDVHFLERKPEHHHSGFHRPAHGAKKSKKLAKVVKTSYPTADADLEPSRSNGXQRKVSETGYLRDVDV

SEQ ID NO: 69301 - protein, 475 aa, Setaria italica
  misc_feature (18)..(18): Xaa can be any naturally occurring amino acid
  misc_feature (446)..(446): Xaa can be any naturally occurring amino acid
  misc_feature (461)..(461): Xaa can be any naturally occurring amino acid
  Transcript Sequence Number=SeqID_3327
  Gene Ontology: Mol. function=DNA binding
  Homolog annotation: Hit_ID=Q5W7C5; Match level="QueryCoverage=92%, HitCoverage=39%, E-value=1e-138, Identity=58%"; Hit description =Unknow protein
TTSASLRDVLSLDAWNTXLSEDERLSLAALLPDMDLETFSRTLVELLGGQNFHFGSPLAALFERLNGGLCDPRINLYRRGTRFAERRKHYYWLQSYHNSMVRGLREIKDCWKGREGYSLDERLRMLDTLKAQQQQRKALASARRAASETDSESRESGEKVLNQLKLDKIGQKKSGKLVKERSKGLLRVCMPKGVDEEYGGGSGRHSAMSLAELSHRDNAYGYDSSGHRGKLHRSIDGLYSEELGYEQDSSRTRLPRLLPKPVKKKELTMSYDGNLYGNNYHDDNTASPYYYGRNPSANQGVTLAAAYDPPYFETRRNARYSERDWVQGGKGAQGKALTGDEMHWTAGTHTGHLDDWQKGKLAGDYRSRKDQAGHGLKVKSYKSIEQQANDTRVGSDPRSKISQVKMAGKPSSQFDRIGQKHSRGNAVYSQSEETESDSSEQFEGGXDVHFLERKPEHHHSXHRPAHGFDHFSKLF

SEQ ID NO: 69302 - protein, 379 aa, Setaria italica
  misc_feature (337)..(337): Xaa can be any naturally occurring amino acid
  Transcript Sequence Number=SeqID_3328
  Gene Ontology: Mol. function=protein serine/threonine kinase activity; Cellular component=plasma membrane; Biological process =protein amino acid phosphorylation
  Homolog annotation: Hit_ID=B2KTA4; Match level="QueryCoverage=100%, HitCoverage=74%, E-value=0.0, Identity=93%"; Hit description=Calcium- dependent protein kinase
  Pfam annotation: Domain name=APH; Domain location=21-197; Score= -12.5; E_value=0.016; Accession=PF01636.15; Description =Phosphotransferase enzyme family
  Pfam annotation: Domain name=Pkinase; Domain location=19-279; Score =295.3; E_value=1.3e-85; Accession=PF00069.17; Description=Protein kinase domain
  Pfam annotation: Domain name=Pkinase_Tyr; Domain location=19-277; Score=-35.1; E_value=2.2e-11; Accession=PF07714.9; Description =Protein tyrosine kinase
  Pfam annotation: Domain name=efhand; Domain location=326-354; Score =26.4; E_value=0.00012; Accession=PF00036.24; Description=EF hand
  Pfam module annotation: Pfam domain module=APH::Pkinase::Pkinase _Tyr::efhand; Domain location=21-197::19-279::19-277::326-354
VACGKRTDFGYDKDFEARYSLGKLLGHGQFGYTYAAVDRASGDRVAVKRIDKNKMVLPVAVEDVKREVKILKALQGHENVVHFYNAFEDDNYVYIVMELCEGGELLDRILAKKDSRYSEKDAAVIVRQMLKVAAECHLHGLVHRDMKPENFLFKSTKEDSPLKATDFGLSDFIRPGKQFRDIVGSAYYVAPEVLKRKSGPESDVWSIGVITYILLCGRRPFWDKTEDGIFKEVLKNKPDFRRKPWPNITPAAKDFVQKLLVKDPRARLTAAQALSHDWVREGGKASEIPLDISVLHNMRQFVKYSRFKQFALRALASTLNSEELSDLRDQFNAIDVXKNGTISLEELKQALAKDVPCRLKGPRVLEIIEAIDSNTDGLV

SEQ ID NO: 69303 - protein, 257 aa, Setaria italica
  misc_feature (109)..(109): Xaa can be any naturally occurring amino acid
  misc_feature (118)..(118): Xaa can be any naturally occurring amino acid
  Transcript Sequence Number=SeqID_3329
  Gene Ontology: Mol. function=protein serine/threonine kinase activity; Cellular component=plasma membrane; Biological process =protein amino acid phosphorylation
  Homolog annotation: Hit_ID=B2KTA4; Match level="QueryCoverage=92%, HitCoverage=64%, E-value=3e-63, Identity=63%"; Hit description =Calcium-dependent protein kinase
  Pfam annotation: Domain name=Pkinase; Domain location=1-146; Score= -76.1; E_value=0.00058; Accession=PF00069.17; Description=Protein kinase domain
  Pfam annotation: Domain name=SPARC_Ca_bdg; Domain location=117-237; Score=-27.9; E_value=0.004; Accession=PF10591.1; Description =Secreted protein acidic and rich in cyst
  Pfam annotation: Domain name=efhand; Domain location=141-169; Score =22.6; E_value=0.0016; Accession=PF00036.24; Description=EF hand
  Pfam annotation: Domain name=efhand; Domain location=183-211; Score =25.3; E_value=0.00025; Accession=PF00036.24; Description=EF hand
  Pfam annotation: Domain name=efhand; Domain location=213-241; Score =28.8; E_value=2.2e-05; Accession=PF00036.24; Description=EF hand
  Pfam module annotation: Pfam domain module=Pkinase::SPARC_Ca _bdg::efhand::efhand::efhand; Domain location=1-146::117-237::141 -169::183-211::213-241
LIIYFDKKGVPNFLCFFKPENFLFKSTKEDSPLKATDFGLSDFIRPGKQFRDIVGSAYYVAPEVLKRKSGPESDVWSIGVITYILLCGRRPFWDKTEDGIFKEVLKNKXIDLILINHXTCGLEELKQALAKDVPWRLKGPRVLEIIEAIDSNTDGLVDFEEFVAATLHVHQLVEHDTEKWKLLSQAAFDKFDVDGDGYITSDELRMHTGMKGSIDPLLEEADIDKDGKISLDEFRRLLKTASMSARIVQTPRGIRMS

SEQ ID NO: 69304 - protein, 72 aa, Setaria italica
  Transcript Sequence Number=SeqID_3330
FGKIRCQGPHCMGPEFAARNETESRTEPEFDLGRAGAESEITSTATQRLNYGSIPSRSGRERDESETYPAPP

SEQ ID NO: 69305 - protein, 90 aa, Setaria italica
  Transcript Sequence Number=SeqID_3331
RVCGLTSDEDLHPSYQRTSVRELWEQRTKRESWLLGSLIHQRDRVADLIVFLWRCGAFCLLCGKACGGRVVGSGARGWSTAASSATAART

SEQ ID NO: 69306 - protein, 281 aa, Setaria italica
  Transcript Sequence Number=SeqID_3332
  Gene Ontology: Mol. function=protein binding; Cellular component =nucleus; Biological process=proteasome assembly
  Homolog annotation: Hit_ID=B6TKL0; Match level="QueryCoverage=100%, HitCoverage=100%, E-value=1e-142, Identity=90%"; Hit description =Tumor necrosis factor superfamily member 5-induced protein 1
  Pfam annotation: Domain name=HCCA3; Domain location=16-281; Score =442.9; E_value=4.9e-130; Accession=PF09754.1; Description=Primary hepatocellular carcinoma protein HCC
MEFAVVEGESFSPSCPTLIMPALSIGNVGQLAVDLLISSARSRRVAYLDEPSVLPCAGNDAFGPDAVGDLALALEAYESTSHRLSFIQQRSPVITGMMVSFAKNVADFIKTIGKDHIVILSSLDSGKRRVIDASSDMQVYYLSSCNEDGSDSEYEKLGWKKLEEYDLSHKRWSCLTGLVEGGDFSEDMADDTDEMTINDYYASLPFAALFSACKAKGLKVSCVLCYCSEGDNMPESFQLAEAVCKLLGHEPEKFHGNGSNGWTVPLSWKSVYGPPPDMSIF

SEQ ID NO: 69307 - protein, 98 aa, Setaria italica
  misc_feature (70)..(70): Xaa can be any naturally occurring amino acid
  Transcript Sequence Number=SeqID_3333
  Gene Ontology: Mol. function=structural molecule activity
  Homolog annotation: Hit_ID=Q0JF03; Match level="QueryCoverage=98%, HitCoverage=16%, E-value=5e-43, Identity=83%"; Hit description=Actin- related protein 9
LVGKTASTAGLAPVLELRILNKLPANQSVERVEVLQSRTYPLFVPWKGGVILGVLDTGRDAWIHREDWIXKNGVHIGSGRKYKDSYFLQAQVMCYYNI

SEQ ID NO: 69308 - protein, 81 aa, Setaria italica
  Transcript Sequence Number=SeqID_3334
ITVKHECVFTTPDSSTSNLPVFIQVSWLLMTQTKQDKHSMHETDDASYIKVNCSPQAYPKIIRSQTACKIAGPGCVRNSVI

SEQ ID NO: 69309 - protein, 212 aa, Setaria italica
  misc_feature (184)..(184): Xaa can be any naturally occurring amino acid
  Transcript Sequence Number=SeqID_3335
  Gene Ontology: Mol. function=structural molecule activity
  Homolog annotation: Hit_ID=Q0JF03; Match level="QueryCoverage=99%, HitCoverage=35%, E-value=1e-107, Identity=85%"; Hit description =Actin-related protein 9
DDDDRSAGHQKTRLSALNVPPMGLLYPRVLVPEEYPPPPRSWFQDYDDMLEDTWQTSDSLYPGGNGGYGMWDSYPTFPTRLKKFDNIGLVEAIVSSVLSTGRVDLQRKLFCSIQLVGGAASTAGLAPVLELRILNKLPANQSVERVEVLQSRTYPLFVPWKGGVILGVLDTGRDAWIHREDWIXKNGVHIGSGRKYKDSYFLQAQVMCYYNI

SEQ ID NO: 69310 - protein, 496 aa, Setaria italica
  Transcript Sequence Number=SeqID_3336
  Gene Ontology: Mol. function=structural molecule activity; Cellular component=cytoskeleton; Biological process=regulation of transcription, DNA-dependent
  Homolog annotation: Hit_ID=Q0JF03; Match level="QueryCoverage=96%, HitCoverage=81%, E-value=0.0, Identity=84%"; Hit description=Actin -related protein 9
  Pfam annotation: Domain name=Actin; Domain location=13-496; Score= -128.8; E_value=9.9e-08; Accession=PF00022.11; Description=Actin
MDYLKTVVPSQLMAERGSNLVVINPGSANVRMGFASQDVPFNIPHCIARHINPQEGEEPKFSVRDQMLNCRATSSQNAERESAYDIIAALMKIPFLDEEMPSPNQPLPPKMGRVDGFSSQQSRDDSKFTWTNVTERSIKPSTSIDRSVYKDAEEGTLPSTSGDDNGHDVEENKYKEMIFGEDALKIPPSESYCLSRPIRRGHFNVSHNYSLHQVLEDLRTIWNWMLTEKLHINPRDRGLYSAILVLGETFDNREIKEMLSIVLHDLGFSTAVVHQEALAAAFGNGLSTACVVNIGAQVTQVVCVEDGVALPHTALALPYGGDDISRCLLWVQRRHHTWPNFQTDPVSKPIDMLMLNKIKESYSQIRSGTFDAVALVHSYDDDRSAGHQKTRLSALNVPPMGLLYPRVLVPEEYPPPPRSWFQDYDDMLEDTWQTSDSLYPGGNGGYGMWDSYPTFPTRLKKFDNIGLVEAIVSSVLSTDWFAGSLLRILSSRTGAR

SEQ ID NO: 69311 - protein, 43 aa, Setaria italica
  Transcript Sequence Number=SeqID_3337
TELGRNLNGLMYDGKDPLLLQKCYCRNITILCVKFMLLFDLLF

SEQ ID NO: 69312 - protein, 72 aa, Setaria italica
  misc_feature (1)..(1): Xaa can be any naturally occurring amino acid
  Transcript Sequence Number=SeqID_3338
XPIPVCLVRLVVRRVVLRLGHLESLASFHQHKQTDRRRISGRGGLDLRRRRTLCIRKDRARRRRVTEASARV

SEQ ID NO: 69313 - protein, 60 aa, Setaria italica
  Transcript Sequence Number=SeqID_3339
  Gene Ontology: Mol. function=structural constituent of ribosome; Cellular component=intracellular; Biological process=translation
  Homolog annotation: Hit_ID=B6U0G5; Match level="QueryCoverage=91%, HitCoverage=71%, E-value=4e-22, Identity=94%"; Hit description=60S ribosomal protein L29
  Pfam annotation: Domain name=Ribosomal_L29e; Domain location=3-42; Score=67.6; E_value=4.5e-17; Accession=PF01779.9; Description =Ribosomal L29e protein family
  Subcellular localization annotation: CTP_CleavageSite=53; ConfidenceScore=5.22e-01
MAKSKNHTAHNQSYKAHKNGIKKAKRHRQTSTKGMDPKFLRNLRYSRKNNKKSGEAEAEE

SEQ ID NO: 69314 - protein, 78 aa, Setaria italica
  Transcript Sequence Number=SeqID_3340
VRNYSTMRLNNINTCIILLHSRQINNGLLESLLFPPAVLVSQAVTMPEQLIHHVTIVQNFTGFTGGGIWDEQQNTRPQ

SEQ ID NO: 69315 - protein, 86 aa, Setaria italica
  Transcript Sequence Number=SeqID_3341
  Gene Ontology: Mol. function=sucrose synthase activity; Cellular component=plasma membrane; Biological process=sucrose metabolic process
  Homolog annotation: Hit_ID=B9SJX1; Match level="QueryCoverage=76%, HitCoverage=7%, E-value=1e-18, Identity=59%"; Hit description =Sucrose synthase, putative
ECYTWQIYATKVLNMGSMYGFWRTMDKEERQAKQRYLQMFYNLQFRKLAKAVPKVGERPEQPTAATVPDRLVSRPKERKTQIRIQR

SEQ ID NO: 69316 - protein, 81 aa, Setaria italica
  misc_feature (63)..(63): Xaa can be any naturally occurring amino acid
  Transcript Sequence Number=SeqID_3342
  Gene Ontology: Mol. function=binding
CSCIRFKALEVHTDPYGGVLNKSSISLLVEIALRLAKDVEKVKSNAVRALGYLSRFIRFNHQXDSGFYGDPVWLERMVQAL

SEQ ID NO: 69317 - protein, 49 aa, Setaria italica
  Transcript Sequence Number=SeqID_3343
SVKKRKDKLHQLNGFSCGICSIKDQDTNIQQNEDLGPSQLSFGMLTIKK

SEQ ID NO: 69318 - protein, 844 aa, Setaria italica
  misc_feature (284)..(284): Xaa can be any naturally occurring amino acid
  Transcript Sequence Number=SeqID_3344
  Gene Ontology: Mol. function=binding
  Homolog annotation: Hit_ID=UPI000173949A; Match level="QueryCoverage =98%, HitCoverage=75%, E-value=1e-168, Identity=40%"; Hit description= binding
  Pfam annotation: Domain name=HEAT; Domain location=132-165; Score =8.1; E_value=5; Accession=PF02985.14; Description=HEAT repeat
  Pfam annotation: Domain name=HEAT; Domain location=424-460; Score =10.7; E_value=2.4; Accession=PF02985.14; Description=HEAT repeat
  Pfam annotation: Domain name=HEAT; Domain location=466-503; Score =3.1; E_value=20; Accession=PF02985.14; Description=HEAT repeat
  Pfam annotation: Domain name=HEAT; Domain location=509-545; Score =12.8; E_value=1.3; Accession=PF02985.14; Description=HEAT repeat
  Pfam annotation: Domain name=HEAT; Domain location=563-598; Score =10.1; E_value=2.8; Accession=PF02985.14; Description=HEAT repeat
  Pfam module annotation: Pfam domain module=HEAT::HEAT::HEAT::HEAT::HEA T; Domain location=132-165::424-460::466-503::509-545::563-598
  Subcellular localization annotation: CTP_CleavageSite=34; ConfidenceScore=5.04e-01
LFVANLQMFFVYGLRSASPPALVPKQIGTDSKPRASHRGRYRPPHLRNKAGRENDSLEGPSSDSEYSRYDLSSSDSDLSDSDGYAKNGDRFRSSKARLAAILCIQDICRADPKLLTSQWPVLLPENDVLQQRKHQATLMTCLIFDPVTKVRVEAASAIATMLEGQALVLTQVAEYKESSKRGSFTALSCSLGQILMQLHTGALYLIQRETQATLLAALFRVLILMISATPYARMPKELLPTVIKVMCSRLPNTHSNKNEHYVLLHFQRCYLLWMSLRFSLKIVXEEMHFSIRCGAFQVLRSAVHNYPSCANMIWEKIRDNVLDLLQIQSFEDQKLDANFGPPGPKEESSIKGRCLVAGIKVMDECLRVSSGFKGADDIKEYRLMDIQHISDCTINKVIKSAPHFEVEVAGSSQNCTLDITLGTSRWIEVIETHLPRGLSHDSAMVRTASLTCFAGMTSDVFFSLPENKRDYVTTTSVHAALSDVVPSVRSAACRAIGIIACFPEILASPSLPGKFIDAIEFNTRNPSAPVRVTASWALANLCSCIRFKALEVHTDPYGGVLNKSSISLLVEIALRLAKDVEKVKSNAVRALGYLSRFIRFNHQVDAINDPSDSGFYGDPVWLERMVQALISCVTTGNVKVQWNVCHALSNLFMNDSLRLQDMPWASSVYSILLLLIRNSNNYKIKMHAGVALAVPVSRLDYGSSFPDVVQGLVHALEALCSNNSSLPSNFKQKGNLEKQLTFTALHLLGFVSPNDDPSLKDFLIKKASFLEDWLKSLCTSFSNTEHQPLPMEAINEEDGFSPNVTQKVMLSSAVQSLLGIYAGRNQQAITQRFEQLAASLVNGE

SEQ ID NO: 69319 - protein, 145 aa, Setaria italica
  Transcript Sequence Number=SeqID_3345
  Gene Ontology: Mol. function=transporter activity; Cellular component= intracellular; Biological process=transport
  Homolog annotation: Hit_ID=B9SSF9; Match level="QueryCoverage=91%, HitCoverage=40%, E-value=3e-52, Identity=67%"; Hit description=Sec14 cytosolic factor, putative
  Pfam annotation: Domain name=CRAL_TRIO_N; Domain location=2-50; Score= 18.0; E_value=0.0011; Accession=PF03765.7; Description=CRALTRIO, N -terminus
LLASNQLPEKFDDYYLLLRFLRMRGFNILKAKEMFLNMLKWREDCSVDAIANDFKFEEYDAVKRCYPHGFHGVDKFGRPLYIERIGLVDLSKLMQVTSIDRYVKYHISEQEKTMSLRYPSCSLAAKKHIASTTAILDVKGLVRDS

SEQ ID NO: 69320 - protein, 121 aa, Setaria italica
  Transcript Sequence Number=SeqID_3346
YNTPAVFLQQQSALLQQQYLAHLTLQSIMAQQHQVLSPFSRLSLASPAAYWQHQQLLPFNQLAVENAYLQQQQLLPLNPLAVGNPRFWQQQQLLRVNPFSCDEPRAFWQHSSYCVSTQLLR

SEQ ID NO: 69321 - protein, 113 aa, Setaria italica
  Transcript Sequence Number=SeqID_3347
  Homolog annotation: Hit_ID=Q7FSP8; Match level="QueryCoverage=98%, HitCoverage=27%, E-value=8e-27, Identity=62%"; Hit description=X1 (Fragment)
RFKLETMSNSDGKDSVSEKKINELSNQLQEKVDEMDFIESSNQILVIKERRSNDELQEIRTELINGLLEHGCARAHIGIKRMGELDPKAFSNACKPILPEDNAEVNAAILCSK

SEQ ID NO: 69322 - protein, 120 aa, Setaria italica
  misc_feature (32)..(32): Xaa can be any naturally occurring amino acid
  Transcript Sequence Number=SeqID_3348
  Gene Ontology: Mol. function=RNA binding; Cellular component =mitochondrion
  Homolog annotation: Hit_ID=B9RZU8; Match level="QueryCoverage=90%, HitCoverage=16%, E-value=2e-19, Identity=45%"; Hit description =Pentatricopeptide repeat-containing protein, putative
  Pfam annotation: Domain name=PPR; Domain location=17-51; Score=28.6; E_value=2.6e-05; Accession=PF01535.12; Description=PPR repeat
  Pfam annotation: Domain name=PPR; Domain location=52-86; Score=26.1; E_value=0.00015; Accession=PF01535.12; Description=PPR repeat
  Pfam module annotation: Pfam domain module=PPR::PPR; Domain location =17-51::52-86
CYFWGRMIVQGIQPDAFTFNAMIYAYCKEGEXRMAAWMLGGMNAVNCPRNIVAYTILMAELCNQHRLEDAMVYLLKMLYEGIYPNTATWNVLVRGAFRNLGCIEPIDLVQHITRDLSAGT

SEQ ID NO: 69323 - protein, 107 aa, Setaria italica
  misc_feature (4)..(4): Xaa can be any naturally occurring amino acid
  Transcript Sequence Number=SeqID_3349
  Gene Ontology: Mol. function=structural constituent of ribosome; Cellular component=intracellular; Biological process=translation
  Homolog annotation: Hit_ID=B4G1F2; Match level="QueryCoverage=99%, HitCoverage=54%, E-value=4e-29, Identity=68%"; Hit description=39S ribosomal protein L12
  Pfam annotation: Domain name=Ribosomal_L12; Domain location=40-107; Score=79.4; E_value=1.3e-20; Accession=PF00542.11; Description =Ribosomal protein L7L12 C-terminal domain
YPSXPPIAILNSAAGLGGGAAATAGAAGEKAAAAAEKTVFELRLEAFEAASKIKVIKEIRSFTDLGLKEAKELVEKAPAVIKGGVSKEEAEAIVERMKAVGAKVVMD

SEQ ID NO: 69324 - protein, 161 aa, Setaria italica
  Transcript Sequence Number=SeqID_3350
  Gene Ontology: Cellular component=membrane
  Homolog annotation: Hit_ID=Q5JKX1; Match level="QueryCoverage=100%, HitCoverage=22%, E-value=6e-75, Identity=78%"; Hit description=Early- responsive to dehydration protein-like
LRYVVVIRHFKFGIKCFTVCSIVGVLILAPTNYTSEGRADIKRSNSMELFTVTNVTRGSDRLWVHFSCLCFISFYVVYLLHKEYNEITRRRIEHLKYHCKRPDQYTILVRGIPTCPDHGTYGCYVDHFFSKHYQTYQSYQIVHDIGNIEALQKLAYSIDNR

SEQ ID NO: 69325 - protein, 72 aa, Setaria italica
  Transcript Sequence Number=SeqID_3351
  Subcellular localization annotation: CTP_CleavageSite=32; ConfidenceScore=5.34e-01
ESQFDDHLESDNSSSGIAQSTTNNHVPSRSLSVSALSRLRGRVHALWQWVLQKWPSVRKFSSCYLHLYFITH

SEQ ID NO: 69326 - protein, 331 aa, Setaria italica
  Transcript Sequence Number=SeqID_3352
  Gene Ontology: Mol. function=metal ion binding; Cellular component =peroxisomal membrane; Biological process=peroxisome organization and biogenesis
  Homolog annotation: Hit_ID=Q94LL6; Match level="QueryCoverage=91%, HitCoverage=73%, E-value=1e-121, Identity=75%"; Hit description =Putative zinc-binding peroxisomal integral membrane protein
  Pfam annotation: Domain name=Pex2_Pex12; Domain location=48-281; Score=168.1; E_value=2.6e-47; Accession=PF04757.6; Description=Pex2 Pex12 amino terminal region
  Subcellular localization annotation: CTP_CleavageSite=43; ConfidenceScore=5.11e-01
MRAGTPAGDAGPSSHGGAGFGSGSRAPALPRRFPGAAQPEIMRAAEKDDSYAAHVTEACRDAFRHLFGTRVAVAYQNEIKLLGQSLYYLLTTGSGQQTLGEEYCDISQVATLHGLPPTPARRILFILYQTTVPYLAERISSRIVARSIALNESQFDDHLESDNSSSGIAQSTTNNHVPSRSLSVSALSRLRGRVHALWQWVLQKWPSMLPFAQDFIQLAIRTNLMLFYFEGLYYHLPKRAAGIRYVFIGKPMNQRPRYQILGIFLLIQLCILGAERLRRSNISSIASSINQISSGSYPSSTGRGVPVLNEDGHVISDICGGKAADVASHSE

SEQ ID NO: 69327 - protein, 142 aa, Setaria italica
  misc_feature (40)..(40): Xaa can be any naturally occurring amino acid
  Transcript Sequence Number=SeqID_3353
MQPTNFSGGNPISTAHQQRQPLDQSNVQEQMMANQQGLGXNQQQDRLKYQILVEQQANVTTTNNSHPGAQNNQPGITVGFRSTLKMHEQEALNEHIKMEPQPVSLLQPLITVSQQNSSFCTIPQTLATMGRAGEVDWREDMF

SEQ ID NO: 69328 - protein, 111 aa, Setaria italica
  misc_feature (89)..(89): Xaa can be any naturally occurring amino acid
  misc_feature (98)..(98): Xaa can be any naturally occurring amino acid
  misc_feature (100)..(100): Xaa can be any naturally occurring amino acid
  Transcript Sequence Number=SeqID_3354
  Gene Ontology: Mol. function=transferase activity, transferring glycosyl groups; Cellular component=integral to membrane; Biological process=cellulose biosynthetic process
  Homolog annotation: Hit_ID=C3U576; Match level="QueryCoverage=100%, HitCoverage=14%, E-value=2e-42, Identity=72%"; Hit description =Cellulose synthase-like protein H1
LIESARSAISGELFAAAPMVDLASRIDVAKEVSACSYEAGTCWGQEVGWVYGSMTEDILTGQRIHAAGWRSAFLTTDPPAFLGGAPTGXPASLTQYKXWXTGLLEIILSRN

SEQ ID NO: 69329 - protein, 506 aa, Setaria italica
  Transcript Sequence Number=SeqID_3355
  Gene Ontology: Mol. function=triacylglycerol lipase activity; Biological process=lipid metabolic process
  Homolog annotation: Hit_ID=B9RTA9; Match level="QueryCoverage=95%, HitCoverage=75%, E-value=1e-145, Identity=57%"; Hit description =Triacylglycerol lipase, putative
  Pfam annotation: Domain name=Lipase_3; Domain location=39-180; Score =119.4; E_value=1.2e-32; Accession=PF01764.17; Description=Lipase (class 3)
CVPGIRSGFSQEDVLIEDQSGILKPAHTILRDECTKSFLVLIRGTHSMKDTLTAATGAVVPFHLSLLNEGGVSKLVLGYAHCGMVAAARWIARSVTPCLREAVRQCPDYQIKIVGHSLGGGTAALLTYILREHTEFSSATCVAFAPASCMTWELAESGKHFVTTIVNGADLVPTVSTASIDDLRSEVTASSWLNDLRDQIQQTRFLNVVYRSATALGTRLQSFSGARERVAGAGAFLHPVSSKTQVVMKQAQNVAQAVARSRSAFSSWSCMGARRRGVGVVTASSKDDTTTETHVTSTVESESFIVDQHGTKTIEELQYTVASVSVHEEADEEDALLSEHETSREHAEEEITEGELWYEFEKDLDRQVEVEARNREEEAAAAKEIMEEESAVLKNVEDRQSFSSDSLERQQFYPPGRIMHMVAMPPTDADPDDPVAADECSVGIYETPRDLYSKIRLSNTMINDHYMPMYKKMMEILIEKFAKDEDNSCTGSTVQRYEGTNELYTS

SEQ ID NO: 69330 - protein, 109 aa, Setaria italica
  misc_feature (14)..(14): Xaa can be any naturally occurring amino acid
  misc_feature (92)..(92): Xaa can be any naturally occurring amino acid
  Transcript Sequence Number=SeqID_3356
  Gene Ontology: Mol. function=hydrolase activity, hydrolyzing O -glycosyl compounds; Cellular component=anchored to membrane; Biological process=carbohydrate metabolic process
  Homolog annotation: Hit_ID=Q7XVG8; Match level="QueryCoverage=100%, HitCoverage=26%, E-value=2e-34, Identity=67%"; Hit description =OSJNBa0073L04.8 protein
  Subcellular localization annotation: CTP_CleavageSite=24; ConfidenceScore=5.12e-01
SPAAAQAWLQQHVXPHLLSGARISCVTVGNEVFKGNDTALQAAVLPAMVSVHRALSALGLQGRVNVTTAHSLDIMGPFVPALVGAFHPAALXHLRPFLAFLSATRSPFL

SEQ ID NO: 69331 - protein, 56 aa, Setaria italica
  Transcript Sequence Number=SeqID_3357
  Homolog annotation: Hit_ID=Q2R9D4; Match level="QueryCoverage=82%, HitCoverage=12%, E-value=1e-18, Identity=97%"; Hit description=Non -imprinted in Prader-Willi/Angelman syndrome region protein, putative, expressed
IHFIKCFSRTGIALKLTFSGTNQLFYPQTWAFALIVATCVSTQINYLNKALDTFNT

SEQ ID NO: 69332 - protein, 76 aa, Setaria italica
  Transcript Sequence Number=SeqID_3358
  Homolog annotation: Hit_ID=Q2R9D4; Match level="QueryCoverage=94%, HitCoverage=19%, E-value=7e-18, Identity=65%"; Hit description=Non -imprinted in Prader-Willi/Angelman syndrome region protein, putative, expressed
REQFLLHKTKDMADSPGQSLSTRRKHDRQNGFAIEVMPLKCQDSVDDETLTLSLPKVGNGYLKEGRPLRYKDSSIV

SEQ ID NO: 69333 - protein, 377 aa, Setaria italica
  Transcript Sequence Number=SeqID_3359
  Homolog annotation: Hit_ID=Q2R9D4; Match level="QueryCoverage=94%, HitCoverage=94%, E-value=1e-151, Identity=76%"; Hit description=Non -imprinted in Prader-Willi/Angelman syndrome region protein, putative, expressed
  Pfam annotation: Domain name=DUF6; Domain location=5-139; Score=2.8; E_value=0.053; Accession=PF00892.12; Description=Integral membrane protein DUF6
  Pfam annotation: Domain name=DUF803; Domain location=18-317; Score =687.7; E_value=9.8e-204; Accession=PF05653.6; Description=Protein of unknown function (DUF803)
  Pfam module annotation: Pfam domain module=DUF6::DUF803; Domain location=5-139::18-317
  Subcellular localization annotation: CTP_CleavageSite=56; ConfidenceScore=5.46e-01
MAAPASPAAAAAGRGGAMSSDNAKGLVLAVSSSAFIGASFIVKKMGLRRAADSGVRAGYGGFSYLMEPLWWIGMISMIVGEIANFAAYAFAPAILVTPLGALSIIISAALAHVILQEKLHTFGILGCVLCVVGSITIVLHAPQERDIDSVKEVWDLATEPGFLCYAAIVVAAALVLIYFVVPHHGQTNIMVYIGVCSLLGSLTVMSVRALGIALKLTFSGTNQLFYPQTWAFALIVATCVSTQINYLNKALDTFNTAVVSPIYYVMFTSLTIIASVIMFKDWDHQNPTQIVTEMCGFLTILSGTFLLHKTKDMADSPGQSLSTRRKHDRQNGFAIEVMPLKCQDSVDDETLTLSLPKVGNGYLKEGRPLRYKDSSIV

SEQ ID NO: 69334 - protein, 81 aa, Setaria italica
  misc_feature (4)..(4): Xaa can be any naturally occurring amino acid
  misc_feature (8)..(8): Xaa can be any naturally occurring amino acid
  Transcript Sequence Number=SeqID_3360
  Homolog annotation: Hit_ID=Q2R9D4; Match level="QueryCoverage=85%, HitCoverage=18%, E-value=4e-16, Identity=64%"; Hit description=Non -imprinted in Prader-Willi/Angelman syndrome region protein, putative, expressed
FLTXLLGXILLHKTKDMADSPGQSLSTRRKHDRQNGFAIEVMPLKCQDSVDDETLTLSLPKVGNGYLKEGRPLRYKDSSIV

SEQ ID NO: 69335 - protein, 98 aa, Setaria italica
  Transcript Sequence Number=SeqID_3361
VLAWPRFGDQRINAAVVTRGGLGAWEERWSWDGEEGLVSGEEVGEKIKAVMADETVAKKAAAVGDAAAAAATSKGGTSYRSLAEFVGRCRDAGSRQDR

SEQ ID NO: 69336 - protein, 56 aa, Setaria italica
  Transcript Sequence Number=SeqID_3362
  Gene Ontology: Mol. function=protein serine/threonine kinase activity; Biological process=protein amino acid phosphorylation
  Homolog annotation: Hit_ID=B6U4T7; Match level="QueryCoverage=100%, HitCoverage=16%, E-value=2e-21, Identity=94%"; Hit description =Serine/threonine-protein kinase WNK2
MAVDRVVDAGEEAFEEVDPTGRFGRYADVLGLGSVKKVYRGFDQEEGIEVAWNRVR

SEQ ID NO: 69337 - protein, 222 aa, Setaria italica
  Transcript Sequence Number=SeqID_3363
  Gene Ontology: Cellular component=nucleus
  Homolog annotation: Hit_ID=B9SGF2; Match level="QueryCoverage=97%, HitCoverage=47%, E-value=1e-45, Identity=46%"; Hit description =Ribulose-1,5 bisphosphate carboxylase/oxygenase large subunit N -methyltransferase, chloroplast, putative
RRQKDVSEVIADRNYAVGEQVMIRYGKYSNAVLALNFGFTLSRNIYDQAQTWVDMEDQDSFSREKLATWLRHHHGPKSEDMFSCNYTKASFVIKEVKFCGGKGVGVPQILRAFFRVFYATSLEELEEMSTEAARDDGRLARRPLENREREIHAHRMLLLHLDEEIQGYFTAIEHLGIASDPESRSVHPFRKEMAKDLLVGELRVLRSARAWVATYCETLSTS

SEQ ID NO: 69338 - protein, 340 aa, Setaria italica
  Transcript Sequence Number=SeqID_3364
  Gene Ontology: Mol. function=transferase activity, transferring glycosyl groups; Cellular component=integral to membrane; Biological process=cellulose biosynthetic process
  Homolog annotation: Hit_ID=B9STK1; Match level="QueryCoverage=95%, HitCoverage=40%, E-value=3e-49, Identity=36%"; Hit description =Cellulose synthase, putative
PNDIYTNDLRYIFATRWIGQDGLRGPLLAGTGFYVRRDALYGAMPSAATSLPAHGAEFSSMETGELVRRFGHSDDLISSVRNLHLQKPPAAGRHRRRLPRDAALVASCAYETGTGWGDEVGFMYQSVVEDYFTGYRRFFSRGWTSAYCYPAPSSRPPFLGTMPTNLNDVLVQNKRWMSGLLAVGLSRRYCPLACRGLLAVSVPQAMTYAHFGFLSLYAFSALCYATLPQLCFLRGVPLFPDAAAAPWFAAAFASSLVQHLVEVSVARRGLAVRTWWNEQRFWMLNAVTAQLFGCVSAVQDLVGAAALRFDLTSKADDDDGGRLYQKGVRQAREELDQEAH

SEQ ID NO: 69339 - protein, 263 aa, Setaria italica
  Transcript Sequence Number=SeqID_3365
  Gene Ontology: Mol. function=protein serine/threonine kinase activity; Biological process=protein amino acid phosphorylation
  Homolog annotation: Hit_ID=Q84XZ4; Match level="QueryCoverage=100%, HitCoverage=42%, E-value=1e-123, Identity=80%"; Hit description =Mitogen-activated protein kinase
  Pfam annotation: Domain name=Pkinase; Domain location=32-259; Score =115.0; E_value=2.5e-31; Accession=PF00069.17; Description=Protein kinase domain
  Pfam annotation: Domain name=Pkinase_Tyr; Domain location=33-259; Score=-33.2; E_value=1.6e-11; Accession=PF07714.9; Description =Protein tyrosine kinase
  Pfam module annotation: Pfam domain module=Pkinase::Pkinase_Tyr; Domain location=32-259::33-259
MSGPRRCGSRRLAVVGDNSNGYVETDPTGRYGRFDELLGKGAMKSVYRGFDEERGVEVAWNQAHLTDVLRTPNAVERMYSEVQLLSALRHDAIIGFHASWVDVPRRTFNFITELFSSGTLRSYRLRYPRVSLRAIRSWARQILRGLAYLHAHDPPVIHRDLKCDNLLVNGHQGQVKIADLGLAAVLRHQSTAHSVIGTPEFMAPEMYDEEYDERVDVYSFGMCMLEMLTVEYPYSECSNPAQIYKKVTAGKLPDAFYRVQDDD

SEQ ID NO: 69340 - protein, 95 aa, Setaria italica
  misc_feature (49)..(49): Xaa can be any naturally occurring amino acid
  misc_feature (56)..(56): Xaa can be any naturally occurring amino acid
  Transcript Sequence Number=SeqID_3366
ICSLVACIVGNSELSEVANIISCMSNLVYWTVCSCMQVIAHSLSCQLRXPILSRLXVNYNGIAMYLQTQHKVEMDKRDGTLDTMSVPPMQQMSRW

SEQ ID NO: 69341 - protein, 107 aa, Setaria italica
  Transcript Sequence Number=SeqID_3367
  Gene Ontology: Cellular component=plasma membrane
FCCFGNSVASTRFLLQDEFNIQTTQCDNCIIAFMFFLQQLACICSLVACIVGNSELSEVANIISCMSNLVYWTVCSCMQTQHKVEMDKRDGTLDTMSVPPMQQMSRW

SEQ ID NO: 69342 - protein, 77 aa, Setaria italica
  Transcript Sequence Number=SeqID_3368
  Gene Ontology: Mol. function=protein serine/threonine kinase activity; Biological process=protein amino acid phosphorylation
  Homolog annotation: Hit_ID=Q6ZK06; Match level="QueryCoverage=83%, HitCoverage=8%, E-value=4e-16, Identity=64%"; Hit description =Putative wall-associated serine/threonine kinase
SCGNITIPYPFGVEPGCYHAGFNLTCRSGAGGQGSPQLFLGDGTVQVLEISVQHNTVRINSTGMILPFNDGGRTKNG

SEQ ID NO: 69343 - protein, 156 aa, Setaria italica
  misc_feature (13)..(13): Xaa can be any naturally occurring amino acid
  Transcript Sequence Number=SeqID_3369
  Gene Ontology: Mol. function=DNA binding; Cellular component=nucleus; Biological process=regulation of transcription
  Homolog annotation: Hit_ID=Q2R3N5; Match level="QueryCoverage=94%, HitCoverage=56%, E-value=5e-28, Identity=39%"; Hit description=No apical meristem protein, expressed
  Pfam annotation: Domain name=NAM; Domain location=1-91; Score=11.6; E_ value=1.6e-08; Accession=PF02365.7; Description=No apical meristem (NAM) protein
TNNPWDLLTEGSXGKVFFSQRVLKWPLGDQWNRAAGNGHWKTTGKDMPIFSSTVIGGVPLMIGLKRTLVFHLGKSDIGENTEWAMQEYSLAGASLTPYHVMRPSTIFTKKNDSPSEALSSVKVPVMVYPDKSWVVCRMYKKRKHTPGAVANVYSTA

SEQ ID NO: 69344 - protein, 178 aa, Setaria italica
  Transcript Sequence Number=SeqID_3370
  Gene Ontology: Mol. function=metal ion binding
  Homolog annotation: Hit_ID=B9RYE5; Match level="QueryCoverage=43%, HitCoverage=9%, E-value=1e-10, Identity=39%"; Hit description=Ssm4 protein, putative
EVCKRAISIAPVYAANAPARLPLPEFMLGLASKLMAWLLLLLSLLFAVCVWEFLMPLTTLWVWRLALSRTFAQVRHLLSLRASAFARPYALRFMPSPDTVLACASIRRAFLRELPNLRQLNAPARIAADALAPLALWVARVEAHLQRRFGGLDTLQLLALHTVEASLMVVVGDVAFAF

SEQ ID NO: 69345 - protein, 142 aa, Setaria italica
  Transcript Sequence Number=SeqID_3371
  Gene Ontology: Mol. function=zinc ion binding; Cellular component =nuclear pore; Biological process=intracellular transport
  Homolog annotation: Hit_ID=B6TQB3; Match level="QueryCoverage=99%, HitCoverage=67%, E-value=3e-62, Identity=82%"; Hit description=Ran -binding protein 1
  Pfam annotation: Domain name=Ran_BP1; Domain location=36-142; Score =153.3; E_value=7.5e-43; Accession=PF00638.10; Description=RanBP1 domain
  Pfam annotation: Domain name=WH1; Domain location=41-142; Score= -19.2; E_value=0.048; Accession=PF00568.15; Description=WH1 domain
  Pfam module annotation: Pfam domain module=Ran_BP1::WH1; Domain location=36-142::41-142
TAEHRPAEEEEEAAAAGEDEDTGAQVAPIVKLEEVAVTTGEEDEDVLLDMKAKLYRFDKDGNQWKERGTGTVKLLKHKENSKVRLVMRQAKTLKICANHLVVATTKMQEHAGSDKSCVWHALDFADGELKEEMFAIRFGSVD

SEQ ID NO: 69346 - protein, 185 aa, Setaria italica
  Transcript Sequence Number=SeqID_3372
  Gene Ontology: Mol. function=iron-sulfur cluster binding; Cellular component=chloroplast
  Homolog annotation: Hit_ID=B6TUC7; Match level="QueryCoverage=79%, HitCoverage=77%, E-value=2e-59, Identity=83%"; Hit description =Electron carrier/ electron transporter/ iron ion binding protein
  Pfam annotation: Domain name=Fer2; Domain location=86-167; Score =23.6; E_value=0.00059; Accession=PF00111.19; Description=2Fe-2S iron- sulfur cluster binding domain
  Subcellular localization annotation: CTP_CleavageSite=44; ConfidenceScore=5.82e-01
MAATSSAPAAAALVSLPFPAATSSSRVSASSHRGARRFRAATIRCSSASPNVSQGAPAPAPAPAPPKPQIDLEFVGPQPGADGTYPVDRAEAASGEKLLRDIMNENKIELYAAYGKVMNCGGGGSCGTCIVEILDGKELLNERTNTENRYLKKKPESWRLACQTIVGNKENSGKVVVQRLPQWKK

SEQ ID NO: 69347 - protein, 130 aa, Setaria italica
  Transcript Sequence Number=SeqID_3373
VEMEEEDEVGEEEEVEVVDRGTVVEVKVSTQPQTPAAGKVHRSTLVINKFVGSTPLSVDQPRCHADTTEPDAESSDDELAAYSPRSTLRRVPSSTTSLAAAVAVASTGSVRSYSGSPVRLRYVTSAAACT

SEQ ID NO: 69348 - protein, 120 aa, Setaria italica
  misc_feature (107)..(107): Xaa can be any naturally occurring amino acid
  Transcript Sequence Number=SeqID_3374
FRILFPCEFPCQKKPLQIPRSFPVTVDSGTFDSEESSDFDDSDDDNGNVELQETQPSSIECEASTCPAEELHLLQQEHDSKERMFLFKLPKSLPLPRRSSNIAAGKXVKEGSNLQQLPQG

SEQ ID NO: 69349 - protein, 338 aa, Setaria italica
  Transcript Sequence Number=SeqID_3375
  Gene Ontology: Mol. function=DNA-directed RNA polymerase activity; Cellular component=DNA-directed RNA polymerase III complex; Biological process=transcription from RNA polymerase III promoter
  Homolog annotation: Hit_ID=B9RRC4; Match level="QueryCoverage=22%, HitCoverage=25%, E-value=1e-20, Identity=54%"; Hit description=DNA binding protein, putative
  Pfam annotation: Domain name=RNA_pol_Rpc4; Domain location=222-331; Score=115.4; E_value=1.9e-31; Accession=PF05132.6; Description=RNA polymerase III RPC4
KDLADTELIGFLVLLVRQKRTWDLQKKTIYTSEVLISKQKRALICSRRASRETKMDADGSSKRSRPVRRAVKKLKFKPKVPPQKPKKLATEKPQLEEPKPIDEQLMKILRTRQVPANSVPNTKDERSTQKPPSTPPSADVVSLSPAQSGVQKQNQSKPLQIPRSFPVTVDSGTFDSEESSDFDDSDDDNGNVELQETQPSSIECEASTCPAEELHLLQEHDSKERMFLFKLPKSLPLPRRSSNIVERKGKAAGKEVKEGSNLQQLPQGYLGKMLVYKSGKIKMKLGDVMFDVNPGAESRMPQHVVALNTQEKHCCLLGEIENRHVIVTPDVDSLLNDK

SEQ ID NO: 69350 - protein, 277 aa, Setaria italica
  misc_feature (211)..(211): Xaa can be any naturally occurring amino acid
  Transcript Sequence Number=SeqID_3376
  Homolog annotation: Hit_ID=B6STM0; Match level="QueryCoverage=100%, HitCoverage=62%, E-value=1e-136, Identity=85%"; Hit description=Pre -mRNA-splicing factor PRP17
  Pfam annotation: Domain name=WD40; Domain location=104-149; Score =2.3; E_value=21; Accession=PF00400.24; Description=WD domain, G-beta repeat
  Pfam annotation: Domain name=WD40; Domain location=20-58; Score=28.8; E_value=2.2e-05; Accession=PF00400.24; Description=WD domain, G-beta repeat
  Pfam annotation: Domain name=WD40; Domain location=205-240; Score =12.3; E_value=1.4; Accession=PF00400.24; Description=WD domain, G -beta repeat
  Pfam annotation: Domain name=WD40; Domain location=62-100; Score =26.7; E_value=9.3e-05; Accession=PF00400.24; Description=WD domain, G-beta repeat
  Pfam module annotation: Pfam domain module=WD40::WD40::WD40::WD40; Domain location=104-149::20-58::205-240::62-100
LTSAGMDHRVHVWNVWDKGNTTARVLKHHTAAVKDVRWSPRGLSLLSGGLDCSLQLVDVVEGKVIKVFKEDQAVDVIKFNPSNPNLFLSGGSKGSLRLWDIRSGVVTKVFHRSLGTILDIEFSADGRQFISSTDTTRSNISENTIIVWDVLRQVPLSNQVYTEAFTCPCVRYHPHEASFVAQSNGNYIAIFSARPPFKLNKYLRFEGHGVXWGFPVKCNFSPSGRELASGSSDGSIYFYDYKSARLLRKIEAFKEACTDVVYHPVMPNVIASCSWGG

SEQ ID NO: 69351 - protein, 286 aa, Setaria italica
  misc_feature (57)..(57): Xaa can be any naturally occurring amino acid
  misc_feature (202)..(202): Xaa can be any naturally occurring amino acid
  misc_feature (214)..(214): Xaa can be any naturally occurring amino acid
  Transcript Sequence Number=SeqID_3377
  Homolog annotation: Hit_ID=B6STM0; Match level="QueryCoverage=98%, HitCoverage=98%, E-value=1e-51, Identity=69%"; Hit description=Pre -mRNA-splicing factor PRP17
  Pfam annotation: Domain name=WD40; Domain location=139-176; Score =15.8; E_value=0.18; Accession=PF00400.24; Description=WD domain, G -beta repeat
  Pfam annotation: Domain name=WD40; Domain location=203-244; Score =14.8; E_value=0.37; Accession=PF00400.24; Description=WD domain, G -beta repeat
  Pfam annotation: Domain name=WD40; Domain location=248-282; Score =0.7; E_value=33; Accession=PF00400.24; Description=WD domain, G-beta repeat
  Pfam module annotation: Pfam domain module=WD40::WD40::WD40; Domain location=139-176::203-244::248-282
MDLISAAYGATSDDDDGEPPSSLPVATGPASFAPPPLKRPRWEYQPYLPPPQSSPQXPPRPDAAPPLASPASGRYVSKRERAILAASRAPVDSASLLPSQATAAVDSSVGSVIDSNLRGDILHSLQCQPKPGSSKTLPSKLSVSLKGHTKAINCVDWSPTHAHLLTSAGMICVRYHPHEASFVAQSNGTYIAIFSARPPFKXLNKYLRFEGHGXVWGFPVKCNFSPSGRELASGSSDGSIYFYDYKSARLLRKIEAFKEACTDVVYHPVMPNVIASCSWGGEYRFE

SEQ ID NO: 69352 - protein, 673 aa, Setaria italica
  Transcript Sequence Number=SeqID_3378
  Gene Ontology: Mol. function=DNA binding; Cellular component=nucleus; Biological process=regulation of transcription
  Homolog annotation: Hit_ID=Q9XIC4; Match level="QueryCoverage=26%, HitCoverage=32%, E-value=1e-49, Identity=53%"; Hit description =F23M19.14 protein
  Pfam annotation: Domain name=NAM; Domain location=4-101; Score=94.4; E_value=3.9e-25; Accession=PF02365.7; Description=No apical meristem (NAM) protein
ACCNPSGSLLTCTHRCCTEERSALQTGDRQWFFFSRTDRKYPNGSRASRTTGDGYWKATGKDRFICGGGRAVGNKKTLVYHHGRAPRGERTDWVMHEYTLLADALPPAAQGRESYALYKLFQKSGAGPKNGEQYGAPFREEDWLDDDEEGVTADASANSVPNTNNCPATVEEHAIADRELPIEDLHELLSQIGNDQEEFGEAPLDFSTPATSHGQGQGWPSGGCDKAEVVDASVSDGAVVVAENTCIDLPLGDIEQLLMQISDDQQNAEFFSDFTPSVPQLQLQCDNHQVWLDAHRGQEVCAADPTASGGAVVAAECTDTDLEGLLLQIASDQDMVEPLSDLSPPIPHHNFNQVGIGDFHESHGAPVGNLSCTVQESTFVPQTELRSQFPQSNLTNVPFSGETNSSEGTSVPHSVSGLISYNSQDADDEFLEINDFFDLEDVEQSANCTATEHLISATNGMFDNLEYSDAPTFLPGPFDTAGEVAENQFFDFGSSGIQNQGFHYTTQVRTQNQAALNVRSHMKDNHVVLSSHTSGTLNLHAANEPPSRSSTASQSWFNAALSTLLDSVPSSPALAAEIENTVINRTLQRISSFRSHQASGEENTVINRTLQRISSFRSQQAVREEPSTRRIQVTRGGRLTFISLLVILAAVMWTFTAGSALNFCKGLWKSSSR

SEQ ID NO: 69353 - protein, 153 aa, Setaria italica
  misc_feature (79)..(79): Xaa can be any naturally occurring amino acid
  Transcript Sequence Number=SeqID_3379
  Gene Ontology: Mol. function=L-aspartate oxidase activity; Cellular component=cytoplasm; Biological process=NAD biosynthetic process
  Homolog annotation: Hit_ID=B6U0K6; Match level="QueryCoverage=67%, HitCoverage=15%, E-value=2e-49, Identity=93%"; Hit description=L -aspartate oxidase 1
SQQHVRHRVSPIRASTLSCLQDDTTKFFDFVVIGSGVAGLRYALEVSKHGSVAIITKAEPHESNTNYAQGGVSAVLCPXSDSVESHMKDTIVAGAYLCDEEIARAQQTQLLLRNLKLLYKELLYKEYLGVEIGVERIGSSIQFVRSTATLCIS

SEQ ID NO: 69354 - protein, 83 aa, Setaria italica
  Transcript Sequence Number=SeqID_3380
MLKFVSKVVVEYCPLDPRKAAAVELLAQCNGRKAKDSNPACSVELRRLPAPPQSTGTGPQPPRVFVTYLNGAEEAIVAAEGAT

SEQ ID NO: 69355 - protein, 142 aa, Setaria italica
  Transcript Sequence Number=SeqID_3381
MLKFLSKVVVEYCPLDPRKAAAVELLAQCNGRKAKDSNPACSVELRRLPGPPPTEDPKSQPPLPPPRVLVTYLNGAEEAIVAAEGATAQGIRDQILARGRLIDTEQMFRDGGEKWPVLIPEEELGMSFPGIKPKKAEDKPQA

SEQ ID NO: 69356 - protein, 263 aa, Setaria italica
  Transcript Sequence Number=SeqID_3382
  Gene Ontology: Mol. function=ubiquitin-protein ligase activity; Cellular component=nucleus; Biological process=ubiquitin-dependent protein catabolic process
  Homolog annotation: Hit_ID=B3F0L0; Match level="QueryCoverage=99%, HitCoverage=76%, E-value=1e-154, Identity=97%"; Hit description=SINA3
  Pfam annotation: Domain name=Sina; Domain location=43-242; Score =445.6; E_value=7.6e-131; Accession=PF03145.8; Description=Seven in absentia protein family
PPSRTNSMYPPIHQCQNGHTLCSTCKTRVHNRCPTCRQELGDIRCLALEKVAESLELPCKYYSLGCPEVFPYYSKLKHESQCNFRPYNCPYAGSECSVVGDIPFLVAHLRDDHKVDMHSGCTFNHRYVKSNPREVENATWMLTVFHCFGQYFCLHFEAFQLGMAPVYMAFLRFMGDENDARNYSYSLEVGANGRKMIWEGTPRSIRDSHRKVRDSHDGLIIQRNMALFFSGGDRKELKLRVTGRIWKEQQNPDSGACIPNLFS

SEQ ID NO: 69357 - protein, 114 aa, Setaria italica
  Transcript Sequence Number=SeqID_3383
QKYQHTWYKNKSTRKKLKVLLRRRTPTSWLQWALPPQGTAHRPPLCCCGPRHHQPPPSLPSGSRTSQLQAPVCKQSCKVLLLYSGQLLVALLAIEALRLPSGLWRSPNLRPTTR

SEQ ID NO: 69358 - protein, 300 aa, Setaria italica
  Transcript Sequence Number=SeqID_3384
  Gene Ontology: Mol. function=protein binding; Cellular component =soluble fraction
  Homolog annotation: Hit_ID=B6TBL1; Match level="QueryCoverage=91%, HitCoverage=92%, E-value=1e-137, Identity=85%"; Hit description =Protein OS-9
  Pfam annotation: Domain name=PRKCSH; Domain location=120-197; Score =70.0; E_value=8.7e-18; Accession=PF07915.5; Description=Glucosidase II beta subunit-like protein
  Subcellular localization annotation: CTP_CleavageSite=67; ConfidenceScore=5.12e-01
MPSPMGFAGRVSALLLLLFAGAVASDQIFTASGVPFGRSSREPRFRVEFHPVDSPYQPENGQESEPMANHEGKHYMCFLPVEETKTMKSILPQNATNVIIESDRRIKPKEPDELLEPLKDQCLYRHEGWWSYEFCYHGKIRQVHVEGDKVIQEYVLGEYDNDATTAYHENNTSEFADDDHRVKDISKRYHVHLYTNGTVCDLTEIPRETEVRFVCSEPTVLISSIKEISSCKYVVTIQSPMLCKNPLFHQEKRTLSIHCNELPAEEEPRVTVEDDLLPKEAPISIIPDQDELHDFTAYAT

SEQ ID NO: 69359 - protein, 112 aa, Setaria italica
  Transcript Sequence Number=SeqID_3385
  Gene Ontology: Cellular component=integral to membrane
  Homolog annotation: Hit_ID=B6SJC6; Match level="QueryCoverage=99%, HitCoverage=99%, E-value=1e-40, Identity=73%"; Hit description =PTD008 protein
  Pfam annotation: Domain name=UPF0139; Domain location=12-111; Score =171.1; E_value=3.2e-48; Accession=PF03669.5; Description =Uncharacterised protein family (UPF0139)
MKEGSSSGGGVAAGGSDPRQPSTAKPYAPPKLSPQDLPIDYAGFLAVVFGVVGVMLRYKLCSWIAIIFCAQSLANMKNFENDLKQLSMAFMFAVMGLVTNYFGPPRPGSTKS

SEQ ID NO: 69360 - protein, 115 aa, Setaria italica
  Transcript Sequence Number=SeqID_3386
KNDAFPGAGGDRRIEIYTTAPPPHLPPPPGHTLALPPPPGWKEGRMGGGGGGAGRKGGGGGGGASMWCLSDPEMKRRRRVASYKAYSVEGKVKASLRRGLRWFKGKCSEIFHHGW

SEQ ID NO: 69361 - protein, 128 aa, Setaria italica
  misc_feature (9)..(9): Xaa can be any naturally occurring amino acid
  misc_feature (19)..(19): Xaa can be any naturally occurring amino acid
  Transcript Sequence Number=SeqID_3387
  Gene Ontology: Mol. function=serine-type carboxypeptidase activity; Cellular component=extracellular region; Biological process =proteolysis
  Homolog annotation: Hit_ID=B6TG69; Match level="QueryCoverage=100%, HitCoverage=28%, E-value=4e-53, Identity=82%"; Hit description =Serine carboxypeptidase 1
  Pfam annotation: Domain name=Peptidase_S10; Domain location=1-128; Score=-205.7; E_value=0.004; Accession=PF00450.14; Description =Serine carboxypeptidase
GLAYEIGPXKFDAKGYRGXFPTLLYRPETSTKTSNIIFVDSPVGTGFSYATTEEGLKASDTKAVEQLVIFLRKWLQDHPRFLSNPLYIAGDSYSGLIIPGLTLEIDRSIELGEKPLFNLKGYIAGNPV

SEQ ID NO: 69362 - protein, 85 aa, Setaria italica
  Transcript Sequence Number=SeqID_3388
  Gene Ontology: Mol. function=protein serine/threonine kinase activity; Cellular component=plasma membrane; Biological process =protein amino acid phosphorylation
  Homolog annotation: Hit_ID=Q9FN92; Match level="QueryCoverage=92%, HitCoverage=9%, E-value=4e-17, Identity=54%"; Hit description =Receptor-like protein kinase
MVNPMQQYSGLSAQPLETVYRVNMGGPKVTPDNDTLSRTWVTDQKYLLNPTVTKKFAYGKDVNYKKGGATQLTAPDIVYGTVTEL

SEQ ID NO: 69363 - protein, 584 aa, Setaria italica
  Transcript Sequence Number=SeqID_3389
  Gene Ontology: Mol. function=protein serine/threonine kinase activity; Cellular component=integral to membrane; Biological process=protein amino acid phosphorylation
  Homolog annotation: Hit_ID=Q9FN92; Match level="QueryCoverage=99%, HitCoverage=70%, E-value=1e-174, Identity=55%"; Hit description =Receptor-like protein kinase
  Pfam annotation: Domain name=Pkinase; Domain location=241-514; Score =140.1; E_value=6.7e-39; Accession=PF00069.17; Description=Protein kinase domain
  Pfam annotation: Domain name=Pkinase_Tyr; Domain location=241-511; Score=109.9; E_value=8.7e-30; Accession=PF07714.9; Description =Protein tyrosine kinase
  Pfam module annotation: Pfam domain module=Pkinase::Pkinase_Tyr; Domain location=241-514::241-511
TTFYNYKKGGATQLTAPDIVYGTVTELAASNTSNALFNMTWQFDVDAGFSYLIRFHFCDIVSKALNQLYFNAYVGGFFAQNNLDLSVMSDNQLATATYIDVVLSSNDASSKLGISIGPSTLNNVLPDGILNGLEVMKISTGGSAFTVGSGTGNKNLGVILGAVLGGAGLLIIIVVLVLLCRKKKTLEKQHSKTWMPFSINGLTSLSTGSRTSYGTTLTSGLNGSYGYRFAFSVLQEATNNFDENWVIGVGGFGKVYKGVMRDETKVAVKRGNPKSQQGLNEFRTEIELLSRLRHRHLVSLIGYCDERNEMILVYEYMEKGTLKSHLYGSDNPSLNWKQRLEVCIGAARGLHYLHTGSAKAIIHRDVKSANILLDENLLAKVADFGLSKTGPELDQTHVSTAVKGSFGYLDPEYFRRQQLTEKSDVYSFGVVLLEVLCARPVIDPTLPREMVNLAEWGMKWQKRGELHQIVDQRISGTIRPDSLRKFGETVEKCLADYGVERPSMGDVLWNLEYVLQLQDADSTVSDVNSMNRIVELPSQVQNVGALESISVTMAEAGASNDPDHDLSDVSMSRVFSQLIKAEGR

SEQ ID NO: 69364 - protein, 114 aa, Setaria italica
  Transcript Sequence Number=SeqID_3390
CYLDPISHGASSSYRNKCVGSNVYKWTFSVDSASCRTNLNLYRPYVFGRHMISYHATQLGPEYSYICEASNIIAFGPEHLILYILKRKLNKPEKKVSVFSTIHQKDENSFYMCQ

SEQ ID NO: 69365 - protein, 108 aa, Setaria italica
  Transcript Sequence Number=SeqID_3391
HQKRRHRNGRDNGHRHLRRPHRGRQLLREGTWRALHQTRREGASASWRGGCACVAVAKFAAPFFALSSSEEPLICWRGVYNSLLKARICEVAGSSRGASVKGRGKITC

SEQ ID NO: 69366 - protein, 117 aa, Setaria italica
  misc_feature (14)..(14): Xaa can be any naturally occurring amino acid
  Transcript Sequence Number=SeqID_3392
PPPPFGGWDYEAQXRELQRQRDWYLMSTAAADPYLPLPPELEEPPLWSPRPPCPECEAAAAAMRPAPFHWCVRDAVVTAGFRSHVGPIERPAKKSPSPPPPPPSPGRLPGLLGMPVY

SEQ ID NO: 69367 - protein, 118 aa, Setaria italica
  Transcript Sequence Number=SeqID_3393
DKSNNTKKNHFLGEITRFEVYKEKKTERKPLKAQICELYVVGVNPRGHHRARSDRGQSSSRVAGSNLSATAASLPQEPRHHPTSPGGRRGQHGRGRGDSGRRGAAGRLARIRSSSVRE

SEQ ID NO: 69368 - protein, 104 aa, Setaria italica
  Transcript Sequence Number=SeqID_3394
  Gene Ontology: Cellular component=integral to membrane
  Homolog annotation: Hit_ID=B4FII4; Match level="QueryCoverage=77%, HitCoverage=33%, E-value=2e-13, Identity=53%"; Hit description =Cytochrome b561
  Subcellular localization annotation: CTP_CleavageSite=44; ConfidenceScore=5.31e-01
GIATISLYALQWAAGFLAFFFPGASPATRRRALPWHAVGGLLVFALAVGTAQLGFLEKLTFLQGPPLRLPRHGAEALLVNFTALVVLLLGVAVVLATVTMDATT

SEQ ID NO: 69369 - protein, 122 aa, Setaria italica
  Transcript Sequence Number=SeqID_3395
  Homolog annotation: Hit_ID=Q68HV3; Match level="QueryCoverage=78%, HitCoverage=83%, E-value=6e-24, Identity=64%"; Hit description=LEA protein 12
  Pfam annotation: Domain name=LEA_6; Domain location=20-122; Score =126.6; E_value=8.1e-35; Accession=PF10714.1; Description=Late embryogenesis abundant protein 18
QQPTAMEATKERRERKAAAAGAKEGADTVQLPTETSPYVQYDGLEDYKMRGYGAQGHLPVSDVPHGGSGTDAPTVPGTAVPVAKPKRQDDVQPQRDLGGGKVDAGRRHGDASTDVVNRHGVP

SEQ ID NO: 69370 - protein, 179 aa, Setaria italica
  Transcript Sequence Number=SeqID_3396
  Gene Ontology: Mol. function=hydrolase activity, acting on glycosyl bonds; Biological process=metabolic process
  Homolog annotation: Hit_ID=B6SQF4; Match level="QueryCoverage=86%, HitCoverage=37%, E-value=4e-71, Identity=83%"; Hit description=Alpha- galactosidase
PCAPLISDPESVLRCHEFVVFFDGADPDMLEVGNGGMKNNEYVVHFSLWAISKAPLIIGCDLRHMPQETYDILANKEVIGPNTDPLGVQAKKVRMEGSSEIWAAPLSDYRTAVVLLNRHATDEATITARWDDIGLPAGTAVEARDLWLHKTLDTAFTDKMAFDVAARSCRMFVLKSRLR

SEQ ID NO: 69371 - protein, 138 aa, Setaria italica
  Transcript Sequence Number=SeqID_3397
  Gene Ontology: Mol. function=hydrolase activity, hydrolyzing O -glycosyl compounds; Biological process=carbohydrate metabolic process
  Homolog annotation: Hit_ID=B6SQF4; Match level="QueryCoverage=99%, HitCoverage=33%, E-value=9e-70, Identity=90%"; Hit description=Alpha- galactosidase
GLKLGIYSDAGFQTCAKVQPGSLGHEEQDAKTFAAWGVDYLKYDNCNNGDLKPLERYPEMSKALMKAGRPIYFSLCEWGDMHPARWGAAYGNSWRTTNDIADTWESMIATADQNEVWAEYARPAAGRPDMLEVGNGGE

SEQ ID NO: 69372 - protein, 411 aa, Setaria italica
  Transcript Sequence Number=SeqID_3398
  Gene Ontology: Mol. function=hydrolase activity, hydrolyzing O -glycosyl compounds; Biological process=carbohydrate metabolic process
  Homolog annotation: Hit_ID=B6SQF4; Match level="QueryCoverage=91%, HitCoverage=91%, E-value=0.0, Identity=89%"; Hit description=Alpha -galactosidase
  Pfam annotation: Domain name=Melibiase; Domain location=29-351; Score= -59.9; E_value=2.3e-12; Accession=PF02065.10; Description=Melibiase
MAGGGRRTGPSPARLALMVLLLAAAVAAEAKVVHVEEPHRRSMLANGLGSAPPMGWNSWNHFQCDGNGEVVIRETADALVSTGLAALGYKYVNIDDCWAEPKRDAMGNLVANTNTFPHGIKALADYVHSKGLKLGIYSDAGFQTCAKVQPGSLGHEEQDAKTFAAWGVDYLKYDNCNNGDLKPLERYPEMSKALMKAGRPIYFSLCEWGDMHPARWGAAYGNSWRTTNDIADTWESMIATADQNEVWAEYARPGGWNDPDMLDVGNGGMKNNEYVVHFSLWAISKAPLIIGCDLRHMPQETYDILANKEVIAVNQDPLGVQAKKVRMEGSSEIWAAPLSDYRTAVVLLNRHATDEATITARWDDIGLPAGTAVEARDLWLHKTLDTAFTDKMAFDVAARSCRMFVLKSRLR

SEQ ID NO: 69373 - protein, 131 aa, Setaria italica
  misc_feature (34)..(34): Xaa can be any naturally occurring amino acid
  misc_feature (105)..(105): Xaa can be any naturally occurring amino acid
  misc_feature (122)..(122): Xaa can be any naturally occurring amino acid
  Transcript Sequence Number=SeqID_3399
  Gene Ontology: Mol. function=methyltransferase activity; Biological process=metabolic process
  Homolog annotation: Hit_ID=B4FH40; Match level="QueryCoverage=100%, HitCoverage=53%, E-value=2e-60, Identity=83%"; Hit description =Methylase
PHLKYMKMDVKNMSDFESGSFEAVIDSMALDVIXCGQNSQENATKMLEEVNRILKENGVYMLITYGDPSYRLRLLKDMENWTVKLHVIERWERSANQDKWELTKXLPLDDDNASVVSVLGPXPDVHYIYVC

SEQ ID NO: 69374 - protein, 242 aa, Setaria italica
  Transcript Sequence Number=SeqID_3400
  Gene Ontology: Mol. function=methyltransferase activity; Biological process=metabolic process
  Homolog annotation: Hit_ID=B4FH40; Match level="QueryCoverage=100%, HitCoverage=100%, E-value=1e-119, Identity=83%"; Hit description =Methylase
  Pfam annotation: Domain name=Methyltransf_11; Domain location=52-155; Score=41.2; E_value=4e-09; Accession=PF08241.4; Description =Methyltransferase domain
  Pfam annotation: Domain name=Methyltransf_12; Domain location=52-153; Score=23.1; E_value=0.0011; Accession=PF08242.4; Description =Methyltransferase domain
  Pfam annotation: Domain name=TPMT; Domain location=12-198; Score= -71.5; E_value=0.011; Accession=PF05724.3; Description=Thiopurine S -methyltransferase (TPMT)
  Pfam module annotation: Pfam domain module=Methyltransf _11::Methyltransf_12::TPMT; Domain location=52-155::52-153::12-198
MTGGAAASQAYGEAWYWDERYRKEAGPFDWYQKYPALAPLLRLYVQPHHRLLLVGCGNSVFGENMVDDGYQDVVNIDISSVVIEQMKKKYHDKPHLKYMKMDVKNMSDFESGSFEAVIDKGTLDSIMCGQNSQENATKMLEEVNRILKENGVYMLITYGDPSYRLRLLKDMENWTVKLHVIERWERSANQDKWELTKPLPLDDDNASVVSVLGPKPDVHYIYVCVKGNDGARADSSAGEVVD

SEQ ID NO: 69375 - protein, 166 aa, Setaria italica
  misc_feature (9)..(9): Xaa can be any naturally occurring amino acid
  misc_feature (100)..(100): Xaa can be any naturally occurring amino acid
  Transcript Sequence Number=SeqID_3401
  Gene Ontology: Mol. function=helicase activity; Cellular component =chloroplast
  Homolog annotation: Hit_ID=B6SP46; Match level="QueryCoverage=92%, HitCoverage=47%, E-value=3e-57, Identity=42%"; Hit description =Transferase, transferring glycosyl groups
  Pfam annotation: Domain name=PPR; Domain location=1-34; Score=23.0; E_ value=0.0012; Accession=PF01535.12; Description=PPR repeat
  Pfam annotation: Domain name=PPR; Domain location=105-139; Score =20.0; E_value=0.01; Accession=PF01535.12; Description=PPR repeat
  Pfam annotation: Domain name=PPR; Domain location=35-69; Score=31.2; E_value=4e-06; Accession=PF01535.12; Description=PPR repeat
  Pfam annotation: Domain name=PPR; Domain location=70-104; Score=9.0; E_value=0.77; Accession=PF01535.12; Description=PPR repeat
  Pfam module annotation: Pfam domain module=PPR::PPR::PPR::PPR; Domain location=1-34::105-139::35-69::70-104
TYNTLIRGXCKVGMLAEAIRMYEWLSSSGLEPTVSTFSPLIATMCKEGQVDAAVDLIKSMQAKGFEPLVWNNDCIINGFCKIGRSDEGMAWLAGMLKNNXKPRQQTFNSLVESLSTSGRVDDALLILDIMFKVGFELGRCACTILVDKLCTGNVLYSHQLDDILAS

SEQ ID NO: 69376 - protein, 232 aa, Setaria italica
  Transcript Sequence Number=SeqID_3402
  Gene Ontology: Mol. function=metal ion binding
  Homolog annotation: Hit_ID=B6SSM5; Match level="QueryCoverage=100%, HitCoverage=53%, E-value=1e-111, Identity=86%"; Hit description =C3H2C3 RING-finger protein
MGANCCIAAKERTQPCITPIEVSAYRNVRHSPSWSFRWDNRTHIEDIMEIPTLFSNHSSGSIRPETKSGSIAPTEGLSNGNSLGTSPSDVLHRTKWHKSDKKMEAPKATKADPHADRSTASISSPEAKLTRKSLDMGSVALDLKTSASVPSTPPLVSRADPSSSRGHSQPTDSDSMKKARRSPGYQLYRQVSDSKIPSLRSLNEISSPEGRPSSSMLSVCSNDLSAAGSHGE

SEQ ID NO: 69377 - protein, 173 aa, Setaria italica
  Transcript Sequence Number=SeqID_3403
  Gene Ontology: Mol. function=metal ion binding
  Homolog annotation: Hit_ID=B6SSM5; Match level="QueryCoverage=95%, HitCoverage=37%, E-value=1e-73, Identity=87%"; Hit description =C3H2C3 RING-finger protein
  Subcellular localization annotation: CTP_CleavageSite=3; ConfidenceScore=5.37e-01
FILFSADRSTASISSPEAKLTRKSLDMGSVALDLKTSASVPSTPPLVSRADPSSSRGHSQPTDSDSMKKARRSPGYQLYRQVSDSKIPSLRSLNEISSPEGRPSSSMLSVCSNDLSAAGSHGESSDGWSMRTFSEMVATSQRERWSLDSELLGSISSKMTRSNASNSTSLPFP

SEQ ID NO: 69378 - protein, 140 aa, Setaria italica
  Transcript Sequence Number=SeqID_3404
  Gene Ontology: Mol. function=phosphoenolpyruvate carboxylase activity; Cellular component=cytoplasm; Biological process=carbon utilization by fixation of carbon dioxide
  Homolog annotation: Hit_ID=B9RHR7; Match level="QueryCoverage=100%, HitCoverage=48%, E-value=1e-50, Identity=69%"; Hit description=2 -alkenal reductase, putative
SLDVGDAIMVASSFSHMLNLANIAEVLQMAYRKKAETDRRGGGFADEASASTESDIDETLQRLVVGLGKTPREVFDALRGQTIDIVLTAHPTQSVRRSLLQKHARIRNCLTQLCAEGIAENERQEIDEALQREILAALRT

SEQ ID NO: 69379 - protein, 108 aa, Setaria italica
  misc_feature (1)..(22): Xaa can be any naturally occurring amino acid
  Transcript Sequence Number=SeqID_3405
  Subcellular localization annotation: CTP_CleavageSite=56; ConfidenceScore=5.38e-01
XXXXXXXXXXXXXXXXXXXXXXFFFFFFFIFFFFFLTKQERFYPRICNNITTLRPSMATVSSKARINKVRQTGRIACIIYHTHNPPHAPCLQRARSLISCGRPWRWAW

SEQ ID NO: 69380 - protein, 135 aa, Setaria italica
  misc_feature (121)..(121): Xaa can be any naturally occurring amino acid
  Transcript Sequence Number=SeqID_3406
  Gene Ontology: Mol. function=triose-phosphate isomerase activity; Cellular component=chloroplast; Biological process=metabolic process
  Homolog annotation: Hit_ID=B4FCE2; Match level="QueryCoverage=80%, HitCoverage=37%, E-value=2e-49, Identity=89%"; Hit description =Triosephosphate isomerase
  Pfam annotation: Domain name=TIM; Domain location=1-133; Score=-2.1; E_value=1.4e-10; Accession=PF00121.10; Description=Triosephosphate isomerase
MNGGGHHNIYISFKCSSIQFRDKLANGVLLEEREAGKTFDVCFEQMKAFADSISNWADVVIAYEPVWAIGTGKVATPGLAQEVHAAVRDWLKTNVSPDVASSVRIIYGGSVNAGNCAELAXRKKILMVFLLVVPL

SEQ ID NO: 69381 - protein, 163 aa, Setaria italica
  misc_feature (76)..(76): Xaa can be any naturally occurring amino acid
  misc_feature (84)..(84): Xaa can be any naturally occurring amino acid
  Transcript Sequence Number=SeqID_3407
  Gene Ontology: Mol. function=triose-phosphate isomerase activity; Cellular component=chloroplast; Biological process=metabolic process
  Homolog annotation: Hit_ID=A3C0Z2; Match level="QueryCoverage=98%, HitCoverage=62%, E-value=5e-73, Identity=86%"; Hit description =Triosephosphate isomerase
  Pfam annotation: Domain name=TIM; Domain location=1-153; Score=54.9; E_value=3.9e-14; Accession=PF00121.10; Description=Triosephosphate isomerase
TLFIGEDDEFIGKKAAYALSQNINVIACIGELLEEREAGKTFDVCFEQMKAFADSISNWADVVIAYEIIVPVLALXLVTGKSVXTPEQAQEVHAAVRDWLKTNVSPDVASSVRIIYGGSVNAGNCAELAKKEDIDGFLVGGASLKGPDFATIVNSVTAKKVAA

SEQ ID NO: 69382 - protein, 146 aa, Setaria italica
  misc_feature (138)..(138): Xaa can be any naturally occurring amino acid
  Transcript Sequence Number=SeqID_3408
  Gene Ontology: Mol. function=triose-phosphate isomerase activity; Cellular component=chloroplast; Biological process=metabolic process
  Homolog annotation: Hit_ID=B4FCE2; Match level="QueryCoverage=99%, HitCoverage=51%, E-value=2e-77, Identity=95%"; Hit description =Triosephosphate isomerase
  Pfam annotation: Domain name=TIM; Domain location=26-146; Score=44.1; E_value=1.8e-13; Accession=PF00121.10; Description=Triosephosphate isomerase
FPQQLRIGSSRRRAQRVVAMAGSGKFFVGGNWKCNGTKDSISKLVSELNAATLEADVDVVVAPPFIYIDQVKNSLTGRIEVSAQNVWIGKGGAYTGEISAEQLVDIGCQWVILGHSERRHIIGEDDEFIGKKAAYALXQNIKVIAC

SEQ ID NO: 69383 - protein, 335 aa, Setaria italica
  Transcript Sequence Number=SeqID_3409
  Gene Ontology: Mol. function=transferase activity, transferring groups other than amino-acyl groups; Cellular component=membrane; Biological process=fatty acid biosynthetic process
  Homolog annotation: Hit_ID=A7L830; Match level="QueryCoverage=94%, HitCoverage=61%, E-value=1e-135, Identity=71%"; Hit description=3 -ketoacyl-CoA synthase
  Pfam annotation: Domain name=ACP_syn_III; Domain location=232-313; Score=-10.0; E_value=0.0098; Accession=PF08545.2; Description=3 -Oxoacyl-[acyl-carrier-protein (ACP)]
  Pfam annotation: Domain name=FAE1_CUT1_RppA; Domain location=96-333; Score=560.4; E_value=2.1e-165; Accession=PF08392.4; Description =FAE1Type III polyketide synthase-like
  Pfam module annotation: Pfam domain module=ACP_syn_III::FAE1_CUT1 _RppA; Domain location=232-313::96-333
MNGGTVQSAAAAAATPPHRRLPDFLQSVNLKYVKLGYHYLITHLLTLMLLPLMAVILLEAGRTDPNDLRQLWVHLQYNLVSVLVLSAVLVFGATVYVLTRPRPVYLVDFACYKPPAHLQVPFEEFMSHSKLCGFSEDALEFQRKILERSGLSEETYVPEAMHALPPQPTMANARAEAETVMFGALDNLFKSTGVKPKDVGVLVVNCSLFNPTPSLSAMIVNKYKLRGNIRSFNLGGMGCSAGVIAIDLARDMLQVHRNTYAVVVSTENITQNWYFGNRKSMLIPNCLFRVGGAAVLLSNRGADRRRAKYGLKHVVRTHKGADDKAFNCVYQEQGT

SEQ ID NO: 69384 - protein, 225 aa, Setaria italica
  Transcript Sequence Number=SeqID_3410
  Gene Ontology: Mol. function=triose-phosphate isomerase activity; Cellular component=chloroplast; Biological process=metabolic process
  Homolog annotation: Hit_ID=Q69K00; Match level="QueryCoverage=99%, HitCoverage=73%, E-value=1e-121, Identity=94%"; Hit description =Triosephosphate isomerase
  Pfam annotation: Domain name=TIM; Domain location=1-215; Score=360.3; E_value=3.5e-105; Accession=PF00121.10; Description=Triosephosphate isomerase
PTLEADVDVVVAPPFIYIDQVKNSLTGRIEVSAQNVWIGKGGAYTGEISAEQLVDIGCQWVILGHSERRHIIGEDDEFIGKKAAYALSQNIKVIACIGELLEEREAGKTFDVCFEQMKAFADSISNWADVVIAYEPVWAIGTGKVATPEQAQEVHAAVRDWLKTNVSPDVASSVRIIYGGSVNAGNCAELAKKEDIDGFLVGGASLKGPDFATIVNSVTAKKVAA

SEQ ID NO: 69385 - protein, 76 aa, Setaria italica
  Transcript Sequence Number=SeqID_3411
  Pfam annotation: Domain name=RNA_pol_Rpb1_R; Domain location=21-34; Score=19.8; E_value=0.011; Accession=PF05001.5; Description=RNA polymerase Rpb1 C-terminal repeat
  Pfam annotation: Domain name=RNA_pol_Rpb1_R; Domain location=35-48; Score=17.1; E_value=0.075; Accession=PF05001.5; Description=RNA polymerase Rpb1 C-terminal repeat
  Pfam annotation: Domain name=RNA_pol_Rpb1_R; Domain location=49-62; Score=17.1; E_value=0.075; Accession=PF05001.5; Description=RNA polymerase Rpb1 C-terminal repeat
  Pfam annotation: Domain name=RNA_pol_Rpb1_R; Domain location=63-76; Score=17.1; E_value=0.075; Accession=PF05001.5; Description=RNA polymerase Rpb1 C-terminal repeat
  Pfam module annotation: Pfam domain module=RNA_pol_Rpb1_R::RNA_pol _Rpb1_R::RNA_pol_Rpb1_R::RNA_pol_Rpb1_R; Domain location=21-34::35 -48::49-62::63-76
  Subcellular localization annotation: CTP_CleavageSite=40; ConfidenceScore=5.78e-01
VLFVLSLFLLSPNIRASPTYSPTSPNYSPTSPTYSPTSPSYSPTSPSYSPTSPSYSPTSPSYSPTSPSYSPTSPSY

SEQ ID NO: 69386 - protein, 52 aa, Setaria italica
  Transcript Sequence Number=SeqID_3412
  Gene Ontology: Mol. function=catalytic activity; Biological process =trehalose biosynthetic process
  Homolog annotation: Hit_ID=B6T0F0; Match level="QueryCoverage=65%, HitCoverage=4%, E-value=1e-12, Identity=94%"; Hit description =Trehalose-6-phosphate synthase
MPSLSCHNLLDLAAADDVLSNYLLANFSCLPVYLPSDLHHRFYHGFCKHYLW

SEQ ID NO: 69387 - protein, 82 aa, Setaria italica
  Transcript Sequence Number=SeqID_3413
  Gene Ontology: Mol. function=catalytic activity; Biological process =trehalose biosynthetic process
  Homolog annotation: Hit_ID=B6T0F0; Match level="QueryCoverage=100%, HitCoverage=9%, E-value=2e-37, Identity=90%"; Hit description =Trehalose-6-phosphate synthase
RASKDHLSRRHWGIGFGMSFKVVALGPNFRRLYVKHIVPSYRKTENRLILLDYDGTVMPENSIDKTPSSEVISVLNCLCEDP

SEQ ID NO: 69388 - protein, 82 aa, Setaria italica
  Transcript Sequence Number=SeqID_3414
  Gene Ontology: Mol. function=catalytic activity; Biological process =trehalose biosynthetic process
  Homolog annotation: Hit_ID=B6T0F0; Match level="QueryCoverage=100%, HitCoverage=9%, E-value=4e-40, Identity=97%"; Hit description =Trehalose-6-phosphate synthase
NRIPYIYTVCRQESNALGDDSLKRSVIVLSEFVGCSPSLSGAIRVNPWSVESVAEAMNAALRMPEAEQRLRHEKHYKYVSTH

SEQ ID NO: 69389 - protein, 51 aa, Setaria italica
  Transcript Sequence Number=SeqID_3415
MDARFPYSPAETAKVELVQFGVLSPDEIVMPPPALLEFAVRIRAGWVVWGD

SEQ ID NO: 69390 - protein, 66 aa, Setaria italica
  misc_feature (55)..(55): Xaa can be any naturally occurring amino acid
  Transcript Sequence Number=SeqID_3416
  Gene Ontology: Mol. function=protein serine/threonine kinase activity; Biological process=protein amino acid phosphorylation
  Homolog annotation: Hit_ID=Q5VN19; Match level="QueryCoverage=72%, HitCoverage=8%, E-value=7e-20, Identity=95%"; Hit description =Mitogen-activated protein kinase 11
DGDVNRYEILEVIGKGSYGLVCSANDKHTGEKVAIKKIHNIFEHISDAARILREXIKLLRLLRHPD

SEQ ID NO: 69391 - protein, 74 aa, Setaria italica
  Transcript Sequence Number=SeqID_3417
  Subcellular localization annotation: CTP_CleavageSite=38; ConfidenceScore=5.43e-01
SSSTSKKVQTCGLGLAAVTGSTGVLFLFLLLFFYISTSSSSVPVYVRTIICKNVSTTLYMYVADDDDEIRKVEK

SEQ ID NO: 69392 - protein, 56 aa, Setaria italica
  Transcript Sequence Number=SeqID_3418
VAPKAAWSLPLRPYGFWTYERFNSQLSWDPQISQAAGRRDPYDDLITRHSGSPPSS

SEQ ID NO: 69393 - protein, 40 aa, Setaria italica
  misc_feature (11)..(11): Xaa can be any naturally occurring amino acid
  Transcript Sequence Number=SeqID_3419
NAVSVIVGPKXEGDTPDRQKYKQGIKFFEPEVAHQRNLLM

SEQ ID NO: 69394 - protein, 96 aa, Setaria italica
  Transcript Sequence Number=SeqID_3420
  Gene Ontology: Mol. function=protein serine/threonine kinase activity; Biological process=protein amino acid phosphorylation
  Homolog annotation: Hit_ID=Q5VN19; Match level="QueryCoverage=95%, HitCoverage=15%, E-value=9e-22, Identity=59%"; Hit description =Mitogen-activated protein kinase 11
SYQLEENGNKSEVAPVQRKHASLPRSTVVHSASIPSKDHRHEASSSTKRVVDGSWNEQIHGVHASIAGKHSTTVRPVMSCDSKISQDMDDIWLPWI

SEQ ID NO: 69395 - protein, 108 aa, Setaria italica
  Transcript Sequence Number=SeqID_3421
  Gene Ontology: Mol. function=DNA-directed RNA polymerase activity; Cellular component=DNA-directed RNA polymerase II, core complex; Biological process=transcription
  Homolog annotation: Hit_ID=B9FZ53; Match level="QueryCoverage=90%, HitCoverage=12%, E-value=2e-52, Identity=98%"; Hit description=DNA -directed RNA polymerase
  Pfam annotation: Domain name=RNA_pol_Rpb1_2; Domain location=5-106; Score=48.6; E_value=1.5e-11; Accession=PF00623.12; Description=RNA polymerase Rpb1, domain 2
GNLMGKRVDFSARTVITPDPNINIDELGVPWSIALNLTYPETVTPYNIERLKELVEYGPHPPPGKTGAKYIIREDGQRLDLRYVKKSSDLHLELGYKVSTDFIVIVAH

SEQ ID NO: 69396 - protein, 151 aa, Setaria italica
  misc_feature (76)..(76): Xaa can be any naturally occurring amino acid
  Transcript Sequence Number=SeqID_3422
  Gene Ontology: Mol. function=protein serine/threonine kinase activity; Cellular component=cytoplasm; Biological process=protein amino acid phosphorylation
  Homolog annotation: Hit_ID=Q5VN19; Match level="QueryCoverage=99%, HitCoverage=32%, E-value=9e-37, Identity=47%"; Hit description =Mitogen-activated protein kinase 11
ERRTIKELIFQEVLEYHPQLLKEYTSGTERPNFLHLSATDQFREQVTQLEENGNKSEVAPVQRKHASLPRQTFNNXRPVMSCDSKISQDMNDPRSLAPSNPWQPNIIHFPNHAVNFQNLPSMGSLLDATSPAQNMPVATPSTESRPGQLYL

SEQ ID NO: 69397 - protein, 47 aa, Setaria italica
  Transcript Sequence Number=SeqID_3423
  Gene Ontology: Mol. function=catalytic activity; Biological process =cellular metabolic process
  Homolog annotation: Hit_ID=Q6EUK4; Match level="QueryCoverage=97%, HitCoverage=12%, E-value=4e-18, Identity=97%"; Hit description =Putative UOS1
LPAGLFKGTVSTSNNGGFTSIRTKNFTVPEDLSAYDGIELRVKGDGR

SEQ ID NO: 69398 - protein, 98 aa, Setaria italica
  misc_feature (82)..(82): Xaa can be any naturally occurring amino acid
  Transcript Sequence Number=SeqID_3424
  Subcellular localization annotation: CTP_CleavageSite=71; ConfidenceScore=5.91e-01
MNCSSCCGAAVSSVPVVLARPRVRFTASCSTRTDQKVLFLGSKRFPRFTYSPSRRASSRLSRREIVESIISSFTGSASTEVXPKKMETSDVVLVTGAT

SEQ ID NO: 69399 - protein, 170 aa, Setaria italica
  Transcript Sequence Number=SeqID_3425
LLRFLFYFWTSSRHSTLQQRIYWSNVHEPRYIPPVVETLDLSIPRKLLLWVYTLVHGRYSNISSVVKYCDEMKSRSKRGTSAATASSQVVQPIPQTIEKGAQVESNEAAHDANPSAQAAACAPPAHQEAGAASASQTAVDAQKAASAISQLNRSGSSRAMEYTPDSMERK

SEQ ID NO: 69400 - protein, 153 aa, Setaria italica
  misc_feature (38)..(38): Xaa can be any naturally occurring amino acid
  Transcript Sequence Number=SeqID_3426
  Gene Ontology: Mol. function=catalytic activity; Biological process =trehalose biosynthetic process
  Homolog annotation: Hit_ID=B6T0F0; Match level="QueryCoverage=86%, HitCoverage=15%, E-value=6e-60, Identity=87%"; Hit description =Trehalose-6-phosphate synthase
  Pfam annotation: Domain name=Trehalose_PPase; Domain location=1-122; Score=-33.6; E_value=9.4e-05; Accession=PF02358.8; Description =Trehalose-phosphatase
HHEADPDFGSCQAKELLDHLENVLANEPVVVKRGPRQXIVEVNPQGISKGVVVESLLSSMVKTGKPPDFVLCIGDDRSDEDMFESIVCPSNASVKLPATSEVFACTVGKKPSMAKYYLDDTVDVIKMLEGLANAPSQRPRPAVQLRVSFEGSL

SEQ ID NO: 69401 - protein, 256 aa, Setaria italica
  Transcript Sequence Number=SeqID_3427
  Gene Ontology: Mol. function=metal ion binding; Cellular component =nucleus; Biological process=cell differentiation
  Homolog annotation: Hit_ID=B6T708; Match level="QueryCoverage=95%, HitCoverage=94%, E-value=1e-101, Identity=76%"; Hit description =Yabby15 protein
  Pfam annotation: Domain name=YABBY; Domain location=16-214; Score =295.2; E_value=1.4e-85; Accession=PF04690.5; Description=YABBY protein
  Subcellular localization annotation: CTP_CleavageSite=43; ConfidenceScore=5.02e-01
MMSSSSSSSSAAFPLDHLAPSPTEQLCYVHCNCCDTILAVGVPCSSLFKTVTVRCGHCANLLSVNLRGLLLPPAAPPAASQLSFGHSLLSPTSPHGLLDEFALQAPSILMDQASANLSSATTGRSNSSCGSNLPAAPMPAAKPPAVQQEPELAKSAPSVNRPPEKRQRVPSAYNRFIKDEIQRIKAGNPDITHREAFSAAAKNWAHFPHIHFGLMPDQGLKKTFKAQDGAEDMLLKDGLYAAAAAAAAANMGITPF

SEQ ID NO: 69402 - protein, 249 aa, Setaria italica
  Transcript Sequence Number=SeqID_3428
  Gene Ontology: Mol. function=catalytic activity; Biological process =trehalose biosynthetic process
  Homolog annotation: Hit_ID=B6T0F0; Match level="QueryCoverage=91%, HitCoverage=27%, E-value=1e-121, Identity=91%"; Hit description =Trehalose-6-phosphate synthase
  Pfam annotation: Domain name=Trehalose_PPase; Domain location=1-218; Score=289.4; E_value=7.9e-84; Accession=PF02358.8; Description =Trehalose-phosphatase
SEVISVLNRLCEDPKNRVFIVSGRGKDELSKWFAPCEKLGIAAEHGYFTRWSRDAPWETSVLAADFDWKKTAEPVMQLYTGATDGSYIEHKESAIVWHHHEADPDFGSCQAKELLDHLENVLANEPVVVKRGQHIVEVNPQGISKGVVVESLLSSMVKTGKPPDFVLCIGDDRSDEDMFESIVCPSNASVKLPATSEVFACTVGKKPSMAKYYLDDTVDVIKMLEGLANAPSQRPRPAVQLRVSFEGSL

SEQ ID NO: 69403 - protein, 203 aa, Setaria italica
  misc_feature (50)..(50): Xaa can be any naturally occurring amino acid
  misc_feature (68)..(68): Xaa can be any naturally occurring amino acid
  misc_feature (123)..(123): Xaa can be any naturally occurring amino acid
  Transcript Sequence Number=SeqID_3429
ENEFLIACPCNLPGKRYRHGCSGRRRAAGVAGDEVVVGVAAAGGLADLGXPGELGVEALVGPEAVGAXREAPRRLGALAPLLHPVDVLPPHLVALVRVLHHTEDQVLRELHDETHRRRRSSPXPVSLGSAGVLGCVVSVRSAVPCPSQIERVYTRPSLTTTPPSIELSDLVDSASASGAGAAHIRSSKSIMMSSSSSSSSAVP

SEQ ID NO: 69404 - protein, 786 aa, Setaria italica
  misc_feature (5)..(5): Xaa can be any naturally occurring amino acid
  misc_feature (20)..(20): Xaa can be any naturally occurring amino acid
  misc_feature (264)..(264): Xaa can be any naturally occurring amino acid
  misc_feature (558)..(558): Xaa can be any naturally occurring amino acid
  misc_feature (727)..(727): Xaa can be any naturally occurring amino acid
  Transcript Sequence Number=SeqID_3430
  Gene Ontology: Mol. function=binding
  Homolog annotation: Hit_ID=UPI0001A7B3D0; Match level="QueryCoverage =89%, HitCoverage=37%, E-value=0.0, Identity=53%"; Hit description =binding
PLRFXSWQKLSNLYCIVGKXVFLLLNDGSKHISILDWRTNTDLIRRVEMGRRHSRRCLLMSSLLAKTAPEQSESHELLALVYYDSLQNVVPFYDQRATLPVKDSTWETFCQNSMKHFEKAFEIKEQWLHAFYLGKLCEKLGHSFSKPFSYYNKAMMLNPTAVDPVYRIHASRLKLLYTQGKQNLEAIQVVADYTYNQSTKENVLSMLGSTTNVSNSSSDQNEKSVLDTKEENKCVEPDLLLDKVWHILYDDCLYALGTCVEGEXLKHFHKARYKLAQGLYRRGEAGDLERAKEELSFCFKSSRSSFTVNMWEIDGTVRKGRRKNPNAGGSRKNLEVSLSESSRKFITCIRKYMIFYLNLLEKNKDLWTLEKAYTYLRTDKRFALCLGDIVPVGLGKYLQVLTAAINNPEVRRASGDASVEQLLEKMFSVFMDHANLWADISTIPEVNCPELSESNLYSYIHQYIHLLESDVRLDALEGLNEKIRKRFKTPKLSNSNFAKICKHASLAWCRCILIKLASITPLPESMDATNQPAPLSSGLLLYVDLQPDELLISSPDGXPAQFKGLDMNWFETLNRIKNIPIKQTTEDNLETAVTLMKSTYNFYRESSCGTFPSGINLYTVTPAHAPIEGLPQAPPVVETLDLSIPRKLLLWVYTLVHGRYSNISSVVKYCDEMKSRSKRGTSAATASSQVVQPIPQSTVSSQAIEKGAQVESNGKKKKKKKKKTHMXANPSAQAAACAPPAHQEAGAASASQTAVDAQKAASAISQLNRSGSSRAMEYTPDSMERK

SEQ ID NO: 69405 - protein, 437 aa, Setaria italica
  Transcript Sequence Number=SeqID_3431
  Gene Ontology: Mol. function=catalytic activity; Cellular component =cytoplasm; Biological process=metabolic process
  Homolog annotation: Hit_ID=B9S5D4; Match level="QueryCoverage=91%, HitCoverage=84%, E-value=1e-178, Identity=74%"; Hit description=2,3 -bisphosphoglycerate-independent phosphoglycerate mutase, putative
  Pfam annotation: Domain name=Metalloenzyme; Domain location=251-361; Score=47.4; E_value=5.6e-11; Accession=PF01676.10; Description =Metalloenzyme superfamily
  Pfam annotation: Domain name=PhosphMutase; Domain location=29-216; Score=155.8; E_value=1.3e-43; Accession=PF10143.1; Description=2,3 -bisphosphoglycerate-independent p
  Pfam module annotation: Pfam domain module=Metalloenzyme::PhosphMutase ; Domain location=251-361::29-216
MPSLSCHNLLDLAAADDVPLPSPTPLRLPRVMSAGLAMAPGDIAFKSNFATLDEGTGVIVSRRADRHFEEEGPILCAALDGLKLPSFPEYEVRVRYATEHRCGVVVKGPKLSGNISGTDPLKDNRVHLKAEPLDDSEEAKNTAAVVNELSREITRILVSHPINAKRAAEGKNIANVVLLRGCGIRIEVPAFESKHGLAPCMVAPTKIIAGLGLSLGIDILEAPGATGDYRTLLTSKAKAIAKALSAPMDTPPRVFVPGEDEYKAGKENGYDFGFLHIKAIDDAGHDKAVKLKVRGLEAVDRAIGQLTRLLWEAEKAGHYQYFLCVTGDHSTPVEYGDHSFEPVPFTICRLRDYVGAIGEDIVLGTPLDDFPLPSVKSGEDLLDNIESAEHKPGQLKAFSGDSVCEFNEIAAARGCLGRFPGSEMMGIIKKFIKAKND

SEQ ID NO: 69406 - protein, 590 aa, Setaria italica
  Transcript Sequence Number=SeqID_3432
  Gene Ontology: Mol. function=catalytic activity; Biological process =cellular metabolic process
  Homolog annotation: Hit_ID=Q8S4X1; Match level="QueryCoverage=88%, HitCoverage=84%, E-value=0.0, Identity=72%"; Hit description=UOS1
  Pfam annotation: Domain name=ADH_zinc_N; Domain location=117-238; Score=-16.6; E_value=0.018; Accession=PF00107.18; Description=Zinc -binding dehydrogenase
  Pfam annotation: Domain name=CIA30; Domain location=250-429; Score =302.1; E_value=1.2e-87; Accession=PF08547.4; Description=Complex I intermediate-associated prote
  Pfam annotation: Domain name=NmrA; Domain location=121-553; Score= -103.8; E_value=0.032; Accession=PF05368.5; Description=NmrA-like family
  Pfam annotation: Domain name=adh_short; Domain location=119-254; Score=-53.6; E_value=0.047; Accession=PF00106.17; Description=short chain dehydrogenase
  Pfam module annotation: Pfam domain module=ADH_zinc_N::CIA30::NmrA::ad h_short; Domain location=117-238::250-429::121-553::119-254
  Subcellular localization annotation: CTP_CleavageSite=66; ConfidenceScore=5.87e-01
MNCSSCCGAAVSSVPVVLARPRVRFTASCSTRTDQKVLFLGSKRFPRFTYSPSRRASSRLSRREVIAFAGQQSWDIGRFVRTLYFFNGPPNPLKIVESIISSFTGSASTEVPKKMETSDVVLVTGATGGVGRRVVDILRKKGVPVRVLARNQDKARSMLGTDVDLIIGDVTKEDTLDPKLFKGIKKVVNAVSVIVGPKEGDTPDRQKYKQGIKFFEPEIKGPSPEMVEYIGMQNLINAIKNSVGLSEGKLLFGLKGNLSGKIVWGALDDVVMGGVSESTFQILPTGSETGGPAGLFKGTVSTSNNGGFTSIRTKNFTVPEDLSAYDGIELRVKGDGRRYKLIIRTSYEWDTVGYTASFDTTKGEWQSVKVPFYSLRPVFRARTMTDAPPFDASNITSLQLMFSKFEYDGKLNPTFAEGPFELPFSSIRAYINEPITPRFVHVSSAGVTRPERPGLDLSKQPPAVRLNKELGSILTYKLKGEDLIRESGIPYTIVRPCALTEEPAGADLIFDQGDNITGKISREEVACICVAALASPNAVGKTFEVKSTVPFSEAYVIDPSNPPPEKDYEVYFKELKEGITGKEALEATPA

SEQ ID NO: 69407 - protein, 571 aa, Setaria italica
  misc_feature (542)..(542): Xaa can be any naturally occurring amino acid
  Transcript Sequence Number=SeqID_3433
  Gene Ontology: Mol. function=protein serine/threonine kinase activity; Cellular component=cytoplasm; Biological process=protein amino acid phosphorylation
  Homolog annotation: Hit_ID=Q5VN19; Match level="QueryCoverage=99%, HitCoverage=99%, E-value=0.0, Identity=76%"; Hit description=Mitogen- activated protein kinase 11
  Pfam annotation: Domain name=Pkinase; Domain location=26-317; Score =301.1; E_value=2.3e-87; Accession=PF00069.17; Description=Protein kinase domain
  Pfam annotation: Domain name=Pkinase_Tyr; Domain location=26-315; Score=-1.0; E_value=1.2e-13; Accession=PF07714.9; Description =Protein tyrosine kinase
  Pfam module annotation: Pfam domain module=Pkinase::Pkinase_Tyr; Domain location=26-317::26-315
MQNNDWRKKNAQEMNFFSEYGDVNRYEILEVIGKGSYGLVCSANDKHTGEKVAIKKIHNIFEHISDAARILREIKLLRLLRHPDIVEIKHIMLPPSKKDFKDIYVVFELMESDLHQVIKANDDLTREHYQFFLYQMLRALKYIHTANVYHRDLKPKNVLANANCKLKICDFGLARVAFSDAPTTVFWTDYVATRWYRAPELCGSFYSKYTPAIDIWSIGCIFAEVLIGKPLFPGKNVVHQLDLITDLLGTPPLDAISKVRNDKARKYLTCMRKKQPASFSQKFPKADPLALQLLRRLLAFDPKDRPSAEEALADPYFNGLAKVEREPSCQPIPKVEFEFERHRVRKEDIKELIFQEVLEYHPQLLKEYTSGTERPNFLHLSATDQFREQVTQLEENGNKSEVAPVQRKHASLPRSTVVHSASIPSKDHRHEASSSTKRVVDGSWNEQIHGVHASIAGKHSTTVRPVMSCDSKISQDMNDPRSLAPSNPWQPNIIHFPNHAVNFQNLPSMGSLLDATSPAQNMPVATPSTESRPGQLYLYMHXSVTADRVAVQAASASHGPVPAVPYSMPGL

SEQ ID NO: 69408 - protein, 810 aa, Setaria italica
  misc_feature (395)..(395): Xaa can be any naturally occurring amino acid
  misc_feature (414)..(414): Xaa can be any naturally occurring amino acid
  misc_feature (465)..(465): Xaa can be any naturally occurring amino acid
  misc_feature (577)..(577): Xaa can be any naturally occurring amino acid
  Transcript Sequence Number=SeqID_3434
  Gene Ontology: Mol. function=catalytic activity; Biological process =trehalose biosynthetic process
  Homolog annotation: Hit_ID=B6T0F0; Match level="QueryCoverage=93%, HitCoverage=90%, E-value=0.0, Identity=89%"; Hit description =Trehalose-6-phosphate synthase
  Pfam annotation: Domain name=Glyco_transf_20; Domain location=1-475; Score=681.8; E_value=5.9e-202; Accession=PF00982.13; Description =Glycosyltransferase family 20
  Pfam annotation: Domain name=Hydrolase_3; Domain location=523-767; Score=-61.3; E_value=0.0077; Accession=PF08282.4; Description =haloacid dehalogenase-like hydrolase
  Pfam annotation: Domain name=Trehalose_PPase; Domain location=524 -761; Score=340.9; E_value=2.5e-99; Accession=PF02358.8; Description =Trehalose-phosphatase
  Pfam module annotation: Pfam domain module=Glyco_transf_20::Hydrolase_ 3::Trehalose_PPase; Domain location=1-475::523-767::524-761
RAAPDPAAPFGFAFTVDAGTVAYQLRSGLPASAPVLHIGTLPAAAAEAASDELSNYLLANFSCLPVYLPSDLHHRFYHGFCKHYLWPLLHYLLPLTPSSLGGLPFQRTLYHSFLSANRAFADRLTEVLSPDEDLVWIHDYHLLALPTFLRKRFPRAKVGFFLHSPFPSSEIFRTIPVRDDLVRALLNADLVGFHTFDYARHFLSACSRLLGLDYQSKRGYIGIEYYGRTVTVKILPVGIDMGQLRSVVSAPETGDVVRRVAEAYKGRRLMIGVDDVDLFKGIGLKFLAMEQLLVEHPELRGRAVLVQIANPARSEGRDVQGVQDEAKAISARVNARFGTPGYTPIVLIDGPLTAHEKAAYYAAAECCVVSAVRDGLNRIPYIYTVCRQESNALGXDSPKRSVIVLSEFVGCSPXSLSGAIRVNPWSVESVAEAMNAALRMPEAEQRLRHEKHYKYVSTHDVAYWXARSFDQDLQRACKDHFSRRHWGIGFGMSFKVVALGPNFRRLSVEHIVPSYRRTENRLILLDYDGTVMPENSIDKTPSSEVISVLNRLCEDPKNRVFIVSGRGKDELSKWFAXPCEKLGIAAEHGYFTRWSRDAPWETSVLAADFDWKKTAEPVMQLYTGATDGSYIEHKESAIVWHHHEADPDFGSCQAKELLDHLENVLANEPVVVKRGQHIVEVNPQGISKGVVVESLLSSMVKTGKPPDFVLCIGDDRSDEDMFESIVCPSNASVKLPATSEVFACTVGKKPSMAKYYLDDTVDVIKMLEGLANAPSQPAPAGGAAPCLVRRFSVRKGEGIHCTVVVHIEEE

SEQ ID NO: 69409 - protein, 102 aa, Setaria italica
  Transcript Sequence Number=SeqID_3435
  Gene Ontology: Mol. function=damaged DNA binding; Cellular component =nucleus; Biological process=proteasomal ubiquitin-dependent protein catabolic process
  Homolog annotation: Hit_ID=B4FR10; Match level="QueryCoverage=100%, HitCoverage=25%, E-value=1e-49, Identity=96%"; Hit description=DNA repair protein RAD23
  Pfam annotation: Domain name=UBA; Domain location=59-95; Score=32.9; E_value=1.3e-06; Accession=PF00627.23; Description=UBATS-N domain
  Pfam annotation: Domain name=XPC-binding; Domain location=1-35; Score= 26.9; E_value=8e-05; Accession=PF09280.3; Description=XPC-binding domain
  Pfam module annotation: Pfam domain module=UBA::XPC-binding; Domain location=59-95::1-35
QPLLQELGKQNPQVMQLIQENQAEFMRLINEPLEGDEENEMNMLDQIADAAETIAVTPEENEAILRLEGMGFDRALVLEVFFACNKNEQLAANYLLDHMHEF

SEQ ID NO: 69410 - protein, 136 aa, Setaria italica
  misc_feature (126)..(126): Xaa can be any naturally occurring amino acid
  Transcript Sequence Number=SeqID_3436
  Gene Ontology: Mol. function=damaged DNA binding; Cellular component =nucleus; Biological process=proteasomal ubiquitin-dependent protein catabolic process
  Homolog annotation: Hit_ID=B4FR10; Match level="QueryCoverage=83%, HitCoverage=28%, E-value=1e-51, Identity=92%"; Hit description=DNA repair protein RAD23
  Pfam annotation: Domain name=XPC-binding; Domain location=23-81; Score=104.8; E_value=2.8e-28; Accession=PF09280.3; Description=XPC -binding domain
QKHLEGLVGRGPNASANAGAGNLDVLRNNAQFQTLLSLVQANPQILQPLLQELGKQNPQVMQLIQENQAEFMRLINEPLEGDEENEMNMLDQIADAAETIAVTPEENEAILRLEGMGFDRALVLEXVLACNKNEQL

SEQ ID NO: 69411 - protein, 551 aa, Setaria italica
  Transcript Sequence Number=SeqID_3437
  Gene Ontology: Mol. function=magnesium ion binding; Biological process=metabolic process
  Homolog annotation: Hit_ID=B6SHD2; Match level="QueryCoverage=95%, HitCoverage=95%, E-value=1e-172, Identity=55%"; Hit description =Terpene synthase 6
  Pfam annotation: Domain name=Terpene_synth; Domain location=30-219; Score=210.1; E_value=5.8e-60; Accession=PF01397.13; Description =Terpene synthase, N-terminal domain
  Pfam annotation: Domain name=Terpene_synth_C; Domain location=232 -500; Score=258.2; E_value=2e-74; Accession=PF03936.8; Description =Terpene synthase family, metal binding domain
  Pfam module annotation: Pfam domain module=Terpene_synth::Terpene _synth_C; Domain location=30-219::232-500
MAICSAAATAPATQSAAEQDCRRQYAPSVWGDFFISYEPCTTEELLSMQEKARALKEEVRRIVLAASNDDDLVRKLELVDALQRLGVDYHFKKEIDDLLLAVYGDEDGGSNDLYVASLRFYLLRKHGYTVSSDVFLKFRDEQGHISSDDVGTLTTLYDAAHMRVHGEDILDNIIAFNKSRLQSLLMKANLDPALLEEVRVTLETTRFRRVERVEARRFISVYEKKAMRDDTILEFAKLDYNIVQVVYGNELKELTIWWKDLRSRVDLTFSRDRLVEMHFCMMGIVYEPYYSYARIMLTKQVLFLVLLDDIYDNYSSTEESNMFTSALERWDEKAAEQIPEYLRPFFTNVIRCTDKVIGELKLQNNKHAEVVKEMALHVTKSYHAEVTWRDEHYVPADVDEHLQISLGSVTAMQVVVLTFVSLGDVTSREAIDWALTYPKIVRGVTVIARIMNDIMSHEREQASDHMTSTVQTCMKQYGVTVEEAIEKLKVILERAWMDMVQGCLDQKYPMVLLEKVVSFAQSIDFLYKREDLYTLPCNLKETLTSMYAKFV

SEQ ID NO: 69412 - protein, 161 aa, Setaria italica
  Transcript Sequence Number=SeqID_3438
PPKNTDCDDEQDSPPSPSGGSAEAPSYPGNDHPSPPPPMAPSSPPPPVAPSSPPTSSESSPPATTPTYGQQSPPPPMSSPPATPPSDKTPPPASSPLATPPQQSPSPQQFSPPATPPTNNSPPPSLSPPATPPTNSQPPPPVANTPTTPPQQSSSPPPSSS

SEQ ID NO: 69413 - protein, 370 aa, Setaria italica
  Transcript Sequence Number=SeqID_3439
  Gene Ontology: Mol. function=methionine-tRNA ligase activity; Cellular component=cytoplasm; Biological process=tRNA aminoacylation for protein translation
  Homolog annotation: Hit_ID=Q8H054; Match level="QueryCoverage=87%, HitCoverage=55%, E-value=1e-179, Identity=92%"; Hit description =Putative methionyl-tRNA synthetase
  Pfam annotation: Domain name=tRNA-synt_1g; Domain location=1-177; Score=53.7; E_value=2.9e-21; Accession=PF09334.3; Description=tRNA synthetases class I (M)
LNEVQGWIKSGLRDFSISRASVDWGIPVPNDTKQTIYVWFDALLGYISALLDDGEQASLQQAIDRGWPASLHLIGKDILRFHAVYWPAMLMSAGISVPDAVFGHGFLTKDGMKMGKSLGNTLEPKDLVERFGGDAVRYFFLREVEFGNDGDYSEERFINIVNAHLANTIGNLLNRTLGLLKKNCKSTLAVDSIAAVDGVPFRENVENLVDKAKHHYENLLLSSACESVLEIGNLGNLYIDEQAPWSCFKKGGESTEKAAKDLVIILETMRIIAIALSPITPSLSLRIYTQLGFTEDQFRVLRWEDTKWGGLKAGQVMMEPKPVFARIETETEAEAQATSKAAKGGKKKAQVGYSISDFMLLRRSIKSLME

SEQ ID NO: 69414 - protein, 146 aa, Setaria italica
  Transcript Sequence Number=SeqID_3440
  Gene Ontology: Mol. function=drug transporter activity; Cellular component=membrane; Biological process=multidrug transport
  Homolog annotation: Hit_ID=Q10A00; Match level="QueryCoverage=94%, HitCoverage=28%, E-value=1e-35, Identity=58%"; Hit description=MATE efflux family protein, expressed
VVLFLAVAEGLIVGLILVCVRYIWGHAYSDVEEVVVYVARMMLVIAVTIFFDGIMTVLSGVARGCGWQKIGACINLGAYYIVGIPSAYLLGFVLCLGGMGLWMGINCGLLVQLLLLMIVTMCTNWDKEAAKAKDRVFSPLSSNFDT

SEQ ID NO: 69415 - protein, 269 aa, Setaria italica
  Transcript Sequence Number=SeqID_3441
  Gene Ontology: Mol. function=dihydroorotate dehydrogenase activity; Cellular component=mitochondrial inner membrane; Biological process ='de novo' pyrimidine base biosynthetic process
  Homolog annotation: Hit_ID=Q9FZM9; Match level="QueryCoverage=99%, HitCoverage=57%, E-value=1e-140, Identity=92%"; Hit description =Dihydroorotate dehydrogenase
  Pfam annotation: Domain name=DHO_dh; Domain location=1-252; Score =199.2; E_value=1.1e-56; Accession=PF01180.13; Description =Dihydroorotate dehydrogenase
YGFNSEGIVVVAKRLGAQHGKRKMEETSSSTPPSTSDIKQGGKAGPGILGVNLGKNKTSEDAAADYVQGVHTLSQYADYLVINISSPNTPGLRKLQGRKQLKDLVKKVQAARDEMQWAEDGPPPLLVKIAPDLSKQDLEDIAAVALALRLDGLIISNTTVSRPPPTDTHPLAQETGGLSGKPLFDLSTNILREMYILTRGKIPLIGCGGVSSGEDAYKKIRSGATLVQLYTALAYGGPALIPRIKAELAECLERDGFKSVQEAVGADFR

SEQ ID NO: 69416 - protein, 112 aa, Setaria italica
  Transcript Sequence Number=SeqID_3442
KSPHKAASHPPAEVRPCPLPTGGATSHAGGIPPPPTTHTGASLPRIRIEPAALLAEESDAATLPIAAAALLIPAAAGGRLLHQLLCTFSSHGKTVRATSSSSSKQVRFLTVS

SEQ ID NO: 69417 - protein, 152 aa, Setaria italica
  misc_feature (137)..(137): Xaa can be any naturally occurring amino acid
  Transcript Sequence Number=SeqID_3443
  Gene Ontology: Mol. function=hydrolase activity, hydrolyzing O -glycosyl compounds; Cellular component=extracellular region; Biological process=carbohydrate metabolic process
  Homolog annotation: Hit_ID=B5U8Y9; Match level="QueryCoverage=76%, HitCoverage=12%, E-value=1e-46, Identity=76%"; Hit description=Alpha- glucosidase
MLSFSRSPILSYLLWCLVLLALASSNGVVATAKPKVGFGYKLVSLVQLPNGGGLVGYLQVKQRTSTYGPDIPRLRLFVKHETRERVRVQITDADKQRWEVPYNLLPREPAPPVAGGKFTGAPFTAAEYPGEELVFTXRCNPFWFAVHRRSTR

SEQ ID NO: 69418 - protein, 96 aa, Setaria italica
  Transcript Sequence Number=SeqID_3444
ALAKSTALLRGIKNKQSTNLVRRLEPAEVKSAETSLWVPHPRTGIYYPKGFEWVMEDVPSGAASFRQSYWFRTGEAESASSTTPKNDAAFLDHPFV

SEQ ID NO: 69419 - protein, 418 aa, Setaria italica
  misc_feature (65)..(65): Xaa can be any naturally occurring amino acid
  Transcript Sequence Number=SeqID_3445
  Gene Ontology: Mol. function=zinc ion binding; Cellular component =intracellular
  Homolog annotation: Hit_ID=B9RF68; Match level="QueryCoverage=61%, HitCoverage=11%, E-value=1e-42, Identity=40%"; Hit description=DNA polymerase
  Pfam annotation: Domain name=zf-RanBP; Domain location=158-187; Score= 33.4; E_value=8.9e-07; Accession=PF00641.10; Description=Zn-finger in Ran binding protein and others
  Pfam annotation: Domain name=zf-RanBP; Domain location=202-230; Score= 25.3; E_value=0.00025; Accession=PF00641.10; Description=Zn-finger in Ran binding protein and others
  Pfam annotation: Domain name=zf-RanBP; Domain location=235-264; Score= 6.7; E_value=0.19; Accession=PF00641.10; Description=Zn-finger in Ran binding protein and others
  Pfam module annotation: Pfam domain module=zf-RanBP::zf-RanBP::zf -RanBP; Domain location=158-187::202-230::235-264
MQQLLLLEEEEDTTDWDCHIQWHISRWDIQVALRCGCPSIDRKVVNSGKRLRAYVGLDEGELVLXVCSQCNLRGSCERAYVKARKEEVGRTVDVIRILLTYGLDVITDNVENRACLNKTVKESIKSLLNEVVKVDSRGPGSSTAKSAQLKCQSSLPRKQGDWNCPKCDFLNFAKNIKCLRCDGEFQERYRLQHEDQEHLPLKKGDWICKRCNFLNFAKNTRCLQCHEKPTNRLLNPGEWECISCNYVNFKRNAFCLKCCWKRPKSLNSQDSIESRHDLEHSRNPTISFVQDGIRSKKWQIPQKNAPLSDEDSDFWSADDEGDDSRANDMFPLQKDYKFLESFPIVGGKTAISQDHLEREKWKDEMSRRSKGLPTKESQEHSRPFAPARLPRSMELVDSDDDIASWFSCGENNKNLEKA

SEQ ID NO: 69420 - protein, 483 aa, Setaria italica
  Transcript Sequence Number=SeqID_3446
  Gene Ontology: Mol. function=transferase activity
  Homolog annotation: Hit_ID=Q5QPY6; Match level="QueryCoverage=100%, HitCoverage=100%, E-value=0.0, Identity=83%"; Hit description =Glycosyltransferase
  Pfam annotation: Domain name=DUF563; Domain location=101-345; Score =471.2; E_value=1.5e-138; Accession=PF04577.6; Description=Protein of unknown function (DUF563)
MKTRSSARGEPRRLGNVALLALMLCSVVALSLIRGRFAPIVTSAGDAIKSEDTSAAVSKEAVNIDAGDGADEAAAEAAAAEEKDKEAQPKPAGASGGAVKPVCYETSRRSDTCEAAGDVRLMGSSQTVYVDTLDREWKTKPYCRKHDNFALSHVKEWTLKPLPSGAAPQCTVNSSATAFVLSTGGFTGNPFHDYTDVLIPAFITAHPFRGEVQFLVSSYKSWWVNRYIQIFQQMSRYDVVDIDADDEVRCYRNVVVGPTFHRELGVDASKTPSGYSTANFRKMLRDAFGLERATATPSGDQWDIRRRPRLLIISRRPARGRAFMNERAMADMAASLGFDVRIGEPDTSTDTSKFARLVNSCDVMVGVHGAGLTNMVFLPAGAVVVQVVPYGRLEWLARNTFAEPSAGMEVHYLEYAVQLDETTLSEQYPSDHPVLRDPMAIHKQGWNALKTTYLDKQNVRPHLGRLKKTFLQALKMLPHGRDD

SEQ ID NO: 69421 - protein, 92 aa, Setaria italica
  Transcript Sequence Number=SeqID_3447
  Gene Ontology: Mol. function=RNA binding
  Homolog annotation: Hit_ID=B6U6Y1; Match level="QueryCoverage=100%, HitCoverage=20%, E-value=4e-36, Identity=81%"; Hit description=RNA binding protein
  Pfam annotation: Domain name=Agenet; Domain location=1-57; Score =12.1; E_value=0.017; Accession=PF05641.4; Description=Agenet domain
SKLEDDSVVAWLPAVVAKTIWKNNLLVEYTVSKSDGIALSEEIVDVKHVRPCPPQASAIHFCINDEVEAFRGGGWWLGVITDVHPELKYTFK

SEQ ID NO: 69422 - protein, 183 aa, Setaria italica
  Transcript Sequence Number=SeqID_3448
  Gene Ontology: Mol. function=RNA binding
  Homolog annotation: Hit_ID=B6U6Y1; Match level="QueryCoverage=100%, HitCoverage=51%, E-value=8e-71, Identity=61%"; Hit description=RNA binding protein
  Pfam annotation: Domain name=Agenet; Domain location=99-164; Score =85.5; E_value=1.9e-22; Accession=PF05641.4; Description=Agenet domain
SSCIGIALSEEIVDVKHVRPCPPQASAIHFCINDEVEAFRGGGWWLGVITDVHPELKYTFKPAHLGVEVQLSQKLLRLRCDWVDGQWKQESQNTLKAKFKQGAKVEVSSDDEGFHGAWFEATVLKSAGSKFVVEYATLKADDETKPLTEAVESRHIRPPPPHIPVVDGFKLLDEVDAFCNDAW

SEQ ID NO: 69423 - protein, 150 aa, Setaria italica
  misc_feature (64)..(64): Xaa can be any naturally occurring amino acid
  misc_feature (78)..(78): Xaa can be any naturally occurring amino acid
  Transcript Sequence Number=SeqID_3449
  Gene Ontology: Mol. function=RNA binding; Cellular component=vacuole
  Homolog annotation: Hit_ID=B6U6Y1; Match level="QueryCoverage=94%, HitCoverage=94%, E-value=2e-56, Identity=52%"; Hit description=RNA binding protein
  Pfam annotation: Domain name=Agenet; Domain location=15-80; Score =80.9; E_value=4.6e-21; Accession=PF05641.4; Description=Agenet domain
MPFGCLFQNTLKAKFKQGAKVEVSSDDEGFHGAWFEATVLKSAGSKFVVEYATLKADDETKPFXEAVESRHIRPPPPXIPVVDGFKLLDEVDAFCNDAWWVGVVSKVISNQKYMVYFKRWREELEFEHGQLRLHCDWMGGRWMRAAPGTL

SEQ ID NO: 69424 - protein, 156 aa, Setaria italica
  Transcript Sequence Number=SeqID_3450
  Gene Ontology: Mol. function=tubulin-tyrosine ligase activity; Biological process=protein modification process
  Homolog annotation: Hit_ID=B6U4S2; Match level="QueryCoverage=96%, HitCoverage=17%, E-value=1e-68, Identity=85%"; Hit description =Tubulin--tyrosine ligase-like protein 12
HDSDRSGSLEHVLQIVEKEKARIQEKGSDSAAWLELEELGIDDDMLVALDLSTKFPNMVALNLWGNKLHDTEKVMQEIRKCPKLKALWLNENPVLGKGIDKAILDGLSELEIYNSHFTSKAGEWALSFCADIVGADNPCSSVESTLLESAVTIDLS

SEQ ID NO: 69425 - protein, 311 aa, Setaria italica
  Transcript Sequence Number=SeqID_3451
  Homolog annotation: Hit_ID=Q8W0Y1; Match level="QueryCoverage=81%, HitCoverage=34%, E-value=2e-86, Identity=58%"; Hit description =Putative transposase
RGKARARPPSPVASSSSSEEEEEVPSSHASGDEEVQVEQDQVEEEAGGSGSSSSSGIWLRGPSTLPKRPIPLERRPVIQPSWKRGFTKVGGGDHARHPNGILGLLCRLHFPGLVEFGGTTKPAYTWEHYVAARDALDQDGRVFPNKAERVKAELWDFFRCQEGYEARAATVAHEAAKKLVKDMHYEARVQAIIDYYASYRRMKINKTEARTMKLTREQYLQVPPWWCTQHRQCWEHMVDKWCNPKWEETHNACRDRRLLMPGAPHHQGNLSLDEYAAKWSSSHSGQPCSQFKAWALSHKGKATANIDYNPE

SEQ ID NO: 69426 - protein, 70 aa, Setaria italica
  Transcript Sequence Number=SeqID_3452
  Gene Ontology: Cellular component=exocyst; Biological process =exocytosis
  Homolog annotation: Hit_ID=Q53PU2; Match level="QueryCoverage=100%, HitCoverage=10%, E-value=5e-30, Identity=91%"; Hit description=Exo70 exocyst complex subunit family protein, expressed
VSDEQLQSELRVSIAAVIVPAYRSFLGRFSQHFSAGRQTEKYIKLSGEDLEAIIEELFDGNAVSMPRRRT

SEQ ID NO: 69427 - protein, 139 aa, Setaria italica
  misc_feature (51)..(51): Xaa can be any naturally occurring amino acid
  Transcript Sequence Number=SeqID_3453
  Homolog annotation: Hit_ID=B6UI68; Match level="QueryCoverage=75%, HitCoverage=37%, E-value=5e-44, Identity=86%"; Hit description=IDS4 -like protein
ELQDRAVSAAETGSAEELLRVRKEIVDLHGEMVLLENYSALNYTGLVKILXKKYDKRTGALIRLPFIQNVMQEPFFTTDLLYKLVKECEAMLDQLLPRSQQPPAPSDDGREDSDGDDKPVDNASSSLANGGGGALELEE

SEQ ID NO: 69428 - protein, 137 aa, Setaria italica
  misc_feature (120)..(120): Xaa can be any naturally occurring amino acid
  Transcript Sequence Number=SeqID_3454
  Gene Ontology: Cellular component=integral to membrane
  Homolog annotation: Hit_ID=Q2MJU2; Match level="QueryCoverage=89%, HitCoverage=12%, E-value=6e-10, Identity=39%"; Hit description =Cadmium tolerance factor
VTALLGLGGAYAAGSCRDGKHTGYVVGLILPVAACIYLQYVAANSSCIKNFKHWYERRLEVEANKRSANKYISAIRAIVTEPSTRDDLNKARENIQLLGILAATIAYQAGLDPPGGVWAXKGKGYNVGDPILLTTHP

SEQ ID NO: 69429 - protein, 42 aa, Setaria italica
  Transcript Sequence Number=SeqID_3455
STISTWSNHGLIKLNRFVSRISRIYAIGFVINLYLILKYTSN

SEQ ID NO: 69430 - protein, 90 aa, Setaria italica
  Transcript Sequence Number=SeqID_3456
RFFRYEMNDNNMGFGLFFATFRVVPAPAAGAGCELRWEFECEPVRGTPREALVARLQAGLDGMAARVRDHVLAARTGSTTAAAVVAGPEA

SEQ ID NO: 69431 - protein, 109 aa, Setaria italica
  Transcript Sequence Number=SeqID_3457
  Gene Ontology: Cellular component=anchored to membrane
  Homolog annotation: Hit_ID=Q06I84; Match level="QueryCoverage=83%, HitCoverage=20%, E-value=4e-26, Identity=70%"; Hit description =Fasciclin-like protein FLA22
  Subcellular localization annotation: CTP_CleavageSite=67; ConfidenceScore=5.57e-01
LLATAVAAAASKPGAVAVNVTGVLSAFPDLADFTRLLASSPVLAELAGRSSLTLLAVPNGNLPQSPSAFAAASGADLADVLRYHVLLEYLAPADLRRLPASGKLVTTLF

SEQ ID NO: 69432 - protein, 178 aa, Setaria italica
  Transcript Sequence Number=SeqID_3458
  Gene Ontology: Mol. function=chaperone activator activity; Cellular component=cytoplasm
  Homolog annotation: Hit_ID=Q012W8; Match level="QueryCoverage=58%, HitCoverage=52%, E-value=1e-10, Identity=33%"; Hit description=[S] KOG2936 Uncharacterized conserved protein
  Pfam annotation: Domain name=Aha1_N; Domain location=42-178; Score =137.5; E_value=4.3e-38; Accession=PF09229.3; Description=Activator of Hsp90 ATPase, N-terminal
GESTGDAAPLPAPRKLDAADLAANPAPTTLGSVWNQAGTWEEKNLNSWANSRIKDLLGSLDPLEFSTGKASVYEVSRCSGDAFLVTVRNKKRVGYTYELSLKFKGEWLIKEENKKVKGHLEIPEFSFGELEDLEVNVRFGDEKDLSSDDKAQICKDMKSFLAPIQGKLREFEKELKER

SEQ ID NO: 69433 - protein, 318 aa, Setaria italica
  misc_feature (77)..(77): Xaa can be any naturally occurring amino acid
  Transcript Sequence Number=SeqID_3459
  Gene Ontology: Mol. function=DNA binding; Cellular component=nucleus; Biological process=regulation of transcription, DNA-dependent
  Homolog annotation: Hit_ID=Q5JMM1; Match level="QueryCoverage=99%, HitCoverage=43%, E-value=1e-136, Identity=76%"; Hit description =Auxin response factor 3
  Pfam annotation: Domain name=Auxin_resp; Domain location=174-255; Score=97.2; E_value=5.7e-26; Accession=PF06507.5; Description=Auxin response factor
  Pfam annotation: Domain name=B3; Domain location=47-152; Score=104.7; E_value=3.1e-28; Accession=PF02362.13; Description=B3 DNA binding domain
  Pfam module annotation: Pfam domain module=Auxin_resp::B3; Domain location=174-255::47-152
ATDEVYARLALVAEGEAFGRNVRGAGVEGDDDMEDLDAERKSRMLHMFCKTLTASDTSTHGGFSVPRRAAEDCFPPXDYNQLRPSQELVAKDLHGAKWKFRHIYRGQPRRHLLTTGWSSFVHKKKLVSGDAVLFLRGDDGELRLGVRRAIQLKNEALFEDFSSDSAKRHTLSDVYDSLEHRSVFHISYNPRATASEYIIPYRKFIKSLNRPVCIGARINFQCHNEDVSERRSGMVVGISEVDSVKWPGSKWRSLLVRWEDGSECNGQDRVSPWEIEIVGGSVSVAHSLSASSSKRTKLCPQGNLDVPTMWNGCTDFRW

SEQ ID NO: 69434 - protein, 117 aa, Setaria italica
  Transcript Sequence Number=SeqID_3460
  Subcellular localization annotation: CTP_CleavageSite=18; ConfidenceScore=5.48e-01
ANLIMASSSYLLSRITPRATASPTRTAAARAPTWSPAASTRCVEPMAGCRTVLMEPIDCQDGKVDQQVETFIRRFRERTHQSETARLEAAAAGSAAAVRPPPVTSTMWAGTMHRYTR

SEQ ID NO: 69435 - protein, 146 aa, Setaria italica
  misc_feature (134)..(134): Xaa can be any naturally occurring amino acid
  Transcript Sequence Number=SeqID_3461
  Gene Ontology: Mol. function=calcium-dependent cysteine-type endopeptidase activity; Cellular component=intracellular; Biological process=proteolysis
  Homolog annotation: Hit_ID=B9SBQ0; Match level="QueryCoverage=100%, HitCoverage=6%, E-value=1e-47, Identity=68%"; Hit description =Calpain, putative
VIVTIRPWTVGVACLLAILFLVFVIGVIHYWTSNNFYLTRTQMLLVCSIAFLLALAAFLMGLFHGKPFVGASIGYFSFIFLLTGRALTVLLSPPIVVYSPRVLPVYVYDAHADSAKNVSYAFLILDGIALATEXVWGVIASIIMNP

SEQ ID NO: 69436 - protein, 117 aa, Setaria italica
  Transcript Sequence Number=SeqID_3462
MPAPFFSYLIFLATFQVLILLSFDNANALLITICEYQLSVCFVAAELVLAADSNLSKLFYDCKDYIIGIYQDDMSKDKLDEICKVYETMEAIVTHPEEALQIMEQPDEKSIENKNRF

SEQ ID NO: 69437 - protein, 599 aa, Setaria italica
  Transcript Sequence Number=SeqID_3463
  Gene Ontology: Mol. function=GTPase activator activity; Cellular component=cytoplasm; Biological process=regulation of GTPase activity
  Homolog annotation: Hit_ID=Q642R9; Match level="QueryCoverage=59%, HitCoverage=41%, E-value=3e-36, Identity=30%"; Hit description=Rab3 GTPase-activating protein catalytic subunit
GLGCPGRELDVKPPSPRDEVLELSPSGNVDSSSIPTESISSAKLPTVPPTSTVKQLVAAIEHGKNFKSMSHMRATGDQFLKDKGGLSLSVVKSLVRRDKEERSSSEFFGDDETQSLMYSLFKLEEQFPLDGSQCNPELIHSRSLSKDLHGAPPGSFIHHLAVVIGSISSVHKMAFFWQSVVLELRKLWSDWQPVPRMPLDAPPDLNSCLLHQEMQVVNCCIARKKRRKAAKESLDSLLKQANIDNSEPRFLNGKSPDSEVCARDSTGDYVLRLGADRASENLTLLETGELIYAPTLQEGPIMTAELIKETEELVLRTGSLGAGCSQLLSDMQAFKAANPGCVLEDFVRWHSPPDWSEDCAANSTTVGEGSSRRGRLSDRMQTKEGNLWKELWETAKPIPAVEQTPIYDEDLAVESIFDSLEVIEPSKLFEQLLAVTLSVCFVAAELVLAADSNLSKLFYDCKDYIIGIYQDDMSKDKLDEICKVYETMEAIVTHPEEALQIMEQPDEKSIENKNRFKLKLNFMTKDRPPLWKRASKDEKKMSPKDDKSTSEEKNTKIFSNLFDKKVNIFSKKNAKSLEVPVAPPSTSQGPFDESEWTIL

SEQ ID NO: 69438 - protein, 143 aa, Setaria italica
  Transcript Sequence Number=SeqID_3464
  Gene Ontology: Mol. function=protein disulfide oxidoreductase activity; Cellular component=chloroplast; Biological process =electron transport chain
  Homolog annotation: Hit_ID=B6T9S0; Match level="QueryCoverage=97%, HitCoverage=79%, E-value=4e-65, Identity=86%"; Hit description =Thioredoxin X
  Pfam annotation: Domain name=Thioredoxin; Domain location=32-137; Score=98.8; E_value=1.9e-26; Accession=PF00085.12; Description =Thioredoxin
  Subcellular localization annotation: CTP_CleavageSite=28; ConfidenceScore=5.18e-01
LRLSPAQPASAGCRAAPGRLTCPRTRVRCAAAAKFIAESEFAAEVLESVFPVLVDFVADWCGPCRLIAPVVDWASEEYDGRLKIVKIDHDANPKLIEEYKVYGLPTLILFKNGQEVPGSRREGAMIKDKFKQYLEPLLATTVA

SEQ ID NO: 69439 - protein, 211 aa, Setaria italica
  Transcript Sequence Number=SeqID_3465
  Gene Ontology: Mol. function=ATP binding; Cellular component=nucleus; Biological process=DNA replication
  Homolog annotation: Hit_ID=B6SMZ0; Match level="QueryCoverage=90%, HitCoverage=93%, E-value=1e-101, Identity=92%"; Hit description=DNA replication complex GINS protein PSF2
  Pfam annotation: Domain name=Psf2; Domain location=20-167; Score =343.3; E_value=4.7e-100; Accession=PF04128.5; Description=Partner of SLD five, PSF2
MAGQSDPHLSIFSPSEVEFAAEDEIVDIVPNIRMEALNMICGDFGPFFPQIPTKVPLWLAVALKKRGKCTIRTPNWMTVDRLTQVLEAERESPREFQPLPFHYIEISKLLFDHARDDISDAYLVRSLIEDIRDVRFHKVENGLETISGRTHAVKLKNLSAMEVNIVRPFMVRTLQAFYKHDSPQMIQQADNTGSRPTPVTDRGPRRDLRRR

SEQ ID NO: 69440 - protein, 68 aa, Setaria italica
  Transcript Sequence Number=SeqID_3466
KLISILFIIIFCFFLNIRRFELISKSQTSYYLKWGVFVLPVSVYYTRVLSIEPVLCRASVIKGSGSYF

SEQ ID NO: 69441 - protein, 200 aa, Setaria italica
  Transcript Sequence Number=SeqID_3467
  Gene Ontology: Mol. function=hydrolase activity, hydrolyzing O -glycosyl compounds; Cellular component=cell wall; Biological process= carbohydrate metabolic process
  Homolog annotation: Hit_ID=C5IG71; Match level="QueryCoverage=78%, HitCoverage=47%, E-value=7e-44, Identity=59%"; Hit description =Xyloglucan xyloglucosyl transferase
  Pfam annotation: Domain name=XET_C; Domain location=97-144; Score =37.6; E_value=4.9e-08; Accession=PF06955.4; Description=Xyloglucan endo-transglycosylase (XET)
LRHHAYAVAWTPTAIVFYIDGTPIREVVRVPAMAGDFPSKPMSVYATIWDGSAWATEGGRYKVDYAHAPFAADFSKLVLSGCPAAVGVGGGGGGARCAVAVMTAEFAVMTPAKRAAMRRFRRRHLLYTVCHDRVRYNGTVLPECDDADGSERDDFHRWGESKRVSHSRRGYRQPQQLQREDKDAAGGRPSTWPIGSLRAD

SEQ ID NO: 69442 - protein, 85 aa, Setaria italica
  Transcript Sequence Number=SeqID_3468
MAGKKRKSGSEKQPKHRLPLGADADAVADASKRRRSGAAKQHQADEEASIPSSLSAKILREARKQQQEEMLADSSDEGPSASAAA

SEQ ID NO: 69443 - protein, 69 aa, Setaria italica
  Transcript Sequence Number=SeqID_3469
  Gene Ontology: Mol. function=nucleotidyltransferase activity
  Homolog annotation: Hit_ID=Q10Q39; Match level="QueryCoverage=100%, HitCoverage=5%, E-value=3e-22, Identity=73%"; Hit description =Nucleotidyltransferase domain containing protein, expressed
MVPNGLLPNVAVGVTRRLDAERWAVAEERTAELIARIQPTPWSEDRRRAAADYVQRLIMGCLSCLGFYF

SEQ ID NO: 69444 - protein, 140 aa, Setaria italica
  Transcript Sequence Number=SeqID_3470
  Gene Ontology: Mol. function=protein binding
  Homolog annotation: Hit_ID=Q7XZU0; Match level="QueryCoverage=79%, HitCoverage=6%, E-value=6e-13, Identity=43%"; Hit description=SAC domain protein 9
NSSGPVNDSRGSEGCYTKSSSSAQPGGSENLLDFLTGDFDMSKSHITENMSFGNGEQTNFLDDGFDVNPFASASEVPVPTVNNQVEECGSTQLYLKFFESFSGNNKGKGLTFEEVMKLEIKRLHLGLSAAERDRALLSIG

SEQ ID NO: 69445 - protein, 143 aa, Setaria italica
  Transcript Sequence Number=SeqID_3471
  Subcellular localization annotation: CTP_CleavageSite=22; ConfidenceScore=5.22e-01
ISPSAHCDMGSKSFANSSGPVNDSRGSEGCYTKSSSSAQPGGSENLLDFLTGDFDMSKSHITENMSFGNGEQTNFLDDGFDVNPFASASEVPVPTVNNQVEECGSTQLYLKFFESFSGYNKVSICKKIILFYYFSYLIFLYLC

SEQ ID NO: 69446 - protein, 168 aa, Setaria italica
  Transcript Sequence Number=SeqID_3472
  Gene Ontology: Mol. function=binding
  Homolog annotation: Hit_ID=Q0GKF3; Match level="QueryCoverage=98%, HitCoverage=49%, E-value=6e-61, Identity=67%"; Hit description =Chloroplast FLU-like protein
  Pfam annotation: Domain name=TPR_1; Domain location=134-168; Score =8.8; E_value=0.52; Accession=PF00515.20; Description=Tetratricopeptid e repeat
  Pfam annotation: Domain name=TPR_1; Domain location=54-87; Score=4.8; E_value=1.6; Accession=PF00515.20; Description=Tetratricopeptide repeat
  Pfam annotation: Domain name=TPR_1; Domain location=94-127; Score =15.0; E_value=0.093; Accession=PF00515.20; Description =Tetratricopeptide repeat
  Pfam annotation: Domain name=TPR_2; Domain location=134-167; Score =14.4; E_value=0.48; Accession=PF07719.9; Description=Tetratricopeptid e repeat
  Pfam annotation: Domain name=TPR_2; Domain location=54-87; Score =15.0; E_value=0.31; Accession=PF07719.9; Description=Tetratricopeptid e repeat
  Pfam annotation: Domain name=TPR_2; Domain location=94-127; Score =21.1; E_value=0.0046; Accession=PF07719.9; Description =Tetratricopeptide repeat
  Pfam module annotation: Pfam domain module=TPR_1::TPR_1::TPR_1::TPR _2::TPR_2::TPR_2; Domain location=134-168::54-87::94-127::134-167::54- 87::94-127
RKEELKRLNNQLRQINTALRRQAQIESFAPGLTYAPVKRTTETDVVVDPRKQQLVSNLRNGKNYMRNQDLDKAVVEFRTALELAESIGDRFEEKKAARGLGASLQRQGKYREAMRQYGKVLELSKETGEDSGCTEAYGAIADCYAELGDLERAAKVYDKYISRLQPGE

SEQ ID NO: 69447 - protein, 168 aa, Setaria italica
  Transcript Sequence Number=SeqID_3473
  Homolog annotation: Hit_ID=A8YLE8; Match level="QueryCoverage=97%, HitCoverage=69%, E-value=2e-55, Identity=62%"; Hit description =Similar to tr|Q4BV10|Q4BV10_CROWT NnrU
  Pfam annotation: Domain name=NnrU; Domain location=3-161; Score= -114.6; E_value=0.071; Accession=PF07298.3; Description=NnrU protein
WQVQGITGIHELVWLSSFISFFFLYPSTFNLLEVAAVDKPKLHMWETGIMRITRHPQMVGQVIWCLAHTLWIGNSVAVAASVGLIGHHLFGAWNGDRRLASRYGEAFEVLKKRTSVVPFAAIVDGRQKLPKDYYKEFFRLPYFAITSLTLGAYLAHPLMQASSYQLPW

SEQ ID NO: 69448 - protein, 50 aa, Setaria italica
  Transcript Sequence Number=SeqID_3474
  Gene Ontology: Mol. function=transporter activity; Cellular component= integral to membrane; Biological process=transport
  Homolog annotation: Hit_ID=B6TVE3; Match level="QueryCoverage=98%, HitCoverage=8%, E-value=1e-16, Identity=81%"; Hit description =Patellin-1
YRYIAPEQVPVQFGGLYKEDDTEFSTSDAVTELTVKPSSKETIEIPATEV

SEQ ID NO: 69449 - protein, 275 aa, Setaria italica
  Transcript Sequence Number=SeqID_3475
  Gene Ontology: Mol. function=transporter activity; Cellular component= integral to membrane; Biological process=transport
  Homolog annotation: Hit_ID=B6TVE3; Match level="QueryCoverage=90%, HitCoverage=38%, E-value=1e-23, Identity=95%"; Hit description =Patellin-1
  Pfam annotation: Domain name=CRAL_TRIO_N; Domain location=198-266; Score=42.6; E_value=1.5e-09; Accession=PF03765.7; Description =CRALTRIO, N-terminus
AEAEAEKKADEAAVTADDAGAGSFKEESNLVEDLPDPEKKALDEFKQLIVAALAAGEFNLPPPPPPPKAKEEPKAEETKTEEPKAEEPAKEEPKTEEPAKAEAAAEVPKTEEPAKAEAAAEEANAEAAAEAPAEEAKTEAPVEETKAEAVAEEAKPAEPEPEWKTVVAAVAESATKTVEAIEETVVPAAAAATAATSEVAAEPDAEAEAAAPEPVLIWGVPLVGDDERTDTVLLKFLRAREFKVKEAMAMLKSTVLWRKRFGITSLLEADLACRS

SEQ ID NO: 69450 - protein, 122 aa, Setaria italica
  Transcript Sequence Number=SeqID_3476
  Gene Ontology: Mol. function=transporter activity; Cellular component= integral to membrane; Biological process=transport
  Homolog annotation: Hit_ID=B6TVE3; Match level="QueryCoverage=78%, HitCoverage=16%, E-value=1e-41, Identity=88%"; Hit description =Patellin-1
LTKEGIEYLEITTNLPNAVTELTIKPSSKETVEIPVTENSTIVWELRVLGWEVSYGAEFTPEAEGGYTVIVQKTRKVPANEEPIMKGSFKVGEPGKLVLTINNPASKKKKLLYRSKVKSTSD

SEQ ID NO: 69451 - protein, 622 aa, Setaria italica
  Transcript Sequence Number=SeqID_3477
  Gene Ontology: Mol. function=transporter activity; Cellular component= integral to membrane; Biological process=transport
  Homolog annotation: Hit_ID=B6TVE3; Match level="QueryCoverage=54%, HitCoverage=60%, E-value=1e-179, Identity=87%"; Hit description =Patellin-1
  Pfam annotation: Domain name=CRAL_TRIO; Domain location=343-529; Score=65.6; E_value=1.8e-16; Accession=PF00650.12; Description =CRALTRIO domain
  Pfam annotation: Domain name=CRAL_TRIO_N; Domain location=259-330; Score=37.9; E_value=4.1e-08; Accession=PF03765.7; Description =CRALTRIO, N-terminus
  Pfam module annotation: Pfam domain module=CRAL_TRIO::CRAL_TRIO_N; Domain location=343-529::259-330
EVVVTEPEKKAEEPAAEKAVEAAEEKAAEAAVEKAVEAEEKAAEADSEEEKKAEEALEAAAGDEAAVIDAAGSFKEESNLVSELPDPEQTALAQLKELVAAALANGEFDLPPPPPPKEEPKKEEPAKEEAKDEAKPAKDEEPKAEAAAAEEPAKEEAKAEEPKTEAPAEAAVEEVKAEAPAPEEPKAEAAPAEEPKAEEPAKEEPMAEAATEEPKAEAAAEEAKPSEPEPEEKTVVVAEEEATKTVEAIEETVVPAASETAASAEAEAAPGPAAERKEELIWGVPLVGDDERTDTVLLKFLRAREFKVKEAMAMLKSAVLWRKRFGIDELLGADLGLPELENVVFYRGADREGHPVCYNVYGEFQDKELYEKAFGDEEKRERFLKWRIQLLERGIREQLDFSPSGICSMVQVTDLKNSPPMLGKHRAVTRQALALLQDNYPEFVAKKVFINVPWWYLAANKVMSPFLTQRTKSKIVFCSPGKSAETLFRYIAPEQVPVQFGGLYKEDDTEFSTSDAVTELTVKPSSKETIEIPATENSTVVWELRVLGWEVSYGAEFTPDAEGGYTVIVQKTRKVPAHEEPIMKGSFKVSEPGKVVLIVNNPASKKKKLLYRFKVKSTAESA

SEQ ID NO: 69452 - protein, 360 aa, Setaria italica
  misc_feature (37)..(37): Xaa can be any naturally occurring amino acid
  Transcript Sequence Number=SeqID_3478
  Gene Ontology: Mol. function=nucleotide binding; Cellular component =protein complex; Biological process=protein polymerization
  Homolog annotation: Hit_ID=Q9SDW5; Match level="QueryCoverage=99%, HitCoverage=74%, E-value=1e-150, Identity=78%"; Hit description=FtsZ protein
  Pfam annotation: Domain name=Tubulin; Domain location=2-196; Score =277.8; E_value=2.4e-80; Accession=PF00091.17; Description =TubulinFtsZ family, GTPase domain
  Pfam annotation: Domain name=Tubulin_C; Domain location=199-319; Score=95.8; E_value=1.5e-25; Accession=PF03953.9; Description =TubulinFtsZ family, C-terminal domai
  Pfam module annotation: Pfam domain module=Tubulin::Tubulin_C; Domain location=2-196::199-319
ARIKVIGVGGGGSNAVNRMIESSMKGVEFWIVNTDFXQAMRMSPIDPENRLQIGQELTRGLGAGGNPEIGMNAAKESQELVEQAVAGADMVFVTAGMGGGTGTGGAPIIAGIAKSMGILTVGIVTTPFSFEGRRRALQAQEGIASLRSNVDTLIVIPNDKLLTAVSPNTPVTEAFNLADDILRQGVRGISDIITVPGLVNVDFADVRSVMSDAGSSLMGIGTATGKTRARDAALNAIQSPLLDIGIERATGIVWNITGGNDLTLTEVNAAAEVIYDLVDPGANLIFGSVIDPSYTGQVSITLIATGFKRQEESENRSSQAGGDSNRGHSGWFSPTSQEEGPALQIPEFLQRKGRSGFPRV

SEQ ID NO: 69453 - protein, 235 aa, Setaria italica
  misc_feature (215)..(215): Xaa can be any naturally occurring amino acid
  Transcript Sequence Number=SeqID_3479
  Gene Ontology: Mol. function=hydrolase activity, acting on ester bonds; Cellular component=apoplast; Biological process=lipid metabolic process
  Homolog annotation: Hit_ID=B9RQB3; Match level="QueryCoverage=86%, HitCoverage=56%, E-value=4e-60, Identity=59%"; Hit description=Zinc finger protein, putative
  Pfam annotation: Domain name=Lipase_GDSL; Domain location=34-233; Score=42.4; E_value=1.8e-09; Accession=PF00657.14; Description=GDSL -like LipaseAcylhydrolase
  Subcellular localization annotation: CTP_CleavageSite=17; ConfidenceScore=5.05e-01
MASSTVALLAVSLLAASAMSGGGGVRAQPLVPAVISFGDSTIDVGNNNYLPRAVFKADYAPYGENFVRQEPTGRFSDGKIVTDITAETLGFESYAPPYLSPQASGKNLLIGANFASAASSYYDDTAAVYDAITLTQQLKYYKEYQSKLAAVAGRAKARSILTGALYVVSTGTGDFLQNYYHNASLSRRYNVDQYCDLLVGILSNFASELYKLGAXRRIGVTSMPPLGCLPASIKE

SEQ ID NO: 69454 - protein, 203 aa, Setaria italica
  Transcript Sequence Number=SeqID_3480
  Gene Ontology: Mol. function=hydrolase activity, acting on ester bonds; Cellular component=apoplast; Biological process=lipid metabolic process
  Homolog annotation: Hit_ID=B9SN62; Match level="QueryCoverage=98%, HitCoverage=55%, E-value=3e-54, Identity=48%"; Hit description=Zinc finger protein, putative
  Pfam annotation: Domain name=Lipase_GDSL; Domain location=7-194; Score=30.5; E_value=7e-06; Accession=PF00657.14; Description=GDSL -like LipaseAcylhydrolase
YLSNLVSLVALYVVSTGTGDFLQNYYHNASLSRRYNVDQYCDLLVGILSNFASELYKLGARRIGVTSMPPLGCLPASIRLYGEGRDACVARLNRDAETFNWKLNATVKALKGQHADLKMAIFDIYTPLRKLAEAPAEQGFADARGTCCRTGTAKTRVYLCNPTTGGTCRNASSYVFFDGVHPSEAANLFMAESMVEAGIELVT

SEQ ID NO: 69455 - protein, 346 aa, Setaria italica
  Transcript Sequence Number=SeqID_3481
  Gene Ontology: Mol. function=protein kinase activity; Cellular component=integral to membrane; Biological process=protein amino acid phosphorylation
  Homolog annotation: Hit_ID=B9R782; Match level="QueryCoverage=68%, HitCoverage=37%, E-value=2e-87, Identity=63%"; Hit description=ATP binding protein, putative
  Pfam annotation: Domain name=Pkinase; Domain location=139-343; Score =34.5; E_value=1.5e-10; Accession=PF00069.17; Description=Protein kinase domain
  Pfam annotation: Domain name=Pkinase_Tyr; Domain location=138-344; Score=-34.2; E_value=1.9e-11; Accession=PF07714.9; Description =Protein tyrosine kinase
  Pfam module annotation: Pfam domain module=Pkinase::Pkinase_Tyr; Domain location=139-343::138-344
  Subcellular localization annotation: CTP_CleavageSite=81; ConfidenceScore=5.16e-01
STVRRRNKLGPDKRESLSMPDSSAPHAKKVRRRTTLAVAVAVGTVLAALLLCAMIAMKRSNGRRRPSSATYASPNPKKSAPASEVSRDNADMGYVECVADEETAAIMVPEEKARRLERSGCLTFCAGEAASYSLEQLMRASAEVLGRGSVGTTYKAVLDGRLVVIVKRLDAAKIGPAALEAEAFEQNMDAVGRLRHPNLVPLRAFFQAKEERLLVYDYQPNGSLYSLIHGSRSSRTKPLHWTSCLKIAEDVAQGLAYIHQASRLVHGNIKSSNVLLGSDFEACLTDNCLSFLLESSEVKDDAAYRAPENMKSNRMLTPKSDIYAFGVLLLELLSGKPPLQHSVLVA

SEQ ID NO: 69456 - protein, 63 aa, Setaria italica
  Transcript Sequence Number=SeqID_3482
LSSESVPKVNVESAFYAHGACLAQNLKRGILSAFEVSKGQRPHFSVSNPCKNCRTSCTTCGHN

SEQ ID NO: 69457 - protein, 68 aa, Setaria italica
  Transcript Sequence Number=SeqID_3483
CWRRWHPREEYPHPAVPELPKPELPPHPTVPELPEHPAVPELPKTELPPHPTVPELPKPEVPAHPEVP

SEQ ID NO: 69458 - protein, 178 aa, Setaria italica
  Transcript Sequence Number=SeqID_3484
MAARSTMASLVLLMALLLSCSGMSGAARVLEEVAPKEEYPHPAVPELPKPELPPHPTVPELPEHPALPELPVPELPKPELPPHPTVPELPKPEVPAHPEVPELPKPELPPHPAVPELPKPEVPEHPAVPELPKPELPPHPTVPELPKPELPHPDVPEVPEHELPPKPESHYPEPETKP

SEQ ID NO: 69459 - protein, 340 aa, Setaria italica
  Transcript Sequence Number=SeqID_3485
  Homolog annotation: Hit_ID=Q0GPH0; Match level="QueryCoverage=100%, HitCoverage=78%, E-value=1e-113, Identity=59%"; Hit description=BZIP transcription factor bZIP80 (Fragment)
  Pfam annotation: Domain name=DUF632; Domain location=1-206; Score =232.4; E_value=1.1e-66; Accession=PF04782.4; Description=Protein of unknown function (DUF632)
SRESVKIEHEKKLSTLQSLEYRGRDSSKLDKTKASINKLQSLIVVTSQAATTTSSAIVRVRDNELAPQLVQLCFALLGMWRSMNHFHEIQNEIVQQVCGLVDNSMAESTSDLHRLATRDLEAAVAAWHSNFNRLIKYQRDYIRALYGWLKLTLCQVDNSAPQEAHASMISRELTSFCDEWKQALDRLPDAVASEAIKSFVNVVHVIYTKQAEEMKIKKRAETYSKELEKKTNSLRSIEKKYYQSYSMVGLGLPGSGRDGIETHAYDARDPLAEKKTEIAQCRRKVEDEMTRHAKAVEVTRSMTLNNIQTGLPGIFQAIAGFSATVVEALDVVCRRAGSVR

SEQ ID NO: 69460 - protein, 66 aa, Setaria italica
  misc_feature (35)..(35): Xaa can be any naturally occurring amino acid
  Transcript Sequence Number=SeqID_3486
  Homolog annotation: Hit_ID=B9RQZ5; Match level="QueryCoverage=74%, HitCoverage=6%, E-value=3e-18, Identity=89%"; Hit description=DNA cross-link repair protein pso2/snm1, putative
TLILDTTYCNPRYDFPSQEIVIQFVIEAIQARSFXNPKTLFLIGSYTIGIILSYLFILRQFSVSPS

SEQ ID NO: 69461 - protein, 133 aa, Setaria italica
  misc_feature (118)..(118): Xaa can be any naturally occurring amino acid
  Transcript Sequence Number=SeqID_3487
DARAQLSDRLKNVLRREPDAEPPFSHRRRAASTSFDEEPRPKPRHDMASRKGKIRRKEEKKCAIESDVRSFRYGSSNKTPTTQLDSEPVSPRNLMRSFSAPVSGTTFVKLLSEEPRVXLTGARLQRKQEGYGS

SEQ ID NO: 69462 - protein, 180 aa, Setaria italica
  misc_feature (15)..(15): Xaa can be any naturally occurring amino acid
  Transcript Sequence Number=SeqID_3488
PCPELSMDDIEESSXWGSPELVKKENNMEAFLEEVKKRLKIELEGSIASDDKANRWAGGDIPADPKKIARNIANQIRENVTRDLHPALVRSESTRSYRSDVPFNGQNQMDYIGRDARRQLSDRLKNVLRREPDAEPPFSHRKKGTDLRTYVTNEGRTERNPKEPKGTNETNKEQITKGKE

SEQ ID NO: 69463 - protein, 84 aa, Setaria italica
  Transcript Sequence Number=SeqID_3489
  Subcellular localization annotation: CTP_CleavageSite=47; ConfidenceScore=5.03e-01
MHGERNGEEGNRDADADGRPPPQPPPPSPPATGSEAKNPRDRVSFPSSSGTRPRPSCWGRIRIHRVGLSRGRSRTGGDGHETAP

SEQ ID NO: 69464 - protein, 127 aa, Setaria italica
  Transcript Sequence Number=SeqID_3490
  Subcellular localization annotation: CTP_CleavageSite=87; ConfidenceScore=5.57e-01
WRGRTGTKPKTKLKKRNRTLPTATAPSFPARHGSEAKNPRDRVSFPSSSGTRPRPSCWGRIRIHRVGLSRGRSRTGGDGHETAPAVRAVVSSLICAGDRGRGRRGKADVAAAAAGARSLLQRNDFYC

SEQ ID NO: 69465 - protein, 94 aa, Setaria italica
  Transcript Sequence Number=SeqID_3491
  Gene Ontology: Mol. function=sodium:dicarboxylate symporter activity; Cellular component=membrane
  Homolog annotation: Hit_ID=UPI0001A7B14A; Match level="QueryCoverage =95%, HitCoverage=11%, E-value=3e-21, Identity=54%"; Hit description =aminopeptidase
QEVKEVIIAYYILMENGKATSDDLDLQCEELIQEEFGLQCNFEVMDAVQKLERLGITTRDSIGRICCVPLKRANEIIGATTEELVMKARQSLRG

SEQ ID NO: 69466 - protein, 85 aa, Setaria italica
  Transcript Sequence Number=SeqID_3492
FTMPGSKLPLAVLLLAAIALLLSPSPAGGRRHERRLRRRRQGGHHPRPWDKGGRRRYWCCSYQQVAAAPPGGGGGAGVRQPAGGG

SEQ ID NO: 69467 - protein, 89 aa, Setaria italica
  Transcript Sequence Number=SeqID_3493
MEQPAAQKDEDGLLGYAVMEDVAVGDLDLMEELFMAAPGFDFSDFSQPGPGASPGACFSPLFDICSTTTTATPPAPPGDDDRDDTERPE

SEQ ID NO: 69468 - protein, 111 aa, Setaria italica
  Transcript Sequence Number=SeqID_3494
  Gene Ontology: Mol. function=transporter activity; Cellular component= mitochondrial inner membrane; Biological process=transport
  Homolog annotation: Hit_ID=B4FIJ0; Match level="QueryCoverage=100%, HitCoverage=33%, E-value=1e-57, Identity=96%"; Hit description =Mitochondrial deoxynucleotide carrier
  Pfam annotation: Domain name=Mito_carr; Domain location=12-111; Score= 95.2; E_value=2.3e-25; Accession=PF00153.19; Description =Mitochondrial carrier protein
MGSAEEPSQMRRALVDSLAGAISGGISRTVTSPLDVIKIRFQVQLEPTTSWGVLQRDVYGPSKYTGLLQATKDILREEGLPGFWRGNVPALLMYMPYTAIQFTVLHKLKTF

SEQ ID NO: 69469 - protein, 140 aa, Setaria italica
  Transcript Sequence Number=SeqID_3495
  Gene Ontology: Mol. function=transporter activity; Cellular component= mitochondrial inner membrane; Biological process=transport
  Homolog annotation: Hit_ID=B4FIJ0; Match level="QueryCoverage=92%, HitCoverage=38%, E-value=2e-60, Identity=85%"; Hit description =Mitochondrial deoxynucleotide carrier
  Pfam annotation: Domain name=Mito_carr; Domain location=38-139; Score= 111.7; E_value=2.5e-30; Accession=PF00153.19; Description =Mitochondrial carrier protein
IILATQVNDVNIYICSMSSSNRYRYSHLNLGSEDDSVSSFQLFLCGFAAGTFSKAACHPLDVVKKRFQIEGLKRHPRYGARIESSTYKGMYHALKEIVAKEGFGGLYKGLFPSLVKSAPAGAVTFVAYEYISDWLESILM

SEQ ID NO: 69470 - protein, 267 aa, Setaria italica
  misc_feature (38)..(38): Xaa can be any naturally occurring amino acid
  Transcript Sequence Number=SeqID_3496
  Gene Ontology: Mol. function=transporter activity; Cellular component= mitochondrial inner membrane; Biological process=transport
  Homolog annotation: Hit_ID=B4FIJ0; Match level="QueryCoverage=96%, HitCoverage=76%, E-value=1e-139, Identity=93%"; Hit description =Mitochondrial deoxynucleotide carrier
  Pfam annotation: Domain name=Mito_carr; Domain location=163-264; Score=109.0; E_value=1.6e-29; Accession=PF00153.19; Description =Mitochondrial carrier protein
  Pfam annotation: Domain name=Mito_carr; Domain location=56-146; Score= 97.4; E_value=4.8e-26; Accession=PF00153.19; Description =Mitochondrial carrier protein
  Pfam module annotation: Pfam domain module=Mito_carr::Mito_carr; Domain location=163-264::56-146
MFLLCKIVKIQGFWRGNVPALLMYMPYTAIQFTVLHKXLKTFASGSSRTEDHLHLSPYLSYVSGALAGCAATIGSYPFDLLRTILASQGEPKVYPNMRSAFVDIIKTRGFQGLYSGLSPTLVEIIPYAGLQFGSYDSFKRSMMTWNRYRYSHLNLGSEDDSVSSFQLFLCGFAAGTFSKAACHPLDVVKKRFQIEGLKRHPRYGARIESSTYKGMYHALKEIVAKEGFGGLYKGLFPSLVKSAPAGAVTFVAYEYISDWIGSTAGVE

SEQ ID NO: 69471 - protein, 94 aa, Setaria italica
  Transcript Sequence Number=SeqID_3497
  Gene Ontology: Mol. function=zinc ion binding; Cellular component =intracellular
  Homolog annotation: Hit_ID=A4Q7P3; Match level="QueryCoverage=97%, HitCoverage=10%, E-value=9e-14, Identity=47%"; Hit description=AT -rich interaction region; Zinc finger, FYVE/PHD-type
  Subcellular localization annotation: CTP_CleavageSite=20; ConfidenceScore=5.08e-01
MSQIQSTSRHNSVLLAVLCRKFAEKQQTPARLAPEPKRVRRSYPFPELVSSGRLEVHTLINPSVEQFREAQQAVQPNLLYLQGQQLENEEIGSL

SEQ ID NO: 69472 - protein, 555 aa, Setaria italica
  misc_feature (42)..(42): Xaa can be any naturally occurring amino acid
  Transcript Sequence Number=SeqID_3498
  Gene Ontology: Mol. function=protein phosphatase type 2A regulator activity; Cellular component=protein phosphatase type 2A complex; Biological process=signal transduction
  Homolog annotation: Hit_ID=Q32SG1; Match level="QueryCoverage=92%, HitCoverage=99%, E-value=0.0, Identity=66%"; Hit description=Protein phosphatase 2A regulatory subunit B'
  Pfam annotation: Domain name=B56; Domain location=121-534; Score =778.2; E_value=5.8e-231; Accession=PF01603.12; Description=Protein phosphatase 2A regulatory B subunit (B56 family)
DLVCGSSSCFHGRGKERLLPFLPGGSESPIRVDLGGVSCSGXGSMMKQIFGRRKASKSADKESIGGRRHAVSNQQSGSGVADQSGQQPILSSTGHACGSGNRMGFQESRINDGLFSSHFRPLPSIKDMPNAEKQNLLIVKLNMCCTQFDFTDPTRNMREKKIKGETMMDILDYVKTANTKFPEIVVEGITKMISENLFRTLVIPPREKKVLQAFDLEEDEPLMDPAWPHLHIVYELLLNFVQSPETDAKLAKRYVDHSFILRLLELFDSEDLRERDYLKTVLHRIYGKFMVYRPFIRKAINNVFYQFIYETEKHNGIAELLEILGSIINGFALPLKEEHKLFLVRTLIPLHKPRCISMYHRQLSYCITQFVEKDEKLADTIIRGIIKCWPVTNSPKEVLFLGELEEILEATQPSEFQKCMVPIFSQVARCFNSSHFQVAERALFLWNNDRVYNLISQNSKVILPIILPALEKNINGHWNLAVRSLSLNVQKLFSEREAELFAECMLTYEEDKVREEARKLKQEAAWKRLDEIASDKVTSGEAVLISPTLPRQPSV

SEQ ID NO: 69473 - protein, 84 aa, Setaria italica
  Transcript Sequence Number=SeqID_3499
LGHGKFGSKGTISSVKEISLACNIGNSISLMKVYYKLIDSVKIEERLSLVGQTSCRDYQLFPLALILLVFLVVYNPLLSLCSLT

SEQ ID NO: 69474 - protein, 57 aa, Setaria italica
  Transcript Sequence Number=SeqID_3500
NLSSTNRFLLSSVGCYSYDAHVALGSRHHTTTPSFLFFKVQARTALMRRKKLQSLYY

SEQ ID NO: 69475 - protein, 90 aa, Setaria italica
  Transcript Sequence Number=SeqID_3501
PEPEPEPEPDPEPDPEPEPEPLPPKPIPTPTPSPRPRPPPDPDPEPEPDPDPEPDPELPEPDEDAEPEPEPEPPAPTPIPIPIPRPFPRL

SEQ ID NO: 69476 - protein, 83 aa, Setaria italica
  Transcript Sequence Number=SeqID_3502
RKLLREGSQKPSPFIHSSFVFAIQIVKTVYMYCSLKICQFNKYGSRLGCNVTVSTFHNSSIKLVARAMDNVNYTKLVICSKRQ

SEQ ID NO: 69477 - protein, 199 aa, Setaria italica
  misc_feature (148)..(148): Xaa can be any naturally occurring amino acid
  misc_feature (179)..(179): Xaa can be any naturally occurring amino acid
  Transcript Sequence Number=SeqID_3503
  Gene Ontology: Mol. function=voltage-gated potassium channel activity; Cellular component=voltage-gated potassium channel complex; Biological process=potassium ion transport
  Homolog annotation: Hit_ID=B6TDA2; Match level="QueryCoverage=95%, HitCoverage=39%, E-value=9e-75, Identity=73%"; Hit description =Protein binding protein
  Subcellular localization annotation: CTP_CleavageSite=61; ConfidenceScore=5.77e-01
APAAAAAVPKVLSWPGSPSATVLSIATTGAPSAPWLFASFESVRRNSSAMVAFDLNSFSPVAEIGRKEVFGADVEAAIPATKLGWLGEHNLLLAAGSHSSPGGVVGDIRLWDIRASATVPVWEVREKEDCFADVAASDTLSALFKVGXASGEVFMADLRRLGNGGGIGLEPWVCIGNGXRAAAAASSRRKEGNGCKIEC

SEQ ID NO: 69478 - protein, 189 aa, Setaria italica
  Transcript Sequence Number=SeqID_3504
  Gene Ontology: Mol. function=nuclease activity; Cellular component =intracellular; Biological process=DNA repair
  Homolog annotation: Hit_ID=O81990; Match level="QueryCoverage=93%, HitCoverage=31%, E-value=3e-64, Identity=75%"; Hit description =Putative transcription repressor HOTR
TNRPDKGGVQRYRIRNLPDNFPGIYELGVAGASDEGVRSRRRDSRGAVVVYLGQADSVRARLQQYGRSGSHLDTGNSLGSAGKAEVNALAAGPGLFREVFSRGYSVVFRCAQMDNKQEAEKTEAQLLRIFDYAWNKLQNGACRCEEILLKLEQGATSRRSSLLSRVCHSKQDIFGVKAGIKIKGSGSVN

SEQ ID NO: 69479 - protein, 136 aa, Setaria italica
  Transcript Sequence Number=SeqID_3505
  Homolog annotation: Hit_ID=A2T1U2; Match level="QueryCoverage=99%, HitCoverage=51%, E-value=3e-54, Identity=74%"; Hit description=OR -LDel
VLELKLGLGGTSYEDFIRTLHLPLQLSQVDPIVASFSGGAVGVISALMLVEVRNVRQQEKKRCTYCHGTGYLPCARCSASGMLLSTKPFSLSGNNMRSMNGRCQSCSGAGKVMCPTCLCTGMAMASEHDPRIDPFD

SEQ ID NO: 69480 - protein, 41 aa, Setaria italica
  Transcript Sequence Number=SeqID_3506
FNHINLLQPPPSIDRFRHRPSQRMSRSIRATMGCIAFAIAW

SEQ ID NO: 69481 - protein, 140 aa, Setaria italica
  Transcript Sequence Number=SeqID_3507
  Gene Ontology: Mol. function=thiamin-phosphate diphosphorylase activity; Biological process=thiamin biosynthetic process
  Homolog annotation: Hit_ID=Q2UVH9; Match level="QueryCoverage=100%, HitCoverage=25%, E-value=2e-70, Identity=90%"; Hit description =Phosphomethylpyrimidine kinase/thiamin-phosphate pyrophosphorylase
  Pfam annotation: Domain name=TMP-TENI; Domain location=21-140; Score =115.7; E_value=1.5e-31; Accession=PF02581.9; Description=Thiamine monophosphate synthaseTENI
LKSPLYKMGSLHKFNPDDLFLYAVTDSGMNKKWGRSIKDAVKAAIEGGATIVQLREKDADTREFLEAAKACVEICRSSGVPILINDRIDVALACNADGVHVGQSDMPAWEVRELLGPGKIIGVSCKTPAQAKQAWKDGAD

SEQ ID NO: 69482 - protein, 39 aa, Setaria italica
  Transcript Sequence Number=SeqID_3508
GSDQHFQCFDNVFCNLFLHHIAVLPCQCQQYIVLQSFNM

SEQ ID NO: 69483 - protein, 199 aa, Setaria italica
  Transcript Sequence Number=SeqID_3509
  Gene Ontology: Cellular component=plasma membrane
  Homolog annotation: Hit_ID=B6T5L9; Match level="QueryCoverage=100%, HitCoverage=100%, E-value=3e-99, Identity=88%"; Hit description =Fiber protein Fb34
  Pfam annotation: Domain name=DUF1218; Domain location=65-160; Score =124.5; E_value=3.3e-34; Accession=PF06749.4; Description=Protein of unknown function (DUF1218)
MGGFATSRPASIGFCAFICFLNLFAFLLAVGAERRRSTGKVVPDEYDDRSYCLYDSDASTVYGVSAFFVLLLQQAIVTAATRCLCFGPALSSRCCAVAAFVLSWTTFLVAEACLIGGSVRNAKHTKYLGYYMKHDLVSCATLRKGVFAAAAAMMIINLVASLVYYWSYSKAATGGFMKHQNEVGVGMTDYGLDKGVPGP

SEQ ID NO: 69484 - protein, 95 aa, Setaria italica
  Transcript Sequence Number=SeqID_3510
  Gene Ontology: Mol. function=nucleic acid binding
  Homolog annotation: Hit_ID=Q60DM2; Match level="QueryCoverage=95%, HitCoverage=11%, E-value=2e-23, Identity=57%"; Hit description=F-box domain containing protein
QPSPHYEVFLIPVVLCWADLDPVAQESEWPPPLLETHVFSSRTGRWEERSFVREGEAAGTMAEMQLARATQKRNGVYGRGALYVHCQSDFFCRIS

SEQ ID NO: 69485 - protein, 406 aa, Setaria italica
  misc_feature (107)..(107): Xaa can be any naturally occurring amino acid
  Transcript Sequence Number=SeqID_3511
  Gene Ontology: Mol. function=sugar:hydrogen symporter activity; Cellular component=integral to membrane; Biological process =carbohydrate transport
  Homolog annotation: Hit_ID=Q7X7C4; Match level="QueryCoverage=99%, HitCoverage=99%, E-value=0.0, Identity=87%"; Hit description =OSJNBa0076N16.10 protein
  Pfam annotation: Domain name=Nuc_sug_transp; Domain location=106-342; Score=25.6; E_value=6.6e-15; Accession=PF04142.7; Description =Nucleotide-sugar transporter
MQRNGVVECSVCRNRMVAPSPRSVSRAYDKHRNKMSSKFRALNVFLVVGDCILVGLQPILVFMSKVDGKFQFSPISVNFLTEVMKVIFAVVMLIIQSRKQKVGEKPXLLSRSTLIQAARNNVLLAVPALLYAINNYLKFIMQLYFNPATVKMLSNLKVLVIAVLLKFIMRRKFSVIQWEALALLLIGISINQLRTVPVGNTTFGLPVTAIAYIYTLVFVTVPSMASVYNEYALKSQYDTSIYLQNLFLYGYGAIFNFLGILGTALFQGPESFNILRGHSRATMFLICNNAAQGILSSFFFKYADTILKKYSSTVATIFTGLASAAFLGHTLTINFLLGISVVFISMHQFFSPLAKIKDDKPADLLELEDTQNHRSSESSFVNMTAGAADDASHRIGTDERQPLLPT

SEQ ID NO: 69486 - protein, 146 aa, Setaria italica
  Transcript Sequence Number=SeqID_3512
  Gene Ontology: Cellular component=intracellular; Biological process =RNA processing
MEQHQTVAAGVDSGSAEPGAAAFDLTTANPEANAYGHNPPAVTGGSAVTPDGGAQAADGSAYPAEHAALNGTAGEMANYQSTENGAAVTNEMGEPVPEPSYEEAAVSAEEARLWSVVTANSLDFNAWTTLIDETEKNAESNYFEDT

SEQ ID NO: 69487 - protein, 90 aa, Setaria italica
  Transcript Sequence Number=SeqID_3513
  Gene Ontology: Mol. function=cysteine-type endopeptidase activity; Cellular component=endoplasmic reticulum lumen; Biological process =proteolysis
  Homolog annotation: Hit_ID=B4ESF2; Match level="QueryCoverage=68%, HitCoverage=16%, E-value=6e-22, Identity=79%"; Hit description =Papain-like cysteine proteinase
  Pfam annotation: Domain name=Inhibitor_I29; Domain location=45-90; Score=5.8; E_value=0.0089; Accession=PF08246.4; Description =Cathepsin propeptide inhibitor domain (
MARAPAAAALLAAAVLLLASAPAPASAVDFGAEDLASEDALWALYERWRGVHAVARDLGDKARRFNVFRENARLVHDFNQRDEPYKLRLN

SEQ ID NO: 69488 - protein, 363 aa, Setaria italica
  misc_feature (312)..(312): Xaa can be any naturally occurring amino acid
  Transcript Sequence Number=SeqID_3514
  Gene Ontology: Mol. function=cysteine-type endopeptidase activity; Cellular component=endoplasmic reticulum lumen; Biological process =proteolysis
  Homolog annotation: Hit_ID=B6TLR1; Match level="QueryCoverage=88%, HitCoverage=84%, E-value=1e-152, Identity=81%"; Hit description =Vignain
  Pfam annotation: Domain name=Inhibitor_I29; Domain location=41-96; Score=51.4; E_value=3.6e-12; Accession=PF08246.4; Description =Cathepsin propeptide inhibitor domain (
  Pfam annotation: Domain name=Peptidase_C1; Domain location=128-343; Score=451.2; E_value=1.6e-132; Accession=PF00112.15; Description =Papain family cysteine protease
  Pfam module annotation: Pfam domain module=Inhibitor_I29::Peptidase _C1; Domain location=41-96::128-343
PSRVRSPLLSLPPLASAPAPASAVDFGAEDLASEDALWALYERWRGVHALARDLGDKARRFNVFRENARLVHDFNQRDEPYKLRLNRFADMTADEFRRHYAGSRVAHHRMFRGDRRQGGFMYAGARDLPASVDWRQKGAVTDVKDQGQCGSCWAFSTIAAVEGINAIKTKNLTSLSEQQLVDCDTKANAGCNGGLMDYAFQYIAKHGGVAGEDAYPYKARQASCKKSPSPIVTIDGYEDVPANDESALRKAVAHQPVSVAIEASGSHFQFYSEGVFAGKCGTELDHGVAAVGYGVAADGTKYWVVKNSWGPXEWGEKGYIRMARDVDAKEGLCGIAMEASYPVKTSPNPKAVVAAAGDEHDEL

SEQ ID NO: 69489 - protein, 207 aa, Setaria italica
  misc_feature (73)..(73): Xaa can be any naturally occurring amino acid
  Transcript Sequence Number=SeqID_3515
  Gene Ontology: Mol. function=metal ion binding; Cellular component =integral to membrane
  Homolog annotation: Hit_ID=B9TA62; Match level="QueryCoverage=89%, HitCoverage=39%, E-value=8e-39, Identity=43%"; Hit description=Zinc finger protein, putative
LNNCIGRRNYATFILLMFFVLLMLVIEGGTAIVIFVRCFVDSKGVKLEMEHRLHIRLPKGAHATLSMAFVIFXTLYSTAALGQLFFFHMVLIKKGMRTYDYILAMREAGTAFDSFEDSDSDESIDFDSPEKPSFLSRVFCRKDDGDESTRKLSIRIESDKMDAPGRKDDIQINPWALIKMSKDKAMAAAERARERIRQKLPTSPMKP

SEQ ID NO: 69490 - protein, 420 aa, Setaria italica
  Transcript Sequence Number=SeqID_3516
  Gene Ontology: Mol. function=nucleic acid binding
  Homolog annotation: Hit_ID=B6SPC3; Match level="QueryCoverage=93%, HitCoverage=69%, E-value=1e-167, Identity=74%"; Hit description =Calmodulin binding protein
  Pfam annotation: Domain name=IQ; Domain location=61-81; Score=17.3; E_ value=0.065; Accession=PF00612.19; Description=IQ calmodulin-binding motif
  Subcellular localization annotation: CTP_CleavageSite=40; ConfidenceScore=5.10e-01
APPQYPESAAPAGRGGSGINGARPGTLALQPAPQQQSPRRAASPAQAMIEYISPRPRVELDEAATKLQKIYKGHRTRRSLADGAIIAEELWWKTYDSVYLNIKSISFFDGGKQETAASRWSRAGKRIAKVGKGLSKDEKAQKLALQHWLEAIDPRHRYGHNLHLYYDIWSASSSCEPFFYWLDIGAGRDQHHPKCPRSKLYSQLIMYLGPNERAAYEVIVEGGRLLYKQSGELVNTNEESKWIFVLSTSRSLYVGQKRKGRFQHSSFLSGAATTAAGRLVAKEGVLRAIWPYSGHYHPTEENFREFIAFLEENSVDLANVKRCSVDDDEYPSFKKAPEEAEAPTAEAAAHGETVETDQPVELPEVDIVKEEVAAEMAVGGGEEEDAAEPEMMARRPSFKWSTPTGARIGCLPYREATRTE

SEQ ID NO: 69491 - protein, 96 aa, Setaria italica
  Transcript Sequence Number=SeqID_3517
  Gene Ontology: Mol. function=transporter activity; Cellular component= membrane; Biological process=oligopeptide transport
  Homolog annotation: Hit_ID=Q336M5; Match level="QueryCoverage=94%, HitCoverage=18%, E-value=6e-14, Identity=42%"; Hit description=POT family protein, expressed
  Subcellular localization annotation: CTP_CleavageSite=41; ConfidenceScore=5.11e-01
VGQLEFFYDQAPETMRAASTAFYFLSLSVGSLLSSQVVTLVASVTSAGGRKGWFPADMDEGHLDYYFLLIVGIAALNFAVFVYLAKNYTPKTKRVR

SEQ ID NO: 69492 - protein, 82 aa, Setaria italica
  Transcript Sequence Number=SeqID_3518
  Gene Ontology: Mol. function=Rab GTPase activator activity; Cellular component=intracellular; Biological process=regulation of Rab GTPase activity
  Homolog annotation: Hit_ID=B6UDP4; Match level="QueryCoverage=81%, HitCoverage=15%, E-value=2e-29, Identity=94%"; Hit description=TBC1 domain family member 22A
  Subcellular localization annotation: CTP_CleavageSite=31; ConfidenceScore=5.35e-01
MSGSGGGVGGGAGGSPNNKEWRFNQTLRNVQGMLKGRSFPGKVLLTRRSEPLSPPDYSPRFENEHDEDERKEGSQEGEGQAS

SEQ ID NO: 69493 - protein, 433 aa, Setaria italica
  misc_feature (150)..(150): Xaa can be any naturally occurring amino acid
  Transcript Sequence Number=SeqID_3519
  Gene Ontology: Mol. function=Rab GTPase activator activity; Cellular component=intracellular; Biological process=regulation of Rab GTPase activity
  Homolog annotation: Hit_ID=B6UDP4; Match level="QueryCoverage=98%, HitCoverage=96%, E-value=0.0, Identity=87%"; Hit description=TBC1 domain family member 22A
  Pfam annotation: Domain name=TBC; Domain location=130-387; Score= -11.3; E_value=9.5e-07; Accession=PF00566.10; Description=TBC domain
MFLYHYKRFLVVLPHSVRMLKGRSFPGKVLLTRRSEPLSPPDYSPRFENEHDEDERKEGSQEGEGQASGNSFDNASAKKSNPLSTSSSNSLPDAQGLVSGARATDSARIDKFTKELSRPAVILDKLRELSWSGVPPYMRPNVWRLLLASXGYAPPNKDRREGVLTRKRLEYVECVSQYYDIPDSERSDEEITMLRQIAVDCPRTVPDVTFFQNPQIQKSLERILYTWAIRHPASGYVQGINDLVTPFLIVFLSEHLEGNMDGWSMDNLSAQDISNIEADCYWCLSKFLDGMQDHYTFAQPGIQRLVFRLKELVRRIDEPVSKHIEEQGLEFLQFAFRWFNCLLIREIPFHLVTRLWDTYLAEGDYLPDFLVYISASFLLTWSDKLQKLDFQEMVMFLQHLPTRTWAHHELEMVLSRAFMWHTMFKSSPSHLAG

SEQ ID NO: 69494 - protein, 190 aa, Setaria italica
  misc_feature (165)..(165): Xaa can be any naturally occurring amino acid
  misc_feature (173)..(173): Xaa can be any naturally occurring amino acid
  misc_feature (185)..(185): Xaa can be any naturally occurring amino acid
  Transcript Sequence Number=SeqID_3520
  Gene Ontology: Mol. function=phospho-N-acetylmuramoyl-pentapeptide -transferase activity; Cellular component=integral to membrane; Biological process=dolichol biosynthetic process
  Homolog annotation: Hit_ID=B6ST77; Match level="QueryCoverage=90%, HitCoverage=40%, E-value=1e-67, Identity=77%"; Hit description=UDP-N- acetylglucosamine--dolichyl-phosphate N-acetylglucosaminephosphotransf erase
  Pfam annotation: Domain name=Glycos_transf_4; Domain location=19-179; Score=146.2; E_value=1e-40; Accession=PF00953.13; Description =Glycosyl transferase
AIIFQQFHFTEDSIWLVEYNAALASVCFMILLGFVDDVLDIPWRVKLALPTIAALPLLMAYAGGTSIIIPKPLTPYVGLTVLELGVFYKLFMLLLAVFCTNSINIHAGINGLEVGQTVVISAAVLIHNVMRIGSSTDIETQQAHEFSIYLVLPFLTTSLALLAFXNGYPSIVXLLVIPTPISLEXWLWLW

SEQ ID NO: 69495 - protein, 246 aa, Setaria italica
  misc_feature (144)..(144): Xaa can be any naturally occurring amino acid
  Transcript Sequence Number=SeqID_3521
  Gene Ontology: Mol. function=binding; Cellular component=chloroplast; Biological process=regulation of transcription, DNA-dependent
  Homolog annotation: Hit_ID=Q852B8; Match level="QueryCoverage=100%, HitCoverage=28%, E-value=1e-123, Identity=89%"; Hit description =Pentatricopeptide, putative, expressed
  Pfam annotation: Domain name=PPR; Domain location=169-203; Score =24.2; E_value=0.00055; Accession=PF01535.12; Description=PPR repeat
  Pfam annotation: Domain name=PPR; Domain location=204-238; Score =28.4; E_value=3e-05; Accession=PF01535.12; Description=PPR repeat
  Pfam annotation: Domain name=PPR; Domain location=93-127; Score=37.2; E_value=6.7e-08; Accession=PF01535.12; Description=PPR repeat
  Pfam module annotation: Pfam domain module=PPR::PPR::PPR; Domain location=169-203::204-238::93-127
KLPPRGSIARCLETARHRLTLQDFAAVYREFSRRGDWQRSLRLFKYMQRQSWCRPDEHIHAIVIGVLGRQGPALLDKCLEVFHDLPAESRTALSYTSLIAAYARNALHEEARALLDQMKAAGVAPTAATYNTVLAACARATDPXPFDMLLGLFAEMRHDVSPSVRPDLTTYNTLLAAAAVRSLADQSEMLLRTMLEAGVSPDTVSYRHIVDAFASAGNLSRVAELFSEMMATGHTPDASAYLGLME

SEQ ID NO: 69496 - protein, 53 aa, Setaria italica
  Transcript Sequence Number=SeqID_3522
  Subcellular localization annotation: CTP_CleavageSite=21; ConfidenceScore=5.20e-01
MLGVGLGVRLLGAAAPAHPVPAPPGKVPLPLSSLRRRCSSWWFSNGNAHERDS

SEQ ID NO: 69497 - protein, 72 aa, Setaria italica
  Transcript Sequence Number=SeqID_3523
PKLTYVLNILQRRHETEFPFASFKELSKTFPVLPYSLIVHKLESRVVWSFEGEVGEQLLCAGCTRIPPFLFA

SEQ ID NO: 69498 - protein, 130 aa, Setaria italica
  Transcript Sequence Number=SeqID_3524
  Subcellular localization annotation: CTP_CleavageSite=26; ConfidenceScore=5.07e-01
KKTSAAYGCRLPSISPPPTAPLVWCRGSLVVVHIHWGSAPCSPSYTTAGCYITRSHRRPLSRSGRVPMSSRRRRGSQPRPLQAPHLHGEGNLPRPGARTIARGRATFCRRATTASSEIELHNSRYFVTGC

SEQ ID NO: 69499 - protein, 136 aa, Setaria italica
  Transcript Sequence Number=SeqID_3525
FKCSYYVQLVNQVLVLNCAELHLCKIQDYNQYDKCLTCFCFISSFCTHIFVNFKLVWIITGSVYVPDCYTNLKHAIDMVFNSLKEDADFYKVCAFREAGKGYLGKQFVCLKAGWSLEGTQMEQKGQRWKCSTSRII

SEQ ID NO: 69500 - protein, 68 aa, Setaria italica
  Transcript Sequence Number=SeqID_3526
SITLHWDACMIQRQKGARRDDQGNRTKQENVFVLFLFYFSSNFIIDSSTRDIRSIHTENWNFFFSLNG

SEQ ID NO: 69501 - protein, 126 aa, Setaria italica
  Transcript Sequence Number=SeqID_3527
  Gene Ontology: Mol. function=transferase activity, transferring glycosyl groups; Biological process=metabolic process
  Homolog annotation: Hit_ID=B6SUB6; Match level="QueryCoverage=100%, HitCoverage=26%, E-value=2e-59, Identity=87%"; Hit description =Anthocyanidin 5,3-O-glucosyltransferase
SHGVIVNTFRQLERRAVEAVVAGRCTPPELPTPPVHCIGPLIKSEEVLGNGGEECLAWLDAQPKASVVFLCFGSIGRFSAEQIREVAAGLEASGQRFLWVVRAPPSDDPAKKFDRPPEPDLGALLP

SEQ ID NO: 69502 - protein, 1126 aa, Setaria italica
  Transcript Sequence Number=SeqID_3528
  Gene Ontology: Mol. function=metal ion binding
  Homolog annotation: Hit_ID=B9SLY6; Match level="QueryCoverage=98%, HitCoverage=90%, E-value=0.0, Identity=54%"; Hit description=Zinc finger protein, putative
  Pfam annotation: Domain name=Hemerythrin; Domain location=189-251; Score=32.4; E_value=1.9e-06; Accession=PF01814.15; Description =Hemerythrin
  Pfam annotation: Domain name=Hemerythrin; Domain location=254-320; Score=20.8; E_value=0.0057; Accession=PF01814.15; Description =Hemerythrin
  Pfam annotation: Domain name=Hemerythrin; Domain location=537-598; Score=33.2; E_value=1.1e-06; Accession=PF01814.15; Description =Hemerythrin
  Pfam annotation: Domain name=Hemerythrin; Domain location=608-699; Score=24.9; E_value=0.00032; Accession=PF01814.15; Description =Hemerythrin
  Pfam annotation: Domain name=Hemerythrin; Domain location=7-68; Score= 32.0; E_value=2.3e-06; Accession=PF01814.15; Description=Hemerythrin
  Pfam annotation: Domain name=zf-C3HC4; Domain location=1009-1050; Score=16.7; E_value=0.0012; Accession=PF00097.17; Description=Zinc finger, C3HC4 type (RING finger)
  Pfam annotation: Domain name=zf-CHY; Domain location=880-957; Score =155.2; E_value=2e-43; Accession=PF05495.4; Description=CHY zinc finger
  Pfam annotation: Domain name=zf-MIZ; Domain location=1005-1053; Score= -8.4; E_value=0.018; Accession=PF02891.12; Description=MIZ zinc finger
  Pfam module annotation: Pfam domain module=Hemerythrin::Hemerythrin::H emerythrin::Hemerythrin::Hemerythrin::zf-C3HC4::zf-CHY::zf-MIZ; Domain location=189-251::254-320::537-598::608-699::7-68::1009 -1050::880-957::1005-1053
DIRVKNVAGTYSLEHKGESDLFRQLFALLQLDIQNDDGLRRELASCTGAIETCLSQHMSKEEEQVFPLLTKKFSCEEQADLVWQFLCSIPVNMMAEFLPWLSTSVSPDEHQDIRNCLCKVVPDEKLLQQVIFTWIEGKAAKEVAESFGDGNSAEDVPDQGEKHICSHQGSKLGSTNCAESNDGQVYRHPIDDILHWHNAIRKDLHDIAEETRRVQQSGDFSDISAFNEMLQFIADVCIYHSIAEDQVIFPAVDSELSFVQEHAEEERRFNNFRCLIQQMQIAGAKSTAVDFCSKLCSHADEILETIEKHFCNEETKVLPQARMLFSPEKQRELSYKSLCVMPLKLLERVLPWLVSKLSDEQASSFLQNISLAASPSETALVTLFSGWACKARDKSNSGEYLCSTSGTVRCLLDDIDNLGKCRSFCPCASRNSPDLPVRIQTENGSRPGKRGKDESFPGANGIYCSQTADIEASPCSKKPCCIPGLRVECSNLGIGPLASAKSFRSLSYNFTAPSLYSSLFSWENDASLSCSDGISRPIDTIFKFHKAIRKDLEYLDVESGKLIDGDESCLRQFIGRFRLLWGLYRAHSNAEDEIVFPALESRETLHNVSHSYTLDHQQEEQLFEDISGVLFELSHLYDSKSHAHTEVNEVERNCSDSSNLVDWTRKYNELATKLQGMCKSIRVALTNHVHREELELWPLFDKHFSVEEQDKLVGRIIGSTGAEVLQSMLPWVTSALSQEEQNKMLDMWKQATKNTMFGEWLNEWWKGAPTSSDSPAEASSAPDSHSQDKLEQNDQMFKPGWKDIFRMNQSELEAEVRKVSRDPTLDPRRKAYLIQNLMTSRWIAAQQKMPEPNSEECTDGASIPGCVPSYRDEEKQIYGCEHYKRNCKLVAACCNKLFTCRFCHDKVSDHTMERKATQEMMCMVCLKIQPVGPICQTPSCNGLSMAKYYCNICKFFDDERTVYHCPFCNLCRLGKGLGVDFFHCMKCNCCLGMKLAEHKCREKGLETNCPICCDFLFTSSAAVRALPCGHFMHSACFQAYTCSHYTCPICCKSLGDMAVYFGMLDALLAAEELPEEYRDRCQDILCNDCEKKGRCRFHWLYHKCSSCGSYNTRVIKTDTADCSTPN

SEQ ID NO: 69503 - protein, 85 aa, Setaria italica
  misc_feature (4)..(4): Xaa can be any naturally occurring amino acid
  Transcript Sequence Number=SeqID_3529
GCAXAHDLREEEVVRDGGGRRERPSSRHRCPPRAREGSSTRRPRAAGRRLRRSSSPRGRVAPATPPCTRTLTAHRLLAIAPLHTT

SEQ ID NO: 69504 - protein, 66 aa, Setaria italica
  Transcript Sequence Number=SeqID_3530
  Gene Ontology: Mol. function=mismatched DNA binding; Biological process=mismatch repair
  Homolog annotation: Hit_ID=Q9M5L9; Match level="QueryCoverage=98%, HitCoverage=10%, E-value=1e-22, Identity=73%"; Hit description =Mismatch binding protein Mus3 (Fragment)
NDLLSPGTGLPDVSSILDRFRDAFDWSDADSNGRVIPREGCDPEYDATCNAIQEIGSSQKASIAQR

SEQ ID NO: 69505 - protein, 219 aa, Setaria italica
  Transcript Sequence Number=SeqID_3531
  Gene Ontology: Mol. function=mismatched DNA binding; Cellular component=MutSalpha complex; Biological process=mismatch repair
  Homolog annotation: Hit_ID=B9RNF5; Match level="QueryCoverage=94%, HitCoverage=16%, E-value=3e-53, Identity=49%"; Hit description=ATP binding protein, putative
CIVDVSTNKFIVGQFQDDPERHGLCSILSEMRPVEIIKPGKMLSPETEKALKNNTREPLINELLPSTEFWDAEKTIHEIKQYYSSADKQNNVNDVQDSMDCLPNLLNDLIGAGDKIYALSALGGSLFYLRQTLLDEKILLCAEFEPLACSGLINNIRKHMILDAAALENLELLENIRTGGLSGTLYAQLNHCVTGFGKRLLKRWITTFTDNDPTIAVCI

SEQ ID NO: 69506 - protein, 80 aa, Setaria italica
  Transcript Sequence Number=SeqID_3532
  Gene Ontology: Mol. function=protein binding
  Homolog annotation: Hit_ID=Q9SKA4; Match level="QueryCoverage=77%, HitCoverage=7%, E-value=1e-21, Identity=79%"; Hit description =F12K8.3 protein
MATAAADADDPSLAATLEKFRLYETRARFYVIGSSREKRWFRVLKIDRSEPSELNVSEDPVWYSLQEVKSLLQRIDEATA

SEQ ID NO: 69507 - protein, 148 aa, Setaria italica
  Transcript Sequence Number=SeqID_3533
  Homolog annotation: Hit_ID=Q6ZC71; Match level="QueryCoverage=100%, HitCoverage=36%, E-value=8e-71, Identity=81%"; Hit description=Sac domain-containing inositol phosphatase 3-like
LMERTCSSIRSVSFHCDADLKLSGGAGTSGMAPDAAEIQLKSPNWYFGQRKHTETIPTAGVVPVENANEANKDELNVSLCGELNWLSSSESCEEDIFRRYLAFTTADVENGWYGGTLIYDQDENSGAYKHYSELCQGAVMDPFEHDPE

SEQ ID NO: 69508 - protein, 282 aa, Setaria italica
  misc_feature (241)..(241): Xaa can be any naturally occurring amino acid
  misc_feature (269)..(269): Xaa can be any naturally occurring amino acid
  Transcript Sequence Number=SeqID_3534
  Gene Ontology: Mol. function=protein binding
  Homolog annotation: Hit_ID=B9S742; Match level="QueryCoverage=93%, HitCoverage=29%, E-value=1e-115, Identity=76%"; Hit description =Phosphoinositide 5-phosphatase, putative
TAVGYLNQNVPEEKKLRFIHWDFHKFAKSKSANVLGVLGKVAGEALDLTGFYYSGKPKVQKKRTTQLSRTSTARDGSLDIRASSGDLSRLSSNADALCSTGFQDMRNEANKQEPLGDAPSYQTGVLRTNCIDCLDRTNVAQYAYGLAALGRQLHAMGVTDVSKIHPDSSIASALMEMYQSMGDALAHQYGGSAAHNTVFPERQGKWKATTQSREFLKSIKRYYSNAYTDGEKQDAINLFKXREYFQPQEGKPALWELDTDYYLHVTTAXDDLTSDSYDSSCT

SEQ ID NO: 69509 - protein, 810 aa, Setaria italica
  misc_feature (439)..(439): Xaa can be any naturally occurring amino acid
  Transcript Sequence Number=SeqID_3535
  Gene Ontology: Mol. function=protein binding
  Homolog annotation: Hit_ID=B9S742; Match level="QueryCoverage=96%, HitCoverage=92%, E-value=0.0, Identity=63%"; Hit description =Phosphoinositide 5-phosphatase, putative
  Pfam annotation: Domain name=Syja_N; Domain location=54-360; Score =500.5; E_value=2.3e-147; Accession=PF02383.10; Description=SacI homology domain
KRWFRVLKIDRSEPSELNVSEDPGWYALQEVKSLLQRIDEGNRSTGGLTFVTKAYGIAGCIKFLESYYLILVTKRRQIGCICGHAIYCIDESQMITIPHSSVQTDVATSKNELRYKKLLASVDLTKDFFYSYTYPIMQSLQQNVTSAGMKEMPYENLFVWNTFLTEPIRSRCRNTLWTVALVHGHFKQVKLSFFGREINVVLISRRSRHFAGTRYLKRGVNDHGKVANDVETEQIVFEEEAGSWKGRMSAVVQMRGSIPLFWSQEASRLSPKPDIFVQRYDPTYEATKLHFDDLARRYGHPIIILNLIKTVEKRPREMMLRREYFAAVGYLNQNVPEEKKLRFIHWDFHKFAKSKSANVLGVLGKVAGEALDLTGFYYSGKPKVQKKRTTQLSRTSTARDGSLDIRASSGDLSRLSSNADALCSTGFQDMRNEANKQEXSSIASALMEMYQSMGDALAHQYGGSAAHNTVFPERQGKWKATTQSREFLKSIKRYYSNAYTDGEKQDAINLFRGYFQPQEGKPALWELDTDYYLHVTTAGDDLTSDSYDSSCTPGNNAFLGSGAALIPGSTLSPVPACKEDFSRMKLTSFEKLMERTCSSIRSVSFHCDADLKLSGGAGTSGMAPDAAEIQLKSPNWYFGQRKHTETIPTAGVVPVENANEANKDELNVSLCGELNWLSSSESCEEDIFRRYLAFTTADVENGWYGGTLIYDQDENSGAYKHYSELCQGAVMDPFEHDPEKERHYAEALSVDLDISNDARVAAEMQAALDEYQVIGSDLSIIPSCGALAEDPSQLTRWIIGDEKLRVGTAQ

SEQ ID NO: 69510 - protein, 266 aa, Setaria italica
  Transcript Sequence Number=SeqID_3536
  Homolog annotation: Hit_ID=Q7FB19; Match level="QueryCoverage=76%, HitCoverage=41%, E-value=1e-23, Identity=31%"; Hit description =OSJNBa0018M05.22 protein
  Pfam annotation: Domain name=LRR_2; Domain location=107-130; Score =17.7; E_value=0.049; Accession=PF07723.5; Description=Leucine Rich Repeat
ERAEFIETVNSIVQQHSGVGLNRFCIRCGIEKESSDHLDRWICFATAARAKTIDINLSPKGCIRRPTKGDYHFPLEALGARDGPFIQSLLLTNVSIEPYSDVCGFTKLRRLLLHSVQITGDLAGLLLNCSSLEDLELIACSGLTDLIIPHQLDKLRHLLLSNMCVQMVDFHVPGLAHFNYKGDVVPIALHGCSKLEKAIIMFKNYKVLGHAFTAIHGISAVKVLNMRAVMQEDHPWGSQVQMVTRPTCMFMSLRHLTCEIKIHTYR

SEQ ID NO: 69511 - protein, 69 aa, Setaria italica
  Transcript Sequence Number=SeqID_3537
  Subcellular localization annotation: CTP_CleavageSite=42; ConfidenceScore=5.51e-01
LLGLPPPPAAACKRPSYFKPPPQQQQQPPLPSPTAAAPQFVPAKASGGACCVGEVEAMRSCPEHECMQV

SEQ ID NO: 69512 - protein, 901 aa, Setaria italica
  misc_feature (566)..(566): Xaa can be any naturally occurring amino acid
  Transcript Sequence Number=SeqID_3538
  Gene Ontology: Mol. function=transporter activity; Cellular component= membrane; Biological process=transport
  Homolog annotation: Hit_ID=Q6JN48; Match level="QueryCoverage=100%, HitCoverage=70%, E-value=0.0, Identity=75%"; Hit description =Ethylene insensitive 2
  Pfam annotation: Domain name=DUF606; Domain location=243-341; Score= -60.9; E_value=0.059; Accession=PF04657.5; Description=Protein of unknown function, DUF606
  Pfam annotation: Domain name=Nramp; Domain location=44-395; Score= -42.1; E_value=1.7e-12; Accession=PF01566.10; Description=Natural resistance-associated macrophage protein
  Pfam module annotation: Pfam domain module=DUF606::Nramp; Domain location=243-341::44-395
MDVTEVQQGMRSMDARGGAPNLFHALGPALLISMGYIDLGKWVAAVEAGSRFGFDLVLLALIFNFTAIVCQYLAACIGTVTGKNLAEICHQEYSKPTCVFLGIQAGLSLLTSELTMIFGIALGFNLLFEYDDLVTGVCFAMVVPNLLPYAISHLGKKMAGTVNACIAGFALLCYVLGLLVSQPQIPLTMNVMFPKLSGESAYSLMALLGANVMAHNFYIHSSVVQGQKRSSAVGLGALFHDHLFSILFIFTGIFLVNYVLMNSAAAESTNTLLLTFQDVVELMNQIFVNPLAPTIFLVVLLFSSHIITLTSVIGSQVISQHLFGVNIPLSGHHLILKGFAIVPTLYWAKVAGAEGIYQLLIICQIIQAMLLPSSVIPLFRVASSRSIMGAHRVSLHLEILAFLAFLLMLFSNIIFVAEMLFGDSGWMNNLKGYTGSPVVLPYSVFILVACISVAFMLYLAVTPLKSGSNEAESQEWSVHSQRELLCTQGREEAKADNVSYEEDQRSDVDPSPRDLVDNYPQSAMEYADTSDTAVESDHDSQQSTAFASTIPETCPSPSFTPEESKXSVVAVNWPEPLEKLSTSTVIEESTVESVDSRSTTERDVLVETDVLADKYKEDLNVLESEKSVVGSTPSCVSDDGPPSLTFRGKGSDAGNGNGSLSRLSGLGRAARRQLAAILDEFWGHLFDYHGKLTQEASTKKFDILLGLDLRAPSSAARTDKQAIEIPKSPMVRDTMRGPAFMPSSVDLMSPKNEMSNLELTYGLQRGTSMGSSTWSQGMQLPNTQLQSSSNSLLEQSARLNSNFGAPSYSDNNQFYQPATIHGYQLTSYLKQMNANRNPYSSMPLDPQRLPKSSAPAAPTYVDSMMHSRNQNLLASLGATPSQIAATSRIGSMMTERSYYDP

SEQ ID NO: 69513 - protein, 51 aa, Setaria italica
  Transcript Sequence Number=SeqID_3539
SRLEMALRKDLSNEPEHHFRGVQSKKKIAILRCTILPHGGIEYNKDLTVDQ

SEQ ID NO: 69514 - protein, 56 aa, Setaria italica
  Transcript Sequence Number=SeqID_3540
  Subcellular localization annotation: CTP_CleavageSite=40; ConfidenceScore=5.34e-01
RSPSYGRRSYSPAARSPRRRSVSPAPARGRSYSRSPQYNRAREASPYDNGYRRSRS

SEQ ID NO: 69515 - protein, 189 aa, Setaria italica
  Transcript Sequence Number=SeqID_3541
  Gene Ontology: Mol. function=nucleic acid binding; Cellular component= nucleolus; Biological process=nuclear mRNA splicing, via spliceosome
  Homolog annotation: Hit_ID=B6TJ91; Match level="QueryCoverage=53%, HitCoverage=36%, E-value=2e-38, Identity=73%"; Hit description =Splicing factor, arginine/serine-rich 7
  Pfam annotation: Domain name=RRM_1; Domain location=7-72; Score=62.0; E_value=2.3e-15; Accession=PF00076.14; Description=RNA recognition motif. (a.k.a. RRM, RBD, o
  Pfam annotation: Domain name=zf-CCHC; Domain location=90-107; Score =33.0; E_value=1.2e-06; Accession=PF00098.15; Description=Zinc knuckle
  Pfam module annotation: Pfam domain module=RRM_1::zf-CCHC; Domain location=7-72::90-107
SAAMARLYVGNLDPRVTARELEDEFRTFGVLRSVWVARKPPGFAFIDFDDKRDAEDAIRDLDGKNGWRVEISRNSSSGRGGRDRQGGSESKCYECGETGHFARECRLRIGSGGLGSGRRRSRSRSRSRSPRYRRSPSYGRRSYSPAARSPRRRSVSPAPARGRSYSRSPQYNRAREASPYDNGYRRSRS

SEQ ID NO: 69516 - protein, 101 aa, Setaria italica
  Transcript Sequence Number=SeqID_3542
  Subcellular localization annotation: CTP_CleavageSite=71; ConfidenceScore=5.55e-01
PQPVTLPLPLPLLGFVVLFRSPRPPLPIAGVFLSCRVLTSTGLRHPAPPSRSAWPPPPPRCPSDPQVLLPRSGLDPPPSRRLNRCSLVAIRLLERLVAPSL

SEQ ID NO: 69517 - protein, 50 aa, Setaria italica
  Transcript Sequence Number=SeqID_3543
ERSRKLQELKTGDLPYGFASKCTEQFTSRQYKRTCITSKGSVHKRLNWKI

SEQ ID NO: 69518 - protein, 87 aa, Setaria italica
  Transcript Sequence Number=SeqID_3544
  Subcellular localization annotation: CTP_CleavageSite=64; ConfidenceScore=5.19e-01
LTTDDSAPSGTQGGGDADADSAKGSSAGSCTQGNFSQDGSWCSVVSEQSPAGACMDLAGTNNSSSSEESAGDHDSERQHLDASSGCS

SEQ ID NO: 69519 - protein, 181 aa, Setaria italica
  Transcript Sequence Number=SeqID_3545
VHDVPSSDEEEDGVEEDEDEEDDEEEVEDEGEEAEPQSSGRVAMMTGEDGGEEIDGHEHGEGDDEDENGEIGEEDDEGLEGDRVYEEGNDDEDADDEDEDTEYLVQPIAQPQAMAIGSDFDAADPDDADEDRDEVDDDDEGATDQPSSSQGTKRKRDDDPSGSGDDSEDDGVEDLRPFKHH

SEQ ID NO: 69520 - protein, 138 aa, Setaria italica
  Transcript Sequence Number=SeqID_3546
  Subcellular localization annotation: CTP_CleavageSite=73; ConfidenceScore=5.69e-01
TVSLSARLSSSRLSLARSCSPRPRSRSSWATLPSLLTLQVLAPPRSRLLIVSWPSELRQLPNSSRRPPPMMLKLMLPVAPPALSPTCSRVAIPCFSFPSAFTRLALLCPCYRLFCTSVSQLCLKTAPRRKLLVLLYPS

SEQ ID NO: 69521 - protein, 62 aa, Setaria italica
  Transcript Sequence Number=SeqID_3547
  Gene Ontology: Mol. function=nucleotide binding; Cellular component =microtubule
  Homolog annotation: Hit_ID=Q9LQ55; Match level="QueryCoverage=90%, HitCoverage=6%, E-value=9e-11, Identity=64%"; Hit description =Dynamin-2B
MSSAAAMEAIDELVQLSESMRQAASLLADDDPSDETASRRPSTFLNAVALGNVGAGKSAVLN

SEQ ID NO: 69522 - protein, 156 aa, Setaria italica
  Transcript Sequence Number=SeqID_3548
  Gene Ontology: Mol. function=chlorophyllase activity; Biological process=chlorophyll catabolic process
  Homolog annotation: Hit_ID=Q8LJZ8; Match level="QueryCoverage=86%, HitCoverage=14%, E-value=6e-23, Identity=45%"; Hit description =Putative Mla1
DLSFISIAVIELKEEDLKILGRLPALCYLNLKVDHENLGIIRRFIIGAFFFPCLEGCVLWGFRGPVVFHQGAMPKLTSLRFTLHARDTREISGSSDGGYDFGFQNLPSLQDVTVLLRCGGTSDKEVKEVMAALRHATTIHPNHPTIDIVGYEDKDE

SEQ ID NO: 69523 - protein, 51 aa, Setaria italica
  Transcript Sequence Number=SeqID_3549
NIAFYSGKCAMAMLGPCALARIQCHVPMASFLIGHGSFRLFLFLFLLVTLM

SEQ ID NO: 69524 - protein, 87 aa, Setaria italica
  Transcript Sequence Number=SeqID_3550
TSSVQTRRALDSICNASTVWQFYSGFASGEREPDGLLLGLCFLGLAAASPFAGCIAILADKLSKRITKLFQLKKETYRSIRRFGSCW

SEQ ID NO: 69525 - protein, 134 aa, Setaria italica
  Transcript Sequence Number=SeqID_3551
  Gene Ontology: Mol. function=nucleic acid binding; Cellular component= nucleus; Biological process=mRNA processing
  Homolog annotation: Hit_ID=Q64HC2; Match level="QueryCoverage=44%, HitCoverage=22%, E-value=1e-22, Identity=89%"; Hit description =ASF/SF2-like pre-mRNA splicing factor SRP32'
RKAGSLVYSEVYREGVGTVGIVDYTNYDDMKYAIKKLDDTEFRNAFGRAYIRVKEYDGKRGRSDSRSRSPSRSYSRSRSPSKSPRARRSASRSRSRSVSSRSRSPSKGRSPSRLNCLAVLSGIVWRSGDCALGY

SEQ ID NO: 69526 - protein, 181 aa, Setaria italica
  Transcript Sequence Number=SeqID_3552
  Gene Ontology: Mol. function=nucleic acid binding; Cellular component= nucleus; Biological process=mRNA processing
  Homolog annotation: Hit_ID=Q64HC2; Match level="QueryCoverage=44%, HitCoverage=31%, E-value=2e-39, Identity=96%"; Hit description =ASF/SF2-like pre-mRNA splicing factor SRP32'
  Pfam annotation: Domain name=RRM_1; Domain location=9-75; Score=40.6; E_value=6.4e-09; Accession=PF00076.14; Description=RNA recognition motif. (a.k.a. RRM, RBD, o
MVVKARYRVLVTGLPSSASWQDLKDHMRKAGDVCFSEVYREGGGTVGIVDYTNYDDMKYAIKKLDDTEFRNAFGRAYIRVKEYDGKRGRSDSRSRSPSRSYSRSRSPSKSPRARRSASRSRSRSVSSRSRSPSKGRSPSRSPARSKSPNASPANGEAAASPKKQSPSRSPSGSRSPDAKPE

SEQ ID NO: 69527 - protein, 258 aa, Setaria italica
  Transcript Sequence Number=SeqID_3553
  Gene Ontology: Mol. function=nucleic acid binding; Cellular component= nucleus; Biological process=mRNA processing
  Homolog annotation: Hit_ID=Q64HC2; Match level="QueryCoverage=72%, HitCoverage=73%, E-value=8e-88, Identity=86%"; Hit description =ASF/SF2-like pre-mRNA splicing factor SRP32'
  Pfam annotation: Domain name=RRM_1; Domain location=113-179; Score =40.6; E_value=6.4e-09; Accession=PF00076.14; Description=RNA recognition motif. (a.k.a. RRM, RBD, o
  Pfam annotation: Domain name=RRM_1; Domain location=9-76; Score=87.0; E_value=6.8e-23; Accession=PF00076.14; Description=RNA recognition motif. (a.k.a. RRM, RBD, o
  Pfam module annotation: Pfam domain module=RRM_1::RRM_1; Domain location=113-179::9-76
MSRRWSRTIYVGNLPGDIREREVEDLFYKYGRIVDIDLKVPPRPPGYAFVEFEDPRDAEDAIAGRDGYNFDGHRLRVEPAHGGRGNASSHDRGSGGFGGGARRGVSRHSEYRVLVTGLPSSASWQDLKDHMRKAGDVCFSEVYREGGGTVGIVDYTNYDDMKYAIKKLDDTEFRNAFGRAYIRVKEYDGKRGRSDSRSRSPSRSYSRSRSPSKSPRARRSASRSRSRSVSSRSRSPSKGRSPSRSPARLTYTNPAFEL

SEQ ID NO: 69528 - protein, 63 aa, Setaria italica
  Transcript Sequence Number=SeqID_3554
LPQTLICARQQLGIQYNKIIQQDPTYCIRTIQGFSSSEISRVLGELKTFILEKLDVSQQHQLV

SEQ ID NO: 69529 - protein, 451 aa, Setaria italica
  misc_feature (53)..(53): Xaa can be any naturally occurring amino acid
  misc_feature (74)..(74): Xaa can be any naturally occurring amino acid
  misc_feature (440)..(440): Xaa can be any naturally occurring amino acid
  Transcript Sequence Number=SeqID_3555
  Gene Ontology: Mol. function=protein kinase activity
  Homolog annotation: Hit_ID=Q9FI89; Match level="QueryCoverage=95%, HitCoverage=55%, E-value=1e-159, Identity=64%"; Hit description =Similarity to regulatory protein Nedd1
  Pfam annotation: Domain name=WD40; Domain location=126-208; Score =29.8; E_value=1.1e-05; Accession=PF00400.24; Description=WD domain, G-beta repeat
  Pfam annotation: Domain name=WD40; Domain location=213-252; Score =11.6; E_value=1.7; Accession=PF00400.24; Description=WD domain, G -beta repeat
  Pfam annotation: Domain name=WD40; Domain location=255-293; Score =10.2; E_value=2.5; Accession=PF00400.24; Description=WD domain, G -beta repeat
  Pfam annotation: Domain name=WD40; Domain location=31-71; Score=20.5; E_value=0.0068; Accession=PF00400.24; Description=WD domain, G-beta repeat
  Pfam annotation: Domain name=WD40; Domain location=83-122; Score =19.4; E_value=0.015; Accession=PF00400.24; Description=WD domain, G -beta repeat
  Pfam module annotation: Pfam domain module=WD40::WD40::WD40::WD40::WD4 0; Domain location=126-208::213-252::255-293::31-71::83-122
MGFVDPAAPLLVTCGGDTVKLFDVTVESGDPCVLAYTPSPGNPVNAVKWNHTXVNLIVASAGDDKKISLWHKKXGHNVGQLPTSSIDRGDDIEECIYSISFSNKGSRYLCSGGSGHIVRIWDLQRKRCIKWLSGHTDTITGVMYNCKDEHLASISMKGDLILHNLASGARAAELSDPNGQVLRVLDYSRNSRHLLVTAGDDGSVHLWDATAKAPKMSWLKQHSAPTSGVCISPSSDKIIATVGLDKKLYTLDSGSRRPTHTIPHEAPFSSLAYNDDGTILAAGTNSGRVVFYDVRGKPQPLTILRAYNSSEAVIGLCWQRSKPVIVNENSSSEVALLGGTSEESVLMPDPLPSATPTSFSSGVVTTGLRSSLTANTSTMDETPYRTRSLSGGPLSKLQAPRSNYNLKDDMDVFSPLVDVQPFTPSSGNWWDEHGSDDTKXDDKTGEKKLYN

SEQ ID NO: 69530 - protein, 109 aa, Setaria italica
  misc_feature (14)..(14): Xaa can be any naturally occurring amino acid
  Transcript Sequence Number=SeqID_3556
  Gene Ontology: Cellular component=membrane
  Homolog annotation: Hit_ID=Q2R1X7; Match level="QueryCoverage=100%, HitCoverage=27%, E-value=3e-10, Identity=32%"; Hit description =Integral membrane protein DUF6 containing protein, expressed
IFACNTVMQAAALXEIPAPLSICSITAMMGSIFSAIIQVLMEGKLTAGTSDNITRIIGEIVVFVGGVVIGLCTTFQVSSIGRKGPVLVSMFSPFQTVFSSFISLIVFGQ

SEQ ID NO: 69531 - protein, 80 aa, Setaria italica
  misc_feature (9)..(9): Xaa can be any naturally occurring amino acid
  misc_feature (27)..(27): Xaa can be any naturally occurring amino acid
  Transcript Sequence Number=SeqID_3557
  Subcellular localization annotation: CTP_CleavageSite=29; ConfidenceScore=5.36e-01
NDAGTSYHXRRTQQPNTRKATGSPREXPSSGAAGSASKSDQGNTGSEASRDRYPPNPSESNRIESERAERSNRSTSPVKK

SEQ ID NO: 69532 - protein, 137 aa, Setaria italica
  misc_feature (107)..(107): Xaa can be any naturally occurring amino acid
  Transcript Sequence Number=SeqID_3558
  Homolog annotation: Hit_ID=B6SZV8; Match level="QueryCoverage=100%, HitCoverage=27%, E-value=4e-56, Identity=75%"; Hit description =Selenium-binding protein
  Pfam annotation: Domain name=PPR; Domain location=13-47; Score=43.4; E_value=9e-10; Accession=PF01535.12; Description=PPR repeat
  Pfam annotation: Domain name=PPR; Domain location=48-82; Score=10.3; E_value=0.53; Accession=PF01535.12; Description=PPR repeat
  Pfam annotation: Domain name=PPR; Domain location=84-117; Score=6.1; E_value=1.7; Accession=PF01535.12; Description=PPR repeat
  Pfam module annotation: Pfam domain module=PPR::PPR::PPR; Domain location=13-47::48-82::84-117
SRLFGRMTVRNVWTWSAMIVGFSQNGMAREALELFDKMKDASITPNYVTFLGLLCACSHAGLVDEGHQFFHEMQHVYGIKPMITHYSAMVDVLGRNGHLQEAYDFVXDVPVKPDPVVWRTLLSACQLHSSKDCIDIV

SEQ ID NO: 69533 - protein, 108 aa, Setaria italica
  Transcript Sequence Number=SeqID_3559
  Gene Ontology: Mol. function=methyltransferase activity; Cellular component=extracellular region; Biological process=metabolic process
  Homolog annotation: Hit_ID=A6N1H2; Match level="QueryCoverage=94%, HitCoverage=93%, E-value=8e-43, Identity=78%"; Hit description=Sam -dependent methyltransferase (Fragment)
MEIYGFLNVLWFCCFCQLALELVEHLRAMGETNALFQRNPVLKRDTALATAAIYQSMFGLEDGSIPATFQVIYMTGWREHPSQQKAKRRGSATISFSDIQKQFSPSEN

SEQ ID NO: 69534 - protein, 46 aa, Setaria italica
  Transcript Sequence Number=SeqID_3560
  Gene Ontology: Mol. function=methyltransferase activity; Biological process=metabolic process
  Homolog annotation: Hit_ID=A4U2A3; Match level="QueryCoverage=97%, HitCoverage=14%, E-value=3e-12, Identity=73%"; Hit description=SAM -dependent methyltransferases
SSQDLIISCLGLHWTNDLPGAMIQCRLALKPDGLFLAAILGGETLK

SEQ ID NO: 69535 - protein, 349 aa, Setaria italica
  Transcript Sequence Number=SeqID_3561
  Gene Ontology: Mol. function=methyltransferase activity; Cellular component=extracellular region; Biological process=metabolic process
  Homolog annotation: Hit_ID=A4U2A3; Match level="QueryCoverage=83%, HitCoverage=94%, E-value=1e-63, Identity=45%"; Hit description=SAM -dependent methyltransferases
  Pfam annotation: Domain name=Methyltransf_11; Domain location=96-195; Score=35.6; E_value=2e-07; Accession=PF08241.4; Description =Methyltransferase domain
  Pfam annotation: Domain name=Methyltransf_12; Domain location=96-193; Score=18.8; E_value=0.01; Accession=PF08242.4; Description =Methyltransferase domain
  Pfam module annotation: Pfam domain module=Methyltransf _11::Methyltransf_12; Domain location=96-195::96-193
MASSAAAAAARRLLLLRHRHGHLLPKRHLSSSSAADSLDDGGGGGGRVKIFDRDLKRRHRDRAAWAMREADGFVDAVADNLLDRLEDCRKAFPSALCLGGSAGAVRRLLRGRGGIEKLIMMDMSADMVRKWRESENATDDGPETHFVVCDEEFLPIKESSQDLIISCLGLHWTNDLPGAMIQCRLALKPDGLFLAAILGGETLKELRIACTVAQMEREGGISPRMSPLAQVRDAGNLLTRAGFTLPGVDVDSYTVKYNSALELVEHLRAMGETNALFQRNPVLKRDTALATAAIYQSMFGLEDGSIPATFQVIYMTGWREHPSQQKAKRRGSATISFSDIQKQFSPSEN

SEQ ID NO: 69536 - protein, 111 aa, Setaria italica
  Transcript Sequence Number=SeqID_3562
PDQVLMDLDDDLPAETASIETDMDNPDMSPYSFSFINASDSKKRNKDDQDHERLHKELASLLEENQNLKDRISSMLEHSNKAECEILRLKESLAQQEEEKEAAVSLCQQST

SEQ ID NO: 69537 - protein, 182 aa, Setaria italica
  Transcript Sequence Number=SeqID_3563
  Homolog annotation: Hit_ID=Q7XLY4; Match level="QueryCoverage=92%, HitCoverage=75%, E-value=6e-35, Identity=52%"; Hit description =OSJNBa0042I15.6 protein
  Subcellular localization annotation: CTP_CleavageSite=33; ConfidenceScore=5.56e-01
SYGPSGPVGSLVGHQLQQKQRPKTLPDLLAGVRRASFRSVTRPRGGGGGGETGRRTPSKVLVSVAVQRSMWPLHVMASAEWTVADLVAAAVALYVKEGRRPLLPSADPAAFGLHYSQFSLESLDPKEKVMELGSRSFFLCPKSSAAGQAASSSSSDGVSGVSTVASGKAPAWLNYMQFWPMM

SEQ ID NO: 69538 - protein, 187 aa, Setaria italica
  Transcript Sequence Number=SeqID_3564
  Gene Ontology: Mol. function=steroid hormone receptor activity; Cellular component=integral to membrane; Biological process =regulation of transcription, DNA-dependent
  Homolog annotation: Hit_ID=Q2HU72; Match level="QueryCoverage=99%, HitCoverage=32%, E-value=2e-25, Identity=33%"; Hit description =Steroid nuclear receptor, ligand-binding
WAAALMILGNVSVILVLFPAHVWWTIYSLIKTDRINAGLKLAVLLALPVLFGLWLGLSIFGGALVALGYGFFTPWISTFEAFRQESEAKKFVHGIVDGTWGTIKGSCTVVRDFADICFHSYPVYLKELRESSHNREPHSIRLLDVPSCIVVALLGLVVDIPLYTVIALIKSPYMLFKGWQRLLHDLI

SEQ ID NO: 69539 - protein, 82 aa, Setaria italica
  Transcript Sequence Number=SeqID_3565
  Gene Ontology: Mol. function=binding; Cellular component=nucleus
  Homolog annotation: Hit_ID=Q10MH9; Match level="QueryCoverage=100%, HitCoverage=11%, E-value=4e-41, Identity=95%"; Hit description =Cyclin, putative, expressed
MGFLSAKLLPSCESMCVCCPALRPSSRRPVKRYKKLLAEIFPKTPDGAPNERKIMKLCEYAAKNPLRIPKIAKFLEQRTHKE

SEQ ID NO: 69540 - protein, 975 aa, Setaria italica
  Transcript Sequence Number=SeqID_3566
  Gene Ontology: Mol. function=binding; Cellular component=nucleus
  Homolog annotation: Hit_ID=Q10MH9; Match level="QueryCoverage=71%, HitCoverage=95%, E-value=0.0, Identity=79%"; Hit description=Cyclin, putative, expressed
FSYRYVKVNPSCRLLTLKLLAEIFPKTPDGAPNERKIMKLCEYAAKNPLRIPKIAKFLEQRTHKELRSAHVSFVRIITEAYSKLLFICKEQMAYFAISLMNVLTELLESKQENIHILGCQTLANFINSQVDNTYARNIESLVRKVCGLSRQQGEEHRLLRAASLQCLSAMIWFMKEHSYIFADFDEVVQSVLENYRAEESIGGGDDRHASQHNWVDEIARCEGRPGLGGGNDVNISSTTIRLRPARNSSALTREERESPEVWSHICVQKLAELAKESTTMRRILDPMLSYFDKKKQWPPRHGLALLVLSDMAYPEKISGNEQLILTAVIRHLDHKNVSHDPQTKSDIIQTATSLARQLRSRGFTAELVVAGDLCKHLRKTLEAVESGSVEDLNLNESLQNFLEECLMEVVRGINDVRPLYDMMAITLENLPSIPTVARATLGSLLILSHIISLTSVSSNAPMVFPEALLQQILKAMVHPDIDTRVGAHHMFSAIITRGPSHLRSESEYLYETKKQSRTTSVFASATALLEKLRREKESLSSDKPRNIINDDVKERSTHEEDHKHVWSRKNSAYFSKLVFSFMERCAKLSSPVQEANIALLTEDQTNQLLSAFWIQANQTDNIPFNYEAIGHSYSLTVLSSRLKNSSNCNIIQFFQLPLSLRSIALTPGGVLPASCQLSIFTLATSMLAFTGKVCHITELSDLLRCFTSSKVDPYLRIGEDLQLYVRLQSDLGSYGSENDQEVAKSILSDCRMKVGTNDQQLLDVIASALSSVTEMEKDVLVKELTEMFTPEEMPLFGSNSALDWANFNGQAFSDESLSFDEECSRTSSVDCGLHESPITNTASSISKITLPQSVPHVLGVGQLLESALHVAGQVAGASVSTSPLPYGTMTSQCEALGLGTRKKLSSWLVSGHESTPDNPMPSLPTAHHSIIPKVNSCGFESIHRVSSEPCSMVKLPPASPFDNFLKAAYRTQPEL

SEQ ID NO: 69541 - protein, 365 aa, Setaria italica
  misc_feature (64)..(64): Xaa can be any naturally occurring amino acid
  Transcript Sequence Number=SeqID_3567
  Homolog annotation: Hit_ID=B9SFN4; Match level="QueryCoverage=41%, HitCoverage=36%, E-value=1e-24, Identity=39%"; Hit description =Synapse-associated protein, putative
  Pfam annotation: Domain name=BSD; Domain location=82-143; Score=71.7; E_value=2.7e-18; Accession=PF03909.9; Description=BSD domain
LPSSAHALDGLADIVAQGKDALSQVAAAAAAPVSAHSDGGEWEQSSASGAHVRYSRFEAQLRAXLQADPTTFTADPEDAEDFAAWSKGFNLDERKDEIEALCYDSDALEAMVDRLVPGTVESEVFWSRYFYRVHKLKQQEDARAKLVQRVIAQEEDEDLSWEVDDEDEEEEQQKEDAKELAARQEPIKEEVKHEVEVKENERVVEERKVEAVEEPAALEEQKNADEPQPVVLGSSLVVVDEEEQKNADEPQPVVFGSSLVVVDEEEKEGHSKSSVEESGDKKEAVKHETSDSSKDSDYSIVSRQRTMEEEDLEWDEIEDLGEHEEKKGSTHDSSPALKEELRKRLSVAEDDEDLSWDIEDDDDKS

SEQ ID NO: 69542 - protein, 85 aa, Setaria italica
  Transcript Sequence Number=SeqID_3568
ISLTNSPTGMNGGTVESSNGEATSQEAEQKCMGLSCCSQRSPPPRPKIVDRGISNPWNPARQEQGEVQQGKMPMAIQSNQGLKDV

SEQ ID NO: 69543 - protein, 166 aa, Setaria italica
  Transcript Sequence Number=SeqID_3569
  Gene Ontology: Mol. function=protein disulfide oxidoreductase activity; Cellular component=cytoplasm; Biological process=cell redox homeostasis
  Homolog annotation: Hit_ID=Q9AR82; Match level="QueryCoverage=71%, HitCoverage=96%, E-value=4e-16, Identity=35%"; Hit description =Thioredoxin h
  Pfam annotation: Domain name=Thioredoxin; Domain location=46-151; Score=40.1; E_value=8.5e-09; Accession=PF00085.12; Description =Thioredoxin
MYLSVGLSCCSQRSPPPRPKIVDRGISNPWNPARQEQGEVQQGKMPMAIQSNQGLKDVLRQAKQPNSKLVVLEFMAPWSEPCKFMRPAMEEIAARFKEHADFYTLDVEQFKTFARNTRVEALPTFLLVRDTILERVVGVSKDDLQRSIEKHTTNTAVHVDRTSGST

SEQ ID NO: 69544 - protein, 102 aa, Setaria italica
  misc_feature (84)..(84): Xaa can be any naturally occurring amino acid
  Transcript Sequence Number=SeqID_3570
  Gene Ontology: Mol. function=flavin-containing monooxygenase activity; Biological process=cellular aromatic compound metabolic process
  Homolog annotation: Hit_ID=B6SWL5; Match level="QueryCoverage=100%, HitCoverage=24%, E-value=7e-40, Identity=83%"; Hit description =Disulfide oxidoreductase/ monooxygenase/ oxidoreductase
LKETHVRTPVLDYGALARIRAGDIAVVPAVKRFAKGTQVELADGRVLNFDAVILATGYRSNVPQWLQGNDFFTKDGYPKIALPXHGGKGQSGLYAVGFTRRG

SEQ ID NO: 69545 - protein, 142 aa, Setaria italica
  Transcript Sequence Number=SeqID_3571
  Gene Ontology: Mol. function=protein tyrosine kinase activity; Cellular component=plasma membrane; Biological process=protein amino acid phosphorylation
  Homolog annotation: Hit_ID=Q9LSI9; Match level="QueryCoverage=76%, HitCoverage=18%, E-value=1e-24, Identity=50%"; Hit description =Leucine-rich repeat receptor-like protein kinase
  Pfam annotation: Domain name=LRRNT_2; Domain location=33-75; Score =23.3; E_value=0.001; Accession=PF08263.4; Description=Leucine rich repeat N-terminal domain
MPPPRLLLLLLPLLLLAPPAAPQPAPGSEAAPQEDDLRCLRGVKKDLADPDNRLAWDFSNTSAAAICNFNGITCWNPQESRVISLSLSGFGLQGSLPSSLQYCRAATTLDLSQNAIEGSIPPALCDWVPFLVNLDLSSNKLN

SEQ ID NO: 69546 - protein, 39 aa, Setaria italica
  Transcript Sequence Number=SeqID_3572
  Homolog annotation: Hit_ID=B9RYS8; Match level="QueryCoverage=87%, HitCoverage=9%, E-value=4e-11, Identity=88%"; Hit description =Protein MYG1, putative
HGQAETGIPGCVFVHMSGFIGGNKTYEGALEMARAALKC

SEQ ID NO: 69547 - protein, 386 aa, Setaria italica
  Transcript Sequence Number=SeqID_3573
  Gene Ontology: Mol. function=nickel ion binding; Cellular component =cellular_component; Biological process=pigmentation
  Homolog annotation: Hit_ID=Q9FHY6; Match level="QueryCoverage=87%, HitCoverage=97%, E-value=1e-151, Identity=73%"; Hit description =GAMM1 protein-like
  Pfam annotation: Domain name=UPF0160; Domain location=62-385; Score =495.1; E_value=9.7e-146; Accession=PF03690.5; Description =Uncharacterised protein family (UPF0160)
  Subcellular localization annotation: CTP_CleavageSite=50; ConfidenceScore=5.65e-01
GLLAAWRLSQRAVTFTSPLGIGRSQIRNPFPAMASLSPAAASSPKRLRVYSSANVNGDGAGSGKRVGTHNGSFHCDEALGCFLIRLTSQFAGADVVRTRDSQILDTLDAVLDVGGVYDPSRHRYDHHQKGFNEVFGHGFNTKLSSAGLVYKHFGKEIIAKELGVNEDHEDVHRLYLAIYKSFVEALDAIDNGINQYDTDQPPKYVNNTHLSSRVGRLNPDWTDPDQSPEKENAAFQQAMMLAGSEFMESVRFHVKSWLPARSIVLECLFSRSKVDPSSEIMVLDRFCPWKLHLFELEEELKVDPLTTYVLYQDERSKSWRVQAVAVAPDRFESRKALPEKWRGMRDDELSAETGIPGCVFVHMSGFIGGNKTYEGALEMARAALKC

SEQ ID NO: 69548 - protein, 98 aa, Setaria italica
  Transcript Sequence Number=SeqID_3574
  Gene Ontology: Mol. function=hydrogen ion transporting ATPase activity, rotational mechanism; Cellular component=nucleus; Biological process=protein modification process
  Homolog annotation: Hit_ID=B6T938; Match level="QueryCoverage=97%, HitCoverage=73%, E-value=7e-48, Identity=95%"; Hit description =Ubiquitin-like protein SMT3
  Pfam annotation: Domain name=ubiquitin; Domain location=21-91; Score =43.7; E_value=7.4e-10; Accession=PF00240.15; Description=Ubiquitin family
MSGNGEEDKKPAEGGAHINLKVKGQDGNEVFFRIKRSTQLKKLMNAYCDRQSVDMNAIAFLFDGRRLRGEQTPDELEMEDGDEIDAMLHQTGGYVPSA

SEQ ID NO: 69549 - protein, 123 aa, Setaria italica
  Transcript Sequence Number=SeqID_3575
MDILLGSGRFLARRPPLALVPRCSRGTPDKGGSDKGETSTDWDKAWSTFKNKGKRTLFSDFSPNKYVTWNPRRSEYPLAEEVDPIKRTERSNLMLWTSPQFTLVGAIIIVLTLLIYTIVVPPK

SEQ ID NO: 69550 - protein, 46 aa, Setaria italica
  Transcript Sequence Number=SeqID_3576
MASDMKPLSDQKDEIPSRSVENCGVSKQACHGKSQSCDSDVKPILC

SEQ ID NO: 69551 - protein, 124 aa, Setaria italica
  Transcript Sequence Number=SeqID_3577
  Subcellular localization annotation: CTP_CleavageSite=5; ConfidenceScore=5.52e-01
MAIIVAMAPTAHPSNPSKAHTYPSVRDNKAHAPAAAYNPNPSSASSNSAAMAPPLLLLLLLPLLTAAAPTATTTLPLYRHLPHVATEAAHHHPLSRLAAASLARASHLRRPAPAHHKAQGGSTA

SEQ ID NO: 69552 - protein, 190 aa, Setaria italica
  misc_feature (136)..(136): Xaa can be any naturally occurring amino acid
  misc_feature (158)..(158): Xaa can be any naturally occurring amino acid
  Transcript Sequence Number=SeqID_3578
KEFLQPEQSEEDPKCAKNDNVVAMEISISDECSLFQSSEGSISSSNKIRDSVNTKSIEKSLETESIIHATGKKVLKNNDLELELPSLSHWLKPPNPKKPFRDEALTGDRSNSAKSSDEDRPIIGMVAAHWKDKEPXNFTPKWFDGNGIPNSTNKYKEXNCSSGKTSQFLGVEGEESDTAESNRLYAAAYA

SEQ ID NO: 69553 - protein, 59 aa, Setaria italica
  misc_feature (36)..(36): Xaa can be any naturally occurring amino acid
  Transcript Sequence Number=SeqID_3579
  Gene Ontology: Mol. function=nucleoside-triphosphatase activity; Cellular component=protein complex; Biological process=protein catabolic process
  Homolog annotation: Hit_ID=Q8W3N8; Match level="QueryCoverage=88%, HitCoverage=14%, E-value=6e-18, Identity=82%"; Hit description=26S proteasome regulatory particle triple-A ATPase subunit4b (Fragment)
KLCLVGFLTGSCLRNVCTEAGMAAIRAERDYVVHEXVRKLNDAKKLESSAHYSADFGKE

SEQ ID NO: 69554 - protein, 400 aa, Setaria italica
  Transcript Sequence Number=SeqID_3580
  Gene Ontology: Mol. function=nucleoside-triphosphatase activity; Cellular component=protein complex; Biological process=protein catabolic process
  Homolog annotation: Hit_ID=Q8W3N8; Match level="QueryCoverage=94%, HitCoverage=100%, E-value=0.0, Identity=95%"; Hit description=26S proteasome regulatory particle triple-A ATPase subunit4b (Fragment)
  Pfam annotation: Domain name=AAA; Domain location=176-363; Score =312.1; E_value=1.2e-90; Accession=PF00004.21; Description=ATPase family associated with various cellular activities (AAA)
  Pfam annotation: Domain name=AAA_2; Domain location=172-304; Score= -27.8; E_value=0.0016; Accession=PF07724.6; Description=ATPase family associated with various
  Pfam annotation: Domain name=AAA_3; Domain location=176-307; Score= -17.3; E_value=0.029; Accession=PF07726.3; Description=ATPase family associated with various
  Pfam annotation: Domain name=AAA_5; Domain location=176-310; Score =3.1; E_value=0.00053; Accession=PF07728.6; Description=ATPase family associated with various
  Pfam annotation: Domain name=Sigma54_activat; Domain location=142 -272; Score=-179.6; E_value=0.026; Accession=PF00158.18; Description =Sigma-54 interaction domain
  Pfam module annotation: Pfam domain module=AAA::AAA_2::AAA_3::AAA _5::Sigma54_activat; Domain location=176-363::172-304::176-307::176 -310::142-272
MADGEDAAAARRRSAITDYRKKLLNCRELESRVGTVRESLKNAKKDFAKTEDDLKSLQSVGQIIGEVLRPLDNERFIVKASSGPRYVVGCRSKVDKEKLTSGTRVVLDMTTLTIMRTLPREVDPVVYNMLHEDPGNVSYSAVGGLSDQIRELRESIELPLMNPELFLRVGIKPPKGVLLYGPPGTGKTLLARAIASNIDANFLKIVSSAIIDKYIGESARLIREMFGYARDHQPCIIFMDEIDAIGGRRFSEGTSADREIQRTLMELLNQLDGFDELGKVKMIMATNRPDVLDPALLRPGRLDRKIEIPLPNEQARMEVLKIHAAGIAKHGEIDYEAVVKLAEGFNGADLRNVCTEAGMAAIRAERDYVVHEDFMKAVRKLNDAKKLESSAHYSADFGKE

SEQ ID NO: 69555 - protein, 132 aa, Setaria italica
  Transcript Sequence Number=SeqID_3581
  Gene Ontology: Cellular component=nucleus; Biological process=cell division
  Homolog annotation: Hit_ID=Q8LHA8; Match level="QueryCoverage=98%, HitCoverage=37%, E-value=3e-33, Identity=58%"; Hit description =Cyclin-D2-2
ITADIIVGTLKGSAFLSFRPSEIAAAAALAAVSANEVVGFGSVLSASEIPVNKEMVDKCYELMQERALVKKRGHINGSSSVPQSPIGVLDAACFSFRSEDATLGSSQSNISSDNNQVSAPASKRRRLSTSPI

SEQ ID NO: 69556 - protein, 99 aa, Setaria italica
  Transcript Sequence Number=SeqID_3582
  Gene Ontology: Mol. function=hydrolase activity, acting on ester bonds; Cellular component=cellular_component; Biological process =lipid metabolic process
  Homolog annotation: Hit_ID=B9RFN2; Match level="QueryCoverage=93%, HitCoverage=25%, E-value=2e-29, Identity=67%"; Hit description=Zinc finger protein, putative
DPAGEGCARPPVVFAFGDSNTDTGGVAAGLGYYYPLPEGRAFFRRATGRLCDGRLVIDYLCESLNTSYLSPYLEALGSDFTSGANFAISGSSTLPAASP

SEQ ID NO: 69557 - protein, 255 aa, Setaria italica
  misc_feature (15)..(15): Xaa can be any naturally occurring amino acid
  misc_feature (30)..(30): Xaa can be any naturally occurring amino acid
  Transcript Sequence Number=SeqID_3583
  Gene Ontology: Mol. function=phosphatidylinositol phosphate kinase activity; Cellular component=plasma membrane; Biological process =phosphatidylinositol metabolic process
  Homolog annotation: Hit_ID=B6SXI7; Match level="QueryCoverage=97%, HitCoverage=30%, E-value=1e-112, Identity=81%"; Hit description =Phosphatidylinositol-4-phosphate 5-kinase 9
  Pfam annotation: Domain name=PIP5K; Domain location=138-255; Score =7.3; E_value=3.7e-11; Accession=PF01504.10; Description =Phosphatidylinositol-4-phosphate 5-Kinase
LEREYMQGVLISEVXVDTSFSHSFKRSSHXKKKIVKDIKKPGQTIIKGHRSYDLMLSLQLGISLNKMYTVGKITPILRREVRASDYGPRASFWMSFPKNGSRLTPSHHADDFKWKDYCPMVFRNLREMFKIDAADYMFSICGSDALRELSSPGKSGSVFFLSQDDRFMIKTLRKSEVQVLLRMLPEYYYHVRTYENTLITKFFGLHRVKPSSGQKFHFVVMGNMVCMPARIHRRFDLKGSSLSSVSRKKAQHKNE

SEQ ID NO: 69558 - protein, 77 aa, Setaria italica
  Transcript Sequence Number=SeqID_3584
PYFYYVSLALLKRITKISEVVTTDQLSSWYSICKPPTPSLLILSKKYGLKDHRMERLSSPAVSNYLTCQLCFTITFQ

SEQ ID NO: 69559 - protein, 807 aa, Setaria italica
  Transcript Sequence Number=SeqID_3585
  Gene Ontology: Mol. function=phosphatidylinositol phosphate kinase activity; Cellular component=plasma membrane; Biological process =phosphatidylinositol metabolic process
  Homolog annotation: Hit_ID=B6SXI7; Match level="QueryCoverage=98%, HitCoverage=98%, E-value=0.0, Identity=82%"; Hit description =Phosphatidylinositol-4-phosphate 5-kinase 9
  Pfam annotation: Domain name=MORN; Domain location=118-140; Score =31.2; E_value=4.1e-06; Accession=PF02493.12; Description=MORN repeat
  Pfam annotation: Domain name=MORN; Domain location=141-163; Score =32.2; E_value=2.1e-06; Accession=PF02493.12; Description=MORN repeat
  Pfam annotation: Domain name=MORN; Domain location=164-186; Score =27.5; E_value=5.3e-05; Accession=PF02493.12; Description=MORN repeat
  Pfam annotation: Domain name=MORN; Domain location=187-209; Score =30.2; E_value=8.6e-06; Accession=PF02493.12; Description=MORN repeat
  Pfam annotation: Domain name=MORN; Domain location=210-231; Score =11.4; E_value=0.47; Accession=PF02493.12; Description=MORN repeat
  Pfam annotation: Domain name=MORN; Domain location=49-71; Score=22.8; E_value=0.0014; Accession=PF02493.12; Description=MORN repeat
  Pfam annotation: Domain name=MORN; Domain location=72-94; Score=41.4; E_value=3.5e-09; Accession=PF02493.12; Description=MORN repeat
  Pfam annotation: Domain name=MORN; Domain location=95-117; Score =13.1; E_value=0.28; Accession=PF02493.12; Description=MORN repeat
  Pfam annotation: Domain name=PIP5K; Domain location=472-803; Score =469.3; E_value=5.5e-138; Accession=PF01504.10; Description =Phosphatidylinositol-4-phosphate 5-Kinase
  Pfam module annotation: Pfam domain module=MORN::MORN::MORN::MORN::MOR N::MORN::MORN::MORN::PIP5K; Domain location=118-140::141-163::164 -186::187-209::210-231::49-71::72-94::95-117::472-803
MTSSQTTEASSNLHKGLLLALPNCQHSDASKINPGSRVGELILPNGDIYRGTLLGNTPDGSGSYIWSDGCVYEGEWRGGLRHGHGKMLWPTGATYEGDYSGGYIYGEGTYIGLNNSTYKGGWKLNLKHGLGLQTYPNGDRFEGSWTQGQVQGHGMYTWANGNTYVGTMKNGVMSGKGIFTWKHGDSFEGNWLDGVMHGHGVYTWKDCGYYVGTWTRGVKDGKGTFYPRCREILLPDELSIDALRKRGVLPGVESQIHGSRTLHSSSFDMADVMARGNQDSAGVSSIRSLAFEETRSKNVSLERRWSLGVAIEKFIGRETNESSAAQSCENKTDSNLPILEREYMQGVLISEVLVDTSFSHSFKRSSHCQKKIVKDIKKPGQTIIKGHRSYDLMLSLQLGIRYTVGKITPILRREVRASDYGPRASFWMSFPKNGSRLTPSHHADDFKWKDYCPMVFRNLREMFKIDAADYMVSICGSDALRELSSPGKSGSVFFLSQDDRFMIKTLRKSEVQVLLRMLPEYYYHVRTYENTLITKFFGLHRVKPSSGQKFHFVVMGNMFCTELRIHRRFDLKGSSLGRSTDKITIDENTTLKDLDLSYSFYVEPSWRDTLLKQIETDSKFLRNHAIMDYSLLLGVHYRAPQKLRTQASFNHTIVPDRLAVLSEEGALEEDIMNCSEGLVLVQRASDQNDVVIGPHIRGARLRSSASFEEVDLLLPGTTRLQIQLGVNMPARAEQTTKEDDRESFGQVYDVVLYLGIIDILQEYNLRKKIEHTYKSIKYNSLSISVVEPNFYSERFLKFIRTIFPERS

SEQ ID NO: 69560 - protein, 315 aa, Setaria italica
  Transcript Sequence Number=SeqID_3586
  Gene Ontology: Mol. function=magnesium ion binding; Cellular component=chloroplast; Biological process=metabolic process
  Homolog annotation: Hit_ID=Q673F9; Match level="QueryCoverage=98%, HitCoverage=36%, E-value=1e-136, Identity=74%"; Hit description=Ent -kaurene synthase-like protein 1
  Pfam annotation: Domain name=Terpene_synth; Domain location=26-239; Score=179.9; E_value=7.1e-51; Accession=PF01397.13; Description =Terpene synthase, N-terminal domain
MDIGLSYRRKAYMAYIAEGLGNMLDWDEIMKFQRKNGSLFSCPSTTAVALIHKYNDQALQYLNLLVSEFGSAVPAVYPSKNHWQLLMVDALEKMGISQRFVSEIKSILDMTFSRWLQKDEEIMMDIATCAMAFRLLRMNGYDVSSDELSHVAEASTFCDSLQGYLNDTKSLLELYKASKVSLSENDLILDSIGSWSGNLLNDKLYSNRAQKTPIFGEMEYVVKFPFYATLERLEHKRNIEHFDAWGSLMVSTKCSSFRVNQEFLALAVEDFSFSQSVYQDELQHLDSWVKENKLDQLQFARQKLTYCYLSAAATI

SEQ ID NO: 69561 - protein, 533 aa, Setaria italica
  misc_feature (94)..(94): Xaa can be any naturally occurring amino acid
  Transcript Sequence Number=SeqID_3587
MNFAFLDTPILLNEDTSGESWTDNAGCSRCIPESNRTHSLHDGKLALPRTSERANVGLEESLISLDQEINLEIFSLYSRSSSCVSEVNMTKLSXSGILPALENDDDFSFDEMTSMMGPNVKHAENYTDNARSAEFVPEINMTETLNVGKEATARLEHEVSSNFDISLEAPDIGNGVEKFDNSLDLVLWPFEPVVDASEGMQAAQGFSMLQSENDFSLLRLMLLLKMSTMMEIYQNSQETSIDALGSAQPGLSKSEDEGVSTLRGTCKSPDAVGVIDSDNVLMANYASDLRSAVGNHFFSQNASPEAQPQDPLMFKESLVYPDELSVSENNSDNAKLLFCSTKVNLIESLDGDKRGTDQQQAETNLVSEDTYMACQGSTSEKYLDNFGYQHISDANITKTLQSTDRLLSEMFHDGSFCTAGTSVSLDGGTDADNSSANSGSEMRTAQNNTVILLGFQGPEKAIVSISQYEVDRAEKNGSDSICAEATMTGDIQGFLEERKVCEWRCTDKEPKDLKVKDMEEDVQGLDEDHENSP

SEQ ID NO: 69562 - protein, 373 aa, Setaria italica
  misc_feature (160)..(160): Xaa can be any naturally occurring amino acid
  Transcript Sequence Number=SeqID_3588
  Gene Ontology: Mol. function=protein binding
  Homolog annotation: Hit_ID=Q7FS96; Match level="QueryCoverage=66%, HitCoverage=70%, E-value=3e-73, Identity=60%"; Hit description =Putative Cf-2
  Pfam annotation: Domain name=LRR_1; Domain location=123-146; Score =11.5; E_value=1.9; Accession=PF00560.25; Description=Leucine Rich Repeat
  Pfam annotation: Domain name=LRR_1; Domain location=194-216; Score =12.4; E_value=1.3; Accession=PF00560.25; Description=Leucine Rich Repeat
  Pfam annotation: Domain name=LRR_1; Domain location=218-240; Score =17.2; E_value=0.07; Accession=PF00560.25; Description=Leucine Rich Repeat
  Pfam annotation: Domain name=LRR_1; Domain location=22-44; Score=7.5; E_value=11; Accession=PF00560.25; Description=Leucine Rich Repeat
  Pfam annotation: Domain name=LRR_1; Domain location=242-264; Score =19.0; E_value=0.02; Accession=PF00560.25; Description=Leucine Rich Repeat
  Pfam annotation: Domain name=LRR_1; Domain location=266-287; Score =4.9; E_value=36; Accession=PF00560.25; Description=Leucine Rich Repeat
  Pfam annotation: Domain name=LRR_1; Domain location=45-67; Score =16.7; E_value=0.097; Accession=PF00560.25; Description=Leucine Rich Repeat
  Pfam annotation: Domain name=LRR_1; Domain location=69-91; Score=9.0; E_value=5.7; Accession=PF00560.25; Description=Leucine Rich Repeat
  Pfam module annotation: Pfam domain module=LRR_1::LRR_1::LRR_1::LRR _1::LRR_1::LRR_1::LRR_1::LRR_1; Domain location=123-146::194-216::218- 240::22-44::242-264::266-287::45-67::69-91
VLDLSHNYFNGPIPPCFIENIPLSVLNLRENRLKGMLPSNITRCHLQTIDLHGNKIEGRLPRGLSNCPDLEVIDFGSNKIADVFPSWLRGLPKLSVLVLRSNQMYGTIGDIVGDTKCEECFPSLQIIDLASNNFSGTLWPQWFKQLKSMMAEFNSSGKLXETLSTSHGEERFYQYSVEIMYKGADMQFGRMLTTVTAIDFSNNSLEGTIPETFGSLVSLRVLSLSHNDFTGKIPAQLGSMTDLESLDLSCNQLSGDIPQELTDLTFLGSLNLSYNHLVGKIPQSRQFSTFDSSSFEGNAGLCGLQLPKFPCGSSPHSPGVAHGDKSSRHIDVVLFLFVGLGFGVGFAAAIVVKWDRFGRCFYCNCKSLAYLIT

SEQ ID NO: 69563 - protein, 190 aa, Setaria italica
  Transcript Sequence Number=SeqID_3589
  Gene Ontology: Mol. function=RNA binding; Cellular component =ribosome; Biological process=translation
  Homolog annotation: Hit_ID=Q6L5I7; Match level="QueryCoverage=94%, HitCoverage=30%, E-value=7e-61, Identity=63%"; Hit description =Putative 30S ribosomal protein S1
  Pfam annotation: Domain name=S1; Domain location=36-109; Score=45.4; E_value=2.2e-10; Accession=PF00575.15; Description=S1 RNA binding domain
RLENKFGSNIRVCIARFDEETNDLIISEMEAWEMTYLREGTLLQGSVRKIFPYGAQIRIAGTNRSGLLHISNISRGRVLSVSDILKIDDEVKVLVIKSNVPDKIALSIADLESAPGLFLSDREKVFSEAEAMAKRYREQLPVISQNTILDDSLPGEALPFDDEAKLYANWKWFKFLHHNKPGDNSSGDLP

SEQ ID NO: 69564 - protein, 95 aa, Setaria italica
  misc_feature (9)..(9): Xaa can be any naturally occurring amino acid
  misc_feature (16)..(16): Xaa can be any naturally occurring amino acid
  Transcript Sequence Number=SeqID_3590
  Gene Ontology: Mol. function=transferase activity, transferring nitrogenous groups; Biological process=biosynthetic process
  Homolog annotation: Hit_ID=B6TK79; Match level="QueryCoverage=98%, HitCoverage=20%, E-value=5e-39, Identity=84%"; Hit description =Aspartate aminotransferase
APSAIAEAXGMNAIRXGCTRYTPNARTLELRKAICAKLQEENGIPYSPDKVLVSNGAKQCITQAVLAVCSPGDEVLIPAPYWVNYPEMARLADAT

SEQ ID NO: 69565 - protein, 142 aa, Setaria italica
  Transcript Sequence Number=SeqID_3591
  Homolog annotation: Hit_ID=Q7XQ05; Match level="QueryCoverage=98%, HitCoverage=18%, E-value=2e-23, Identity=52%"; Hit description =OSJNBa0036B21.17 protein
QGSTEYCKAHGGGKRCVFGGGCEKFARGRSGLCAAHGTLVASQQHRCGGAGAGMIGPGLFHGIVRSASAANMNNNEYSSSGVSTVSDCGDGSPVLAVGRLELIPPQVLVPHSMKSLTPAAPAPERSREGGVVAVPEGRVHGG

SEQ ID NO: 69566 - protein, 435 aa, Setaria italica
  Transcript Sequence Number=SeqID_3592
  Gene Ontology: Mol. function=oxidoreductase activity, acting on the CH-OH group of donors, NAD or NADP as acceptor; Biological process =metabolic process
  Homolog annotation: Hit_ID=Q8S5W4; Match level="QueryCoverage=99%, HitCoverage=69%, E-value=1e-178, Identity=71%"; Hit description =Putative C-terminal binding protein
  Pfam annotation: Domain name=2-Hacid_dh_C; Domain location=1-112; Score=-20.7; E_value=3.1e-08; Accession=PF02826.11; Description=D -isomer specific 2-hydroxyacid dehydr
KLVKRPSIVFPSAARRMDTLNDLLAASDLVSLHCALTNDTTHILNAERLQHIKPGAFIVNTGSCQLIDDCALKQLLIDGTIAGCALDGAEGPQWMEAWVREMPNVLILPRSADYSEEVWMEIREKAIAILQSFLYDGVVPNNVISDEDEEISEVGCEDDQLGKQEKEHALQVGDGEQHTEESQLTTDYDKRRAISQPEEPQASAQSHSIGSRSEGRRSRSGKKGKKRPARRRTQQKMDELLTVEGGSNYSSRRDDDNQVLSSSSRFASPEDSKNKQKSSAESPMEIISENKLPAGLGRQPPEKLKEGFVIALKTRDNSGFYVSRERVAGGGWYLDVVPNATKRDPAAQFLVTFRNKDTMGLRSFVAGGKLLQANNKMEFVFANHSFDVCESWMLEGSLSECCKLVNRKNSSAVLEVYFEILGAPSEEDGVIRWLD

SEQ ID NO: 69567 - protein, 54 aa, Setaria italica
  Transcript Sequence Number=SeqID_3593
MADREKAEAEAGEEYESDLDDAPLAALRRRDAASDDEGEEDDEDGGTPLRRING

SEQ ID NO: 69568 - protein, 71 aa, Setaria italica
  Transcript Sequence Number=SeqID_3594
SSDLVLVFESPLHRTSCLRMFVCTQLRRRDSAIHYMPRECNGTSSITKHKCKTTQIPSITMHARCKKKLHV

SEQ ID NO: 69569 - protein, 64 aa, Setaria italica
  Transcript Sequence Number=SeqID_3595
  Gene Ontology: Cellular component=cytoplasm; Biological process =response to biotic stimulus
  Homolog annotation: Hit_ID=Q4VQB3; Match level="QueryCoverage=100%, HitCoverage=40%, E-value=8e-25, Identity=85%"; Hit description =Pathogenesis-related protein 10d
MAATNSWTLEIASPVAAPRLFRAAVMDWHTLAPKLVSDVVASAHPVEGEGGVGSVRQFNFTSAM

SEQ ID NO: 69570 - protein, 43 aa, Setaria italica
  Transcript Sequence Number=SeqID_3596
  Gene Ontology: Biological process=response to biotic stimulus
  Homolog annotation: Hit_ID=B5B3P8; Match level="QueryCoverage=100%, HitCoverage=26%, E-value=3e-14, Identity=90%"; Hit description =Pathogenesis related protein 10
VDSTYKLLPGVEVKDEIAKAKESVTAIFKAAEAFLVANPDAYN

SEQ ID NO: 69571 - protein, 161 aa, Setaria italica
  Transcript Sequence Number=SeqID_3597
  Gene Ontology: Cellular component=cytoplasm; Biological process =response to biotic stimulus
  Homolog annotation: Hit_ID=Q4VQB3; Match level="QueryCoverage=100%, HitCoverage=100%, E-value=4e-74, Identity=85%"; Hit description =Pathogenesis-related protein 10d
  Pfam annotation: Domain name=Bet_v_I; Domain location=2-156; Score =85.6; E_value=1.7e-22; Accession=PF00407.11; Description =Pathogenesis-related protein Bet v I family
MASANSWTLEIASPVAAPRLFRAAVMDWHTLAPKLVSLVVASAHPVEGEGGVGSVRQFNFTSAMPFSFMKEKLEFLDVDKCECKSTLVEGGGIGVAIESATSHIKVEPAAGGGSVVKVESTYKPLPSVEMKEDDVAKAKESVTAIFKAAEGYLVANPDAYN

SEQ ID NO: 69572 - protein, 85 aa, Setaria italica
  Transcript Sequence Number=SeqID_3598
  Gene Ontology: Mol. function=zinc ion binding; Cellular component =intracellular
  Homolog annotation: Hit_ID=B9RJ95; Match level="QueryCoverage=97%, HitCoverage=17%, E-value=2e-09, Identity=45%"; Hit description =Nucleic acid binding protein, putative
AGDGGGVRTMATSGRAHDAVAGAPLDQEEEERRCRAMLVCRVIAGRVKRPTQLGEEEEASSEEFDSVAASAGVYSNLEELQVFNP

SEQ ID NO: 69573 - protein, 108 aa, Setaria italica
  Transcript Sequence Number=SeqID_3599
  Gene Ontology: Mol. function=protein serine/threonine kinase activity; Biological process=protein amino acid phosphorylation
  Homolog annotation: Hit_ID=B9SP66; Match level="QueryCoverage=40%, HitCoverage=10%, E-value=3e-10, Identity=68%"; Hit description =Serine/threonine-protein kinase PBS1, putative
LCVRIGLLCVQADPRLRPDMKRVVIILSKKQSTLEEPTRPGVPGSRYRRRPHGLRGSHYSAGSSSGTSSPSTSATSHASASASNAMTTSSTHTLRSHGGLPSHREEQE

SEQ ID NO: 69574 - protein, 1109 aa, Setaria italica
  Transcript Sequence Number=SeqID_3600
  Gene Ontology: Mol. function=cysteine-type peptidase activity; Cellular component=nucleus; Biological process=proteolysis
  Homolog annotation: Hit_ID=B9S9I8; Match level="QueryCoverage=36%, HitCoverage=46%, E-value=1e-119, Identity=52%"; Hit description =Sentrin/sumo-specific protease, putative
  Pfam annotation: Domain name=Peptidase_C48; Domain location=310-522; Score=131.4; E_value=2.8e-36; Accession=PF02902.11; Description=Ulp1 protease family, C-terminal catalytic domain
MNHAEVSGLLCVSMNETDGGEESYGAEYPKMDQDTSHETAKFDVVMATSALYTDNINTNACLDEYHMSGIQAMEEIRFGSAQPFEIQPKGMVTNSEEESMPSSPETSSTSNYDMPGYMEQNLQHVHNAYDAMVERAGPVVLSPAFIICDETSHLQPRLTFSLDGVKIEYLNLDSFEGEKMIALQWEISNIISISCKWAQSVGYAFITLLAGSEVESGNAAPVRVQFCLDDSQWSRRQQKIWELQPRYQEIWKDIPSDDFTSENWSIEPNLFFPRQYFSSTEDFEDIIYPQGDPDAVSISKRDAELLLPETFVNDTIIDFYIKYLSTRIESTEKRRYHFFNSFFFRKLADLDKDQGRAPEGRAAFLRVRKWTRKINVFEKDFLFIPVNFNLHWSLIVICYPGEVATSKDGDAKLAAELPCILHMDSLKGSHTGLKDIIQSYLWEEWKERHPESASDISDKFLNLRFVSLELPQQDNSFDCGLFLLHYVELFLMDAPSNFNPLKIDVFSDFLSGDWFAPAEASLKRSVVRKLIHEVVTGSFQNHPKLACGSEQLDERHQRCSNAEQEPAGEFLAQRRSDVEPETVCKVRDGTHELQPSESICLNDSEEKRVPASGCMLDTGRVSIVDVQNRQESEVCAADEDTIVCMSNQDEKNELLIAESNNQLNMRSCAPKEDEVLKGSNCVVTDKEHGESLFLSLDNNQKIPSQAEVEVQDIMVSTSCADNEIAAQVIACQEHSFQRSAEVGDGCFRPSQDMDSVMMLDSSKDDDGLNPERMTAEGDCGGPHEDMDSVTLHKDAVDTKCEDSLLDPIAENAIIENVNEISTADSVTVETAIIENVKDVSTTADNVNHGELYVSSQLAEGNTDNGMTGAGNTDNGTTGVSTASPGLKEENIDKVVADDCTHESDINAKYSSELKVGNTDIGGITVSSDVNEGNTDQIIAGDCANETDVNADGEGADNCKHFAMDGAAPCADAATCTDGVVLSIDVPCSTINETVSENISSDAQSPLPDGTSKLVDRPCSPKNETSEITSLDGKRPAPDGTSEENDIVIPGDKCTQKDGGQGTDAKIERHYKRRKVLALEKQRSFSGATSLDKVLALEKQRSFSGATSLD

SEQ ID NO: 69575 - protein, 64 aa, Setaria italica
  Transcript Sequence Number=SeqID_3601
FSITSLLHGVDVLIVILYYAYIDLPPMLSKHTQHITPVLPCLYFNKQKNRNNAAKISTTTKHGN

SEQ ID NO: 69576 - protein, 295 aa, Setaria italica
  misc_feature (267)..(267): Xaa can be any naturally occurring amino acid
  Transcript Sequence Number=SeqID_3602
  Gene Ontology: Mol. function=peptidase activity; Cellular component =endoplasmic reticulum membrane; Biological process=proteolysis
  Homolog annotation: Hit_ID=Q7X7Q3; Match level="QueryCoverage=99%, HitCoverage=33%, E-value=1e-144, Identity=84%"; Hit description =OSJNBa0019D11.4 protein
  Pfam annotation: Domain name=Peptidase_M28; Domain location=1-128; Score=63.2; E_value=9.6e-16; Accession=PF04389.9; Description =Peptidase family M28
KSGVLFLFNTGEEEGLDGAHSFITQHHWRNSVRFAIDLEAMGISGKSTLFQATDHWALESFAAVAKYPSAQIASQDVFRSGAIKSATDFQIYQEVAGLPGLDFAYTDTTSVYHTKNDKMKLLKPGSLQHIGDNMLAFLLHSAASPNFLKNAQEQKKENTEQNKVVFFDILGKYMVVYPQRLATMFHNSIILQSLLIWGTSLLMGGRPGLVSFGISCLSIILMLIFSICLPVVVAFILPHICPFPVPYVANPWLIIGLFGSPALLGAXFIGQHVGFILLKRHLRHVYSRTKPSLNS

SEQ ID NO: 69577 - protein, 93 aa, Setaria italica
  Transcript Sequence Number=SeqID_3603
  Subcellular localization annotation: CTP_CleavageSite=13; ConfidenceScore=5.62e-01
MAASPVVLRSRVLARAVSSSLRRSILGAHPHPPSSPLAASSRPSVVHRLPSVCGGLLTVMPLHSAVASTRLRSAISPESQSWGVVPQGNSMPL

SEQ ID NO: 69578 - protein, 55 aa, Setaria italica
  Transcript Sequence Number=SeqID_3604
NSFQSPDSILTIPKPNQTLIFLTETPKDDTSVDPAWMAEGRGRATPRVRVPVESV

SEQ ID NO: 69579 - protein, 95 aa, Setaria italica
  Transcript Sequence Number=SeqID_3605
  Gene Ontology: Mol. function=transferase activity, transferring glycosyl groups; Biological process=queuosine biosynthetic process
  Homolog annotation: Hit_ID=Q6K4A3; Match level="QueryCoverage=74%, HitCoverage=17%, E-value=3e-27, Identity=83%"; Hit description =Queuine tRNA-ribosyltransferase
AMGSQLLSNLIQFNMMRLSRDLHTSILEGRFPEFVRGFLRAQFPKGDVPQWVRNAMEVAGIDISECCASAKCHTPSIQEPPIPVPVEVNGVVQQN

SEQ ID NO: 69580 - protein, 180 aa, Setaria italica
  misc_feature (78)..(78): Xaa can be any naturally occurring amino acid
  Transcript Sequence Number=SeqID_3606
  Gene Ontology: Mol. function=transferase activity, transferring glycosyl groups; Cellular component=transcription factor TFIID complex; Biological process=queuosine biosynthetic process
  Homolog annotation: Hit_ID=B9G435; Match level="QueryCoverage=95%, HitCoverage=38%, E-value=9e-94, Identity=95%"; Hit description =Queuine tRNA-ribosyltransferase
  Pfam annotation: Domain name=TGT; Domain location=1-179; Score=172.2; E_value=1.5e-48; Accession=PF01702.10; Description=Queuine tRNA -ribosyltransferase
MGVCSVQCSIVAHKKPDVQNLFGIVQGGLDPVLRDICVRGLVERNLPGYAIGGLAGGEDKDSFWRVVAQCTAGLPENXPRYVMGVGYPLDIVVCSALGADMYDCVYPTRTARFGTALVPEGLLKLKQNAMATDERPIDPTCSCMVCKKYTRAYLHCLVTKDAMGSQLLSYHNLSFMMRLS

SEQ ID NO: 69581 - protein, 110 aa, Setaria italica
  Transcript Sequence Number=SeqID_3607
  Gene Ontology: Mol. function=potassium ion transmembrane transporter activity; Cellular component=integral to membrane; Biological process=potassium ion transport
  Homolog annotation: Hit_ID=Q9AYN4; Match level="QueryCoverage=100%, HitCoverage=14%, E-value=3e-49, Identity=83%"; Hit description=High -affinity potassium transporter
FMSIKHLPISHVVPAERFLFRQVGPREHRMFRCVARYGYSDSLEEPKEFAGFLVDRLKMFIQEEIAFAQNDAENEDHTEVPDAPTRPRRSTNSVVHSEEAIEPRVSSNSG

SEQ ID NO: 69582 - protein, 103 aa, Setaria italica
  Transcript Sequence Number=SeqID_3608
  Homolog annotation: Hit_ID=Q67V48; Match level="QueryCoverage=82%, HitCoverage=9%, E-value=6e-13, Identity=49%"; Hit description =Putative microtubule-associated protein MAP65-1a
CSIYNTQYLANQIIQSTSRLKEIVKKRRTELEEICQNAHIEPDVSTAPEQTDALIDSGCCLCILLCYYIQMFSCFLQIMTFLCRCHPGLIDPSELLANIESQI

SEQ ID NO: 69583 - protein, 125 aa, Setaria italica
  Transcript Sequence Number=SeqID_3609
  Gene Ontology: Cellular component=vacuole
  Homolog annotation: Hit_ID=Q67V48; Match level="QueryCoverage=95%, HitCoverage=20%, E-value=1e-59, Identity=92%"; Hit description =Putative microtubule-associated protein MAP65-1a
GTRNKIKWIAACDEEAWLEEYNQDPKRYSAGRGAHINLKRAEKARILVIKIPSMVDNLINRTFAWENARNKPFLYDGGRLISVLEEYRLSRHQKEEEKRRYRDQKKLESILLAEKEAIFGSKLSP

SEQ ID NO: 69584 - protein, 596 aa, Setaria italica
  Transcript Sequence Number=SeqID_3610
  Homolog annotation: Hit_ID=Q67V48; Match level="QueryCoverage=97%, HitCoverage=98%, E-value=0.0, Identity=83%"; Hit description =Putative microtubule-associated protein MAP65-1a
  Pfam annotation: Domain name=MAP65_ASE1; Domain location=37-595; Score=81.0; E_value=4.3e-21; Accession=PF03999.4; Description =Microtubule associated protein (MAP65ASE1 family)
MVGVGAGLGLGMEGTSCGALLKELQQIWAEVGESESEKNKVLLDIERECLEVYRRKVDDANRTRVQLHQSVAAKESEVASLMATLGEHKLYLKKDKGVVSLKEQLAAVVPVLENLKCKKEERIKQLSDVRSQIEKIRFELSEFNDQGDNASSLAADEHDLSTRTLNSYQAQLRALQKDKSERLRKVLEYINEVHSLCGVLGIDFGSTVNEVHPSLHQNGVEQSRNISNSTLEGLASTISKLKAERKSRIHKMRETMESLCQLWKLMDSPEEEKRQFSKVMSSLILPEEGITSPGVLSQEKIEKMEAEVERLTKLKTSRLKEIVKKRRTELEEICQNAHIEPDVSTAPEQTDALIDSGLIDPSELLANIESQILKAKEESLSRKDIMDRINKWIAACDEEAWLEEYNQDPKRYSAGRGAHINLKRAEKARILVIKIPSMVDNLINRTFAWENARNKPFLYDGGRLISVLEEYRLSRHQKEEEKRRYRDQKKLESILLAEKEAIFGSKLSPKRTNSLNRKTNGYRPNGNTNGLKTPTPRRSSLGSATSELLTPRSYSGHNRYFGDLRRLSTSHLNFGDDSLSTFTSISGSEPESPPLG

SEQ ID NO: 69585 - protein, 126 aa, Setaria italica
  Transcript Sequence Number=SeqID_3611
  Gene Ontology: Mol. function=oxidoreductase activity; Biological process=oxidation reduction
  Homolog annotation: Hit_ID=B6SUN2; Match level="QueryCoverage=100%, HitCoverage=33%, E-value=5e-55, Identity=83%"; Hit description=1 -aminocyclopropane-1-carboxylate oxidase
  Pfam annotation: Domain name=2OG-FeII_Oxy; Domain location=1-74; Score=43.2; E_value=1e-09; Accession=PF03171.12; Description=2OG -Fe(II) oxygenase superfamily
VLAQDCVGGLQVKQTDDDGASYWVDVKPVPGALVINVGDLLQIMSNDKYKSVDHRVIMNTREEARVSIGIFFNPGKRGDSDFYGPLPELVSSDNPSKYRNFTMPEFLGAFFRRDLASKALVDYFKL

SEQ ID NO: 69586 - protein, 176 aa, Setaria italica
  misc_feature (92)..(92): Xaa can be any naturally occurring amino acid
  Transcript Sequence Number=SeqID_3612
  Gene Ontology: Mol. function=oxidoreductase activity; Biological process=oxidation reduction
  Homolog annotation: Hit_ID=B6SUN2; Match level="QueryCoverage=100%, HitCoverage=43%, E-value=3e-72, Identity=76%"; Hit description=1 -aminocyclopropane-1-carboxylate oxidase
  Pfam annotation: Domain name=2OG-FeII_Oxy; Domain location=7-124; Score=114.8; E_value=2.9e-31; Accession=PF03171.12; Description=2OG -Fe(II) oxygenase superfamily
EEASCLEGRVMVCHYYPVCPEPERTMGIVPHTDPGGLTVLAQDCVGGLQVKQTHDDGASYWVDVKPVPGALVINVGDLLQIPFFDMTTSIHXIMSNDKYKSVDHRVIMNTREEARVSIGIFFNPGKRGDSDFYGPLPELVSSDNPSKYRNFTMPEFLGAFFRRDLASKALVDYFKL

SEQ ID NO: 69587 - protein, 335 aa, Setaria italica
  Transcript Sequence Number=SeqID_3613
  Gene Ontology: Mol. function=nucleic acid binding
  Homolog annotation: Hit_ID=Q9SFY4; Match level="QueryCoverage=97%, HitCoverage=17%, E-value=6e-78, Identity=47%"; Hit description =T22C5.20
  Pfam annotation: Domain name=CUE; Domain location=248-290; Score =45.7; E_value=1.8e-10; Accession=PF02845.8; Description=CUE domain
ASLQVLTSTGSIDNGYVQLYKDFLEVLDFINDAIVTLDSFVGAYQPAALLFCTNFEMNYGVEELLNTLSRLYDSLLPSLLQGFKVMSKSQSNREASPDSMLSDTALGIRMLSKRTIKFGWRLLHYCYLNDQLKEHDAQTSTKMFPANVEDPMIRGDILVQTLKDINREAAYSSQLNHGSTFLQSLESEFQLMSQIDNIRNKGWIYMDDEQFQFISRLCGSTHSWNSVPDLPVSSHGGELQQKDEETAMIESKISQIRDLFPDYGKGFLAACLEAYNLNPEEVIQRILEGTLHQDLLALDTSLEEMPQEKLTPTAVKDKGKGILVETAPQITAKPY

SEQ ID NO: 69588 - protein, 142 aa, Setaria italica
  Transcript Sequence Number=SeqID_3614
  Homolog annotation: Hit_ID=Q5VS03; Match level="QueryCoverage=100%, HitCoverage=38%, E-value=3e-38, Identity=59%"; Hit description =Selenium-binding protein-like
SNCKWQLSDPCKKNLSCCCSVPQNTPDTMHYLGCSYGYLIFTYEEDCLLVDAYTGAKVKTPNLPCDNELGFTSGIGILTAPLSSPNSCLLLFSRASMFEWQVGTNSWSVHPFDLDRERIHQIVSFKGHILVIDALMRLHSVQ

SEQ ID NO: 69589 - protein, 413 aa, Setaria italica
  misc_feature (30)..(30): Xaa can be any naturally occurring amino acid
  Transcript Sequence Number=SeqID_3615
  Gene Ontology: Mol. function=translation release factor activity, codon specific; Cellular component=cytoplasm; Biological process =translational termination
  Homolog annotation: Hit_ID=B9S3U7; Match level="QueryCoverage=87%, HitCoverage=97%, E-value=1e-176, Identity=81%"; Hit description =Peptide chain release factor, putative
  Pfam annotation: Domain name=PCRF; Domain location=113-228; Score =207.9; E_value=2.7e-59; Accession=PF03462.10; Description=PCRF domain
  Pfam annotation: Domain name=RF-1; Domain location=257-370; Score =223.2; E_value=6.8e-64; Accession=PF00472.12; Description=Peptidyl -tRNA hydrolase domain
  Pfam module annotation: Pfam domain module=PCRF::RF-1; Domain location=113-228::257-370
  Subcellular localization annotation: CTP_CleavageSite=44; ConfidenceScore=5.29e-01
MEAFLAGFFRAPPPLRPRRSRCSDLLRPSXFHGRRRRRPSSSVVCMAEPYLIAKLDSAEKAWKEMSVRLADPDIVSDPSEYQKLAQSVAELDQVVTTYRQFKDCERNLEETKALQKENEEDPDMAEMIASELEALSNQLAGLEEKLKLLLIPSDPLDARNILLEVRAGAGGDEAGIWAGDLVRMYQRYCERNNWKFKPVSCSEAEMGGYKTYVMEVKGKQVYSKLKFESGVHRVQRVPQTETMGRVHTSTATVAIMPEADEVDVVIDPKDIELKTARSGGAGGQNVNKVETAVDLIHKPTGIRIFCTEERSQLQNRERAFQLLRAKLYEIKLREQQESIRNQRKLQVGTGARSEKIRTYNYKDNRVTDHRLKMNFELTSFLLGDIESAVQSCATLEQQELLEEMASSVGVAKV

SEQ ID NO: 69590 - protein, 102 aa, Setaria italica
  Transcript Sequence Number=SeqID_3616
SRLKQKDLAYEELQKLDRFAVTYLSTQTQLCIIKFTEKYRRCYQRGVRTFTRGIIHHGENSSAIILAPRKAKHKYANQAVAKDPSTASQSAAPRWTAAMELR

SEQ ID NO: 69591 - protein, 93 aa, Setaria italica
  Transcript Sequence Number=SeqID_3617
  Gene Ontology: Mol. function=metal ion binding; Cellular component =nucleus; Biological process=regulation of transcription, DNA -dependent
  Homolog annotation: Hit_ID=A3A2Z8; Match level="QueryCoverage=73%, HitCoverage=14%, E-value=5e-14, Identity=60%"; Hit description =Squamosa promoter-binding-like protein 3
TRAVSGAGARELLQWHCRCPWDREPETAHQDFAGFMAFKGTSAKVLNQGVEASVVASDSNGNPDLQRALSLLSNNSADAGNNQPTTQLHPGLK

SEQ ID NO: 69592 - protein, 485 aa, Setaria italica
  misc_feature (247)..(247): Xaa can be any naturally occurring amino acid
  Transcript Sequence Number=SeqID_3618
  Gene Ontology: Mol. function=metal ion binding; Cellular component =nucleus; Biological process=regulation of transcription, DNA -dependent
  Homolog annotation: Hit_ID=A3A2Z8; Match level="QueryCoverage=94%, HitCoverage=98%, E-value=1e-113, Identity=52%"; Hit description =Squamosa promoter-binding-like protein 3
  Pfam annotation: Domain name=SBP; Domain location=188-266; Score =177.6; E_value=3.6e-50; Accession=PF03110.6; Description=SBP domain
MMDDPSTRRTAGIFGSGMGSFGMDWSQKGSVLWDWENLPPIGANGNLVPQAEAKFAGVEITRHGSVHSSCGTFSSSSEMGYGSSKSSISASIDSSPKAGNNMELNFAPARVPDKYIRKNTDLRTSPSSVIAVSSGEPVLSLKLGKRTYFEDACGGQSVKSSPSDSSIVTPPAAPVKKAKAAQNVQNSYCQVEGCKIDLSSAKDYHRKHKVCEAHSKAPKVVVAGLERRFCQQCSRFHGLDVFDQKKXSCRRRLNDHNARRRKPQPEAISFGSSRLPAMFYGTDPRQQTSLLFGQAPYGQIRSRASSSWDNPGGAFKFAETKASWLKPAGATGLDALHLSSQQVWNNIMPHGAHQDFAGFMAFKGTSAKVLNQGVEASVVASDSNGNPDLQRALSLLSNNSADAGNNQPTTQLHPGLSALASTSNAVMQQASPPGLWQDGTALDLHARFQALDPMGNGSAIAAAHELQLPRPPSYNGSSSHYDLTR

SEQ ID NO: 69593 - protein, 231 aa, Setaria italica
  Transcript Sequence Number=SeqID_3619
  Gene Ontology: Mol. function=RNA binding; Biological process=RNA processing
  Pfam annotation: Domain name=DRY_EERY; Domain location=51-177; Score =141.6; E_value=2.4e-39; Accession=PF09750.1; Description=Alternative splicing regulator
GLPAAPKPQSPPPLSFLTETLELLRRASDPQSRRLGEKRKAEEAGSHTSTMDLEIVGRHALLFDDDATAEVVNSGGSLVPWAAIGAADLLLDRHDVRHLLDCVPPRPRRAYSAAILYVPSSDGVSEAELDRERYLDLPDADGDGEDEGSGDAAPSGNGTDTRQSDCSSVPFSYGSSAGSDDPNSLGSYYRPSFYVPDSLLNKLVSICFGLSLLTSLFSHKYDRNLFLRPFY

SEQ ID NO: 69594 - protein, 65 aa, Setaria italica
  Transcript Sequence Number=SeqID_3620
DSDEDFVVIRRPLLVAQAPPPYLPTTVDTRGFRPDLWSSRMRQKYGLNTSDYTYNTVDANAAPPQ

SEQ ID NO: 69595 - protein, 251 aa, Setaria italica
  Transcript Sequence Number=SeqID_3621
  Gene Ontology: Cellular component=integral to membrane
  Homolog annotation: Hit_ID=B6TTZ1; Match level="QueryCoverage=74%, HitCoverage=70%, E-value=2e-24, Identity=33%"; Hit description =Tetraspanin family protein
  Pfam annotation: Domain name=Tetraspannin; Domain location=23-179; Score=-6.5; E_value=0.002; Accession=PF00335.12; Description =Tetraspanin family
MMMMGRRSGEGGRSRQGLGWAACCLGFLLKLLAFLQAFAAVSAILYAAWILSRWARHHHLHLQDLLPGLWFPSLVMAAGLFYCILLLAGYLAAEINTGCCLCFYTIPAMAMMLLEAALAAHLTINEHWIQDLPDDRTGELHNLLSFIHNNLDLCKWVALAIFATQALSLFLAMILRAMLSARTMDYDSDEDFVVIRRPLLVAQAPPPYLPTTVDTRGFRPDLWSSRMRQKYGLNTSDYTYNTVDANAAPPQ

SEQ ID NO: 69596 - protein, 135 aa, Setaria italica
  Transcript Sequence Number=SeqID_3622
  Gene Ontology: Mol. function=hydrolase activity
  Homolog annotation: Hit_ID=B9RPB1; Match level="QueryCoverage=74%, HitCoverage=35%, E-value=1e-15, Identity=44%"; Hit description=Sigma factor sigb regulation protein rsbq, putative
PNAVGDPASVPPVEESFLAMRPGVALEVARMIFLGDQREALGAVTAPCTIVQVEGDFAAPPGVAEHMRRLMARAAATDVVIIDSVGHFPQLVAPQQLLGVLEGVLRRHGGGEDGRAHGGAVEEQVADGGINIITA

SEQ ID NO: 69597 - protein, 215 aa, Setaria italica
  Transcript Sequence Number=SeqID_3623
  Gene Ontology: Mol. function=hydrolase activity
  Homolog annotation: Hit_ID=B9RPB1; Match level="QueryCoverage=89%, HitCoverage=71%, E-value=2e-39, Identity=43%"; Hit description=Sigma factor sigb regulation protein rsbq, putative
MRWYANVREVVGGGGATVVLAHGYGANQALWDKLLPALSQRNRVILFDWDFTGGGEQQPEEEGRYTFGRFADDLIALLDNKGVRGAVMVGHSMSAMAACIASVRRPDLFSHLVLLCASPRYINSPEEGYVGGFEKAGIDGMLDAMSSDFVSWVKGFVPNAVGDPASVPPVEESFLAMRPGVALEVARMIFLGDQREALGAVTAPCTIVQVASISN

SEQ ID NO: 69598 - protein, 51 aa, Setaria italica
  Transcript Sequence Number=SeqID_3624
INKSLIQCSFIRLFGILRRKKPECRNDDEQQTVLTKRKITFNTVVQLGIKI

SEQ ID NO: 69599 - protein, 56 aa, Setaria italica
  Transcript Sequence Number=SeqID_3625
GQILMELVVVASQLKVHLGLVLHCTSQFCHSDWMQQPPACMQMNDLSSELDTSISK

SEQ ID NO: 69600 - protein, 28 aa, Setaria italica
  Transcript Sequence Number=SeqID_3626
MKFRVVCRKLYDYVRYDLKEIAFPSSLP

SEQ ID NO: 69601 - protein, 174 aa, Setaria italica
  Transcript Sequence Number=SeqID_3627
LVLVVRYDLKEIAFPSSLPDPPHIKKRPKLTWHDHWCILKEVTRLYGASWVRDIGPDLRPNDYKKAVENDAEEPSNGKPISDNGKKGKSSEPSVLEDLAVAARGGAETLKPTLRRIYMTRAATYTDAMKNFVETYQEGLKDQLQEKAADGEAGRQQPQQGDEAMLKPPPPPSSS

SEQ ID NO: 69602 - protein, 237 aa, Setaria italica
  Transcript Sequence Number=SeqID_3628
  Gene Ontology: Mol. function=nucleic acid binding; Cellular component= ribonucleoprotein complex; Biological process=mRNA processing
  Homolog annotation: Hit_ID=B9RNK5; Match level="QueryCoverage=70%, HitCoverage=59%, E-value=3e-52, Identity=57%"; Hit description =Ribonucleoprotein, chloroplast, putative
  Pfam annotation: Domain name=RRM_1; Domain location=180-237; Score =31.8; E_value=2.8e-06; Accession=PF00076.14; Description=RNA recognition motif. (a.k.a. RRM, RBD, o
  Pfam annotation: Domain name=RRM_1; Domain location=77-147; Score =78.2; E_value=3e-20; Accession=PF00076.14; Description=RNA recognition motif. (a.k.a. RRM, RBD, o
  Pfam module annotation: Pfam domain module=RRM_1::RRM_1; Domain location=180-237::77-147
SRARASSGPPPPPVFETVEEEEEEREWSDAEAEFSDGVEDEQEWAGGNGAARGEDRGADAGEDLSGWTRQWPRPRELFVCNLPRRCDVEDLLQLFRPHGTVLSVEVSRDTETGISRGTAFVTMRSLAEARTAINALDGFDLDGREIFVKLASDVISNRKNVNLTHITPTKDHIFESPHKLYYGNLLWSVQPQDLRELFTQCGTVVSTRLLTDRKGGRNRVYGFLSFSSAEELEAALK

SEQ ID NO: 69603 - protein, 176 aa, Setaria italica
  misc_feature (43)..(43): Xaa can be any naturally occurring amino acid
  misc_feature (83)..(83): Xaa can be any naturally occurring amino acid
  Transcript Sequence Number=SeqID_3629
  Subcellular localization annotation: CTP_CleavageSite=14; ConfidenceScore=5.17e-01
ACRAPAGAAGTAPAAGAGAGSPARRPRRRAARHDPELNPLRVXGLLAGVARGVDDVDAGVGAAAGGEGDGDEPPRRLVPAHGXTAAGLSTFGQPRGAEPNRNCPLTCCWSKHQAEQIAAAAAGQVVSLYSSEKGALGPHARAAALAPPATGRPPSSLQRSAAGEEASGAEQGSRIL

SEQ ID NO: 69604 - protein, 148 aa, Setaria italica
  Transcript Sequence Number=SeqID_3630
VGFHRLCDSSSGGRREAAVVSSRDRTHAARSGVGGEVDREEERGGEEKSGTRGKMSEERPVPRRESPWGLPEGDTRQPKAHRCNDRAEDVVQAVFEGNPFKTVPGPFKLFLQCMRSKPGEEPTEPYTYLQLDPPRRVEVNVEQTASES

SEQ ID NO: 69605 - protein, 143 aa, Setaria italica
  Transcript Sequence Number=SeqID_3631
REAAVVSSRDRTHAARSGVGGEVDREEERGGEEKSGTRGKMSEERPVPRRESPWGLPEGDTRQPKAHRCNDRAEDVVQAVFEGNPFKTVPGPFKLFLQCMRSKPGYVYLLIIYVFDAFGISYLVCKSVIQCEGLLDSSNALKL

SEQ ID NO: 69606 - protein, 164 aa, Setaria italica
  misc_feature (83)..(83): Xaa can be any naturally occurring amino acid
  Transcript Sequence Number=SeqID_3632
  Gene Ontology: Mol. function=potassium channel activity; Cellular component=integral to membrane; Biological process=potassium ion transport
  Homolog annotation: Hit_ID=B5LZY0; Match level="QueryCoverage=96%, HitCoverage=46%, E-value=4e-66, Identity=76%"; Hit description =Voltage-dependent outwardly rectifying plasma membrane K+ channel KCO1/TPK1
  Pfam annotation: Domain name=Ion_trans_2; Domain location=10-85; Score=42.7; E_value=1.4e-09; Accession=PF07885.8; Description=Ion channel
IKYKFYTVTLLLVMIIVTGNLFLWKVEKLSLVDSFYCVCATMTTLGYVDKCFSSKLGPIFAIFWVIMSTILLAQFFQYVAELXQKMLAKWVLIRRITTMDLEAADLDGDHQVGAAEFVLYKLKKLGKISQEEISSFLEEFDKLDVDQSGTISTYDLTLAQQISL

SEQ ID NO: 69607 - protein, 347 aa, Setaria italica
  Transcript Sequence Number=SeqID_3633
  Gene Ontology: Mol. function=potassium channel activity; Cellular component=integral to membrane; Biological process=potassium ion transport
  Homolog annotation: Hit_ID=B5LZY0; Match level="QueryCoverage=100%, HitCoverage=100%, E-value=1e-148, Identity=73%"; Hit description =Voltage-dependent outwardly rectifying plasma membrane K+ channel KCO1/TPK1
  Pfam annotation: Domain name=Ion_trans_2; Domain location=190-265; Score=67.5; E_value=5.1e-17; Accession=PF07885.8; Description=Ion channel
  Pfam annotation: Domain name=Ion_trans_2; Domain location=69-151; Score=79.5; E_value=1.2e-20; Accession=PF07885.8; Description=Ion channel
  Pfam module annotation: Pfam domain module=Ion_trans_2::Ion_trans_2; Domain location=190-265::69-151
MADDSIHQAFIEDPPNVPKEKPSEGAKRFRRCRSTPADPTDQKPSERGSALQAKELFKDIRPSFRLVGLLLFIYLLLGVIIFYLFMDQISGKRTNRVLDAMYFVIVTMTSVGYGDLVPKSDTTKLLACAFVFTGMAVIALFISKAADYLVEKQEVLFFKAMHMNMKGGEAKMLRAMETNRIKYKFYTVALLLVMIIVTGTLFLWKVEKLSFVDSFYCVCATITTLGYGDKSFSSKLGRVFAIFWIIMSTILMAQFFLYLAELYTERRQKMLAKWVLNRRITTMDLEAADLDGDRQVGAAEFVLYKLKELGKISQEEISSFLEEFDKLDVDQSGTISTYDLTLAQTSQ

SEQ ID NO: 69608 - protein, 172 aa, Setaria italica
  Transcript Sequence Number=SeqID_3634
  Gene Ontology: Mol. function=protein binding; Cellular component =nucleus; Biological process=transcription from RNA polymerase II promoter
  Homolog annotation: Hit_ID=B9SSQ9; Match level="QueryCoverage=97%, HitCoverage=66%, E-value=7e-61, Identity=62%"; Hit description=Pirin, putative
  Pfam annotation: Domain name=Pirin_C; Domain location=49-154; Score =151.1; E_value=3.4e-42; Accession=PF05726.5; Description=Pirin C -terminal region
GNKMVEPGYQEIQSKDIACTSADGVTVRVIAGHAMGVRSPVCTRTPTMYLDFTVRPRAAVRQPVLPSWNAFAYVLEGEGVFGTERCAPVGAHHLLLLGQGDGLEVWNKSDRPLRFLLIGGEPIGEPVAQLGPFVMNTEEEIDMTVDDFERYANGFEKARHWKSQAMVALGVE

SEQ ID NO: 69609 - protein, 78 aa, Setaria italica
  misc_feature (58)..(78): Xaa can be any naturally occurring amino acid
  Transcript Sequence Number=SeqID_3635
GQTRAEYTAKGKKINRLFSFFPIIIVIYGTTSRYHCFSFFPPRSGLCTYIWYKLILTXXXXXXXXXXXXXXXXXXXXX

SEQ ID NO: 69610 - protein, 83 aa, Setaria italica
  Transcript Sequence Number=SeqID_3636
LNIATTSSIFDCFLIWGSHALAYMPCSSIFWHQLPTYSLTLKAAAWVGRTMRQFSSVQFSISHLLQQCKINTKQVRKKAKHFY

SEQ ID NO: 69611 - protein, 113 aa, Setaria italica
  Transcript Sequence Number=SeqID_3637
  Subcellular localization annotation: CTP_CleavageSite=23; ConfidenceScore=5.09e-01
AKPAGVHEAYVQPPRHGRPGARSAGTLWPSRQRTCRPQENRTPQPCRRQRQGSHMKGSPHLHCAPLKTERQGGLLNGHPHSICTCFSATSLAVNVAGYMLLLPSTCYNDVLVL

SEQ ID NO: 69612 - protein, 87 aa, Setaria italica
  Transcript Sequence Number=SeqID_3638
SSAECRLQRCSENHRAEGARTSQPHDDERLGLEARFRRWHPASVGSGLCRRRHILAWTEWSRAATVLGAAAPPEREQGLSLKYGFIR

SEQ ID NO: 69613 - protein, 562 aa, Setaria italica
  Transcript Sequence Number=SeqID_3639
  Gene Ontology: Mol. function=heat shock protein binding
  Homolog annotation: Hit_ID=Q9LQB4; Match level="QueryCoverage=27%, HitCoverage=24%, E-value=1e-32, Identity=49%"; Hit description=F4N2.3
  Pfam annotation: Domain name=DnaJ; Domain location=505-560; Score= -13.4; E_value=0.093; Accession=PF00226.23; Description=DnaJ domain
MSWGRFSNFNPFQGPTRTVRSCPVAPRNVVVIDEDDDGGDDASEPEVFIIGGAAPPPTPAAAPGCQARKGNGLSGNVITIDDDEDVGEGAGWDKAGPSTSRASSGSPASMTPGRGSPGNRYGFDSTSDSDLSEGWDFDTDDGGSSDCEILDDTSGTAREMWETAASRKKMPHGVHEREDGWAAAFESCARSEAQPYKDSEGFFGAGCNLDETYFSTAWKGDSHNDTGGTKEGSEHVQSSANGVKDGQGPSVPNAKKCSNGNVGEGTEGMQDTNSSAKDVHAEPHPDENIFQSSSDACKGGVQNNTGVSKDHHGPSSAPSAKECSNEEGVVPQKTSEGFQTPRADGTFVYKFVSANMVFPGNSSADRKDGSPPMSVSTPDKIDEKIPDGEYSQKDQSPPEPSHASVIGERERHKESIEYKRAAEEEWASRQRQLQIQAEEAKKLRKRKKAEAQRLLDMEKRQKQRLQEVRESQRKNEEAIQLKEQYRGVVRKELEDLERRYWDMTSILRALGIPVEGGEVKAYKQALLKFHPDRVSRNDMYQQVKAEETFKFISRLKEKLPRF

SEQ ID NO: 69614 - protein, 401 aa, Setaria italica
  misc_feature (101)..(101): Xaa can be any naturally occurring amino acid
  Transcript Sequence Number=SeqID_3640
  Gene Ontology: Mol. function=mismatched DNA binding; Cellular component=nucleus; Biological process=mismatch repair
  Homolog annotation: Hit_ID=Q9ZRV4; Match level="QueryCoverage=100%, HitCoverage=54%, E-value=1e-132, Identity=57%"; Hit description=MLH1 protein (Fragment)
PTKKEVSLLNQERIIEIIKNTIEEKLRSSNTTRIFQTQAINPSALTQANTQKEKGTEVKMASGMKSQKTPVSQMVRTDPRDPSGRLHTYWHGQSSNLEKNXDLVSVRNVVRSRRNPKDACDLSSRHELLTEVDSQCHPGLLEVVKNCTYVGLTDEVFALIQHNTRLYLVNVVNVSKELMYQQALCRFGNFNAIQLSEPAPLRELLLMALKDDELMGDENDEEKMEIAEVNSEILKENAEMINEYFSIHVDKDGNLTRLPVVLDQYTPDMDHLPEFVLTMANDVTWDDEKECFRTAAAAIGNFYALHPPILPNPYGSGIQLYKKNKDCMASGKCVDNTDEDDIDQELLAEAETAWSQREWTIQHVLFPSMRLFLKPPKSMATDGTFVQVASLEKLYKIFERC

SEQ ID NO: 69615 - protein, 100 aa, Setaria italica
  Transcript Sequence Number=SeqID_3641
  Homolog annotation: Hit_ID=Q7XS41; Match level="QueryCoverage=96%, HitCoverage=12%, E-value=8e-34, Identity=84%"; Hit description =OSJNBa0074L08.11 protein
EEFELREVGTGRQLTMEEFVDLCVGRSPIVQELMRRENVANAGSNNDSSTPIQRSNSDSSNGATRHRRRSSWLRSIRNIAGSMVVTSRDRRSSDEKARAT

SEQ ID NO: 69616 - protein, 115 aa, Setaria italica
  misc_feature (108)..(108): Xaa can be any naturally occurring amino acid
  Transcript Sequence Number=SeqID_3642
LINIQSWAFIGTLVIADTLYLQDGAHYMIYTPVDPLLFVAVKVSRLLSNFLLQHSILYMMSENGATCFVQDKDGVLHIAEDDLMDDPAVVDAIDEETEFTALVEEEEXLLETVLG

SEQ ID NO: 69617 - protein, 301 aa, Setaria italica
  Transcript Sequence Number=SeqID_3643
  Subcellular localization annotation: CTP_CleavageSite=47; ConfidenceScore=5.46e-01
LVPPVVFLCKQGTKPPLPHVARRAVSVRAAPPRQQQQHRARPRPPPRNNKRVDRPARRPPRAPPLDYDDDEDDDQEDEVGRFAGGTRAAAMPKPPAGFVLDDKGRCIAAASKRIVTIIDDATNRPLECIIRRVFRSSQDHDCMLLCPVDMPVQVLKSTNFSGWIAVDDDQLKQIIPSVAYALARVHMHFVESGFCYTARGGFCFPEEAIQEFHDSGDGGDGVPFEGVEICCFNLDGAHYMIYTPVDPLLFVAVKDKDGVLHIAEDDLMDDPAVVDAIDEETEFTALVEEEEALLETVLGER

SEQ ID NO: 69618 - protein, 91 aa, Setaria italica
  Transcript Sequence Number=SeqID_3644
YALCRKRVRTQKCKKMVQYLAAVTKISSILLYVSDSVIQQGVASASLKKPFKSFMVTKTTGVHFVLGNVPYHLAKFIKQLYLLLRESVPRF

SEQ ID NO: 69619 - protein, 116 aa, Setaria italica
  Transcript Sequence Number=SeqID_3645
  Gene Ontology: Mol. function=transporter activity; Cellular component= membrane; Biological process=transport
  Homolog annotation: Hit_ID=B6U234; Match level="QueryCoverage=100%, HitCoverage=22%, E-value=1e-59, Identity=93%"; Hit description =Permease
MAEVKPEDMVHHMPMDQLQGFEYCIDSNPSWGEGIALGFQHYILSLGTAVMIPTMLVPLMGGNDHDKAKVVQTLLFVTGIKTLLQTLFGTRLPTIMGGSYAYVVPVLSIIRDPSIA

SEQ ID NO: 69620 - protein, 128 aa, Setaria italica
  Transcript Sequence Number=SeqID_3646
  Gene Ontology: Mol. function=transferase activity, transferring glycosyl groups; Biological process=metabolic process
  Homolog annotation: Hit_ID=C3W7B0; Match level="QueryCoverage=100%, HitCoverage=26%, E-value=4e-33, Identity=60%"; Hit description=C -glucosyltransferase
LQSLFPTYLDANGGAGHSVGDVDVPGVCRVPRSSIPQALHDPDDIFTRQFVANGRALVAADGLLVNAFEAMEPEAVAALLGGSVVASLPPVFAVGPLMPLNLREAAEEQGNYRAWLDAQPPRSVVYVS

SEQ ID NO: 69621 - protein, 294 aa, Setaria italica
  Transcript Sequence Number=SeqID_3647
  Gene Ontology: Mol. function=hydrolase activity, hydrolyzing O -glycosyl compounds; Biological process=carbohydrate metabolic process
  Homolog annotation: Hit_ID=B9R6T2; Match level="QueryCoverage=100%, HitCoverage=79%, E-value=9e-92, Identity=38%"; Hit description =Hydrolase, hydrolyzing O-glycosyl compounds, putative
  Pfam annotation: Domain name=CBM_4_9; Domain location=125-282; Score =69.4; E_value=1.4e-17; Accession=PF02018.9; Description=Carbohydrate binding domain
TGRVHNWNGIQQEITGRVQRKVLYEISSAVRIFGSANDTEVRATLWVQEYGRDRYVGLAKNQASDKQWTHLKGRFLLHAPFTKAVIFIEGPPAGIDILVDGLVLSPARKLEAAPCPKVENVVYGANLLHNSAFTRGLAGWSPMGSCRLSIQTEGPHMLSSILKDRASQKHISGRYILATNRTEVWMGPSQVITDKLRLHVTYRVSAWVRAGSGGHGRHHVNVCLAVDNQWVNGGQVEADGDQWYEIKGAFKLEKQPSKVTAYVQGPPPGVDLRVMDLQIYPVDRKARFEYLKEK

SEQ ID NO: 69622 - protein, 61 aa, Setaria italica
  Transcript Sequence Number=SeqID_3648
LFHGSFRHVQERLPVTRTYSDVNHISKYLTHPEPENLIKITQTKDPATKTCSMTTVQWTAG

SEQ ID NO: 69623 - protein, 111 aa, Setaria italica
  misc_feature (80)..(80): Xaa can be any naturally occurring amino acid
  Transcript Sequence Number=SeqID_3649
  Gene Ontology: Mol. function=zinc ion binding; Cellular component =intracellular
  Homolog annotation: Hit_ID=B9RJ95; Match level="QueryCoverage=98%, HitCoverage=22%, E-value=5e-34, Identity=60%"; Hit description =Nucleic acid binding protein, putative
HAVSELGADDTSRNIIEIIFQSSWLKKQSPVCKVERILKVHNTARTLARFEEYRDAVKAKAAAQQQQQPAAKTTKHPRCXADGNELLRFHCATLACELGLNGATHLCSSSG

SEQ ID NO: 69624 - protein, 49 aa, Setaria italica
  Transcript Sequence Number=SeqID_3650
PFILFLSNLAGWVNRFANAGDTAVVVAENTAVKVHLVYLFMVVHFLYFQ

SEQ ID NO: 69625 - protein, 251 aa, Setaria italica
  Transcript Sequence Number=SeqID_3651
  Homolog annotation: Hit_ID=Q5SMI0; Match level="QueryCoverage=60%, HitCoverage=54%, E-value=3e-18, Identity=35%"; Hit description =Apoptosis-related protein PNAS-4 like
  Pfam annotation: Domain name=DUF862; Domain location=2-156; Score =195.7; E_value=1.3e-55; Accession=PF05903.6; Description=Eukaryotic protein of unknown function (DUF862)
MKEVVLHVYDVTNSDSEKTNNTILQINRIFKDRIGLGGIFHSAIQVYGEDEWSFGFCETGSGVFSCPIGKNPMYTYRERIVLGETECGIAAVNRILRELSREWPGHSYDLLSRNCNHFCDVLCERLGVPKLPGWVNRFANAGDTAVVVAENTAVKFRQAKTEIVNASRVAYRFMAGLASKNQASPESPGNNQNRGSPIQGAWFKNIISAGAKPSSSGSTPSQDTDDGSPLWRQNSTEQSTRQNSTEQSTRL

SEQ ID NO: 69626 - protein, 203 aa, Setaria italica
  Transcript Sequence Number=SeqID_3652
  Pfam annotation: Domain name=WIYLD; Domain location=7-73; Score=86.1; E_value=1.2e-22; Accession=PF10440.1; Description=WIYLD domain
PAPRGRGRSRGRGDRRIDAAIDHFAAMGYAARDIRDAIADLLKVYGGPSAWPLLEEGSYQVVQDKLFEKEDEEKQKQEQEQEQDQTLLLEGQQVEEEEEEPPQHQEPAVDEAPPENNKLILLHDEVPVETESADEVEDPMFIEPSPLEAIVPLTAAVGIGCKRKPCYGWLTESDDEEQPTIQHHEVHIPTSGGGLLCKRNQVQ

SEQ ID NO: 69627 - protein, 259 aa, Setaria italica
  Transcript Sequence Number=SeqID_3653
  Gene Ontology: Mol. function=phosphatase activity
  Homolog annotation: Hit_ID=B6TE36; Match level="QueryCoverage=99%, HitCoverage=57%, E-value=5e-71, Identity=54%"; Hit description=CTD -phosphatase-like protein
  Pfam annotation: Domain name=NIF; Domain location=108-259; Score =169.4; E_value=1.1e-47; Accession=PF03031.10; Description=NLI interacting factor-like phosphatase
ESFAAVQFNTLMGFGNDDCSYNECVDAADMVAMGISPPDKTRGVDDATCRAPVDYTSFYLQNRPSDSENECSSASCMVTGYECTDNQELPVGLLNLMDIGSPGNSDDLSRPSLNTKNIVLVLDLDETLVHSKLQPCDNFDFTLQVFFNMEDHTVYVRQRPHLEMFLNRVAQMFEVVVFTASESVYAEPLLDKLDPDRKLISRRFYRESCTFSNGSYTKDLTIFGVDLAKVVIVDNTPQVFQLQVDNGIPIKSWFDDPPL

SEQ ID NO: 69628 - protein, 262 aa, Setaria italica
  Transcript Sequence Number=SeqID_3654
  Subcellular localization annotation: CTP_CleavageSite=55; ConfidenceScore=5.19e-01
PEIGSISSMVASSAASAAAAAADFTRWAETFSTEKADAAKAALASAATIATSSACAAASASSTAASSAYAAASDLTLIAKEELEWVKKEYSTHEQMVFGKIKEGVIMAIMHPGIAAGSATLAGIVLFKRPRSYLIQRVRRMFVSKETLLSGIQAEVNHMRQTVNLVSNESQKLMDRAATAEKRFQKGWNTLREEGRAIQHELNEISDIEQQAVGLKGILDQLPRAHASEFQSEISGLASQVKKEKRVLNAALSKIVNYGVPI

SEQ ID NO: 69629 - protein, 92 aa, Setaria italica
  misc_feature (85)..(85): Xaa can be any naturally occurring amino acid
  Transcript Sequence Number=SeqID_3655
  Homolog annotation: Hit_ID=B6SPJ2; Match level="QueryCoverage=100%, HitCoverage=15%, E-value=5e-24, Identity=64%"; Hit description =Selenium-binding protein-like
PLTTIAELRQHHSQLVRLGLASHPSHARRLLSFLARDPDSHFPYAARLLAHHPDPHPALFNPLLSALPPRHAARLLALMLSLPLXPDHFTFP

SEQ ID NO: 69630 - protein, 44 aa, Setaria italica
  Transcript Sequence Number=SeqID_3656
CWPLHLNLNCRRRLFTMISNLPTIYEVVTGSGKKPYQKTPQQQW

SEQ ID NO: 69631 - protein, 222 aa, Setaria italica
  Transcript Sequence Number=SeqID_3657
  Gene Ontology: Mol. function=metal ion binding
  Homolog annotation: Hit_ID=B6TJ70; Match level="QueryCoverage=100%, HitCoverage=86%, E-value=8e-74, Identity=61%"; Hit description=PHD finger protein
  Pfam annotation: Domain name=C1_3; Domain location=166-197; Score =8.3; E_value=0.062; Accession=PF07649.4; Description=C1-like domain
  Pfam annotation: Domain name=PHD; Domain location=167-218; Score =56.6; E_value=9.8e-14; Accession=PF00628.21; Description=PHD-finger
  Pfam module annotation: Pfam domain module=C1_3::PHD; Domain location= 166-197::167-218
ALTTDVEKFYKMCDPEKENLCLYGLSNETWEVTLPAEEVPPELPEPALGINFARDGMAEKDWLMLVAVHSDAWLIAVAFYFGARFGFDKDARRRLFTMISNLPTIYEVVTGSGKKPSKTPNSNGKSKSGSKPSKKPNSNSKPAKQPVPKQEEQTLKEEGGDKDQAYLCGTCGGSYSNNGDFWIGCDICENWYHGDCVRITPAKAEHIKQYKCPACSNKRSRE

SEQ ID NO: 69632 - protein, 115 aa, Setaria italica
  Transcript Sequence Number=SeqID_3658
  Gene Ontology: Cellular component=integral to membrane
  Homolog annotation: Hit_ID=A8J8U0; Match level="QueryCoverage=89%, HitCoverage=41%, E-value=1e-10, Identity=33%"; Hit description=Low -CO2-inducible membrane protein
  Pfam annotation: Domain name=UPF0187; Domain location=1-115; Score= -124.0; E_value=0.001; Accession=PF05249.3; Description =Uncharacterised protein family (UPF0187)
SDVKTDLEGLLAEDDLNVVLASKHRPRCIIEFISQSLQMLDLDQQKRGIMESKLSCFLEGIGVCEQLIGIPIPVSYTRLTSRFLVLWHLTLPVILWAECKWIVVPATFISAASLF

SEQ ID NO: 69633 - protein, 217 aa, Setaria italica
  misc_feature (90)..(90): Xaa can be any naturally occurring amino acid
  Transcript Sequence Number=SeqID_3659
  Gene Ontology: Cellular component=integral to membrane
  Homolog annotation: Hit_ID=A8J8U0; Match level="QueryCoverage=71%, HitCoverage=64%, E-value=2e-16, Identity=33%"; Hit description=Low -CO2-inducible membrane protein
  Pfam annotation: Domain name=UPF0187; Domain location=1-194; Score =64.0; E_value=5.6e-16; Accession=PF05249.3; Description =Uncharacterised protein family (UPF0187)
GNAILPPPPAAAADDEPLRRALLNYILAFPVALKCHILCDSDVKTDLEGLLAEDDLNVVLASKHRPRCIIEFISQSLQMLDLDQQKRGIXGIGVCEQLIGIPIPVSYTRLTSRFLVLWHLTLPVILWAECKWIVVPATFISAASLFCIEEVGVLIEEPFPMLALDALCKQLHDGIKDVIAVQSSVHTRLVGKAKGRGGSRRTDNGWPSSKREEAKID

SEQ ID NO: 69634 - protein, 96 aa, Setaria italica
  Transcript Sequence Number=SeqID_3660
  Gene Ontology: Mol. function=FMN binding; Biological process =pyridoxine biosynthetic process
ADPAKLQHREKAWFASSVKSRLQYLGPQPGIPVVDEEQAKDVHLEPSAGPVDAFCLLVLDPEKVDYLNLKSNQRLIFTRRQKENGSSDWMAEKVSP

SEQ ID NO: 69635 - protein, 141 aa, Setaria italica
  Transcript Sequence Number=SeqID_3661
  Gene Ontology: Cellular component=integral to membrane
  Homolog annotation: Hit_ID=O04347; Match level="QueryCoverage=78%, HitCoverage=53%, E-value=4e-36, Identity=68%"; Hit description =Putative integral membrane protein
  Pfam annotation: Domain name=TPT; Domain location=2-89; Score=32.9; E_ value=1.3e-06; Accession=PF03151.8; Description=Triose-phosphate Transporter family
PKIVLLSFRIYYLLQVLFFIVLSCLISVSVNFSTFLVIGKTSPVTYQVLGHLKTCLVLTFGYVLLHDPFSWRNILGILIAVIGMVLYSYFCTRETQQKPAEVSPQVIQGKESESNPLISDSLNAAENGGSTPDDEPLKVPM

SEQ ID NO: 69636 - protein, 147 aa, Setaria italica
  misc_feature (28)..(28): Xaa can be any naturally occurring amino acid
  Transcript Sequence Number=SeqID_3662
  Gene Ontology: Cellular component=integral to membrane
  Homolog annotation: Hit_ID=Q9FWG4; Match level="QueryCoverage=91%, HitCoverage=30%, E-value=2e-20, Identity=40%"; Hit description =Putative glucose-6-phosphate/phosphate-translocator
TSWHLLVTFCSLHVALCMKLFEHKPFDXKTVMGFGVLNGISIGLLNLSLGFNSVGFYQMTKLAIIPCTVILETLFFRKKFSRNIKLSLSVLLLGVGVATVTDLQLNTVGSVLSLLAIITTCIAQIVSFHCHQSICKMQTSRKSCNIF

SEQ ID NO: 69637 - protein, 448 aa, Setaria italica
  Transcript Sequence Number=SeqID_3663
  Gene Ontology: Cellular component=integral to membrane
  Homolog annotation: Hit_ID=Q9FWG4; Match level="QueryCoverage=67%, HitCoverage=79%, E-value=1e-86, Identity=54%"; Hit description =Putative glucose-6-phosphate/phosphate-translocator
  Pfam annotation: Domain name=ABC-3; Domain location=96-303; Score= -171.2; E_value=0.047; Accession=PF00950.9; Description=ABC 3 transport family
  Pfam annotation: Domain name=DUF6; Domain location=260-388; Score =12.7; E_value=0.014; Accession=PF00892.12; Description=Integral membrane protein DUF6
  Pfam annotation: Domain name=TPT; Domain location=246-388; Score =174.4; E_value=3.2e-49; Accession=PF03151.8; Description=Triose -phosphate Transporter family
  Pfam annotation: Domain name=UAA; Domain location=104-394; Score= -146.9; E_value=0.0052; Accession=PF08449.3; Description=UAA transporter family
  Pfam module annotation: Pfam domain module=ABC-3::DUF6::TPT::UAA; Domain location=96-303::260-388::246-388::104-394
  Subcellular localization annotation: CTP_CleavageSite=60; ConfidenceScore=5.36e-01
ERRGGRRGGREPQQLKQPRSQSPADPVAACLSGPRTIASSALRFTSLSPRSSFARPNSVYWEQRGAGRRRGSVGCAGEFLVLLRLVFLVRRWRWGAGEKFQLGTVGALSLSVVSSVSIVICNKALMSSLGFNFATTLTSWHLLVTFCSLHVALCMKLFEHKPFDARTVMGFGVLNGISIGLLNLSLGFNSVGFYQMTKLAIIPCTVILETLFFRKKFSRNIKLSLSVLLLGVGVATVTDLQLNTVGSVLSLLAIITTCIAQIMTNTIQKKFKVSSTQLLYQSCPYQALTLFLVGPFLDGFLTNQNVFAFDYTTQVLFFIVLSCLISVSVNFSTFLVIGKTSPVTYQVLGHLKTCLVLTFGYVLLHDPFSWRNILGILIAVIGMVLYSYFCTRETQQKPAEVSPQVIQGKESESNPLISDSLNAAENGGSTPDDEPLKVPMWSSKYSRA

SEQ ID NO: 69638 - protein, 86 aa, Setaria italica
  Transcript Sequence Number=SeqID_3664
  Subcellular localization annotation: CTP_CleavageSite=63; ConfidenceScore=5.66e-01
AGAAATRDSHGASRPATAAKSAEQTTTGRSSNQAPLPVLSAGSLPSFGLAFGDWGSGTSPPERASQPWRRGSRRRRPPPRSPRRGS

SEQ ID NO: 69639 - protein, 78 aa, Setaria italica
  misc_feature (57)..(57): Xaa can be any naturally occurring amino acid
  misc_feature (69)..(69): Xaa can be any naturally occurring amino acid
  Transcript Sequence Number=SeqID_3665
VLFGNFFKAVINTDFSFLLQGRPTSIPADPEGLQLLVEYLNEAYGNLPIYIQETGYXTKNGSLHDTDRXVGYMKNHIR

SEQ ID NO: 69640 - protein, 123 aa, Setaria italica
  Transcript Sequence Number=SeqID_3666
  Gene Ontology: Mol. function=hydrolase activity, hydrolyzing O -glycosyl compounds; Biological process=carbohydrate metabolic process
  Homolog annotation: Hit_ID=Q8RZL1; Match level="QueryCoverage=100%, HitCoverage=27%, E-value=2e-25, Identity=47%"; Hit description =Putative beta-glucosidase
TLDFIGINYYYSLYVNDHPLEKGIHDFALDISVECRGSRIDPPIGQKNTEGPPTSIPADPEGLQLLVEYLNEAYGNLPIYIQETGYETKNGSLHDTDRVGYMKNHIRSTLTALRNGANVKGYF

SEQ ID NO: 69641 - protein, 168 aa, Setaria italica
  misc_feature (28)..(28): Xaa can be any naturally occurring amino acid
  misc_feature (150)..(150): Xaa can be any naturally occurring amino acid
  Transcript Sequence Number=SeqID_3667
  Gene Ontology: Mol. function=hydrolase activity, hydrolyzing O -glycosyl compounds; Cellular component=apical plasma membrane; Biological process=carbohydrate metabolic process
  Homolog annotation: Hit_ID=Q8RZL1; Match level="QueryCoverage=92%, HitCoverage=36%, E-value=4e-37, Identity=49%"; Hit description =Putative beta-glucosidase
  Pfam annotation: Domain name=Glyco_hydro_1; Domain location=3-150; Score=-303.1; E_value=0.002; Accession=PF00232.10; Description =Glycosyl hydrolase family 1
PLEKGIHDFALDISVESGSRIDPPIGLXRPTSIPADPEGLQLLVEYLNEAYGNLPIYIQETGYETKNGSLHDTDRVGYMKNHIRSTLTALRNGANVKGYFAWSFTDMFEFGSGFRSQYGLYRVDFEDEALPRQARLSARWYSEFLKNQGXIQISEENELDGAGSHAQQ

SEQ ID NO: 69642 - protein, 294 aa, Setaria italica
  Transcript Sequence Number=SeqID_3668
  Homolog annotation: Hit_ID=B6STZ4; Match level="QueryCoverage=100%, HitCoverage=63%, E-value=1e-102, Identity=68%"; Hit description =Calmodulin binding protein
HALVRVQARARACRAIRSQQAPAHPDPPTPEKYDHAGAPRHGRSGSLKGSSSKTPGSERLGRERSESCGRNWLDRWVEERFMDDEKNAKILEVDNGKPGRHASKRRGGGGNHHHSPCSTMTSDQNSRSYATMPESPSKDSTTAQQSVPSPPSVSMGEALSPLRLPVDIAELCDSPQFFSATSRPGSSRRGPFTPTKSECSRSLFGGYSDYPNYMANTESFRAKARSQSAPKQRPQYEKSSSLRKASAANAFATGPYAPTAAAAQRSAASLHAKFTNKAYPGSGRLDRLGMPVKY

SEQ ID NO: 69643 - protein, 165 aa, Setaria italica
  misc_feature (81)..(81): Xaa can be any naturally occurring amino acid
  Transcript Sequence Number=SeqID_3669
  Gene Ontology: Mol. function=aspartic-type endopeptidase activity; Cellular component=chromatin; Biological process=chromatin assembly or disassembly
  Homolog annotation: Hit_ID=Q8SA91; Match level="QueryCoverage=89%, HitCoverage=6%, E-value=8e-35, Identity=45%"; Hit description =Putative gag-pol polyprotein
LLFNLLTRIIKIIPLDHYDLILGMDWLERFSPMKVHWKLKWMSIPYQGSAVVLHGISSSDPDTLMVQVCPLASSQQDSQDXDLPPQLAALLSEFEVVFAPVEGLPPPRSFDHSIPLVPGAKPVFIRPYRYPPTLKDEIEKQIQEWLDKGIIRPSNSPFSSPLLLV

SEQ ID NO: 69644 - protein, 605 aa, Setaria italica
  misc_feature (140)..(140): Xaa can be any naturally occurring amino acid
  misc_feature (175)..(175): Xaa can be any naturally occurring amino acid
  misc_feature (210)..(210): Xaa can be any naturally occurring amino acid
  misc_feature (394)..(394): Xaa can be any naturally occurring amino acid
  misc_feature (486)..(486): Xaa can be any naturally occurring amino acid
  Transcript Sequence Number=SeqID_3670
  Gene Ontology: Mol. function=aspartic-type endopeptidase activity; Cellular component=chromatin; Biological process=chromatin assembly or disassembly
  Homolog annotation: Hit_ID=Q8SA91; Match level="QueryCoverage=100%, HitCoverage=25%, E-value=0.0, Identity=56%"; Hit description =Putative gag-pol polyprotein
  Pfam annotation: Domain name=RnaseH; Domain location=120-237; Score= -20.3; E_value=0.014; Accession=PF00075.16; Description=RNase H
  Pfam annotation: Domain name=rve; Domain location=374-528; Score =81.6; E_value=2.7e-21; Accession=PF00665.18; Description=Integrase core domain
  Pfam module annotation: Pfam domain module=RnaseH::rve; Domain location=120-237::374-528
LQLLADDKWQVKLSKYFFAKRQISYLGRIVSSEGISTDNSKITSITNWPTPTNAKELRSFLGLAGYYRKFVRHFATIAKPLTSLLKKHTILVWTSLHQDAFDALKNALSTAPVLAAPDFSKPFCLETDACAYKIGAVLVXNGHPLAYISKPLGPKTAGLSTYEKEYLAILMVVEXWRSYLQHGEFVIYTDQRSLIHLSNQRLGTPWQQKXFTKLLGLQYKIVYKQGASNRVADALSRRPHSIPQLCVVSICEPSWTSSVIQGYSNDSYTQDILTKLAISKDFVTNFTLQDGVLKFKGRLWIGNNPPLQLQILSALHCAPVGGHSRFPVYRRIKQLFAWKNMKAAVKEYVSHCHICQQAKPDRSKYAGLLQPLPVPSSAWQAITMDFVEGLPPSXNKNCILVVMDKFTKYGHFIPLAHPFTAAIMARTFFDNIYKLHGLPDSIVSNRDKIFTSNFWQELFKLVNVSLNMSASYHPQIEGQTERVNQXLETFLRCYAHACPSKWLDWLSHAGFWYNTSSHSALDCSPFEALYGYTPKTLGILPSSHQQALDLISWMEDKKLMYALLQQHLHRAQQRMKHQVDKNRQERTFQVGDSVFLKLQPYVQSS

SEQ ID NO: 69645 - protein, 436 aa, Setaria italica
  misc_feature (424)..(424): Xaa can be any naturally occurring amino acid
  Transcript Sequence Number=SeqID_3671
  Gene Ontology: Mol. function=electron carrier activity; Cellular component=chloroplast envelope; Biological process=oxidation reduction
  Homolog annotation: Hit_ID=B6TAN0; Match level="QueryCoverage=100%, HitCoverage=91%, E-value=0.0, Identity=89%"; Hit description =Monodehydroascorbate reductase, cytoplasmic isoform 2
  Pfam annotation: Domain name=Pyr_redox; Domain location=165-260; Score=113.3; E_value=8e-31; Accession=PF00070.19; Description =Pyridine nucleotide-disulphide oxidore
  Pfam annotation: Domain name=Pyr_redox_2; Domain location=7-305; Score=167.9; E_value=3e-47; Accession=PF07992.6; Description =Pyridine nucleotide-disulphide oxidore
  Pfam module annotation: Pfam domain module=Pyr_redox::Pyr_redox_2; Domain location=165-260::7-305
MGRAFVYVILGGGVAAGYAALEFARRGGYSRGELCIISEEAAAPYERPALSKGYLLPEGASCLPGFHTCVGANDELLTTKWYEEQGIELVLGTKVISADVRRKTLLTGTGETISYKTLIIATGARALKLQEFGIQGSDASNICYLRNVDDADKLVNAMKSCPGGNAVVIGGGYIGMECAAALVTNKIRVTMVFPEKHCMGRLFTPKIAEYYENYYTSKGVTFVKGTVLTSFEKDTTGKVTAVILKDGRHLPADMVVIGIGIRANTSLFEGQLVMSMENGGIKVNGQLQTSDSSVYAVGDVAAFPIKLFDGDIRRLEHVDSARRTARHAVASILEASKARDIDYLPFFYSRVFTLSWQFYGDNVGEVVHFGDFTSSSPRFGAYWVNKGRIAGAFLEGGSRDEYEAISVTVRRKAKVVNMAELGKXGLAFAIQESQTE

SEQ ID NO: 69646 - protein, 127 aa, Setaria italica
  Transcript Sequence Number=SeqID_3672
  Gene Ontology: Mol. function=electron carrier activity; Cellular component=chloroplast envelope; Biological process=oxidation reduction
  Homolog annotation: Hit_ID=B6TAN0; Match level="QueryCoverage=100%, HitCoverage=26%, E-value=1e-53, Identity=78%"; Hit description =Monodehydroascorbate reductase, cytoplasmic isoform 2
FTLSWQFYGDNVGEVVHFGDFTSSSPRFGAYWVNKGRIAGAFLEGGSRDEYEAISVTVRRKAKVVNMAELGKQGLAFAIQESQTEAPDSGLAVVGKPTYAWHATAGVVAAVSIAAIGYWYGRKRRRW

SEQ ID NO: 69647 - protein, 194 aa, Setaria italica
  misc_feature (72)..(72): Xaa can be any naturally occurring amino acid
  misc_feature (173)..(173): Xaa can be any naturally occurring amino acid
  Transcript Sequence Number=SeqID_3673
  Homolog annotation: Hit_ID=B6TJU9; Match level="QueryCoverage=100%, HitCoverage=47%, E-value=1e-86, Identity=81%"; Hit description=Kelch motif family protein
  Pfam annotation: Domain name=F-box; Domain location=41-89; Score =22.3; E_value=0.002; Accession=PF00646.25; Description=F-box domain
MVVMGSEEWELYPSYIGSQVMEYRPISEDSDDDWNGDVAVPLDAVLPDDLLEKVLSFLPVASIIRSGSVCKXRWHEIVHAQRQTWSKMVPQKPWYFMFTCSEEAVSGFAYDPSLRKWYGFDFPCIEKSNWSTSSSAGLVCLMDSENRRRIMVCNPITKDWKRLLDAPGGKTGXYSALAFSVDRSSHQYTVAIAR

SEQ ID NO: 69648 - protein, 70 aa, Setaria italica
  Transcript Sequence Number=SeqID_3674
  Gene Ontology: Mol. function=nucleotide binding; Cellular component =plasma membrane; Biological process=small GTPase mediated signal transduction
  Homolog annotation: Hit_ID=Q43463; Match level="QueryCoverage=100%, HitCoverage=34%, E-value=2e-22, Identity=70%"; Hit description=Ras -related protein Rab7
MVSEKKAREWCASKGDIPYFETSAKEDHNVDTAFLCIAKLALAHEHDQDICFKTVAEQVPDPEQTTGCAC

SEQ ID NO: 69649 - protein, 247 aa, Setaria italica
  Transcript Sequence Number=SeqID_3675
  Gene Ontology: Mol. function=electron carrier activity; Biological process=oxidation reduction
  Homolog annotation: Hit_ID=Q9FRC1; Match level="QueryCoverage=87%, HitCoverage=69%, E-value=2e-78, Identity=65%"; Hit description =Putative cytochrome P450-related protein
FGLSSYSIRVNSKSLSFRPIGNREVQMMTTTMLACAQSMIKELENKACQSKNGEIEVDFDIELRELTADVISHAAFGSSYKLGKQVFQTQHALMAIYLESLLDVQIPGLKYLPTERNRRKWMLEKKLRSSLLQIIQPRLASTCRDYGNDLLGLMLESCIATEQGGKKGDLSMSIDEIIHECKMFFFAGHDTTSLLLTWAIFLLSAYPEWQERLRKEVFREIGREQPSADALSKLKEARNKRKFYLFT

SEQ ID NO: 69650 - protein, 220 aa, Setaria italica
  misc_feature (108)..(108): Xaa can be any naturally occurring amino acid
  misc_feature (161)..(161): Xaa can be any naturally occurring amino acid
  Transcript Sequence Number=SeqID_3676
  Gene Ontology: Mol. function=electron carrier activity; Biological process=oxidation reduction
  Homolog annotation: Hit_ID=Q84TT2; Match level="QueryCoverage=94%, HitCoverage=49%, E-value=5e-68, Identity=61%"; Hit description =Putative cytochrome P450, 5'-partial (Fragment)
MKEEAEGLVLDVHDHNHLPRIAPHYLRWRAQYGEPFLYWFGTKPRICIFDYELARQILSSKSGHFLKTDPPSTLLDVVGKGLALLDGIDWVRHHRVIKPAFAMDKLKXMINELENACRKNEIERRQVFQTQHALMAIYLESLLDVQIPGLKYLPTERNRRXSWLYDLQKLRSSLLQIIQPRLASTCRDYGNDLLGLMLESCIATEQGGKKGDLSNRRQYE

SEQ ID NO: 69651 - protein, 523 aa, Setaria italica
  Transcript Sequence Number=SeqID_3677
  Gene Ontology: Mol. function=electron carrier activity; Biological process=oxidation reduction
  Homolog annotation: Hit_ID=B6TF97; Match level="QueryCoverage=95%, HitCoverage=95%, E-value=0.0, Identity=67%"; Hit description =Cytochrome P450 CYP709E4
  Pfam annotation: Domain name=p450; Domain location=64-516; Score =217.9; E_value=2.7e-62; Accession=PF00067.14; Description=Cytochrome P450
MAFLVPLAALVALLAAAAIAWLWDYAVVRLVWRPYAIGKELRGQGIHGPPYKFVRGSNDDIKAMKEEAEGLVLDVHDHNHLPRIAPHYLRWRAQYGEPFLYWFGTKPRICIFDYELARQILSSKSGHFLKTDPPSTLLDVVGKGLALLDGIDWVRHHRVIKPAFAMDKLKMMTTTMLACAQSMIKELENKACQSKNGEIEVDFDIELRELTADVISHAAFGSSYKLGKQVFQTQHALMAIYLESLLDVQIPGLKYLPTERNRRKWMLEKKLRSSLLQIIQPRLASTCRDYGNDLLGLMLESCIATEQGGKKGDLSMSIDEIIHECKMFFFAGHDTTSLLLTWAIFLLSAYPEWQERLRKEVFREIGREQPSADALSKLKETTMVLLETLRLYGPALFMQRKPVTDITVGATKLPKGVTVVIPIPIMHREKEVWGDDAGEFNPLRFENGVTRAGKVPHAMIAFSMGPRSCIGQNFAMLEAKSTLALLLQKFSFTLSPDYVHAPADVFSLKPKFGLPVIVRRLDA

SEQ ID NO: 69652 - protein, 115 aa, Setaria italica
  Transcript Sequence Number=SeqID_3678
  Gene Ontology: Mol. function=extracellular-glutamate-gated ion channel activity; Cellular component=integral to membrane; Biological process=G-protein coupled receptor protein signaling pathway
  Homolog annotation: Hit_ID=Q9SW97; Match level="QueryCoverage=86%, HitCoverage=10%, E-value=1e-36, Identity=71%"; Hit description =Glutamate receptor 3.5
AAAARAVAAAGARPSEVAVGALFTYDSTIGRAARLAIELAVDDVNADRTVLAGTQLKLITQDTNCSGFLGTIEALQLMEKNVVTVIGPQSSGIGHVISHVVNELHVPLLSFAATD

SEQ ID NO: 69653 - protein, 202 aa, Setaria italica
  Transcript Sequence Number=SeqID_3679
  Gene Ontology: Mol. function=oxidoreductase activity, acting on single donors with incorporation of molecular oxygen, incorporation of two atoms of oxygen; Cellular component=chloroplast; Biological process=fatty acid biosynthetic process
  Homolog annotation: Hit_ID=B1PYP0; Match level="QueryCoverage=99%, HitCoverage=22%, E-value=2e-82, Identity=74%"; Hit description =Lipoxygenase
  Pfam annotation: Domain name=Lipoxygenase; Domain location=1-181; Score=-309.8; E_value=7.9e-05; Accession=PF00305.11; Description =Lipoxygenase
VELQAFWTEVRTKGHADKRDEPWWPVLDGHESLVQVLSTIIWVASGHHAAVNFPQYPYAGYFPNRPTTARRNVPTEAGGEDMRAFLEDPVKVLLDTYPSQYQTTLALPVLNLLSSHSAGEEYLGVQSEPAWMADAEMRAAFVKFNKRMMEIAETIDSRNKDPELRNRKGPGVVPYVQLKPNYGDFKDMTSVMEMGIPTSISI

SEQ ID NO: 69654 - protein, 256 aa, Setaria italica
  Transcript Sequence Number=SeqID_3680
  Gene Ontology: Biological process=cell redox homeostasis
  Homolog annotation: Hit_ID=B6TIJ3; Match level="QueryCoverage=100%, HitCoverage=85%, E-value=4e-62, Identity=49%"; Hit description =Thioredoxin
  Pfam annotation: Domain name=DUF862; Domain location=1-137; Score =214.0; E_value=4e-61; Accession=PF05903.6; Description=Eukaryotic protein of unknown function (DUF862)
LHIYDLSQGMARELSATILGKAIEAIWHTGVVVYGCEYYFGGGIQHGQPGRTPYGTPVRVEDLGVTHVPREVFEDFLREIGPRYTPATYSLLSHNCNNFSNEAAQFLAGAKVPSYILELPNQVMNSPVGALILPMIQGLETSLRAGAVPQPPQIRSAPAPVATATMTPPSADDVEQRSTAAADKPDEETAGNGSDNGSTAVPPAVEPAAPPAAATQVSAAPAAAVETKAAPPDPLAEAKSRVQEEIKREFAAIMAA

SEQ ID NO: 69655 - protein, 87 aa, Setaria italica
  Transcript Sequence Number=SeqID_3681
  Gene Ontology: Mol. function=glyceraldehyde-3-phosphate dehydrogenase (NADP+) (phosphorylating) activity; Cellular component=chloroplast; Biological process=reductive pentose-phosphate cycle
  Homolog annotation: Hit_ID=P09044; Match level="QueryCoverage=98%, HitCoverage=19%, E-value=5e-40, Identity=94%"; Hit description =Glyceraldehyde-3-phosphate dehydrogenase B, chloroplastic (Fragment)
  Pfam annotation: Domain name=Gp_dh_N; Domain location=1-61; Score= -51.4; E_value=3.6e-05; Accession=PF00044.16; Description =Glyceraldehyde 3-phosphate dehydrogenas
VIEGTGVFVDGPGAGKHIQAGAKKVIITAPAKGADIPTYVVGVNEVDYDHGVADIISNASCTTNCLAPFVKVLDEEFGIVKGTMTTN

SEQ ID NO: 69656 - protein, 88 aa, Setaria italica
  Transcript Sequence Number=SeqID_3682
QESGADGFTGGEEEEENGGGGEEPEEVEEELGGDDELELEEEGGDSGMGSDELEVTELGEPGAEMCQVGDQSFAVPLELYDLASLRDV

SEQ ID NO: 69657 - protein, 74 aa, Setaria italica
  Transcript Sequence Number=SeqID_3683
  Gene Ontology: Mol. function=phosphatase activity
  Homolog annotation: Hit_ID=B6TE36; Match level="QueryCoverage=72%, HitCoverage=11%, E-value=2e-17, Identity=77%"; Hit description=CTD -phosphatase-like protein
DVLHGVRTVKCSHIQQVFQLQVDNGIPIKSWFDDPTDVELMELLQFLATLVDAKDVRPIISKNFNNKPQLIGSD

SEQ ID NO: 69658 - protein, 159 aa, Setaria italica
  Transcript Sequence Number=SeqID_3684
  Gene Ontology: Mol. function=NADH dehydrogenase (ubiquinone) activity; Cellular component=membrane; Biological process=oxidation reduction
  Homolog annotation: Hit_ID=B9S202; Match level="QueryCoverage=98%, HitCoverage=98%, E-value=1e-67, Identity=76%"; Hit description=NADH -ubiquinone oxidoreductase subunit B17.2, putative
  Pfam annotation: Domain name=NDUFA12; Domain location=48-154; Score =203.8; E_value=4.6e-58; Accession=PF05071.8; Description=NADH ubiquinone oxidoreductase subunit NDUFA
MAAVVRGVLRGIKEKGLTNFLRDVREEGYLNCLLDGNLLQTKIHNIGATLVGVDKFGNKYYEKLHDTQYGRHRWVEYAEKGRYNASQVPAEWHGWLHHITDNTGDQLLAQKTARYLVEHKQNYSGEGEELIYHSKGHALNPGQRDWTRYQPWEPKKEQS

SEQ ID NO: 69659 - protein, 150 aa, Setaria italica
  Transcript Sequence Number=SeqID_3685
  Gene Ontology: Mol. function=isomerase activity; Cellular component =endoplasmic reticulum lumen; Biological process=cell redox homeostasis
  Homolog annotation: Hit_ID=B6TM50; Match level="QueryCoverage=81%, HitCoverage=81%, E-value=2e-63, Identity=95%"; Hit description=PDIL5- 1-Zea mays protein disulfide isomerase
  Pfam annotation: Domain name=Thioredoxin; Domain location=33-138; Score=84.5; E_value=3.8e-22; Accession=PF00085.12; Description =Thioredoxin
MDPVAPRRGRLPIHLLVVLLTVLVALTVRSRAEVITLTEETFSDKIKEKDTVWFVQFCVPWCKHCKSLGTLWEDLGKVMEGEDEIEIGQVDCGVSKPVCSKVDIHSYPTFKVFYEGEEVAKYKGPRDVESLKNFVLNEAEKAGEAKLQAD

SEQ ID NO: 69660 - protein, 534 aa, Setaria italica
  Transcript Sequence Number=SeqID_3686
  Gene Ontology: Mol. function=ATP-dependent helicase activity; Cellular component=ribonucleoprotein complex; Biological process =regulation of alternative nuclear mRNA splicing, via spliceosome
  Homolog annotation: Hit_ID=Q84MP1; Match level="QueryCoverage=100%, HitCoverage=62%, E-value=0.0, Identity=53%"; Hit description =Putative Sec63 domain containing protein
  Pfam annotation: Domain name=DEAD; Domain location=358-533; Score =130.9; E_value=4e-36; Accession=PF00270.21; Description=DEADDEAH box helicase
  Pfam annotation: Domain name=ResIII; Domain location=354-532; Score= -16.5; E_value=0.0013; Accession=PF04851.7; Description=Type III restriction enzyme, res subunit
  Pfam module annotation: Pfam domain module=DEAD::ResIII; Domain location=358-533::354-532
NPDKKKDIEQLLNPISNQLFDQLVSIGKLITDFHDAAAGDAAGGPSGDAMDTTLDDDVGVAVEFEESDEDEESDFDQVQDDLDEDDEDEATELNGPGGMQMGGELDDDDMQNANQGLAINVQDIDAYWLQRKISQAYGDGNIDAQQSQKLAEEILKIIAEGDDRDVENRLVMLLDYDKFDLIKLLLRNRLKIVWCTRLARAEDQEQRTKIEEEMASDPSLAPILEQLHATRASAKERQKNLEKSIRDEAKRLLNNDGAGADGPRDRRAAERDMESGWLKGQRQLLDLDSLAFHQGGLFMANKKCELPAGSFRTPHKGYEEVHVPALKAKPYETGEKIVKISDLPEWAQPAFEGMSALNRVQSRVYDTALFKPDNILLCAPTGAGKTNVAVLTILQQIGLHMKDGEFDNTKYKIVYVAPMKALVAEVVGNLSKRLAPFNVTVRELSGDQNLTKQQIDETQIIVTTPEKWDIVTRKSGDRTYTQMVKLLIIDEIHLLHDNRGPVLESIVARTVRQIETTKEHIHRVVVSATLPNYE

SEQ ID NO: 69661 - protein, 86 aa, Setaria italica
  Transcript Sequence Number=SeqID_3687
  Gene Ontology: Mol. function=1-deoxy-D-xylulose-5-phosphate synthase activity; Biological process=terpenoid biosynthetic process
  Homolog annotation: Hit_ID=Q5BLU5; Match level="QueryCoverage=100%, HitCoverage=28%, E-value=4e-41, Identity=96%"; Hit description=1 -deoxy-D-xylulose 5-phosphate synthase (Fragment)
SGLAGFPKRDESPHDAFGAGHSSTSISAALGMAVARDLLGRNNHVISVIGDGAMTAGQAYEAMNNSGYLDANMIVVLNDNKQVSLP

SEQ ID NO: 69662 - protein, 85 aa, Setaria italica
  misc_feature (73)..(73): Xaa can be any naturally occurring amino acid
  Transcript Sequence Number=SeqID_3688
  Gene Ontology: Mol. function=zinc ion binding; Cellular component =intracellular
  Homolog annotation: Hit_ID=Q7XP23; Match level="QueryCoverage=100%, HitCoverage=22%, E-value=9e-31, Identity=80%"; Hit description =OSJNBa0027H09.16 protein
  Pfam annotation: Domain name=DUF1644; Domain location=27-85; Score= -66.7; E_value=0.018; Accession=PF07800.4; Description=Protein of unknown function (DUF1644)
MANAENLFKMVNADTDTDTAALHKEWDDALCPICMDHPHNAVLLLCSSHDKGCRPYICDTSYRHSNCLDRFKXKMKVNDGDSPSQ

SEQ ID NO: 69663 - protein, 45 aa, Setaria italica
  Transcript Sequence Number=SeqID_3689
  Gene Ontology: Mol. function=ARF guanyl-nucleotide exchange factor activity; Cellular component=intracellular
  Homolog annotation: Hit_ID=Q7XIK7; Match level="QueryCoverage=97%, HitCoverage=3%, E-value=2e-16, Identity=95%"; Hit description =Putative guanine nucleotide-exchange protein GEP2
MAGAAGGFVTRAFEAMLKECAANRGKFAALQQSIQSYLDSIKGAT

SEQ ID NO: 69664 - protein, 80 aa, Setaria italica
  misc_feature (40)..(40): Xaa can be any naturally occurring amino acid
  Transcript Sequence Number=SeqID_3690
  Gene Ontology: Mol. function=receptor activity
  Homolog annotation: Hit_ID=Q8W338; Match level="QueryCoverage=88%, HitCoverage=6%, E-value=4e-29, Identity=91%"; Hit description=TGF beta receptor associated protein-like protein
MVDLRLHFHLQPLCRSDPMLVLESSLYVLERNPSETIELXFLSENVPADLVNSYLKQHAPNLQSTYLELMLSMSETGINT

SEQ ID NO: 69665 - protein, 197 aa, Setaria italica
  misc_feature (82)..(82): Xaa can be any naturally occurring amino acid
  Transcript Sequence Number=SeqID_3691
  Gene Ontology: Mol. function=receptor activity; Cellular component =late endosome membrane; Biological process=protein transport
  Homolog annotation: Hit_ID=Q8W338; Match level="QueryCoverage=85%, HitCoverage=18%, E-value=3e-69, Identity=73%"; Hit description=TGF beta receptor associated protein-like protein
  Pfam annotation: Domain name=Vps39_2; Domain location=72-181; Score =175.0; E_value=2.1e-49; Accession=PF10367.1; Description=Vacuolar sorting protein 39 domain 2
PGCSFRGACHIVWENESAPPCTLSVCSQGKKVVEIEGADDIRFSPSGTDSGRSDGDGDDASEGGPIMLNEALELLSQRWDRXNGAQALRLLPRDTKLQDLVSFLEPLLRNSSEHLRNYLVIKNLISRANLQVKEDLYKRRQAVVKIDGNSMCSLCHKRIANSAFAIYPNGQTLVHFVCFRESQQIKAVRGANSVKRR

SEQ ID NO: 69666 - protein, 428 aa, Setaria italica
  Transcript Sequence Number=SeqID_3692
  Gene Ontology: Mol. function=receptor activity; Cellular component =late endosome membrane; Biological process=protein transport
  Homolog annotation: Hit_ID=Q8W338; Match level="QueryCoverage=98%, HitCoverage=40%, E-value=0.0, Identity=85%"; Hit description=TGF beta receptor associated protein-like protein
  Pfam annotation: Domain name=Vps39_1; Domain location=327-425; Score =93.5; E_value=7.5e-25; Accession=PF10366.1; Description=Vacuolar sorting protein 39 domain 1
REYMIINSMTGALTEVFSSGRIAPPLVVPLPTGELLLGKDNIGVFVDQNGKLIQDGRIIWSDTPASVVIHRPYAVARLPRHVEIRSLRAPNALVQTLLLRDVQKLVQTDNCILAALSNSVYGFLPVPIGAQIVQLTASGEFEEALALCKLLPPEDSNLRAAKESSIHIRYGHFLFDSGSYEEAMEQFSDSHVDITYVLSLYPSIVLPQTHIIGEHDKLLDMPELARESSDVTDEMESYSLQLHESDDKSPLEVKKMSHNALVALVKYLQKKRSGIIERATAEVTEEVVSGAVHHSLILSEPYKPKKPNKKRAQTHTSSIAREMATVLDTSLLQALLLTGQSSRAIVISLKGLNYCDLKICEEFLKERSEYMVLLELYKSNEMHREALQLLNQLVEESKSEMENTDFNKKFNPQMIIEYLRVSFVFPLL

SEQ ID NO: 69667 - protein, 544 aa, Setaria italica
  Transcript Sequence Number=SeqID_3693
  Gene Ontology: Mol. function=receptor activity; Cellular component =late endosome membrane; Biological process=protein transport
  Homolog annotation: Hit_ID=Q8W338; Match level="QueryCoverage=97%, HitCoverage=52%, E-value=0.0, Identity=82%"; Hit description=TGF beta receptor associated protein-like protein
  Pfam annotation: Domain name=Vps39_1; Domain location=55-165; Score =164.4; E_value=3.4e-46; Accession=PF10366.1; Description=Vacuolar sorting protein 39 domain 1
  Pfam annotation: Domain name=Vps39_2; Domain location=419-528; Score =181.8; E_value=2e-51; Accession=PF10367.1; Description=Vacuolar sorting protein 39 domain 2
  Pfam module annotation: Pfam domain module=Vps39_1::Vps39_2; Domain location=55-165::419-528
VVLVVLVVLYWSKLRVSGAVHHSLILSEPYKPKKPNKKRAQTHTSSIAREMATVLDTSLLQALLLTGQSSGAIELLKGLNYCDLKICEEFLKERSEYMVLLELYKSNEMHREALQLLNQLVEESKSEMENTDFNKKFNPQMIIEYLRPLCRSDPMLVLESSLYVLERNPSETIELFLSENVPADLVNSYLKQHAPNLQSTYLELMLSMSETGINPNLQNELVQLYLSEVLDWYKLLKEEESWTEKTYSPTRKKLISTLESNSGYNTDLLLKRLPQDALFEERAILYGKMNQHLRALSLYVHKLQMPERAVAYCDRVYEEGAQQPSKSNIYFNLLQIYLNPRKAEKEFEQKIIPVTSQYPGIQKSSSTTKFRGGRTGKKVVEIEGADDIRFSPSGTDSGRSDGDGDDASEGGPIMLNEALELLSQRWDRINGAQALRLLPRDTKLQDLVSFLEPLLRNSSEHLRNYLVIKNLISRANLQVKEDLYKRRQAVVKIDGNSMCSLCHKRIANSAFAIYPNGQTLVHFVCFRESQQIKAVRGANSVKRR

SEQ ID NO: 69668 - protein, 134 aa, Setaria italica
  Transcript Sequence Number=SeqID_3694
  Gene Ontology: Mol. function=nucleotide binding; Cellular component =endomembrane system; Biological process=plant-type hypersensitive response
  Homolog annotation: Hit_ID=Q2R8K0; Match level="QueryCoverage=67%, HitCoverage=8%, E-value=2e-14, Identity=44%"; Hit description =Nitrate-induced NOI protein, expressed
  Pfam annotation: Domain name=NOI; Domain location=58-131; Score=41.5; E_value=3.4e-09; Accession=PF05627.3; Description=Nitrate-induced NOI protein
HHRHAGGEAPRRGGGGRTGGGYSVEQSPVHPYSSESGGYGLVANSVERSRAKGGLRGNETPTRGSAVPKFGDWDSNPASADGYTHIFDKVREEKQTQAGKPAASGKDAARGNGNKHYDDGYVSSSKFSCFGWCK

SEQ ID NO: 69669 - protein, 188 aa, Setaria italica
  Transcript Sequence Number=SeqID_3695
  Gene Ontology: Mol. function=nucleotide binding; Cellular component =endomembrane system; Biological process=plant-type hypersensitive response
  Homolog annotation: Hit_ID=Q2R8K0; Match level="QueryCoverage=47%, HitCoverage=8%, E-value=4e-14, Identity=44%"; Hit description =Nitrate-induced NOI protein, expressed
  Pfam annotation: Domain name=NOI; Domain location=112-185; Score =41.5; E_value=3.4e-09; Accession=PF05627.3; Description=Nitrate -induced NOI protein
  Subcellular localization annotation: CTP_CleavageSite=17; ConfidenceScore=5.22e-01
PAENPEAFSIAAPSPNRSDAGRSSSPAPPPASRHERRPSSDAPPLSPNPYAGSPYHRHAGGEAPRRGGGGRTGGGYSVEQSPVHPYSSESGGYGLVANSVERSRAKGGLRGNETPTRGSAVPKFGDWDSNPASADGYTHIFDKVREEKQTQAGKPAASGKDAARGNGNKHYDDGYVSSSKFSCFGWCK

SEQ ID NO: 69670 - protein, 384 aa, Setaria italica
  Transcript Sequence Number=SeqID_3696
  Gene Ontology: Mol. function=nucleotide binding; Cellular component =membrane; Biological process=intracellular protein transmembrane transport
  Homolog annotation: Hit_ID=Q657P0; Match level="QueryCoverage=77%, HitCoverage=29%, E-value=1e-168, Identity=96%"; Hit description =Protein translocase subunit secA
  Pfam annotation: Domain name=DEAD; Domain location=153-314; Score= -24.5; E_value=0.0025; Accession=PF00270.21; Description=DEADDEAH box helicase
  Pfam annotation: Domain name=SecA_DEAD; Domain location=71-318; Score= 497.3; E_value=2.1e-146; Accession=PF07517.6; Description=SecA DEAD -like domain
  Pfam annotation: Domain name=SecA_PP_bind; Domain location=297-384; Score=99.0; E_value=1.6e-26; Accession=PF01043.12; Description=SecA preprotein cross-linking domain
  Pfam module annotation: Pfam domain module=DEAD::SecA_DEAD::SecA_PP _bind; Domain location=153-314::71-318::297-384
  Subcellular localization annotation: CTP_CleavageSite=25; ConfidenceScore=5.37e-01
MATAPHASAAAAAATPALRFPHPLSATGLASPRHAGGCGGFRVQFHPTRRGWGIQGWREGGSHVARVGGLLGGMFGGGGRDDGEATRKKYADTVARINSMEPEVSALSDADLRARTAALQERARSGESLDSLLPEAFAVVREASKRVLGLRPFDVQLIGGMVLHKGEIAEMKTGEGKTLVAILPAYLNALSGKGVHVVTVNDYLARRDCEWVGQVPRFLGLQVGLIQQNMTPEQRRENYSCDITYVTNSELGFDYLRDNLAMTIDELVLRNFNYCVIDEVDSILIDEARTPLIISGLAEKPSDRYYKAAKIAEAFERDIHYTVDEKQRNVLLTEQGYADAEEILDINDLYDPREQWASYVLNAIKAKELFLKDVNYIVRSKEVL

SEQ ID NO: 69671 - protein, 158 aa, Setaria italica
  misc_feature (14)..(14): Xaa can be any naturally occurring amino acid
  misc_feature (23)..(23): Xaa can be any naturally occurring amino acid
  Transcript Sequence Number=SeqID_3697
  Gene Ontology: Mol. function=iron-sulfur cluster binding; Cellular component=cytoplasm; Biological process=rRNA processing
  Homolog annotation: Hit_ID=B9SHC0; Match level="QueryCoverage=96%, HitCoverage=17%, E-value=8e-62, Identity=75%"; Hit description =Catalytic, putative
  Subcellular localization annotation: CTP_CleavageSite=39; ConfidenceScore=5.24e-01
SLSIMVDDQGLHFXSPRKVTVSXTSGLVPQLKRFLHESNCSLAVSLNATTDEVRNWIMPINRKYNLNLLLGTLREEVCLRKNYRVLFEYVMLSGVNDSMDDAKRLIELVQGIPCKINLISFNPHSGSQFKPTPDEKILEFRNVLIQGGLIVFGCGLLV

SEQ ID NO: 69672 - protein, 217 aa, Setaria italica
  Transcript Sequence Number=SeqID_3698
LAMLGAFALGFAAQACNEWAALLRQVRLLSADRSSLLDGAKTASLGLLLLVLPSSVLGDRVAVNHPQDTPPPDGGGAGESVSTSTPGEGARGESEGSRGSSNERWWLRQLREMAKASFSKEGGAAATTGGEEEASTSGTKSRSGEWKAKSGASTTTWKPSSPTGEPICPPLLQGRRAREMNEKPLIQHECSVLCVIASCEFDWLVDLLGGKDGVDGD

SEQ ID NO: 69673 - protein, 111 aa, Setaria italica
  misc_feature (10)..(10): Xaa can be any naturally occurring amino acid
  Transcript Sequence Number=SeqID_3699
  Gene Ontology: Mol. function=transferase activity, transferring glycosyl groups; Biological process=purine base biosynthetic process
  Homolog annotation: Hit_ID=B6SRU6; Match level="QueryCoverage=78%, HitCoverage=15%, E-value=3e-27, Identity=70%"; Hit description =Amidophosphoribosyltransferase
  Subcellular localization annotation: CTP_CleavageSite=42; ConfidenceScore=5.30e-01
LPYHRARTRXAATAAAAATTPSSPLLRRAAAAPTTGHHYQLRCSAKPSPLELRHCAARLAPARALFPDRVTPFSFDADGDDHPREECGVFGVIGDPDASSLCYLGLQKLQH

SEQ ID NO: 69674 - protein, 714 aa, Setaria italica
  misc_feature (136)..(136): Xaa can be any naturally occurring amino acid
  misc_feature (246)..(246): Xaa can be any naturally occurring amino acid
  Transcript Sequence Number=SeqID_3700
  Subcellular localization annotation: CTP_CleavageSite=57; ConfidenceScore=5.29e-01
MHQDSFRSVVCRSLSKNLPPRSKDGSYPETVQCAVPCVVTLQPSVCRNCQGQERSTSQSYREERSMSFNGDYLMASSLSKHFAEDLLRGAMDLQESLAMLEKFQTASQSMRLSNKKRRPKTGEKSPEIDTIIREVXPSNAKKALPRTVNNGLHGQLSNSTDELKNAVKDSFYRKNLLSVSSNNEQASLSQSARYLPNNYLISKISQQKKVAPRSLPSCAAVQPGKSKAPSLVAKLMGLDGLPSQKXNSKMKDEKIKTVSSPRARFDIEMPKSQRLQTQLFGEESGFDAEMPSSEKLAPEHYNVRTDYTSSQKGITPSNNTVATNEIRPMKSSLREINIEQARPKSPKEIKIAAPTSRKQQIKETTEINRRTREKQKSNLTSRNRGGREDAKAKAVSASRTAKVAKNPDRKSVSSSSRSCDSVKPVLQRRTHNNSRQKTVSRRNVKSSTIDELVAYEIQREIFHALDQIDGPSTEHSATPSDESYPNADWEAESSVDDIQKDFCESDEASLFTSHAERTGSTDGDAIHPSSTDIITHIKEAEIKDEIILLLLSDKSFLGKASKLIGIDVYEHLRNQYDVISKVEMKEHKIYLDTAAEQLERKHHQQNSLCYTGFQGQKCRARAYFSLEELLRDISNGIRKLNGYSARDDAGCTKDSLDLKLERDLRCSGASINGVWDMGWQDLICTEETECFIRDAGEDILSLLIEEAALDMCMH

SEQ ID NO: 69675 - protein, 87 aa, Setaria italica
  Transcript Sequence Number=SeqID_3701
  Gene Ontology: Mol. function=nucleoside-triphosphatase activity; Cellular component=membrane; Biological process=transport
  Homolog annotation: Hit_ID=B6U174; Match level="QueryCoverage=100%, HitCoverage=11%, E-value=2e-36, Identity=86%"; Hit description =ATPase, coupled to transmembrane movement of substances
KVLQRIAQSGSVVVMSIHQPSYRILGLLDRLLFLSRGQTVYYGPPGALPSFFDDFGKPIPGNENPTEFALDLIRELETMPDGARDLV

SEQ ID NO: 69676 - protein, 146 aa, Setaria italica
  misc_feature (7)..(7): Xaa can be any naturally occurring amino acid
  Transcript Sequence Number=SeqID_3702
  Gene Ontology: Mol. function=ubiquitin-protein ligase activity; Cellular component=ubiquitin ligase complex; Biological process =ubiquitin-dependent protein catabolic process
PEKGKRXSVASAVAADLDSAVPALLSFAKGGAGADARVDAVRILATVAPELVAYLTGDGKEKPGRVSMAVEALAAVLSADGVAEEAKDAVVVTLVAEDLGRIATTLLGAGSNGAAVLEAILTLPAADADAKTAIADRPELFPDLVR

SEQ ID NO: 69677 - protein, 51 aa, Setaria italica
  Transcript Sequence Number=SeqID_3703
MASPSGNEPLLAAAPPVPAPVVVVSPQFCAKEVVPLTVTKKVKSLTGGDFT

SEQ ID NO: 69678 - protein, 91 aa, Setaria italica
  Transcript Sequence Number=SeqID_3704
  Gene Ontology: Mol. function=aspartic-type endopeptidase activity; Biological process=proteolysis
  Homolog annotation: Hit_ID=B6SJD9; Match level="QueryCoverage=73%, HitCoverage=13%, E-value=9e-28, Identity=89%"; Hit description =Pepsin A
AAEAGGGGGFVYTPLLHNPRHPYFYSVALEAVSVGATRIPARPELGRVDRAGNGGMVVDSGTTFTMLPGETHARVVEAFARAMDAAGFARS

SEQ ID NO: 69679 - protein, 207 aa, Setaria italica
  misc_feature (71)..(71): Xaa can be any naturally occurring amino acid
  misc_feature (102)..(102): Xaa can be any naturally occurring amino acid
  misc_feature (143)..(143): Xaa can be any naturally occurring amino acid
  Transcript Sequence Number=SeqID_3705
  Gene Ontology: Mol. function=structural molecule activity
  Homolog annotation: Hit_ID=Q8LN94; Match level="QueryCoverage=97%, HitCoverage=68%, E-value=1e-29, Identity=43%"; Hit description=MSP domain containing protein, expressed
LSKVIKFLWLSSSRWFVLVYGLLAKYITSQMFVKEVGNVVEEVKLKVAYVMPPEPQSEIAEEHDGLERVLXPMQQIVDNGRSTSELSSGSASLRSAEEGGSXSPVGRIVKSEEFLKAATPALETKTYAGRAEQSHQLSAIIAXKLTEEKNSALEQNRKLRDELMVVCHCDMQELVRREASKQQGSFSLVLLLALGVLCVILGHLVKK

SEQ ID NO: 69680 - protein, 261 aa, Setaria italica
  misc_feature (8)..(8): Xaa can be any naturally occurring amino acid
  misc_feature (17)..(17): Xaa can be any naturally occurring amino acid
  misc_feature (30)..(30): Xaa can be any naturally occurring amino acid
  Transcript Sequence Number=SeqID_3706
  Gene Ontology: Mol. function=structural molecule activity; Cellular component=plasma membrane; Biological process=lipid transport
  Homolog annotation: Hit_ID=Q8LN94; Match level="QueryCoverage=100%, HitCoverage=95%, E-value=2e-74, Identity=57%"; Hit description=MSP domain containing protein, expressed
  Pfam annotation: Domain name=Motile_Sperm; Domain location=1-103; Score=79.4; E_value=1.3e-20; Accession=PF00635.18; Description=MSP (Major sperm protein) domain
  Subcellular localization annotation: CTP_CleavageSite=59; ConfidenceScore=5.32e-01
PELQFPSXLDKQISCPXLRLTNRPCDTCGXKVKTTSPRKYCVRPNNGVVPPRSSCTVVVTMQAQKVVPPDLQCKDKFLVQSVVVSDGLLAKYITSQMFVKEVGNVVEEVKLKVAYVMPPEPQSEIAEEHDGLERVLMPMQQIVDNGRSTSELSSGSASLRSAEEVGSPVGRIVKSEEFLKAATPALETKTYAGRAEQSHQLSAIIAKLTEEKNSALEQNRKLRDELELVRREASKQQGSFSLVLLLALGVLCVILGHLVKK

SEQ ID NO: 69681 - protein, 222 aa, Setaria italica
  Transcript Sequence Number=SeqID_3707
  Gene Ontology: Mol. function=nucleic acid binding
  Homolog annotation: Hit_ID=B9R7H3; Match level="QueryCoverage=88%, HitCoverage=45%, E-value=2e-70, Identity=68%"; Hit description =Nuclear acid binding protein, putative
  Pfam annotation: Domain name=RRM_1; Domain location=1-60; Score=27.3; E_value=6.1e-05; Accession=PF00076.14; Description=RNA recognition motif. (a.k.a. RRM, RBD, o
  Pfam annotation: Domain name=RRM_1; Domain location=92-156; Score =84.9; E_value=2.8e-22; Accession=PF00076.14; Description=RNA recognition motif. (a.k.a. RRM, RBD, o
  Pfam module annotation: Pfam domain module=RRM_1::RRM_1; Domain location=1-60::92-156
ATLLETFSSRYSSVKGAKVVIDANTGRSKGYGFVRFGDDSEKTHAMTEMNGVYCSSRPMRIGPATPRKSSGTTGSNGSSARSDGGDLTNTTVFVGGLDPNVSEEDLRQTFSQYGEISSVKIPVGKQCGFVQFAQRKNAEDALQGLNGSTIGKQTVRLSWGRNPANKQFRGDNGNQWNNGMYYAASPFYNGYGYPAAPFPDPGMYAAPAYGAYPFYGSQPQVS

SEQ ID NO: 69682 - protein, 537 aa, Setaria italica
  Transcript Sequence Number=SeqID_3708
  Gene Ontology: Mol. function=nucleic acid binding; Cellular component= cytoplasm; Biological process=multicellular organismal development
  Homolog annotation: Hit_ID=Q851R2; Match level="QueryCoverage=99%, HitCoverage=50%, E-value=0.0, Identity=84%"; Hit description=Protein argonaute MEL1
  Pfam annotation: Domain name=PAZ; Domain location=10-147; Score =148.6; E_value=1.9e-41; Accession=PF02170.14; Description=PAZ domain
  Pfam annotation: Domain name=Piwi; Domain location=301-537; Score =173.3; E_value=6.8e-49; Accession=PF02171.9; Description=Piwi domain
  Pfam module annotation: Pfam domain module=PAZ::Piwi; Domain location= 10-147::301-537
VPNNSFFKPVTVIKFVEEFLSIRDTSRPSSDRDRVKIKKALRGVRIETSHQQDQIRRYKITGITPIPMSQLIFPVDEKGTRQTVVQYFWDKYNYRLKFGSWPCLQAGSDSRPVYLPMEVCKIVEGQRYSKKLNDRQVTNILRATCKRPQEREQSIRDMVLHNNYAEDKFAQEFGIKVCSDLVSVPARVLPPPLLKYHDSGREKTCAPSVGQWNMINKKMINGGTIDNWTCLNFSRMRPEEVQRFCMDLTHMCNATGMNVNPRPFVEVKSAAPNHIENALRDVHRRATQMAAQQGARNQLQLLIVILPDVSGSYGKIKRVCETDIGIVSQCCLPKHASRPNKQYLENVALKINVKVGGRNTVLERAFVRNGIPFVSEVPTIIFGADVTHPPPGEDSASSIAAVVASMDWPEITKYRGLVSAQPHRQEIIEDLFTVSKDPQKGHNVNGGMIRELLIAFRRKTNRRPERIIFYRDGVSEGQFSHVLLHEMDAIRKACASLEEGYLPPVTFVVVQKRHHTRLFPEVHGRRDMTDKSGNILP

SEQ ID NO: 69683 - protein, 395 aa, Setaria italica
  misc_feature (87)..(87): Xaa can be any naturally occurring amino acid
  Transcript Sequence Number=SeqID_3709
  Gene Ontology: Mol. function=branched-chain-amino-acid transaminase activity; Cellular component=chloroplast; Biological process =branched chain family amino acid metabolic process
  Homolog annotation: Hit_ID=B6STR2; Match level="QueryCoverage=91%, HitCoverage=87%, E-value=0.0, Identity=86%"; Hit description =Branched-chain-amino-acid aminotransferase
  Pfam annotation: Domain name=Aminotran_4; Domain location=132-376; Score=146.5; E_value=8.2e-41; Accession=PF01063.11; Description =Aminotransferase class IV
AKGALLPWARGGHGGLARVLLGGALLTAGGGGGSCPRRWQSSLPQLDHTDRSDEESCGEIDWDNLGFGLTPTDYMYVMRSSPEDLGXLPRGELCRYGNIELSPSSGVLNYAQGLFEGMKAYRRPGRAGYTLFRPEENARRMQHGAERMCMPAPSVDQFVRAVKETVLANRRWVPPQGKGALYLRPLLMGSGPILGLAPAPEYTFLIYAAPVGNYFKEGLAPINLVVDDEFHRAMPGGTGGVKTIANYAPVLRAQLDAKSKGFTDVLYLDSVHKRYLEEVSSCNVFVVKGGVVATPATMGTILPGITRKSVIELARDRGYKVEERLVSIDDLIDADEVFCTGTAVVVAPVSTVTYKGQRHAFRTGSDTLAQELYTTLTSIQMGLTEDNKGWTVAVD

SEQ ID NO: 69684 - protein, 95 aa, Setaria italica
  Transcript Sequence Number=SeqID_3710
  Gene Ontology: Mol. function=pseudouridine synthase activity; Cellular component=ribonucleoprotein complex; Biological process =pseudouridine synthesis
  Homolog annotation: Hit_ID=Q9M3X0; Match level="QueryCoverage=66%, HitCoverage=15%, E-value=4e-26, Identity=88%"; Hit description =Putative kinetochore protein
  Pfam annotation: Domain name=DKCLD; Domain location=59-95; Score =35.1; E_value=8.8e-08; Accession=PF08068.4; Description=DKCLD (NUC011) domain
MSSTPPAVASPASEQAKSKKKKHKSKDAAAAIDPPSLAEAEEKTDGYLIKPQSLVPSLDASTWPLLLKNYDRLNVRTGHYTPLPSGHSPLKRPLA

SEQ ID NO: 69685 - protein, 202 aa, Setaria italica
  misc_feature (13)..(13): Xaa can be any naturally occurring amino acid
  Transcript Sequence Number=SeqID_3711
  Gene Ontology: Mol. function=pseudouridine synthase activity; Cellular component=ribonucleoprotein complex; Biological process =pseudouridine synthesis
  Homolog annotation: Hit_ID=Q9M3X0; Match level="QueryCoverage=75%, HitCoverage=37%, E-value=9e-82, Identity=94%"; Hit description =Putative kinetochore protein
  Pfam annotation: Domain name=DKCLD; Domain location=63-121; Score =141.6; E_value=2.5e-39; Accession=PF08068.4; Description=DKCLD (NUC011) domain
  Pfam annotation: Domain name=TruB_N; Domain location=125-202; Score =40.3; E_value=4.4e-09; Accession=PF01509.10; Description=TruB family pseudouridylate synthase (N terminal domain)
  Pfam module annotation: Pfam domain module=DKCLD::TruB_N; Domain location=63-121::125-202
MSSATPAVASPAXSEQAKSKKKKHKSKDDPAAAAAADPPSLAEAEEKTDGYLIKPQALVPSLDASTWPLLLKNYDRLNVRTGHYTPLPSGHSPLKRPLAEHLRYGIINLDKPSNPSSHEVVAWIKRILRAEKTGHSGTLDPKVTGNLIVCVDRATRLVKSQQGAGKEYVCVARFHAAVPDTARVARALEALTGAVFQPPAAH

SEQ ID NO: 69686 - protein, 213 aa, Setaria italica
  Transcript Sequence Number=SeqID_3712
  Gene Ontology: Mol. function=pseudouridine synthase activity; Cellular component=ribonucleoprotein complex; Biological process =pseudouridine synthesis
  Homolog annotation: Hit_ID=B9SBQ8; Match level="QueryCoverage=39%, HitCoverage=14%, E-value=1e-35, Identity=86%"; Hit description =Centromere/microtubule binding protein cbf5, putative
FTRIDNKGEPIAIGIAEMTTAVMATCDHGAVAKIKRVVMDRDTYPRKWGLGPVALKKKKLIAEGLLDKHGKPNEKTPAEWLRNVVLPTGGDVSIASIAAAPEPEKAKVEQDAVGGEEVKEKKRKKDEENDDGDASIPVKKIKVEEAAEVVEGEKSEKKKKKKKKDKAESGSAELKEEKVDVADEKDGSEKKKKKKKSKEGSDVTDPEIAQTRD

SEQ ID NO: 69687 - protein, 442 aa, Setaria italica
  Transcript Sequence Number=SeqID_3713
  Gene Ontology: Mol. function=pseudouridine synthase activity; Cellular component=ribonucleoprotein complex; Biological process =pseudouridine synthesis
  Homolog annotation: Hit_ID=B9SBQ8; Match level="QueryCoverage=66%, HitCoverage=50%, E-value=1e-148, Identity=85%"; Hit description =Centromere/microtubule binding protein cbf5, putative
  Pfam annotation: Domain name=PUA; Domain location=167-240; Score =102.1; E_value=1.9e-27; Accession=PF01472.12; Description=PUA domain
  Pfam annotation: Domain name=TruB_N; Domain location=1-117; Score =149.9; E_value=7.7e-42; Accession=PF01509.10; Description=TruB family pseudouridylate synthase (N terminal domain)
  Pfam module annotation: Pfam domain module=PUA::TruB_N; Domain location=167-240::1-117
ILIVCIDRATRLVKSQQGAGKEYVCVARFHAAVPDTARVARALEALTGAVFQRPPLISAVKRQLRVRTIYESKLLEHDPERHLAVFWISCEAGTYVRTLCVHLGLLLGVGAHMQELRRVRSGILGEQDNMVTMHDVMDSMWSLDNHKDESYLRRVVMPLEVLLTSYKRLVVKDSAVNAICYGAKLMIPGLLRFENDIENGEEVVLMTTKGEAIAIGIAEMTTAVMATCDHGAVAKIKRVVMDRDTYPRKWGLGPVALKKKKLISEGLLDKHGKPNEKTPAEWLRNVVLPTGGDVAIASIAAAPEPEKVKVELEAAVTDEVKEKKKKRQKDEEDNDADASVPSKKIKVEEAAETVEGEKSEKKKKKKKKDKAESGSAELKEEKVDVADEKDGSEKKKKKKKSKEGSDVTDPEIAQTRDSAESEKSEKKKEKKKKKSRDAEEAQ

SEQ ID NO: 69688 - protein, 118 aa, Setaria italica
  Transcript Sequence Number=SeqID_3714
  Homolog annotation: Hit_ID=B6SV94; Match level="QueryCoverage=96%, HitCoverage=23%, E-value=2e-17, Identity=57%"; Hit description=CCT motif family protein
  Subcellular localization annotation: CTP_CleavageSite=32; ConfidenceScore=5.69e-01
SPGAHSSPLRPVHSSPSSTLSEASNASSSATSVSLKRARAPRKRPNQAYNEAAALLASIHPSVFPVKKSPKTATRPPVRQLSGLAAAFDASSDLLPPLPVLADTAFLLRDVPAPPPPL

SEQ ID NO: 69689 - protein, 107 aa, Setaria italica
  misc_feature (37)..(37): Xaa can be any naturally occurring amino acid
  Transcript Sequence Number=SeqID_3715
  Homolog annotation: Hit_ID=B9SGS7; Match level="QueryCoverage=100%, HitCoverage=12%, E-value=3e-26, Identity=57%"; Hit description =Pentatricopeptide repeat-containing protein, putative
  Pfam annotation: Domain name=PPR; Domain location=46-80; Score=20.8; E_value=0.0057; Accession=PF01535.12; Description=PPR repeat
YVFNSLMNVNAHSLSYNLSVYKHMQVMHLLPYCCCSXNLGVAPDLTSYNILLKTCCNAREFNLAQEIYEEMKKKECDGLLKLDVFTYSTMMKVFADAKMWKMASNIK

SEQ ID NO: 69690 - protein, 41 aa, Setaria italica
  Transcript Sequence Number=SeqID_3716
NFPVKLILFLLTWTSVPLAMSPRACYAVENFIDYTYTVCNL

SEQ ID NO: 69691 - protein, 405 aa, Setaria italica
  Transcript Sequence Number=SeqID_3717
  Gene Ontology: Mol. function=uroporphyrinogen decarboxylase activity; Cellular component=chloroplast; Biological process=porphyrin biosynthetic process
  Homolog annotation: Hit_ID=Q9AXB0; Match level="QueryCoverage=88%, HitCoverage=89%, E-value=0.0, Identity=92%"; Hit description =Uroporphyrinogen decarboxylase 1, chloroplastic
  Pfam annotation: Domain name=URO-D; Domain location=46-387; Score =480.7; E_value=2e-141; Accession=PF01208.9; Description =Uroporphyrinogen decarboxylase (URO-D)
  Subcellular localization annotation: CTP_CleavageSite=53; ConfidenceScore=5.79e-01
MMSPAASSTAPAVAFLSAAPTSSSCSRRRRSRLRSISASLSPSASSEEPLLVRAARGEDGLPRPPAWMMRQAGRYMAEYQALAKRHPSFRERSENTDLIVEITLQPWRAFAPDGVILFSDILTPLPAIGVPFDISDSKGPVIQSPVRSEDQVKQLVPIDLDKLHFVGESLRILRNEIDGKAALLGFVGAPWTIATYVVEGGMTNTYTNIKSMCHTAPNVLRGLLSHLAQAISDYIIYQVNSGAQCIQIFDSWGGQLPPHVWEQWSKPYIKQIVSRIKKECPHVPLVLYINGNGGLLERMKDTGVDVIGLDWTVDMADGRRRLGNGIGVQGNVDPAFLFSPLPVLTDEIHRVVKSAGPKGHILNLGHGVLQKTPEEAVAHFFDVTRSLRYDTLFQGSVAEELQPVA

SEQ ID NO: 69692 - protein, 490 aa, Setaria italica
  misc_feature (431)..(431): Xaa can be any naturally occurring amino acid
  Transcript Sequence Number=SeqID_3718
  Gene Ontology: Mol. function=transferase activity, transferring glycosyl groups; Cellular component=chloroplast
  Homolog annotation: Hit_ID=B6UEE3; Match level="QueryCoverage=100%, HitCoverage=60%, E-value=0.0, Identity=94%"; Hit description =Phosphoribosylanthranilate transferase
  Pfam annotation: Domain name=C2; Domain location=84-172; Score=92.5; E_value=1.5e-24; Accession=PF00168.22; Description=C2 domain
  Pfam annotation: Domain name=PRT_C; Domain location=335-490; Score =409.8; E_value=4.4e-120; Accession=PF08372.2; Description=Plant phosphoribosyltransferase C-ter
  Pfam module annotation: Pfam domain module=C2::PRT_C; Domain location= 84-172::335-490
GRIVLPLQAAMPRHDHFGKPVEPRWYNLMRPSDDPEKKEMKFASKIQIRMSLDFGYHVLDESTYYSSDLQPSSKPARKPSIGMLELGVLGARNLIPMKPKDGRTTDAYCVAKYGPKWVRTRTILDTLNPQWNEQYTWEVFDPCTVITVVVFDNGQIGSKNGGGPDQRIGKVRIRLSTLETDRVYTHFYPLLVLHPSGLKKTGELHLAVRFTCMAWVNMMALYGRPLLPKMHYTQPIPVMQLDYLRHQAMQIVAARLSRAEPPLRREVVEYMLDVDSHMFSLRRSKANFYRITSLFYGFLAMLKWYEGIRSWRNPITTMLVHMLFLILICYPELILPTFFLYMFMIGLWNYRYRPRHPSHMDTKLSHAEMTHPDELDEEFDTFPTSRPADIVRMRYDRLRSVGGRVQTVVGDLATQGERAHALLSWRDPRAXAIFIFLSLVVAIVLYVTPFQVLMVITMLYLLRHPRFRSRMPSVPFNFYRRLPAKSDMLL

SEQ ID NO: 69693 - protein, 225 aa, Setaria italica
  misc_feature (82)..(82): Xaa can be any naturally occurring amino acid
  misc_feature (183)..(183): Xaa can be any naturally occurring amino acid
  misc_feature (216)..(216): Xaa can be any naturally occurring amino acid
  Transcript Sequence Number=SeqID_3719
  Gene Ontology: Biological process=intracellular signaling cascade
  Homolog annotation: Hit_ID=Q69T67; Match level="QueryCoverage=85%, HitCoverage=22%, E-value=7e-59, Identity=60%"; Hit description =Lustrin A-like
  Subcellular localization annotation: CTP_CleavageSite=71; ConfidenceScore=5.51e-01
SDAQPGSGSGSGDASHESAGSSSSVKSNAGDGGGEHNSSSVSAVPTSNQTGSSALAGEKEVGSPSKNNMVVASPAVKNTGNXKKKQKSKRKVASGGSSGAVNKQKGDATQGSAGSSKDHSAQAVTSKSGNDSKGNVSTTKQDGGSSGNKEVDWFKQVASCDMFHGHWVRDDSYPLYPEGSCPXIDEPFDCYLNGRRDLAYQKLRWQPSGCSIPRLXPTDMLERLG

SEQ ID NO: 69694 - protein, 116 aa, Setaria italica
  misc_feature (7)..(7): Xaa can be any naturally occurring amino acid
  misc_feature (67)..(67): Xaa can be any naturally occurring amino acid
  Transcript Sequence Number=SeqID_3720
  Homolog annotation: Hit_ID=Q5CZW3; Match level="QueryCoverage=86%, HitCoverage=32%, E-value=2e-27, Identity=56%"; Hit description =Zgc:112985
  Pfam annotation: Domain name=N2227; Domain location=1-112; Score= -0.9; E_value=2.6e-14; Accession=PF07942.4; Description=N2227-like protein
ANEWTIXYPWIHSNCNSLSDNDQLRPVSFPDIHPSSAGITDGFSMCAGDFVEVYSEESQESAWDAVXTCFFLDTAHNIVEYIEIISKVLKDGGVWINLGPLLYHFADSYGPDDVIS

SEQ ID NO: 69695 - protein, 398 aa, Setaria italica
  Transcript Sequence Number=SeqID_3721
  Homolog annotation: Hit_ID=Q5CZW3; Match level="QueryCoverage=66%, HitCoverage=85%, E-value=3e-73, Identity=50%"; Hit description =Zgc:112985
  Pfam annotation: Domain name=N2227; Domain location=120-389; Score =555.9; E_value=4.6e-164; Accession=PF07942.4; Description=N2227-like protein
MIIHRTCMTTFMWIALIIPWRGDCSTISTSRSNTSLDEQHDNPQEDAKAHGSSSETVNKKDEEDHTARCSQPVGSNLGTSQGVHVSCNGDTDTSTAYCQDKDVSASSAVDNVTPRHCAGSLFKLNVPPIDVDKVRCIIRNIVRDWAEEGQKERDECYKPILEELNRLFPNRSNERPPSCLVPGAGLGRLALEISSLGFVSQGNEFSYYMLICSSFILNHTQEANEWTIYPWIHSNCNSLSDNDQLRPVSFPDIHPSSAGITDGFSMCAGDFVEVYSEESQESAWDAVVTCFFLDTAHNIVEYIEIISKVLKDGGVWINLGPLLYHFADSYGPDDDMSIELSLEDVKKVAYHYGFVMEVEKMIETTYTANMRAMMQNRYRAAFWTMRKNASRAKAQKPR

SEQ ID NO: 69696 - protein, 407 aa, Setaria italica
  Transcript Sequence Number=SeqID_3722
  Gene Ontology: Mol. function=signal transducer activity; Biological process=response to light stimulus
  Homolog annotation: Hit_ID=B6U1M7; Match level="QueryCoverage=99%, HitCoverage=66%, E-value=0.0, Identity=81%"; Hit description =Transposon protein Mutator sub-class
  Pfam annotation: Domain name=NPH3; Domain location=7-256; Score =376.7; E_value=4.1e-110; Accession=PF03000.6; Description=NPH3 family
KQQLVPKDWWVEDLTDLDIDAYKQVITAIKAKCMVSKDVIGEAIKAYTYKKLPSLSKVSMIHGDAKVRAMLVTITCLLPSEKGSVSCSFLLKLLKATNLLKCGEMCRKELMKRIARQLEEASVSDLLIPTVDGDTTVYDIDLILSIVEEFVRQDSKHAQKHNGGEVNDHVSAPSASMITVAKIVDGYLAEVAKDPNIPVYKFFSLAETVSGNSRPVHDGLYRAIDMYLKEHPSLGKSDKKRLCALMDCKKLSPDACAHAVQNERLPLRIVVQVLYHEQTRASAAATIRADSIGIGSYESSRSGATTNTEDEWDGVMAVEDLSLSKTTKLDKCDTAGTDAEKNHGGNKAANGRAKGGATPKKALGKMMSSKGQAGERSSSDSSDSAILPRQEHPKRTPARSTTKSAAA

SEQ ID NO: 69697 - protein, 81 aa, Setaria italica
  Transcript Sequence Number=SeqID_3723
GSRRPRSPSGAAARRGTAAAAGPLLDGAAPAVDDGDGSSSGELPSCQAMMGPFDRGRPRLVRWLRASSARVWRARDIYDAG

SEQ ID NO: 69698 - protein, 52 aa, Setaria italica
  misc_feature (48)..(48): Xaa can be any naturally occurring amino acid
  Transcript Sequence Number=SeqID_3724
  Homolog annotation: Hit_ID=B6TWZ9; Match level="QueryCoverage=100%, HitCoverage=15%, E-value=5e-16, Identity=78%"; Hit description=HEAT repeat family protein
MSASALKDLNISQPADLENGKDRSMKSCISKPVLNGSKCANKEENAPXACPD

SEQ ID NO: 69699 - protein, 340 aa, Setaria italica
  Transcript Sequence Number=SeqID_3725
  Gene Ontology: Mol. function=binding
  Homolog annotation: Hit_ID=B4FX70; Match level="QueryCoverage=100%, HitCoverage=100%, E-value=1e-170, Identity=85%"; Hit description =HEAT repeat family protein
  Pfam annotation: Domain name=HEAT; Domain location=117-153; Score =12.4; E_value=1.5; Accession=PF02985.14; Description=HEAT repeat
  Pfam annotation: Domain name=HEAT; Domain location=159-194; Score =3.4; E_value=19; Accession=PF02985.14; Description=HEAT repeat
  Pfam annotation: Domain name=HEAT; Domain location=195-229; Score =4.8; E_value=13; Accession=PF02985.14; Description=HEAT repeat
  Pfam module annotation: Pfam domain module=HEAT::HEAT::HEAT; Domain location=117-153::159-194::195-229
MSASALKDLNISQPADLENGKDRSMKSCISKPVLNGSKCANKEENAPSACPDAVTNGNEAGNADVEYIDSENLVDLPDADATLSTLVKRLDSKDWVMTCEALNNVRQLAIYHKERLQELLEPLVPLIVKSVKNPRSAVCKTALMTCADIFKAYGDLIVDSIDPLLVQLFLKASQDKRFVCEAAEAALISLTSWISPSVLLPRMQPYLKNRNPRIRAKASVCFSKSVPRLDVEGIKEYGMDKLIQIAATQLSDQLPESREAARNLALELQVLYEKSQASTSGENDGEPSASPDAESWEAFCQSKLSALSAQAILRVTSTTPKEGAPAGVTSAPKEGVAVGC

SEQ ID NO: 69700 - protein, 45 aa, Setaria italica
  Transcript Sequence Number=SeqID_3726
  Gene Ontology: Mol. function=serine-type endopeptidase activity; Cellular component=intracellular; Biological process=protein modification process
  Homolog annotation: Hit_ID=Q91N45; Match level="QueryCoverage=95%, HitCoverage=6%, E-value=4e-18, Identity=97%"; Hit description =Polyprotein (Fragment)
  Pfam annotation: Domain name=ubiquitin; Domain location=1-45; Score =44.3; E_value=4.8e-10; Accession=PF00240.15; Description=Ubiquitin family
KIQDKEGIPPDQQRLIFAGKQLEDGRTLADYNIQKESTLHLVLIP

SEQ ID NO: 69701 - protein, 204 aa, Setaria italica
  Transcript Sequence Number=SeqID_3727
  Gene Ontology: Mol. function=selenium binding; Cellular component =plasma membrane; Biological process=cell redox homeostasis
  Homolog annotation: Hit_ID=B9T1J6; Match level="QueryCoverage=69%, HitCoverage=62%, E-value=5e-58, Identity=72%"; Hit description =Selenoprotein T, putative
  Pfam annotation: Domain name=SelT; Domain location=76-182; Score =200.2; E_value=5.5e-57; Accession=PF10262.1; Description =Selenoprotein T
PHHHPHPPHHPHPHPPHHHPHPPHHHHHPDPAAAAIQEPRVDGAGFGATVELQFCASCSYRGTAMTMKRMLETSFPGIHVILHNYPPPFPKRVLSKAIPIVQVGAVATIMAGDQIFPRLGMVPPPWYYSLRANRFGTMATIWLFGNFAQSFLQSSGAFEVYCNGELVFSKLTEQRFPSEFELRDLIGSRLPESPFGRNLGKTFT

SEQ ID NO: 69702 - protein, 57 aa, Setaria italica
  Transcript Sequence Number=SeqID_3728
RDRGSEYRSNSYRNGRDSERGGHRYRSGDMTNDRGRMRSRSRSPSRHGYGRSRSPDH

SEQ ID NO: 69703 - protein, 352 aa, Setaria italica
  Transcript Sequence Number=SeqID_3729
  Gene Ontology: Mol. function=protein binding; Cellular component =nuclear speck; Biological process=response to stress
  Homolog annotation: Hit_ID=Q84LL9; Match level="QueryCoverage=63%, HitCoverage=66%, E-value=5e-92, Identity=73%"; Hit description=Salt tolerance protein 3
  Pfam annotation: Domain name=LUC7; Domain location=1-265; Score =326.5; E_value=5.5e-95; Accession=PF03194.7; Description=LUC7 N _terminus
MDAQRALLDELMGTARNLTEEEKKGHKELKWDDPDVCGPYMVRFCPHDLFVNTKSNLGTCSRIHDPKLKESFEKSPRHDSYMRRFEAELAQQCEKLVVDLDRKIRRGRERLAHDSAVPMPIPGKIAEQLSAREEQVKKLLEQIEELGEAGKVDEAEALMRRVDILNAEKTALANQADNKVAMLEKKMELCETCGSFLVADDALERTQSHVTGKQHIGYGMVRDFLAEYKAAKEKAKEEERLAREQKAEERRKQRGKEYDSGGRDSGTRRERSGERDYDRDRQYERSRGRDRSYDYRDRGSEYRSNSYRNGRDSERGGHRYRSGDMTNDRGRMRSRSRSPSRHGYGRSRSPDH

SEQ ID NO: 69704 - protein, 563 aa, Setaria italica
  Transcript Sequence Number=SeqID_3730
  Gene Ontology: Mol. function=calcium ion binding; Cellular component =nucleus; Biological process=apoptosis
  Homolog annotation: Hit_ID=Q7XMG3; Match level="QueryCoverage=88%, HitCoverage=80%, E-value=0.0, Identity=83%"; Hit description =OSJNBa0028I23.19 protein
AAVSVARSSPPPQQAVVEPAPAPSPEAAEEEKADPEPTGISMEEAEEVEVAEGEGEEEEEEGGEELPPDVAEQLWAMVFGAGVSKAVLAQWSNQGIRFSSDSETTMGLVQHEGGPCGVLATVQAYVLKYLLFFSDDLRNPEVSNPLYTLGQRRFYQSSFAAGDDFSSLTDGRKTRALVHAMVEILFLCGTGKRAVVASIARVNRGKTNAVLEGLSVESATDLQKILRTSTFTSRKDAFDILLANIPLFESRLGAMLFLISALLSRGLEYIQADRDDPSQPLVTAPFGHASQEIVNLLLCGEAVPNVFDGKMDLGGGMSLKGIPNNVEVGFLTLLESLNLCKVGQYLKCPKWPIWVVGSESHYTVLFALNPNVQEENELEERESRIRRAFDAQDQSGGGGFISIEGFQQVLRDTDINFPSDKLEDLCNAGIIVWSEFWQALLQLDKRAGGMKDPTGLMGKKQFNIFHFNGIAKSVLNGNASAGGSVPIQRPRLCKLNVTVPPRWNQDEYLADVVSASTSSSKDDNILSLAPPVQTSQHAPLVDCIRTRWPRAVCSWAGDMPSIV

SEQ ID NO: 69705 - protein, 126 aa, Setaria italica
  Transcript Sequence Number=SeqID_3731
INELIPSFTLYCYSAHTEQLRNWGSNGSLVAVAYSCCEHLVIPCSYKLGACSYIICLHKFYESVWHQLLKRKEFVIVFITKAFPRYGGRVTKLAPYLSRMVDLRNTISLTVAGGPREYTRNGKSSL

SEQ ID NO: 69706 - protein, 53 aa, Setaria italica
  Transcript Sequence Number=SeqID_3732
KPKQRCSTSMDQADVARLSCGKRLISPTVSEDFKRTSSSDTVWEAPYFPHVSE

SEQ ID NO: 69707 - protein, 45 aa, Setaria italica
  Transcript Sequence Number=SeqID_3733
  Gene Ontology: Mol. function=calcium ion binding; Cellular component =intracellular; Biological process=small GTPase mediated signal transduction
  Homolog annotation: Hit_ID=A6YTD0; Match level="QueryCoverage=100%, HitCoverage=6%, E-value=3e-16, Identity=84%"; Hit description =ATP/GTP/Ca++ binding protein
  Pfam annotation: Domain name=EF_assoc_2; Domain location=9-45; Score=- 21.1; E_value=0.015; Accession=PF08356.4; Description=EF hand associated
NEFQVRCFSAPLQPTEISGVKRVVQEKMPEGVNDNGLTLTGFLFL

SEQ ID NO: 69708 - protein, 208 aa, Setaria italica
  Transcript Sequence Number=SeqID_3734
  Gene Ontology: Mol. function=calcium ion binding; Cellular component =intracellular; Biological process=small GTPase mediated signal transduction
  Homolog annotation: Hit_ID=Q5N9W6; Match level="QueryCoverage=91%, HitCoverage=28%, E-value=5e-61, Identity=62%"; Hit description =Putative mitochondrial Rho 1
  Pfam annotation: Domain name=EF_assoc_1; Domain location=3-53; Score =75.1; E_value=2.6e-19; Accession=PF08355.4; Description=EF hand associated
  Pfam annotation: Domain name=MMR_HSR1; Domain location=58-177; Score=- 4.8; E_value=0.0028; Accession=PF01926.15; Description=GTPase of unknown function
  Pfam annotation: Domain name=Miro; Domain location=59-177; Score =47.7; E_value=4.5e-11; Accession=PF08477.5; Description=Miro-like protein
  Pfam module annotation: Pfam domain module=EF_assoc_1::MMR _HSR1::Miro; Domain location=3-53::58-177::59-177
  Subcellular localization annotation: CTP_CleavageSite=66; ConfidenceScore=5.04e-01
YNYEGFLSKWALMTLLDPTNSYANLVYVGYPGEFSSAFTVTRKRRVDRKKQQTQRNVFQCYVFGARGSGKTSLLQSFIGRQPSDALPSNTERFATNSVELPDGTRKTLILREIPEGDVRSLLSDKESLAPCDVAVFVYDSCDEYSWHRARDLLVQVATHGENTGYEVPCLIVASKDDLDQCPQALQESTRVSVLAFNSIGIVGQLNPD

SEQ ID NO: 69709 - protein, 531 aa, Setaria italica
  Transcript Sequence Number=SeqID_3735
  Gene Ontology: Mol. function=calcium ion binding; Cellular component =intracellular; Biological process=small GTPase mediated signal transduction
  Homolog annotation: Hit_ID=A6YTD0; Match level="QueryCoverage=100%, HitCoverage=82%, E-value=0.0, Identity=66%"; Hit description =ATP/GTP/Ca++ binding protein
  Pfam annotation: Domain name=EF_assoc_1; Domain location=238-308; Score=147.8; E_value=3.4e-41; Accession=PF08355.4; Description=EF hand associated
  Pfam annotation: Domain name=EF_assoc_2; Domain location=116-204; Score=156.1; E_value=1e-43; Accession=PF08356.4; Description=EF hand associated
  Pfam annotation: Domain name=MMR_HSR1; Domain location=313-432; Score= -4.8; E_value=0.0028; Accession=PF01926.15; Description=GTPase of unknown function
  Pfam annotation: Domain name=Miro; Domain location=314-432; Score =47.7; E_value=4.5e-11; Accession=PF08477.5; Description=Miro-like protein
  Pfam annotation: Domain name=Ras; Domain location=314-478; Score= -99.7; E_value=0.085; Accession=PF00071.14; Description=Ras family
  Pfam annotation: Domain name=efhand; Domain location=206-234; Score =19.7; E_value=0.012; Accession=PF00036.24; Description=EF hand
  Pfam annotation: Domain name=efhand; Domain location=86-114; Score =12.5; E_value=0.93; Accession=PF00036.24; Description=EF hand
  Pfam module annotation: Pfam domain module=EF_assoc_1::EF_assoc _2::MMR_HSR1::Miro::Ras::efhand::efhand; Domain location=238-308::116- 204::313-432::314-432::314-478::206-234::86-114
RLQLKTPVIVVGCKLDLRDEQQVSLEQVMAPIMQSFREIETCIECSALRQIQVPEVFYYAQKAVLHPTAPLFDQEAQSLKPRCVRALKRIFILCDSDKDGALSDVELNEFQVRCFSAPLQPTEISGVKRVVQEKMPEGVNDNGLTLTGFLFLHALFIEKGRLETTWTVLRKFGYDNDIKLRDELIAMPIRRAPDQTLELTGEVVDFLRGIFNMFDIDNDGALLPTELEDLFSTAPENPWSSDPYKDCAEKNVLGGLSLEGFLSKWALMTLLDPTNSYANLVYVGYPGEFSSAFTVTRKRRVDRKKQQTQRNVFQCYVFGARGSGKTSLLQSFIGRQPSDALPSNTERFATNSVELPDGTRKTLILREIPEGDVRSLLSDKESLAPCDVAVFVYDSCDEYSWHRARDLLVQVATHGENTGYEVPCLIVASKDDLDQCPQALQESTRVSQDMGIETPIPISVRLRDLNNIFCRVVHAAQQPHLSIPETEAGKTRRQYRQLLNRSLMVVSVGAAVAVVGVAAYRVYAARKNSSS

SEQ ID NO: 69710 - protein, 264 aa, Setaria italica
  Transcript Sequence Number=SeqID_3736
  Gene Ontology: Mol. function=calcium ion binding; Cellular component =intracellular; Biological process=small GTPase mediated signal transduction
  Homolog annotation: Hit_ID=B9RF54; Match level="QueryCoverage=93%, HitCoverage=42%, E-value=1e-109, Identity=75%"; Hit description=Rac -GTP binding protein, putative
  Pfam annotation: Domain name=MMR_HSR1; Domain location=19-132; Score=- 13.1; E_value=0.016; Accession=PF01926.15; Description=GTPase of unknown function
  Pfam annotation: Domain name=Miro; Domain location=20-132; Score =152.8; E_value=1.1e-42; Accession=PF08477.5; Description=Miro-like protein
  Pfam annotation: Domain name=Ras; Domain location=20-182; Score=6.4; E_value=8.1e-10; Accession=PF00071.14; Description=Ras family
  Pfam module annotation: Pfam domain module=MMR_HSR1::Miro::Ras; Domain location=19-132::20-132::20-182
  Subcellular localization annotation: CTP_CleavageSite=20; ConfidenceScore=5.24e-01
MAGATSPAAAANLAGKSGVRVVVIGDPGTGKSSLIVALATEQFPENVPKVMPPTRLPADFFPDRVPITIIDTSSSPEQKPKLIAECQAADAVVLTYACDRPATLERLSSFWLPELRRLQLKTPVIVVGCKLDLRDEQQVSLEQVMAPIMQSFREIETCIECSALRQIQVPEVFYYAQKAVLHPTAPLFDQEAQSLKPRCVRALKRIFILCDSDKDGALSDVELNEFQVRCFSAPLQPTEISGVKRVVQEKMLEGVNEKCINPIP

SEQ ID NO: 69711 - protein, 250 aa, Setaria italica
  Transcript Sequence Number=SeqID_3737
  Gene Ontology: Mol. function=threonine-type endopeptidase activity; Cellular component=proteasome core complex; Biological process =ubiquitin-dependent protein catabolic process
  Homolog annotation: Hit_ID=P0C1G8; Match level="QueryCoverage=100%, HitCoverage=100%, E-value=1e-134, Identity=91%"; Hit description =Proteasome subunit alpha type-4-1
  Pfam annotation: Domain name=Proteasome; Domain location=28-215; Score=239.7; E_value=7.1e-69; Accession=PF00227.18; Description =Proteasome A-type and B-type
  Pfam annotation: Domain name=Proteasome_A_N; Domain location=5-27; Score=43.1; E_value=1.1e-09; Accession=PF10584.1; Description =Proteasome subunit A N-terminal signa
  Pfam module annotation: Pfam domain module=Proteasome::Proteasome_A _N; Domain location=28-215::5-27
MSRRYDSRTTIFSPEGRLYQVEYAMEAIGNAGSALGILAADGVVLVGEKKVTSKLLQTSRSAEKMYKIDSHLACAVAGIMSDANILINTARLHAQRYALSYQEPIPVEQLVQSLCDTKQGYTQFGGLRPFGVSFLFAGWDKHHGFQLYMSDPSGNYGGWKAAAVGANSQAAQSMLKQDYKDGLTREEAVALALKVLSKTMDSTSLTAEKLELAEVFLQPGTGEVQYQVCSPEALGKLLAKSGLTQPAPEA

SEQ ID NO: 69712 - protein, 160 aa, Setaria italica
  Transcript Sequence Number=SeqID_3738
  Gene Ontology: Mol. function=peptidyl-prolyl cis-trans isomerase activity; Cellular component=spliceosome; Biological process=protein folding
  Homolog annotation: Hit_ID=Q9SNN7; Match level="QueryCoverage=99%, HitCoverage=99%, E-value=6e-81, Identity=89%"; Hit description =Peptidyl-prolyl cis-trans isomerase
  Pfam annotation: Domain name=Pro_isomerase; Domain location=2-153; Score=208.2; E_value=2.1e-59; Accession=PF00160.13; Description =Cyclophilin type peptidyl-prolyl cis-tr
MSVTLHTNLGDIKCEVFCDQVPRTAENFLALCASGYYDGTVFHRNIKGFMIQGGDPTGTGKGGASIWGAKFADEFRESLKHNARGIMSMANSGPNTNGSQFFITYAKQPHLNGHYTIFAKVIHGFEVLDLMEKAQTGPGDRPLAEIRLNRVTIHANPLAG

SEQ ID NO: 69713 - protein, 147 aa, Setaria italica
  misc_feature (76)..(76): Xaa can be any naturally occurring amino acid
  Transcript Sequence Number=SeqID_3739
  Gene Ontology: Mol. function=transferase activity, transferring groups other than amino-acyl groups; Cellular component=cytoplasm
  Homolog annotation: Hit_ID=B6TU21; Match level="QueryCoverage=97%, HitCoverage=31%, E-value=9e-60, Identity=83%"; Hit description =Anthocyanin 5-aromatic acyltransferase
PPLPAEYFGNCLRPCFVEAATADLLSGDTADGVAAAASAIGSAIREMEQGVLEGAEGWLGRVLSVLPERPMSVGGXSPRHGVYETTDFGWGRPARVEMVSVEKTPGTVALADSPEGDGGIELGVVLPPDAMDAFASCFADALGGATI

SEQ ID NO: 69714 - protein, 247 aa, Setaria italica
  Transcript Sequence Number=SeqID_3740
  Gene Ontology: Mol. function=histone-lysine N-methyltransferase activity; Cellular component=nucleus; Biological process=chromatin modification
MEMGNRAGDGELERKQNGVAGSRMKRWLTSAVNSPPKKRVVADGRTVTTKEEGNGVLEISPVCTSPPGCGRNAVTTTDSRVLEVSPIRTFPPGSGKSALTTTGSGDEEGLPLEATPIINVDAAAAIPVSGGATSLTSALDVSNEKLEGKRMTNEGHSKAHIRVQVPDDFVGTEQDGNLQQNVDEKSTPRNSSDEKMKGKLSQSEGKQLARVVVGDKMKNKIEGSLHRSTHKTPLSDPIDAKTKGKEG

SEQ ID NO: 69715 - protein, 52 aa, Setaria italica
  Transcript Sequence Number=SeqID_3741
  Gene Ontology: Mol. function=binding; Cellular component =mitochondrial inner membrane; Biological process=transport
  Homolog annotation: Hit_ID=Q10R11; Match level="QueryCoverage=96%, HitCoverage=11%, E-value=2e-16, Identity=82%"; Hit description =Mitochondrial carrier, putative, expressed
  Pfam annotation: Domain name=Mito_carr; Domain location=1-50; Score= -13.2; E_value=0.055; Accession=PF00153.19; Description=Mitochondrial carrier protein
LAAAARDLVREGGWAACYRGLGPRWASMSLSAATMVTAYEFLKRLSAKEGSL

SEQ ID NO: 69716 - protein, 56 aa, Setaria italica
  Transcript Sequence Number=SeqID_3742
  Gene Ontology: Mol. function=DNA binding; Cellular component=nucleus; Biological process=regulation of transcription
  Homolog annotation: Hit_ID=B9I4W4; Match level="QueryCoverage=100%, HitCoverage=23%, E-value=1e-25, Identity=94%"; Hit description=MYB transcription factor
  Pfam annotation: Domain name=Myb_DNA-binding; Domain location=4-50; Score=54.9; E_value=3.1e-13; Accession=PF00249.23; Description=Myb -like DNA-binding domain
MCTRGHWRPSEDEKLKELVALYGPHNWNAIAEKLQGRSGKSCRLRWFNQLDPRINR

SEQ ID NO: 69717 - protein, 258 aa, Setaria italica
  Transcript Sequence Number=SeqID_3743
  Homolog annotation: Hit_ID=Q9LPK4; Match level="QueryCoverage=37%, HitCoverage=25%, E-value=4e-10, Identity=34%"; Hit description =F14J8.16 protein
HTRLVDGQLVLEIGGVVVNYDQPIAAGPQGEKDKQRGIETAVPSPGKGVGIGAGRDEDEVVSSAPATAVPEQYACDWRADPSPGREVKEKDAGDEGLLDAADAGTMKGVYWEASSSDGRRARRRTNSGEKVEQELGIIWPTHITRRPDSDFKRRLIEALTKPVARKEYYRLFDTVTIRTPLMKLRQIRNETKFYPTEAMGSSYLDHYPDLAEQIMNSGRCNGLALMRGFLFWLQNNAHDDQFKPWVDDSKAREVYFLV

SEQ ID NO: 69718 - protein, 30 aa, Setaria italica
  Transcript Sequence Number=SeqID_3744
MDPGKHNGMSLMDKRQLVYEVARWPQGAVE

SEQ ID NO: 69719 - protein, 65 aa, Setaria italica
  Transcript Sequence Number=SeqID_3745
  Subcellular localization annotation: CTP_CleavageSite=45; ConfidenceScore=5.71e-01
MQPPPQPQGAMATGAAILTVPCSACRRPKRSSQRRGSGSGSLSVRASSDANTVTLLDYGGGERAQ

SEQ ID NO: 69720 - protein, 96 aa, Setaria italica
  Transcript Sequence Number=SeqID_3746
FKSTLAFNASEFFYRCFLSFKCEVTASSPHACVKFGPITACVNACKHTRLAQIIFRMLVFSKVLYANYIRLAKHHSTGKRFALLLNYDKSIVSGKP

SEQ ID NO: 69721 - protein, 67 aa, Setaria italica
  Transcript Sequence Number=SeqID_3747
SNWIIRVHKDLRQNNPTNQHTHHATKKLRLKNEAIVSQRDTSTYNSSAWVTRSSQHNSARSGQKPPC

SEQ ID NO: 69722 - protein, 331 aa, Setaria italica
  Transcript Sequence Number=SeqID_3748
  Gene Ontology: Mol. function=aspartic-type endopeptidase activity; Biological process=proteolysis
  Homolog annotation: Hit_ID=B6TBA8; Match level="QueryCoverage=100%, HitCoverage=70%, E-value=1e-159, Identity=85%"; Hit description =Aspartic proteinase nepenthesin-2
  Pfam annotation: Domain name=Asp; Domain location=1-328; Score=-87.3; E_value=2.2e-08; Accession=PF00026.15; Description=Eukaryotic aspartyl protease
  Subcellular localization annotation: CTP_CleavageSite=50; ConfidenceScore=5.42e-01
LGTPATSYAMVVDTGSSLTWLQCSPCVVSCHRQAGPLFDPRSSSTYASVPCSASQCGELQAATLNPSACSVSGVCVYQASYGDSSFSVGYLSRDTVSFGSGSFPDFYYGCGQDNEGLFGRSAGLIGLARNKLSLLYQLAPSLGYSFSYCLPTSASTGYLTIGSYNPGQYTYTPMASSSLDGSLYFVTLSGMSVGGSPLAVSQSEYGSLPTIIDSGTVITRLPTGVYTALSKAVAAAMGGAPRAPAFSILDTCFEGQASQLRVPAVSMAFAGGASLKLATRNVLINVDDSTTCLAFAPTDSTAIIGNTQQQTFSVVYDVAQSRIGFAAGGCS

SEQ ID NO: 69723 - protein, 91 aa, Setaria italica
  Transcript Sequence Number=SeqID_3749
AEPICTCYKQHHFLDMLTSRAWSFFNSSKRIQFSLPSRCPEDLSIQGTPFCKPLPSITELPLDAKGKAVCMTSRLQALQPLYPQHQLPPRR

SEQ ID NO: 69724 - protein, 74 aa, Setaria italica
  Transcript Sequence Number=SeqID_3750
  Gene Ontology: Mol. function=methyltransferase activity; Cellular component=cytoplasm; Biological process=protein amino acid methylation
  Homolog annotation: Hit_ID=UPI000034F49D; Match level="QueryCoverage =85%, HitCoverage=13%, E-value=4e-23, Identity=77%"; Hit description =RNA binding
ASSCSTVKVMENGIVYLVSLEGQKTGFYADQRENRHFISLLSKDQRVLDICCYSGGFALNAAKGGADNVIGKIL

SEQ ID NO: 69725 - protein, 343 aa, Setaria italica
  Transcript Sequence Number=SeqID_3751
  Gene Ontology: Cellular component=membrane
  Homolog annotation: Hit_ID=B6TU52; Match level="QueryCoverage=94%, HitCoverage=93%, E-value=1e-160, Identity=84%"; Hit description=Cell division control protein 50
  Pfam annotation: Domain name=CDC50; Domain location=67-337; Score =496.8; E_value=2.9e-146; Accession=PF03381.7; Description=LEM3 (ligand-effect modulator 3) family  CDC50 family
  Subcellular localization annotation: CTP_CleavageSite=21; ConfidenceScore=5.31e-01
MDSHAAGSSSGGSGDGGAAPRRNTRKPKYSKFTQQELPACKPILTPKWVISVFVLVGVIFVPIGVASLRASQQVVEIVDRYDDACVPANVTDKLAYIRNKAIPKTCTRNLTITKDMKQPIFVYYQLDNFYQNHRRYVKSRNDAQLRDRSKASDTSNCDPEATVDGKPIVPCGLIAWSLFNDTYNLIRNNENLTVDKKDISWKSDREHKFGSDVFPSNFQKGPLQGGKILNPNLSLSKQEDLIVWMRTAALPTFRKLYGRIYVDLKVNDTITVHLENNYNTYSFGGKKKLVLSTTTWLGGKNDFLGLAYLTVGGLCFFLAFAFTLLYLIKPRKLGDNNYLSWNR

SEQ ID NO: 69726 - protein, 457 aa, Setaria italica
  Transcript Sequence Number=SeqID_3752
  Gene Ontology: Mol. function=methyltransferase activity
  Homolog annotation: Hit_ID=UPI000034F49D; Match level="QueryCoverage =88%, HitCoverage=89%, E-value=1e-170, Identity=68%"; Hit description= RNA binding
  Pfam annotation: Domain name=Met_10; Domain location=181-378; Score= -123.6; E_value=0.098; Accession=PF02475.8; Description=Met-10+ like -protein
  Pfam annotation: Domain name=Methyltrans_SAM; Domain location=166 -429; Score=-72.8; E_value=6.9e-07; Accession=PF10672.1; Description =S-adenosylmethionine-dependent methyl
  Pfam annotation: Domain name=UPF0020; Domain location=269-430; Score=- 62.0; E_value=0.067; Accession=PF01170.10; Description=Putative RNA methylase family UPF0020
  Pfam module annotation: Pfam domain module=Met_10::Methyltrans _SAM::UPF0020; Domain location=181-378::166-429::269-430
  Subcellular localization annotation: CTP_CleavageSite=35; ConfidenceScore=5.07e-01
MLRACGGTAPAAVPALVRARLARRASSAAYAAATVADASSASSALEELAAERKGFAKVVLKKGKTQIFRDGSPMVYSGAVDRIIGRPPPKSGDVVLVADGTEKPIGWGLYNSVSMFCVRLMQLEEEARRDPTCALNMETLLEARISSAVNLRKSLGLPSANTNAYRLINSEGDRLSGLIVDIFADVAVIASSAAWVEKYREEIQFLVSKVNGISHIKWRPSADILKEEGLDILEKEPASSCSTVKVMENGIVYLVSLEGQKTGFYADQRENRHFISLLSKDQRVLDICCYSGGFALNAAKGGADNVIGIDSSGSALDLANENIILNELNPGRISFVKGDATAFMKGAISKNELWDLVILDPPKLAPRKKVLQSASGMYRNLNALAMQVVKPGGLLMTCSCSGAMTQSGMFLKTIQGAASMAGRKVTVLRQAGAACDHPIDPGYPEGQYLSNYLLRVA

SEQ ID NO: 69727 - protein, 65 aa, Setaria italica
  misc_feature (18)..(18): Xaa can be any naturally occurring amino acid
  Transcript Sequence Number=SeqID_3753
  Gene Ontology: Mol. function=protein serine/threonine phosphatase activity; Cellular component=protein serine/threonine phosphatase complex; Biological process=protein amino acid dephosphorylation
  Homolog annotation: Hit_ID=Q6ETK3; Match level="QueryCoverage=69%, HitCoverage=12%, E-value=2e-17, Identity=88%"; Hit description =Probable protein phosphatase 2C 11
LTELFFYQGPHSDFAGPXCGSTACVALIRNNQLVVANAGDSRCVISRAGKVCYSCSFISWQNGYP

SEQ ID NO: 69728 - protein, 107 aa, Setaria italica
  Transcript Sequence Number=SeqID_3754
LIGFWSTEVNSHTYKQELIRQRQELDKLDQCTHEVLRRPSAAAAGGKIPPPLDPSTRHSKRRPPHRAGVAQRPLTGRTAAIGTNRGGCGRRRGGEEEKGKRENAACL

SEQ ID NO: 69729 - protein, 150 aa, Setaria italica
  Transcript Sequence Number=SeqID_3755
  Gene Ontology: Mol. function=protein serine/threonine phosphatase activity; Cellular component=protein serine/threonine phosphatase complex; Biological process=protein amino acid dephosphorylation
  Homolog annotation: Hit_ID=B6TDZ9; Match level="QueryCoverage=84%, HitCoverage=35%, E-value=2e-61, Identity=88%"; Hit description =Protein phosphatase 2C isoform gamma
  Pfam annotation: Domain name=PP2C; Domain location=1-150; Score=10.1; E_value=1.8e-06; Accession=PF00481.13; Description=Protein phosphatase 2C
MLERETYAKIPNTKDSVVNNYGPHSDFAGPTCGSTACVALIRNNQLVVANAGDSRCVISRAGKAYNLSRDHKPELAVERERIMKAAGFIHMGRVNGSLNLSRAIGDVEFKQNKFLPPEKQIVTANPDINVVELCDDDAETRNRGYKAHRG

SEQ ID NO: 69730 - protein, 359 aa, Setaria italica
  Transcript Sequence Number=SeqID_3756
  Gene Ontology: Mol. function=protein serine/threonine phosphatase activity; Cellular component=protein serine/threonine phosphatase complex; Biological process=protein amino acid dephosphorylation
  Homolog annotation: Hit_ID=B6TDZ9; Match level="QueryCoverage=100%, HitCoverage=100%, E-value=0.0, Identity=89%"; Hit description =Protein phosphatase 2C isoform gamma
  Pfam annotation: Domain name=PP2C; Domain location=22-322; Score =265.7; E_value=1.1e-76; Accession=PF00481.13; Description=Protein phosphatase 2C
MGIYLSTPKTDKLSENGENDRLKFGLSSMQGWRASMEDAHSALLDLDSETAFFGVFDGHGGRVVAKFCAKYLHSQVLKTEAYSAGDLGSAVHRAFFRMDEMMRGQRGWRELSALGDKINKFSGMIEGLIWSPRGSDSNNQQDDWASEEGPHSDFAGPTCGSTACVALIRNNQLVVANAGDSRCVISRAGKAYNLSRDHKPELAVERERIMKAAGFIHMGRVNGSLNLSRAIGDVEFKQNKFLPPEKQIVTANPDINVVELCDDDDFVVVACDGIWDCMSSQQLVNFIHEHINKESSLSAVCERVLDRCLAPSTITGEGCDNMTMILVQFKKPVDRRKKSEVAEQSSSSADGTEIHVAEE

SEQ ID NO: 69731 - protein, 77 aa, Setaria italica
  Transcript Sequence Number=SeqID_3757
  Subcellular localization annotation: CTP_CleavageSite=50; ConfidenceScore=5.22e-01
ARDRATTLRNGGGPRPQRLGVVAWSGLPCTKRPPCPVPLAGRGFRTPCTVASAPRGVLTHGPTYSVACSCPIRQLRG

SEQ ID NO: 69732 - protein, 371 aa, Setaria italica
  Transcript Sequence Number=SeqID_3758
  Gene Ontology: Mol. function=cysteine-type endopeptidase activity; Cellular component=plasma membrane; Biological process=proteolysis
  Homolog annotation: Hit_ID=B6SZV3; Match level="QueryCoverage=98%, HitCoverage=99%, E-value=1e-137, Identity=68%"; Hit description =Thiol protease SEN102
  Pfam annotation: Domain name=Inhibitor_I29; Domain location=47-107; Score=101.2; E_value=3.6e-27; Accession=PF08246.4; Description =Cathepsin propeptide inhibitor domain (
  Pfam annotation: Domain name=Peptidase_C1; Domain location=153-368; Score=407.3; E_value=2.6e-119; Accession=PF00112.15; Description =Papain family cysteine protease
  Pfam module annotation: Pfam domain module=Inhibitor_I29::Peptidase _C1; Domain location=47-107::153-368
MAASSTKRFLPCVLLLVAVSLNGCLSAHSLADDGVADNNDDLMLARFQQWKAEYDKSYATAEEELHRFQVYASNVRYIESTNADAEAAGLTYELGETEYTDLTNEEFMALYTVPPQTQLAEEDDDEGMAVITTRAGSVDATGHAAAYTNLSAAPASVDWRTKGAVTPAKNQGACGSCWAFAAVAAVEGINKIRTGKLLSLSEQELVDCDTLDKGCKGGMHYRALQWITKNGGITTEKDYPYKARQGKCDRSKLKHRAATISGFRRVATRSEASLQNAVAMQPVCVSIEAGGSNFQHYKKGIYNGPCGTKLNHAVTVVGYGQQGRDKYWIVKNSWGGKWGDKGFIKMKKNIARKPEGLCGIAIRPSFPLKKK

SEQ ID NO: 69733 - protein, 92 aa, Setaria italica
  Transcript Sequence Number=SeqID_3759
RNEFPYIVVLYVSFETYLVLRFQLSAQILINKGATVTWAVRIEKLSDLMVHLEITPFQGMRNAVDLCIDSLKIFSYPPQSYILKKIEFLYGR

SEQ ID NO: 69734 - protein, 70 aa, Setaria italica
  Transcript Sequence Number=SeqID_3760
  Gene Ontology: Mol. function=hydrogen ion transporting ATP synthase activity, rotational mechanism; Cellular component=proton -transporting ATP synthase complex, catalytic core F(1); Biological process=ATP synthesis coupled proton transport
  Homolog annotation: Hit_ID=Q41898; Match level="QueryCoverage=98%, HitCoverage=98%, E-value=2e-32, Identity=94%"; Hit description=ATP synthase subunit epsilon, mitochondrial
  Pfam annotation: Domain name=ATP-synt_Eps; Domain location=9-57; Score=97.2; E_value=5.8e-26; Accession=PF04627.5; Description =Mitochondrial ATP synthase epsilon chain
MSATTAAVPFWRAAGMTYIGYSNICAALVRNCLKEPFKSEAASREKVHFSVAKWADGKQEKPTVRTDSDQ

SEQ ID NO: 69735 - protein, 70 aa, Setaria italica
  Transcript Sequence Number=SeqID_3761
  Gene Ontology: Mol. function=hydrogen ion transporting ATP synthase activity, rotational mechanism; Cellular component=proton -transporting ATP synthase complex, catalytic core F(1); Biological process=ATP synthesis coupled proton transport
  Homolog annotation: Hit_ID=Q41898; Match level="QueryCoverage=100%, HitCoverage=100%, E-value=5e-32, Identity=91%"; Hit description=ATP synthase subunit epsilon, mitochondrial
  Pfam annotation: Domain name=ATP-synt_Eps; Domain location=9-57; Score=96.2; E_value=1.1e-25; Accession=PF04627.5; Description =Mitochondrial ATP synthase epsilon chain
MSATTAAVPFWRAAGMTYIGYSNICAALVRSCLKEPFKSEAASREKVHFSVAKWADGKQEKPTVRTDSDE

SEQ ID NO: 69736 - protein, 277 aa, Setaria italica
  misc_feature (267)..(267): Xaa can be any naturally occurring amino acid
  Transcript Sequence Number=SeqID_3762
LMLMEQGEDEDGAAAKSSSAPQVSSLKSGKKPASGADATCHVSDLGKGLGPIVQTRDGGYLAAMNPFDIPVERKELPKLAMQLSKPFILRGQKLPGGGAEVFQRLCAGGGSEALCAKLGALIAMDDVVGKTAEQIAFEGMASAIISARSKELVAITSAAHSVSLLRTMSVAMSHGRQDRIATGIWNAQEAPVAVDEILAFALQKIETMAIEALKVQAGMVEEQAPFEVSPEKTQAKHLLDTAVPPEEWVSACDGADAVSLLVVVQLXDPMRRYEAVG

SEQ ID NO: 69737 - protein, 130 aa, Setaria italica
  Transcript Sequence Number=SeqID_3763
  Gene Ontology: Mol. function=hydrolase activity; Biological process =metabolic process
MSPPPSSEPHVVEDIRGLVQLMSDGTVRRSADPASYPVVDADPDGGGGSGSDGDDDSGVEWKDVTWQREHDLNARLYRPRHLGAANDAQIPIVAYFHGGGAGGGFFCLGSGRWPGPHAWCLRLAAEPPPT

SEQ ID NO: 69738 - protein, 84 aa, Setaria italica
  Transcript Sequence Number=SeqID_3764
  Gene Ontology: Mol. function=DNA binding
  Homolog annotation: Hit_ID=B4Y5K2; Match level="QueryCoverage=100%, HitCoverage=22%, E-value=3e-38, Identity=89%"; Hit description=GT -like protein
TLDRDMPIRTYTLHLDDGVTIKLCDASRMQTPEDKTFYTEDDLRDFLARRGWTLLREYGGYRNVDSLDDLRPGVIYQGLRSLGD

SEQ ID NO: 69739 - protein, 343 aa, Setaria italica
  misc_feature (11)..(11): Xaa can be any naturally occurring amino acid
  Transcript Sequence Number=SeqID_3765
  Gene Ontology: Mol. function=DNA binding
  Homolog annotation: Hit_ID=B4Y5K2; Match level="QueryCoverage=96%, HitCoverage=86%, E-value=1e-141, Identity=77%"; Hit description=GT -like protein
TRRVETWVREXRILCLIALRRECLRLSDVCKSNKHLWEAISARMRDQGFDRSPTMCTDKWRNLLKEFKKARSHARSSGGGGSGAGGNGNAKMAYYKEIDDLLKRRGKASGSGGGVGSGSGSGAGKSPTSNSKIESYLQFATDNGFEDASIPFGPVEANGRSLLSIDDRLEDDRHPLPLTAADAVATNGVNQWNWRDTSTNGGDNQGTFGGRVILVKWGDYTKRIGIDGTAEAIKEAIKSAFGLRTRRAFWLEDEDEVVRTLDRDMPIRTYTLHLDDGVTIKLCDASRMQTPEDKTFYTEDDLRDFLARRGWTLLREYGGYRNVESLDDLRSGVIYQGLRSLGD

SEQ ID NO: 69740 - protein, 122 aa, Setaria italica
  Transcript Sequence Number=SeqID_3766
AGSASPSTLGAGEHLRPGSEVGVRTRTTTLKTGEVLVFWFRATIVSPTHGGYEVVYDGNWPPGDPYGTVHVPRRHVRTIKPSPSPTKIPPPSLPPSSRPQLVRLRHHRHRGRRAEGDVASAE

SEQ ID NO: 69741 - protein, 245 aa, Setaria italica
  Transcript Sequence Number=SeqID_3767
  Gene Ontology: Mol. function=transferase activity, transferring glycosyl groups; Biological process=metabolic process
  Homolog annotation: Hit_ID=B6T8U9; Match level="QueryCoverage=99%, HitCoverage=50%, E-value=2e-84, Identity=69%"; Hit description =Anthocyanidin 3-O-glucosyltransferase
LGSGARPHVMFIPSAGMGHLLPFLRVIAALARHDDVDVSVVTVLPTVSAAEADHLAGLFAAFPRVRRADLHLLPFDASEFPGHDPFLLRWEALRRSAHLLRPLIACGAAPRVSAIVTDVTLASHVIPISKELNVQCHVHFISCATMLSLLAYIPVHLDSKAELGPGVGDVDIPGVRRIPESYLPQPLRDLNNVFTKQFIDNGREIINADGILVNTFDALEPAALAALRDGKVVPGFPPVNAIGPL

SEQ ID NO: 69742 - protein, 399 aa, Setaria italica
  Transcript Sequence Number=SeqID_3768
  Gene Ontology: Mol. function=transferase activity, transferring glycosyl groups; Biological process=metabolic process
  Homolog annotation: Hit_ID=B6T8U9; Match level="QueryCoverage=93%, HitCoverage=77%, E-value=1e-147, Identity=71%"; Hit description =Anthocyanidin 3-O-glucosyltransferase
  Pfam annotation: Domain name=Glyco_tran_28_C; Domain location=206 -382; Score=-31.8; E_value=0.02; Accession=PF04101.8; Description =Glycosyltransferase family 28 C-terminal domain
  Pfam annotation: Domain name=UDPGT; Domain location=1-397; Score= -132.8; E_value=0.00028; Accession=PF00201.10; Description=UDP -glucoronosyl and UDP-glucosyl transferase
  Pfam module annotation: Pfam domain module=Glyco_tran_28_C::UDPGT; Domain location=206-382::1-397
YASEFPGTTNPLPRLPVGKDPRRPSSAHLLRPLIACGAAPRVSAIVTDVTLASHVIPISKELNVQCHVHFISCATMLSLLAYIPVHLDSKAELGPGVGDVDIPGVRRIPESYLPQPLRDLNNVFTKQFIDNGREIINADGILVNTFDALEPAALAALRDGKVVPGFPPVNAIGPLDSHTASTANAKQSEPAGSPVAWLGEQPARSVVYVAFGNRSAVSRDQLRQIAAGLEASGCRFLWVLKTTTVDKDDNTEVEDVLGCGFLERVRGRGLVTKAWVDQEALLKHPAVGLFLSHSGWNSVVEAAAAGMPLLAWPRGGDQRVNAMVVASGGFGVWMEHWSWDGEDRLVTGEEIREKVKEVMSDAAVRVRAMKTGEEAAKAVAEGGTSYRSMQEFIGKLRAT

SEQ ID NO: 69743 - protein, 61 aa, Setaria italica
  Transcript Sequence Number=SeqID_3769
  Subcellular localization annotation: CTP_CleavageSite=37; ConfidenceScore=5.11e-01
APTGAYQFKFSLFLLFLVFLHSFFFFSFLPLELYLVRAEDFSRSLAFWRQCFFCLFWNILL

SEQ ID NO: 69744 - protein, 259 aa, Setaria italica
  Transcript Sequence Number=SeqID_3770
  Gene Ontology: Cellular component=intracellular; Biological process =ribosome biogenesis
  Homolog annotation: Hit_ID=A8IK52; Match level="QueryCoverage=100%, HitCoverage=100%, E-value=1e-109, Identity=73%"; Hit description=Low- CO2-inducible protein
  Pfam annotation: Domain name=Ribosomal_S8e; Domain location=1-236; Score=456.4; E_value=4.1e-134; Accession=PF01201.14; Description =Ribosomal protein S8e
MPQGDHIELHQKRHGRRLDYEERKRKREARKVHRLSKDAQKLLGAKGKRFAKKRYAEKAQMKKTLKMHDESTSRQKADDVQEGALPPYLLDRDQTQRAKVLSNTIKQKRKEKAGKWDVPLPKVRPVAEEEMFKVLRTGKRKTKQWKRMVTKATFVGAGFTRKPPKYERFIRPTGLRFTKAHVTHPELKCTFNLDIISVKKNPNGPMYTSLGVMTRGTIIEVNVSELGLVTPAGKVVWGKYAQVTNNPENDGCINAVLLV

SEQ ID NO: 69745 - protein, 87 aa, Setaria italica
  Transcript Sequence Number=SeqID_3771
  Homolog annotation: Hit_ID=B6TMC3; Match level="QueryCoverage=65%, HitCoverage=29%, E-value=6e-10, Identity=57%"; Hit description =Prenylated rab acceptor family protein
  Pfam annotation: Domain name=PRA1; Domain location=1-87; Score=-25.0; E_value=0.0034; Accession=PF03208.11; Description=PRA1 family protein
VANLAHFAANYALVVLAVVFASLLWYPVSLLVFLACFAGWLFLYFLRDRDVDQALLICGRPVGDGVVIAFLSAVTLVLLLLTGATSN

SEQ ID NO: 69746 - protein, 55 aa, Setaria italica
  Transcript Sequence Number=SeqID_3772
TAIGVDSPVEWDVSIGILQGHQQEPSIASCIPRMITTTMNKLTKCSCIRPFGVGC

SEQ ID NO: 69747 - protein, 153 aa, Setaria italica
  misc_feature (41)..(41): Xaa can be any naturally occurring amino acid
  Transcript Sequence Number=SeqID_3773
  Gene Ontology: Cellular component=plasma membrane
  Homolog annotation: Hit_ID=B3TM05; Match level="QueryCoverage=100%, HitCoverage=60%, E-value=1e-61, Identity=71%"; Hit description =Aluminum-induced protein
ANEVNIVIEAYRTLRDRGPYPADQVVRDISGKFAFVLYDCXCKVRSLQLAADADGNVPFYWGVDSDGRLVVSDDDEMVKKACGKSSAPFPKGFFFTTSGGLQSYEHPMNEVKPVPRVDSKGEVCGTTYTVDAKAKKDTSIPRVGSAADWSAQY

SEQ ID NO: 69748 - protein, 161 aa, Setaria italica
  misc_feature (83)..(83): Xaa can be any naturally occurring amino acid
  misc_feature (108)..(108): Xaa can be any naturally occurring amino acid
  misc_feature (150)..(150): Xaa can be any naturally occurring amino acid
  Transcript Sequence Number=SeqID_3774
  Gene Ontology: Mol. function=protein binding; Cellular component =nucleus
  Homolog annotation: Hit_ID=B6TC32; Match level="QueryCoverage=100%, HitCoverage=51%, E-value=2e-71, Identity=85%"; Hit description=Brix domain-containing protein 1
  Pfam annotation: Domain name=Brix; Domain location=33-161; Score =15.8; E_value=4.5e-06; Accession=PF04427.10; Description=Brix domain
MVAAIRVPKTQRARRELLKHAPKLVETGKKTLILHGTKTSAVLNSVLSDIYHLKRDNAVKYTKKNDNIRPFESGGESSLEFFXSLKTDCSLIVYGSHSKKRPNNLIFXRTYDHHIYDLVEVGVENYKSMESYVYDKKLAPKLGSKPFFAXFIGEHFESAKE

SEQ ID NO: 69749 - protein, 83 aa, Setaria italica
  Transcript Sequence Number=SeqID_3775
  Gene Ontology: Cellular component=nucleus
  Homolog annotation: Hit_ID=B6TC32; Match level="QueryCoverage=77%, HitCoverage=20%, E-value=7e-18, Identity=75%"; Hit description=Brix domain-containing protein 1
LKRKKENLKKKKKKRLIERTAEHAKKVKNVTKDPVQGRLGKVYMPDQQVGKLTLSNDIKGLKRERREAKKNKEHSKKQKVNPE

SEQ ID NO: 69750 - protein, 310 aa, Setaria italica
  Transcript Sequence Number=SeqID_3776
  Gene Ontology: Mol. function=protein binding; Cellular component =nucleus
  Homolog annotation: Hit_ID=B6TC32; Match level="QueryCoverage=100%, HitCoverage=100%, E-value=1e-151, Identity=86%"; Hit description =Brix domain-containing protein 1
  Pfam annotation: Domain name=Brix; Domain location=33-233; Score =177.1; E_value=5.2e-50; Accession=PF04427.10; Description=Brix domain
MVAAIRVPKTKRARRELLKHAPKLVETGKKTLILHGTKTSAVLNSVLSDIYHLKRDNAVKYTKKNDNIRPFESGGESSLEFFSLKTDCSLIVYGSHSKKRPNNLILGRTYDHHIYDLVEVGVENYKSMESYVYDKKLAPKLGSKPFFAFIGEHFESAEELKHLKEVLLDLFRGEVVENLNLAGVDRIYVCTATSPTTVYMMHCALCLKRSGTSIPRMELVEVGPSMDLVVRRHRLPVESLKKEAMKTADHAKKVKNVTKDPVQGRLGKVYMPDQQVGKLALSNDIKGLKRERREAKKNKEHSKKQKVNPE

SEQ ID NO: 69751 - protein, 60 aa, Setaria italica
  Transcript Sequence Number=SeqID_3777
WQHSKRTGCWHNCTSVSVVACRPWLLLYSCDIGQRDGMRVVNDKSWRHLGNYVGVGRWAT

SEQ ID NO: 69752 - protein, 294 aa, Setaria italica
  Transcript Sequence Number=SeqID_3778
  Gene Ontology: Cellular component=plasma membrane
  Subcellular localization annotation: CTP_CleavageSite=33; ConfidenceScore=5.60e-01
KERNQIQPRTNNISWFSTKKSSTSSRGRHRNFSSSTCKDFLRKFVDNELLTSSLEDWFSGHSEDYGFRKPAFDVPFDLTELQNFDYALEGVTFQQLVRMPNALYASTSDVFEATAYLALEDFLHAGIKGLWETFWGPDEAMPFSVACIHSTSSKFYPAEKAISSGKLDGVCATAVLLKNLKHSQGRWDHIVVLALLRPDIGMVSAQGDQEPSPAVLGEALFFALRVLLSRSLSRSSTVLRNSDCVYLLLVDSQFGGVVKVEGDLNKLDFDLNNVYDCAAEWIKKHARVSVSSID

SEQ ID NO: 69753 - protein, 507 aa, Setaria italica
  Transcript Sequence Number=SeqID_3779
  Gene Ontology: Cellular component=plasma membrane
  Subcellular localization annotation: CTP_CleavageSite=49; ConfidenceScore=5.07e-01
MVSAQGDQEPSPAVLGEALFFALRVLLSRSLSRSSTVLRNSDCVYLLLVDSQFGGVVKVEGDLNKLDFDLNNVYDCAAEWIKKHARVSVSSIDRVWNKLGNANWGDIGTLQVLIAIFHSMIQFYGDPKYSLNELATEHSSRLQSRRSERHLVDRQANGNGLSRYQQRSHSPEIVEVQEETAVDVKPQEILKLEIGSVVLMDDAYSQKGFQINDILTDSDPPIYSSTPVEEPTKTYLLYVGSSPSHLEPAWEDMNSWYQVQRQTKVLTLMKQRGISSRYIPQMVSSGRAIHPGPCNKPNSSGSCGHPWCSTPILVTSPVGETISNLIRNGLFGVEEALRCCHDCLSALAASASAGIRHGDIRPENVIRVSNGSRHPYFVLIGWGHAILEDRDRPVMNLFFSSTFALQEGKLCAASDAESLIYLLYFSCGGVCPELDSVESALQWRETSWSRRVIQQKLGDVSALLKAFADYVDSLCGTPYPMDYEIWLKRLRRTINEDHGKEVDTSSS

SEQ ID NO: 69754 - protein, 76 aa, Setaria italica
  Transcript Sequence Number=SeqID_3780
KSRVFLGSVFNIMLSHLIIHLEERKSFSLLSQAFLYNVPTPCCMYLTNAHTCIYCNPTCIGMSWQMSLVSRLGGKW

SEQ ID NO: 69755 - protein, 237 aa, Setaria italica
  Transcript Sequence Number=SeqID_3781
  Gene Ontology: Mol. function=protein binding; Biological process=cell division
  Homolog annotation: Hit_ID=B6TIP3; Match level="QueryCoverage=99%, HitCoverage=100%, E-value=1e-116, Identity=87%"; Hit description =PREG-like protein
  Pfam annotation: Domain name=Cyclin; Domain location=35-170; Score =137.9; E_value=3.2e-38; Accession=PF08613.3; Description=Cyclin
  Pfam annotation: Domain name=Cyclin_N; Domain location=54-171; Score =11.1; E_value=0.00036; Accession=PF00134.15; Description=Cyclin, N -terminal domain
  Pfam module annotation: Pfam domain module=Cyclin::Cyclin_N; Domain location=35-170::54-171
MAMAPPTTDAGDELESYSSLGLTVPHSQKGNAEFPKVLLLLSTYLDKTVQQNEELLDSSKVKESTTIFHGQRVPELSIKLYAERIFKYAQCSPSCFVLALIYMERYLQQPNIYMTSFSVHRLLITSVVVAAKFIDDSFFNNAYYGRVGGISTREMNRLELDLLFSLDFRLKVNLETFRSYCLQLEKEALALVLERPIKVHATNGTKPLICNGSVDETCKHELVRERYSSQALQGCSW

SEQ ID NO: 69756 - protein, 395 aa, Setaria italica
  Transcript Sequence Number=SeqID_3782
  Gene Ontology: Mol. function=GTP binding; Cellular component =intracellular
  Homolog annotation: Hit_ID=B6SV42; Match level="QueryCoverage=98%, HitCoverage=58%, E-value=0.0, Identity=91%"; Hit description=IMP dehydrogenase/GMP reductase
  Pfam annotation: Domain name=MMR_HSR1; Domain location=176-267; Score= 24.3; E_value=5.7e-06; Accession=PF01926.15; Description=GTPase of unknown function
CPTYVKGKGRRDGGEAKRAEAEENLAVVCARCHSLRNYGLVKNDKAENLIPDFDFDRFISSRLMKRSTSAPVIVMVVDCADFDGSFPKRAAKSLFKALEGRRNSKVSETPRLVLVGTKVDLLPWQQMGVRFDRWVRGRAKAFGAPKLDAVFLISVHRDLAVRNLISYIKESAGPRSNVWVIGAQNAGKSTLINAIAKKQGVKITRLTEAAVPGTTLGILRVTGVLPAKAKMYDTPGLLHPYIMAMRLNNEERKMIEIRKELRPRSFRVKVGQSVHIGGLTRLDVLKSSAQTIYITVWASSNVPLHLGKTDNADELRDRHFGIRLQPPIGPERVNELGHWTERQIEVSGASWDVNSMDIAVSGLGWYSLGLKGTATVSLWTFEGIGVTERDAMILH

SEQ ID NO: 69757 - protein, 62 aa, Setaria italica
  Transcript Sequence Number=SeqID_3783
  Subcellular localization annotation: CTP_CleavageSite=56; ConfidenceScore=5.17e-01
QDQRASLTCTTNLKMLLFISFHTAFCFCGGKKSKREKRREIVRWVVRVVPFQFRPVAALFKM

SEQ ID NO: 69758 - protein, 50 aa, Setaria italica
  Transcript Sequence Number=SeqID_3784
KKLPFDLIPSIGLLKLISHLHKSTKDVWLTTLVHASPGHPRYYGSSLRVP

SEQ ID NO: 69759 - protein, 302 aa, Setaria italica
  Transcript Sequence Number=SeqID_3785
  Gene Ontology: Mol. function=DNA binding; Cellular component=nucleus; Biological process=regulation of transcription, DNA-dependent
  Homolog annotation: Hit_ID=Q5JMM1; Match level="QueryCoverage=95%, HitCoverage=37%, E-value=7e-83, Identity=58%"; Hit description=Auxin response factor 3
QGNLDVPTMWNGCTDSVETGKLPRVLQGQELMGFRTHRVTCAPQTAEVAKFQSSDASRFLTNARSCMLSGPTSRLAVQNTSFTYQSVGFNESIGFSEVLQGQEISQAVPMFQGMMSEACSVKGGYGLRGYMRTPTTVDGLSATAQECSLTLSTPPAAQVHSPHPNHMFNQTVASQLGLASKTAGEVGNSSQPRPFEMLWEAQTRSQHGRPGQISLDQFETRRASAPGDAAKTGSGGREVRKTSCRLFGFSLTEKILPADDDSVKEVSYEAECQNPRMLDLFGYNRSTPNAALPALCAAPFGM

SEQ ID NO: 69760 - protein, 642 aa, Setaria italica
  Transcript Sequence Number=SeqID_3786
  Gene Ontology: Mol. function=histone-lysine N-methyltransferase activity; Cellular component=nucleus; Biological process=chromatin modification
  Homolog annotation: Hit_ID=Q8L820; Match level="QueryCoverage=97%, HitCoverage=71%, E-value=1e-177, Identity=50%"; Hit description=SET domain-containing protein SET104
  Pfam annotation: Domain name=Pre-SET; Domain location=366-463; Score =116.4; E_value=9.5e-32; Accession=PF05033.8; Description=Pre-SET motif
  Pfam annotation: Domain name=SET; Domain location=465-619; Score =171.8; E_value=2e-48; Accession=PF00856.20; Description=SET domain
  Pfam annotation: Domain name=YDG_SRA; Domain location=193-343; Score =93.4; E_value=7.8e-25; Accession=PF02182.9; Description=YDGSRA domain
  Pfam module annotation: Pfam domain module=Pre-SET::SET::YDG_SRA; Domain location=366-463::465-619::193-343
MAEPHGANPGDLPGLKCNGTAEQRDSVGEDCSLQFLMNGDGTIPGLRKGRKAVAQWRFQTGYKPKWARDLLSGNRSGEIEGPVSMVGDGSSKSAPVMAYNRSHIKGSATGGHHSKVQKGTGSAPKKRKVHEDDHRTSLVRENMLTKLREFRIIYKKLLEEEEVKWSGRGHGVRPDIAAFNIFREKFGADHDDMRYDGSIPGVRIGDVFNSIMELSIVGIHRAQSLSVDHIKKKDGTCLAVSVVSYAQPSASDSLDFLLHVGSVAATYDQKLGGTDVALMESMETDTPVRVIHAFVTELGNDCGPKQLTTYVYGGLYLVEKFHREKTTGDQYVNTFHLRRMAEQQQIDIQVLKTKKPESFDGTFTVDISGGLEKVPISAINSISNEHLMTFRYISQIQYPLNFRPDPPSGCDCVGGCSVSQKCACTVKNGGEFPYDDNGENIEEKPLIYECGPSCKCPPTCRNRVSQRGIKFRLQVFKTNSMGWGVRTLDFIPNGSFVCEYIGELLEEEEAQKRKSDEYLFAIGNKYHDVPRWKAQIKTIPSLQNVPSEDDEIGFAIDALNQGNFARFINHSCTPNLYTQNVLHDHDNISMPHVMLFASEDIPPLKELSYDYNYEIDKVYDSDGNIKMKPCFCGSVECTGRLY

SEQ ID NO: 69761 - protein, 62 aa, Setaria italica
  Transcript Sequence Number=SeqID_3787
  Subcellular localization annotation: CTP_CleavageSite=44; ConfidenceScore=5.47e-01
GNPALPPGAGHHMGSPSSSLSGSPYHMSGLSHGLPYGRSTSYTAADPSTNSLMQNEWPNQAR

SEQ ID NO: 69762 - protein, 142 aa, Setaria italica
  Transcript Sequence Number=SeqID_3788
FFGKAPMEGPELGGFLEDGGVDGDGSGFGGHDDGGYQFSSMGEEIDCMSNLSEIDDLASTFAKLNRSISGTRNPGVIGDRRSISRESSLTTDWVQDADFHSWVDQGMLDGDEFLDSKQWCSQLQSSPHFGESKPLSRTSSYP

SEQ ID NO: 69763 - protein, 101 aa, Setaria italica
  Transcript Sequence Number=SeqID_3789
MRGVRADGGGGGGGGAAASSSSTAENSRFDAAQYSFFGKAPMEGPELGGFLEDGGVDGDGSGFGGHDDGGYQFSSMGEEVLLSAPSDQIVRLKFPVSGPVF

SEQ ID NO: 69764 - protein, 346 aa, Setaria italica
  Transcript Sequence Number=SeqID_3790
  Homolog annotation: Hit_ID=O64542; Match level="QueryCoverage=93%, HitCoverage=37%, E-value=1e-77, Identity=47%"; Hit description =YUP8H12R.29 protein
GGVSFSAIRRPRPLLEVDLPGSGDGLYDHKSSTRPLEKEPMVAARITVEDSLRLLLDVDDIDRFLQSSQPQDNSFQLRRRRQVLLEGLAASLQLVDPFGPNKPGHSSGLAPKDDLIFLRIVSLPKGRKLLARYLRLLVPGSELTRIVCMTVFRHLRSLFGGLPTDSGAAETTIGLAKTVSSCVHHMELSALSACLAAVVCSSQQPPLRPLGSSAGDGASLIIKSVLDRATDLLADPHSAANYSRSTRSLWQASFDAFFGLLTKYCDSKYESIVQRFAMHGSNSLGGPEATKAVSREMPVELLRASLPHTNEQHRQTLLDFARKSTHVSGFSPNASRGHINSESVPG

SEQ ID NO: 69765 - protein, 457 aa, Setaria italica
  Transcript Sequence Number=SeqID_3791
  Homolog annotation: Hit_ID=O64542; Match level="QueryCoverage=42%, HitCoverage=22%, E-value=5e-43, Identity=49%"; Hit description =YUP8H12R.29 protein
NKDRSISRESSLTTDWVQDADFHSWVDQGMLDGDEFLDSKQWCSQLQSSPHFGESKPLSRTSSYPDQPLQHRSSEPILLHRSTSFTSYPPPGGSAGLPYPAQGLTRHASIPSPGAGHHMGSPSSSLSGSPYHMSGLSHGLPYGRSTSYTAADPSTNSLMQNEWPNQAGPLAFDHLNRRPSLLQPQLSLPSSSMSSLHYSQQHQRLPPVQPSFQNYLNLHPHLFYHHQSPEIMGNFDHIPNVPSPRDKRSRSGRGKRSIRLPQQPSDASSQHSESVGIKFRSKYMSSEEIENILKMQHSASHSNDPYIDDYYHQATNAKRSVNTQKSNFCPMSIKDFPSKARSGGDQHSYLQVDANGGVSFSAIRRPRPLLEVDLPGSGDGLYDHKSSTRPLEKEPMVAARITVEDSLRLLLDVDDIDRFLQSSQPQDNSFQLRRRRQVLLEGLAASLQLVDPFGSPN

SEQ ID NO: 69766 - protein, 77 aa, Setaria italica
  Transcript Sequence Number=SeqID_3792
KIRVQTFSTPCQPEFGVTQKCYSNVQEMHTLSALDAEKLNGEKCAPSATMIGDHSEHYAMSKKANRTTRMVVARTEL

SEQ ID NO: 69767 - protein, 74 aa, Setaria italica
  Transcript Sequence Number=SeqID_3793
  Subcellular localization annotation: CTP_CleavageSite=62; ConfidenceScore=5.04e-01
TAKISPIFTATMTAGCSTIARGPSTGSKFDKALKIILKSAGTGASKDLAWAVLGQASQFDLRLMTSSNCAGILS

SEQ ID NO: 69768 - protein, 112 aa, Setaria italica
  Transcript Sequence Number=SeqID_3794
  Subcellular localization annotation: CTP_CleavageSite=79; ConfidenceScore=5.24e-01
VVRRSFPSILLFLGVGTLSWSTRSITLRYSTPLAYLASRPPSSHPGADPSGTRHTLGSGPAQVVGSFPSTSRFSHSPVLADSPVRRLLYGQPSLVVPHRRLVLLEATAPHHA

SEQ ID NO: 69769 - protein, 92 aa, Setaria italica
  Transcript Sequence Number=SeqID_3795
  Subcellular localization annotation: CTP_CleavageSite=40; ConfidenceScore=5.41e-01
KLATAHFFTALSQCTKIRVQTFSTPCQPSATMIGDHSEHYAMSKKANRTTRMVVARTELSSSSLNSTYTIVQTFHKIQSTITVSHPVTPLIS

SEQ ID NO: 69770 - protein, 97 aa, Setaria italica
  Transcript Sequence Number=SeqID_3796
KGYLMYNYSEKQFRMLQLMKLFFFFQMKIPLLSHSCQVHKLLLVLCLCRHVYFVVAYYHQCHCLFEMCKICRESFWEVKSLWNGVKEDQDLDDLHQC

SEQ ID NO: 69771 - protein, 167 aa, Setaria italica
  Transcript Sequence Number=SeqID_3797
  Gene Ontology: Mol. function=structural constituent of cytoskeleton; Cellular component=microtubule organizing center; Biological process= microtubule cytoskeleton organization and biogenesis
  Homolog annotation: Hit_ID=B9T277; Match level="QueryCoverage=91%, HitCoverage=17%, E-value=6e-62, Identity=75%"; Hit description=Gamma- tubulin complex component, putative
GAMAGAIHGHAHHGDPMFQEFMGRLLRRVCSPLFEMVRSWVLEGELEDVFAEFFIVGQPVKAESLWREGYLIQSDMLPTFISPVLAQRILRTGKSINFLRVCCDDSGWADAAAEAAAYVGTTTSRGGLGYGETDALEALVVEAAKRIDRHLMDVIHKRYRFKDHCLA

SEQ ID NO: 69772 - protein, 125 aa, Setaria italica
  misc_feature (19)..(19): Xaa can be any naturally occurring amino acid
  Transcript Sequence Number=SeqID_3798
  Gene Ontology: Cellular component=microtubule organizing center; Biological process=microtubule cytoskeleton organization and biogenesis
  Homolog annotation: Hit_ID=B9T277; Match level="QueryCoverage=84%, HitCoverage=12%, E-value=3e-24, Identity=59%"; Hit description=Gamma- tubulin complex component, putative
NKGTEEELEDVFTESFIVXAESLCWECYLIRSDMLPALISPVLAQRILRTGKAVNFLRVCCDDSCWAAAAAEAAAYVGTTTSRGGLGYAETDALEALVEATKRIDTHLMGCDDGFVDHFIMSIQS

SEQ ID NO: 69773 - protein, 184 aa, Setaria italica
  Transcript Sequence Number=SeqID_3799
  Homolog annotation: Hit_ID=Q4AC18; Match level="QueryCoverage=95%, HitCoverage=42%, E-value=4e-34, Identity=37%"; Hit description =117M18_7
  Pfam annotation: Domain name=DUF618; Domain location=57-119; Score =79.6; E_value=1.1e-20; Accession=PF04818.5; Description=Protein of unknown function, DUF618
MSAGFNKQILAQKLAKLNSSQQSIETLSHWCVFHHRYCRLVVETWDCEFHASSSERRLSLLYLANDIMQNSRKEGNGYITEFMRVIPAALNEVLTIRDDLGRNVVKRLIDIWEDRKIFDTQGQSLKDEFFRRLKDIRNKLKNPAGELLEKVVSSYKHVLNAPMDEDTLMQKCQAALIDFDRNYK

SEQ ID NO: 69774 - protein, 449 aa, Setaria italica
  Transcript Sequence Number=SeqID_3800
  Homolog annotation: Hit_ID=Q8RVC4; Match level="QueryCoverage=62%, HitCoverage=57%, E-value=3e-66, Identity=45%"; Hit description =P0482D04.1 protein
MKIIYGFIPCFYDKYLLFHLRDYLGRNVSTLQIDIWEDRKIFDTQGQSLKDEFFRRLKDIRNKLKNPAGELLEKVVSSYKHVLNAPMDEDTLMQKCQAALIDFDELNKAYRNNSFLGSSNQSGFEELQQQHSILRNSIEQLKMSESLRATLIHHLKEALNEQELKVEQVRSQLQAAQSRYKKAGELCRGLGIDVERHQPSNQGLKSSLSETPASIAPDSANTKSFQKGQSSAVLYSQEGNGAEHNAIAANVLTKLAVGAASDKIRDGVLPSRANGGNTAVKIDEHSSGNKRQKLEDDIHTSQPQSESPPPPPPFPHPDAFQPPPPPEYPPDAFQPPPPPPEYPPSPEPSPPPPPTSTPPHIIPPPLPTTMPPQIISPLPPTAGTYAPFPAGPPGPMYGTFPFTPVVNFPMNIPPGFPSPPTPPPAFQGLAGTFYGPPPFPTATPPTDKK

SEQ ID NO: 69775 - protein, 106 aa, Setaria italica
  Transcript Sequence Number=SeqID_3801
MATRRAVGVGRALVPQPAWAAVAEAVARRMEGVGGGGRVPRYFSDKASGRLLSEEERAAENVYIQKMEREKLEKLRRKADKDKAEAAKRAAAAKGEKKVGEEDHPS

SEQ ID NO: 69776 - protein, 95 aa, Setaria italica
  Transcript Sequence Number=SeqID_3802
  Subcellular localization annotation: CTP_CleavageSite=51; ConfidenceScore=5.29e-01
MASPADEALPALPPIKTAPLPPPPCASASGSASASASPSVPAPAPAKDGAEAAAEEEDHEPSTPTSEESRLRPPAVCPPAPRKPPATRLPVKRKP

SEQ ID NO: 69777 - protein, 344 aa, Setaria italica
  Transcript Sequence Number=SeqID_3803
  Gene Ontology: Mol. function=zinc ion binding; Cellular component =intracellular
  Homolog annotation: Hit_ID=Q2Z1Y7; Match level="QueryCoverage=58%, HitCoverage=56%, E-value=1e-68, Identity=62%"; Hit description=Pm27 protein
  Pfam annotation: Domain name=DUF1644; Domain location=48-211; Score =191.0; E_value=3.3e-54; Accession=PF07800.4; Description=Protein of unknown function (DUF1644)
MARSARARRHVARQLRPTPYPIPSNRWKPMKESNQKKALPTSQKMDWEDANCSVCMEYPHNAVLILCSSHDKGCRPYMCGTSYRHSNCLDQFKKAYTKGALLQEVHANGAGTNLDSAPLTAGEKTESIDLACPLCRGKVKGWTVVEPARSYLNGKRRTCMQDGCSFVGTYKELRKHVKSEHPLAKPREVDPVLEQKWRLLEIERERQDALSTITATMGRAVVLGDYVLDLEDGVDLEDVESDADVDDGRGTENTRRMLLFIMRQVAQHHQNQRLQNATGASENAEDEYVVSNGANGTTPYSYPLEGEDEDDMVVAGGRSTDVLRPERRRRRRRRNRGRLFLGAN

SEQ ID NO: 69778 - protein, 133 aa, Setaria italica
  Transcript Sequence Number=SeqID_3804
  Gene Ontology: Mol. function=aspartic-type endopeptidase activity; Cellular component=anchored to membrane; Biological process =proteolysis
  Homolog annotation: Hit_ID=B6SVD7; Match level="QueryCoverage=98%, HitCoverage=24%, E-value=9e-45, Identity=74%"; Hit description =Aspartic-type endopeptidase/ pepsin A
TFADGNATIQSLGFLYYAQVALGTPIATFLVALDTGSDLFWVPCDCKQCAPLSGGGNATAELRPYSPRLSSTSKQVTCDSAFCDRPNACSAATNGSCPYGVRYVSANTSSSGVLVQDVLHLTREGPPAPGARP

SEQ ID NO: 69779 - protein, 51 aa, Setaria italica
  Transcript Sequence Number=SeqID_3805
  Gene Ontology: Mol. function=aspartic-type endopeptidase activity; Biological process=proteolysis
  Homolog annotation: Hit_ID=Q7XJ13; Match level="QueryCoverage=88%, HitCoverage=6%, E-value=3e-13, Identity=84%"; Hit description =Chloroplast nucleoid DNA-binding protein-like protein
PYYNISITGAMVGSKSINSKFSAIVDSGTSFTALSDPMYTEITSSVSIKFN

SEQ ID NO: 69780 - protein, 452 aa, Setaria italica
  misc_feature (374)..(374): Xaa can be any naturally occurring amino acid
  Transcript Sequence Number=SeqID_3806
  Gene Ontology: Mol. function=aspartic-type endopeptidase activity; Cellular component=anchored to membrane; Biological process =proteolysis
  Homolog annotation: Hit_ID=Q7XJ13; Match level="QueryCoverage=93%, HitCoverage=57%, E-value=0.0, Identity=76%"; Hit description =Chloroplast nucleoid DNA-binding protein-like protein
  Pfam annotation: Domain name=Asp; Domain location=34-375; Score= -63.0; E_value=7.9e-10; Accession=PF00026.15; Description=Eukaryotic aspartyl protease
RRSLASAGPGAGGEVAFADGNDTYRLNDFGFLHYAVVALGTPNVTFLVALDTGSDLFWVPCDCIKCAPLVSPNYGNLKFDVYSPQKSSTSRKVPCSSNLCDQQSACLSTSSSCPYSIEYLSDNTSSSGVLVEDLLYLITEYGQPKIVTAPITFGCGQVQTGSFLGNAAPNGLLGLGMDSKSVPSLLASGGVAANSFSMCFGEDGHGRINFGDTGSSDQQETPLNIYKQNPYYNISITGAMVGSKSINSKFSAIVDSGTSFTALSDPMYTEITSSFDSQVEDKPSQLDSSLPFEFCYSVSSKGSINPPNISLTAIGGSVFPVNDPIITITDTASNPLGYCLAMMKSEGVNLIGENFMSGLKIVFDRERKVLGWKXFDCYSVDNSSRLPANPNPSAVPPKPPMGPNSYTPEAAKGASPNGTQVNVLQPSAGFSLKLHFNTNVFIAAALLFVAIL

SEQ ID NO: 69781 - protein, 262 aa, Setaria italica
  misc_feature (15)..(15): Xaa can be any naturally occurring amino acid
  misc_feature (83)..(83): Xaa can be any naturally occurring amino acid
  misc_feature (98)..(98): Xaa can be any naturally occurring amino acid
  Transcript Sequence Number=SeqID_3807
  Homolog annotation: Hit_ID=Q9SHP4; Match level="QueryCoverage=95%, HitCoverage=38%, E-value=4e-27, Identity=29%"; Hit description =F1K23.23
PAPNYDSLVKIRGSXEFVLWANEYIPTYKLQINAKAFENTNLEGRHELQSNRWEVLLTHSQLAELGNIIDMYFEDQFTLPGKXTFHPHWNSDPSKIKXNNGYLNNLFTFLAGSCIILVLTVFAQLCWPRSLRDKRLFNGSSNVSSSQSYCSDINSLDSSEIQAYCTSLIKKMKDSYGCPGDVFIDARIGAWVGELPDCFKGINSQDDTASGNVQHPDTFSQENQSQLVPTNIKMSDLEQNDRTQETLQNIASFQVVMSEEVK

SEQ ID NO: 69782 - protein, 199 aa, Setaria italica
  Transcript Sequence Number=SeqID_3808
  Gene Ontology: Mol. function=metal ion binding; Biological process =cell redox homeostasis
  Homolog annotation: Hit_ID=B9SZY8; Match level="QueryCoverage=96%, HitCoverage=64%, E-value=1e-46, Identity=45%"; Hit description=Zinc finger protein, putative
  Pfam annotation: Domain name=PHD; Domain location=133-177; Score=2.2; E_value=0.015; Accession=PF00628.21; Description=PHD-finger
  Pfam annotation: Domain name=zf-C3HC4; Domain location=134-174; Score= 44.1; E_value=5.3e-10; Accession=PF00097.17; Description=Zinc finger, C3HC4 type (RING finger)
  Pfam annotation: Domain name=zf-RING-like; Domain location=134-174; Score=2.0; E_value=0.089; Accession=PF08746.3; Description=RING-like domain
  Pfam module annotation: Pfam domain module=PHD::zf-C3HC4::zf-RING -like; Domain location=133-177::134-174::134-174
MESSPVSYWCYRCSRFVRVSPATVVCPECDGGFLEQFPQPPPRGGGGSGRRGTMNPVIVLRGGSLSGFELYYDDGAGDGLRPLPGDVQHLLMGSGFHRLLDQFSREAAAPRPPASKAAVESMPSVTIAGGGAHCAVCQEAFEPGAAGREMPCKHVYHQDCILPWLSLRNSCPVCRQELPAAATPDAEADAGLTIWRLPR

SEQ ID NO: 69783 - protein, 345 aa, Setaria italica
  misc_feature (331)..(331): Xaa can be any naturally occurring amino acid
  Transcript Sequence Number=SeqID_3809
  Gene Ontology: Mol. function=transcription regulator activity; Cellular component=nucleus; Biological process=regulation of transcription, DNA-dependent
  Homolog annotation: Hit_ID=B6U708; Match level="QueryCoverage=100%, HitCoverage=61%, E-value=1e-167, Identity=82%"; Hit description =Ethylene-insensitive3-like protein
  Pfam annotation: Domain name=EIN3; Domain location=1-345; Score =637.9; E_value=9.9e-189; Accession=PF04873.5; Description=Ethylene insensitive 3
MWKDKIKLKRIKERQQKLALQRLELEKSKTKKISDQALRKKMARAQDGILKYMIKLMEVCNARGFVYGIIPDKGKPVSGASDNIRAWWKEKVKFDKNGPAAITKYEVENSILSNAKSNGAKDQHSLMDLQDGTLGSLLSALMLHCSPQQRRYPLDKGVPPPWWPSGNEAWWSSLGLPKGEAPPYKKPHDLKKVWKVGVLTGVIKHMAPNFDKIRNHVRKSKCLQDKMTAKENLIWLGVLQREEKSVNSFGNALSEITRNEDIYSSSDEYDVDRLEQPPHSTSSKEDEDTQPVLQIRGKKTSTRENKRRRRDKSSNQVVSKEDMTKSRQQQXPSGHPPVAEDEVEV

SEQ ID NO: 69784 - protein, 1149 aa, Setaria italica
  misc_feature (176)..(176): Xaa can be any naturally occurring amino acid
  Transcript Sequence Number=SeqID_3810
  Gene Ontology: Mol. function=guanyl-nucleotide exchange factor activity
  Homolog annotation: Hit_ID=Q8H7M0; Match level="QueryCoverage=100%, HitCoverage=62%, E-value=0.0, Identity=94%"; Hit description =Putative adapter protein SPIKE1
  Pfam annotation: Domain name=Ded_cyto; Domain location=956-1142; Score=406.4; E_value=4.7e-119; Accession=PF06920.5; Description =Dedicator of cytokinesis
LIGDGGETLQVAAFRAMVNILTRVQQESSDGAERNRFLINYVDYAFDDFGDRQAPVYPGLSTVWGSLARSKAKGYRVGPVYDDVLAMAWFFLELIVKSMGLEQSRLFYHNLPLGEDVPPLQLKEGVFRCIMQLFDCLLTEVHERCKKGLSLAKRLNSTLAFFCYDLLSIIEPRQVXFELVSLYMDKFAGVCQSVLHDCKLTFLQIICDHDLFVEMPGRDPSDRNYLSSVLIQEIFLTLDHDDLSQRAKAARILVVLICKHEFDARYQKSEDKLYIAQLYFPLIGQILDEMPVFYNLNAVEKREVLVVILQIVRNLDDATLIKAWQQSIARTRLFFKLLEECITHFEHNKTGDSMLLGASSRSPDVERPASPKYSERLSPSVNAYLSEASRHEIRPQGTPENGYMWNRVSPQLSSPNQPYSLREALAQAQSSRIGSTARALRESLHPVLRQKLELWEENLSTAVSLEVLGITEKFSVAAGTRSITTDYAKLDCVTSILMGLLSRSQPLAFWKAFLPVVYNIFNLHGATLMARENDRFLKQIAFHLLRLAVFRNDSIRKRAVVGLQILVRNSFNYFKNTTRLRVMLTITLSELMSDVQVTQMKSDGSLEESGEARRLRKSLEEMADVRSKDLLKDCGLPVTALEAAPEGSNDNRWSWVEVKHLSKCLVQALDAGLEHALLGSVVNVDRYAAAEGFYKLAMAYAPVPDLHIMWLLHLCDAHQEMQSWAEAAQCAVAVAGVIMQALVGRNDAVWSKEHVASLRKICPIVSTDVSAEVSAAEVEGYGASKLTVDSAVKYLQLANKLFAQAELYHFCASIQELIIPVYKSRRSYGQLAKCHTSLTNIYESILEQEASPIPFIDATYYRVGFYGERFGKLNKKEYVFREPRDVRLGDIMEKLSHTYEAKMDGNHTLHIIPDSRQVNADELQPGVCYLQITAVDPVMEDEDLGSRRERIFSLSTGTVRARVFDRFLFDTPFTKNGKTQGGLEDQWKRRTVLQTEGSFPALVNRLLVTKSESLEFSPVENAIGMIETRTAALRNELEEPRSSEGDQLPRLQSLQRILQGSVAVQVNSGVLSVCTAFLSGEPATRLRSQELQQLIAALLEFMAVCKRAIRVHFRLIGEEDQEFHTQLVNGFQSLTAELSHYIPAILSEL

SEQ ID NO: 69785 - protein, 50 aa, Setaria italica
  Transcript Sequence Number=SeqID_3811
LCNPGNTHFLYKHGDHRGTLIPGLQMRNVQYCTFLIPGLQMRNVQYYYSH

SEQ ID NO: 69786 - protein, 162 aa, Setaria italica
  Transcript Sequence Number=SeqID_3812
  Gene Ontology: Biological process=response to stress
  Homolog annotation: Hit_ID=B6T8B9; Match level="QueryCoverage=100%, HitCoverage=100%, E-value=1e-83, Identity=93%"; Hit description=ER6 protein
  Pfam annotation: Domain name=Usp; Domain location=7-160; Score=87.1; E_value=6.3e-23; Accession=PF00582.18; Description=Universal stress protein family
MATGNLASVVVAVDGSEESMNALRWALDNLRLRPDGELVVLHVQPPPNIAAGLNPAPIPFGGPSGLEVPAFTQAIEAHQRRITQAILEHALKICSAKNVEVKTEVIVGDPKEKICEATANRNADLLVMGCRAIGPLQRMFLGSVSNYCINHVGCPVVVIKGT

SEQ ID NO: 69787 - protein, 117 aa, Setaria italica
  Transcript Sequence Number=SeqID_3813
  Subcellular localization annotation: CTP_CleavageSite=20; ConfidenceScore=5.02e-01
PCCIQLSSWRLTSGRDTGPRQNTVKTQDGNYNVTGYRPTQAHSAEPWLTGTSHSSSSALMLFSGALTEGSMWRLGTADLDLVLLLSASSCDPSCTIGKSVLTLTLTEDIFSFHILPS

SEQ ID NO: 69788 - protein, 62 aa, Setaria italica
  misc_feature (35)..(35): Xaa can be any naturally occurring amino acid
  Transcript Sequence Number=SeqID_3814
MGNCLNAASKQRRGGLLPEEEESLSEMRRISQLLXRDEEEEDDAEAEYPEETDESPPPAAAA

SEQ ID NO: 69789 - protein, 65 aa, Setaria italica
  Transcript Sequence Number=SeqID_3815
TLQLTRMTRCPENYNSISMMFFLNSKQTDKTKDNIYLMKYLKHQGNTNIYVLHTAIKSNMINHDL

SEQ ID NO: 69790 - protein, 101 aa, Setaria italica
  Transcript Sequence Number=SeqID_3816
  Homolog annotation: Hit_ID=B6TGV9; Match level="QueryCoverage=97%, HitCoverage=95%, E-value=1e-35, Identity=77%"; Hit description =Hypoxia induced protein conserved region containing protein
  Pfam annotation: Domain name=HIG_1_N; Domain location=4-71; Score =6.5; E_value=0.0003; Accession=PF04588.5; Description=Hypoxia induced protein conserved region
MAEEKSALQSAREWVVDHKLRAVGTLWLSGIVGSIAYNWSRPGMKTSVKIIHARLHAQALTLAALAGSALVEYYDHQQGSGSKVHQYAKQFISSDGSSQNK

SEQ ID NO: 69791 - protein, 61 aa, Setaria italica
  Transcript Sequence Number=SeqID_3817
CWPRAFTPDRTDSLRCDGRARLASRPAGESDARLASPAVRRRRSSSRRGDELGAGSRRGVR

SEQ ID NO: 69792 - protein, 86 aa, Setaria italica
  Transcript Sequence Number=SeqID_3818
NSESNARAPGEHRFGCGELGSGHPSLPPSPSSLLRREQPSRDQSISFSSLLAADPEAARISCPLRPSRRHAIPRPRSTQIHHPQPV

SEQ ID NO: 69793 - protein, 71 aa, Setaria italica
  Transcript Sequence Number=SeqID_3819
  Subcellular localization annotation: CTP_CleavageSite=26; ConfidenceScore=5.18e-01
NVVGNTATGTRGAGGLHKKGPPLESRATAGSRSGGQVWSMNLLGNAKPEEHSWSSSTSKNGAAAACDDAMF

SEQ ID NO: 69794 - protein, 188 aa, Setaria italica
  Transcript Sequence Number=SeqID_3820
  Gene Ontology: Mol. function=protein serine/threonine kinase activity; Biological process=protein amino acid phosphorylation
  Homolog annotation: Hit_ID=Q0DCT8; Match level="QueryCoverage=96%, HitCoverage=30%, E-value=2e-88, Identity=85%"; Hit description =Protein kinase G11A
  Pfam annotation: Domain name=Pkinase; Domain location=1-132; Score= -61.9; E_value=8.4e-05; Accession=PF00069.17; Description=Protein kinase domain
KGIVNRKPEVATQINPWPELIAEPSDARSMSFVGTHEYLAPEIIKGEGHGSAVDWWTFGIFLYELLFGKTPFKGSGNRATLFNVIGQPLRFPEYPVVSFSARDLIRGLLVKEPQQRLAYKRGATEIKQHPFFEGVNWALIRCASPPEVPKPVEIERPSKLPPSPSGAADGSSGAPQKGSDGYLEFDFF

SEQ ID NO: 69795 - protein, 130 aa, Setaria italica
  misc_feature (76)..(76): Xaa can be any naturally occurring amino acid
  Transcript Sequence Number=SeqID_3821
  Gene Ontology: Mol. function=binding
  Homolog annotation: Hit_ID=Q2R9P0; Match level="QueryCoverage=100%, HitCoverage=5%, E-value=1e-51, Identity=78%"; Hit description =Armadillo/beta-catenin-like repeat family protein, expressed
  Pfam annotation: Domain name=Arm; Domain location=51-91; Score=19.7; E_value=0.012; Accession=PF00514.15; Description=Armadillobeta -catenin-like repeat
  Pfam annotation: Domain name=Arm; Domain location=9-49; Score=33.6; E_ value=7.7e-07; Accession=PF00514.15; Description=Armadillobeta -catenin-like repeat
  Pfam module annotation: Pfam domain module=Arm::Arm; Domain location =51-91::9-49
LLAILSDEVDDSKWAITAAGGIPPLVQLLETGSQKAKEDAAYIMWNMCSDSDDIRACIESAGAVLALIWLLKSGSXRGQEASVKALKKLIRSADSATINQLLALLLSDSLSSKAHVITVLGHVLVLAPQR

SEQ ID NO: 69796 - protein, 46 aa, Setaria italica
  Transcript Sequence Number=SeqID_3822
WFGALIKMATNPPHLQTRKLTYHLLQKRPGKTLYVVIQKIENQTFF

SEQ ID NO: 69797 - protein, 51 aa, Setaria italica
  Transcript Sequence Number=SeqID_3823
  Gene Ontology: Mol. function=oxidoreductase activity, acting on NADH or NADPH, quinone or similar compound as acceptor; Cellular component=photosystem II; Biological process=photosynthesis, light reaction
  Homolog annotation: Hit_ID=P0C386; Match level="QueryCoverage=100%, HitCoverage=28%, E-value=4e-21, Identity=92%"; Hit description =NAD(P)H-quinone oxidoreductase subunit I, chloroplastic
MFPMLTGFISYGQQTIRAARYIGQGFIITLSHTNRLPVTIHYPYEKSITSE

SEQ ID NO: 69798 - protein, 49 aa, Setaria italica
  Transcript Sequence Number=SeqID_3824
SSQNQRILDCLHNTKIGIIVTSHENHVSTKAFSPSLRVSYRITFHSAML

SEQ ID NO: 69799 - protein, 150 aa, Setaria italica
  Transcript Sequence Number=SeqID_3825
LHTLLETSHSAVGSRFAPLRPHFLSIPLRIHPDFTPIIPRISSSQHTRLISSIYMAHDMLGFKEDDAMRFIFGEDIMGVDDPAAFDRSLMELHVFKEVFCGGGAATTTTTNLTPETDITGGDHPAAHPQQPDLLDAAAVMQWQPGANCAT

SEQ ID NO: 69800 - protein, 81 aa, Setaria italica
  Transcript Sequence Number=SeqID_3826
  Gene Ontology: Mol. function=protein serine/threonine kinase activity; Cellular component=cell wall; Biological process=protein amino acid phosphorylation
  Homolog annotation: Hit_ID=Q8S5G8; Match level="QueryCoverage=97%, HitCoverage=7%, E-value=2e-17, Identity=58%"; Hit description =Leucine Rich Repeat family protein
  Pfam annotation: Domain name=LRR_1; Domain location=11-33; Score=9.4; E_value=4.8; Accession=PF00560.25; Description=Leucine Rich Repeat
  Pfam annotation: Domain name=LRR_1; Domain location=36-58; Score=0.4; E_value=2.6e+02; Accession=PF00560.25; Description=Leucine Rich Repeat
  Pfam annotation: Domain name=LRR_1; Domain location=60-79; Score =13.9; E_value=0.66; Accession=PF00560.25; Description=Leucine Rich Repeat
  Pfam module annotation: Pfam domain module=LRR_1::LRR_1::LRR_1; Domain location=11-33::36-58::60-79
  Subcellular localization annotation: CTP_CleavageSite=13; ConfidenceScore=5.05e-01
PLPSSLGNLQQLTEATFSNNELSGPLPKEIFNLSSLSYALVLSSNNFVGSLPSEVGGLTKLVFLYISGNNLSGSLPDELGN

SEQ ID NO: 69801 - protein, 190 aa, Setaria italica
  Transcript Sequence Number=SeqID_3827
  Gene Ontology: Mol. function=transferase activity; Cellular component= nucleus; Biological process=regulation of transcription
  Homolog annotation: Hit_ID=B9SQ91; Match level="QueryCoverage=99%, HitCoverage=70%, E-value=2e-69, Identity=35%"; Hit description =Pentatricopeptide repeat-containing protein, putative
  Pfam annotation: Domain name=PPR; Domain location=109-143; Score =30.1; E_value=9.1e-06; Accession=PF01535.12; Description=PPR repeat
  Pfam annotation: Domain name=PPR; Domain location=144-178; Score =42.3; E_value=2e-09; Accession=PF01535.12; Description=PPR repeat
  Pfam annotation: Domain name=PPR; Domain location=39-73; Score=28.5; E_value=2.7e-05; Accession=PF01535.12; Description=PPR repeat
  Pfam annotation: Domain name=PPR; Domain location=74-108; Score=35.4; E_value=2.2e-07; Accession=PF01535.12; Description=PPR repeat
  Pfam module annotation: Pfam domain module=PPR::PPR::PPR::PPR; Domain location=109-143::144-178::39-73::74-108
LWDDIVNVAVQLRLNRQWEPIITVCEWILYRSSFRPDIICYNLLIDAYGRKRELSKAESIYMALLETHCVPTEDTYALLLRAYCNAGQLHRAEGVISEMQENGIPPSATVYNAYLDGLLKARCTEKAVEVYQRMKKERCRTNTETYTLMINVYGKAKQPMSSLKVFNEMKAIGCKPNICTYTALVNAFAR

SEQ ID NO: 69802 - protein, 86 aa, Setaria italica
  Transcript Sequence Number=SeqID_3828
  Subcellular localization annotation: CTP_CleavageSite=41; ConfidenceScore=5.72e-01
MASPTASPHLPLASASARSSSFPKRSLRSSCLPPRRGPSLRAGSVKEWREFEDEAGAVKEWREFEDAVRRKDLSRALRFLQSVEPA

SEQ ID NO: 69803 - protein, 45 aa, Setaria italica
  Transcript Sequence Number=SeqID_3829
IGLAYLTLLKMGTLCTIHNFYHITVDWLSNEAVRHEISQIDQYYA

SEQ ID NO: 69804 - protein, 149 aa, Setaria italica
  Transcript Sequence Number=SeqID_3830
  Subcellular localization annotation: CTP_CleavageSite=30; ConfidenceScore=5.39e-01
DRSGQPFLQSPPPAVAGAPQAGFMHLLATTAAPAAAIAMAGRRALPCPSQSSDQTSPPERIITPFEREGGGREARRETETESREERRLGMRSFPMDVEGATNARTPAGECWRLVHAGAGKTRNGIRGGGMGGRSQAPWCRGVTNSNSNP

SEQ ID NO: 69805 - protein, 957 aa, Setaria italica
  Transcript Sequence Number=SeqID_3831
  Gene Ontology: Mol. function=zinc ion binding; Cellular component =intracellular; Biological process=regulation of transcription, DNA -dependent
  Homolog annotation: Hit_ID=B9SRS4; Match level="QueryCoverage=95%, HitCoverage=97%, E-value=0.0, Identity=46%"; Hit description =Transcription factor, putative
  Pfam annotation: Domain name=B3; Domain location=363-466; Score=96.6; E_value=8.7e-26; Accession=PF02362.13; Description=B3 DNA binding domain
  Pfam annotation: Domain name=zf-CW; Domain location=629-674; Score =72.2; E_value=2e-18; Accession=PF07496.7; Description=CW-type Zinc Finger
  Pfam module annotation: Pfam domain module=B3::zf-CW; Domain location= 363-466::629-674
MAMAAAGAAVVAKRCMNPACGAPATAGGGDWRKGWPLRSGGFALLCDKCGLAYEQFVFCDIFHQKESGWRDCSFCGKRLHCGCVASKNSYDLLDSGGVQCVICMRNLAAQSASGQVVPKLFPCQNNQRIFGKSDELLLGRKFEQSPSLMLDSRNDEIAVVNKSNHPFMVKGIEAGQSSSILRQKEMENGSRQIKWEQPTLSIGDMGRPFLTRSQSALESPQYTRRDDNKDPTTDSTTSESISEACLSMSLGIANNGNKMEATSTVERPILSPTTSIAEGREITTTLSPFQHAQRARHFLTRPPRVGEGAVFDPTKDIFPHLRVARPPAEGRGRNQLLPRYWPRITDQELQQISGDSNSTIVPLFEKVLSASDAGRIGRLVLPKACAEAYFPPISQPEGRPLTIQDARGKEWHFQFRFWPNNNSRMYVLEGVTPCIQSLQLQAGDTVTFSRIEPGGKLVMGFRKATNTVSLPDSQISAIANGSLLSETLFSTANENLGVVSGYPGFLQTIKGAADLHPSSLYDHHMNSADGDVSWLKADKFGSRPDEGSLQFLQKRSRNIGSKSRRFLMDAEDAMELKLTWEEAQEWLRPAPSAKPTIVMIEDYEFEEYDEPPVFAKRSIFTIRATGEQDQWIQCDDCSKWRRLPLTVIVASKWTCTDNSWDPKSCSCSAPEELTPKELQSVLQQYEEMRRRKGSYGLKLNVAEMDASSLDALATAAVFGDVGNQGTASVATTTKHPRHRPGCTCIVCIQPPSGKGPKHNPACTCNVCMTVRRRFKTLMMRKKQRQSEREEAEASKKITWANRDEPEGSNLSRSPQTLDTTRDSSDVTMFDKVADPNKGHIDLNFHPAVRDDHQGQHGAQQPRPVSMMGLLEVATRPLDNYMKQNGLTSLAGEQAGGSSSTATVLPAPVESEERTSNEGRVASVERKREPDAMAVDEAGDNQQDKAADDAPLPPPAAT

SEQ ID NO: 69806 - protein, 92 aa, Setaria italica
  Transcript Sequence Number=SeqID_3832
  Homolog annotation: Hit_ID=B6TMK4; Match level="QueryCoverage=100%, HitCoverage=31%, E-value=3e-43, Identity=90%"; Hit description =EMB1417
  Pfam annotation: Domain name=PPR; Domain location=15-49; Score=10.2; E_value=0.55; Accession=PF01535.12; Description=PPR repeat
  Pfam annotation: Domain name=PPR; Domain location=51-85; Score=22.4; E_value=0.0019; Accession=PF01535.12; Description=PPR repeat
  Pfam module annotation: Pfam domain module=PPR::PPR; Domain location =15-49::51-85
VIKWMFNKGQGKTMGSYYTLLNALIEDGRIEEAEELFGMIFSRYMEGLPRTFFMRMISLYYSVGAYNKMFEVFADMEELGVRPDGSIVRTLG

SEQ ID NO: 69807 - protein, 230 aa, Setaria italica
  misc_feature (165)..(165): Xaa can be any naturally occurring amino acid
  misc_feature (227)..(227): Xaa can be any naturally occurring amino acid
  Transcript Sequence Number=SeqID_3833
  Homolog annotation: Hit_ID=B6TMK4; Match level="QueryCoverage=100%, HitCoverage=77%, E-value=1e-106, Identity=82%"; Hit description =EMB1417
  Pfam annotation: Domain name=PPR; Domain location=127-161; Score =10.2; E_value=0.55; Accession=PF01535.12; Description=PPR repeat
  Pfam annotation: Domain name=PPR; Domain location=163-197; Score =16.5; E_value=0.099; Accession=PF01535.12; Description=PPR repeat
  Pfam module annotation: Pfam domain module=PPR::PPR; Domain location =127-161::163-197
  Subcellular localization annotation: CTP_CleavageSite=32; ConfidenceScore=5.21e-01
MFCLANYWSPAFTLVRGGATVGHPLKFNSVVVCGARGPRPRYPRVWKTRKKIGTISKSQKLVECIKGLSNVKEEVYGALDSFVAWELEFPLIVVKKALKTLEDEKEWKRIIQVIKWMFNKGQGKTMGSYYTLLNALIEDGRIEEAEELFGMIFSRYMEGLPRTFXMRMISLYYSVGAYNKMFEVFADMEELGVRPDGSIVRMLGDVFQKLDMMDKYEKLKKKYPPPXWEY

SEQ ID NO: 69808 - protein, 85 aa, Setaria italica
  misc_feature (19)..(19): Xaa can be any naturally occurring amino acid
  Transcript Sequence Number=SeqID_3834
MVVGVGVFGSIGREEGEKXGISGDGDKQEEDDDKEEREAQLVSSATTTPPKNALLLMRCRSAPQNRTSPLTSRFPARRRRRCRRP

SEQ ID NO: 69809 - protein, 70 aa, Setaria italica
  Transcript Sequence Number=SeqID_3835
  Subcellular localization annotation: CTP_CleavageSite=40; ConfidenceScore=5.04e-01
HARAAVPMGVPQQLHPRLLPVMRPHHVVGHVPLPRHAVPVAVPVPQLRPVPPQPVQRPPVAVPLKPESPK

SEQ ID NO: 69810 - protein, 111 aa, Setaria italica
  misc_feature (84)..(84): Xaa can be any naturally occurring amino acid
  Transcript Sequence Number=SeqID_3836
  Subcellular localization annotation: CTP_CleavageSite=23; ConfidenceScore=5.17e-01
TGTSPLPQHQMPQSSSSQSGQVDAATGPPQSNHGASRDGKFPLCYSQLYPPEVPGEHSLDRIGDEQPHSPEAQFHVMHVQQEGXTEQPSLLGSAVKSSGKRRGRGTSNLQD

SEQ ID NO: 69811 - protein, 459 aa, Setaria italica
  Transcript Sequence Number=SeqID_3837
  Gene Ontology: Mol. function=DNA binding; Cellular component =cytoplasm; Biological process=protein import into nucleus
  Homolog annotation: Hit_ID=B9RSV1; Match level="QueryCoverage=49%, HitCoverage=14%, E-value=1e-72, Identity=62%"; Hit description=80 kD MCM3-associated protein, putative
RADSPADYDNGMGQRRLVNYADPLFENGGLQSSKQLRMPPSEQMRLHTSARSPPSNITSKFRPPSDFQDHHPVHIADPRNNVFTDALQNRSLDHNISKRSRSPTLSYQDVDGAARIDTGGNARRLVDYTDTLIGDENIETSKRMRSPASEFTRAIKSPPSDIRDNIRSSPNSAQNLHAHADVQKSTASLPKFGNQIQSRIGGARSPPHQMSSLSDDSNEPNTSAVSPPKSSIRSATRRMGTSPLDASDDDHSTPSTELEREQQAKAKRLARFHVELSRPVENTNDFVKTLKGSADRPKQATSVGNFPMKKNDNTDESTSADMDSPVLAAIVGLCPDMCPEPERAERERKGDLDRYERLDGDRNLTTELLAVKKYNRTAERDADLIRPMPVLQKTMDYLLSLLDHTYDDSFLGLYNFLWDRMRAIRMDLRMQHFFNQEAISMLEQMIRLHIVAMHELCEY

SEQ ID NO: 69812 - protein, 81 aa, Setaria italica
  Transcript Sequence Number=SeqID_3838
  Gene Ontology: Mol. function=nucleotidyltransferase activity; Cellular component=cytoplasm; Biological process=coenzyme A biosynthetic process
  Homolog annotation: Hit_ID=B6T8W5; Match level="QueryCoverage=65%, HitCoverage=28%, E-value=3e-19, Identity=92%"; Hit description =Bifunctional coenzyme A synthase
MWSPNHVNSSCLFLSFYFYCASFDVAMLLMFSKETLNGGLAVNRKREEKGLPLLKVEVVDLLSGGVEGEKLSSSALRKLEA

SEQ ID NO: 69813 - protein, 187 aa, Setaria italica
  Transcript Sequence Number=SeqID_3839
  Gene Ontology: Mol. function=nucleotidyltransferase activity; Cellular component=cytoplasm; Biological process=coenzyme A biosynthetic process
  Homolog annotation: Hit_ID=B6T8W5; Match level="QueryCoverage=96%, HitCoverage=96%, E-value=2e-81, Identity=86%"; Hit description =Bifunctional coenzyme A synthase
  Pfam annotation: Domain name=CTP_transf_2; Domain location=29-169; Score=47.7; E_value=4.7e-11; Accession=PF01467.18; Description =Cytidylyltransferase
VAGGTPAVEAPPPPQTSEEEATPPYGSVVLGGTFDRLHDGHRCLLKASADLARERIVVGVCTGPMLAKKEYAELIEPVEKRIKAVEDYIKSIKPELIVQVEPIEDPYGPSITDDKLDAITVSKETLNGGLAVNRKREEKGLPLLKVEVVDLLSGGVEGEKLSSSALRKLEAEQAEQSEAKTAIHEAS

SEQ ID NO: 69814 - protein, 78 aa, Setaria italica
  Transcript Sequence Number=SeqID_3840
  Gene Ontology: Mol. function=protein kinase activity; Cellular component=integral to membrane; Biological process=protein amino acid phosphorylation
  Homolog annotation: Hit_ID=B6UCN1; Match level="QueryCoverage=100%, HitCoverage=11%, E-value=1e-34, Identity=92%"; Hit description =Atypical receptor-like kinase MARK
LASAVNWNRASGRTPLDWETRSAIALAAARGVAHIHSTGPTASHGNIKSSNVLLTKNYEARVSDHGLPTLVGPSFSPT

SEQ ID NO: 69815 - protein, 337 aa, Setaria italica
  Transcript Sequence Number=SeqID_3841
  Gene Ontology: Mol. function=protein kinase activity; Cellular component=integral to membrane; Biological process=protein amino acid phosphorylation
  Homolog annotation: Hit_ID=B6UCN1; Match level="QueryCoverage=90%, HitCoverage=45%, E-value=1e-176, Identity=99%"; Hit description =Atypical receptor-like kinase MARK
  Pfam annotation: Domain name=Pkinase; Domain location=44-310; Score =55.6; E_value=1.9e-13; Accession=PF00069.17; Description=Protein kinase domain
  Pfam annotation: Domain name=Pkinase_Tyr; Domain location=43-310; Score=32.0; E_value=7.4e-16; Accession=PF07714.9; Description =Protein tyrosine kinase
  Pfam module annotation: Pfam domain module=Pkinase::Pkinase_Tyr; Domain location=44-310::43-310
  Subcellular localization annotation: CTP_CleavageSite=44; ConfidenceScore=5.07e-01
PAAAAAAGAAAAAKAGGGSTGSKKLIFFGPMAAAPPFDLEDLLRASAEVLGKGAFGTAYKAVMENGSAVAVKRLKDVDLPEPEFRERIAAIGAVQHELVVPLRAYYFSKDEKLLVYDYMSMGSLSALLHGNRASGRTPLDWETRSAIALAAARGVAHIHSTGPTASHGNIKSSNVLLTKNYEARVSDHGLPTLVGPSFSPTRVSGYRAPEVTDIRRVSQKADVYSFGVLLLELLTGKAPTHAVVNEEGLDLPRWVQSVVREEWTAEVFDQELLRYQNVEEEMVQLLQLAIDCSAQHPDRRPTMAEVATRIDEIRRSSLGDRQAGDSAGDGEGDEPSL

SEQ ID NO: 69816 - protein, 123 aa, Setaria italica
  Transcript Sequence Number=SeqID_3842
SRRRWSAAGVKEKRTLRWCARTPPADSTVTKTRPVEVEEVGNKMQWQMRLHAAAAEENDTNLPLQALFDSYRRLPPAEIFRPYLRMPSAGGWPSSAMPALDAGLHLHLRTEPRYSSGSPGRGI

SEQ ID NO: 69817 - protein, 74 aa, Setaria italica
  Transcript Sequence Number=SeqID_3843
  Pfam annotation: Domain name=potato_inhibit; Domain location=15-74; Score=80.4; E_value=6.6e-21; Accession=PF00280.10; Description =Potato inhibitor I family
MSSPAAEGKVSDAPKTEWPELVGRKIKEAKEKIKADRPDLKVEVVTVGTRVTEEFNMKRVRLWVDTVAEVPRIG

SEQ ID NO: 69818 - protein, 81 aa, Setaria italica
  Transcript Sequence Number=SeqID_3844
  Gene Ontology: Mol. function=peptidase activity
  Homolog annotation: Hit_ID=B9T7Q4; Match level="QueryCoverage=96%, HitCoverage=22%, E-value=2e-31, Identity=73%"; Hit description =Cysteine-type peptidase, putative
  Pfam annotation: Domain name=OTU; Domain location=9-79; Score=29.8; E_ value=1.1e-05; Accession=PF02338.11; Description=OTU-like cysteine protease
CLRRGKLSPSDSAQKELADELRAKVADEFVKRREDTEWFLEGDFESYVKKMRKPHAWGGEPELLMCSHVLRMPITVYMYTS

SEQ ID NO: 69819 - protein, 158 aa, Setaria italica
  Transcript Sequence Number=SeqID_3845
  Gene Ontology: Mol. function=peptidase activity
  Homolog annotation: Hit_ID=B9RMI0; Match level="QueryCoverage=89%, HitCoverage=84%, E-value=3e-55, Identity=70%"; Hit description=OTU domain-containing protein 6B, putative
  Pfam annotation: Domain name=OTU; Domain location=15-141; Score =117.8; E_value=3.5e-32; Accession=PF02338.11; Description=OTU-like cysteine protease
MSDRELRPLRSIRITGDGRCLFRSVAYGACLRRGKLSPSDSAQKELADELRAKVADEFVKRREDTEWFLEGDFESYVKKMRKPHAWGGEPELLMCSHVLRMPITVYMYTSSSDSPRIIAEYGQEYGKDNPVRVLYDGYGHYDALQPSLVRTQSRLRGV

SEQ ID NO: 69820 - protein, 125 aa, Setaria italica
  Transcript Sequence Number=SeqID_3846
  Gene Ontology: Mol. function=hydrolase activity, hydrolyzing O -glycosyl compounds; Cellular component=plasma membrane; Biological process=carbohydrate metabolic process
  Homolog annotation: Hit_ID=Q25AG9; Match level="QueryCoverage=100%, HitCoverage=16%, E-value=8e-54, Identity=80%"; Hit description =B1011H02.4 protein
  Pfam annotation: Domain name=Glyco_hydro_3_C; Domain location=18-125; Score=-46.5; E_value=0.00062; Accession=PF01915.14; Description =Glycosyl hydrolase family 3 C terminal domain
VCTKEHRELAAEAVRQGAVLLKNYNSFLPLKRSEVRHVAIIGPSVNDVYAMGGDYTGVPCNPTTFLKGIQAYVTQTTFAAGCKDVSCNSTDLFGEAIEAAKRADIVVVVAGLNLTEEREDFDRVS

SEQ ID NO: 69821 - protein, 256 aa, Setaria italica
  misc_feature (23)..(23): Xaa can be any naturally occurring amino acid
  misc_feature (101)..(101): Xaa can be any naturally occurring amino acid
  Transcript Sequence Number=SeqID_3847
  Gene Ontology: Mol. function=hydrolase activity, hydrolyzing O -glycosyl compounds; Cellular component=plasma membrane; Biological process=carbohydrate metabolic process
  Homolog annotation: Hit_ID=Q25AG9; Match level="QueryCoverage=100%, HitCoverage=30%, E-value=1e-100, Identity=68%"; Hit description =B1011H02.4 protein
  Pfam annotation: Domain name=Glyco_hydro_3; Domain location=1-206; Score=98.4; E_value=2.5e-26; Accession=PF00933.13; Description =Glycosyl hydrolase family 3 N terminal domain
LTTAAFNRSLWRAVAGAVATEAXGMHGAGQAGLTYWAPNINIFRDPRWGRGQETSGEDPAVAAAYSLEYVKGFQGEYGDEGRIRLSACCKHYTAYDMEKWXGFSRYTFNAKVNAQDLEDTYQPPFKTCIQEARASCLMCSYNQVNGVPICARKDLLQKTRDEWGFQGYITSDCDAVAIIHENQTYTNSDEDSVAIVLKAGMDLNCGSFLVRHTKSAIEKGKIQEQDINRALFNLFSVQLRLGIFDKSSGNQLGPNN

SEQ ID NO: 69822 - protein, 260 aa, Setaria italica
  Transcript Sequence Number=SeqID_3848
  Homolog annotation: Hit_ID=B4FNU7; Match level="QueryCoverage=99%, HitCoverage=68%, E-value=1e-122, Identity=85%"; Hit description=BSD domain containing protein
  Pfam annotation: Domain name=BSD; Domain location=28-88; Score=59.7; E_value=1.1e-14; Accession=PF03909.9; Description=BSD domain
SQVPDDVVGAARALAARPEAWIDFPVLALDENSIISDIQRDHLESIEKLVPDLASLRTRLCPSYMDEDIFWKVYFRLLESNINEHSSEEDNRSVPNSARHVNEIESDSPPHVCEIESVKSNQEGYQSSDGQALPKTRSERSIDQWVFAKSKSEESMDQWSEIPSDVESFREGKRYLSSEELSDVDSANVVVMDKYMDSLLSDRRNLPYASSSVRRDSVRRKPASSTDYSHRPPQPTPPASLSKKESWDVIEDSEFDILDS

SEQ ID NO: 69823 - protein, 230 aa, Setaria italica
  misc_feature (22)..(22): Xaa can be any naturally occurring amino acid
  misc_feature (74)..(74): Xaa can be any naturally occurring amino acid
  misc_feature (124)..(124): Xaa can be any naturally occurring amino acid
  misc_feature (196)..(196): Xaa can be any naturally occurring amino acid
  misc_feature (218)..(218): Xaa can be any naturally occurring amino acid
  Transcript Sequence Number=SeqID_3849
  Gene Ontology: Mol. function=nuclease activity
TSMELLETKKLEMEVETQLVLXASSGLEGSIEHLVEEDKIEKDMLSKNGEILAEELAGLLELVRLKEAEIAENXARIHEVQEIISGVVSRFHGSQSDIDLKLNSLKETQSKVDLETEALVLKKXEIDKFISLTEQKDSELREIIGACSSEAKTCQQSVEIRRKLASSILKSREDRIGLLKMEEEILQDIQMLRQKXITDARTSLQEISSRRTSIQQEXDSFKQKLSFIDK

SEQ ID NO: 69824 - protein, 421 aa, Setaria italica
  Transcript Sequence Number=SeqID_3850
  Gene Ontology: Mol. function=heat shock protein binding; Cellular component=plasma membrane; Biological process=protein folding
  Homolog annotation: Hit_ID=B0FFN7; Match level="QueryCoverage=100%, HitCoverage=100%, E-value=1e-178, Identity=72%"; Hit description =DnaJ family heat shock protein
  Pfam annotation: Domain name=DnaJ; Domain location=14-72; Score =128.0; E_value=3e-35; Accession=PF00226.23; Description=DnaJ domain
  Pfam annotation: Domain name=DnaJ_C; Domain location=237-363; Score =30.9; E_value=6.6e-09; Accession=PF01556.10; Description=DnaJ C terminal region
  Pfam annotation: Domain name=DnaJ_CXXCXGXG; Domain location=138-224; Score=120.9; E_value=4.2e-33; Accession=PF00684.11; Description=DnaJ central domain (4 repeats)
  Pfam module annotation: Pfam domain module=DnaJ::DnaJ_C::DnaJ _CXXCXGXG; Domain location=14-72::237-363::138-224
MFGRMPRKTSNNTKYYEVLGVSKSASQDELKKAYRKAAIKNHPDKGGDPEKFKELSQAYEVLSDPEKREIYDQYGEDALKEGMGGGSSSDFHSPFDIFEQLFPGSGTFGGGSSRGRRQKRGEDVVHTMKVSLEDLYNGTTKKLSLSRSVLCSKCKGKGSKSGASGTCHGCRGAGMRTITRQIGMGMIQQMNTICPECKGSGEIISEKDKCPGCKGSKVSQEKKVLEVHVEKGMQHGQKIVFQGQADEAPDTLTGDIVFVLQLKDHPKFKRKYDDLFVEHTISLTEALCGLQFVLTHLDGRQLLIKSNPGEVIKPGQHKAINDEGMPQHGRPFMKGRLFVEFNVEFPEPGALSPSQCQSLEKILPPKPGSQLSDMELDQCEETTLQDVNIEEEMRRRQQQKRQEAYDEDEEESGPRVQCAQQ

SEQ ID NO: 69825 - protein, 71 aa, Setaria italica
  Transcript Sequence Number=SeqID_3851
FNVTVISHPDGKCSLCDFSHWLEFTLHNSITIKVGSRYILVDRPFYFLSWYDTKHSYQLVQFMIRMCRMFS

SEQ ID NO: 69826 - protein, 127 aa, Setaria italica
  Transcript Sequence Number=SeqID_3852
  Homolog annotation: Hit_ID=Q6KF34; Match level="QueryCoverage=35%, HitCoverage=27%, E-value=4e-18, Identity=91%"; Hit description =ETCHED1 protein
  Pfam annotation: Domain name=zf-DNL; Domain location=92-127; Score =22.6; E_value=5.3e-06; Accession=PF05180.4; Description=DNL zinc finger
  Subcellular localization annotation: CTP_CleavageSite=66; ConfidenceScore=5.99e-01
MATTAAAYGCSSAASLLPSAAFPGRRSYRRSPPPRVSLAASSKPRTTAHGLRVSCRRRRLVVSACSSGEASSEAPASPTEATVDIKLPRRSLLVQFTCNKCGERTQRLINRLAYERGTVFLQCAGCQ

SEQ ID NO: 69827 - protein, 192 aa, Setaria italica
  Transcript Sequence Number=SeqID_3853
  Gene Ontology: Mol. function=serine-type endopeptidase activity; Cellular component=plasma membrane; Biological process=negative regulation of catalytic activity
  Homolog annotation: Hit_ID=Q5N955; Match level="QueryCoverage=99%, HitCoverage=26%, E-value=5e-43, Identity=48%"; Hit description =Putative subtilase
  Pfam annotation: Domain name=Inhibitor_I9; Domain location=1-72; Score=42.9; E_value=1.3e-09; Accession=PF05922.8; Description =Peptidase inhibitor I9
HMDKSAMPRAFSSHQRWYESTLSAAAPGADMYYVYDHAAHGFAARLRTEELESLRRSRGFVSCYRDDPRAVTRDTTHTPEFLGVSAQGGLWEEAGYGDGVIVGVVDTGVWPESASFRDDGLPPVPARWKGACESGTAFDGSKACNRKLIGARKFNKGLIASQNVTIAVNSPRDSEGHGTHTSSTAAGSPVPA

SEQ ID NO: 69828 - protein, 238 aa, Setaria italica
  misc_feature (128)..(128): Xaa can be any naturally occurring amino acid
  misc_feature (186)..(186): Xaa can be any naturally occurring amino acid
  Transcript Sequence Number=SeqID_3854
  Gene Ontology: Cellular component=nucleus
  Homolog annotation: Hit_ID=B9SX77; Match level="QueryCoverage=74%, HitCoverage=16%, E-value=5e-22, Identity=37%"; Hit description =Filamin-A-interacting protein, putative
KERRNLKKENLNKNNYKKRSSSNPILEKALHDMRGETAEIKVSYEAKLVEALQMIDAAQKKFDEAEEKLLAAKSLEAESIRTHNASLRSLQDIEDREDQLRRDRTSFELESASKEKEISLQRKLLDDXQKILHEKEQALVKEQALLNQRDDNILERLGYITHSEKRLEEEKLNLEDERKALMEEKXKLDLKMQAIISREEVCIVSFPSFVSSRVWLLKLCLLYRNSLHSFISSSTLLT

SEQ ID NO: 69829 - protein, 1002 aa, Setaria italica
  Transcript Sequence Number=SeqID_3855
  Gene Ontology: Cellular component=nucleus
  Homolog annotation: Hit_ID=B9SX77; Match level="QueryCoverage=83%, HitCoverage=80%, E-value=1e-133, Identity=37%"; Hit description =Filamin-A-interacting protein, putative
  Pfam annotation: Domain name=Cenp-F_leu_zip; Domain location=20-160; Score=-0.7; E_value=0.0083; Accession=PF10473.1; Description=Leucine- rich repeats of kinetochore p
  Pfam annotation: Domain name=Uso1_p115_C; Domain location=371-516; Score=-6.6; E_value=0.052; Accession=PF04871.5; Description=Uso1 p115 like vesicle tethering protein, C terminal region
  Pfam module annotation: Pfam domain module=Cenp-F_leu_zip::Uso1_p115 _C; Domain location=20-160::371-516
MASPRSAGAGGGVAGDEAIWRKLREAGFDEDAVRRRDKAALIGYISRLESEIYDYQHNLGLILLEQKEVTSKYEQLKAASEATEIMLKRERAAQQSALAETRKREENLKKNLCIQKECVSNLEKALHDMRGETAEIKVSYEAKLVEALQMIDAAQKKFDEAEEKLLAAKSLEAESIRTHNASLRSLQDIEDREDQLRRDRTSFELESASKEKEISLQRKLLDDTKKILHEKEQALVKEQALLNQRDDNILERLGYITHSEKRLEEEKLNLEDERKALMEEKNKLDLKMQAIISREEAIIKKESVLDKRESELLVLQETIASKERAEIERLRQEQEIDLGRRRNEFDTEMEIKLTSFKEEIEARKTLLDQRESALSEQEDAVAQREQNINLRLAELSNKEESLVKRSDELKEEERKLSSHRDTVHSELQKEREEIQNMKLDLEKEKSFFEEEKREAIQAQEKLLITQSEREDLLILQMKLKEEIDSLRAQKVELMVDAERLLAEKERFEIEWELIDEKKDELQKEAARIAEERRVIDEHLKNELDVIKQEKENLRIQFKSSAESLACEHKEFMNKMQQEHASWLSRIQQEREDLKRDIDIQRTELMNSAKARQMEIESYLREKEEEFEQKKSKELEYINSEKETISSKLEHVRIELQKLEDERKEALLERARREQELSEIKSTIDALNEQREKLQEQRKLLHSDREAITQQIQQLNELEELKIESENNQLSLRQCGRSKHGDVETQKENGVHLSPDEDQNASPKKCSSPKVILGKKLEVSPSVSTPISWVRKCAQVIFKRSPEKSADHDNDRSAHATLGNVNDFSLVENGGLFACQLENGAGEVPHAVDGLKVGKKRLNYALSHDQSENLEPKRKHQRSSILTQKVVGGEIDSNGSPSVLEEKCSKNEHDAVLVGLSRKGLPYPRTGEVASSDDALFVNGKPDTSDIPDDEPSEEISVSAAEALNGDVAEDKDELDEDSDDEGEEEEEEKASSAKKLWRFLIT

SEQ ID NO: 69830 - protein, 75 aa, Setaria italica
  Transcript Sequence Number=SeqID_3856
DVVNYSVQSSGCHRRRRDRWIFRICDEFLLAMSPDLQLSINSHLFFRSLMKIHSSGQEIHWMGTGNNPVPEPKKK

SEQ ID NO: 69831 - protein, 126 aa, Setaria italica
  Transcript Sequence Number=SeqID_3857
  Gene Ontology: Mol. function=phosphopantetheine binding; Cellular component=chloroplast; Biological process=fatty acid biosynthetic process
  Homolog annotation: Hit_ID=B6UIR7; Match level="QueryCoverage=100%, HitCoverage=93%, E-value=6e-47, Identity=81%"; Hit description=Acyl carrier protein
  Pfam annotation: Domain name=PP-binding; Domain location=50-117; Score=68.5; E_value=2.4e-17; Accession=PF00550.17; Description =Phosphopantetheine attachment site
  Subcellular localization annotation: CTP_CleavageSite=41; ConfidenceScore=5.52e-01
PALRVQGMDAVSFRVSASFPRQRTSFPSIRVQRIPKRFQVSCSAKQETIEKVCEIVKGQLALPEDSTVTGETKFVDLGADSLDTVEIVMGLEEAFQINVDESSAQEIQTVGDAAALIDKLIAEKDA

SEQ ID NO: 69832 - protein, 239 aa, Setaria italica
  misc_feature (13)..(13): Xaa can be any naturally occurring amino acid
  Transcript Sequence Number=SeqID_3858
  Gene Ontology: Mol. function=inositol or phosphatidylinositol phosphatase activity; Cellular component=intracellular; Biological process=signal transduction
  Homolog annotation: Hit_ID=B9SSY3; Match level="QueryCoverage=98%, HitCoverage=32%, E-value=3e-96, Identity=69%"; Hit description=Type II inositol 5-phosphatase, putative
  Pfam annotation: Domain name=Exo_endo_phos; Domain location=16-239; Score=50.0; E_value=9.4e-12; Accession=PF03372.15; Description =EndonucleaseExonucleasephosphatase family
WIDNIGKTLDEGXSFHRVGSRQLAGLLIAAWARNDLKPHVGDVDAAAVPCGFGHAIGNKGGVGLRIRVYDRRICFVSNHFAAHQGNVSRRNDDFNHIYRTMSFNKPHGSTASATSVQLHKAVSANGNQADEDIPELAEADMVVFLGDLNYRLDGITYDEARDMVSQRSFDWLRERDQLRAEMRAGNVFQGMREGPIRFPPTYKFQRNQPGLSGYDSSEKKRIPAWCDRILYRDSRLYQC

SEQ ID NO: 69833 - protein, 511 aa, Setaria italica
  Transcript Sequence Number=SeqID_3859
  Gene Ontology: Cellular component=chloroplast
GDLRAGIPESSGQSEACLHPCNKDIPQFTADGAKQCGDRVSLLPLAGALQTEAPCLTLGRDSNAASVEKLHGSDPLSCGKENIGTDLQSKPDAEHGENRMSSAHLGLDLNTVDSSDAAELNPFFPYKKLGQSKVSDPSECGSTTGATEESESHRKWREMKQNGFLSSSHGKAVVPRPRGRPPKRKRDDEFKKNTSTQHGQANKFVKVAAPSGLLSGLNPGIINHVRNSKQVYSIIKAMVHSERLENENQPACTSRTSERGKEVSERIQDHNYGGGFMKCHFMMKDNNAMFHQTLPTTSQFLPQDGDSLKLQLSSAAAASSDRTCSTSADDLASNHDYMTLLSVKAASVASQWLELLHQDIRGRLAALKRSRKRVRNALHTELPYLISTEFSSNQENESSIANTSESGCTDKAVSEAHAARWKSLFVQMDRALQEEGKHLENRLKQVQEMQLNCDKGLKHMTSDAPLLGPMAELWKLKNPDTSESEWAVQAAAASIYSTCNMVMRTENVPCF

SEQ ID NO: 69834 - protein, 135 aa, Setaria italica
  misc_feature (91)..(91): Xaa can be any naturally occurring amino acid
  Transcript Sequence Number=SeqID_3860
  Gene Ontology: Mol. function=nucleoside-triphosphatase activity; Cellular component=cytoplasm; Biological process=protein transport
  Homolog annotation: Hit_ID=B9RZA0; Match level="QueryCoverage=97%, HitCoverage=21%, E-value=6e-63, Identity=79%"; Hit description =Vesicular-fusion protein nsf, putative
  Pfam annotation: Domain name=AAA; Domain location=1-133; Score=54.1; E_value=5.4e-13; Accession=PF00004.21; Description=ATPase family associated with various cellular activities (AAA)
GETEKNVRDLFADAENEQKTQGDQSDLHVIIFDEIDAICKSRGSTRDGTGVHDSIVNQLLTKIDGVEALNNVLLIGMTNRKDLLDEALLRXLQIHTNKMKENSFLSPDINLHELAARTKNYSGAELEGVVKSRNK

SEQ ID NO: 69835 - protein, 175 aa, Setaria italica
  misc_feature (24)..(24): Xaa can be any naturally occurring amino acid
  misc_feature (40)..(40): Xaa can be any naturally occurring amino acid
  misc_feature (48)..(48): Xaa can be any naturally occurring amino acid
  Transcript Sequence Number=SeqID_3861
  Gene Ontology: Mol. function=nucleoside-triphosphatase activity; Cellular component=cytoplasm
  Homolog annotation: Hit_ID=B9RZA0; Match level="QueryCoverage=85%, HitCoverage=21%, E-value=1e-43, Identity=57%"; Hit description =Vesicular-fusion protein nsf, putative
  Pfam annotation: Domain name=CDC48_N; Domain location=26-101; Score =9.5; E_value=0.0013; Accession=PF02359.10; Description=Cell division protein 48 (CDC48), N-terminal
RRSHGGEVRTRGHGGGGGGGASMXGSTPNQELALTNCAYXVSSGDLRXFPNALALVADAWVFTLRAHDAVTSGRIALNAIQRRQAKVSAGDSVTVSSFVPPEDFKLALLTLELEYAKARANRNDELDAVVLAQQLRKRFLDQVMTLGQRVPFEFYGTNYVFTVNQALLEGQESST

SEQ ID NO: 69836 - protein, 743 aa, Setaria italica
  Transcript Sequence Number=SeqID_3862
  Gene Ontology: Mol. function=nucleoside-triphosphatase activity; Cellular component=cytoplasm; Biological process=protein transport
  Homolog annotation: Hit_ID=Q40495; Match level="QueryCoverage=100%, HitCoverage=100%, E-value=0.0, Identity=73%"; Hit description=N -ethylmaleimide sensitive fusion protein
  Pfam annotation: Domain name=AAA; Domain location=255-454; Score =278.5; E_value=1.5e-80; Accession=PF00004.21; Description=ATPase family associated with various cellular activities (AAA)
  Pfam annotation: Domain name=AAA_2; Domain location=251-392; Score= -47.9; E_value=0.056; Accession=PF07724.6; Description=ATPase family associated with various
  Pfam annotation: Domain name=AAA_5; Domain location=255-397; Score= -2.5; E_value=0.0015; Accession=PF07728.6; Description=ATPase family associated with various
  Pfam annotation: Domain name=CDC48_2; Domain location=121-184; Score =20.9; E_value=0.0054; Accession=PF02933.9; Description=Cell division protein 48 (CDC48), dom
  Pfam annotation: Domain name=CDC48_N; Domain location=15-97; Score =31.4; E_value=3.7e-06; Accession=PF02359.10; Description=Cell division protein 48 (CDC48), N-terminal
  Pfam annotation: Domain name=NACHT; Domain location=534-685; Score= -39.2; E_value=0.086; Accession=PF05729.4; Description=NACHT domain
  Pfam module annotation: Pfam domain module=AAA::AAA_2::AAA_5::CDC48 _2::CDC48_N::NACHT; Domain location=255-454::251-392::255-397::121 -184::15-97::534-685
MAGRYYQGHGGGGGGGASMEVVSTPNQELALTNCAYVSSGDLRRFPNALALVADAWVFTLRAHDAVTSGRIALNAIQRRQAKVSAGDSVTVSSFVPPEDFKLALLTLELEYAKARANRNDELDAVVLAQQLRKRFLDQVMTLGQRVPFEFYGTNYVFTVNQALLEGQESSTPLDRGFLSSDTYIIFEAAPNSGIKVFNQKEAASSKLFKHKEFNLEKLGIGGLSAEFTDIFRRAFASRVFPPHVVSKLGIKHVKGILLYGPPGTGKTLMARQIGKLLNGKDPKIVNGPEVLSKFVGETEKNVRDLFADAENEQKTQGDQSDLHVIIFDEIDAICKSRGSTRDGTGVHDSIVNQLLTKIDGVEALNNVLLIGMTNRKDLLDEALLRPGRLEVHIEINLPDENGRLQILQIHTNKMKENSFLSPDINLHELAARTKNYSGAELEGVVKSAVSFALNRQITMDDLTKPLDEESIKVTMDDFVNALHEITPAFGASTDNLERCRLRGIVDCGKAHKHIYQRAMLLVEQVKVSKGSPLVTCLLEGPAGSGKSAMAASVGIDSDFAYVKIISAETMIGFSESSKCAQICKVFEDAYKSQFSIIILDDIERLLEYVAIGPRFSNLISQTLLVLLKRVPPKGKNLLVIGTTSEVGFLESVGMCDVFSVTYHVPKLKKEDAKKVLQNLNVFDEGDLDAAAEALDDMPIKKLYTLVEMSAQGPTGGSAEAIYAGEEKIDINHFFSILSDIIRY

SEQ ID NO: 69837 - protein, 79 aa, Setaria italica
  Transcript Sequence Number=SeqID_3863
  Gene Ontology: Mol. function=aspartic-type endopeptidase activity; Cellular component=chromatin; Biological process=RNA-dependent DNA replication
  Homolog annotation: Hit_ID=Q8SA91; Match level="QueryCoverage=98%, HitCoverage=3%, E-value=1e-21, Identity=60%"; Hit description =Putative gag-pol polyprotein
CCHRRCLPTLVLKLDFAKAFDSVDWECLNSVMEARGFPSLWNAWVAAMLHTSKLSVLVNSVLGPWFACGRGLRQGDPLP

SEQ ID NO: 69838 - protein, 98 aa, Setaria italica
  Transcript Sequence Number=SeqID_3864
  Homolog annotation: Hit_ID=B4FAJ5; Match level="QueryCoverage=85%, HitCoverage=17%, E-value=9e-42, Identity=97%"; Hit description =Avr9/Cf-9 rapidly elicited protein 137
  Pfam annotation: Domain name=DUF668; Domain location=1-69; Score =75.8; E_value=1.6e-19; Accession=PF05003.4; Description=Protein of unknown function (DUF668)
AEGRQEEAAAERAEMYEMLPAKLRAAVRSKLREWWRDPGPLDEGLARGWKDAVDRIMAWLGPMARDTARWQAERNMDRTRRFDGAPRVYALQTLRWAD

SEQ ID NO: 69839 - protein, 84 aa, Setaria italica
  Transcript Sequence Number=SeqID_3865
MAATSPRDPNPLRAGAVRARWVCLPIGSRERSSLEREGWQREGNRAAAVVLGLDLSDSYLSCDRSGLKAGWLCGKEGEGRGRVG

SEQ ID NO: 69840 - protein, 134 aa, Setaria italica
  Transcript Sequence Number=SeqID_3866
  Gene Ontology: Mol. function=N-acetyltransferase activity; Cellular component=chloroplast; Biological process=metabolic process
  Homolog annotation: Hit_ID=B9T4P8; Match level="QueryCoverage=96%, HitCoverage=48%, E-value=9e-45, Identity=66%"; Hit description=N -acetyltransferase, putative
  Pfam annotation: Domain name=Acetyltransf_1; Domain location=10-104; Score=54.3; E_value=4.6e-13; Accession=PF00583.16; Description =Acetyltransferase (GNAT) family
  Pfam annotation: Domain name=FR47; Domain location=25-113; Score= -3.6; E_value=0.033; Accession=PF08445.2; Description=FR47-like protein
  Pfam module annotation: Pfam domain module=Acetyltransf_1::FR47; Domain location=10-104::25-113
LCSMCKFVEDGEERVVVGSLDLNQCLWLPDELTGMRPGVNEDSQTRAYLSNVCVAKELQKKGLGYALVDKSKKLAREWGITDLYVHVAINNIAGQKLYKKSGFVYEGEEPAWKARFLGRPRRLLLWLDMNKEPL

SEQ ID NO: 69841 - protein, 71 aa, Setaria italica
  Transcript Sequence Number=SeqID_3867
  Homolog annotation: Hit_ID=B6SR19; Match level="QueryCoverage=84%, HitCoverage=41%, E-value=2e-25, Identity=91%"; Hit description=16kDa membrane protein
TDDVDDPCVAGFVRGGRVSARNPLMTRNLERNGRITCMTFPRDWLRRDLSVIGFGLIGWIGPSSVPVINGN

SEQ ID NO: 69842 - protein, 70 aa, Setaria italica
  Transcript Sequence Number=SeqID_3868
LGYGFAMESGRKSGEPFLITKGLHYQWNNIKRNFLSGSESPIPFSAIRSTAGLSILPFSANSSVSGHLMW

SEQ ID NO: 69843 - protein, 103 aa, Setaria italica
  misc_feature (3)..(3): Xaa can be any naturally occurring amino acid
  Transcript Sequence Number=SeqID_3869
  Subcellular localization annotation: CTP_CleavageSite=40; ConfidenceScore=5.53e-01
DPXGALRVVYRARTSTAPRRRRRQRPAAPPTGTSWARRSSAGLARSRSDRPQEEKPAAALVNPACPAPAPASISLSLCAGRQRQVASAAVAVGWPSGGGGDAG

SEQ ID NO: 69844 - protein, 135 aa, Setaria italica
  Transcript Sequence Number=SeqID_3870
  Gene Ontology: Mol. function=aspartic-type endopeptidase activity; Cellular component=chromatin; Biological process=RNA-dependent DNA replication
  Homolog annotation: Hit_ID=Q8SA91; Match level="QueryCoverage=99%, HitCoverage=5%, E-value=1e-47, Identity=66%"; Hit description =Putative gag-pol polyprotein
SSIFVWTQDHEVAFTTLKQALSTAPVLALPDFTKQFCLETDACKNGVGAVLLQEGHPLAFICKPLGVKTQGLSTYKKEYLAILIAVEQWRSYLLHGEFIIFTDQKSLVHLNEQRLNTPWQQKVFTKLLGMQYRII

SEQ ID NO: 69845 - protein, 188 aa, Setaria italica
  misc_feature (79)..(79): Xaa can be any naturally occurring amino acid
  Transcript Sequence Number=SeqID_3871
  Gene Ontology: Mol. function=nucleoside-triphosphatase activity; Cellular component=late endosome membrane; Biological process =proteolysis
  Homolog annotation: Hit_ID=Q1W2L1; Match level="QueryCoverage=98%, HitCoverage=40%, E-value=6e-80, Identity=76%"; Hit description =Suppressor of K+ transport growth defect-like protein
  Pfam annotation: Domain name=AAA; Domain location=1-105; Score=-33.0; E_value=0.02; Accession=PF00004.21; Description=ATPase family associated with various cellular activities (AAA)
  Pfam annotation: Domain name=Vps4_C; Domain location=120-185; Score =131.2; E_value=3.4e-36; Accession=PF09336.2; Description=Vps4 C terminal oligomerisation domain
  Pfam module annotation: Pfam domain module=AAA::Vps4_C; Domain location=1-105::120-185
RVSIKFQGVGHNDDKVLVLAATNTPYALDQAVRRRFDKRIYIPLPDMKARQHMFKVHYGDNNPTKNLKQRKSQNFRRRXLARRTDGFSGSDIAVCVKDVLFEPVRKTQDAMFFFKADGDMWMPCGPKQPGAVQTTMQELASKGLAAKILPPPISKTDFEKVLSRQRPTVSKKDLEVHERFTKEFGEEG

SEQ ID NO: 69846 - protein, 435 aa, Setaria italica
  Transcript Sequence Number=SeqID_3872
  Gene Ontology: Mol. function=nucleoside-triphosphatase activity; Cellular component=late endosome membrane; Biological process =proteolysis
  Homolog annotation: Hit_ID=Q9ZNT0; Match level="QueryCoverage=100%, HitCoverage=100%, E-value=0.0, Identity=85%"; Hit description =F10A12.27/F10A12.27
  Pfam annotation: Domain name=AAA; Domain location=167-352; Score =272.4; E_value=1e-78; Accession=PF00004.21; Description=ATPase family associated with various cellular activities (AAA)
  Pfam annotation: Domain name=AAA_2; Domain location=163-293; Score= -46.8; E_value=0.046; Accession=PF07724.6; Description=ATPase family associated with various
  Pfam annotation: Domain name=AAA_3; Domain location=167-292; Score= -14.5; E_value=0.015; Accession=PF07726.3; Description=ATPase family associated with various
  Pfam annotation: Domain name=AAA_5; Domain location=167-298; Score =0.1; E_value=0.00093; Accession=PF07728.6; Description=ATPase family associated with various
  Pfam annotation: Domain name=MIT; Domain location=5-73; Score=97.9; E_ value=3.6e-26; Accession=PF04212.10; Description=MIT domain
  Pfam annotation: Domain name=Vps4_C; Domain location=367-432; Score =131.2; E_value=3.4e-36; Accession=PF09336.2; Description=Vps4 C terminal oligomerisation domain
  Pfam module annotation: Pfam domain module=AAA::AAA_2::AAA_3::AAA _5::MIT::Vps4_C; Domain location=167-352::163-293::167-292::167 -298::5-73::367-432
MYSNFKEQAIEYVKQAVQEDNAGNYVKAFPLYMNALEYFKTHLKYEKNPKIREAITAKFTEYLRRAEEIRAVLDEGGAGPGANGSDAAVATRPKTKGKDGDGGNGGDDSEQSKLRAGLNSAIITEKPNVKWNDVAGLESAKQALQEAVILPVKFPQFFTGKRRPWRAFLLYGPPGTGKSYLAKAVATEADSTFFSISSSDLVSKWMGESEKLVANLFQMARENAPSIIFIDEIDSLCGQRGEGNESEASRRIKTELLVQMQGVGHNDDKVLVLAATNTPYALDQAVRRRFDKRIYIPLPDMKARQHMFKVHLGDTPHSLTESDFESLARRTDGFSGSDIAVCVKDVLFEPVRKTQDAMFFFKADGDMWMPCGPKQPGAVQTTMQELASKGLAAKILPPPISKTDFEKVLSRQRPTVSKKDLEVHERFTKEFGEEG

SEQ ID NO: 69847 - protein, 147 aa, Setaria italica
  misc_feature (83)..(83): Xaa can be any naturally occurring amino acid
  Transcript Sequence Number=SeqID_3873
  Gene Ontology: Mol. function=transporter activity; Cellular component= integral to membrane; Biological process=transport
  Homolog annotation: Hit_ID=B6TEP5; Match level="QueryCoverage=99%, HitCoverage=40%, E-value=2e-72, Identity=89%"; Hit description =Triose phosphate/phosphate translocator, non-green plastid ,chloroplast
  Pfam annotation: Domain name=TPT; Domain location=56-147; Score=18.6; E_value=5.1e-05; Accession=PF03151.8; Description=Triose-phosphate Transporter family
CSFTHTIKAMEPFFSVLLSAIFLGELPTPWVVLSLLPIVGGVALASLTEASFNWAGFWSAMASNVTFQSRNVLSKKLMVKKEXMSFCLLAPVTLLTEGVKVSPAVLQSAGLNLKQIYTRSLIAAFCFHAYQQVSYMILARVSPVTHS

SEQ ID NO: 69848 - protein, 90 aa, Setaria italica
  Transcript Sequence Number=SeqID_3874
  Subcellular localization annotation: CTP_CleavageSite=19; ConfidenceScore=5.16e-01
SAASPRRVSPERNSAREHRAAPRSGHPMPSSADSRRQGRSRTRGDANGAPPARRGGKACGAGGGGWRERRGGVEREEELGSSCACALLLG

SEQ ID NO: 69849 - protein, 170 aa, Setaria italica
  misc_feature (20)..(20): Xaa can be any naturally occurring amino acid
  misc_feature (60)..(60): Xaa can be any naturally occurring amino acid
  misc_feature (101)..(101): Xaa can be any naturally occurring amino acid
  misc_feature (112)..(112): Xaa can be any naturally occurring amino acid
  Transcript Sequence Number=SeqID_3875
  Gene Ontology: Mol. function=protein dimerization activity; Cellular component=nucleus; Biological process=regulation of transcription, DNA-dependent
  Homolog annotation: Hit_ID=Q6YVY0; Match level="QueryCoverage=93%, HitCoverage=23%, E-value=2e-62, Identity=76%"; Hit description=Auxin response factor 7
  Pfam annotation: Domain name=B3; Domain location=15-120; Score=59.6; E_value=1.2e-14; Accession=PF02362.13; Description=B3 DNA binding domain
PNPEPPEPERCNVHSFCKTXTASDTSTHGGFSVLRRHAEECLPQLDMSQNPPWSRTWLVXSHGPKWQLRFGSRGVLLRHLLTTVSRGFVSSKRLVAGDAFXFLRGENGELRXGVRRLMRQLTNMPSSVISSHSMHLGVLATASHAISTGTLFSVFYKTQETKYEITESLS

SEQ ID NO: 69850 - protein, 673 aa, Setaria italica
  Transcript Sequence Number=SeqID_3876
  Gene Ontology: Mol. function=protein dimerization activity; Cellular component=nucleus; Biological process=regulation of transcription, DNA-dependent
  Homolog annotation: Hit_ID=B6UCM8; Match level="QueryCoverage=98%, HitCoverage=98%, E-value=0.0, Identity=82%"; Hit description=Auxin response factor 1
  Pfam annotation: Domain name=AUX_IAA; Domain location=464-635; Score=- 79.9; E_value=0.0011; Accession=PF02309.8; Description=AUXIAA family
  Pfam annotation: Domain name=Auxin_resp; Domain location=249-334; Score=161.2; E_value=3.1e-45; Accession=PF06507.5; Description=Auxin response factor
  Pfam annotation: Domain name=B3; Domain location=122-227; Score =118.3; E_value=2.6e-32; Accession=PF02362.13; Description=B3 DNA binding domain
  Pfam module annotation: Pfam domain module=AUX_IAA::Auxin_resp::B3; Domain location=464-635::249-334::122-227
MANAGAGAGGSGGVSDALFRELWHACAGPLVTVPRQGELVYYFPQGHMEQLEASTDQQLDQHLPLFNLPSKILCKVVNVELRAETDSDEVYAQIMLQPEADQNEPTSPNPEPPEPERCNVHSFCKTLTASDTSTHGGFSVLRRHAEECLPQLDMSQNPPWQELVAKDLHGNEWHFRHIFRGQPRRHLLTTGWSVFVSSKRLVAGDAFIFLRGENGELRVGVRRLMRQLTNMPSSVISSHSMHLGVLATASHAISTGTLFSVFYKPRTSRSEFVVSVNKYLEAKNHKMSVGMRFKMRFEGDESPERRFSGTIIGLGSMPANSTSPWADSDWRSLKVQWDEPSAVLRPDRVSPWELEPLDATNIQPPQPPLRNKRARPPASPSIAPELPPAFGFWKSPAEPTHAFSFSGLQRTQELYHSNPNSIFSSPLNEGFNSKNERSTPTNNHLYWPVRDMRTESYSASINKPPPERKQESVTAGCRLFGIEISNAVSPVVTAASVGQDQPPAVSVDVESDQLSQPSHANKTDAPAASSERSPHETESRQIRSCTKVIMQGMVVGRAVDLTRLDGYDDLLHKLEEMFDIQGELSASLKKWKVIYMDDEDDMMLVGDDPWHEFCIMVKKIYIYSYEEAKSLIPKAKLPVIGDTIKPNPDKLSPESDMPQSDSNNTAPVAADKD

SEQ ID NO: 69851 - protein, 35 aa, Setaria italica
  Transcript Sequence Number=SeqID_3877
LFHALVPLNIKLLVTATQGPVVVSIERLTELYKKS

SEQ ID NO: 69852 - protein, 59 aa, Setaria italica
  Transcript Sequence Number=SeqID_3878
  Subcellular localization annotation: CTP_CleavageSite=48; ConfidenceScore=5.49e-01
GKYFRSSGRRIRLCAHGSRRKRSRKPPAYASSAAATGRRSRTSRSVPSAGAAGESGPPP

SEQ ID NO: 69853 - protein, 184 aa, Setaria italica
  Transcript Sequence Number=SeqID_3879
  Gene Ontology: Mol. function=protein serine/threonine kinase activity; Biological process=protein amino acid phosphorylation
  Homolog annotation: Hit_ID=B9R6R4; Match level="QueryCoverage=64%, HitCoverage=12%, E-value=2e-21, Identity=44%"; Hit description =Receptor protein kinase CLAVATA1, putative
  Pfam annotation: Domain name=LRR_1; Domain location=29-51; Score=8.6; E_value=6.8; Accession=PF00560.25; Description=Leucine Rich Repeat
  Pfam annotation: Domain name=LRR_1; Domain location=5-27; Score=9.6; E_value=4.3; Accession=PF00560.25; Description=Leucine Rich Repeat
  Pfam annotation: Domain name=LRR_1; Domain location=53-75; Score =15.0; E_value=0.31; Accession=PF00560.25; Description=Leucine Rich Repeat
  Pfam annotation: Domain name=LRR_1; Domain location=76-95; Score =13.5; E_value=0.8; Accession=PF00560.25; Description=Leucine Rich Repeat
  Pfam module annotation: Pfam domain module=LRR_1::LRR_1::LRR_1::LRR _1; Domain location=29-51::5-27::53-75::76-95
  Subcellular localization annotation: CTP_CleavageSite=26; ConfidenceScore=5.03e-01
GRLSSLNSLSIEGNGIGGAIPASLGSCSALSTVNFAGNKLAGAIPAELGNLPRLNSLDLSRNELTGAVPASLAALKLSSLNLSDNQLTGPVPEALAISAYGESFVGNPGLCATNGAGFLRRCAPGSGGRSASAAARLVVTCILAATAVLLAALGVLIYLKKRRRAEAEAAASGAGKLFALKKGS

SEQ ID NO: 69854 - protein, 129 aa, Setaria italica
  misc_feature (121)..(121): Xaa can be any naturally occurring amino acid
  Transcript Sequence Number=SeqID_3880
  Gene Ontology: Mol. function=RNA binding
  Homolog annotation: Hit_ID=B9SKB5; Match level="QueryCoverage=52%, HitCoverage=22%, E-value=5e-14, Identity=63%"; Hit description =Nucleic acid binding protein, putative
MVTCNFDLMDHAVSIISKFLLLHFILWAYSYFRSFKLCFFVYQVIIKTVVATAILTACLFGRYLAELLAERQKLAPFVQVLPFCTRLLNQEILRASTMAPNHNFVEPERIEHGSPLRLPGXHPVNGQPM

SEQ ID NO: 69855 - protein, 62 aa, Setaria italica
  Transcript Sequence Number=SeqID_3881
  Gene Ontology: Mol. function=RNA binding
  Homolog annotation: Hit_ID=Q1SL18; Match level="QueryCoverage=90%, HitCoverage=18%, E-value=2e-12, Identity=65%"; Hit description=KH
YQYLRRNLLKPIDESMDYYKKQQLRELAILNGTLREESPSPHLSPSVSPFNSTGMKRAKTGR

SEQ ID NO: 69856 - protein, 291 aa, Setaria italica
  Transcript Sequence Number=SeqID_3882
  Gene Ontology: Mol. function=RNA binding; Cellular component =cytoplasm; Biological process=multicellular organismal development
  Homolog annotation: Hit_ID=B9SKB5; Match level="QueryCoverage=84%, HitCoverage=84%, E-value=3e-79, Identity=61%"; Hit description =Nucleic acid binding protein, putative
  Subcellular localization annotation: CTP_CleavageSite=39; ConfidenceScore=5.09e-01
MDDRIPPPSLLQYSPSPVHSSPHPLNSLRYSSSERERYLAELLAERQKLAPFVQVLPFCTRLLNQEILRASTMAPNHNFVEPERIEHGSPLRLPGHPVNGQPMDLEGGWSGMQTEHMGVLQASSMGWNGAPALAGTPVVKKVVRLDVPVDKYPNYNFVGRLLGPRGNSLKRVEASTQCRVYIRGRGSVKDSVKEDKLRDKPGYEHLNEPLHVLVEAEFPADIVDGRLNQAVSILEDLLKPIDESMDYYKKQQLRELAILNGTLREESPSPHLSPSVSPFNSTGMKRAKTGR

SEQ ID NO: 69857 - protein, 450 aa, Setaria italica
  misc_feature (389)..(389): Xaa can be any naturally occurring amino acid
  Transcript Sequence Number=SeqID_3883
  Gene Ontology: Mol. function=calcium ion binding; Cellular component =nucleus; Biological process=regulation of transcription, DNA -dependent
  Homolog annotation: Hit_ID=Q10KD2; Match level="QueryCoverage=99%, HitCoverage=82%, E-value=0.0, Identity=77%"; Hit description=IQ calmodulin-binding motif family protein, expressed
  Pfam annotation: Domain name=Ank; Domain location=141-173; Score =31.5; E_value=3.3e-06; Accession=PF00023.22; Description=Ankyrin repeat
  Pfam annotation: Domain name=IQ; Domain location=312-332; Score=22.1; E_value=0.0023; Accession=PF00612.19; Description=IQ calmodulin -binding motif
  Pfam annotation: Domain name=IQ; Domain location=335-355; Score=26.9; E_value=8.4e-05; Accession=PF00612.19; Description=IQ calmodulin -binding motif
  Pfam module annotation: Pfam domain module=Ank::IQ::IQ; Domain location=141-173::312-332::335-355
NVETSPSQANGVNEMHLHIRLEKLLTLGPDDHGMVVLSSGDEKYEVINAINSLMLDAKWSDQESASANEVVSTARDQSLKKLVKEKLHHWLICKINDDGKGPNVLCKEGQGVIHLVAALGYDWAIRPIIVAGVNVNFRDAHGWTALHWAASSGRERTIGVLIANGAAAGALTDPTSEFPSGRSPADLASVNGHKGIAGFLAEAALTSHLSALTIRESKDSTVEVCGLPAVEGLTGINSAQLAGEDSHAESLEGSLSAVRKSTQAAARIFQAFRVESFHRKKIVEYGDDNCGLSDERTLSLVSLKGQHDPHLHSAAVRIQNKFRGWKGRKEFMIIRQRIVKLQAHVRGHQVRRNYRKVVWTVGIVEKVILRWRRKRPGLRGFRPEKQLEXGPSEIQPAKVEDEYDFLHDGRRQAEARLQRALARVHSMSQYPEAREQYHRLTTCVAEMKQP

SEQ ID NO: 69858 - protein, 439 aa, Setaria italica
  misc_feature (10)..(10): Xaa can be any naturally occurring amino acid
  Transcript Sequence Number=SeqID_3884
  Gene Ontology: Mol. function=calcium ion binding; Cellular component =nucleus; Biological process=regulation of transcription, DNA -dependent
  Homolog annotation: Hit_ID=Q7XI44; Match level="QueryCoverage=99%, HitCoverage=61%, E-value=1e-115, Identity=66%"; Hit description =Putative anther ethylene-upregulated protein ER1
  Pfam annotation: Domain name=IQ; Domain location=289-309; Score=22.1; E_value=0.0023; Accession=PF00612.19; Description=IQ calmodulin -binding motif
  Pfam annotation: Domain name=IQ; Domain location=312-332; Score=26.9; E_value=8.4e-05; Accession=PF00612.19; Description=IQ calmodulin -binding motif
  Pfam annotation: Domain name=TIG; Domain location=68-154; Score=19.9; E_value=0.011; Accession=PF01833.16; Description=IPTTIG domain
  Pfam module annotation: Pfam domain module=IQ::IQ::TIG; Domain location=289-309::312-332::68-154
TKKHDSFSRXWMSKELKEVVDLGIKSTSDAFWSNIETVKVPDRCNVLTNEQLDAYVVSPSLSQDQLFSIIDVSPSCAYIGTNTKISVTGTFLVKKEHVENRKWSCMFGNIEVPAEILTDGTLRCYAPEHQSGRVPFYVTCSNRVACSEVREFEYRDPDAQYVETSPSQANGVNEMHLHIRLEKLLTLGPDDHGMVVLSSGDEKYEVINAINSLMLDAKWSDQESASANEVVSTARDQSLKKLVKEKLHHWLICKINDDGKGPNVLCKEGQGVIHLVAALGYDWAIRPIHSAAVRIQNKFRGWKGRKEFMIIRQRIVKLQAHVRGHQVRRNYRKVVWTVGIVEKVILRWRRKRPGLRGFRPEKQLEGPSEIQPAKVEDEYDFLHDGRRQAEARLQRALARVHSMSQYPEAREQYHRLTTCVAEMKQPMMMQDEMLSEAAG

SEQ ID NO: 69859 - protein, 51 aa, Setaria italica
  Transcript Sequence Number=SeqID_3885
  Gene Ontology: Mol. function=structural constituent of ribosome; Cellular component=ribonucleoprotein complex; Biological process =translation
  Homolog annotation: Hit_ID=P51426; Match level="QueryCoverage=100%, HitCoverage=100%, E-value=5e-21, Identity=98%"; Hit description=60S ribosomal protein L39
  Pfam annotation: Domain name=Ribosomal_L39; Domain location=9-51; Score=100.6; E_value=5.4e-27; Accession=PF00832.12; Description =Ribosomal L39 protein
MPSHKTFQIKKKLAKKMRQNRPIPYWIRMRTDNTIRYNAKRRHWRRTKLGF

SEQ ID NO: 69860 - protein, 51 aa, Setaria italica
  Transcript Sequence Number=SeqID_3886
  Gene Ontology: Mol. function=structural constituent of ribosome; Cellular component=ribonucleoprotein complex; Biological process =translation
  Homolog annotation: Hit_ID=P51426; Match level="QueryCoverage=100%, HitCoverage=100%, E-value=2e-21, Identity=100%"; Hit description=60S ribosomal protein L39
  Pfam annotation: Domain name=Ribosomal_L39; Domain location=9-51; Score=100.6; E_value=5.4e-27; Accession=PF00832.12; Description =Ribosomal L39 protein
MPSHKTFRIKKKLAKKMRQNRPIPYWIRMRTDNTIRYNAKRRHWRRTKLGF

SEQ ID NO: 69861 - protein, 92 aa, Setaria italica
  Transcript Sequence Number=SeqID_3887
  Gene Ontology: Mol. function=shikimate 5-dehydrogenase activity; Cellular component=cytoplasm; Biological process=oxidation reduction
  Homolog annotation: Hit_ID=B6TSW1; Match level="QueryCoverage=100%, HitCoverage=17%, E-value=5e-46, Identity=95%"; Hit description =Shikimate dehydrogenase
LANTTAIGMHPNVNDTPLSKQALKSYAVVFDAVYTPKETRLLREAAECGATVVSGLEMFIRQAMGQFEHFTGMPVDDDKFRAITSSLDNPNT

SEQ ID NO: 69862 - protein, 486 aa, Setaria italica
  Transcript Sequence Number=SeqID_3888
  Gene Ontology: Mol. function=3-dehydroquinate dehydratase activity; Cellular component=cytoplasm; Biological process=aromatic amino acid family biosynthetic process
  Homolog annotation: Hit_ID=B6TSW1; Match level="QueryCoverage=100%, HitCoverage=89%, E-value=0.0, Identity=87%"; Hit description =Shikimate dehydrogenase
  Pfam annotation: Domain name=DHquinase_I; Domain location=2-186; Score=141.2; E_value=3.3e-39; Accession=PF01487.7; Description=Type I 3-dehydroquinase
  Pfam annotation: Domain name=Shikimate_DH; Domain location=296-425; Score=104.8; E_value=2.9e-28; Accession=PF01488.12; Description =Shikimate  quinate 5-dehydrogenase
  Pfam annotation: Domain name=Shikimate_dh_N; Domain location=201-281; Score=145.0; E_value=2.3e-40; Accession=PF08501.3; Description =Shikimate dehydrogenase substrate bind
  Pfam module annotation: Pfam domain module=DHquinase_I::Shikimate _DH::Shikimate_dh_N; Domain location=2-186::296-425::201-281
GFAPRRDLPVILAEPRPLPALVTYRPKWEGGEYEGDDEPRFEALMLAMELGAEYVDIELKVADKFMRLLSGKKPENCKLIVSSHNYENTPSAEELANLVAQIKATGADIVKIATTATDIVDVARMFQILVHCQEKQVPIIGLVMNDRGFISRVLCPKYGGYLTFGSLEKGKESAAAQPTVADLINVYNIRQIGPDTKVFGIIGKPVGHSKSPILHNEAFRSVGFNAVYVPFLVDDLAKFLNTYSSPDFAGFSCTIPHKEAAVRCCDEVDPIARDIGAVNTMVRRPDGKLVGYNTDYVGAISAIEDGIRASQDPSTSPLAGRLFVVIGAGGAGKALAYGAKEKGARVVIANRTFARAQELANLIGGPALTLADLENYHPEEGMILANTTAIGMHPNVNDTPLSKQALKSYAVVFDAVYTPKETRLLREAAECGATVVSGLEMFIRQAMGQFEHFTGMPAPDRLMLDDDKFRAITSSLDNPNTMKPRL

SEQ ID NO: 69863 - protein, 122 aa, Setaria italica
  Transcript Sequence Number=SeqID_3889
  Gene Ontology: Mol. function=signal transducer activity; Cellular component=plasma membrane; Biological process=response to light stimulus
  Homolog annotation: Hit_ID=B6SX07; Match level="QueryCoverage=98%, HitCoverage=21%, E-value=4e-57, Identity=84%"; Hit description =Protein binding protein
RARFLRMTEAVAKGNLAAKLESFFDSCVLHGWKDSVAALQAAWRVSGWSESRVVQPCVDSIVEKILTPPSKVTWSFTYTRPGYTSRKSSVPKDWWTEDVSELDIEVFRSVLSTVRASRLLPR

SEQ ID NO: 69864 - protein, 97 aa, Setaria italica
  Transcript Sequence Number=SeqID_3890
  Gene Ontology: Mol. function=nucleoside diphosphate kinase activity; Cellular component=cytoplasm; Biological process=nucleotide metabolic process
  Homolog annotation: Hit_ID=P93554; Match level="QueryCoverage=98%, HitCoverage=63%, E-value=9e-41, Identity=84%"; Hit description =Nucleoside diphosphate kinase 1
  Pfam annotation: Domain name=NDK; Domain location=1-97; Score=121.1; E_value=3.6e-33; Accession=PF00334.11; Description=Nucleoside diphosphate kinase
FYLKALKLVNVERCFAEKHYSDLSAKPFFQGLVDYIISGPVVAMVWEGKSVVTTGRKIIGATNPLASEPGTIRGDFAVDIGRNLLGSTLNAVTSMNI

SEQ ID NO: 69865 - protein, 149 aa, Setaria italica
  Transcript Sequence Number=SeqID_3891
  Gene Ontology: Mol. function=nucleoside diphosphate kinase activity; Cellular component=chloroplast; Biological process=nucleotide metabolic process
  Homolog annotation: Hit_ID=P93554; Match level="QueryCoverage=100%, HitCoverage=100%, E-value=1e-78, Identity=95%"; Hit description =Nucleoside diphosphate kinase 1
  Pfam annotation: Domain name=NDK; Domain location=2-135; Score=348.4; E_value=1.3e-101; Accession=PF00334.11; Description=Nucleoside diphosphate kinase
MEHTFIMIKPDGVQRGLIGEIISRFEKKGFYLKALKLVNVERCFAEKHYSDLSAKPFFQGLVDYIISGPVVAMVWEGKSVVTTGRKIIGATNPLASEPGTIRGDFAVDIGRNVIHGSDSIESATKEIALWFPEGLANWQSSQHPWIYEK

SEQ ID NO: 69866 - protein, 97 aa, Setaria italica
  Transcript Sequence Number=SeqID_3892
  Gene Ontology: Mol. function=UDP-glucose 4-epimerase activity; Cellular component=integral to membrane; Biological process =galactose metabolic process
  Homolog annotation: Hit_ID=Q8H930; Match level="QueryCoverage=100%, HitCoverage=23%, E-value=6e-44, Identity=84%"; Hit description =Probable UDP-arabinose 4-epimerase 1
  Subcellular localization annotation: CTP_CleavageSite=49; ConfidenceScore=5.07e-01
MLPNTRGRPQQRPPRSWSFSEMVDFSDPKRRPRYLSKVIMVALLTAMCVVMLTQPPCHRRTPSVFSVHQPGVTHVLVTGGAGYIGSHAALRLLKDPF

SEQ ID NO: 69867 - protein, 327 aa, Setaria italica
  Transcript Sequence Number=SeqID_3893
  Gene Ontology: Mol. function=protein binding; Cellular component =nucleus; Biological process=sorocarp development
  Homolog annotation: Hit_ID=B6T9T8; Match level="QueryCoverage=89%, HitCoverage=96%, E-value=1e-140, Identity=80%"; Hit description=Set1 complex component swd2
  Pfam annotation: Domain name=WD40; Domain location=107-145; Score =31.9; E_value=2.5e-06; Accession=PF00400.24; Description=WD domain, G-beta repeat
  Pfam annotation: Domain name=WD40; Domain location=19-58; Score=23.4; E_value=0.00096; Accession=PF00400.24; Description=WD domain, G-beta repeat
  Pfam annotation: Domain name=WD40; Domain location=237-275; Score =18.0; E_value=0.041; Accession=PF00400.24; Description=WD domain, G -beta repeat
  Pfam module annotation: Pfam domain module=WD40::WD40::WD40; Domain location=107-145::19-58::237-275
MTSPPRVSMEITDEMLKSMEVGLAFRDYNGRISSMDFHSKATNYLVTASDDESIRLYDTQNALCLKTINSKKYGVELVCFTDNPGIVLYSSKNGWDESLRLLSLNDNRFLRYFKGHLDRVVCISFCSEKENFLSGSIDRTVLLWDQRAEKSQGLLRVQGRPAVSYDDQGMVFAVAYGGHIRMFDARKFEKGPFEIFSIGNDDSEAHVIKFSSDGRRILVTTKAGRVHVLDSFHGSSIASYNVKPVVTNSTLEASFSPDGNHIISGSGDGSVYAWNVRSGKVARWGSTDNEPPLVRWAPGSLMFVTGSSELSCWVPDLSKLGSFTVTK

SEQ ID NO: 69868 - protein, 55 aa, Setaria italica
  Transcript Sequence Number=SeqID_3894
GKLHTQLFSPEHELPGSLKDGILHLKQDLEELNSFMVDLSGLGRPNSYGSKSLDE

SEQ ID NO: 69869 - protein, 211 aa, Setaria italica
  Transcript Sequence Number=SeqID_3895
  Gene Ontology: Mol. function=catalytic activity
  Homolog annotation: Hit_ID=B9FUR1; Match level="QueryCoverage=66%, HitCoverage=31%, E-value=7e-15, Identity=40%"; Hit description =Superoxide dismutase [Cu-Zn]
DAAAEEEDPSHPQDFTKEGLDAKEVVLCLSKSIVSLVSSVDGKPLFGCTGTVVNHVGSETWILTSATLVRKPGTDHDAYKADEVKIEVLLDNKRSINGRLAMCNLQYNIAVVTIELQFGLPIVALNDPPEYYSILGRPVVAVGRDSKSQVLLVRHGNMIRKRSKLDCSELLLCTCPVSKTFIGGLVMDFERRIIGIFFFGEDTTPVMPIEI

SEQ ID NO: 69870 - protein, 58 aa, Setaria italica
  Transcript Sequence Number=SeqID_3896
TDPSTLTYIPHVSQLEPAIYISIGPVLQHGSFHVPSQTDIIGCIIAIRTQSIVKSYKI

SEQ ID NO: 69871 - protein, 129 aa, Setaria italica
  Transcript Sequence Number=SeqID_3897
  Gene Ontology: Mol. function=glucose-6-phosphate dehydrogenase activity; Cellular component=cytoplasm; Biological process =carbohydrate metabolic process
  Homolog annotation: Hit_ID=B9FFT3; Match level="QueryCoverage=100%, HitCoverage=27%, E-value=2e-53, Identity=79%"; Hit description =Glucose-6-phosphate 1-dehydrogenase
  Pfam annotation: Domain name=G6PD_N; Domain location=7-129; Score =104.7; E_value=3.2e-28; Accession=PF00479.14; Description=Glucose-6 -phosphate dehydrogenase, NAD bindi
KGCLSIVVLGASGDLAKKKTFPALYHLFDQGFIQSGEVHIFGYARSNLSDDGLRERIRGYLKGAPEEDVSEFLQLIKYVSGSYDNGEGFEKLNKAISEYEASSKSESYRRLFYLALPPSVYPSVCKMIR

SEQ ID NO: 69872 - protein, 106 aa, Setaria italica
  misc_feature (78)..(78): Xaa can be any naturally occurring amino acid
  Transcript Sequence Number=SeqID_3898
  Gene Ontology: Mol. function=glucose-6-phosphate dehydrogenase activity; Cellular component=cytoplasm; Biological process =carbohydrate metabolic process
  Homolog annotation: Hit_ID=B9FFT3; Match level="QueryCoverage=66%, HitCoverage=14%, E-value=9e-33, Identity=95%"; Hit description =Glucose-6-phosphate 1-dehydrogenase
  Pfam annotation: Domain name=G6PD_N; Domain location=3-85; Score= -26.6; E_value=5e-07; Accession=PF00479.14; Description=Glucose-6 -phosphate dehydrogenase, NAD bindi
YIQIPNVEWHTTVLNCTTTSIEFGLDISVVHAASHPGWTRVIVEKPFGKDLDSAEELSAQLGELFEEHQLYRIDHYLXGKELVQNLLVLRFANRLFLPLWNRDNID

SEQ ID NO: 69873 - protein, 149 aa, Setaria italica
  Transcript Sequence Number=SeqID_3899
  Gene Ontology: Mol. function=glucose-6-phosphate dehydrogenase activity; Cellular component=cytoplasm; Biological process =carbohydrate metabolic process
  Homolog annotation: Hit_ID=B9FFT3; Match level="QueryCoverage=87%, HitCoverage=27%, E-value=2e-53, Identity=80%"; Hit description =Glucose-6-phosphate 1-dehydrogenase
  Pfam annotation: Domain name=G6PD_N; Domain location=33-149; Score =84.8; E_value=3e-22; Accession=PF00479.14; Description=Glucose-6 -phosphate dehydrogenase, NAD bindi
MSGGSSPSSRRSSFNSLSRDLDLPSEQGCLSIVVLGASGDLAKKKTFPALYHLFDQGFIQSGEVHIFGYARSNLSDDGLRERIRGYLKGAPEEDVSEFLQLIKYVSGSYDNGEGFEKLNKAISEYEASSKSESYRRLFYLALPPSVYPS

SEQ ID NO: 69874 - protein, 215 aa, Setaria italica
  Transcript Sequence Number=SeqID_3900
  Gene Ontology: Mol. function=glucose-6-phosphate dehydrogenase activity; Cellular component=cytoplasm; Biological process =carbohydrate metabolic process
  Homolog annotation: Hit_ID=Q9XJ53; Match level="QueryCoverage=100%, HitCoverage=89%, E-value=1e-111, Identity=90%"; Hit description =Glucose-6-phosphate 1-dehydrogenase (Fragment)
  Pfam annotation: Domain name=G6PD_C; Domain location=1-215; Score =378.7; E_value=1e-110; Accession=PF02781.8; Description=Glucose-6 -phosphate dehydrogenase, C-terminal domain
LQVFCLVAMEKPVSLKPEHIRDEKVKVLQSVNPIKPEEVVLGQYDGYKDDPTVPDDSNTPTFASVVLRVHNERWEGVPFILKAGKALSSKKAEVRVQFKDVPGDIFKCKKQGRNEFVIRLQPSEAMYMKLTVKKPGLEMATEQSELDLSYGMRYQNVKIPEAYERLILDTIRGDQQHFVRRDELKAAWQIFTPLLHDIDEGKMKAVQYQPGSRGP

SEQ ID NO: 69875 - protein, 143 aa, Setaria italica
  Transcript Sequence Number=SeqID_3901
  Gene Ontology: Mol. function=glucose-6-phosphate dehydrogenase activity; Cellular component=cytoplasm; Biological process =carbohydrate metabolic process
  Homolog annotation: Hit_ID=B9FFT3; Match level="QueryCoverage=96%, HitCoverage=29%, E-value=2e-73, Identity=93%"; Hit description =Glucose-6-phosphate 1-dehydrogenase
  Pfam annotation: Domain name=G6PD_C; Domain location=2-134; Score =37.5; E_value=2.2e-17; Accession=PF02781.8; Description=Glucose-6 -phosphate dehydrogenase, C-terminal domain
PGEGKNIFKCKKQGRNEFVIRLQPSEAMYMKLTVKKPGLEMATEQSELDLSYGMRYQNVKIPEAYERLILDTIRGDQQHFVRRDELKAAWQIFTPLLHDIDEGKMKAVQYQPGSRGPKEADELSARVGYVQTHGYIWVPPTLA

SEQ ID NO: 69876 - protein, 76 aa, Setaria italica
  Transcript Sequence Number=SeqID_3902
  Gene Ontology: Mol. function=heat shock protein binding; Biological process=response to stress
  Homolog annotation: Hit_ID=B6TDF0; Match level="QueryCoverage=81%, HitCoverage=32%, E-value=2e-15, Identity=65%"; Hit description=DnaJ -like protein
  Pfam annotation: Domain name=DnaJ; Domain location=11-76; Score=85.9; E_value=1.4e-22; Accession=PF00226.23; Description=DnaJ domain
MQSSSQARSSSYYAVLGVHPGASATEIRSAYHRLAMRWHPDKIASGRAADPARAEEAKAMFQQIHEAYQVLSDEKR

SEQ ID NO: 69877 - protein, 85 aa, Setaria italica
  Transcript Sequence Number=SeqID_3903
  Subcellular localization annotation: CTP_CleavageSite=44; ConfidenceScore=5.41e-01
MAMMGAAAAASTCCIRSCASPSLSRSRVRAQATSWAGGAEALVRSGAVKAVRPKDAAEALGAEGFRLLDVRPPWELARASVRGSA

SEQ ID NO: 69878 - protein, 110 aa, Setaria italica
  Transcript Sequence Number=SeqID_3904
  Homolog annotation: Hit_ID=B9SLS9; Match level="QueryCoverage=90%, HitCoverage=14%, E-value=3e-33, Identity=65%"; Hit description =Pentatricopeptide repeat-containing protein, putative
SLFVVSKLTVRVCYMSMRRSLVSRKNPVGEVLKVLLAMDEAGVKPERSDYERLVWACTGEEHYTIGKELYQRIRELNGEISLSVCNHLIWLMGKSKKWWAALEIYEVFVG

SEQ ID NO: 69879 - protein, 101 aa, Setaria italica
  Transcript Sequence Number=SeqID_3905
  Gene Ontology: Mol. function=GTPase activator activity; Cellular component=nuclear pore; Biological process=intracellular transport
  Homolog annotation: Hit_ID=B6T8F4; Match level="QueryCoverage=100%, HitCoverage=45%, E-value=1e-30, Identity=72%"; Hit description=Ran -binding protein 1
  Pfam annotation: Domain name=Ran_BP1; Domain location=46-101; Score =5.1; E_value=4.2e-08; Accession=PF00638.10; Description=RanBP1 domain
MADKEPVAERPGAAEEEEDASAAAAAGEEEDTGAQVAPIVRLEEVAVTTGEEDEDVLLDMKAKLYRFDKDGNQWKERGTGTVKLLKHKETSKVRLVMRQAK

SEQ ID NO: 69880 - protein, 282 aa, Setaria italica
  Transcript Sequence Number=SeqID_3906
  Gene Ontology: Mol. function=nucleic acid binding; Cellular component= nuclear pore; Biological process=intracellular transport
  Homolog annotation: Hit_ID=B6T8F4; Match level="QueryCoverage=67%, HitCoverage=86%, E-value=9e-78, Identity=76%"; Hit description=Ran -binding protein 1
  Pfam annotation: Domain name=RRM_1; Domain location=10-80; Score =99.8; E_value=9.2e-27; Accession=PF00076.14; Description=RNA recognition motif. (a.k.a. RRM, RBD, o
  Pfam annotation: Domain name=Ran_BP1; Domain location=107-228; Score =182.8; E_value=9.5e-52; Accession=PF00638.10; Description=RanBP1 domain
  Pfam module annotation: Pfam domain module=RRM_1::Ran_BP1; Domain location=10-80::107-228
MAAADVEYRCFVGGLAWATDSESLQLAFASYGDVVDSKVITDRETGRSRGFGFVTFSTEQSMLEAIENMNGKELDGRNITVNQAAAAGEEEDTGAQVAPIVRLEEVAVTTGEEDEDVLLDMKAKLYRFDKDGNQWKERGTGTVKLLKHKETSKVRLVMRQAKTLKICANHLVVSSTKMQEHAGSDKSCVWHAVDFADGELKEEMFAIRFGSVENCKKFKDLIDEIAESLTKNEGKENEDSSSTAGLLEKLSVSESKSEESVKAESTESGKEAESKAGATPSE

SEQ ID NO: 69881 - protein, 103 aa, Setaria italica
  Transcript Sequence Number=SeqID_3907
TTGIKNESTHAVWIHSSCASLLAHIASKLAIHIFAAAPELDRGEACTACLNYTRSSFNFQELFITRSRSLARTPHPDDTITIPRLFFERELVARRAWRRRRRP

SEQ ID NO: 69882 - protein, 110 aa, Setaria italica
  Transcript Sequence Number=SeqID_3908
QRQIKGAPDDWVDLKLQVAVKTRLVGILMAIMPALIKALIQGRQVVVAPFKTESTSVKGPIDAETAAFQLVWTTASVSWRLYCTPPSTFKGCCLSTIEKLKKPAVVASCT

SEQ ID NO: 69883 - protein, 219 aa, Setaria italica
  Transcript Sequence Number=SeqID_3909
  Subcellular localization annotation: CTP_CleavageSite=25; ConfidenceScore=5.13e-01
SNHSHGNEQTSSVSVVISRKTIPWKCAPKRNSKFRPFNPPPVLYIQGGGGPVERQKHQQKLQCYSLNKPSISRFESKNGGEDDEGGGSCRQPARPAAVRPAGASVRVRHVKYKYCKCFRKCYTPCRNNDHQPRPVCKIRCGGKCIFHHEVTAASAAATGHAERSAWHPSAAARTPPQWWRHGCRADRRRRGGLRRWLHGLLREAEGQARLGTADREVDA

SEQ ID NO: 69884 - protein, 287 aa, Setaria italica
  misc_feature (240)..(240): Xaa can be any naturally occurring amino acid
  Transcript Sequence Number=SeqID_3910
  Gene Ontology: Mol. function=nucleotide binding; Biological process =defense response
  Homolog annotation: Hit_ID=B6RJZ2; Match level="QueryCoverage=94%, HitCoverage=55%, E-value=1e-16, Identity=30%"; Hit description =Resistance gene candidate NBS-type protein (Fragment)
DSRAHLSRRWGMFKDKELAYLVSRLKDATYDAEDLLRELDDQVLRKRIEDADRSRAGQLLSSSLNLAKTLVRRSKTRIRETQDRLEKVLAEIEWMLNHMGLMSVELSQNMPETSSVISAPEVVGRDGERDALIEMLGVMIGREVQQDQVIKLLGVPLAGNRGGTGRTAGSNGKRAAASNGVASTSRAKQPKGNGGRAGLAETNFTNNVSVISIVGIGGVGKTTLAQFIYNDPRVKHHFGXMIWVCVSDFFDKRRITKEIIESIPGEEYNSSSSLNALQIELMKRLKM

SEQ ID NO: 69885 - protein, 81 aa, Setaria italica
  Transcript Sequence Number=SeqID_3911
  Gene Ontology: Mol. function=protein kinase activity; Cellular component=chloroplast; Biological process=protein amino acid phosphorylation
  Homolog annotation: Hit_ID=B6U7F0; Match level="QueryCoverage=100%, HitCoverage=12%, E-value=6e-38, Identity=90%"; Hit description =Protein kinase domain containing protein
DSQPTDAFEYMLLEKDPDIYRMVFSGPSQISPWIDPSVLNLKHRIGRGPFGDVWIATHHQWTEDYDRYHEVAVKMLHPIKE

SEQ ID NO: 69886 - protein, 69 aa, Setaria italica
  Transcript Sequence Number=SeqID_3912
  Subcellular localization annotation: CTP_CleavageSite=37; ConfidenceScore=5.09e-01
ASCPILSPRLLFSSVAFVILLFMIINKYFGSATYSALATVLSPKRLRSTNDSIVCTTSNMISISLDIVL

SEQ ID NO: 69887 - protein, 137 aa, Setaria italica
  Transcript Sequence Number=SeqID_3913
  Gene Ontology: Mol. function=carbamoyl-phosphate synthase activity; Cellular component=chloroplast; Biological process=nitrogen compound metabolic process
  Homolog annotation: Hit_ID=Q8L6J9; Match level="QueryCoverage=87%, HitCoverage=9%, E-value=1e-49, Identity=80%"; Hit description =Putative carbamoyl phosphate synthase large subunit
FVSKAIGHPLAKYASLVMSGVTLHELGFTKEVVPKHVSVKEAVLPFEKFQGCDILLGPEMRSTGEVMGIDYEFSGAFAKAQIAAGQKLTLSGTVFLSLNDLTKRHLAEIGRGFQDLGFSISLAFGRPSCIFRTGSTG

SEQ ID NO: 69888 - protein, 331 aa, Setaria italica
  Transcript Sequence Number=SeqID_3914
  Gene Ontology: Mol. function=oxidoreductase activity; Cellular component=chloroplast envelope
  Homolog annotation: Hit_ID=B6TB75; Match level="QueryCoverage=100%, HitCoverage=87%, E-value=0.0, Identity=96%"; Hit description=Aldo -keto reductase/ oxidoreductase
  Pfam annotation: Domain name=Aldo_ket_red; Domain location=9-319; Score=187.0; E_value=5.4e-53; Accession=PF00248.13; Description =Aldoketo reductase family
EGEGKVRLGESGVAVTKLGIGAWSWGDTTYWNDSEWDERRLKEAQEAFDSSIDNGMTFFDTAEVYGTALMGAVNSESLLGGFIKERQQKEQIEVAVATKFAALPWRFGRGSVLSALKKSLDRLGLPSVELYQLHWPGIWGNEAYLDGLADAYEQGLVKAVGVSNYNEKRLRDAHARLKKRGVPLAANQVNYSLIYRTPELNGVKAACDELGITLIAYSPIAQGVLTGKYTPENPPTGPRANTYTPEFLTKLQPLMNRIKEIGASYGKNPTQVSLNWLTCQGNVVPIPGAKNATQAKEFAGALGWSLTGDEVEELRTLAREIKGIKMPIEES

SEQ ID NO: 69889 - protein, 123 aa, Setaria italica
  Transcript Sequence Number=SeqID_3915
GTTRCWIHMGAYAAMLNGMQWTENGLLGTAAAAAAAAATTEASSRYRTAAASSTTAPSQLAQLYCYFGMQPNGWAAQAAQLQLQPLNELQQSVIMGPVNFFYECRQYGGCARRTGCSRRRTAT

SEQ ID NO: 69890 - protein, 138 aa, Setaria italica
  Transcript Sequence Number=SeqID_3916
  Gene Ontology: Mol. function=metal ion binding; Cellular component =nucleus
  Homolog annotation: Hit_ID=B6UGC3; Match level="QueryCoverage=99%, HitCoverage=63%, E-value=7e-73, Identity=93%"; Hit description=DNA binding protein
  Pfam annotation: Domain name=PHD; Domain location=62-111; Score=54.6; E_value=3.7e-13; Accession=PF00628.21; Description=PHD-finger
QRKLFLSDHFDLQSAHTIEGKCVVHSFKNYTKLDNVGPEDFFCRFEYKAATGSFTPDRVAVYCKCEMPYNPDDLMVQCDACKDWFHPSCMGMTIEQAKKLDHFVCSDCVKENGSKRLSNAYATSPNSEPKAESKRQRR

SEQ ID NO: 69891 - protein, 149 aa, Setaria italica
  misc_feature (123)..(123): Xaa can be any naturally occurring amino acid
  Transcript Sequence Number=SeqID_3917
  Homolog annotation: Hit_ID=Q10AI1; Match level="QueryCoverage=84%, HitCoverage=33%, E-value=4e-51, Identity=75%"; Hit description =Transducin family protein, putative, expressed
SPAAPPPPERSRKEEKKPKRKIQEKEHQNLIPSVKKSSATVLKFQGGTLVSSQHKRKLRCLELCPANDQLVVTSALDGLVTLWQVEPRGPSISFRGKTDCFSPKHRWPEDIAWHPDGDTIFAXVYTADNGDSQVSMTNLISGQRKVTSY

SEQ ID NO: 69892 - protein, 352 aa, Setaria italica
  Transcript Sequence Number=SeqID_3918
  Gene Ontology: Mol. function=transferase activity
  Homolog annotation: Hit_ID=Q5N724; Match level="QueryCoverage=100%, HitCoverage=68%, E-value=1e-172, Identity=84%"; Hit description =Putative ceramide glucosyltransferase
IGVEKMHKDTKYVLFLDDDVRLHPGTIGALTKEMEKNPEIFIQTGYPLDLPSGSLGSYCIYEYHMPCSMGFATGGKTFFLWGGCMMMHADDFRQDRYGVVSGLRDGGYSDDMTLAAIAGQHKRLISSPPVAVFPHPLASDLSFSRYWNYLRKQTFVLESYVSNVNWLMNRALFTSHCYLSWGFVWPYIMALVHLLTALRAPYSKIVKEASDSSWGLHLVGLLFICTLIELVSMWNLTKVEIQLCNMLSPEGPNVSLDSYNWGLVFIAVLVDNFLYPISAFRSHFSQSINWSGIRYYLRDGKISKIERENRSKYTDLGGKHLYGKRTYPSNKSLLGYLSRTLAQWHQPKKYDV

SEQ ID NO: 69893 - protein, 238 aa, Setaria italica
  Transcript Sequence Number=SeqID_3919
  Gene Ontology: Mol. function=transferase activity
  Homolog annotation: Hit_ID=Q5N724; Match level="QueryCoverage=86%, HitCoverage=40%, E-value=1e-108, Identity=89%"; Hit description =Putative ceramide glucosyltransferase
MAAMEAAADAMLAAASRAFSSTSAIAIQIQGCVICLVLALGWAAASIVRKRVILNMRRKQLDGNSFAFLCDDIDELEHSVQENLPRVSVIMPLKGFGEHNLQNWRTQITSLYGGPLEFLFVVESKEDPAYHAVSRLISEYKDNLEAKVVVAGFSTTCSQKIHNQLIGVEKMHKDTKYVLFLDDDVRLHPGTIGALTKEMEKNPEIFIQTGYPLDLPSGSLGSYCIYEYHMVCWLLIKT

SEQ ID NO: 69894 - protein, 62 aa, Setaria italica
  Transcript Sequence Number=SeqID_3920
LSRKALRSLPLLIMWEVWKERNARIFNRHETSPTTLMAKIKDEASAWLLAGAKDLALLLTRE

SEQ ID NO: 69895 - protein, 179 aa, Setaria italica
  Transcript Sequence Number=SeqID_3921
  Gene Ontology: Mol. function=protein serine/threonine kinase activity; Biological process=protein amino acid phosphorylation
  Homolog annotation: Hit_ID=Q94CU5; Match level="QueryCoverage=100%, HitCoverage=18%, E-value=1e-106, Identity=98%"; Hit description =Serine/threonine-protein kinase Nek5
  Pfam annotation: Domain name=Pkinase; Domain location=8-179; Score =69.8; E_value=1e-17; Accession=PF00069.17; Description=Protein kinase domain
  Pfam annotation: Domain name=Pkinase_Tyr; Domain location=8-179; Score=-71.1; E_value=5.3e-09; Accession=PF07714.9; Description =Protein tyrosine kinase
  Pfam module annotation: Pfam domain module=Pkinase::Pkinase_Tyr; Domain location=8-179::8-179
MESRMDQYEVMEQIGRGAFGAAILVNHKTEKKKYVLKKIRLARQTERCRKSAHQEMALIARLQHPYIVEFKEAWVEKGCYVCIVTGYCEGGDMAELMKKANGTYFPEEKLLKWFAQLALAVDYLHSNFVLHRDLKCSNIFLTKEQDIRLGDFGLAKTLKADDLTSSVVGTPNYMCPELL

SEQ ID NO: 69896 - protein, 60 aa, Setaria italica
  Transcript Sequence Number=SeqID_3922
FNQIRFYFNLSMQLKVETETNLSFSIYAALIHKYEHYLLVTMNIKRGEFGNESSSKFSII

SEQ ID NO: 69897 - protein, 166 aa, Setaria italica
  Transcript Sequence Number=SeqID_3923
SHFFQCFEHPLYDHESNAYIIPWVLIIPSCGSIDLNVALQSLDSSDDYTPRKVVPLIIDSKTPWQLGFQPSNAYLNSSLLMEKMVLVDDGVNDRMPCFIHYIPKYIEVLTVAVKLQFIGQSEMAMDLFDAILRRFKQLEDALCVGQPCACWRHFVESDFVACSLLL

SEQ ID NO: 69898 - protein, 97 aa, Setaria italica
  Transcript Sequence Number=SeqID_3924
  Gene Ontology: Mol. function=calcium ion binding; Cellular component =oxygen evolving complex; Biological process=photosynthesis
  Homolog annotation: Hit_ID=O80634; Match level="QueryCoverage=75%, HitCoverage=30%, E-value=2e-18, Identity=53%"; Hit description=PsbP -like protein 2, chloroplastic
DIRDLGPMDEAIFNLVNNVMPAPNQIPSIYDMQERTVDGKNYWTFEYDLEAPGYGVSAFATVAIGNGRMMPIIKLQNLGRLVCSRLNKRGWNSVLFL

SEQ ID NO: 69899 - protein, 232 aa, Setaria italica
  Transcript Sequence Number=SeqID_3925
  Gene Ontology: Mol. function=calcium ion binding; Cellular component =oxygen evolving complex; Biological process=photosynthesis
  Homolog annotation: Hit_ID=B9T157; Match level="QueryCoverage=70%, HitCoverage=90%, E-value=2e-57, Identity=63%"; Hit description =Thylakoid lumenal 25.6 kDa protein, chloroplast, putative
  Pfam annotation: Domain name=PsbP; Domain location=46-228; Score =155.4; E_value=1.7e-43; Accession=PF01789.8; Description=PsbP
  Subcellular localization annotation: CTP_CleavageSite=72; ConfidenceScore=5.68e-01
MASLQNLICSVSKQLVAPNYAVTAKLNGAPPSVVSASSSGASSDQKNVTKRQLALLGAGVLATGLLKTSSAIAEEVPKNYKSYVDAKDGYSYLYPAEWRDFDFLGHDSAFKDRNLALQCVRVGFIPTEKTDIRDLGPMDEAIFNLVNNVYAAPNQIPSIYDMQERTVDGKNYWTFEYDLEAPGYGVSAFATVAIGNGRYYTLIVTANERRWSRLRNRLKVVADSFKISDLTA

SEQ ID NO: 69900 - protein, 68 aa, Setaria italica
  Transcript Sequence Number=SeqID_3926
ILLDLGRELFSFALVWRNRCFGLLVQPIVFLKPAKYMVGYAILSADYALPIDDDVYESYEIVESLNAL

SEQ ID NO: 69901 - protein, 171 aa, Setaria italica
  Transcript Sequence Number=SeqID_3927
  Gene Ontology: Mol. function=iron ion binding; Biological process =oxygen transport
  Homolog annotation: Hit_ID=B5TQZ1; Match level="QueryCoverage=100%, HitCoverage=100%, E-value=5e-88, Identity=88%"; Hit description =Truncated hemoglobin Hb2b
  Pfam annotation: Domain name=Bac_globin; Domain location=26-146; Score=198.2; E_value=2.2e-56; Accession=PF01152.13; Description =Bacterial-like globin
MQSLQDKASEWSGVAAADAFAIDDGNIFESLGGTPQPFVDLSTNFYTRVYEDEEEWFREIFAGSKKEDAIQNQYEFLIQRMGGPPLFSQRRGHPALIGRHRPFLVTHRAAERWLHHMQQALDTTESIDADSKTKMMNFFRHTAYFLVAGNEMTRQHSQGVACKHAASKPAE

SEQ ID NO: 69902 - protein, 254 aa, Setaria italica
  misc_feature (154)..(154): Xaa can be any naturally occurring amino acid
  Transcript Sequence Number=SeqID_3928
  Gene Ontology: Mol. function=zinc ion binding
  Homolog annotation: Hit_ID=Q6YVN1; Match level="QueryCoverage=94%, HitCoverage=21%, E-value=6e-51, Identity=43%"; Hit description =Putative far-red impaired response protein
  Pfam annotation: Domain name=MULE; Domain location=69-167; Score =87.5; E_value=4.6e-23; Accession=PF10551.1; Description=MULE transposase domain
MDANSLKQSDSQMEIRNTDIEITLEHVRRFQMEQPGFFYAIKTDDRNTVRSIFWTDARARLDYALYGDFISFDTSYTTREHNMLFAPLIGINGHGKAIVFGGLLENEMADKADTFSWLLRTFLDVMDGKKPTTIITDQGSAMTKSIAEVFPTVXHRFSMWHVMRKAREIFEDFMENGPVMEADLTCLIANCLTIEEFEDGWKTMLEKYDAPPNEDLNLMYQTRLMWVPVYFKHAFCPFIRSTGRSESTDTIFKE

SEQ ID NO: 69903 - protein, 85 aa, Setaria italica
  Transcript Sequence Number=SeqID_3929
NYCLWKVVPTLIYLSPLSHDGKMLLKFPNRFLSFLSLIFSRGLLHLSRNIAHPPTKVLTQFLHLYAFVLMIIRCDQGWPKQALLP

SEQ ID NO: 69904 - protein, 118 aa, Setaria italica
  Transcript Sequence Number=SeqID_3930
  Gene Ontology: Cellular component=plasma membrane
  Homolog annotation: Hit_ID=Q7XQX2; Match level="QueryCoverage=92%, HitCoverage=17%, E-value=1e-28, Identity=56%"; Hit description =OSJNBa0014K14.3 protein
PRAKSRYVIISISSELFGLKHFGKIYNFIALANPVGAFLFNTLAGYVYDLEVEKQKAGMVDTDIACHGPNCFRLTFYVLSGAACLGTLLSTVLTVRVRPVYQMLYAGGSFSQPRTSAH

SEQ ID NO: 69905 - protein, 415 aa, Setaria italica
  misc_feature (2)..(2): Xaa can be any naturally occurring amino acid
  Transcript Sequence Number=SeqID_3931
  Gene Ontology: Cellular component=plasma membrane
  Homolog annotation: Hit_ID=Q7XQX2; Match level="QueryCoverage=99%, HitCoverage=68%, E-value=1e-117, Identity=52%"; Hit description =OSJNBa0014K14.3 protein
  Pfam annotation: Domain name=Nodulin-like; Domain location=3-118; Score=-17.0; E_value=1.1e-09; Accession=PF06813.5; Description =Nodulin-like
AXAGILKGYSGLSAAVYTEIYTGVLGDSPINLLLLLTLGVPAICLLTMYFVRPCEPSLVETNAEQLHFLFAQIASILLGFYLVGATILDHVVTLNDIMNYSLLAIMVLLIFAPLAIPLKMTLCPKRKGPSDSSDNDHTESLLPSSSESNLGNFEEYDSTDIDILLAEGEGAIKPKRRRPRRGEDFRFREAILKADFWLLFAIYFVGVGSGITVLNNLAQIGIAAGAVDTTISLSVFSFCNFFGRLGGGAVSEYFVRARTLPRSVLIICTQVVMIITYLLFALGQRTTLYVSVALLGICYGVQFSVIISISSELFGLKHFGKIYNFIALANPVGAFLFNTLAGYVYDLEVEKQKAGMVDTDIACHGPNCFRLTFYVLSGAACLGTLLSTVLTVRVRPVYQMLYAGGSFSQPRTSAH

SEQ ID NO: 69906 - protein, 66 aa, Setaria italica
  Transcript Sequence Number=SeqID_3932
AAHSKYMLRTQDKVVLITTNCKHYLKLSSSNLMKRELPQVVAVSEHHYEGEKKLELQLKICTRSMS

SEQ ID NO: 69907 - protein, 191 aa, Setaria italica
  Transcript Sequence Number=SeqID_3933
  Gene Ontology: Mol. function=protein-S-isoprenylcysteine O -methyltransferase activity; Cellular component=integral to membrane; Biological process=C-terminal protein amino acid methylation
  Homolog annotation: Hit_ID=B6TWA2; Match level="QueryCoverage=100%, HitCoverage=100%, E-value=3e-98, Identity=88%"; Hit description =Protein-S-isoprenylcysteine O-methyltransferase
  Pfam annotation: Domain name=ICMT; Domain location=74-170; Score =147.0; E_value=5.8e-41; Accession=PF04140.6; Description =Isoprenylcysteine carboxyl methyltransferase (ICMT) family
MSAWRQAWQFAAALVFFHGSEYVLAAAFHGRRNVTATSLLISKQYVLAMSFAMLEHLTEILIFPEIKEYWFISNIGLLMVLIGEIVRKVAVVTAGRAFTHVIRIYHEDQHQLVTHGVYRFMRHPGYSGFLIWAVGTQVMLCNPVSTVAFILVLWRFFSKRIPYEEFFLRQFFGSEYEEYARRVHSGLPFIK

SEQ ID NO: 69908 - protein, 150 aa, Setaria italica
  misc_feature (136)..(136): Xaa can be any naturally occurring amino acid
  Transcript Sequence Number=SeqID_3934
  Gene Ontology: Mol. function=metalloendopeptidase activity; Cellular component=membrane; Biological process=proteolysis
  Homolog annotation: Hit_ID=B6T554; Match level="QueryCoverage=76%, HitCoverage=24%, E-value=3e-47, Identity=81%"; Hit description =Peptidase family M48 containing protein
  Subcellular localization annotation: CTP_CleavageSite=71; ConfidenceScore=5.05e-01
MNCLRNSRSVLSRLLRHRPHVAAPPAPAPVPQSPASRYYSFYASRILRHKPAVSTPPPQLPGPRHYYTSPRRQEVIHFSRRRGGSRWYHDQRKLTAAVLITGGGAVAFYFGHLEAVPYTNRTHLVILSPKLERQLXGESQFAELKEKFGP

SEQ ID NO: 69909 - protein, 690 aa, Setaria italica
  misc_feature (506)..(506): Xaa can be any naturally occurring amino acid
  misc_feature (660)..(660): Xaa can be any naturally occurring amino acid
  Transcript Sequence Number=SeqID_3935
  Gene Ontology: Cellular component=plasma membrane
  Homolog annotation: Hit_ID=Q10RF6; Match level="QueryCoverage=99%, HitCoverage=48%, E-value=1e-113, Identity=38%"; Hit description =Viral A-type inclusion protein repeat containing protein, expressed
  Pfam annotation: Domain name=M; Domain location=194-214; Score=2.5; E_ value=67; Accession=PF02370.8; Description=M protein repeat
  Pfam annotation: Domain name=M; Domain location=271-291; Score=0.5; E_ value=1.3e+02; Accession=PF02370.8; Description=M protein repeat
  Pfam annotation: Domain name=M; Domain location=362-382; Score=9.1; E_ value=9.2; Accession=PF02370.8; Description=M protein repeat
  Pfam annotation: Domain name=M; Domain location=47-67; Score=2.3; E _value=72; Accession=PF02370.8; Description=M protein repeat
  Pfam annotation: Domain name=M; Domain location=531-551; Score=4.9; E_ value=32; Accession=PF02370.8; Description=M protein repeat
  Pfam module annotation: Pfam domain module=M::M::M::M::M; Domain location=194-214::271-291::362-382::47-67::531-551
RKTTEKRMQAENALLSQGKELAQSHEEVQRLATEINMANEKLNDLKQTKEDLENTVCELKKDVESLTEQNHSSEMLIQKLHDEINTLKDSKNELQSEIQSLKSIISQLNTEKNAALLQYQQCVEQVSVLESQLSKLQLEVEETRQKVQLLTQDLEQEREEANSVRAQLQDECHRRTQTEATLLMTEGLHSQLQEKMKTLTQDLDGSTEKLSDLENNKLNLESTLKELKNTILDLNSEKDAALLEQQKSLEKASDLELELSKMQLEMEKHEQKIQLLELEIAQKNENVDSLELSLKDECEKRLQTQTSLVSMERMYSQSQEDVSRLHLEIEKQNGKLNELENLSSELKNTILLLNAEKDATLHENQQSSARISGLESELTALKAELEQVEGKVQILGQELKHKKEEADNLQISLQDEAQKRVEGESSLLMMTNLHSESQNEVNRLALEIEKLTGNLSQVENSKMDLENIVTKHTEEIHSLREQNLSTELMIKDLHRELEALKELNVXKLQTEMGLHIDEKEVLRRDFACQREEKENLEGIHHTLVDEMDALKTSAAINHKLIEELQIMNSKLKEVCAKNEVEKALLSEKLQEVEKLSEEYSLLENSLSDANAEMDALREKIKAFEASESSLKDIISCHVSEKAVLTSELEILGKSLSDVSXEKNSILDTSLSDIKTELEDLRTKLKSSEES

SEQ ID NO: 69910 - protein, 92 aa, Setaria italica
  Transcript Sequence Number=SeqID_3936
  Gene Ontology: Mol. function=protein serine/threonine kinase activity; Biological process=protein amino acid phosphorylation
  Homolog annotation: Hit_ID=B6SY15; Match level="QueryCoverage=100%, HitCoverage=14%, E-value=3e-44, Identity=94%"; Hit description =Protein kinase
EALSTAESPRSGVMEKFVLVGILCAHVMVALRPTIGDAVRMLEGDMDVPELPDRPLPYGHSLMFSEAGSNFSASPAFSGPLAPFIDNGDMLR

SEQ ID NO: 69911 - protein, 231 aa, Setaria italica
  misc_feature (56)..(56): Xaa can be any naturally occurring amino acid
  Transcript Sequence Number=SeqID_3937
GRGATTESIRNGNSSCLTMQEEHQQGECGQYPHPDYVSVDMVGERSLHDLPQDFFXNNEQYEMEQFPQNICESDSMQMGSPDQYCDDTSLSDFYMDVSSPESISCEQNQSEDICFKSESSTDSSPVPSSRNSTTEDADKYLGHISKQLLDSKSKFIPFNNQHPFKNIGYQKPPVLQKQYDYRSNSSSIQGNSSRGCFSINGASDLCVLEGNRNPASDPRLPIQGKFHHKFS

SEQ ID NO: 69912 - protein, 418 aa, Setaria italica
  Transcript Sequence Number=SeqID_3938
  Gene Ontology: Mol. function=oxidoreductase activity, acting on the aldehyde or oxo group of donors, NAD or NADP as acceptor; Cellular component=chloroplast; Biological process=amino acid biosynthetic process
  Homolog annotation: Hit_ID=C0PIR4; Match level="QueryCoverage=94%, HitCoverage=95%, E-value=0.0, Identity=90%"; Hit description=N -acetyl-gamma-glutamyl-phosphate reductase
  Pfam annotation: Domain name=Semialdhyde_dh; Domain location=77-214; Score=171.2; E_value=3e-48; Accession=PF01118.16; Description =Semialdehyde dehydrogenase, NAD binding domain
  Pfam annotation: Domain name=Semialdhyde_dhC; Domain location=231 -389; Score=62.8; E_value=1.3e-15; Accession=PF02774.10; Description =Semialdehyde dehydrogenase, dimerisation domain
  Pfam module annotation: Pfam domain module=Semialdhyde_dh::Semialdhyde _dhC; Domain location=77-214::231-389
  Subcellular localization annotation: CTP_CleavageSite=66; ConfidenceScore=5.67e-01
MASSTTALGGAAAPARAGLAPQNGILGSNSKPFAGVMLKKAQQVGPLSLRVRGSATSSPRKLFSPKAAAAKSGDGVQIAVLGASGYTGAEIVRILANHPQFHIKVMTADRKAGEQFGSVFPHLISQDLPRLVAIKDADFSGVDAVFCCLPHGTTQEIIKGLPQHLKIVDLSADFRLRDINEYAEWYGHSHRAPELQEESVYGLTELHRDDVRNARLVANPGCYPTSIQLPLVPLVKAKLIKLTNIIIDAKSGVSGAGRGAKEANLYTEIAEGIHAYGITSHRHVPEIEQGLTDAAESKVTISFTPHLMCMKRGMQSTMYVELASGVTANDLYEHLKSTYESEEFVKLLHGSSAPRTSHVAGSNYCIMNVFEDRIPGRAIIISVIDNLVKGASGQAVQNLNLMMGLPENMGLQYQPLFP

SEQ ID NO: 69913 - protein, 176 aa, Setaria italica
  Transcript Sequence Number=SeqID_3939
  Gene Ontology: Mol. function=hydrolase activity, acting on ester bonds; Biological process=lipid metabolic process
  Homolog annotation: Hit_ID=B6T774; Match level="QueryCoverage=100%, HitCoverage=49%, E-value=5e-86, Identity=83%"; Hit description =Anther-specific proline-rich protein APG
  Pfam annotation: Domain name=Lipase_GDSL; Domain location=1-167; Score=21.1; E_value=0.0002; Accession=PF00657.14; Description=GDSL -like LipaseAcylhydrolase
LAPVRPLQYDISAYVDFLVQQACDFIKQLYDRGARRIAILGLPPIGCLPSQRTLAGGLARDCDPARNRAARMFNSRLQGVVARLQGELRCQRIGYVDIYDVLHDMITDPCRYGFDVSTRGCCGTGDFEVSLLCNRLTAATCPDDRKYVFWDSFHPTERAYEIIVDYLFPRYVEKLL

SEQ ID NO: 69914 - protein, 118 aa, Setaria italica
  Transcript Sequence Number=SeqID_3940
  Pfam annotation: Domain name=DUF2423; Domain location=1-41; Score =8.7; E_value=0.07; Accession=PF10338.1; Description=Protein of unknown function (DUF2423)
MAKSLRSKREKRLRTLRREIAEPFYDKKEAAKLAAQAAALEAPPLPVRGPPPSQDAGSSRADNSASAMDVEMSDGGNSRSKSLLKPLGSISKKKVQLHLKIKKDKRKARKKGKFSFKK

SEQ ID NO: 69915 - protein, 123 aa, Setaria italica
  Transcript Sequence Number=SeqID_3941
  Gene Ontology: Mol. function=oxidoreductase activity; Cellular component=mitochondrial respiratory chain; Biological process =respiratory gaseous exchange
  Homolog annotation: Hit_ID=Q8GT27; Match level="QueryCoverage=90%, HitCoverage=32%, E-value=2e-53, Identity=86%"; Hit description =Alternative oxidase
  Pfam annotation: Domain name=AOX; Domain location=19-123; Score= -17.4; E_value=2.1e-12; Accession=PF01786.9; Description=Alternative oxidase
ACEAAAVVGCGERNVVSSYWGIEPSKLVSKDGVEWRWSCFRPWESYKPDTSIDLTRHHKPKVLLDKIAYWTVKSLRFPTDIFFQRRYGCRAMMLETVAAVPGMVGGMLLHLRSLRRFEHKTEQ

SEQ ID NO: 69916 - protein, 180 aa, Setaria italica
  Transcript Sequence Number=SeqID_3942
  Gene Ontology: Mol. function=oxidoreductase activity; Cellular component=mitochondrial respiratory chain; Biological process =respiratory gaseous exchange
  Homolog annotation: Hit_ID=Q8W855; Match level="QueryCoverage=52%, HitCoverage=27%, E-value=9e-45, Identity=86%"; Hit description =Alternative oxidase
  Pfam annotation: Domain name=AOX; Domain location=91-180; Score= -74.1; E_value=2e-08; Accession=PF01786.9; Description=Alternative oxidase
  Subcellular localization annotation: CTP_CleavageSite=48; ConfidenceScore=5.39e-01
SSRAAGSVLLRHLGPRVFGPVSSPVAAAPRPLLAQAAAAVWVRLLSTSAAEVKEEAAASKGNASSTAAAKAEAAEAAREGDGKKSPVVSSYWGIEPSKLVSKDGVEWRWSCFRPWESYKPDTSIDLTRHHKPKVLLDKIAYWTVKSLRFPTDIFFQRRYGCRAMMLETVAAVPGMVGGND

SEQ ID NO: 69917 - protein, 69 aa, Setaria italica
  misc_feature (50)..(50): Xaa can be any naturally occurring amino acid
  misc_feature (58)..(58): Xaa can be any naturally occurring amino acid
  Transcript Sequence Number=SeqID_3943
  Homolog annotation: Hit_ID=A5A364; Match level="QueryCoverage=82%, HitCoverage=12%, E-value=3e-13, Identity=70%"; Hit description=SPX129
MQVQLLIYFMLKYAMEIFTFRVQCITNHYFSWNTSEVAIFLANPWVTVLXPVNAVVGXTSAICLRTRFV

SEQ ID NO: 69918 - protein, 61 aa, Setaria italica
  Transcript Sequence Number=SeqID_3944
LGLQIAYSISKGSIDVAGLREASEDSRKPATSIGSALQIAYSISKGSIVDLLHAKISIAYL

SEQ ID NO: 69919 - protein, 700 aa, Setaria italica
  misc_feature (356)..(356): Xaa can be any naturally occurring amino acid
  Transcript Sequence Number=SeqID_3945
  Gene Ontology: Mol. function=transporter activity; Cellular component= integral to membrane; Biological process=transport
  Homolog annotation: Hit_ID=Q6EPQ3; Match level="QueryCoverage=100%, HitCoverage=100%, E-value=0.0, Identity=70%"; Hit description=SPX (SYG1/Pho81/XPR1) domain-containing protein-like
  Pfam annotation: Domain name=MFS_1; Domain location=250-652; Score =56.2; E_value=1.2e-13; Accession=PF07690.8; Description=Major Facilitator Superfamily
  Pfam annotation: Domain name=SPX; Domain location=2-148; Score=130.4; E_value=5.6e-36; Accession=PF03105.11; Description=SPX domain
  Pfam annotation: Domain name=Sugar_tr; Domain location=253-700; Score= -135.2; E_value=0.0012; Accession=PF00083.16; Description=Sugar (and other) transporter
  Pfam module annotation: Pfam domain module=MFS_1::SPX::Sugar_tr; Domain location=250-652::2-148::253-700
MVNFGKKLMADQIPEWKGYYINYKLMKKKVKQYGQQIQLGEKDRRRVLKDFSKMLDDQIEKIVLFLLEQQGMLASKIEKLGKQRAILQEQPDISGIAELREAYREVGLDLIKLLKFVDLNATGIRKILKKFDKRFGYRFTDYYVTSRSNHPYSQLQQVFKHVGVGAVVGALSRNLAELQERQGSYLSIYDQPSSALKDPIIDMINSSVDKLTRSTNFLRFLGQHAMIVDEESPSTAGEEEIEDQKYHFMSLMLNLVNTFLYMVNTYIIVPTADDYSVSLGAASTVCGVVIGSMAVAQIFSSVYFSAWSNKSYFKPLIFSSIVLFLGNVCYAIAYDMKSLTVLIIGRLLCGLGSARXAVNRRYISDCVPARIRMQASAGFVSASALGMACGPALAGLLQWKFKIYMVTFNQSTLPGWVMAVAWLLYLVWLSISFKEPNRATEVNDATQNPASGQRVDIGQLENGLAQPLLTDAENKQNGDEDEEIDDSEEASEDSRKPATSIGSAYRLLTPSVKVQLLIYFMLKYAMEILLSESSVITNHYFSWNTSEVAIFLAILGLTVLPVNAVVGTYISNMFEDRQLLMVSQITLLVGIIFSFKVTSTYSIVQYVASALITFVSAEVLEGVNLSLLSSVMSSRLSRGTYNGGLLSTEAGTLARVVADCTITAAGYLGVGKLLNITLLPSLVICATSIACTFLTYNSLF

SEQ ID NO: 69920 - protein, 190 aa, Setaria italica
  Transcript Sequence Number=SeqID_3946
  Gene Ontology: Mol. function=methyltransferase activity; Cellular component=integral to membrane; Biological process=vesicle-mediated transport
  Homolog annotation: Hit_ID=B9T1J5; Match level="QueryCoverage=97%, HitCoverage=16%, E-value=1e-49, Identity=52%"; Hit description =Nucleotide binding protein, putative
SPKSVPYKFLQFIINQGLLVAISNENEIQVWNLEFRQLFCSSQWDVNITAFAVIEGSFLMYLGDENGLLSVLKYEVDDGKLQRMPYNVPIQSLAETAGVCLQDPQPIVGILIQPETFGTRVLIAYEKGLLVLWDVSDNNAVSVRGYGDLHMKGQITGSQRDAGEDQLNDAIDETEEEREICSLCWDWVDS

SEQ ID NO: 69921 - protein, 84 aa, Setaria italica
  Transcript Sequence Number=SeqID_3947
  Subcellular localization annotation: CTP_CleavageSite=45; ConfidenceScore=5.10e-01
NNRYQTKRCSSVLTSLLVTSSNLYFVIAPEMVQRTVSKFFRLACSATLLEAHNKTNTRVHDQEPLPATTLEQESYQCSQMLYWN

SEQ ID NO: 69922 - protein, 137 aa, Setaria italica
  Transcript Sequence Number=SeqID_3948
  Gene Ontology: Mol. function=DNA binding
  Homolog annotation: Hit_ID=Q7XLG9; Match level="QueryCoverage=59%, HitCoverage=27%, E-value=1e-34, Identity=78%"; Hit description =OSJNBa0039C07.7 protein
GEGAEPTKWAAVAEYCRRHGVDRGPVQCRKRWSNLAGDYKKIREWERGGFAARKEASFWAMRNDARRERRLPGFFDREVYDILEGRAPGNAAAAAVARPVAVDVESKEDVAAALDGGARGAEGAGLFSSSEDEDDQE

SEQ ID NO: 69923 - protein, 257 aa, Setaria italica
  Transcript Sequence Number=SeqID_3949
  Gene Ontology: Mol. function=DNA binding
  Homolog annotation: Hit_ID=Q7XLG9; Match level="QueryCoverage=24%, HitCoverage=22%, E-value=2e-25, Identity=74%"; Hit description =OSJNBa0039C07.7 protein
HGVERGPVQCRKRWSNLAGDYKKIKEWERAAAASREPSFWAMRNDARRERRLPGFFDREVYDILEGRGRAILAGRSAGNAAEEEEAVAVARVEEEKEAGPAEAVFDSGRPATEEALFSEDEEDEEEEAPAAAPPPPPPPVIAVPVSEKPDASRQQQSAEQGTSKDKQPEQSTERDAPAQQGGQKRPRTDEEAGEGATDLQSKLIQILDRNSRMVAAQLEVQNQNCELDREQRKDQANSLVLVLGRLADALGRIADKL

SEQ ID NO: 69924 - protein, 309 aa, Setaria italica
  misc_feature (108)..(108): Xaa can be any naturally occurring amino acid
  Transcript Sequence Number=SeqID_3950
  Gene Ontology: Mol. function=N-acetyltransferase activity; Biological process=metabolic process
  Homolog annotation: Hit_ID=Q6ZA58; Match level="QueryCoverage=81%, HitCoverage=17%, E-value=5e-48, Identity=48%"; Hit description=PHD finger transcription factor-like
ASVGNAGAGGRGDGDQFGEESVAVSSEKVSAVKSTDGEGSEKNKGVEVERSSPQPVAKKIRVEAAHGSGSGSSGGAAKGGTGGKMRPRGLPSWRFEKAEVRGGRVLDXKGGVDMKASSASKVKEQLSSLDDKRRWVELQKHEKRTPLKTDQGKSADSGQQEVIRLQGKRGVLKILPKNDKLVRDTGDGKILSKKTKVDGETGNVKVLPTNIKADEKTGDGRIPTKRGVLKLLPKNNGMTTETNDRKLLPRNNKVDGETGDGRMVMKNSRVDKESSDGKILTNKTKLDGEFSGHKAMKNSTMDLETGPEK

SEQ ID NO: 69925 - protein, 107 aa, Setaria italica
  misc_feature (3)..(3): Xaa can be any naturally occurring amino acid
  misc_feature (22)..(22): Xaa can be any naturally occurring amino acid
  misc_feature (48)..(48): Xaa can be any naturally occurring amino acid
  Transcript Sequence Number=SeqID_3951
SPXSLARLALDVFSGGAGVSRXGSPARLLLIWPSADALAVAMREFESXGDSATAHAQLGSEAPDVLSACDAAVFLAPGPAQVEQVKAAAAAVDPKPVVLFNPAWSFD

SEQ ID NO: 69926 - protein, 259 aa, Setaria italica
  misc_feature (28)..(28): Xaa can be any naturally occurring amino acid
  Transcript Sequence Number=SeqID_3952
  Gene Ontology: Cellular component=chloroplast
  Homolog annotation: Hit_ID=B6SJX7; Match level="QueryCoverage=98%, HitCoverage=62%, E-value=1e-103, Identity=79%"; Hit description=DAG protein
  Pfam annotation: Domain name=Inhibitor_I9; Domain location=22-74; Score=11.5; E_value=0.013; Accession=PF05922.8; Description =Peptidase inhibitor I9
DPKPSREEMIETYLQTLAKVVGSYEEEXSKKRMYAFSTTTYNGFQAVMTEEMSEKFRGLPGVVFILPDSYLYPETKEYGGDKYENGVITPRQPPVHYSKPSRTDRNRNYRDGPPQQGNYPNRPPPQGGYHNSPPQQGNFQTYRSQQDGRGYAPQQNYAQSGQDARGFGRNDYADRSGYNGPPGGFQGQAPQYQGHVNPAGQGQGYNNPQEHRNFSQGQGGGFRTGGPSAPGSYGQPSTPGSYGQPSTPGSYGQPSVPGN

SEQ ID NO: 69927 - protein, 277 aa, Setaria italica
  Transcript Sequence Number=SeqID_3953
  Gene Ontology: Mol. function=nucleoside-triphosphatase activity; Cellular component=myosin complex; Biological process=protein amino acid phosphorylation
  Homolog annotation: Hit_ID=Q948A2; Match level="QueryCoverage=97%, HitCoverage=16%, E-value=1e-150, Identity=92%"; Hit description =Putative myosin heavy chain
  Pfam annotation: Domain name=Myosin_head; Domain location=1-277; Score=-44.7; E_value=6.1e-13; Accession=PF00063.13; Description =Myosin head (motor domain)
EPGVLYNLKKRYALNEIYTYTGSILIAVNPFTRLPHLYNEYMMEQYKGVRLGELSPHVFAVADASYRAMVNESRSQSILVSGESGAGKTETTKLIMQYLTFVGGRAALDDRTVEQQVLESNPLLEAFGNAKTVRNDNSSRFGKFVEIQFDASGRISGAAIRTYLLERSRVVQITDPERNFHCFYQLCASGKDAELYKLGHASSFHYLNQSRTYDLEGTNNEDEYWKTKRAMDIVGISRKDQDAIFRTLAAVLHLGNIEFAPGKDSDSSKFEVESLIF

SEQ ID NO: 69928 - protein, 168 aa, Setaria italica
  Transcript Sequence Number=SeqID_3954
  Subcellular localization annotation: CTP_CleavageSite=74; ConfidenceScore=5.45e-01
VRFGRRRRRDGAVTSTTTATGLVQSHQATQRRRVVVPPPVSLAGLPSLLVSSRLSRRRAEREPDPLPEPRRAASSSAGGKGGSGQKQKRSEPSEGCCFGSVKREKARRAGKQRGNRKASETSARFASFPPPHASSSSPLPHLTTACPYRSPSLTATGTRSASAASSEP

SEQ ID NO: 69929 - protein, 137 aa, Setaria italica
  Transcript Sequence Number=SeqID_3955
  Gene Ontology: Mol. function=catalytic activity; Cellular component =nucleus; Biological process=coenzyme M biosynthetic process
  Homolog annotation: Hit_ID=B6THJ5; Match level="QueryCoverage=100%, HitCoverage=45%, E-value=5e-73, Identity=94%"; Hit description =Phosphosulfolactate synthase-related protein
  Pfam annotation: Domain name=ComA; Domain location=20-137; Score= -45.3; E_value=1.4e-07; Accession=PF02679.7; Description=(2R)-phospho- 3-sulfolactate synthase (ComA)
MRGWREEVVALSLRGYGYGNEEDDRPEKPRRYGVTEMRSPFYSLRPANQALQEILDSLGPFVDGLKFSGGCHSLMGKELVREITDLAHKHDIYVSTGDWAEHLLRQGPSSFKQYVEECKALGFDTIELNAGSLKLPK

SEQ ID NO: 69930 - protein, 106 aa, Setaria italica
  Transcript Sequence Number=SeqID_3956
  Gene Ontology: Cellular component=endoplasmic reticulum
  Homolog annotation: Hit_ID=Q8GYH6; Match level="QueryCoverage=100%, HitCoverage=46%, E-value=1e-30, Identity=57%"; Hit description =Reticulon-like protein B16
  Pfam annotation: Domain name=Reticulon; Domain location=1-106; Score =19.3; E_value=4.2e-06; Accession=PF02453.9; Description=Reticulon
VIFGATMAWLLFEKSGLSFLTICCDIFLILIIVQFIRVKIAGLLNRQPRPLPELVLSEEMVSNAAASFRVKVNNMLMIAHDITLGNDFRLFFQVVLVLWMLSVIGN

SEQ ID NO: 69931 - protein, 137 aa, Setaria italica
  Transcript Sequence Number=SeqID_3957
  Gene Ontology: Cellular component=endoplasmic reticulum
  Homolog annotation: Hit_ID=Q8GYH6; Match level="QueryCoverage=91%, HitCoverage=55%, E-value=2e-41, Identity=64%"; Hit description =Reticulon-like protein B16
  Pfam annotation: Domain name=Reticulon; Domain location=1-114; Score =55.8; E_value=1.6e-13; Accession=PF02453.9; Description=Reticulon
LAFLYFVKIICRQPRPLPELVLSEEMVSNAAASFRVKVNNMLMIAHDITLGNDFRLFFQVVLVLWMLSVIGNFCSSITLAYIGTIGLVTIPALYNKYQGHVDRYAGMVHRNISRHYKIVDENVISRLPRSFMRESED

SEQ ID NO: 69932 - protein, 209 aa, Setaria italica
  Transcript Sequence Number=SeqID_3958
  Gene Ontology: Mol. function=structural constituent of ribosome; Cellular component=ribonucleoprotein complex; Biological process =translation
  Homolog annotation: Hit_ID=B4FZB4; Match level="QueryCoverage=92%, HitCoverage=92%, E-value=7e-96, Identity=90%"; Hit description=50S ribosomal protein L17
  Pfam annotation: Domain name=Ribosomal_L17; Domain location=113-209; Score=188.4; E_value=2.1e-53; Accession=PF01196.11; Description =Ribosomal protein L17
  Subcellular localization annotation: CTP_CleavageSite=84; ConfidenceScore=5.89e-01
MAAYPSASPSPAISASTWRMASLRAALPTLRPSPAGRLRSSFSPASAATAASVGCLGSFSGLAPVSNLLSLGAENSSFEHRLFSVDARGRIVAMRHGRRVPKLNRPPDQRKALLRGLTTQLLKHGRIKTTKPRAKAMRKYVEKMITLAKDGSLHKRRQALAFIYEKHIVHALFAEVADRYGDREGGYTRIIPTFPRRGDNAPMAYIELV

SEQ ID NO: 69933 - protein, 121 aa, Setaria italica
  misc_feature (111)..(111): Xaa can be any naturally occurring amino acid
  Transcript Sequence Number=SeqID_3959
YHGAAATSLLRRRRCAALAKAFRLEAPRGLPEYFASAFGTRIMATHPREPPGPDDGGGRLRLVPESLFPIFEVRWWGVIFGPRPKTYPARPIYLPVGDLLFALGAGSFELXRPAAGATWRR

SEQ ID NO: 69934 - protein, 71 aa, Setaria italica
  Transcript Sequence Number=SeqID_3960
  Gene Ontology: Mol. function=transferase activity
  Homolog annotation: Hit_ID=Q6YVS8; Match level="QueryCoverage=80%, HitCoverage=15%, E-value=3e-17, Identity=71%"; Hit description=N -acetyltransferase and Transcription factor-like protein
FNSCSASCNAVNSNLFQALKILPAKSLSSKKVERRSHISLEEFICNYFLCESPVIIGGTIDHWPARTKWKE

SEQ ID NO: 69935 - protein, 144 aa, Setaria italica
  misc_feature (52)..(52): Xaa can be any naturally occurring amino acid
  Transcript Sequence Number=SeqID_3961
  Gene Ontology: Mol. function=transferase activity
  Homolog annotation: Hit_ID=Q6YVS8; Match level="QueryCoverage=85%, HitCoverage=32%, E-value=4e-31, Identity=57%"; Hit description=N -acetyltransferase and Transcription factor-like protein
LRADLEAALARISSAEPCGCGGGGREEGAGPVDEEDRRWREGLDRNRDIADXALKILPAKSLSSKKVERRSHISLEEFICNYFLCESPVIIGGTIDHWPARTKWKDIKYLKKIAGDRTVPVEVGMHSYTNAERLWKQTNFIPLT

SEQ ID NO: 69936 - protein, 200 aa, Setaria italica
  Transcript Sequence Number=SeqID_3962
  Gene Ontology: Mol. function=transferase activity
  Homolog annotation: Hit_ID=B9RI82; Match level="QueryCoverage=88%, HitCoverage=43%, E-value=1e-75, Identity=69%"; Hit description =Transcription factor, putative
  Pfam annotation: Domain name=JmjC; Domain location=83-190; Score= -1.3; E_value=0.00099; Accession=PF02373.14; Description=JmjC domain
MIIFWSTYEVDSRQVGKNYVCSDWKQELITFSQFLERMWSTGCPSNLTYLAQHPLFEQIKELSEDLMVPDYCYAGGGELQSLNAWFGPHGTVTPLHHDPHHNILAQVLGRKYIRLYPASISEDLYPHTETMLSNTSQVDLDNMDLKEFPRAENLEFMDCVLEEGELLYIPPKWWHYVRSLSTSFSVSFWWRATVEPSGGS

SEQ ID NO: 69937 - protein, 65 aa, Setaria italica
  Transcript Sequence Number=SeqID_3963
ICSVQCYHVASSSIVFSTKNTYADTPQLVSSLDDIFPAFIPTSAPNSLFFLKETRLQIQTLHVCR

SEQ ID NO: 69938 - protein, 193 aa, Setaria italica
  Transcript Sequence Number=SeqID_3964
  Gene Ontology: Cellular component=integral to membrane; Biological process=response to stress
  Homolog annotation: Hit_ID=B6TLK6; Match level="QueryCoverage=98%, HitCoverage=99%, E-value=1e-104, Identity=96%"; Hit description =HVA22-like protein a
  Pfam annotation: Domain name=TB2_DP1_HVA22; Domain location=10-107; Score=185.2; E_value=1.9e-52; Accession=PF03134.11; Description =TB2DP1, HVA22 family
MGGGGSGSFLKVLVNNLDVLAGPLVSLAYPLYASVRAIETKSAVDDQQWLTYWVLYSFITLFELTFAPVLEWLPFWSYGKLFFNCWLVLPQFNGAAHVYEHFVRPMIVNQQVVNIWYIPKKGESERPDDVISAAQRYIEQNGSKAFENLVNKFKSSNPRRSILEEVEVERRARIQRESEAREVNPFFNPNYQY

SEQ ID NO: 69939 - protein, 175 aa, Setaria italica
  misc_feature (167)..(167): Xaa can be any naturally occurring amino acid
  Transcript Sequence Number=SeqID_3965
  Gene Ontology: Mol. function=diacylglycerol kinase activity; Cellular component=plasma membrane; Biological process=activation of protein kinase C activity
  Homolog annotation: Hit_ID=A8QM11; Match level="QueryCoverage=100%, HitCoverage=35%, E-value=3e-94, Identity=92%"; Hit description =Diacylglycerol kinase 2
  Pfam annotation: Domain name=DAGK_acc; Domain location=8-170; Score =44.7; E_value=1.6e-10; Accession=PF00609.11; Description =Diacylglycerol kinase accessory domain
TFRGGFWNYFSMGMDAEVSYAFHSERKRNPEKFKNQLTNQGTYAKLGLKQGWFCASLSQSSSRNLAQLAKVKVMKRPGSHWEELQIHHSIRSIVCLNLPSFSGGLNPWGMPGTRRAADREFTAPFVDDGLIEVVGFRDAWHGLVLLAPNGHGTRIAQAHRIRFEFHXGVADHTFM

SEQ ID NO: 69940 - protein, 211 aa, Setaria italica
  Transcript Sequence Number=SeqID_3966
  Gene Ontology: Mol. function=diacylglycerol kinase activity; Cellular component=plasma membrane; Biological process=activation of protein kinase C activity
  Homolog annotation: Hit_ID=A8QM11; Match level="QueryCoverage=100%, HitCoverage=42%, E-value=8e-95, Identity=84%"; Hit description =Diacylglycerol kinase 2
  Pfam annotation: Domain name=DAGK_acc; Domain location=3-124; Score= -39.2; E_value=0.00053; Accession=PF00609.11; Description =Diacylglycerol kinase accessory domain
  Subcellular localization annotation: CTP_CleavageSite=15; ConfidenceScore=5.13e-01
SQSSSRNLAQLAKVKVMKRPGSHWEELQQVNTVRSSVCLNLPSFSGGLNPWGMPGTRRAADREFTAPFVDDGLIEVVGFRDAWHGLVLLAPNGHGTRIAQAHRIRFEFHKGVADHTFMRVDGEPWKQPLPTDDDTVVVEISHLGQVSMLANEPCRSKSVSDPSSLPLPAQDSHGDGKDPAEEEDEWEDGRRKFGAADTFRLPDEIDIAHLS

SEQ ID NO: 69941 - protein, 357 aa, Setaria italica
  Transcript Sequence Number=SeqID_3967
  Gene Ontology: Mol. function=diacylglycerol kinase activity; Cellular component=plasma membrane; Biological process=activation of protein kinase C activity
  Homolog annotation: Hit_ID=A8QM11; Match level="QueryCoverage=98%, HitCoverage=70%, E-value=0.0, Identity=93%"; Hit description =Diacylglycerol kinase 2
  Pfam annotation: Domain name=DAGK_acc; Domain location=240-357; Score= -40.6; E_value=0.00068; Accession=PF00609.11; Description =Diacylglycerol kinase accessory domain
  Pfam annotation: Domain name=DAGK_cat; Domain location=45-188; Score =116.0; E_value=1.2e-31; Accession=PF00781.16; Description =Diacylglycerol kinase catalytic domain
  Pfam module annotation: Pfam domain module=DAGK_acc::DAGK_cat; Domain location=240-357::45-188
MEGEAEIVVGSCSKPCGPLEEYHIPDYILKPDAQQVIVDHAPRCPVVVFINSRSGGQLGSSLIKTYRELLNEAQVFDLSEEAPDKVLHRLYVNLERLKMEGDILAVQIWRTLRLIVAGGDGTASWLLGVVSDLKLAHPPPVATVPLGTGNNLPFSFGWGKKNPSTDQEAVKSFLGLVKHAKEIKIDSWHIILRMRVPKEGPCDPIAPLELPHSLHAFHRVSSGDSLNMEGYHTFRGGFWNYFSMGMDAEVSYAFHSERKRNPEKFKNQLTNQGTYAKLGLKQGWFCASLSQSSSRNLAQLAKVKVMKRPGSHWEELQIHHSIRSIVCLNLPSFSGGLNPWGMPGTRRAADREFLFFL

SEQ ID NO: 69942 - protein, 161 aa, Setaria italica
  misc_feature (23)..(23): Xaa can be any naturally occurring amino acid
  Transcript Sequence Number=SeqID_3968
  Homolog annotation: Hit_ID=Q7XN10; Match level="QueryCoverage=100%, HitCoverage=8%, E-value=6e-42, Identity=63%"; Hit description =OSJNBa0008M17.5 protein
SMLDQADDELSRAQLALSEALSXKQELELNLNSLSEQHGESKAFGENANQKILELEAQIQAMHAAEEALKSQLKEADASVQAAEKKGSDLEQQLNEIENKLVASSEEIELLKERIQQEAAVSAEKGMQLEEAAASVEGFKEKINELQLSLDSSVSKNQLLE

SEQ ID NO: 69943 - protein, 439 aa, Setaria italica
  misc_feature (430)..(430): Xaa can be any naturally occurring amino acid
  Transcript Sequence Number=SeqID_3969
  Homolog annotation: Hit_ID=Q01K10; Match level="QueryCoverage=100%, HitCoverage=23%, E-value=1e-127, Identity=63%"; Hit description =OSIGBa0126B18.8 protein
MEVEQGGNVSAPETTDPKVPDKTPAQGGEKENLLNGNSNLQVKEAHNDEDDGTGSDGFELIDVKENFGSAKMEEETAAPRRKTAAHEEQSVAANTRHLDSSMLNQQTEQLGELTRRIEELESEKDKLVKDLTEAENKQSQHYSSLQEAQSSLAVKDKDLAEATESLKELASELESSKRRIQEIEAELDSSADKLHKLEELKDERSLHAAQEAKRASELDKMLELAQTNMKEMEKHISSLQEEIKEHQDKATDHQQIEESLRSTISELKVVQEALELSKSQVADLEDKLASQDADISKLTEELNHHCSSEESLKEKTLKLENELTTTHEELQAKLLSLQELEAKLDEQAKDRQTSEAALEKQNEQIVILQAGLENLKNENETLQGSLVDLNSKLSEKDSMLDQADDELSRAQLALSEALSQKRELELNLNXLSEQHGESK

SEQ ID NO: 69944 - protein, 259 aa, Setaria italica
  Transcript Sequence Number=SeqID_3970
  Gene Ontology: Mol. function=potassium ion transmembrane transporter activity; Cellular component=integral to membrane; Biological process=potassium ion transport
  Homolog annotation: Hit_ID=Q7XPL3; Match level="QueryCoverage=100%, HitCoverage=29%, E-value=1e-121, Identity=84%"; Hit description =Probable potassium transporter 15
  Pfam annotation: Domain name=K_trans; Domain location=1-259; Score= -236.6; E_value=1.9e-12; Accession=PF02705.8; Description=K+ potassium transporter
FFALQTLAVVFGDIGIGPLYTFDVMFNKYPIHGEEDVLGALSLVLYTLILMPLVKYVLVVLWANDDGEGGIFALYSLICRNAKVSLIPNQVHSEKRMSSFRLKLPTAELERSIKVKEKLESSLLLKKLLLGLVLFGTSMFISNGVITPAMSVLSAVSGLKVGIRNASQDVVVMISVALLVILFSLQRYATSKVGFALGPSLLVWFCCLGGIGIYNLSLYGPTAFKAFNPLYIIYYFGRNPFQAWLSLGGCLLCATGSEA

SEQ ID NO: 69945 - protein, 165 aa, Setaria italica
  misc_feature (41)..(41): Xaa can be any naturally occurring amino acid
  Transcript Sequence Number=SeqID_3971
  Gene Ontology: Mol. function=aspartic-type endopeptidase activity; Cellular component=chromatin
  Homolog annotation: Hit_ID=Q7XP97; Match level="QueryCoverage=100%, HitCoverage=5%, E-value=2e-63, Identity=69%"; Hit description =OSJNBa0060B20.14 protein
RALEFHRLALNLCMQQEPTFEGHNAGIDALLLAAECYVNPXFLLDFQPNLERLDKIERIHSELMQGNASIVSKNLHLKDLDRKAMSNLEKKRDRSVIDLLLQAARFDCEYQEKIPEGEPYPNNAEDGERSVEISQEALQFADAVTLVRKNQAMLCHFIMKQFQRK

SEQ ID NO: 69946 - protein, 111 aa, Setaria italica
  Transcript Sequence Number=SeqID_3972
QVLFHILHMQNLSCYCIMSLCQGQMMGLVTKHCKRRNGRTKEEHMTAASAHPPTNSYPSKPFSIMGNYQCSGQMAELEWTYRHPKFRNTAYTCTFTSASPVLPVATPFSHG

SEQ ID NO: 69947 - protein, 189 aa, Setaria italica
  Transcript Sequence Number=SeqID_3973
GRRGGHSKKRTRRSTRSKVAAASRKGQKADSSDTTIGSADKSSIGPNEDEVVAIMEEETTKPHDGGNVIRKAMAHKMEEVPLLATLQQSQRTAALDATAPVEAEEGATTKRRRRPRRSKVAAAAQNGQKADSSDAAIGSPVLVSDRSCGDFREDQLVAVVEEHVAKPQEGIVDEQEQSRTIHKSACSGK

SEQ ID NO: 69948 - protein, 206 aa, Setaria italica
  misc_feature (52)..(52): Xaa can be any naturally occurring amino acid
  Transcript Sequence Number=SeqID_3974
  Gene Ontology: Mol. function=protein binding; Cellular component =membrane; Biological process=vesicle-mediated transport
  Homolog annotation: Hit_ID=B4FTY8; Match level="QueryCoverage=100%, HitCoverage=99%, E-value=5e-76, Identity=67%"; Hit description =Harpin inducing protein
  Pfam annotation: Domain name=Hin1; Domain location=45-183; Score =166.4; E_value=8.6e-47; Accession=PF07320.5; Description=Harpin -induced protein 1 (Hin1)
MGSASRAVSCLCCPCKCLACGLFSCLCSILISLLVFAGVLVLILYLIFRPHXMIAATVDSASLATFTLSPTSSLAYNLTVGITVRNPNKRVGLYYDNVEALALYKDQRFGYAPLDSFYQGTEASTKLTPGFHGQQPLQGDVTAAEFRKEQTDGNFAINVGLNAKLRVKVWAFKVPGPKAKITCKLSVPAPGAANGSPFQPTDCKLW

SEQ ID NO: 69949 - protein, 100 aa, Setaria italica
  misc_feature (64)..(64): Xaa can be any naturally occurring amino acid
  Transcript Sequence Number=SeqID_3975
HNNKYSFVLMAPLYAISSFVGLLDIQGSKTFFTFLDAVKECYEALVIAKFMALMYSYLNISISXKNIVPDEIKGRVLHHSFPVSLSWYLSYSLEQNYFFL

SEQ ID NO: 69950 - protein, 85 aa, Setaria italica
  Transcript Sequence Number=SeqID_3976
  Gene Ontology: Mol. function=protein serine/threonine kinase activity; Biological process=protein amino acid phosphorylation
  Homolog annotation: Hit_ID=B6SWL2; Match level="QueryCoverage=74%, HitCoverage=7%, E-value=1e-15, Identity=70%"; Hit description =Receptor-like kinase
  Subcellular localization annotation: CTP_CleavageSite=75; ConfidenceScore=5.28e-01
MAATTTKFPNLPLLIFPILLLSHRASSAGIVSKTLNNGANITDGETLVSPGGSFTLGFFSPSGVPTKRYLGIWFTASGAASVYWV

SEQ ID NO: 69951 - protein, 111 aa, Setaria italica
  Transcript Sequence Number=SeqID_3977
  Gene Ontology: Mol. function=heat shock protein binding; Cellular component=cytoplasm; Biological process=protein folding
  Homolog annotation: Hit_ID=B6TF62; Match level="QueryCoverage=93%, HitCoverage=38%, E-value=2e-33, Identity=71%"; Hit description=Heat shock protein DnaJ, N-terminal
  Pfam annotation: Domain name=DnaJ; Domain location=8-69; Score=105.0; E_value=2.6e-28; Accession=PF00226.23; Description=DnaJ domain
FRFLGFSSPYEVLGVSPSAAPNEIKRAYRRLALKYHPDVNKEPNAQEKFLRIKHAYNTLMNSESRSKYASSSSDSSWSSYSSRESKSTAEEEPFYGFAEFLKDLQTEFQNW

SEQ ID NO: 69952 - protein, 113 aa, Setaria italica
  Transcript Sequence Number=SeqID_3978
RSVQVEAERLSPQEKYFCYLKGFNCSKSGDDLKRFRLALLPEYLRQDYVISENTQSCSVVSPNSMVPLAQHFAAVHLCCIPRLLTLVGKLCQSPALEMVEDVNINLRLSFTQR

SEQ ID NO: 69953 - protein, 150 aa, Setaria italica
  Transcript Sequence Number=SeqID_3979
  Gene Ontology: Mol. function=electron carrier activity
  Homolog annotation: Hit_ID=B6U7P6; Match level="QueryCoverage=69%, HitCoverage=59%, E-value=6e-45, Identity=77%"; Hit description=Blue copper protein
  Pfam annotation: Domain name=Cu_bind_like; Domain location=34-115; Score=148.2; E_value=2.5e-41; Accession=PF02298.9; Description =Plastocyanin-like domain
MATRFVAIAAVMAAAIFGVASAATYNVGEPGGSWNLQTNYTNWAASKRFHPGDQIVFKYSPQAHDVVEVSKADYDACSNARPINTHTSGNDAIALTSAGTRYFICGFPDHCAGGMKLQVDAVPSATSLAPAGAPGANAPASPSTPGSAAT

SEQ ID NO: 69954 - protein, 63 aa, Setaria italica
  Transcript Sequence Number=SeqID_3980
  Subcellular localization annotation: CTP_CleavageSite=34; ConfidenceScore=5.66e-01
RVLAMAWSAAAVSRFAAASLSFAGARGRRFGPVTASLSTSAAVTALKNFCLALKEAIQTEKAP

SEQ ID NO: 69955 - protein, 179 aa, Setaria italica
  Transcript Sequence Number=SeqID_3981
  Gene Ontology: Mol. function=endonuclease activity; Cellular component=cytoplasm; Biological process=regulation of translational termination
  Homolog annotation: Hit_ID=Q84UT6; Match level="QueryCoverage=69%, HitCoverage=65%, E-value=2e-58, Identity=88%"; Hit description =Perchloric acid soluble translation inhibitor protein homolog
  Pfam annotation: Domain name=Ribonuc_L-PSP; Domain location=61-179; Score=217.4; E_value=3.7e-62; Accession=PF01042.13; Description =Endoribonuclease L-PSP
  Subcellular localization annotation: CTP_CleavageSite=51; ConfidenceScore=5.70e-01
MAWSAAAVSRFAAASPASAPVPVRLGAAASLSFAGARGRRFGPVTASLSTSAAALKEAIQTEKAPAALGPYSQAIKANNLVFVSGVLGLNPESGKFVSENVEEQTEQLMKNMGEILKASGASYSSVVKTTIMLADLQDFKKVNEIYGKYFPAPAPARSTYQVAALPLNARIEIECIAAL

SEQ ID NO: 69956 - protein, 498 aa, Setaria italica
  misc_feature (329)..(329): Xaa can be any naturally occurring amino acid
  Transcript Sequence Number=SeqID_3982
  Gene Ontology: Mol. function=signal transducer activity; Cellular component=integral to membrane
  Homolog annotation: Hit_ID=B9SDD5; Match level="QueryCoverage=98%, HitCoverage=64%, E-value=1e-108, Identity=44%"; Hit description =Signal transducer, putative
AYVFYEAIYSRGYFGAAAGAEGGGGGRHQALLIRYKELRFIARFLVVAMLMRRAEAVDHLAGRLRALVEETKAAYPKTNFKEWKQVIQELGRFLKADGAYKGSRSLRYDNLFDSYPSNLASIARFHSKRVLKLKEAVLTSYHRNEVKFTELTLYTFRMLQCLEWEPTGSYQIAAKELTENGTVSDQSGPSGLIDIHLSTEISDGSLPSNPQKAIIYHPTVSHLLAVLATICEELSQDSILLIYISASGCAEQNMASQKYASSSSSHATAASAFPIDKPNSHMSSDNHLRLGPRGSGGPNNLYPEDLIPFTRYPLFLVIDSENSHAFKAXAIHNAEKGEPAALLLSPRISSAMSGVESTGHGSQFTYFLTAPMQAFCQLAGITSDIDTDTYANAENILFSALEEYEGILCTSVGLNNVWGQVVPDPFLRRLILRFIFCRAVLFYFHPEDHEQHLPTCLPSLPDSVSPTAEAIKTPILLLAENLVVSNRFNFRDSRHNKK

SEQ ID NO: 69957 - protein, 158 aa, Setaria italica
  Transcript Sequence Number=SeqID_3983
  Gene Ontology: Mol. function=transporter activity; Cellular component= membrane; Biological process=oligopeptide transport
  Homolog annotation: Hit_ID=Q5N732; Match level="QueryCoverage=100%, HitCoverage=52%, E-value=3e-68, Identity=77%"; Hit description =Oligopeptide transporter-like protein
NAVAVLKLLPVGATCLIYAVVFAQWMTLFTKQASTLDRWIGTLQVPAATLQSLINVSIVIFVPIYDRILNPLVKKYSKNTCGITTLQRIGIGMVVSVILMIVAALVEMRRLRIARDYGLADKPDVTIPMSVWWIVPQFILSGLADVFTMVGLQEFFYD

SEQ ID NO: 69958 - protein, 306 aa, Setaria italica
  Transcript Sequence Number=SeqID_3984
  Gene Ontology: Mol. function=structural constituent of cell wall; Cellular component=cell wall
  Homolog annotation: Hit_ID=B9RS81; Match level="QueryCoverage=88%, HitCoverage=52%, E-value=6e-95, Identity=62%"; Hit description =Serine-threonine protein kinase, plant-type, putative
  Pfam annotation: Domain name=LRR_1; Domain location=139-161; Score =3.8; E_value=57; Accession=PF00560.25; Description=Leucine Rich Repeat
  Pfam annotation: Domain name=LRR_1; Domain location=163-185; Score =13.1; E_value=0.96; Accession=PF00560.25; Description=Leucine Rich Repeat
  Pfam annotation: Domain name=LRR_1; Domain location=187-209; Score =14.3; E_value=0.51; Accession=PF00560.25; Description=Leucine Rich Repeat
  Pfam annotation: Domain name=LRR_1; Domain location=20-42; Score =10.4; E_value=3.1; Accession=PF00560.25; Description=Leucine Rich Repeat
  Pfam annotation: Domain name=LRR_1; Domain location=211-232; Score =0.0; E_value=3e+02; Accession=PF00560.25; Description=Leucine Rich Repeat
  Pfam annotation: Domain name=LRR_1; Domain location=44-67; Score =11.1; E_value=2.2; Accession=PF00560.25; Description=Leucine Rich Repeat
  Pfam annotation: Domain name=LRR_1; Domain location=68-87; Score =11.6; E_value=1.9; Accession=PF00560.25; Description=Leucine Rich Repeat
  Pfam annotation: Domain name=LRR_1; Domain location=91-113; Score =3.2; E_value=76; Accession=PF00560.25; Description=Leucine Rich Repeat
  Pfam module annotation: Pfam domain module=LRR_1::LRR_1::LRR_1::LRR _1::LRR_1::LRR_1::LRR_1::LRR_1; Domain location=139-161::163-185::187- 209::20-42::211-232::44-67::68-87::91-113
DLNHADLAGHLPEELGLLTDLAVLHLNSNRFCGLVPRSFDKLCALHELDLSNNRLVGPFPDVVLRMPGLRYLDLRYNDFEGPVPPELFDRQLDAIFLNSNRFRFRIPDNVGNSPASVLVLANNDFGGCLPASVANMSGTLDQIILMNTGLKSCIPPEIGALKGLTVLDLSFNKLMGAIPGELAGLRSVEQLDLGHNRLVGDVPEGICHLPRLQNFTYSYNFITGEPPVCLHVDHVVDRRNCIPDRPDQRSPEQCSFFKNHHVNCDAFRCKKFVPPSPPPPPPSPPPPSPPPPSPSPPPPSPPPPSP

SEQ ID NO: 69959 - protein, 567 aa, Setaria italica
  Transcript Sequence Number=SeqID_3985
  Gene Ontology: Mol. function=hydrolase activity; Cellular component =cytoplasm; Biological process=metabolic process
  Homolog annotation: Hit_ID=B6TW66; Match level="QueryCoverage=92%, HitCoverage=91%, E-value=0.0, Identity=93%"; Hit description =Cytosolic purine 5-nucleotidase
  Pfam annotation: Domain name=5_nucleotid; Domain location=157-567; Score=603.1; E_value=2.8e-178; Accession=PF05761.6; Description=5' nucleotidase family
  Subcellular localization annotation: CTP_CleavageSite=60; ConfidenceScore=5.72e-01
MLFARRPLSAALHLAPLSPPLLLFFASASSSCSPAAASASGGTRGCSAVRMDSGAVETTSTGAVWSTPSAEPRSVSIGKAIFCNRSLNMRNITAVGFDMDYTLAQYKPETFEALAYYGTIEKLVKDLHYPEELLTWEFDWKYMVRGLVLDKKRGNILKMDRHKYVKVAYHGFRELSKEEKVAAYGSTLIRDSFDEPDYALIDTLFSLGEAYLFAQLVDFMDNNPGKVPAGTDYPLMYKDVRSAVDLCHRDGTLKRMVAKEPGRYINEDLAIVPMLEMIKKSGRSTFLVTNSLWDYTDVVMNYLCGAYTSDAGSGLNHKWLQYFDIVITGSSKPSFFHDDNRAGLFEVEPDSGKLLNADIQIGSPRSSHQHATPVHKVYQGGNVGHLHRLLSIASSSQILYVGDHIYGDILRSKKVLGWRTMLVIPELEHEVKLLSESKSTRKELRHLRMERDSIEDRIHHLEWSLKFDDITENQKEKLFSEHVDLLQQREHVRRLHQEAQRQHHQKFHKVWGQLMKTGYQNSRFAHQVERFACLYSSQVTNFGLYSPNKYYRPSEDYMPHEFDVLGL

SEQ ID NO: 69960 - protein, 76 aa, Setaria italica
  Transcript Sequence Number=SeqID_3986
IEDLSEHLLYENNISLLYSKHHSIGAVKEVKLLGNMFHLRFVGISSTASPGISFKQNILTLSKNAWQYLHNFLNRD

SEQ ID NO: 69961 - protein, 115 aa, Setaria italica
  Transcript Sequence Number=SeqID_3987
  Subcellular localization annotation: CTP_CleavageSite=28; ConfidenceScore=5.29e-01
LFRKYVAPHLPVAMPYPLGAGPSRRRVRCASSSHFKCIVNSIQPAVPHYPTVAANPYCCRASIRTCQSSTRHRAGPRDKAELIMQVSWPRSTSTSHSPNIIPRIYYQNLACYAAR

SEQ ID NO: 69962 - protein, 61 aa, Setaria italica
  Transcript Sequence Number=SeqID_3988
  Gene Ontology: Mol. function=translation elongation factor activity; Cellular component=eukaryotic translation elongation factor 1 complex; Biological process=translational elongation
  Homolog annotation: Hit_ID=B6SIK8; Match level="QueryCoverage=85%, HitCoverage=23%, E-value=9e-20, Identity=88%"; Hit description =Elongation factor 1-beta
  Pfam annotation: Domain name=EF1_GNE; Domain location=2-61; Score =14.4; E_value=0.00019; Accession=PF00736.11; Description=EF-1 guanine nucleotide exchange doma
WEFLITKVFVVPFGYGIKKMTVMLTIVDDLVSVDSLIEDHLTVEPINEYVQSCDIVAFNKI

SEQ ID NO: 69963 - protein, 318 aa, Setaria italica
  Transcript Sequence Number=SeqID_3989
  Gene Ontology: Mol. function=transporter activity; Cellular component= integral to membrane; Biological process=transport
  Homolog annotation: Hit_ID=Q6ZLK1; Match level="QueryCoverage=97%, HitCoverage=100%, E-value=1e-137, Identity=74%"; Hit description =Membrane transporter PFB0275w-like protein
GGSVLATIVAGGDYYGLPGWRLAFILVAFVSFVIGLLVYLYAVDPRKTSPSHYGGDEDNERSHLVSNGILPPHSIWKDSWMAARSVMKVRTFQIIVLQGIVGSLPWAAVVFFTMWFELIGFNNSSSAALNSFFAIGCASGSFLGGVIADRLSRYYPDSARIMCAQFSAFMGIPFSWILLTVIPQSVDYWLAYAVTLFLMGITISWCATCANNPMFAEVVPPKHRTMIYAFDRAFEGSFGSLAAPAVGIVTERIYGYNAKTIDLAHGSVDGAYALSRGLLAMMIVPFALCLMFYTPLYTVFKRDRDNARLASIKEQELI

SEQ ID NO: 69964 - protein, 171 aa, Setaria italica
  Transcript Sequence Number=SeqID_3990
HGSLPLDMEKARESELSSSLHIADLKEHGTSYPGSLAEAGVAALSKIDRKTDSLVPSSINILAPDGATGPQQEQSQQSRQIPSSTPEALKKKSFMKVYPLDFEDNNGGLLLEVPDLAFEQEMMDTYPELFGDMDVDDFLSCDFETMTADESVEAMSGLLWDDLEEGEIPTM

SEQ ID NO: 69965 - protein, 113 aa, Setaria italica
  misc_feature (67)..(67): Xaa can be any naturally occurring amino acid
  Transcript Sequence Number=SeqID_3991
  Subcellular localization annotation: CTP_CleavageSite=53; ConfidenceScore=5.59e-01
RWRRQRDPPWRTTPTAPPPPTPPPSCCAPASAPASSANSPSPSPPRQHSPSPSAAPAAHPAHCSPPXSPPSDGPKPKRPRPGPSLADPPPSPLPPPPSPLPKEKQSSSPGPVL

SEQ ID NO: 69966 - protein, 141 aa, Setaria italica
  Transcript Sequence Number=SeqID_3992
  Homolog annotation: Hit_ID=A8YLE8; Match level="QueryCoverage=39%, HitCoverage=23%, E-value=1e-11, Identity=67%"; Hit description =Similar to tr|Q4BV10|Q4BV10_CROWT NnrU
GGGRGGRRGRGAGGRGRGRTLAVAGSWGRDSAAFRLGDQSVASWAYFAAILAAVLWALNVLWIDPGAGVGTKFLDAVASVSDSHEVVMLVLTIIFAVFHSGMASLRESGEKIIGERAYRVLFAGISLPLAVTTIVYFINHR

SEQ ID NO: 69967 - protein, 49 aa, Setaria italica
  Transcript Sequence Number=SeqID_3993
RLVILDLFSIFTYVSACKTHAMADSVIVHDASFASFAAFFFFLLILVSA

SEQ ID NO: 69968 - protein, 58 aa, Setaria italica
  Transcript Sequence Number=SeqID_3994
GLSMVFPWHGKGIVKDRRGDQSCLASYSWYSHSIFLNIRIIAQIFTLDFYGFIFYLII

SEQ ID NO: 69969 - protein, 467 aa, Setaria italica
  Transcript Sequence Number=SeqID_3995
  Homolog annotation: Hit_ID=B0BL99; Match level="QueryCoverage=61%, HitCoverage=53%, E-value=8e-73, Identity=48%"; Hit description =CM0216.540.nc protein (Fragment)
  Subcellular localization annotation: CTP_CleavageSite=32; ConfidenceScore=5.63e-01
MAAAAAGAASSIFSSTPPRRLPFPPAPARKPLAAAAPKALTLSSQKLLRLPCPPASCAPAPPPPPPEGTEKPDPIKLAFARAAAYKKERDSPSPSPAPPPTPTPPSPPSPPSQPQASAGESGSKEAFKRALEYRNGNGTGARAGGGEAPLLGGSPDFGQNALLSEDVTLGKKGEYEFDETDFLGLDFFEKKRYKGPPPGLAPAFEPLTDNDFPEVEIIIGDRSKFEKSRGSTGIQPADDRESEDSQSTSETNEADKVDKAPPSTVIEPEEDEDVYRPTVRSWGMFPRPQNISKAYGGGRNIRLGGETQSAEEKAAKDKRTKELIAAYRNRQNMVVDAKTKAECIEALREGDEMMNTGRLKQALPYYEKVMDAVDFKTELHGRAALQWSICLDSLCRSKEAMSMYSKLKNHPNSEISKKANMFVFSFQAMDFMKVNSTPVPKSTGYETYFTKFSGQKNYYASLDEPEV

SEQ ID NO: 69970 - protein, 155 aa, Setaria italica
  Transcript Sequence Number=SeqID_3996
  Homolog annotation: Hit_ID=B0BL99; Match level="QueryCoverage=74%, HitCoverage=24%, E-value=8e-33, Identity=58%"; Hit description =CM0216.540.nc protein (Fragment)
MLKALREGDEMMNTGRLKQALPYYEKVMDAVEVQTELHGRAALQWSICLDSLCRSKEAMSMYSKLKNHPNSEISKKANMFVFSFQAMDFMKVNSTPVPKSTGYETYFTKFSGQKNYYASLDEPEVGFDQIIPYMLFLVSPIFIVAFAALRKSFQL

SEQ ID NO: 69971 - protein, 510 aa, Setaria italica
  Transcript Sequence Number=SeqID_3997
  Gene Ontology: Mol. function=inositol-3-phosphate synthase activity; Cellular component=cytoplasm; Biological process=phospholipid biosynthetic process
  Homolog annotation: Hit_ID=O64437; Match level="QueryCoverage=100%, HitCoverage=100%, E-value=0.0, Identity=95%"; Hit description =Inositol-3-phosphate synthase
  Pfam annotation: Domain name=Inos-1-P_synth; Domain location=310-423; Score=243.7; E_value=4.6e-70; Accession=PF01658.9; Description=Myo -inositol-1-phosphate synthase
  Pfam annotation: Domain name=NAD_binding_5; Domain location=62-494; Score=656.4; E_value=2.6e-194; Accession=PF07994.4; Description=Myo -inositol-1-phosphate synthase
  Pfam module annotation: Pfam domain module=Inos-1-P_synth::NAD _binding_5; Domain location=310-423::62-494
MFIESFRVESPNVRYGPSEIESEYRYDTTELVHEGKDGASRWVVRPKSVKYNFRTSTAVPKLGVMLVGWGGNNGSTLTAGVIANREGISWATKDKVQQANYFGSLTQASTIRVGSYNGEEIYAPFKSLLPMVNPDDIVFGGWDISNMNLADSMTRAKVLDIDLQKQLRPYMESMVPLPGIYDPDFIAANQGSRANNVIKGTKKEQVDQIIKDIREFKEKNKVDKIVVLWTANTERYSNVCAGLNDTVENLLASVDKNEAEISPSTLYAIACVMEGVPFINGSPQNTFVPGLIDLAIKNNCLIGGDDFKSGQTKMKSVLVDFLVGAGIKPTSIVSYNHLGNNDGMNLSAPQTFRSKEISKSNVVDDMVSSNAILYEPGEHPDHVVVIKYVPYVGDSKRAMDEYTSEIFMGGKNTIVLHNTCEDSLLAAPIILDLVLLAELSTRIQLKAEGEEKFHSFHPVATILSYLTKAPLVPPGTPVVNALAKQRAMLENIMRACVGLAPENNMILEYK

SEQ ID NO: 69972 - protein, 173 aa, Setaria italica
  Transcript Sequence Number=SeqID_3998
  Gene Ontology: Mol. function=hydrolase activity, hydrolyzing O -glycosyl compounds; Cellular component=anchored to membrane; Biological process=carbohydrate metabolic process
  Homolog annotation: Hit_ID=B9SGA7; Match level="QueryCoverage=98%, HitCoverage=35%, E-value=8e-57, Identity=63%"; Hit description =Glucan endo-1,3-beta-glucosidase, putative
  Pfam annotation: Domain name=Glyco_hydro_17; Domain location=10-173; Score=-87.7; E_value=5.7e-06; Accession=PF00332.10; Description =Glycosyl hydrolases family 17
WNWGTVSAHRMPPPVVVDLLRANGIAKVKLFDADPAVLRALAGSGVQVMVGIRNEALAGIAASPAAADAWVAQNVSRYVAARGGVDIRYIAVGNEPFLTSYQGQFQSYVLPAVTNIQQSLVKANLASYIKLVVPCNADAYQSASVPSQGVFRPDLTQIMTQLAAFLSTTGRPH

SEQ ID NO: 69973 - protein, 104 aa, Setaria italica
  Transcript Sequence Number=SeqID_3999
  Gene Ontology: Mol. function=electron carrier activity; Cellular component=cytoplasm; Biological process=cell redox homeostasis
  Homolog annotation: Hit_ID=A8CCK2; Match level="QueryCoverage=98%, HitCoverage=18%, E-value=2e-44, Identity=83%"; Hit description =Chloroplastic glutathione reductase
  Pfam annotation: Domain name=Pyr_redox_dim; Domain location=2-80; Score=54.6; E_value=3.9e-13; Accession=PF02852.14; Description =Pyridine nucleotide-disulphide oxidored
NTSNFKPLRATLSGLPDRVYMKVIVCAKTNKVLGVHMCGEDAPEIIQGVAIAVKAGLTKQNFDATVGVHPTTAEEIVTMRSPTRKVRRDTAAEAKITDEAVSQK

SEQ ID NO: 69974 - protein, 56 aa, Setaria italica
  Transcript Sequence Number=SeqID_4000
LIAYCDNIPSQSLFVQITFRRRTPCIYFLQPRGGMDCIHQFVAFLLNQPRPATQFS

SEQ ID NO: 69975 - protein, 137 aa, Setaria italica
  Transcript Sequence Number=SeqID_4001
  Gene Ontology: Mol. function=6-phosphofructo-2-kinase activity; Biological process=fructose 2,6-bisphosphate metabolic process
  Homolog annotation: Hit_ID=Q10MV3; Match level="QueryCoverage=100%, HitCoverage=26%, E-value=1e-45, Identity=65%"; Hit description=6 -phosphofructo-2-kinase family protein, expressed
AVFKLNEGKDVLECKVQVETEMLSPFDLAASWRAHQEYVQPSMVRGAHDITINTGLEGRAKGATGGHAPSLEEQRAMFVDRGVGSPNFARPTKETFSVSNFKLDSEAKDMPAAEGAVAAAAVADQMYGPKEDRKLTI

SEQ ID NO: 69976 - protein, 225 aa, Setaria italica
  Transcript Sequence Number=SeqID_4002
  Gene Ontology: Mol. function=6-phosphofructo-2-kinase activity; Cellular component=6-phosphofructo-2-kinase/fructose-2,6 -biphosphatase 1 complex; Biological process=fructose 2,6 -bisphosphate metabolic process
  Homolog annotation: Hit_ID=Q9LL39; Match level="QueryCoverage=95%, HitCoverage=25%, E-value=9e-94, Identity=77%"; Hit description =Fructose-6-phosphate 2-kinase/fructose-2,6-bisphosphatase
  Pfam annotation: Domain name=PGAM; Domain location=52-219; Score =77.3; E_value=5.7e-20; Accession=PF00300.14; Description =Phosphoglycerate mutase family
TQVYEPVEEGSYIKMIDMVSGKGGQLQINDISGYLPGRIVFFLVNCHLTPRPILLTRHGESMDNVRGRIGGDSSLSESGQLYSRKLASFVEKRLKSERTASVSMPFASHHNKKKYLLIYVQQPSQIWTSTLQRTILTAHPIIGFPKIQWRALDEINAGVCDGMTYDEIKKSKPEEYESRRKDKLRYRYPRGESYLDVIQRLEPVIIELERQRAPVVSTIRLQPRT

SEQ ID NO: 69977 - protein, 75 aa, Setaria italica
  Transcript Sequence Number=SeqID_4003
  Gene Ontology: Mol. function=6-phosphofructo-2-kinase activity; Biological process=fructose 2,6-bisphosphate metabolic process
  Homolog annotation: Hit_ID=B9RL84; Match level="QueryCoverage=81%, HitCoverage=7%, E-value=2e-15, Identity=63%"; Hit description =Fructose-6-phosphate,2-kinase/fructose-2, 6-bisphosphatase, putative
LHIVIIYHHKVYLCRLLSEGELHAYFADKPLEEVPNIEIPLHTIIEIQMGVAGVQEKRYKLMDAVHPTAGCKNKC

SEQ ID NO: 69978 - protein, 668 aa, Setaria italica
  misc_feature (22)..(22): Xaa can be any naturally occurring amino acid
  misc_feature (232)..(232): Xaa can be any naturally occurring amino acid
  Transcript Sequence Number=SeqID_4004
  Gene Ontology: Mol. function=6-phosphofructo-2-kinase activity; Cellular component=cellular_component; Biological process=fructose 2, 6-bisphosphate metabolic process
  Homolog annotation: Hit_ID=Q93XR7; Match level="QueryCoverage=94%, HitCoverage=86%, E-value=0.0, Identity=68%"; Hit description =Fructose-6-phosphate 2-kinase/fructose-2,6-bisphosphatase
  Pfam annotation: Domain name=6PF2K; Domain location=247-466; Score =413.0; E_value=5e-121; Accession=PF01591.10; Description=6 -phosphofructo-2-kinase
  Pfam annotation: Domain name=PGAM; Domain location=468-619; Score =119.1; E_value=1.4e-32; Accession=PF00300.14; Description =Phosphoglycerate mutase family
  Pfam module annotation: Pfam domain module=6PF2K::PGAM; Domain location=247-466::468-619
VRYVTLTTRQYKPLDFKFILKXKKIDSSQCIVEEGPNRSLGCQSNEVEMRTAVFKLNEGKDVLECKVQVETEMLSPFDLAASWRAHQEYVQPSMVRGAHDITINTGLEGRAKNGFASGLELDLEKYVVPTPNMGSGVVYAANLTENPRSLLQTGSSSNNDTTKDILYNSTKGDSSPNHYINTMKGATGGHAPSLEEQRAMFVDRGVGSPNFARPTKETFSVSNFKLDSEAKXDMPAAEGAVAAAAVADQMYGPKEDRKLTIVLVGLPARGKTFTAAKLTRYLRWLGHETKHFNVGKYRRLKHGTNQTADFFRGDNREGVEARNEVAALAMEDMLSWMQEGGQVGIFDATNSTRIRRNMLMKMAEGKCKIIFLETICNDKDVLERNIRLKVQQSPDYAEQTDFEAGVQDFKERLTYYEKVYEPVEEGSYIKMIDMVSGKGGQLQINDISGYLPGRIVFFLVNCHLTPRPILLTRHGESMDNVRGRIGGDSSLSESGQLYSRKLASFVEKRLKSERTASIWTSTLQRTILTAHPIIGFPKIQWRALDEINAGVCDGMTYDEIKKSKPEEYESRRKDKLRYRYPRGESYLDVIQRLEPVIIELERQRAPVVVIAHQAVLRALYAYFADKPLEEVPNIEIPLHTIIEIQMGVAGVQEKRYKLMDAVHPTAGL

SEQ ID NO: 69979 - protein, 240 aa, Setaria italica
  Transcript Sequence Number=SeqID_4005
  Gene Ontology: Mol. function=nucleoside diphosphate kinase activity; Cellular component=mitochondrial intermembrane space; Biological process=CTP biosynthetic process
  Homolog annotation: Hit_ID=B6TKC5; Match level="QueryCoverage=87%, HitCoverage=88%, E-value=1e-110, Identity=90%"; Hit description =Nucleoside diphosphate kinase
  Pfam annotation: Domain name=NDK; Domain location=91-225; Score =317.1; E_value=3.7e-92; Accession=PF00334.11; Description=Nucleoside diphosphate kinase
  Subcellular localization annotation: CTP_CleavageSite=17; ConfidenceScore=5.06e-01
MSASRKLFQAARSLLASASQRSSSAAILAAEGRTAALATLTNLGRKTLPTAYAYHKQGSHHASSGWGAFAAAVPAAVYMLQDQEAHAAEMERTFIAIKPDGVQRGLISEIVSRFERKGYKLVAIKLIVPSKEFAQKHYHDLKDRPFFNGLCDFLSSGPVLAMVWEGEGVIKYGRKLIGATDPQKSEPGTIRGDLAVVVGRNIIHGSDGPETAKDEIALWFEPKELVSYSSNAEKWIYGVN

SEQ ID NO: 69980 - protein, 267 aa, Setaria italica
  Transcript Sequence Number=SeqID_4006
  Subcellular localization annotation: CTP_CleavageSite=72; ConfidenceScore=5.51e-01
QKTSGWQRSSSSPDGSRKASGWQAPGSSTEGSAKAAWHRSSTSPEGGRKASGWQRSASFTQGSTKASGWQPSGSSTEGCANGDGWQRTSSSPEGTRKSSGLHWSGRERSKVNSTSGASENRKSSSHQATTPTGRHSLEVPKRQGNGDKSTSVWEEALGNSREASKRQGSNDKNADWGEAIGSNRSWHSSSGNAGRGSQGSHHHDRHSHGSESRRGSSNNPRRSDHRHDYGNGGSSRSSSRGQPQKGVCKYYQNGNCWKGFKCQFQHR

SEQ ID NO: 69981 - protein, 352 aa, Setaria italica
  Transcript Sequence Number=SeqID_4007
  Gene Ontology: Mol. function=metal ion binding; Cellular component =cytoplasm; Biological process=ubiquitin-dependent protein catabolic process
  Homolog annotation: Hit_ID=Q8LBL5; Match level="QueryCoverage=84%, HitCoverage=82%, E-value=2e-53, Identity=37%"; Hit description=E3 ubiquitin-protein ligase PRT1
  Pfam annotation: Domain name=Hormone_5; Domain location=129-205; Score=-10.5; E_value=0.035; Accession=PF00184.9; Description =Neurohypophysial hormones, C-terminal
  Pfam annotation: Domain name=ZZ; Domain location=214-267; Score=27.0; E_value=7.6e-05; Accession=PF00569.9; Description=Zinc finger, ZZ type
  Pfam annotation: Domain name=zf-C3HC4; Domain location=109-146; Score= 31.1; E_value=4.6e-06; Accession=PF00097.17; Description=Zinc finger, C3HC4 type (RING finger)
  Pfam module annotation: Pfam domain module=Hormone_5::ZZ::zf-C3HC4; Domain location=129-205::214-267::109-146
MHIFQESHCAVCRQPFKHFPSICQLMHHLLRKLDPADYKRREEEVLEEEKRIEMYSPQIIEFLNSKNNVGNDADNRNEDSKTRPPQEVSLNGSVVDDHSKKIKLEDVSCPLCKEMLYQPAVLNCGHVYCVSCLPSLTEEALKCDVCGSLHPGCFPNVCLDLDHFLEEYFPAEYESRGQKVQSKKGQCNREGSSSGTSSAKGSSRAQHDDDLLNIHIGVGCDSCGEYPIHGKRYKCKDCTELIGFDLCGACYESSLKLPGRFNQQHTPDHRMELDNSALLGRVHQDLLMMEGGVIAPGAMVQIVFENQGMGDNGEGPGEAAIQEPVDVPGAMLHIAVDGQEMEDNGQEDDQEA

SEQ ID NO: 69982 - protein, 164 aa, Setaria italica
  Transcript Sequence Number=SeqID_4008
  Gene Ontology: Mol. function=metal ion binding; Cellular component =nuclear matrix; Biological process=oxygen transport
  Homolog annotation: Hit_ID=Q9FY42; Match level="QueryCoverage=100%, HitCoverage=100%, E-value=1e-80, Identity=89%"; Hit description=Non -symbiotic hemoglobin
  Pfam annotation: Domain name=Globin; Domain location=16-125; Score =80.3; E_value=7e-21; Accession=PF00042.14; Description=Globin
MALAEGNGVVVFSEEQEALVLKSWALMKKDSANLGLRFFLKIFEIAPSAKQMFSFLRDSDVPLEKNPKLKTHAMSVFVMTCEAAAQLRKARKVTVRETTLKRLGATHFKYGVADGHFEVTGYALLETIKEALPADMWSLEMKNAWSEAYNQLVAAIKQEMKPAA

SEQ ID NO: 69983 - protein, 84 aa, Setaria italica
  Transcript Sequence Number=SeqID_4009
  Gene Ontology: Mol. function=transferase activity, transferring hexosyl groups; Biological process=carbohydrate metabolic process
  Homolog annotation: Hit_ID=O22678; Match level="QueryCoverage=75%, HitCoverage=10%, E-value=1e-19, Identity=72%"; Hit description=UDP -glucose:sterol glucosyltransferase
SQGTHPPLTITNKCINNTPCNLMESQVKEKAVELAKAMESEDGVTGAVRAFLRHLPSKTEEQSPPQSSSFLEFLGPVSRCMGCS

SEQ ID NO: 69984 - protein, 601 aa, Setaria italica
  Transcript Sequence Number=SeqID_4010
  Gene Ontology: Mol. function=transferase activity, transferring hexosyl groups; Cellular component=plasma membrane; Biological process=carbohydrate metabolic process
  Homolog annotation: Hit_ID=O22678; Match level="QueryCoverage=93%, HitCoverage=92%, E-value=0.0, Identity=81%"; Hit description=UDP -glucose:sterol glucosyltransferase
  Pfam annotation: Domain name=Glyco_transf_28; Domain location=157 -301; Score=177.5; E_value=3.9e-50; Accession=PF03033.12; Description= Glycosyltransferase family 28 N-terminal domain
  Pfam annotation: Domain name=UDPGT; Domain location=158-598; Score= -168.2; E_value=0.022; Accession=PF00201.10; Description=UDP -glucoronosyl and UDP-glucosyl transferase
  Pfam module annotation: Pfam domain module=Glyco_transf_28::UDPGT; Domain location=157-301::158-598
ESGERRRGSGRRGSSGALGSQRDRSGNSPPPAESSSAVDDRGLHRASTMPGVIKNDEITNETVGPSNLERSRTERRRQNNPADDPAKQLFDERIPIKKKLKMLNRIATVKDDGTVVVDVPSGLEPATAGGTEDAYTEVPVDESLDGADIPYRPPMQIVILIVGTRGDVQPFVAIGKRLQNYGHRVRLATHANFKEFVLTAGLEFYPLGGDPKILAEYMVKNKGFLPSGPSEIAIQRKQIKEIIFSLLPACKDADPDTGIPFKVDAIIANPPAYGHTHVAEALKVPIHIFFTMPWTPTSEFPHPLSRVKQSAGYRLSYQIVDSMIWLGIRDMINEFRKKKLKLRPVTYLSGAQGSGNDIPHGYIWSPHLVPKPKDWGPKIDVVGFCFLDLASNYVPPESLVKWLEAGDKPIYIGFGSLPVQEPQKMTEIIVKALEMTGQRGIINKGWGGLGTLAEPKDFVYLLDNCPHDWLFLQCKAVVHHGGAGTTAAGLKAACPTTIVPFFGDQPFWGDRVHARGLGPPPIPVDQFGLQKLVDAINFMMEPTVKEKAVELAKAMESEDGVTGAVRAFLRHLPSKTEEQSPPQSSSFLEFLGPVSRCMGCS

SEQ ID NO: 69985 - protein, 225 aa, Setaria italica
  misc_feature (10)..(10): Xaa can be any naturally occurring amino acid
  Transcript Sequence Number=SeqID_4011
  Gene Ontology: Cellular component=chloroplast
  Homolog annotation: Hit_ID=Q5JKQ7; Match level="QueryCoverage=100%, HitCoverage=34%, E-value=1e-107, Identity=83%"; Hit description =Putative PPR protein
  Pfam annotation: Domain name=PPR; Domain location=14-48; Score=23.3; E_value=0.00099; Accession=PF01535.12; Description=PPR repeat
  Pfam annotation: Domain name=PPR; Domain location=49-83; Score=3.1; E_ value=3.8; Accession=PF01535.12; Description=PPR repeat
  Pfam module annotation: Pfam domain module=PPR::PPR; Domain location =14-48::49-83
KKMDELNISXPDNITFNTLIRYFCNAKVYHLAYKTVEDMHTKGHQLNEELCSHVMVQLGKAGFPSEAFSVYNMLRYSKRTVRKSLHEKALGILVSSELLKDAYIVVKDNAELISPSSLEKFARAFMVSGNINLINDVMKALNRSGWRISQDIFGRAIQRYIQKPDKKHLLLCLLDWMTGQGYSVDSSSRNLLLKNAQLFGQKQLIAEILSKQQTASRTIGQRHKK

SEQ ID NO: 69986 - protein, 99 aa, Setaria italica
  Transcript Sequence Number=SeqID_4012
VRHACSTAIHLGVMVIRAMLEMMCRLDYRLSDKLTKYPQHFFVATAENVGLYLQQRMSDYIHSRSGMSVYSYSRECWLDFSGLCLLKSLYMDLESCAQI

SEQ ID NO: 69987 - protein, 112 aa, Setaria italica
  Transcript Sequence Number=SeqID_4013
  Subcellular localization annotation: CTP_CleavageSite=38; ConfidenceScore=5.49e-01
PPCRRPAPPSPAIAGASSTSSTRRHPGPVHHLQSAAPGATAATSLAGSAARAHQEEFPDLSRYAHILQSGDLDLLAVAGGGLTPGQSSSTTTASSSLTAPPEELPPRREQAS

SEQ ID NO: 69988 - protein, 361 aa, Setaria italica
  Transcript Sequence Number=SeqID_4014
  Gene Ontology: Mol. function=hydrolase activity; Cellular component =peroxisome
  Homolog annotation: Hit_ID=Q8H289; Match level="QueryCoverage=87%, HitCoverage=99%, E-value=2e-96, Identity=53%"; Hit description =Epoxide hydrolase
  Pfam annotation: Domain name=Abhydrolase_1; Domain location=95-355; Score=76.1; E_value=1.3e-19; Accession=PF00561.12; Description =alphabeta hydrolase fold
MVIACLRELCSSCCPWYEPTSPKTSTMAPTAAAAAGDEEQTVTITHRTLEVSTGVRLHVAEAGPAGAPTVLLLHGFPELWYTWRHQMRALAAAGYRAVAPDLRGYGGSDAPAVEEPGQYTAMHVVGDLVALLDALGERKVFVAAHDWGAVTAWSLCLFRPDRVRALVALSVAYTPRSAARRPVDGLRAIYGDEYYICRIQEPGAIEAEFKRLGTELVLRKFFSYRTPGPLIIPKTGWGSPDDQVLLPSWVTEEDLNYYTSEFERTGFTGGLNYYRALNRTWELTSSWTASEINVPVKFIIGDLDLTYHTPGIQDFIHKGGFKKFVPLLDDVVVMKDVGHFINEEKPKEVSEHIISFIKKFN

SEQ ID NO: 69989 - protein, 76 aa, Setaria italica
  misc_feature (10)..(10): Xaa can be any naturally occurring amino acid
  Transcript Sequence Number=SeqID_4015
ELSYQTSKLXFSIKIMLGLQHDNSQLTCKTSEIRITKLQRIWQSIETVRGNNNYCNYIRNPYRLSLFNSIPVYLIH

SEQ ID NO: 69990 - protein, 187 aa, Setaria italica
  misc_feature (15)..(15): Xaa can be any naturally occurring amino acid
  Transcript Sequence Number=SeqID_4016
  Gene Ontology: Mol. function=transcription regulator activity; Cellular component=nucleus; Biological process=regulation of transcription
  Homolog annotation: Hit_ID=B6TXR4; Match level="QueryCoverage=100%, HitCoverage=46%, E-value=6e-40, Identity=54%"; Hit description=BHLH transcription factor
IAERMKALQELVPNXANKTDKASMLDEIIDYVKFLQLQVKVLSMSRLGGAAGVGPLVANMSSEGNGNGNGTSDSGDGNAANGGNNGENGGSSLKVTEQQVARLMEEDMGTAMQYLQGKGLCLMPISLASAISSATSSSLLSRPSIGSMGGARGLGHEGSNPASPPLMNGAGGDDSRTGKDAGAGSKQ

SEQ ID NO: 69991 - protein, 74 aa, Setaria italica
  Transcript Sequence Number=SeqID_4017
LDHSHTIFVLSLIKRGTESISKQTIDQFSRGTIKTVSITQPSLSKPHQKAECLPWRYTTSRPATANAISLLSKG

SEQ ID NO: 69992 - protein, 95 aa, Setaria italica
  Transcript Sequence Number=SeqID_4018
  Gene Ontology: Mol. function=ATP-dependent helicase activity; Cellular component=nucleus; Biological process=regulation of alternative nuclear mRNA splicing, via spliceosome
  Homolog annotation: Hit_ID=Q84UQ1; Match level="QueryCoverage=100%, HitCoverage=9%, E-value=5e-47, Identity=92%"; Hit description=DEAD -box ATP-dependent RNA helicase 42
KINDFPQNARWKITHKETLAPIQDWTGAAITTRGTYIPQGKIVGANERKLYLFIEGPTESSVKKAKAELKRVLEDCANQALNLPGSAQTGKYSVI

SEQ ID NO: 69993 - protein, 876 aa, Setaria italica
  Transcript Sequence Number=SeqID_4019
  Gene Ontology: Mol. function=ATP-dependent helicase activity; Cellular component=nucleus; Biological process=mRNA processing
  Homolog annotation: Hit_ID=Q84UQ1; Match level="QueryCoverage=95%, HitCoverage=79%, E-value=0.0, Identity=78%"; Hit description=DEAD -box ATP-dependent RNA helicase 42
  Pfam annotation: Domain name=DEAD; Domain location=274-448; Score =244.8; E_value=2.1e-70; Accession=PF00270.21; Description=DEADDEAH box helicase
  Pfam annotation: Domain name=Helicase_C; Domain location=516-592; Score=116.5; E_value=8.9e-32; Accession=PF00271.23; Description =Helicase conserved C-terminal domain
  Pfam annotation: Domain name=ResIII; Domain location=270-443; Score= -29.7; E_value=0.016; Accession=PF04851.7; Description=Type III restriction enzyme, res subunit
  Pfam module annotation: Pfam domain module=DEAD::Helicase_C::ResIII; Domain location=274-448::516-592::270-443
MERRRRRVKEWQEKRREQQQQQDGGGAAGTSAAAAAEADVPKVGKKWTLDGEESDEEGDKEDGNKAEDNGGAGDMNVDLPNGGGDANGGAAMEEDEIDPLDAFMNSMVLPEVAKMESAAAVMDTAPAEGVDDKNGKSTKDAVSNGDKKGPRRAMGRIMQGDDSESDYDDADNEGAGEEDEDDEEFIKRVKKTKAEKLAIVDHSKIDYQPFRKNFYIEVKDITKMTTEEVVAYRKELELKVHGKDVPKPIKTWVQSGMTSKLLDTIKKLGFEKPMPIQAQALPIIMSGRDCIGIAKTGSGKTLAFVLPMLRHVKDQPPVVPGDGPIGLIMAPTRELVVQIHSDIKKFSKVLGINCVAIYGGSGVAQQISELKRGAEIVVCTPGRMIDILCTSSGKITNLRRVTFLVMDEADRMFDMGFEPQITRIVQNTRPDRQTVLFSATFPRQVEILARKVLTKPVEIQVGGRSVVNKDIAQLVEVRPDSERFFRLLELLGEWYVKGKILVFVHSQDKCDSLLKELFQHGYPCLSLHGGKDQTDRESTIADFKSNVCSLLIATSVAARGLDVKELELVVNYDVPNHYEDYVHRVGRTGRAGRKGFAVTFISEEEERYAPDLVKALELSQQALPEDLKALADRFMAKVKQGTEQAHGTGYGGSGFKFNEEEDEARKTAKKAQAREYGYEEDKSDSDSDEEGGVRKAGGDLAAQAIANAHAAAAMVANKAAAGNANQQVPGTAAVPLIPLLAATNQQNDEATARALQAAMNLQQNLARIQAHAVPEHYEAELEINDFPQNARWKITHKETLAPIQDWTGAAITTRGTYIPQGKIVGANERKLYLFIEGPTESSVKKAKAELKRVLEDCANQALNLPGSAQTGKYSVI

SEQ ID NO: 69994 - protein, 794 aa, Setaria italica
  Transcript Sequence Number=SeqID_4020
  Gene Ontology: Mol. function=ARF guanyl-nucleotide exchange factor activity; Cellular component=intracellular; Biological process =regulation of ARF protein signal transduction
  Homolog annotation: Hit_ID=Q7F8R6; Match level="QueryCoverage=99%, HitCoverage=47%, E-value=0.0, Identity=70%"; Hit description =Putative guanine nucleotide-exchange protein GEP2
  Pfam annotation: Domain name=DUF1981; Domain location=201-286; Score =164.9; E_value=2.4e-46; Accession=PF09324.2; Description=Domain of unknown function (DUF1981)
QEAWEHVLTCLSRFEHLHLLGEGVPTDASFLTVPLIESEDKTQKSTSVISSKKTNALQNPAVMAAVRGGTYDSTVAKTSVSALVTPEQINNFLSNINLLDQIGIVELNHIFAHSQRLNGDAIVAFVKALCKVSMTELQSPMDPRIFCLTKIVEIAHYNMNRIRLVWSRIWKVLSDFFVSVGLLENLSVSIFVMDSLRQLAMKFLEREELANYNFQNEFLRPFVVVMQRSKAPEVRELIVRCVSQMVLSRVHNIKSGWKGVFMVFTFAAADDTRSTVLLAFETVEKIIRDYFHHVTETETTTFTDCVTCLIAFTSSQFNSDANLNAIAFLRFCAVRLAEEGFVRQDRGAEQPMNSDMSGGNATVHKDGYVSLWVPLLAGLAKLTTDPRLTIKKGAVGVLFDTLKDHGHLFSQAIWTDIFERIVYPLFNSEMPIPNDQISTSNLPDLETQTLAMKCLVGLFVNFFDVIRPEFARTASIVTNFVRSPYKHCATTGVSAIMRLTEGLGNKLSEEEWKEILVCFKESVTHTFVIFSKIVRMMQDIEISDRLDSYSETEQYLDHEMYSNDEEEANMETASYAIVKLKNHMALLLVVIQSIIKLYEEHRKYLRAEHMSILLEMVSAIATHSSEVSSESSLQMKFHKACSLLEVSEPAIVHFENESFQSYLKLLQALQHDDPSLSEEMNIESQVLNTCKKILRTYLKCAGHEPCDESSQRNPPLNCAVPLSATKKEELAARTLLVLQVMKLLGDLERDSFGRILPFFFPLLVDLIRCEHSSGEVQLALYNIFQSVIGPMIRV

SEQ ID NO: 69995 - protein, 74 aa, Setaria italica
  Transcript Sequence Number=SeqID_4021
KSILTLRDALTRTRINVQHRQQELNLYSILTEQIGYLEQWPVLEEESTGIVAEAIEALQASTLCLPVTSGAQAD

SEQ ID NO: 69996 - protein, 84 aa, Setaria italica
  Transcript Sequence Number=SeqID_4022
  Gene Ontology: Mol. function=metal ion binding; Cellular component =anaphase-promoting complex; Biological process=ubiquitin-dependent protein catabolic process
  Homolog annotation: Hit_ID=Q940X6; Match level="QueryCoverage=98%, HitCoverage=98%, E-value=3e-39, Identity=92%"; Hit description =Anaphase promoting complex subunit 11
  Pfam annotation: Domain name=zf-C3HC4; Domain location=34-76; Score =13.8; E_value=0.0027; Accession=PF00097.17; Description=Zinc finger, C3HC4 type (RING finger)
MKVKILQWHAVASWTWDAQDETCGICRMAFDGCCPDCKFPGDDCPLIWGACNHAYHLHCILKWVNSQTSTPLCPMCRREWQFKG

SEQ ID NO: 69997 - protein, 407 aa, Setaria italica
  misc_feature (11)..(11): Xaa can be any naturally occurring amino acid
  Transcript Sequence Number=SeqID_4023
  Gene Ontology: Mol. function=carboxypeptidase activity; Cellular component=integral to membrane; Biological process=proteolysis
  Homolog annotation: Hit_ID=B6SP44; Match level="QueryCoverage=100%, HitCoverage=55%, E-value=0.0, Identity=91%"; Hit description =Glutamate carboxypeptidase 2
  Pfam annotation: Domain name=Nicastrin; Domain location=41-242; Score= -100.3; E_value=0.035; Accession=PF05450.7; Description=Nicastrin
  Pfam annotation: Domain name=Peptidase_M20; Domain location=44-218; Score=-22.7; E_value=0.02; Accession=PF01546.20; Description =Peptidase family M20M25M40
  Pfam annotation: Domain name=Peptidase_M28; Domain location=41-217; Score=50.0; E_value=9.2e-12; Accession=PF04389.9; Description =Peptidase family M28
  Pfam annotation: Domain name=TFR_dimer; Domain location=265-405; Score=66.6; E_value=9.2e-17; Accession=PF04253.7; Description =Transferrin receptor-like dimerisation domain
  Pfam module annotation: Pfam domain module=Nicastrin::Peptidase _M20::Peptidase_M28::TFR_dimer; Domain location=41-242::44-218::41 -217::265-405
PVYRLGPGPAXVLNLTYIGNETLATIENVFAVIQGKEEPDRYVIIGNHRDAWTFGAVDPNSGTAAMLEIAGRLSKLQAKGWRPRRTIILCSWDAEEFALIGSTEWAEENMDTLASRAIAYLNVDISVFGPGGLRPRATPQLDELIKEASKMVPDPDEPSQTLYDTMMSHHPPITRVAGAGTDFAAFLQHIGVPSLDMSYGTIKEYPVYHSLYDDYVWVERFGDPLFHRHVAVASVWGLIALKLADDEIIPFNYVSYASELEECTKDIVDKCKGFPVSFSPLQKSIKQLERAATKIHKEKMLLQAENWSLKTRQYTLKVREMNDRLMMAERAFTNREGLAGRPWYKHMIYASSDQDDWGTKAFPDIVSAMDKAKKSNTTESWRSLQHEIYRVARAVSKASAVLDGGLT

SEQ ID NO: 69998 - protein, 157 aa, Setaria italica
  Transcript Sequence Number=SeqID_4024
  Gene Ontology: Mol. function=transferase activity, transferring glycosyl groups
  Homolog annotation: Hit_ID=B6TE34; Match level="QueryCoverage=98%, HitCoverage=44%, E-value=9e-80, Identity=96%"; Hit description =Transferase, transferring glycosyl groups
  Pfam annotation: Domain name=Glyco_transf_8; Domain location=1-157; Score=-6.8; E_value=1.6e-05; Accession=PF01501.12; Description =Glycosyl transferase family 8
AEELRATVRASFPSLAFRVYPFADEARVAGLISTSIRGALDRPLNYARSYLASTLPPCVRRVVYLDSDIVLTDDIASLAATPLPGEETAVAAPEYCGANFTAYFTPGFWASPALSSTFAGRRACYFNTGVMVLDLARWRRAGYTAQIEEWMELQKRV

SEQ ID NO: 69999 - protein, 192 aa, Setaria italica
  Transcript Sequence Number=SeqID_4025
  Gene Ontology: Mol. function=metal ion binding; Cellular component =plasma membrane; Biological process=embryonic development ending in birth or egg hatching
  Homolog annotation: Hit_ID=B3SGL6; Match level="QueryCoverage=57%, HitCoverage=11%, E-value=2e-46, Identity=79%"; Hit description =Putative Glu-rich protein
  Pfam annotation: Domain name=zf-C3HC4; Domain location=140-178; Score= 10.5; E_value=0.0063; Accession=PF00097.17; Description=Zinc finger, C3HC4 type (RING finger)
  Pfam annotation: Domain name=zf-P11; Domain location=139-187; Score =1.4; E_value=0.094; Accession=PF03854.6; Description=P-11 zinc finger
  Pfam module annotation: Pfam domain module=zf-C3HC4::zf-P11; Domain location=140-178::139-187
FLYATMPPSNSPNENQEQERNTETRQFQAPVNRPALVIPPPPLPPRQPLWHRELRHNNWSSRHREWDAINDLRSDMGRLQQGMSNMQRMLEACMDMQLELQRSVRQEVSAALNRFAGAEGSSMDLTDDGSKWNQVRKGTCCVCCDTQIDSLLYRCGHMCTCSKCANELVRSGGKCPLCRAPIVEVVRAYSVM

SEQ ID NO: 70000 - protein, 252 aa, Setaria italica
  Transcript Sequence Number=SeqID_4026
  Gene Ontology: Mol. function=metal ion binding
  Homolog annotation: Hit_ID=B3SGL6; Match level="QueryCoverage=77%, HitCoverage=21%, E-value=3e-12, Identity=28%"; Hit description =Putative Glu-rich protein
VRNKNKEVLLNYKVDNMRQDETEDDTVFWQSSLDSRLDRWPSEIEEGADRNWGDNAEDLHSETVEDDDREHDHLQEEPDDWHDDESHGTVENWQDDYQDSALDTGPIPRTENRFIPPDDDNVYSMELRELLSRRSVSNLLSNGFGESLERLIRSYVQRSGHGPLNWNLDATMPPSNSPNENQEQERNTETRQFQAPVNRPALVIPPPPLPPRQPLWHRELRHNNWSSRHRVHHADPELGVLLIDLVEVRNLN

SEQ ID NO: 70001 - protein, 182 aa, Setaria italica
  Transcript Sequence Number=SeqID_4027
DALCAGVEPLSSPAAALLRHTPHPLPPPPARLWLLDPIGFRPFSAAATASQAPAMGATLFGGLMNTRFPKRRPGFANRRKRASLRPKGPYYWVKCNPEEPIPTSQPNKGSVQGRKEKKRIKQRKDFIMAEKKKRRAQYSAAVKRKEAERTERKMAAVARDRAWTERLIELKQLEEEKKAAMA

SEQ ID NO: 70002 - protein, 185 aa, Setaria italica
  Transcript Sequence Number=SeqID_4028
  Gene Ontology: Mol. function=oxidoreductase activity; Biological process=oxidation reduction
  Homolog annotation: Hit_ID=Q3HVL5; Match level="QueryCoverage=96%, HitCoverage=55%, E-value=1e-77, Identity=78%"; Hit description=NADPH quinone oxidoreductase-like protein
  Pfam annotation: Domain name=ADH_zinc_N; Domain location=1-137; Score= 134.5; E_value=3.4e-37; Accession=PF00107.18; Description=Zinc -binding dehydrogenase
IHGGSSGIGTFAIQIAKHLGIKVFVTAGFEEKLAACKGLGADVCINYKTEDFVERVKQETNGKGVDVILDNIGGLYLQRNLNSLGVDGRLFIIGFQGGAAAEVNLQPVLARRLTIQAAGLRGRSPANKAQIVSEVEKNVWPAVAAGKVKPVIYKTFPLSEAAEAHRLMEASTHIGKILLLPGLHM

SEQ ID NO: 70003 - protein, 113 aa, Setaria italica
  Transcript Sequence Number=SeqID_4029
  Gene Ontology: Mol. function=tRNA dihydrouridine synthase activity; Biological process=metabolic process
  Homolog annotation: Hit_ID=Q7XWZ9; Match level="QueryCoverage=69%, HitCoverage=4%, E-value=1e-30, Identity=80%"; Hit description =OSJNBa0079F16.4 protein
  Subcellular localization annotation: CTP_CleavageSite=40; ConfidenceScore=5.73e-01
MAMRSAAKHALLTQPLAPGSPGAFLRGRFSPLSPGARPCRAASSASVPAAGKHLPPLFSVAPMMDWTDNHYRTLARLISRHAWLYTEMVVAETIVHQKDNLDRFLAFPEEQHP

SEQ ID NO: 70004 - protein, 220 aa, Setaria italica
  Transcript Sequence Number=SeqID_4030
  Gene Ontology: Mol. function=polygalacturonase activity; Biological process=carbohydrate metabolic process
  Homolog annotation: Hit_ID=B6TZR7; Match level="QueryCoverage=99%, HitCoverage=52%, E-value=5e-86, Identity=76%"; Hit description =Polygalacturonase
  Pfam annotation: Domain name=Glyco_hydro_28; Domain location=1-199; Score=-29.4; E_value=1.2e-07; Accession=PF00295.9; Description =Glycosyl hydrolases family 28
MEFHLVDSRNVHVMDSLISTGDDCVSIVGSCTDVRLRAISCGPGHGISIGFLGVNNSVDYVEKIKVDTLFISNAQNGVRIRTTKIGGGGFARKVKFGSIIMKNVTNPIIVDQGNFSDLADSSEARAAATGVQVEKINYIDIRGTSASEHAVTFSCSDAMPCRRLSLTNVNLTRVDGRNASSYCHKAFGRSIGTVIPESCLSKEDYVQHVPRHSEEDEADS

SEQ ID NO: 70005 - protein, 138 aa, Setaria italica
  Transcript Sequence Number=SeqID_4031
  Subcellular localization annotation: CTP_CleavageSite=53; ConfidenceScore=5.27e-01
LSSSSSSSSFITNRVPMTWMLRQRLRLLVALVIAVTFCFLTTIPNREQIHEASFNMVFELPLLLICCRFEFFSFSNTTLQTIYKIIVGVNYSGSNFIQGKEFCKSLAQDSEVPFMLSIFGKSNSSEASITAIIIGPTT

SEQ ID NO: 70006 - protein, 136 aa, Setaria italica
  Transcript Sequence Number=SeqID_4032
MRSSSYCESNCAPPLCYLPCLPKSKDDAGGDLASGSPSPAAVTEDKPPVVQKIEEAAAAPGGDDDDEKGCKEVAVASKSCLKRADCADSSKNVVKGNVKWKDLLGKDLTQVKEFEPSESGDSDDDEDTGACTCVIQ

SEQ ID NO: 70007 - protein, 200 aa, Setaria italica
  misc_feature (197)..(197): Xaa can be any naturally occurring amino acid
  Transcript Sequence Number=SeqID_4033
  Gene Ontology: Mol. function=protein binding; Biological process =protein amino acid phosphorylation
  Homolog annotation: Hit_ID=B4F960; Match level="QueryCoverage=82%, HitCoverage=40%, E-value=1e-48, Identity=61%"; Hit description =Polygalacturonase inhibitor 1
  Pfam annotation: Domain name=LRR_1; Domain location=116-137; Score =8.3; E_value=8; Accession=PF00560.25; Description=Leucine Rich Repeat
  Pfam annotation: Domain name=LRR_1; Domain location=164-187; Score =10.3; E_value=3.3; Accession=PF00560.25; Description=Leucine Rich Repeat
  Pfam annotation: Domain name=LRR_1; Domain location=42-64; Score =17.7; E_value=0.047; Accession=PF00560.25; Description=Leucine Rich Repeat
  Pfam annotation: Domain name=LRR_1; Domain location=66-85; Score =11.9; E_value=1.6; Accession=PF00560.25; Description=Leucine Rich Repeat
  Pfam annotation: Domain name=LRR_1; Domain location=92-115; Score =12.1; E_value=1.5; Accession=PF00560.25; Description=Leucine Rich Repeat
  Pfam module annotation: Pfam domain module=LRR_1::LRR_1::LRR_1::LRR _1::LRR_1; Domain location=116-137::164-187::42-64::66-85::92-115
SPGLAGTLPASLASLAALTDLVLYPGSVSGAIPADIGSGIRRLRLLSLSGNQLTGQVPESLAGLPDLHTLDLGNNRLEGAIPTGLLLPSSPSLKVLILANNGGLSGQIPAQFSSSQLFHVDLSRNAITGKLPPLPPTIRYFSVAANGMQGSLDGVFVDGSAPADLAFLDLSMNNFSGSIPPEVFALPSASSLLLARXTSP

SEQ ID NO: 70008 - protein, 907 aa, Setaria italica
  misc_feature (445)..(445): Xaa can be any naturally occurring amino acid
  misc_feature (503)..(503): Xaa can be any naturally occurring amino acid
  misc_feature (753)..(753): Xaa can be any naturally occurring amino acid
  Transcript Sequence Number=SeqID_4034
  Gene Ontology: Mol. function=metalloendopeptidase activity; Biological process=proteolysis
  Homolog annotation: Hit_ID=Q5JKR1; Match level="QueryCoverage=98%, HitCoverage=86%, E-value=0.0, Identity=83%"; Hit description =Chloroplast processing enzyme-like protein
  Pfam annotation: Domain name=Peptidase_M16_C; Domain location=104 -288; Score=40.2; E_value=8e-09; Accession=PF05193.13; Description =Peptidase M16 inactive domain
  Pfam annotation: Domain name=Peptidase_M16_C; Domain location=586 -781; Score=59.3; E_value=1.5e-14; Accession=PF05193.13; Description =Peptidase M16 inactive domain
  Pfam module annotation: Pfam domain module=Peptidase_M16_C::Peptidase_ M16_C; Domain location=104-288::586-781
RDRSYGRPRPRNALTSSDETIYELLVPVDKPGLLSQAISVLAEFSSEVRVSAEDLEKERGAVLEEYRGGRNATGRMQDSHWALLFEGSKYAERLPIGTEKVIRTVPHETVKRFYQKWYHLSNMAVFAVGDFPDTQAVVELIKEHFGQKAPAPLPPPAIPEFRVPSHEEPRFSCFVESEAAGSAVVISCKMPAGEIKTVKDYKDSLAESMFHCALNQRLFKISRGKDPPYFSCSSAADALVRPVKAYIMTSSCRERGTVEALESMLLEVARVRLHGFSDREISIVRALMMSEMESAYLERDQMQSTSLRDEFLQHFLREEPVVGIEYEAQLQKTLLPHISSAEVAKFAENFSTASSCVIKIVEPRAHASLEDLKAVVLKVNSLEEEKSIPPWDEEQIPEEIVAEAPEPGSIIDKVEHPGIVATEMILSNGMRICYKYTDFLDDQVXVFTGFAYGGLSELSEAEYTSCSMGSTIAGEIGTFGYRPSVLMDMLAGKRAEVGTKVGXYMRTFSGDCSPSDLETALQLVYQLFITNVEPREEEVKIVMQMAEEAIYAQERDPYTAFANRVREINYGNSYFFKPIRISDLKKVDPIRACEYFNNCFKDPSAFTVVIVGKIDPAISLPLILQYLGGIPRVQDAAQPLSRDDLRGLPFKFPATIIREVVRSPMVEAQCFVQLAFPVVLKNTMMTEDIHYVGFLSKLLETKIMQVLRFKYGQVYSVNVAVFLGGNKPSRTGDVRGDISVNFSCDPDISSKLXVDFVLEEISYLQAEGPSEEDVLTILEIEQRAHENGLQENYFWLDRILRSYQSRLFSGDIGSTFAFQEEGRMKVREALTPQTMQSALQRVLPFPCRNQYTVVILMPKSSCWASVKSMLSWSSNGVSRDAKILAGIAGALVLAVSLWRYSRSTLKS

SEQ ID NO: 70009 - protein, 215 aa, Setaria italica
  Transcript Sequence Number=SeqID_4035
  Gene Ontology: Mol. function=protein kinase activity; Cellular component=integral to membrane; Biological process=protein amino acid phosphorylation
  Homolog annotation: Hit_ID=Q01I25; Match level="QueryCoverage=100%, HitCoverage=57%, E-value=7e-95, Identity=75%"; Hit description =OSIGBa0106P14.5 protein
  Pfam annotation: Domain name=Pkinase; Domain location=1-210; Score= -53.9; E_value=2.8e-05; Accession=PF00069.17; Description=Protein kinase domain
  Pfam annotation: Domain name=Pkinase_Tyr; Domain location=2-210; Score=-125.8; E_value=2.3e-05; Accession=PF07714.9; Description =Protein tyrosine kinase
  Pfam module annotation: Pfam domain module=Pkinase::Pkinase_Tyr; Domain location=1-210::2-210
PRGEKLLVHPFYAAGSLHRFLQEGIAESQRWNIVCNLSLGIAKGLDHLHTGLEKPMVHGNLKTSNILLDANYECRISDYGIYLLLNPAAAQEMLESSAAQGYKAPELIKMRDATRESDIYSLGVVLLEMLAQKEHADDGRPNPRDILLPASFKNLVLERKISEAFSSDLARHCRRSGKERNLNAYFELATACCSPSPSLRPNTKHVLKRLEEIAR

SEQ ID NO: 70010 - protein, 112 aa, Setaria italica
  Transcript Sequence Number=SeqID_4036
  Gene Ontology: Mol. function=protein kinase activity; Biological process=protein amino acid phosphorylation
  Homolog annotation: Hit_ID=B9S235; Match level="QueryCoverage=74%, HitCoverage=17%, E-value=5e-13, Identity=48%"; Hit description=ATP binding protein, putative
  Subcellular localization annotation: CTP_CleavageSite=31; ConfidenceScore=5.07e-01
MLKALPARFLASPEPGGWRRRPRRGSLKPVSAALMTNPAYFEVGRFLGGYGFMNITSYSSSQFGEPSNVAGIQDLGLGYSAEEIERLRVQDVGEGEVTIRLYEGRVVQGPLR

SEQ ID NO: 70011 - protein, 325 aa, Setaria italica
  Transcript Sequence Number=SeqID_4037
  Gene Ontology: Mol. function=cysteine-type endopeptidase activity; Cellular component=vacuole; Biological process=proteolysis
  Homolog annotation: Hit_ID=B4ESF0; Match level="QueryCoverage=100%, HitCoverage=71%, E-value=1e-151, Identity=78%"; Hit description =Papain-like cysteine proteinase
  Pfam annotation: Domain name=Granulin; Domain location=245-293; Score= 20.2; E_value=6.6e-05; Accession=PF00396.10; Description=Granulin
  Pfam annotation: Domain name=Peptidase_C1; Domain location=2-217; Score=439.8; E_value=4.3e-129; Accession=PF00112.15; Description =Papain family cysteine protease
  Pfam module annotation: Pfam domain module=Granulin::Peptidase_C1; Domain location=245-293::2-217
AVPDAVDWRKKGAVTKVKNQGSCGACWSFSATGAIEGINKIKTGSLVSLSEQELIDCDRSYNNGCGGGLMDYAFKFVIKNGGIDTEDDYPYRQADGTCNKNKLKRRVVTIDGYSDVPSNKEDLLLQAVAQQPVSVGICGSARAFQLYSQGIFDGPCPTSLDHAVLIVGYGSEGGKEYWIVKNSWGERWGMKGYMHMHRNTGASSGICGINMMPSFPTKTSPNPPPSPGPGPTKCNLLTYCPEGSTCCCSWRVLGLCLSWSCCGLDNAICCKDNRYCCPHDYPICDTVRAQCLRANGNFSGIEGIKKKQSFSKVPSWNGLLEVIDQ

SEQ ID NO: 70012 - protein, 199 aa, Setaria italica
  Transcript Sequence Number=SeqID_4038
  Gene Ontology: Mol. function=structural constituent of ribosome; Cellular component=intracellular; Biological process=translation
  Homolog annotation: Hit_ID=B2WS92; Match level="QueryCoverage=77%, HitCoverage=59%, E-value=1e-57, Identity=68%"; Hit description=50S ribosomal protein
MLLRRPLQTLTLPLLRRHLTAAAAAEAIVSPADHHGADPLSPPYDYLPGHPRPNPKHDEVILAVPRASSGRHVSAKERKAGRVPSIVFEQENGQEGGNKRLISVQSKQIRKLVDHLGRSFFLSRLFRLQVWSQHAGQGELVESVRVLPRKVHLHAGTDEPLTVTFMRAPSSALLKIDVPLMFIGEDASPGLRKGAYFNT

SEQ ID NO: 70013 - protein, 125 aa, Setaria italica
  Transcript Sequence Number=SeqID_4039
  Gene Ontology: Mol. function=structural constituent of ribosome; Cellular component=intracellular; Biological process=translation
  Homolog annotation: Hit_ID=A5A5A1; Match level="QueryCoverage=93%, HitCoverage=46%, E-value=3e-45, Identity=72%"; Hit description =Ribosomal protein L25
CGILFEHIQVHLHAGTDEPLTVTFMRAPSSALLKIDVPLMFIGEDASPGLRKGAYFNTIKRTVKYLCPADIVPPYIEVDLSELDVGQKLLMRDLKVHPALKLLQSPDQPICSIIGSRAPEQKKGK

SEQ ID NO: 70014 - protein, 116 aa, Setaria italica
  Transcript Sequence Number=SeqID_4040
  Subcellular localization annotation: CTP_CleavageSite=70; ConfidenceScore=5.59e-01
RSPQRHAGAWDPAPRPGGAPAAPSSSVCPCCSSSPARHPSPRPCRPSPPPSPPPSPSPLLALLIHRAHPPSSQRPHPEPHRCHGGTRRRLDGRSVGGRRGIDGLIDAGRSRIRAEI

SEQ ID NO: 70015 - protein, 106 aa, Setaria italica
  Transcript Sequence Number=SeqID_4041
  Gene Ontology: Mol. function=nucleoside-triphosphatase activity; Cellular component=integral to membrane; Biological process=transport
  Homolog annotation: Hit_ID=Q94A18; Match level="QueryCoverage=100%, HitCoverage=7%, E-value=3e-39, Identity=71%"; Hit description=ABC transporter G family member 29
  Subcellular localization annotation: CTP_CleavageSite=9; ConfidenceScore=5.19e-01
TVIYTLIVYSMMSFQWTPAKFFWFFYISFLTFLYFTYYGMMSVAITPNPQVASIFAAAFYSLFNLFSGFIIPRSKIPKWWIWYYWICPVAWTVYGLIVSQYGDVED

SEQ ID NO: 70016 - protein, 145 aa, Setaria italica
  Transcript Sequence Number=SeqID_4042
  Gene Ontology: Mol. function=nucleoside-triphosphatase activity; Cellular component=plasma membrane; Biological process=protein catabolic process
  Homolog annotation: Hit_ID=A6MZV6; Match level="QueryCoverage=96%, HitCoverage=67%, E-value=5e-73, Identity=96%"; Hit description=26S protease regulatory subunit 8 (Fragment)
  Pfam annotation: Domain name=AAA; Domain location=1-111; Score=47.8; E_value=4.4e-11; Accession=PF00004.21; Description=ATPase family associated with various cellular activities (AAA)
VNGRISEVQRTMLELLNQLDGFEASNKIKVLMATNRIDILDQALLRPGRIDRKIEFPNPNEASRFDILKIHSRRMNLMRDIDLKKIAAKMNGASGAELKAVCTEAGMFALRERRVHVTQEDFDMAVAKVMKKDTEKNMSLRKLWK

SEQ ID NO: 70017 - protein, 422 aa, Setaria italica
  Transcript Sequence Number=SeqID_4043
  Gene Ontology: Mol. function=nucleoside-triphosphatase activity; Cellular component=plasma membrane; Biological process=protein catabolic process
  Homolog annotation: Hit_ID=Q9FNU8; Match level="QueryCoverage=100%, HitCoverage=92%, E-value=0.0, Identity=87%"; Hit description=26S proteasome RPT6a subunit
  Pfam annotation: Domain name=AAA; Domain location=200-388; Score =309.0; E_value=1e-89; Accession=PF00004.21; Description=ATPase family associated with various cellular activities (AAA)
  Pfam annotation: Domain name=AAA_2; Domain location=197-329; Score= -26.9; E_value=0.0014; Accession=PF07724.6; Description=ATPase family associated with various
  Pfam annotation: Domain name=AAA_3; Domain location=200-332; Score= -11.6; E_value=0.0069; Accession=PF07726.3; Description=ATPase family associated with various
  Pfam annotation: Domain name=AAA_5; Domain location=200-334; Score =2.5; E_value=0.0006; Accession=PF07728.6; Description=ATPase family associated with various
  Pfam module annotation: Pfam domain module=AAA::AAA_2::AAA_3::AAA_5; Domain location=200-388::197-329::200-332::200-334
MATVAMDISKPTPAASGDEAAAAAKGRSGGGGEGLRQYYLQHIHDLQLQIRQKTHNLNRLEAQRNDLNSRVRMLREELQLLQEPGSYVGEVVKVMGKSKVLVKVHPEGKYVVDIDKSIDITKITPSTRVALRNDSYMLHLVLPSKVDPLVNLMKVEKVPDSTYDMIGGLDQQIKEIKEVIELPIKHPELFESLGIAQPKGVLLYGPPGTGKTLLARAVAHHTDCTFIRVSGSELVQKYIGEGSRMVRELFVMAREHAPSIIFMDEIDSIGSARMESGTGNGDSEVQRTMLELLNQLDGFEASNKIKVLMATNRIDILDQALLRPGRIDRKIEFPNPNEDSRFDILKIHSRKMNLMRGIDLKKIAEKMNGASGAELKAVCTEAGMFALRERRVHVTQEDFEMAVAKVMKKDTEKNMSLRKLWK

SEQ ID NO: 70018 - protein, 64 aa, Setaria italica
  Transcript Sequence Number=SeqID_4044
  Subcellular localization annotation: CTP_CleavageSite=45; ConfidenceScore=5.08e-01
MRTTTSTALPLAAALCLALLLPGAAAATKPRLRQGDYLNRLRGSPASARQSWQQAESSLAVASP

SEQ ID NO: 70019 - protein, 272 aa, Setaria italica
  Transcript Sequence Number=SeqID_4045
  Gene Ontology: Mol. function=nucleic acid binding
  Homolog annotation: Hit_ID=B6TSJ8; Match level="QueryCoverage=86%, HitCoverage=82%, E-value=1e-117, Identity=88%"; Hit description=RNA -binding region-containing protein 1
  Pfam annotation: Domain name=RRM_1; Domain location=44-113; Score =61.3; E_value=3.8e-15; Accession=PF00076.14; Description=RNA recognition motif. (a.k.a. RRM, RBD, o
  Subcellular localization annotation: CTP_CleavageSite=46; ConfidenceScore=5.67e-01
MMALQQQQQHAGSASGSASASSSSSGLHPLASPSSFADTTHTKVFVGGLAWETNSDRLRRFYERFGDILEAVVITDRHSGRSKGYGFVTFREPDSARKACEDPTPVIDGRRANCNLASLGRAQHPVPLGRPRSAGSYFGVSVPRGFYLGGYGQHRPLPLGYYQGFPVPQYSYTSYGTEYIYPQGTLNPYTGQQYIPIYGVSAAANATNQPFSQLSPSISGGGNGYLSVHGYNMPGNQYVQLTGSNFSNASPTARPSIQTPFLVAAPIPAHPP

SEQ ID NO: 70020 - protein, 150 aa, Setaria italica
  Transcript Sequence Number=SeqID_4046
  Gene Ontology: Mol. function=protein serine/threonine kinase activity; Biological process=protein amino acid phosphorylation
  Homolog annotation: Hit_ID=B6UD76; Match level="QueryCoverage=96%, HitCoverage=27%, E-value=4e-69, Identity=83%"; Hit description=ATP binding protein
  Pfam annotation: Domain name=Pkinase; Domain location=1-125; Score= -64.1; E_value=0.00011; Accession=PF00069.17; Description=Protein kinase domain
  Pfam annotation: Domain name=Pkinase_Tyr; Domain location=1-125; Score=-52.5; E_value=3.1e-10; Accession=PF07714.9; Description =Protein tyrosine kinase
  Pfam module annotation: Pfam domain module=Pkinase::Pkinase_Tyr; Domain location=1-125::1-125
SANLLLGKDHVVKVADFGLARFQDEGGSMTAETGTYRWMAPEVINHQPYDNKADVYSFAIVLWELMTSKIPYTTMSPLQAAVGVRQGLRPQLPENAHPRLLNLMQRCWEVLPSDRPSFTDIIAELEDIQAQAQGTSGESSQKQKDGDSAH

SEQ ID NO: 70021 - protein, 42 aa, Setaria italica
  Transcript Sequence Number=SeqID_4047
  Gene Ontology: Mol. function=nucleoside-triphosphatase activity
  Homolog annotation: Hit_ID=B6TM93; Match level="QueryCoverage=100%, HitCoverage=11%, E-value=3e-13, Identity=90%"; Hit description =ATPase family AAA domain-containing protein 1
PLRQSDLERALSTSRKGKKAASSGLQSPLWVRPSDSVDDQIS

SEQ ID NO: 70022 - protein, 82 aa, Setaria italica
  Transcript Sequence Number=SeqID_4048
  Gene Ontology: Mol. function=nucleoside-triphosphatase activity
  Homolog annotation: Hit_ID=A6N0M8; Match level="QueryCoverage=74%, HitCoverage=85%, E-value=2e-23, Identity=87%"; Hit description =Atpase family aaa domain-containing protein 1 (Fragment)
RKIGNEQLRIKPRPLRQSDLERALSTSRKGKKAASSGLQSPLWVRPSDSEDDQVQSAIFEISKLMSRIVQNSQSEPQEPSSP

SEQ ID NO: 70023 - protein, 261 aa, Setaria italica
  Transcript Sequence Number=SeqID_4049
  Gene Ontology: Mol. function=nucleoside-triphosphatase activity; Cellular component=protein complex; Biological process=proteolysis
  Homolog annotation: Hit_ID=B6TM93; Match level="QueryCoverage=98%, HitCoverage=70%, E-value=1e-141, Identity=95%"; Hit description =ATPase family AAA domain-containing protein 1
  Pfam annotation: Domain name=AAA; Domain location=16-200; Score =240.0; E_value=5.8e-69; Accession=PF00004.21; Description=ATPase family associated with various cellular activities (AAA)
  Pfam annotation: Domain name=AAA_3; Domain location=16-141; Score= -11.2; E_value=0.0064; Accession=PF07726.3; Description=ATPase family associated with various
  Pfam annotation: Domain name=AAA_5; Domain location=16-147; Score =4.7; E_value=0.00039; Accession=PF07728.6; Description=ATPase family associated with various
  Pfam annotation: Domain name=Bac_DnaA; Domain location=2-201; Score= -126.6; E_value=0.044; Accession=PF00308.10; Description=Bacterial dnaA protein
  Pfam annotation: Domain name=Sigma54_activat; Domain location=3-178; Score=-173.9; E_value=0.0096; Accession=PF00158.18; Description =Sigma-54 interaction domain
  Pfam module annotation: Pfam domain module=AAA::AAA_3::AAA_5::Bac _DnaA::Sigma54_activat; Domain location=16-200::16-141::16-147::2 -201::3-178
PELFTFGKLLSPQEGVVLLYGPPGTGKTMLAKAIARESGAVFINVRISNLMSKWFGDAQKLVAAVFSLAHKLQPAIIFIDEVDSFLGQRRTTDHEAMTNMKTEFMSLWDGFTTDQNARVMVLAATNRPSELDEAILRRFTQIFEIGIPVQSERSKILQVVLKGENVEPNIDYDRIARLCEGFTGSDILELCKQAAFYPIRELLDNEKNGRTLDKPRPLRQSDLERALSTSRKGKKAASSGLQSPLWVRPSDSEDDQVQSIS

SEQ ID NO: 70024 - protein, 61 aa, Setaria italica
  Transcript Sequence Number=SeqID_4050
  Gene Ontology: Mol. function=histone acetyltransferase activity; Cellular component=nucleus; Biological process=metabolic process
  Homolog annotation: Hit_ID=Q7X7L3; Match level="QueryCoverage=70%, HitCoverage=7%, E-value=2e-17, Identity=97%"; Hit description =Elongator complex protein 3
GRCSIVRELHVYGTAVPVHGRDADKLQHQGYGTLLMEEAERISLNGVPFEQFFLLLPSVEF

SEQ ID NO: 70025 - protein, 181 aa, Setaria italica
  Transcript Sequence Number=SeqID_4051
  Gene Ontology: Mol. function=histone acetyltransferase activity; Cellular component=nucleus; Biological process=regulation of transcription, DNA-dependent
  Homolog annotation: Hit_ID=Q7X7L3; Match level="QueryCoverage=100%, HitCoverage=31%, E-value=6e-97, Identity=93%"; Hit description =Elongator complex protein 3
AAVPEADRAALLPRLRAKPVRTASGIAVVAVMSKPHRCPHIATTGNICVYCPGGPDSDFEYSTQSYTGYEPTSMRAIRARYNPYVQARSRIDQLKRLGHSVDKVEFILMGGTFMSLPADYRDYFIRNLHDALSGHTSANVEEAVCYSEHSAVKCIGMTIETRPDYCLGPHLRQMLSYGCTR

SEQ ID NO: 70026 - protein, 430 aa, Setaria italica
  Transcript Sequence Number=SeqID_4052
  Gene Ontology: Mol. function=histone acetyltransferase activity; Cellular component=nucleus; Biological process=regulation of transcription, DNA-dependent
  Homolog annotation: Hit_ID=Q7X7L3; Match level="QueryCoverage=99%, HitCoverage=74%, E-value=0.0, Identity=96%"; Hit description =Elongator complex protein 3
  Pfam annotation: Domain name=Acetyltransf_1; Domain location=324-419; Score=29.1; E_value=1.8e-05; Accession=PF00583.16; Description =Acetyltransferase (GNAT) family
  Pfam annotation: Domain name=Radical_SAM; Domain location=5-188; Score=11.7; E_value=0.01; Accession=PF04055.13; Description=Radical SAM superfamily
  Pfam module annotation: Pfam domain module=Acetyltransf_1::Radical _SAM; Domain location=324-419::5-188
SDFEYSTQSYTGYEPTSMRAIRARYNPYVQARSRIDQLKRLGHSVDKVEFILMGGTFMSLPADYRDYFIRNLHDALSGHTSANVEEAVCYSEHSAVKCIGMTIETRPDYCLGPHLRQMLSYGCTRLEIGVQSTYEDVARDTNRGHTVAAVADCFCLAKDAGFKVVAHMMPDLPNVGVERDLESFREFFESPAFRADGLKIYPTLVIRGTGLYELWKTGRYRNYPPELLVDIVARILSMVPPWTRVYRVQRDIPMPLVTSGVEKGNLRELALARMEDLGLKCRDVRTREAGIQDIHHKIRPDEVELVRRDYAANEGWETFLSYEDTRQDILIGLLRLRKCGRNVTCPELVGRCSIVRELHVYGTAVPVHGRDADKLQHQGYGTLLMEEAERIARREHRSKKLAVISGVGTRHYYRKLGYELEGPYMVKCFA

SEQ ID NO: 70027 - protein, 409 aa, Setaria italica
  Transcript Sequence Number=SeqID_4053
  Gene Ontology: Mol. function=nucleoside transmembrane transporter activity; Cellular component=membrane; Biological process=transport
  Homolog annotation: Hit_ID=B6T345; Match level="QueryCoverage=94%, HitCoverage=92%, E-value=1e-162, Identity=75%"; Hit description =Nucleoside transporter
  Pfam annotation: Domain name=Nucleoside_tran; Domain location=129 -409; Score=324.6; E_value=2e-94; Accession=PF01733.10; Description =Nucleoside transporter
SAPLLPPPASSLADEPAAPPADRLGVGYLVFFTLGAGFLLPWNAFITAVDYFAFLYPGAPVDRVFSVAYMLSCLLPLLLIVLCFPKSSSPARINTGLALFTLALLVVPAMDAAYVKGRPGMYGAFDITVAATVLCGAADALVQGGVIGFAGELPERYMQAVVAGTAASGVLVSAMRVFTKALYPQDAHGLRQSANLYFIVGIVVMIICIVCYNVAGKLPVVMYYKNIKKRAQKADVGGGMTGPAWRSTLWSIVGTVKWYGIGIIFIYAITLSIFPGFITEDVHSEALKDWYPILLISAYNVFDLIGKALPAVYFLPNANIAVAGSFARLLFYPLFYGCLHGPSFFRTEIPVTILTCLLGLTNGYLTCILMTLAPKAVPIHHSETAGIVIVLFLVVGLVVGSFVSWFWVI

SEQ ID NO: 70028 - protein, 122 aa, Setaria italica
  misc_feature (70)..(70): Xaa can be any naturally occurring amino acid
  Transcript Sequence Number=SeqID_4054
  Gene Ontology: Mol. function=protein phosphatase type 2A regulator activity; Cellular component=nucleus; Biological process=nucleosome assembly
  Homolog annotation: Hit_ID=B9IJV5; Match level="QueryCoverage=96%, HitCoverage=40%, E-value=4e-26, Identity=53%"; Hit description =Nucleosome/chromatin assembly factor group (Fragment)
  Pfam annotation: Domain name=NAP; Domain location=1-117; Score= -121.1; E_value=0.022; Accession=PF00956.10; Description=Nucleosome assembly protein (NAP)
QDEIEKVNEEASNEVLEVEQKYNEIRRPVYARRNEVIQKIPDFWLTAVCISSIMICVASPLLLEVLNDLXHCCVLTLQFLSHPMLADLLTEDDTQIFKHLESVFVDSEDVKSGCSITLVSFF

SEQ ID NO: 70029 - protein, 79 aa, Setaria italica
  misc_feature (41)..(41): Xaa can be any naturally occurring amino acid
  Transcript Sequence Number=SeqID_4055
  Gene Ontology: Mol. function=nucleotide binding; Cellular component =nucleus; Biological process=cell cycle
  Homolog annotation: Hit_ID=Q10P97; Match level="QueryCoverage=93%, HitCoverage=12%, E-value=5e-27, Identity=72%"; Hit description=Cell cycle checkpoint protein RAD17, putative
YFAVLDFIDNEAVDDAWAVVSYLSEADCLLAGSPITSYNSXENMAQLIAASVTARGVLFGNAHVASSRWHTIRSPKLLV

SEQ ID NO: 70030 - protein, 576 aa, Setaria italica
  misc_feature (52)..(52): Xaa can be any naturally occurring amino acid
  misc_feature (362)..(362): Xaa can be any naturally occurring amino acid
  Transcript Sequence Number=SeqID_4056
  Gene Ontology: Mol. function=nucleotide binding; Cellular component =nucleus; Biological process=cell cycle
  Homolog annotation: Hit_ID=Q10P97; Match level="QueryCoverage=89%, HitCoverage=84%, E-value=0.0, Identity=73%"; Hit description=Cell cycle checkpoint protein RAD17, putative
  Pfam annotation: Domain name=AAA; Domain location=102-306; Score= -17.3; E_value=0.00082; Accession=PF00004.21; Description=ATPase family associated with various cellular activities (AAA)
  Pfam annotation: Domain name=Rad17; Domain location=53-532; Score =34.2; E_value=4.2e-10; Accession=PF03215.7; Description=Rad17 cell cycle checkpoint protein
  Pfam module annotation: Pfam domain module=AAA::Rad17; Domain location=102-306::53-532
ERLQEKPRRESSAGRGRRRASGPAPLDSLKAEFDMLSEDFSECFDDLGMSGXSIRKTKELWVDKYKPHSLAELAVHKKKVEDVKKWFEEKLTAPKQTVGGWTLVLTGQTGVGKSATVKAIAEDLGVDLCEWTTPVPTLWAEHVHANSGLRYISKLEEFENFVEKIRKYAMLHPTSITSQRKLNIILIDDIPVTSGNAAFARLGKCLTGLIHSTQVPTVISLTHYHKSESNDTAMWNSEDLESLLQDAGAHKIAFNPVTTNSIKKILMRICKEERYDASEELLHQIAISSGGDIRHAIMSLQYYCLDPRRHSSALATNGTRAGSKSRDSLVPRQESYGLSSALSSPCGRDETLTLFHALGKFXHNKREINGGVDIDLDPFPLKEKLRRNLLKMDVPEKILSQAHGKVRTVADFLYENVLDFIDNEAVDDAWAVVSYLSEADCLLAGSPITSYNSENMAQLIAASVTARGVLFGNAHVASSRWHTIRSPKLWQTEQSFRSNKDQILNERFDCSSSCASCNFSDLVTEFRPLERWIGPRNNGPISSSWHHGVGGSHLVNKLDADGSNYEEEDDDVIEEC

SEQ ID NO: 70031 - protein, 68 aa, Setaria italica
  Transcript Sequence Number=SeqID_4057
PSSCEHHASMRRNYDKSKHKTFIVEWETLEKSIGESTSMRGENLPECCFQRTRHAKTTISLSYSLRCS

SEQ ID NO: 70032 - protein, 879 aa, Setaria italica
  misc_feature (489)..(489): Xaa can be any naturally occurring amino acid
  misc_feature (498)..(498): Xaa can be any naturally occurring amino acid
  Transcript Sequence Number=SeqID_4058
  Gene Ontology: Mol. function=nucleoside-triphosphatase activity; Cellular component=integral to membrane; Biological process=transport
  Homolog annotation: Hit_ID=Q5Z9S8; Match level="QueryCoverage=97%, HitCoverage=92%, E-value=0.0, Identity=59%"; Hit description =Pleiotropic drug resistance protein 12
  Pfam annotation: Domain name=ABC2_membrane; Domain location=495-708; Score=221.8; E_value=1.8e-63; Accession=PF01061.16; Description=ABC -2 type transporter
  Pfam annotation: Domain name=ABC_tran; Domain location=170-393; Score= 51.3; E_value=3.6e-12; Accession=PF00005.19; Description=ABC transporter
  Pfam annotation: Domain name=PDR_assoc; Domain location=713-781; Score=129.9; E_value=8e-36; Accession=PF08370.3; Description=Plant PDR ABC transporter associated
  Pfam module annotation: Pfam domain module=ABC2_membrane::ABC _tran::PDR_assoc; Domain location=495-708::170-393::713-781
TVGSRGGSRGGRSGRDDDEEALRWAAIERLPTYNRVRTAILSSSTEAEANDAKPGGKQQFKEVDVRKLDVGDRQEFIERVFRVADEDNQRFLQKLRNRIDRVGIELPTVEVRFEQLTVEAKCHVGSRALPTLINTARNIAEGALGLCGIRLGRQATLTILKDVSGVVRPSRMTLLLGPPSSGKTTLLLALAGKLDPTLRCAGEVTYNGFALDEFVPQKTAAYISQTDVHVGEMTVKETLDFSARCQGVGTKYDLMTELTRREKEAGIRPEPEVDLFMKATSMEGVQSSLQTDYTLRILGLDICADTIVGDQMQRGISGGQKKRVTTGEMIVGPTKVLFMDEISTGLDSSTTFQIVKCLQQIVHLGEATILMSLLQPAPETFDLFDDIILLSEGQIVYQGPREYVLEFFESCGFRCPERKGTADFLQEVTSRKDQEQYWADKQRPYRYISVPEFAQRFKRFHVGLQLENHLSLPFDKSRCHQAALVFSKXKEANEQLLXASFDKEWLLIKRNSFVYIFKTIQLIIVALISSTVFLRTHMHQRNVDDGFVYIGALLFSLIVNMFNGFAELSLAITRLPVFYKHRDLLFYPAWVFTLPNVVLRIPFSIIESIVWVLVTYYTIGFAPEADRFFKHLLLVFLIQQMAGGLFRATAGLCRSMIIAHTGGALSLLIFFVLGGFLLPKDFIPKWWIWGYWVSPLMYGFNALAVNEFYAPRWMNKFVLDQSGVPKRLGVSMLEGANIFVDKNWYWIGAAALLGFTIFFNILFTLSLMYLNPLGKPQAVISEETAEEAEGNGHRTVRNGSTKSRDGGHSKEMKEMRLSARLSNSSSNGISRIMSVGSNEAAPRRGMVLPFNPLAMSFDNVNYYVDMPAEMKQQGVQDNR

SEQ ID NO: 70033 - protein, 640 aa, Setaria italica
  Transcript Sequence Number=SeqID_4059
  Gene Ontology: Mol. function=nucleoside-triphosphatase activity; Cellular component=integral to membrane; Biological process=transport
  Homolog annotation: Hit_ID=Q5Z9S8; Match level="QueryCoverage=100%, HitCoverage=87%, E-value=0.0, Identity=58%"; Hit description =Pleiotropic drug resistance protein 12
  Pfam annotation: Domain name=ABC2_membrane; Domain location=364-578; Score=247.8; E_value=2.7e-71; Accession=PF01061.16; Description=ABC -2 type transporter
  Pfam annotation: Domain name=ABC_tran; Domain location=72-267; Score =102.1; E_value=1.9e-27; Accession=PF00005.19; Description=ABC transporter
  Pfam module annotation: Pfam domain module=ABC2_membrane::ABC_tran; Domain location=364-578::72-267
ATSSSNGISRIMSVGSNEAAPRRGMVLPFNPLAMSFDNVNYYVDMPAEMKQQGVQDNRLQLLREVTGSFRPGVLTALMGVSGAGKTTLMDVLAGRKTGGYIEGDIRIAGYPKNQATFARISGYCEQNDIHSPQVTVRESLIYSAFLRLPEMIGDQEITDDIKIQFVDEVMELVELDNLKDALVGLPGITGLSTEQRKRLTIAVELVANPSIIFMDEPTSGLDARAAAIVMRTVRNTVDTGRTVVCTIHQPSIDIFEAFDELLLLKRGGQVIYSGQLGRNSQKMVEYFEAIPGVPKIKDKYNPATWMLEVSSIAAEVRLKMDFAEYYKTSDLYKQNKVQVNRLSQPEPGTSDLYFATQYSQSIIGQFKACLWKQWLTYWRSPDYNLVRFFFTLFVALLLGSIFWRIGTKMGDANTLRIVMGGMYTAVMFVGINNCSTVQPIVSIERTVFYRERAAGMYSALPYAIAQVVMEIPYVFVQTTYYTLIIYAMMSLQWTAAKFFWFFFISYFSFLYFTFYGMMTVSISPNHEVAAIFAAAFYSLFNLFSGFFIPRPRIPRWWIWYYWICPLAWTVYGLIVTQYGDLEEEISVPGGEKQTISYYVTHHFGYHRNFMPVVAPVLVLFPVFFAFMYAVCIKKLNFQQR

SEQ ID NO: 70034 - protein, 336 aa, Setaria italica
  misc_feature (15)..(15): Xaa can be any naturally occurring amino acid
  Transcript Sequence Number=SeqID_4060
  Pfam annotation: Domain name=Cir_N; Domain location=10-47; Score =49.3; E_value=1.5e-11; Accession=PF10197.1; Description=N-terminal domain of CBF1 interacting
MALKFLNKKGWHTGXSLRNIERVWKAEQAEEAEKRKTEELKKQVAAEKEKAEFRAMQERAGLRPAQERLDFLYESGLAVGKSSEGFQALQQSAPGAAAASSSSAQASAADSSKAATPGALFEDKPQSANDTWRKLHSDPLLLIRQREQDAIARIKNNPIKMAEIKKSVESEKKQKEEKKEKKKHKHRHHKSKSKRHHSDEDSDLDEISDGKDERRKRVHSSPDRKKEEKRSRHEKKHRRQDSSDSDNDEPQRRWQDVSEDDERRKRVHSSPDRKKEEKRSRHEKKHRRQDSSDSDNDEKQRRRQDVSEDDEPRRRRHDDDEPRRKRHDDDEPRRRH

SEQ ID NO: 70035 - protein, 42 aa, Setaria italica
  Transcript Sequence Number=SeqID_4061
  Gene Ontology: Mol. function=nucleoside-triphosphatase activity; Cellular component=integral to membrane; Biological process=transport
  Homolog annotation: Hit_ID=Q8GU87-2; Match level="QueryCoverage=83%, HitCoverage=2%, E-value=4e-11, Identity=97%"; Hit description =Isoform 2 of Pleiotropic drug resistance protein 6
MYSALPFAFSLVTVEFPYILVQSLIYGTIFYSLGAVHSNDPK

SEQ ID NO: 70036 - protein, 79 aa, Setaria italica
  Transcript Sequence Number=SeqID_4062
  Gene Ontology: Mol. function=nucleoside-triphosphatase activity; Cellular component=integral to membrane; Biological process=transport
  Homolog annotation: Hit_ID=Q8GU87; Match level="QueryCoverage=92%, HitCoverage=5%, E-value=1e-23, Identity=86%"; Hit description =Pleiotropic drug resistance protein 6
  Pfam annotation: Domain name=PDR_assoc; Domain location=7-69; Score =105.5; E_value=1.8e-28; Accession=PF08370.3; Description=Plant PDR ABC transporter associated
YILAVFQQFANQNITMGEAILTGYGLFKGKYWFWIGVGALFGYAIVLNILFTMFLTILNPIGNLQAVVSKDEIRHRDSR

SEQ ID NO: 70037 - protein, 112 aa, Setaria italica
  Transcript Sequence Number=SeqID_4063
  Gene Ontology: Mol. function=nucleoside-triphosphatase activity; Cellular component=integral to membrane; Biological process=transport
  Homolog annotation: Hit_ID=Q8GU87-2; Match level="QueryCoverage=100%, HitCoverage=7%, E-value=7e-57, Identity=91%"; Hit description=Isoform 2 of Pleiotropic drug resistance protein 6
PIIAAPFYTLWNLFCGFMIPRKRIPVWWRWYYWANPVSWTLYGLLTSQFGDLDQPLLLADGVTSTTVASFLEHHFGFRYDFLGVVAAMVAGFCVLFAVVFALAIKYLNFQRR

SEQ ID NO: 70038 - protein, 153 aa, Setaria italica
  Transcript Sequence Number=SeqID_4064
  Gene Ontology: Mol. function=nucleoside-triphosphatase activity; Cellular component=integral to membrane; Biological process=transport
  Homolog annotation: Hit_ID=Q8GU87-2; Match level="QueryCoverage=100%, HitCoverage=10%, E-value=1e-70, Identity=86%"; Hit description =Isoform 2 of Pleiotropic drug resistance protein 6
  Pfam annotation: Domain name=ABC2_membrane; Domain location=1-153; Score=63.1; E_value=1e-15; Accession=PF01061.16; Description=ABC-2 type transporter
FNAMGAMYAAVLFIGITNATSVQPVISIERFVSYRERAAGMYSALPFAFSLVTVEFPYILVQSLIYGTIFYSLGSFEWTAPKFLWYLFFMYFTLLYFTFYGMMTTAITPNHTVAPIIAAPFYTLWNLFCGFMIPRKRIPVWWRWYYWANPVSW

SEQ ID NO: 70039 - protein, 233 aa, Setaria italica
  misc_feature (143)..(143): Xaa can be any naturally occurring amino acid
  Transcript Sequence Number=SeqID_4065
  Gene Ontology: Mol. function=nucleoside-triphosphatase activity; Cellular component=integral to membrane; Biological process=transport
  Homolog annotation: Hit_ID=Q8GU87-2; Match level="QueryCoverage=98%, HitCoverage=15%, E-value=1e-105, Identity=84%"; Hit description =Isoform 2 of Pleiotropic drug resistance protein 6
  Pfam annotation: Domain name=ABC2_membrane; Domain location=1-170; Score=72.8; E_value=1.2e-18; Accession=PF01061.16; Description=ABC-2 type transporter
IQCHGAMYAAVLFIGITNATSVQPVISIERFVSYRERAAGMYSALPFAFSLVTVEFPYILVQSLIYGTIFYSLGSFEWTAPKFLWYLFFMYFTLLYFTFYGMMTTAITPNHTVAPIIAAPFYTLWNLFCGFMIPRKVWDKHAXRIPVWWRWYYWANPVSWTLYGLLTSQFGDLDQPLLLADGVTSTTVASFLEHHFGFRYDFLGVVAAMVAGFCVLFAVVFALAIKYLNFQRR

SEQ ID NO: 70040 - protein, 1150 aa, Setaria italica
  Transcript Sequence Number=SeqID_4066
  Gene Ontology: Mol. function=nucleoside-triphosphatase activity; Cellular component=integral to membrane; Biological process=transport
  Homolog annotation: Hit_ID=Q8GU87-2; Match level="QueryCoverage=99%, HitCoverage=80%, E-value=0.0, Identity=90%"; Hit description=Isoform 2 of Pleiotropic drug resistance protein 6
  Pfam annotation: Domain name=ABC2_membrane; Domain location=218-431; Score=204.1; E_value=3.7e-58; Accession=PF01061.16; Description=ABC -2 type transporter
  Pfam annotation: Domain name=ABC2_membrane; Domain location=873-1087; Score=222.2; E_value=1.4e-63; Accession=PF01061.16; Description=ABC-2 type transporter
  Pfam annotation: Domain name=ABC_tran; Domain location=586-776; Score= 101.2; E_value=3.5e-27; Accession=PF00005.19; Description=ABC transporter
  Pfam annotation: Domain name=PDR_assoc; Domain location=436-500; Score=121.7; E_value=2.4e-33; Accession=PF08370.3; Description=Plant PDR ABC transporter associated
  Pfam module annotation: Pfam domain module=ABC2_membrane::ABC2 _membrane::ABC_tran::PDR_assoc; Domain location=218-431::873 -1087::586-776::436-500
LKEQRNKRPTSLVAEYIMKILGLDICADTIVGDEMIKGISGGQKKRLTTGELLVGSARVLFMDEISTGLDSATTYQIIKYLRHSTHALDGTTIISLLQPAPETYELFDDVILIAEGQIVYQGPREYAVDFFAAMGFKCPERKNVADFLQEVLSKKDQQQYWCHYDYPYQFVSVSKFAEAFKTFIIGKRLHEELAVPYNRYRNHPAALCTSSYGVKRLELLKSNYQWQRLLMKRNSFIYVFKFIQLLLVALITMTVFFRSTMHHDSVDDGIIYLGALYFAIVMILFNGFTEVSMLVTKLPVLYKHRDLHFYPPWAYTLPSWLLSIPTSLYESGMWVLVTYYVVGYDPQFTRFLGQFLLLFFLHQTSLALFRVMASLGRNMIVANTFGSFALLVVMILGGFIITKESIPVWWIWGYWISPMMYAQNAISINEFHGHSWSKQFANQNITMGEAILTGYGLFKEKYWFWIGVGALFGYAIVLNILFTMFLTILNPIGNLQAVVSKDEIRHRDSRRKNDRVALELRSYLHSNSLSGNLKEQKGMVLPFQPLSMCFRNINYYVDVPEELKKQGIAEDRLQLLVDVTGAFRPGILTALVGVSGAGKTTLMDVLAGRKTGGLIEGSITISGYPKNQETFTRISGYCEQNDVHSPCLTVLESLLYSACLRLPSHVDADTQRAFVEEVMELVELNPLSGALVGLPGVNGLSTEQRKRLTIAVELVANPSIVFMDEPTSGLDARSAAIVMRTVRNIVNTGRTIVCTIHQPSIDIFESFDELLFMKRGGQLIYAGPLGAKSRNLVDFFEAIPGVPKIRDGYNPAAWMLEVTSTQMEQILGVDFAEYYRKSKLFQQTREMVEVLSRPSSESKELTFATKYAQPFCAQYIACLWKQNLSYWRNPQYTAVRFFYTVIISLMFGTICWKFGSRRETQHDIFNAMGAMYAAVLFIGITNATSVQPVISIERFVSYRERAAGMYSALPFAFSLVTVEFPYILVQSLIYGTIFYSLGSFEWTAPKFLWYLFFMYFTLLYFTFYGMMTTAITPNHTVAPIIAAPFYTLWNLFCGFMIPRKRIPVWWRWYYWANPVSWTLYGLLTSQFGDLDQPLLLADGVTSTTVASFLEHHFGFRYDFLGVVAAMVAGFCVLFAVVFALAIKYLNFQRR

SEQ ID NO: 70041 - protein, 62 aa, Setaria italica
  Transcript Sequence Number=SeqID_4067
QLILGKETLKHSPLQLSYSRGYWQDLDSLNKAVCHFNLGFSQQFTPNKKKLLHPNESTKQQK

SEQ ID NO: 70042 - protein, 122 aa, Setaria italica
  Transcript Sequence Number=SeqID_4068
GWLLYLSLAAKCGDPHRLLGLAAVFAAAFVVTALLHWVAPGGPAWGWYWWARRGGLGIGAAIPGPRGLPVLGSMGLMTGLAHRKLAAAAAAGGKARRRLMAFSLGETRVVVTADPDVARELL

SEQ ID NO: 70043 - protein, 114 aa, Setaria italica
  Transcript Sequence Number=SeqID_4069
  Gene Ontology: Mol. function=catalytic activity; Cellular component =plasma membrane
  Homolog annotation: Hit_ID=B6U289; Match level="QueryCoverage=100%, HitCoverage=30%, E-value=7e-34, Identity=64%"; Hit description =Catalytic/ protein phosphatase type 2C
SLFSQKGKKGPNQDAVILCQGFGMEDGVFCGVFDGHGRCGQYVSKLVRDYLPFMILSHRNALLLGAGDDDDGDPAFSDASPSSSTDGSGGGSSPSPAQLLDEWREACANAFEAM

SEQ ID NO: 70044 - protein, 57 aa, Setaria italica
  Transcript Sequence Number=SeqID_4070
IPFSMARKQLRLHCYLTCEPHRNPNLIITIVNPLIHSLSNMFCNLLLPVTILILLHP

SEQ ID NO: 70045 - protein, 102 aa, Setaria italica
  Transcript Sequence Number=SeqID_4071
  Gene Ontology: Mol. function=electron carrier activity; Biological process=oxidation reduction
  Homolog annotation: Hit_ID=C0KHL9; Match level="QueryCoverage=89%, HitCoverage=17%, E-value=4e-29, Identity=79%"; Hit description =Putative ferulate 5-hydroxylase
DNREDYPEGSYVPERFAGDDLTTDYLLGQDFRFVPFGAGRRGCPGVGFAVPAMELALASLLYHFDWELPAGGPSKLEMDELNGLSVRLKTTLNLVAKPRSPQ

SEQ ID NO: 70046 - protein, 130 aa, Setaria italica
  Transcript Sequence Number=SeqID_4072
  Gene Ontology: Mol. function=electron carrier activity; Cellular component=integral to membrane; Biological process=oxidation reduction
  Homolog annotation: Hit_ID=C0KHL9; Match level="QueryCoverage=100%, HitCoverage=25%, E-value=3e-40, Identity=66%"; Hit description =Putative ferulate 5-hydroxylase
MDALLERVIAEHRQKRRDGRWEDDGHRDFVDVMLDVNEEAEKNAGGGGVMFDNVAIKAIILDMFAAATDTTYTTLVWAMAELINHPQEMRKVQDEIRGAVGGGDSVTEDHLPKLRYLKCVIKETFRLRTP

SEQ ID NO: 70047 - protein, 493 aa, Setaria italica
  misc_feature (275)..(275): Xaa can be any naturally occurring amino acid
  misc_feature (362)..(362): Xaa can be any naturally occurring amino acid
  Transcript Sequence Number=SeqID_4073
  Gene Ontology: Mol. function=electron carrier activity; Cellular component=integral to membrane; Biological process=oxidation reduction
  Homolog annotation: Hit_ID=C0KHL9; Match level="QueryCoverage=100%, HitCoverage=85%, E-value=1e-150, Identity=60%"; Hit description =Putative ferulate 5-hydroxylase
  Pfam annotation: Domain name=p450; Domain location=1-486; Score =210.5; E_value=4.4e-60; Accession=PF00067.14; Description=Cytochrome P450
SHGPVMLLRLGRVPTVVASSAAAAQEIMKTRDLAFASRPRVSMAERLVYGRDMAFVPYGEHWRQARRVCVLHLLSHRRVQSFRHAREQEAAAMVDRVRRRASPGGDAVNVTALIISYTNGIISRAAFGDEQSFGQHDGGEELTELFADFEGLLGTVTIGDFVPWLAWVDTLMGLDARAARTSARMDALLERVIAEHRQKRRDGRWEDDGHRDFVDVMLDVNEEAEKNAGGGGVMFDNVAIKAIILVRTRSHELLEYFNYLIDEDELHVTSRMMHXCIDLLFVKRMNVQDMFAAATDTTYTTLVWAMAELINHPQEMRKVQDEIRGAVGGGDSVTEDHLPKLRYLKCVIKETFRLRTPLPLLXPRETMEDTELLGYHVPARTRVIINAWAIARDPAAWELPEEFVPERFAGDDLTTDYLLGQDFRFVPFGAGRRGCPGVGFAVPAMELALASLLYHFDWELPAGGPSKLEMDELNGLSVRLKATLNLVAKPWSP

SEQ ID NO: 70048 - protein, 87 aa, Setaria italica
  misc_feature (12)..(12): Xaa can be any naturally occurring amino acid
  Transcript Sequence Number=SeqID_4074
  Gene Ontology: Mol. function=transcription regulator activity; Cellular component=nucleus; Biological process=regulation of transcription
  Homolog annotation: Hit_ID=B6UB60; Match level="QueryCoverage=95%, HitCoverage=21%, E-value=1e-35, Identity=90%"; Hit description =Inducer of CBF expression 2
FLSFLRMREGHXAVNIHMFCARRPGILLSTMTALDGLGLDIEQAVISCFNGFAMDVFRAEQCGDGPGLVPEEIKAVLLHTAGLTNAM

SEQ ID NO: 70049 - protein, 82 aa, Setaria italica
  Transcript Sequence Number=SeqID_4075
  Gene Ontology: Mol. function=transcription regulator activity; Cellular component=nucleus; Biological process=regulation of transcription
  Homolog annotation: Hit_ID=Q2R3F6; Match level="QueryCoverage=89%, HitCoverage=13%, E-value=1e-31, Identity=84%"; Hit description=Helix- loop-helix DNA-binding domain containing protein, expressed
YPLCALRAGNIHMFCARRPGLLLNAMKAIEGLGLDVQQAVVSCFNGFTLDVFKAELCKDGPGLMPEEIKTVLLQSTGFHGVM

SEQ ID NO: 70050 - protein, 307 aa, Setaria italica
  Transcript Sequence Number=SeqID_4076
  Gene Ontology: Mol. function=transcription regulator activity; Cellular component=nucleus; Biological process=regulation of transcription
  Homolog annotation: Hit_ID=B6UB60; Match level="QueryCoverage=94%, HitCoverage=77%, E-value=1e-117, Identity=74%"; Hit description =Inducer of CBF expression 2
  Pfam annotation: Domain name=HLH; Domain location=118-165; Score =36.9; E_value=8.1e-08; Accession=PF00010.18; Description=Helix-loop -helix DNA-binding domain
APPSSSTPGGGGGSALPAFHDFTSNNPFDDAGQFLAAPPPAQAEHQQVQKGGFLAPAAAPAFVHGGMDWDDDEEIEHSVDASSMAISASMENAAGAATGGGGGGGGSGRGKNKKGLPAKNLMAERRRRKKLNDRLYMLRSVVPKISKMDRASILGDAIEYLKELLQRINDLHNEIESAPSSSVVGPTSASFHPSTPTLQTFPGHVKEELCPAAFPSPNGQQATVEVRMREGHAVNIHMFCARRPGILLSTMTALDGLGLDIEQAVISCFNGFAMDVFRAEQCGDGPGLVPEEIKAVLLHTAGLQNAM

SEQ ID NO: 70051 - protein, 311 aa, Setaria italica
  Transcript Sequence Number=SeqID_4077
  Gene Ontology: Mol. function=transcription regulator activity; Cellular component=nucleus; Biological process=regulation of transcription
  Homolog annotation: Hit_ID=Q2R3F6; Match level="QueryCoverage=99%, HitCoverage=57%, E-value=1e-101, Identity=64%"; Hit description =Helix-loop-helix DNA-binding domain containing protein, expressed
  Pfam annotation: Domain name=HLH; Domain location=122-169; Score =36.9; E_value=8.1e-08; Accession=PF00010.18; Description=Helix-loop -helix DNA-binding domain
RGKAAVLRPLEIFPPVGAQPTLFQKRALRRNASEEDDDKKRKAEALAAAAGASSAGGGDAVLDDADDDDGGSIDASGLNYDSEDARGVEESGKKDDKDSNANSTVTAGGAGDGKGKRKGMPAKNLMAERRRRKKLNDRLYMLRSVVPKISKMDRASILGDAIEYLKELLQKINDLQNELESPPSTASLPPTPTSFHPLTPTLPTLPSRVKEELCTSALPSPTSQQPRVEVRMREGRAVNIHMFCARRPGLLLNAMKAIEGLGLDVQQAVVSCFNGFTLDVFKAELCKDGPGLMPEEIKTVLLQSTGFHGVM

SEQ ID NO: 70052 - protein, 218 aa, Setaria italica
  Transcript Sequence Number=SeqID_4078
  Gene Ontology: Mol. function=RNA polymerase II transcription factor activity; Cellular component=cytoplasm; Biological process=protein transport
  Homolog annotation: Hit_ID=A6MD19; Match level="QueryCoverage=100%, HitCoverage=100%, E-value=1e-100, Identity=80%"; Hit description =EAP30 family protein
  Pfam annotation: Domain name=EAP30; Domain location=1-190; Score =234.4; E_value=2.9e-67; Accession=PF04157.8; Description=EAP30
MKEQLATFRSQLEEFARKHKSDIRKNPIFRQQFHEMCAKVGVDPLASNKGVWAELLGIGDFYYEIGVQIVDICIATRSHNGGLIDLLDLRKLLCQKRKATLESLSEDDCLRAISKLKVLGSGFEVISVGRRKLVRSVPTELNKDHSGILGLAQAEGYVTVEQVEKEFSWSAGRAIDALETLLKEGLAMIDDGHRDGKRRYWFPCVTVSSDTTGSETKS

SEQ ID NO: 70053 - protein, 678 aa, Setaria italica
  Transcript Sequence Number=SeqID_4079
  Gene Ontology: Mol. function=protein kinase activity; Cellular component=plastoglobule; Biological process=protein amino acid phosphorylation
  Homolog annotation: Hit_ID=B9SPP7; Match level="QueryCoverage=97%, HitCoverage=98%, E-value=0.0, Identity=81%"; Hit description=Protein ABC1, mitochondrial, putative
  Pfam annotation: Domain name=ABC1; Domain location=210-330; Score =153.6; E_value=6e-43; Accession=PF03109.8; Description=ABC1 family
  Subcellular localization annotation: CTP_CleavageSite=52; ConfidenceScore=5.55e-01
GSSMELCTACIWTSAQRSHTLTPNRRASYHGFARSISLVPQRRRRSTLYVTNAASTSAPVSSQNITQLPRTKSISSDKPSSALEQLDIERGVCIPFRKYTPEMVRKKVMDSRGSILSLASRGVEIIWKLGFYWSSLVYDFLVGRDEEIVPYRARQLRNLLCDLGPSFIKAGQVLANRPDIIREDYMNELCILQDDVPPVPNQVAFAIIEEELGQPLERLFSKISSGTIAAASLGQVYRATLRETGEDVAIKVQRPGIEPIIYRDLFLFRTLASFLNGISLQKLGCNAELIVDEFGEKLLEELDYTLEATNIEDFLENFKDDPTVKIPRVYKQLSGSRVLVMEWIDGIRCTDPQAIKEAGIDVEGFLTVGVSAALRQLLEFGLFHGDPHPGNIFAMRDGRIAYVDFGNVAVLSQQNKQILIDAVVHAVNEDYAEMANDFTRLGFLASGTDVAPIIPALEAIWQNSAGKGLADFNFRSVTGKFNQLVYNYPIRIPERFSLVIRSLLTQEGICFTLKPDFKFLEVAYPYVAKRLLTDPNPALRERLIQVLFKDGAFQWKRLENLIVLAKENVSKMSSNPALKKNSSQAMRSRQLESKLDLSETIKDGARMFLIDAGIRRQLILAFTEDSKLHVEELVDVYRLVEDQIDMPSLAREVLQDLPSVARDFMLSWSDSILSDRQY

SEQ ID NO: 70054 - protein, 58 aa, Setaria italica
  Transcript Sequence Number=SeqID_4080
LQHLQSVHKWDLSLERDAEEEAEFRAKMKEQANAPEDLPPQFLILLENSFSVLHANHG

SEQ ID NO: 70055 - protein, 479 aa, Setaria italica
  misc_feature (159)..(159): Xaa can be any naturally occurring amino acid
  misc_feature (175)..(175): Xaa can be any naturally occurring amino acid
  Transcript Sequence Number=SeqID_4081
  Gene Ontology: Cellular component=nucleus
  Homolog annotation: Hit_ID=B4FLB4; Match level="QueryCoverage=94%, HitCoverage=94%, E-value=0.0, Identity=87%"; Hit description =Glutamate-rich WD repeat-containing protein 1
  Pfam annotation: Domain name=WD40; Domain location=152-192; Score =3.1; E_value=17; Accession=PF00400.24; Description=WD domain, G-beta repeat
  Pfam annotation: Domain name=WD40; Domain location=217-256; Score =27.7; E_value=4.6e-05; Accession=PF00400.24; Description=WD domain, G-beta repeat
  Pfam annotation: Domain name=WD40; Domain location=263-302; Score =36.6; E_value=9.7e-08; Accession=PF00400.24; Description=WD domain, G-beta repeat
  Pfam annotation: Domain name=WD40; Domain location=307-346; Score =20.5; E_value=0.007; Accession=PF00400.24; Description=WD domain, G -beta repeat
  Pfam annotation: Domain name=WD40; Domain location=353-392; Score =27.0; E_value=7.9e-05; Accession=PF00400.24; Description=WD domain, G-beta repeat
  Pfam module annotation: Pfam domain module=WD40::WD40::WD40::WD40::WD4 0; Domain location=152-192::217-256::263-302::307-346::353-392
MGRTIKKAKKAKSKKTKKVEASSSSNPVVASGPAKVWQPGVDALEDGEELQFDPEAYNYLRGFSIGWSCLSFDVVRDQLGLVRSEFPHTFYGVAGTQAEKAPWNYIGIFKLSNISGKKREPIPPSAVDGDTDVDSDSSSDEEDEEINEDTKPILHLKKXAHAGCVNRIRSMTQKXPHICATWGDTGHVQVWDLSSFLNSLAESGAPAPKEDDIIHKHLPVKVFSGHKDEGYAIDWSPLVAGRLVSGDCNKCIHLWEPTPTNWNVDPNPFVGHSASVEDLQWSPTEADIFASCSVDGTIAIWDIRTGKKPRMSVKAHKTDVNVISWNRLASCMIASGCDDGSFSVRDLRSIQEDSLVAHFEYHKKAITSIEWSPHEASSLAVTSEDHQLTIWDLSLERDAEEEAEFRAKMKEQANAPEDLPPQLLFVHQGQRDLKELHWHPQIPSMIVSTAIDGFNVLMPSNIDTTIPGNTDATMASAEP

SEQ ID NO: 70056 - protein, 475 aa, Setaria italica
  Transcript Sequence Number=SeqID_4082
  Gene Ontology: Cellular component=nucleus
  Homolog annotation: Hit_ID=B4FLB4; Match level="QueryCoverage=95%, HitCoverage=94%, E-value=0.0, Identity=88%"; Hit description =Glutamate-rich WD repeat-containing protein 1
  Pfam annotation: Domain name=WD40; Domain location=152-188; Score =6.3; E_value=7.1; Accession=PF00400.24; Description=WD domain, G -beta repeat
  Pfam annotation: Domain name=WD40; Domain location=213-252; Score =28.0; E_value=3.8e-05; Accession=PF00400.24; Description=WD domain, G-beta repeat
  Pfam annotation: Domain name=WD40; Domain location=259-298; Score =36.3; E_value=1.2e-07; Accession=PF00400.24; Description=WD domain, G-beta repeat
  Pfam annotation: Domain name=WD40; Domain location=303-342; Score =20.5; E_value=0.007; Accession=PF00400.24; Description=WD domain, G -beta repeat
  Pfam annotation: Domain name=WD40; Domain location=349-388; Score =27.0; E_value=7.9e-05; Accession=PF00400.24; Description=WD domain, G-beta repeat
  Pfam module annotation: Pfam domain module=WD40::WD40::WD40::WD40::WD4 0; Domain location=152-188::213-252::259-298::303-342::349-388
MGRTIKKAKSKKTKKVEASSSSNPAVASGPAKVWQPGVDALEDGEELQFDPEAYNYLRGFSIGWSCLSFDVVRDQLGLVRSEFPHTFYGVAGTQAEKAPWNYIGIFKLSNISGKKREPIPASAVDGDTDVDSDSSSDEEDEEINEDTKPVLHLKKVAHAGCVNRIRSMTQKPHLCATWGDTGHVQVWDLSSFLNSLAESGAPAPKEDDIIHKHLPVKVFSGHKDEGYAIDWSPLVTGRLVSGDCNKCIHLWEPTPTNWNVDANPFVGHSASVEDLQWSPTEADIFASCSVDGTIAIWDIRTGKKPRMSVKAHKTDVNVISWNRLASCMIASGCDDGSFSVRDLRSIQEDSLVAHFEYHKKAITSIEWSPHEASSLAVTSEDHQLTIWDLSLERDAEEEAEFRAKMKEQANAPEDLPPQLLFVHQGQRDLKELHWHPQIPSMIISTAIDGFNVLMPSNIDTTIPGNTDAAMASAEP

SEQ ID NO: 70057 - protein, 1386 aa, Setaria italica
  misc_feature (74)..(74): Xaa can be any naturally occurring amino acid
  misc_feature (237)..(237): Xaa can be any naturally occurring amino acid
  misc_feature (320)..(320): Xaa can be any naturally occurring amino acid
  misc_feature (412)..(412): Xaa can be any naturally occurring amino acid
  misc_feature (469)..(469): Xaa can be any naturally occurring amino acid
  misc_feature (1033)..(1033): Xaa can be any naturally occurring amino acid
  Transcript Sequence Number=SeqID_4083
  Gene Ontology: Mol. function=magnesium chelatase activity; Biological process=chlorophyll biosynthetic process
  Homolog annotation: Hit_ID=Q10M50; Match level="QueryCoverage=99%, HitCoverage=99%, E-value=0.0, Identity=89%"; Hit description =Magnesium-chelatase subunit H family protein, expressed
  Pfam annotation: Domain name=CobN-Mg_chel; Domain location=244-1368; Score=1482.2; E_value=0; Accession=PF02514.8; Description =CobNMagnesium Chelatase
  Subcellular localization annotation: CTP_CleavageSite=48; ConfidenceScore=5.71e-01
MSSSLVFATATGAAAQKKLLAAPVPLHSFLLSSRRQPPSTRRGATTIRCAVAGGNGLFTQTKPEVRRVVPEPSXSPRVKVVYVVLEAQYQSSITAAVQQLNADARRSASFEVVGYLVEELRDADTYATFRADLADANVFIGSLIFVEELALKVKAAVEEHRERMDAVLVFPSMPEVMRLNKLGSFSMSQLGQSKSPFFQLFKRNKANSSNFADSMLKLVRTLPKVLKYLPSDKAQDXARLYILSLQFWLGGSPDNLQNFLKMIAGSYVPALKAAGGIKYDDPVLYLDAGIWHPLAPTMYEDVKEYLNWYGTRRDANDKLXDPDAPVIGLVLQRSHIVTGDDGHYVAVIMELEAMGAKVIPIFAGGLDFSGPVQRYLVDPITGKPFVNAVVSLTGFALVGGPARQDHPKAIAXALQKLDVPYIVALPLVFQTTEEWLNSTLGLHPIQVALQVALPELDGGMEPIVFAGRXDPRTGKSHALHKRVEQLCTRAIRWAKLKRKTKEEKKLAITVFSFPPDKGNVGTAAYLNVFSSIYSVLSDLKKDGYNVEGLPDTPEALIEEVIHDKEAQFNSPNLNVAYRMNVREYQSLTSYASLLEENWGKPPGNLNSDGENLLVYGKQYGNVFIGVQPTFGYEGDPMRLLFSKSASPHHGFAAYYTFVEKIFQADAVLHFGTHGSLEFMPGKQVGMSDTCYPDSLIGNIPNIYYYAANNPSEATVAKRRSYANTISYLTPPAENAGLYKGLKQLSELISSYQSLKDTGRGPQIVSSIISTAKQCNLDKDVPLPEEGEELPPKERDLIVGKVYAKIMEIESRLLPCGLHVIGEPPSAIEAVATLVNIAALDRPEEGISSLPSILAATVGRDIEDVYRGSDKGILADVELLRQITEASRGAITSFVEKTTNSKGQVVNVTNNLSNILGFGLSEPWVQYLSTTKFIRADREKLRVLFGFLGECLKLIVQDNELGSLKLALEGSYVEPGPGGDPIRNPKVLPTGKNIHALDPQSIPTAAALKSAKIVVDRLLERQKADNGGKYPETXALVLWGTDNIKTYGESLAQVLWMIGVRPVADTFGRVNRVEPVSLEELGRPRIDVVVNCSGVFRDLFINQMNLLDRAVKMVAELDEPVEMNYVRKHAQEQAEELGVPLREAATRVFSNASGSYSSNVNLAVENASWTDEKQLQDMYLSRKSFAFDSDAPGAGMKEKRKAFELALATADATFQNLDSSEISLTDVSHYFDSDPTKLVQGLRKDGRAPASYIADTTTANAQVRTLSETVRLDARTKLLNPKWYEGMMKSGYEGVREIEKRLTNTVGWSATSGQVDNWVYEEANSTFIEDEAMRKRLMETNPNSFRKLVQTFLEASGRGYWETSEENLEKLRELYSEVEDKIEGIDR

SEQ ID NO: 70058 - protein, 89 aa, Setaria italica
  Transcript Sequence Number=SeqID_4084
  Gene Ontology: Mol. function=two-component response regulator activity; Cellular component=endoplasmic reticulum membrane; Biological process=two-component signal transduction system (phosphorelay)
  Homolog annotation: Hit_ID=Q9FXT2; Match level="QueryCoverage=100%, HitCoverage=11%, E-value=1e-25, Identity=68%"; Hit description =Ethylene receptor homologue
EPHPFMVVLLLTAAKFLTALVSFLTAITLLTLIPQLLRVKVRESLLWIKAHELDREVVLMKRQEEASWHVRMLTQEIRRSLDRHTVLYT

SEQ ID NO: 70059 - protein, 197 aa, Setaria italica
  Transcript Sequence Number=SeqID_4085
  Gene Ontology: Mol. function=nucleoside-triphosphatase activity; Cellular component=chloroplast; Biological process=protein metabolic process
  Homolog annotation: Hit_ID=Q9LLI0; Match level="QueryCoverage=97%, HitCoverage=19%, E-value=1e-75, Identity=74%"; Hit description=ClpB
LSVLCLRCSLATTLDEYRKYIEKDAALERRFQQVYCGEPAVEDTISILRGLRERYELHHGVKISDGALVAAAVLSDRYITGRFLPDKAIDLVDEAAAKLKMEITSKPIELDEVDREIIRLEMEKLSLKNDTDKASKERLSKLEAELESLKQKQKNLSEHWEYEKSLMTRIGSIKEETDRVNLEIEAAEREYDLSRAA

SEQ ID NO: 70060 - protein, 212 aa, Setaria italica
  Transcript Sequence Number=SeqID_4086
  Gene Ontology: Mol. function=DNA binding; Cellular component=nucleus; Biological process=regulation of transcription
  Homolog annotation: Hit_ID=B6TYA5; Match level="QueryCoverage=70%, HitCoverage=67%, E-value=2e-39, Identity=63%"; Hit description=NAC domain-containing protein 68
  Pfam annotation: Domain name=NAM; Domain location=1-113; Score=60.0; E_value=9.2e-15; Accession=PF02365.7; Description=No apical meristem (NAM) protein
RKALACPLPAGIIPDADLARLHPWDLLPPAAAGGDADGERFFFHLPATRCWRKGGGAARAAGTGLWRPSGKEKLVVSPRCKRPVGTKRTLVFYRGRGRAAARTDWAMHEYRLLPSGLHPFHGCAAAGNAPTAHVSCHGAAADWVVCRIFKRTKPAAHRGQEDDDAEEPSSPSSASSCVTDTSEAGDQEQDGDDEESSSSSSNGGSSCSVASN

SEQ ID NO: 70061 - protein, 88 aa, Setaria italica
  Transcript Sequence Number=SeqID_4087
  Gene Ontology: Mol. function=hydrolase activity, acting on acid anhydrides, in phosphorus-containing anhydrides
  Homolog annotation: Hit_ID=A6MZW3; Match level="QueryCoverage=100%, HitCoverage=94%, E-value=4e-43, Identity=96%"; Hit description =Pde317 cell cycle and DNA processing (Fragment)
  Pfam annotation: Domain name=DSHCT; Domain location=1-86; Score= -94.2; E_value=0.025; Accession=PF08148.4; Description=DSHCT (NUC185) domain
QEKHNVKIPCEIDAQFAGMVEAWASGLTWREIMMDSAMDDGDLARLLRRTIDLLAQIPKLPDIDPVLQKNAQIACSVMDRVPISELAG

SEQ ID NO: 70062 - protein, 141 aa, Setaria italica
  Transcript Sequence Number=SeqID_4088
  Gene Ontology: Mol. function=cation transmembrane transporter activity; Cellular component=integral to membrane
  Homolog annotation: Hit_ID=Q259F9; Match level="QueryCoverage=90%, HitCoverage=4%, E-value=2e-29, Identity=58%"; Hit description =H0124B04.17 protein
  Subcellular localization annotation: CTP_CleavageSite=71; ConfidenceScore=5.30e-01
PTQSAANPDGGMDLSRFASGVGPSRAAPRPGLQIGAAGNGFRTCSLRRPRHRGGGGGGNGNLMFSHALRGCATSGGGLFYLASKHGSPLGFRIRGRPPRCQGNDSLGYVDGPLEGTKGSGEVNDDEATSSDSDDEKGGGGR

SEQ ID NO: 70063 - protein, 332 aa, Setaria italica
  Transcript Sequence Number=SeqID_4089
  Gene Ontology: Mol. function=enzyme inhibitor activity; Cellular component=extracellular region; Biological process=specification of floral organ number
  Homolog annotation: Hit_ID=B6TH65; Match level="QueryCoverage=93%, HitCoverage=93%, E-value=1e-155, Identity=85%"; Hit description =Polygalacturonase inhibitor 1
  Pfam annotation: Domain name=LRRNT_2; Domain location=27-66; Score =40.6; E_value=6.2e-09; Accession=PF08263.4; Description=Leucine rich repeat N-terminal domain
  Pfam annotation: Domain name=LRR_1; Domain location=120-142; Score =13.3; E_value=0.87; Accession=PF00560.25; Description=Leucine Rich Repeat
  Pfam annotation: Domain name=LRR_1; Domain location=144-166; Score =14.9; E_value=0.33; Accession=PF00560.25; Description=Leucine Rich Repeat
  Pfam annotation: Domain name=LRR_1; Domain location=168-187; Score =18.0; E_value=0.038; Accession=PF00560.25; Description=Leucine Rich Repeat
  Pfam annotation: Domain name=LRR_1; Domain location=191-211; Score =7.3; E_value=12; Accession=PF00560.25; Description=Leucine Rich Repeat
  Pfam annotation: Domain name=LRR_1; Domain location=214-242; Score =5.7; E_value=25; Accession=PF00560.25; Description=Leucine Rich Repeat
  Pfam annotation: Domain name=LRR_1; Domain location=261-283; Score =16.1; E_value=0.15; Accession=PF00560.25; Description=Leucine Rich Repeat
  Pfam annotation: Domain name=LRR_1; Domain location=285-306; Score =11.3; E_value=2.1; Accession=PF00560.25; Description=Leucine Rich Repeat
  Pfam annotation: Domain name=LRR_1; Domain location=95-118; Score =2.1; E_value=1.2e+02; Accession=PF00560.25; Description=Leucine Rich Repeat
  Pfam module annotation: Pfam domain module=LRRNT_2::LRR_1::LRR_1::LRR_ 1::LRR_1::LRR_1::LRR_1::LRR_1::LRR_1; Domain location=27-66::120 -142::144-166::168-187::191-211::214-242::261-283::285-306::95-118
  Subcellular localization annotation: CTP_CleavageSite=64; ConfidenceScore=5.35e-01
MASTASSFLVVFLLVAAAATTPARSCAPSDLHALLSVKAALGNPATLSSWSPSSPNCCAWDHLRCDDAGRVNNVFIDGADDVHGQIPSAVGGLSALMSLSLFRLPGLTGTIPPCLTALSNLQFLTISHTNVSGPIPEALARLRSLDSVDLSNNKLCGGIPAAFADLPNLRSLDLRHNQLTGPIPAGLVQGQFRSLILSYNQLSGPIPRDDAQDEINTVDLSHNKLTGDPSHLFVPGRPIGKVDLSWNYLDFDLSKLVFPPELTYLDLSHNRIRGTVPASLERLSTLQKLDLSYNNLCGPLPRGHGVIKHGCKPYAHNECHHGTPLAGCQDLS

SEQ ID NO: 70064 - protein, 257 aa, Setaria italica
  Transcript Sequence Number=SeqID_4090
  Gene Ontology: Mol. function=ATPase activity, coupled to transmembrane movement of substances; Cellular component=integral to membrane; Biological process=transport
  Homolog annotation: Hit_ID=Q6UC91; Match level="QueryCoverage=100%, HitCoverage=64%, E-value=1e-121, Identity=55%"; Hit description=P -glycoprotein 1
  Pfam annotation: Domain name=ABC_membrane; Domain location=1-181; Score=-23.4; E_value=0.017; Accession=PF00664.15; Description=ABC transporter transmembrane region
NASARVAARLALDAQNVRSAIGDRISVIVQNSALLLVACTAGFVLQWRLALVLLAVFPLVVGATVLQKMFMKGFSGDLEAAHARATQIAGEAVANLRTVAAFNAERKITGLFESNLRGPLRRCVWKGQIAGIGYGVAQFLLYASYALGLWYAAWLVKHGVSDFSRTIRVFMVLMVSANGAAETLTLAPDFVKGGRAMRSLFETIDRKTEVEPDDVDAAPVPDRPRGEVELRHVDFAYPTRPDVQVLRDLSLRARAGK

SEQ ID NO: 70065 - protein, 146 aa, Setaria italica
  Transcript Sequence Number=SeqID_4091
  Gene Ontology: Mol. function=ATPase activity, coupled to transmembrane movement of substances; Cellular component=integral to membrane; Biological process=transport
  Homolog annotation: Hit_ID=Q6UC91; Match level="QueryCoverage=93%, HitCoverage=56%, E-value=2e-46, Identity=57%"; Hit description=P -glycoprotein 1
  Pfam annotation: Domain name=ABC_tran; Domain location=39-145; Score=- 6.1; E_value=1.2e-05; Accession=PF00005.19; Description=ABC transporter
MARLGAGCRLLPCRHVDFAYTTRPDVQVLRDLSLRARAGKTLALVGPSGCGKSSVLALVLRFYEPSSGRVLLDGKDVRKYNLRALRRVVAVVPQEPFLFAASIHDNIAYGREEGATEAEVVEAAAQANAHKFISALPEGYRTQVGE

SEQ ID NO: 70066 - protein, 70 aa, Setaria italica
  Transcript Sequence Number=SeqID_4092
SYGEWWRCEREIKAGAQQTAQTGKKGVRKRGKKREEARGWRRRRRELRLGLGVAAVQGWAGWEEREMAVG

SEQ ID NO: 70067 - protein, 48 aa, Setaria italica
  Transcript Sequence Number=SeqID_4093
LNCAADISQFQWEIEFRSTYSSHIRTSKSIVLLSERSIPIALLQKESV

SEQ ID NO: 70068 - protein, 120 aa, Setaria italica
  Transcript Sequence Number=SeqID_4094
  Gene Ontology: Mol. function=sequence-specific DNA binding; Cellular component=nucleus
  Homolog annotation: Hit_ID=Q7XAA6; Match level="QueryCoverage=91%, HitCoverage=17%, E-value=1e-14, Identity=43%"; Hit description=WRKY transcription factor 35
MEGHVAMEEWKDPNPPESLMRGFQTGTFPPDAEVAKAGFEKEGRSLPMTPQFGQKSSPGSSLAERMQARAGFRVPKLSMPFSTAVGVDNSVPGAPSPYLTIPPGLSPATLLDSPVFIPMA

SEQ ID NO: 70069 - protein, 62 aa, Setaria italica
  Transcript Sequence Number=SeqID_4095
SGAWRTRPSCRVAELGLPCLFHSRPNDHGPSSSVKIHMGSNHLVNKKAPLSILMFIRLRYIL

SEQ ID NO: 70070 - protein, 111 aa, Setaria italica
  Transcript Sequence Number=SeqID_4096
  Gene Ontology: Mol. function=nucleoside-triphosphatase activity; Cellular component=myosin complex
  Homolog annotation: Hit_ID=Q0WPU1; Match level="QueryCoverage=100%, HitCoverage=7%, E-value=8e-41, Identity=70%"; Hit description=Myosin- like protein
LLVSTLCSRSIHTREGIIVKALDCAAAAANRDALAKTVYARLFDWLVENINKSIGQDVDSKVQIGVLDIYGFESFKNNSFEQFCINFANEKLQQHFNEHVFKMEQEEYKSE

SEQ ID NO: 70071 - protein, 60 aa, Setaria italica
  Transcript Sequence Number=SeqID_4097
LAWVYDSMNISLSVNDSRVDGNASEHVDKMMKLWRCTIYFLRWTRKFQFCIKSSVRKCMQ

SEQ ID NO: 70072 - protein, 270 aa, Setaria italica
  Transcript Sequence Number=SeqID_4098
MRISEQLGSGAYYMQVDQGEDNEDDKTDRQPTQCLNLEISGSFLTCIRLMLARDRNAFFQSEYNDRIKYEELTAAQNQLTSTKNCKRVSTELPLLTLTIGNKKFIRKGDCNILASFCYVTQLVVCKLCYEKLIRRVDIPFSDITSLLVCFDDIRFDTLRIEARSSLQYFSTDKPLPGKFTRWKVDNSKEDDCFPESKFVFVEIEKGMLEKGLAKLLYIDPRLQRSVEFARASDDQHMYQGRLHAHMQQTNMSALQPLLSVNALPNIGGRM

SEQ ID NO: 70073 - protein, 204 aa, Setaria italica
  Transcript Sequence Number=SeqID_4099
HSEHADQPQGQQANGLPLDGTNPAPFHFSLEQYRLQLDQVLQLYNEQVRLSQQQEISIQNATLLNLLLTDALVQKDEEIAGLRIELQRKQENLENAQQLAVMALETNDSLIRRLPPVQQETNSHVSSNDVDAPCSGDEASSVARTAAETTACPVCGAVKGDAVEARFGEVKKSSDQNLLFLMRLIRACVFSFLCCIRCCSLVLS

SEQ ID NO: 70074 - protein, 172 aa, Setaria italica
  Transcript Sequence Number=SeqID_4100
TCRSTSGQQANGLPLDGINPVPFGFSLEQHRLQLDQVLQLYNEQVRVSLQQEMSIQNLTLLNLRTTDALIQKVEEVASLKEEVVSLHVELQRKQGDIEAAQQLAVMALETNDSLIRRLPPVQQETNSHVSSNDVDAPCSGDEASSVARTAAETTACPVCGAVKGDAVEARFG

SEQ ID NO: 70075 - protein, 65 aa, Setaria italica
  Transcript Sequence Number=SeqID_4101
  Gene Ontology: Mol. function=RNA binding; Biological process =regulation of transcription, DNA-dependent
  Homolog annotation: Hit_ID=Q9LK54; Match level="QueryCoverage=96%, HitCoverage=11%, E-value=4e-19, Identity=65%"; Hit description =Similarity to SUN and FMU proteins
QCSIDCEENEKRITAFVQRHPEFAIHSVCGYVPTEFVTDEGFYSSNPTKHSMDGAFAARLVRSMD

SEQ ID NO: 70076 - protein, 123 aa, Setaria italica
  Transcript Sequence Number=SeqID_4102
  Gene Ontology: Mol. function=protein binding
  Homolog annotation: Hit_ID=Q7XZU0; Match level="QueryCoverage=91%, HitCoverage=6%, E-value=9e-28, Identity=57%"; Hit description=SAC domain protein 9
ELYMREFSLTRMEDRFVNQAILYMQVTIVKESGKLVVEEYRLPEVKASTPLYFDFPDLQQDVRCVMFRLLGDVTAFVDDISELDGLNLRNLPLASGLSLSNKIKLYYYADTYEMGKIGSLSAV

SEQ ID NO: 70077 - protein, 70 aa, Setaria italica
  Transcript Sequence Number=SeqID_4103
CLFGPFFFFGFHDQMMIQFEGSWDFASRISGSSILGRISGNSVRLQFQKLPGTFVNICTVFFFAHTYFKH

SEQ ID NO: 70078 - protein, 622 aa, Setaria italica
  Transcript Sequence Number=SeqID_4104
  Gene Ontology: Mol. function=protein binding
  Homolog annotation: Hit_ID=Q7XZU0; Match level="QueryCoverage=98%, HitCoverage=38%, E-value=1e-148, Identity=48%"; Hit description=SAC domain protein 9
SPSWSFCRERDRALLSIGVIPATVDPNRSVDYSYLLKLSSLADNLALLGHAVLEDRVNASIGLEKGSGHAIDFWNISENDDSCYDGACEVRAPSSLQASATRENQSVFVECSQCERTVCKACCAGRGAFLLLNTYRDLKIYGGSQGGGYSALADSFVCKSCCSEIIKRALYVDYVRVLQSLRRKYRAEKSAMDAVNQVCQLESSKVSDLSQSIQTGQRQLKQILDGEESLAEFPYASFLQTVETADDSEPLLSLLAPLGAGDYNSYWKAPGANTSVEFSIVLGGLSDVAGVAIIVSSCGYTSDCPIVEIWASNRIQREDRTFIGKWDVQDIISSSPQLCGPEKSSRISGEPRHIKFHFPNPIRCRIISIKMTLPHIGSHSTKFSEEFDLLSLGDSSFYESKPTSPQNSFIHAKRIIVFGSSLRKEMGSDTSGGIMRMKSYLDRSPPLGRFRIPVEAERLRDNDLVLEHYLLPNSPGIAGFRLDFFSIIRPHVTHSPSSSELYMREFSLTRMEDRFVNQAILYMQVTIVKESGKLVVEEYRLPEVKASTPLYFDFPDLQQDVRCVMFRLLGDVTAFVDDISELDGLNLRNLPLASGLSLSNKIKLYYYADTYEMGKIGSLSAV

SEQ ID NO: 70079 - protein, 872 aa, Setaria italica
  misc_feature (152)..(152): Xaa can be any naturally occurring amino acid
  Transcript Sequence Number=SeqID_4105
  Gene Ontology: Mol. function=zinc ion binding; Cellular component =late endosome membrane; Biological process=intracellular protein transport
  Homolog annotation: Hit_ID=B9RW74; Match level="QueryCoverage=98%, HitCoverage=86%, E-value=0.0, Identity=72%"; Hit description =Vacuolar membrane protein pep3, putative
  Pfam annotation: Domain name=Clathrin; Domain location=469-636; Score= -0.6; E_value=0.0047; Accession=PF00637.12; Description=Region in Clathrin and VPS
  Pfam annotation: Domain name=Pep3_Vps18; Domain location=133-281; Score=178.7; E_value=1.6e-50; Accession=PF05131.6; Description =Pep3Vps18deep orange family
  Pfam module annotation: Pfam domain module=Clathrin::Pep3_Vps18; Domain location=469-636::133-281
SITEASTKEVILGTESGQIFEMAVDEADKREKYVKPLFELTEQREGIKDLQMETAVVGNSTRYYVMAVTPTRLYSFTGIGSLETVFASYSNRAIHFMELPGEIPNSELHFFIKQRRAKHFGWLSGSGIYHGELNFGAQHSSTSGDENFVENXKGFFDYSKLGDSGTKPRSFALSEFHFLLLIGDKIKVVNRISQQMVEELVVDNTPETSRGIVGLCSDASTGLFYAYDESSIFQISTSDEGRDMWQVYLDMNHYAAALSHCRNPFQRDQVYLVQADAAFAAKEYYIAASFYAKMNYILSFEEISLKFISIGEQDALRTFLLRRLDNLTKDDRMQITMISTWVTELYLDKINRLLLEDSTGTTTNSVAESNSSEYRSIVNEFRAFLSDSKDVLDEATTMRLLESYGRVDELVYFAGLKEQYEIVVHHYIQQGEARKALEVLQRRNVPVDLVYKFAPDLIMLDAYETVESWMMARNKLNPGKLIPAMMRYVSEPHAKNETHEVIKYLEFCVKDLNNEDPGVHNLLLSLYAKKEDESQLLQFLDTKFGKGQTNGPEFFYDPKYALRLCLQEKRMRACVRIYSMMSMHEEAVALALKVDLELAKAEADKVEDDEELRKKLWLKVAKHVIEQEKGVKRENIKKAIEFLSETNNLLKIEDILPFFPDFVLIDDFKEEICKSLKDYNSQIELLKQEMDDATRGADNIRSDIGALAQRYTVIDREQDCGVCRRKILTVGGLHQVGRSYTSVGHMAPFYVFPCGHAFHANCLIGHVTRCSSQAQAERILDLQKRLSLMDRKAAKDNGANVNGESIMSTTPVDKLRSQLDDAVASECPFCGDLMIKEISQPFIPPEESDEKASWEIKPQPTPQKILPMTMSI

SEQ ID NO: 70080 - protein, 127 aa, Setaria italica
  Transcript Sequence Number=SeqID_4106
  Gene Ontology: Mol. function=ligase activity; Cellular component =chloroplast; Biological process=response to auxin stimulus
  Homolog annotation: Hit_ID=Q6I581; Match level="QueryCoverage=100%, HitCoverage=21%, E-value=6e-46, Identity=70%"; Hit description =Probable indole-3-acetic acid-amido synthetase GH3.5
PELKFICRRSLVLSINIDKNTEKDLQLAVEEAEKLLAEEKLEVVDFTSLVDRSSDPGHYVIFWELSSGNASEEVLSSCANSMDLAFVDAGYVGSRKIKTIGALELRVLRKGTFGQVMNHYLSLGGAV

SEQ ID NO: 70081 - protein, 454 aa, Setaria italica
  Transcript Sequence Number=SeqID_4107
  Homolog annotation: Hit_ID=Q9LPY6; Match level="QueryCoverage=68%, HitCoverage=52%, E-value=1e-12, Identity=30%"; Hit description =T23J18.15
LTTPSRIGRHFDEDERTPFEPAAPRRPAPSPTSFAPAPVVVPARSGPGNAWGPRREAAPVASPVGPAPASTGGQIWSATRIAQASAVEKVISGRWHPSKPSSPPAPVSAPVVETPVAPPQMERPRSVGVREVDGGVERGAAPVRPASHEGRVGDGRVAEVPERPKLKLLPRSKPVEAPEPSPTYVEDKQVHQVQVTVNVMKVEAVHDVNQNVMAAKTGVLGADAETESRVAERPRLNLKPRSNLTGQSVETVKERQSLFGGARPREQVLKERGVDVLASDLEKTSPVGRSKGESAKVEQKVEAMSINPSSVQRGEGFPAGHRDPMNGDRKEYKRDTDRADAYRPTRREDNRRVARDVEKPPEQPRPEPETWRKPVEPPKPEVTTPRFGKAATALELAQAFSTSMSDTLPQSRLTSVPSPRVPPSPGGRDQSGFSRLTDNRALHSSPSQRKINGY

SEQ ID NO: 70082 - protein, 179 aa, Setaria italica
  Transcript Sequence Number=SeqID_4108
  Gene Ontology: Mol. function=calcium ion binding; Cellular component =integral to membrane
  Homolog annotation: Hit_ID=Q0IKM2; Match level="QueryCoverage=93%, HitCoverage=21%, E-value=9e-54, Identity=67%"; Hit description=Ca2+ binding protein cbp1
HDKKEQLCNISQALAVLASASSVTKERQEFLSLVNKEIELYNNMLAKEGTDGEEEARRAYRAAREESDHAAEAAVGEKVSSALVDRVDAMLQKLEKEIDDVDARIGNRWQLLDRDRDGKVTPEEVTAAANYLKDTIGTEGVQELISNLSKDNEGNILVEDIVKLASQTEENNDHEEAPR

SEQ ID NO: 70083 - protein, 353 aa, Setaria italica
  Transcript Sequence Number=SeqID_4109
  Gene Ontology: Mol. function=protein serine/threonine kinase activity; Cellular component=plasma membrane; Biological process =protein amino acid phosphorylation
  Homolog annotation: Hit_ID=B9RTG0; Match level="QueryCoverage=87%, HitCoverage=50%, E-value=2e-96, Identity=57%"; Hit description =Serine-threonine protein kinase, plant-type, putative
  Pfam annotation: Domain name=Pkinase; Domain location=56-334; Score =132.7; E_value=1.2e-36; Accession=PF00069.17; Description=Protein kinase domain
  Pfam annotation: Domain name=Pkinase_Tyr; Domain location=74-327; Score=61.3; E_value=8.4e-18; Accession=PF07714.9; Description =Protein tyrosine kinase
  Pfam module annotation: Pfam domain module=Pkinase::Pkinase_Tyr; Domain location=56-334::74-327
CLCRRLKAKGRRGDAVVNGDGVEGGRFAKSSSGGGGERFLVSDISEWLDKYRVFKIEELERGTGGFDDAHLINGSVYKANIDGEVFAVKKMKWDACEELKILQKVNHSNLVKLEGFCINSSTGDCYLVYEYVENGSLDLWLLDRDRARRLDWRARLHIALDLAQGLQYIHEHTWPRVVHKDIKSSNVLLDARMRAKIANFGLAKTGHNAVTTHIVGTQGYIAPEYLADGLVTTKMDVFAYGVVLLELVSGREAADEGGEPLWADAEDRVFRGRDERLEARVAAWMDPALKEQTCPPGSVASVVSVARACLHKDPSKRPSMVDVAYTLSKADEHFADYSGESVSVDGSGEIAAR

SEQ ID NO: 70084 - protein, 83 aa, Setaria italica
  Transcript Sequence Number=SeqID_4110
  Gene Ontology: Mol. function=zinc ion binding; Cellular component =intracellular; Biological process=regulation of transcription, DNA -dependent
  Homolog annotation: Hit_ID=B0ZYY8; Match level="QueryCoverage=65%, HitCoverage=22%, E-value=1e-11, Identity=64%"; Hit description=Q -type C2H2 zinc finger protein
  Pfam annotation: Domain name=zf-C2H2; Domain location=60-82; Score =24.9; E_value=0.00032; Accession=PF00096.18; Description=Zinc finger, C2H2 type
NDEEERAVVYAQERCAKGKRSRRRHLRRAPTEEEHLALCLLMLARGQRDARAPRVPAQEHRCSVCGKSFPSHQALGGHMSSHP

SEQ ID NO: 70085 - protein, 221 aa, Setaria italica
  Transcript Sequence Number=SeqID_4111
  Gene Ontology: Mol. function=threonine-type endopeptidase activity; Cellular component=proteasome core complex; Biological process =ubiquitin-dependent protein catabolic process
  Homolog annotation: Hit_ID=O64464; Match level="QueryCoverage=100%, HitCoverage=100%, E-value=1e-125, Identity=96%"; Hit description =Proteasome subunit beta type-1
  Pfam annotation: Domain name=Proteasome; Domain location=10-206; Score=144.3; E_value=3.7e-40; Accession=PF00227.18; Description =Proteasome A-type and B-type
MSRRGDWVYENNGGTCVAIAGADYCVVAADTRLSVGYSILTRDHSKICDLADKCVLASSGFQGDIKALHKNLAARELLYQHQHNKRMSCPAMAQLLSNTLYYKRFFPYYAFNVLGGLDSEGKGCVFTYDAVGSYERTGYSAQGTGSSLIMPVLDNQLKSPSPLLLPARDAVTPLSESEAIDLVKDVFASATERDIYTGDKLEIVVINKAGTKREYIELRKD

SEQ ID NO: 70086 - protein, 100 aa, Setaria italica
  Transcript Sequence Number=SeqID_4112
LFFFFFFKNRSYSIDSLFKKTEYKVQYTWRNHQFVILITVHTIPISKVAEQATSTVQVFLLLQLFSIVDACARNSGARSSLAGEPRSAAGEPRRRQDPRP

SEQ ID NO: 70087 - protein, 277 aa, Setaria italica
  Transcript Sequence Number=SeqID_4113
  Gene Ontology: Mol. function=protein binding; Cellular component =integral to membrane; Biological process=intracellular protein transport
  Homolog annotation: Hit_ID=B6T3V6; Match level="QueryCoverage=100%, HitCoverage=87%, E-value=1e-126, Identity=81%"; Hit description =Syntaxin 81
  Pfam annotation: Domain name=Syntaxin-18_N; Domain location=2-34; Score=5.7; E_value=0.097; Accession=PF10496.1; Description=SNARE -complex protein Syntaxin-18 N-te
PSPTSPFTNAAIKTLESIRELERFIVKHRRDYVDLHRTTEQERDNIEHEVGVFVKACKEQIDILKNRIHEEEKNGGAKTWLGTRDESSRLDLIAHQHGVVLILSERLHSVTAQFDRLRSMRFQDAINRAMPRKKIQKKPEIKPAEPSKSNLVLKSDVSKIGDQEVSTAPMRVQEQLLDDETRALQVELTSLLDAVQETETKMMEMSALNHLMSTHVLQQAQQIQYLYDQAVEATNNVERGNKELSQAIQRNSSSRTFLLLFFFVLTFSVLFLDWYNN

SEQ ID NO: 70088 - protein, 122 aa, Setaria italica
  Transcript Sequence Number=SeqID_4114
YKMMTVTKQSHSGKAKKQCITICFTLHQRKDETGMRTQPNLKNHIFDNKTFTVKSHLNFVLRRKEALGDHANMLIRKELVQKGYENDTIVCQTGKYKLVCFDRIIIQGNNQRTLKTMNLVST

SEQ ID NO: 70089 - protein, 67 aa, Setaria italica
  Transcript Sequence Number=SeqID_4115
  Homolog annotation: Hit_ID=Q3V810; Match level="QueryCoverage=100%, HitCoverage=18%, E-value=2e-26, Identity=88%"; Hit description =Anthocyanin biosynthetic gene regulator PAC1
MDLPKPPSTAASSAGSEAPNPHAFTCELPHSIYALAFSPTAPVLASGSFLEDLHNRVSLLSFDPARP

SEQ ID NO: 70090 - protein, 103 aa, Setaria italica
  Transcript Sequence Number=SeqID_4116
  Subcellular localization annotation: CTP_CleavageSite=38; ConfidenceScore=5.49e-01
RTKFQFFPSTMLQGNNAFASTFSFQCLSKCVTTQQKVKLTSYASSIPFDQYTNYMVRLHGNCKCIDIFYTSWESLGIKILTICRRRCLPATKEESGIQGAGKF

SEQ ID NO: 70091 - protein, 260 aa, Setaria italica
  Transcript Sequence Number=SeqID_4117
  Gene Ontology: Mol. function=transferase activity, transferring glycosyl groups; Cellular component=integral to membrane; Biological process=protein amino acid glycosylation
  Homolog annotation: Hit_ID=B6TVN8; Match level="QueryCoverage=99%, HitCoverage=43%, E-value=1e-106, Identity=76%"; Hit description=Beta 1, 3 galactosyltransferase
  Pfam annotation: Domain name=Gal-bind_lectin; Domain location=1-184; Score=64.9; E_value=3.1e-16; Accession=PF00337.14; Description =Galactoside-binding lectin
GESAAVTVVGVPREGAARFMVEMVGAGGEVVLPVNVSLGAAGMLVEQNSWTPQEGWGEWERCPQVGDVGSSNSSLQRSLVDGLVRCNEKMGSSIIQENNSTMINVTANQPGDGQRPKERSQLSGSFSIVEGEPFTITVWAGVEGFHITVNGQHETSFAYREWSEPWLIAEVKVSGDLELLSFLANGLPVSEEIDMASVALLKAPPLPKKRAFLLVGVFSTGNNFKRRMALRRTWMQYEAVRSGDVVVRFFAGLHKSEQVN

SEQ ID NO: 70092 - protein, 135 aa, Setaria italica
  misc_feature (121)..(121): Xaa can be any naturally occurring amino acid
  Transcript Sequence Number=SeqID_4118
  Gene Ontology: Mol. function=transferase activity, transferring glycosyl groups; Cellular component=integral to membrane; Biological process=protein amino acid glycosylation
  Homolog annotation: Hit_ID=B6TVN8; Match level="QueryCoverage=85%, HitCoverage=19%, E-value=3e-63, Identity=93%"; Hit description=Beta 1, 3 galactosyltransferase
  Pfam annotation: Domain name=Galactosyl_T; Domain location=1-135; Score=-25.4; E_value=5.7e-05; Accession=PF01762.13; Description =Galactosyltransferase
MLINSSSILTSSFFMPKMQHKSEQVNMELWREAQLYGDIQLMPFVDYYSLITFKTISICIFGTKIVPAKYIMKTDDDAFVRIDEVISSLKKSNSHGLLYGLISFQSSPHRDKDSKWFISRXEWPYDMYPPWAHGP

SEQ ID NO: 70093 - protein, 249 aa, Setaria italica
  Transcript Sequence Number=SeqID_4119
  Gene Ontology: Mol. function=transferase activity, transferring glycosyl groups; Cellular component=integral to membrane; Biological process=protein amino acid glycosylation
  Homolog annotation: Hit_ID=B6TVN8; Match level="QueryCoverage=100%, HitCoverage=42%, E-value=1e-141, Identity=93%"; Hit description=Beta 1, 3 galactosyltransferase
  Pfam annotation: Domain name=Galactosyl_T; Domain location=15-205; Score=115.9; E_value=1.3e-31; Accession=PF01762.13; Description =Galactosyltransferase
AFLLVGVFSTGNNFKRRMALRRTWMQYEAVRSGDVVVRFFAGLHKSEQVNMELWREAQLYGDIQLMPFVDYYSLITFKTISICIFGTKIVPAKYIMKTDDDAFVRIDEVISSLKKSNSHGLLYGLISFQSSPHRDKDSKWFISRKEWPYDMYPPWAHGPGYIISRDIAKFVVRGHQELTLQLFKLEDVAMGIWIQQYKSSGQQVNIVTDDRFYSEGCDADYVLAHYQSPRLMMCLWEKLKTEYQAICCE

SEQ ID NO: 70094 - protein, 170 aa, Setaria italica
  misc_feature (136)..(136): Xaa can be any naturally occurring amino acid
  Transcript Sequence Number=SeqID_4120
  Gene Ontology: Mol. function=protein binding
  Pfam annotation: Domain name=zf-Sec23_Sec24; Domain location=134-168; Score=3.7; E_value=0.052; Accession=PF04810.7; Description=Sec23Sec24 zinc finger
VPLGDEYMNILMSSLESNATRNLTASFDCVKIMTNLMNLACLVIVQSNHSLSKRNAVDVLSTIIKECLHNHLYITRANIASHLQFCFDGSSCCYLTEEWEGENVLLFYGLMVLYNVLRKVSFVCIHCKKNLDAGIXVCHDCREYYNEGFIRVLEHAFCQNLSPGPKSYIA

SEQ ID NO: 70095 - protein, 76 aa, Setaria italica
  Transcript Sequence Number=SeqID_4121
  Pfam annotation: Domain name=PAM2; Domain location=40-57; Score=25.7; E_value=0.00018; Accession=PF07145.7; Description=Ataxin-2 C-terminal region
MAVAEAAAADHAAPRPEEEEAPGAGTGSDAGEREMRDLEELLSKLNPMAEEFVPPSLASPSPLPARGAPPPPPSRP

SEQ ID NO: 70096 - protein, 111 aa, Setaria italica
  Transcript Sequence Number=SeqID_4122
VCDGCFIISCFQLPALQDDGPPADSYGRFSNDRGSKNRRSRGGGSARGRGGWDSEGEDRFRRGGRSFRSDNDSGRSFRSDNDSWSEDDWSGGGRKSNRSSSFGSRSSSYCP

SEQ ID NO: 70097 - protein, 86 aa, Setaria italica
  Transcript Sequence Number=SeqID_4123
GSRRGGPPEEDGGQIERAGEQRRGRVVVDGGRGGEADVERGGGGWDSEGEDRFRRGGRSFRSDNDSGRSFRSDNDSWSEDDWSGGG

SEQ ID NO: 70098 - protein, 81 aa, Setaria italica
  Transcript Sequence Number=SeqID_4124
AHSTPADQYTPESQLTLLLADSHRAVATVLFGRFVRARFWHADYQYYKRSSCHTGFTLFVILVVSVPKSCSLLERTRTKTK

SEQ ID NO: 70099 - protein, 51 aa, Setaria italica
  misc_feature (28)..(28): Xaa can be any naturally occurring amino acid
  Transcript Sequence Number=SeqID_4125
MLDNDHVSQARFGHPGAFEAALQKLRGXGTDISDEALEIKDFTEKLQHLPE

SEQ ID NO: 70100 - protein, 437 aa, Setaria italica
  Transcript Sequence Number=SeqID_4126
  Gene Ontology: Mol. function=substrate-specific transmembrane transporter activity; Cellular component=integral to membrane; Biological process=transmembrane transport
  Homolog annotation: Hit_ID=B9RF04; Match level="QueryCoverage=86%, HitCoverage=86%, E-value=1e-137, Identity=60%"; Hit description =Sugar transporter, putative
  Pfam annotation: Domain name=DUF1228; Domain location=57-135; Score= -18.1; E_value=0.015; Accession=PF06779.6; Description=Protein of unknown function (DUF1228)
  Pfam annotation: Domain name=MFS_1; Domain location=47-379; Score =50.3; E_value=7.6e-12; Accession=PF07690.8; Description=Major Facilitator Superfamily
  Pfam annotation: Domain name=Sugar_tr; Domain location=37-427; Score =173.1; E_value=8.2e-49; Accession=PF00083.16; Description=Sugar (and other) transporter
  Pfam module annotation: Pfam domain module=DUF1228::MFS_1::Sugar_tr; Domain location=57-135::47-379::37-427
  Subcellular localization annotation: CTP_CleavageSite=41; ConfidenceScore=5.39e-01
MEHEDQEAQKPLLATAAAGSSGDGRQGASSPSSSSSIAVVVASTAVAVAGSFEFGISVGYSSPSQPGIMRDLDLSLAEYSVFGSILTIGAMLGAIVSGTVADRVGRRFAMAISDLLCILGYLLITFSQNFWWLDIGRLSIGCGIGLLSYVVPVYISEITPKNLRGGFATVNQARFGHPGAFEAALQKLRGKGTDISDEALEIKDFTEKLQHLPESKMLDLFQKAYIRAVTVGVGLMVLQQFGGVNAICFYASEIFVSAGFSSGNTGMLAMVAVQIPMTGLGVLLMDKAGRRPLLMVSAAGTCLGCLLVGLSFLAKEHHWGKDLNILLALAGILIFTGSFSLGMGGIPWVIMSEIFPINMKGAAGSLVTLVSWLGSWIISYAFNFLLEWNSYGTFFIFATVCGLTVVFVERLVPETKGRTLEEIQASMNSSLTGPFQK

SEQ ID NO: 70101 - protein, 501 aa, Setaria italica
  Transcript Sequence Number=SeqID_4127
  Gene Ontology: Mol. function=phosphoinositide phospholipase C activity; Cellular component=plasma membrane; Biological process =intracellular signaling cascade
  Homolog annotation: Hit_ID=Q10MY5; Match level="QueryCoverage=98%, HitCoverage=99%, E-value=0.0, Identity=74%"; Hit description =Phosphoinositide-specific phospholipase C, putative, expressed
  Pfam annotation: Domain name=C2; Domain location=374-466; Score=75.8; E_value=1.6e-19; Accession=PF00168.22; Description=C2 domain
  Pfam annotation: Domain name=PI-PLC-X; Domain location=14-157; Score =168.1; E_value=2.7e-47; Accession=PF00388.11; Description =Phosphatidylinositol-specific phospholipase C, X domain
  Pfam annotation: Domain name=PI-PLC-Y; Domain location=237-355; Score= 89.5; E_value=1.2e-23; Accession=PF00387.11; Description =Phosphatidylinositol-specific phospholipase C, Y domain
  Pfam module annotation: Pfam domain module=C2::PI-PLC-X::PI-PLC-Y; Domain location=374-466::14-157::237-355
SRPYIRRPQVHHDMSHPLSHYFIYTGHNSYLTGNQLSSDCSDVPIIKALQRGVRVIELDMWPNSAKDDINILHGRTLTTPVSLIKCLRSIKEYAFVASPYPVIITLEDHLPADLQAKVAEMVLEVFGDILFYPGTDHFKEFPSPEELKGRVLLSTKPPKEYLEAKVGTMKEGDADPHPGKGAADDAAWGKEVPDFQTEIQSANKHDDDGSDHQRDDEEDDDDDDDEEQIMHPHSAPQYKQLITIRAGKPKGSLADALKSDPDKVRRLSLSEQQLAKLAEDHGTEIVRFTQRNILRIYPKGTRVTSSNYNPFLGWVHGAQMVAFNMQGYGRALWLMHGFYKANGGCGYVKKPDFLMQTEPEVFDPRERQPVKKTLKVKVYLGDGWRMDFKQTHFDQYSPPDFYARVGIAGVPADSMMKKTRAIEDNWVPVWEEEFTFPLTVPEIALLRVEVHEYDMSEKDDFGGQTVLPVSELRPGIRAVALFDRKGNQYNHVKLLMRFEFV

SEQ ID NO: 70102 - protein, 69 aa, Setaria italica
  Transcript Sequence Number=SeqID_4128
  Subcellular localization annotation: CTP_CleavageSite=32; ConfidenceScore=5.10e-01
MPRKASSTSDSRLKWRKRKRNSNASPSKPSTSSAAAADHSDESDSAAANDDEYAAAGDGADDDEAPGRP

SEQ ID NO: 70103 - protein, 199 aa, Setaria italica
  Transcript Sequence Number=SeqID_4129
  Gene Ontology: Mol. function=enoyl-[acyl-carrier-protein] reductase (NADH) activity; Cellular component=chloroplast; Biological process =fatty acid biosynthetic process
  Homolog annotation: Hit_ID=B6TYG2; Match level="QueryCoverage=100%, HitCoverage=53%, E-value=1e-107, Identity=97%"; Hit description =Enoyl-[acyl-carrier-protein] reductase [NADH]
ASNWTVKEVAETVKNDFGSIDILVHSLANGPEVTKPLLETSRKGYLAAISASSYSFVSLLQHFLPIMNPGGASISLTYIASERIIPGYGGGMSSAKAALESDTRVLAYEAGRKGKIRVNTISAGPLGSRAAKAIGFIEKMIEYSYVNAPLQKELLADEVGNTAAFLVSPLASAVTGSTIYVDNGLNTMGLALDSPTLST

SEQ ID NO: 70104 - protein, 69 aa, Setaria italica
  Transcript Sequence Number=SeqID_4130
SRSHKQELSVSFSDLFIYIYLLERQLAWNVAVFFFFCETLLLTPCPALQNDLRGLLQTPASATWASAAS

SEQ ID NO: 70105 - protein, 64 aa, Setaria italica
  Transcript Sequence Number=SeqID_4131
FMYFCLVFLIDCFCKCLRLGRLLFLFDSVRTQMLQFCDRFDPHSYHPFNPIRHKLTTGELRLCA

SEQ ID NO: 70106 - protein, 45 aa, Setaria italica
  Transcript Sequence Number=SeqID_4132
PATSSGILDAVPLFVVVLLAVHVLALVFWMYKLASEKQPPRRKTQ

SEQ ID NO: 70107 - protein, 124 aa, Setaria italica
  Transcript Sequence Number=SeqID_4133
  Subcellular localization annotation: CTP_CleavageSite=57; ConfidenceScore=5.96e-01
QPQRSLILSPAPPTWCSSSRSQPPAQASSTPSRSSSSSSSPSTFWPSCSGCTSWPPRSSRRGGRRSDARRSTQSLACLFGGYIFSLIKRQIFLQFSYGSALSFMGSINKWWHIWANALQVLMYK

SEQ ID NO: 70108 - protein, 200 aa, Setaria italica
  Transcript Sequence Number=SeqID_4134
  Homolog annotation: Hit_ID=B6TV97; Match level="QueryCoverage=88%, HitCoverage=59%, E-value=2e-68, Identity=81%"; Hit description=mTERF- like protein
  Pfam annotation: Domain name=mTERF; Domain location=1-154; Score= -89.0; E_value=0.03; Accession=PF02536.6; Description=mTERF
GVPEADLPRVLRRRPRLLVSPVAARLRPTLYFLRALGVPDLHRRADLLSFSVEDKLLPRIEFLESLGLPSRAARSMARRFPALFGYGVEGNMRPKAEYLLGAMGRDADELFEFPEYFSYALATRIAPRHEACAARGVRLPLPAMLRPGDAKFRATLAGCVGSTPPRRRSPLWHATWVDDDGGDDHHHHAGAVAKEAAAAV

SEQ ID NO: 70109 - protein, 54 aa, Setaria italica
  Transcript Sequence Number=SeqID_4135
EALAKRSSAESRIQADTEEAVRQMRATPGGVCSCASRAAAAAGAGGCRACALRF

SEQ ID NO: 70110 - protein, 52 aa, Setaria italica
  Transcript Sequence Number=SeqID_4136
MFALEEKVSFLFSFSASVVIEHQTSCCTLSLFYREEGSTQRCRILSFMVVCN

SEQ ID NO: 70111 - protein, 200 aa, Setaria italica
  Transcript Sequence Number=SeqID_4137
  Gene Ontology: Mol. function=protein serine/threonine kinase activity; Cellular component=vacuole; Biological process=protein amino acid phosphorylation
  Homolog annotation: Hit_ID=B9S4I8; Match level="QueryCoverage=92%, HitCoverage=13%, E-value=1e-59, Identity=64%"; Hit description=Cell division control protein 15 , cdc15, putative
DFVAFGEGHSLLSLLEKEPPSRHVSGQLDYVHHISGLGRHETILPLLHASTERKTNGELDLIMAEFAEVSRHGRENGHIESSAKDSNRVQSMKYAPSAGVSNEGASTSGAASQTASGVLSGSGVLNLRPGSTTSSGPLAQMFSSMSADVAREYLEKVADLLLEFAQADTVVKSLMASQSLLARIFQMFNKIEPPILLKIL

SEQ ID NO: 70112 - protein, 307 aa, Setaria italica
  Transcript Sequence Number=SeqID_4138
  Gene Ontology: Mol. function=protein serine/threonine kinase activity; Cellular component=vacuole; Biological process=protein amino acid phosphorylation
  Homolog annotation: Hit_ID=Q9STE0; Match level="QueryCoverage=98%, HitCoverage=23%, E-value=1e-154, Identity=86%"; Hit description =MAP3K epsilon 1 protein kinase
  Pfam annotation: Domain name=Pkinase; Domain location=20-274; Score =284.4; E_value=2.5e-82; Accession=PF00069.17; Description=Protein kinase domain
  Pfam annotation: Domain name=Pkinase_Tyr; Domain location=20-274; Score=130.3; E_value=6e-36; Accession=PF07714.9; Description=Protein tyrosine kinase
  Pfam module annotation: Pfam domain module=Pkinase::Pkinase_Tyr; Domain location=20-274::20-274
MASRQHNAQFHKSKTLDNKYMLGDEIGKGAYGRVYKGLDLENGDFVAIKQVSLENIPQEDLNIIMQEIDLLKNLNHKNIVKYLGSLKTKSHLHIILEYVENGSLANIIKPNKFGPFPESLVAVYIAQVLEGLVYLHEQGVIHRDIKGANILTTKEGLVKLADFGVATKLTEADINTHSVVGTPYWMAPEVIEMSGVCAASDIWSVGCTVIELLTCAPPYYDLQPMPALFRIVQDVHPPIPEGLSPEITDFLRQCFQKDAMQRPDAKTLLMHTLLQNSRRALPASLRQPTPLRNIDGDDEGSSGHNTA

SEQ ID NO: 70113 - protein, 659 aa, Setaria italica
  misc_feature (23)..(23): Xaa can be any naturally occurring amino acid
  misc_feature (31)..(31): Xaa can be any naturally occurring amino acid
  misc_feature (50)..(50): Xaa can be any naturally occurring amino acid
  misc_feature (72)..(72): Xaa can be any naturally occurring amino acid
  Transcript Sequence Number=SeqID_4139
  Gene Ontology: Mol. function=protein serine/threonine kinase activity; Cellular component=vacuole; Biological process=protein amino acid phosphorylation
  Homolog annotation: Hit_ID=B9S4I8; Match level="QueryCoverage=80%, HitCoverage=43%, E-value=1e-139, Identity=50%"; Hit description=Cell division control protein 15 , cdc15, putative
NTAGFCGTPGDSQTPIISNVEQXNGRKEPIXESAAQNKPDELYDGIKTHXGSSSNNLALMKDNIVPNKDPTXVLHEKLPAESSSGDADLNDKVMPHELQVGLPSKIEPESKESSSLEDVDAFSFQAGRQNIDYQKVVEPSAVEVPKELSRFSDKPGDASLEDLFPPIDKQGNYVAEASTSTTGHELPYNGVSNDFAKALNARVAEKQKGNDSESMNGGKLIEYADRLQDIDAQGFGDIGGESLFPWQEYSKIVAQLKPGESEDVILSACQKLLVYFNHRPGQKQIYVTQNGFLPLMELLELPKNRILSSVLQLINNIVKDNTGFLENACLVGLIPVVMNFAEPNRPKDVRVQASLFLQQLCQASTLTLQMFIACQGIPVLVSFLEPDYAKYRDMVHLAIDGIWQVFKLQHSTLRNDFCRIAAKNGILLRLVNTLHSLNEATRFASISGSGASVTQNGSTPRRRSGQLDPSFIEISKARLDHHHSSGSLQSLQADADKHHMLIDSSSSPRFSEKTGVGNLERNENDLVRPQRLSVSAGRTSTDRSPKHIELVSNGHNSGQHDQVRPLLSLLEKEPPSRHVSGQLDYVHHISGLGRHETILPLLHASTERKTNGELDLIMAEFAEVSRHGRENGHIESSAKDSNRVQDTHVTTSALMEENI

SEQ ID NO: 70114 - protein, 262 aa, Setaria italica
  Transcript Sequence Number=SeqID_4140
  Gene Ontology: Mol. function=protein serine/threonine kinase activity; Cellular component=vacuole; Biological process=protein amino acid phosphorylation
  Homolog annotation: Hit_ID=O81809; Match level="QueryCoverage=80%, HitCoverage=15%, E-value=2e-99, Identity=83%"; Hit description=MAP3K epsilon protein kinase
  Subcellular localization annotation: CTP_CleavageSite=72; ConfidenceScore=5.27e-01
YYRWLKFFFIGPSPKVLSLSTLFEIIDNPTRAGVSNEGASTSGAASQTASGVLSGSGVLNLRPGSTTSSGPLAQMFSSMSADVAREYLEKVADLLLEFAQADTVVKSLMASQSLLARIFQMFNKIEPPILLKILRCINHLSGDPNCLETLQRTDAIKHLIPILELRDGPLVYQIHSEVLNALFNLCKINKRRQEQAAENGIIPHLMNFVMSDSPLRQYALPLLCDMAHASRNSREQLRAHGGLDVYLNLLEDDAWACTALDS

SEQ ID NO: 70115 - protein, 85 aa, Setaria italica
  Transcript Sequence Number=SeqID_4141
EKLERKGKKIVMKKARSKLAHWQFNRRAQGCPRRPLKQLSSSSWEKSMDLAYVLRNFPSHHTAFFYPISSSSSFLFFSFSPAPLL

SEQ ID NO: 70116 - protein, 96 aa, Setaria italica
  Transcript Sequence Number=SeqID_4142
  Gene Ontology: Cellular component=chloroplast envelope
  Homolog annotation: Hit_ID=Q09S70; Match level="QueryCoverage=52%, HitCoverage=17%, E-value=5e-13, Identity=68%"; Hit description=Tic21
  Subcellular localization annotation: CTP_CleavageSite=70; ConfidenceScore=5.09e-01
SLAEGGTSPRERSSDRRRVLPAAFPAARPLRDSQSAAAASSTPFTVSKKLKKTARYFKNLGTLGFWSQLVCTTISAGILSFSAVATGDATAPFTFI

SEQ ID NO: 70117 - protein, 234 aa, Setaria italica
  Transcript Sequence Number=SeqID_4143
  Gene Ontology: Cellular component=chloroplast envelope
  Homolog annotation: Hit_ID=Q09S70; Match level="QueryCoverage=79%, HitCoverage=64%, E-value=3e-69, Identity=70%"; Hit description=Tic21
  Pfam annotation: Domain name=MotA_ExbB; Domain location=14-147; Score= -40.7; E_value=0.043; Accession=PF01618.8; Description=MotATolQExbB proton channel family
RSSRAAAIVGTGTSSYAAGRGSLPRHLDAAAAAGAGAAPSGPSDPTPLSAEDEVERAKLAQVSKKLEKTARYFKNLGTLGFWSQLVCTTISAGILSFSAVATGDATAPFTFIATSVGIIAAFISVFRSFGYIRLSERLRRAANEPAKAPPRADVVKNLRNSIMFNVVGMGAAVLGLQATVGALVAKALATSSVPYYQGIPPGQSPVLALDIFLVQASANTILSHFLGLSSSLES

SEQ ID NO: 70118 - protein, 104 aa, Setaria italica
  misc_feature (40)..(40): Xaa can be any naturally occurring amino acid
  misc_feature (64)..(64): Xaa can be any naturally occurring amino acid
  Transcript Sequence Number=SeqID_4144
TWVNCSTEDAEKMLKKTFGWIHSPYWSEKDEVPNAELVTXVLNYTRSLVLSDEVLHRLLKKFPXEVLGCDLDSEVKLKVSKLDSDREIMIADCMSQCVHCWVWL

SEQ ID NO: 70119 - protein, 210 aa, Setaria italica
  Transcript Sequence Number=SeqID_4145
  Subcellular localization annotation: CTP_CleavageSite=33; ConfidenceScore=5.06e-01
MLAKSPALPLVTADTTAFRFCTTGNILSPPVVKLSHNKCQGRLNVQQNIDLGKPQDATRKWRVLSADQAQASVVDVDEECKQVLTSLNFSTEDAEKMLKKAFGWIHSPYWSEERKKEVPSAEVVTGVLDYIRSLGLSDEDLHKLLKKFPEVLGCDLDREVKLNVSKLDSEWGINGKTLRSLLLRNPKVLGYNIDCRGDCMAQCTRCWVRF

SEQ ID NO: 70120 - protein, 41 aa, Setaria italica
  misc_feature (1)..(8): Xaa can be any naturally occurring amino acid
  Transcript Sequence Number=SeqID_4146
XXXXXXXXLIKSKKELQLSVHFAEVTLHIDSREHLYYHEPV

SEQ ID NO: 70121 - protein, 78 aa, Setaria italica
  Transcript Sequence Number=SeqID_4147
MILGEDGYLIVIISLQVWVAHKESSWISTAIWIVLLICFGSITTCGYIALQLFQVSYQDPIYHVLLNSHSKYGTATSL

SEQ ID NO: 70122 - protein, 242 aa, Setaria italica
  Transcript Sequence Number=SeqID_4148
  Homolog annotation: Hit_ID=O80547; Match level="QueryCoverage=94%, HitCoverage=74%, E-value=2e-45, Identity=42%"; Hit description =T22J18.8 protein
  Pfam annotation: Domain name=DUF1475; Domain location=1-242; Score =189.1; E_value=1.2e-53; Accession=PF07343.3; Description=Protein of unknown function (DUF1475)
MAAQGSLVAWRVVFAALGLLMVGTLVYTCATDGSPFRPELLTPWMNATLIDFYVNVIAIAAWVIYKEENWISSAVWVVLLFCFGSAATCAYIVTKLFEVTPGGPSHDPLDLLFIRQGNLSQRKCSYVIIGRIMFSILGIFMAAVVTYTVITDGLPFRKELLTPWMAATLIDFYINVFAISVWVAHKESSWISTAIWIVLLICFGSITTCGYIALQLFQVSYQDPIYHVLLNSHSKYGTATKI

SEQ ID NO: 70123 - protein, 133 aa, Setaria italica
  misc_feature (92)..(92): Xaa can be any naturally occurring amino acid
  misc_feature (115)..(115): Xaa can be any naturally occurring amino acid
  Transcript Sequence Number=SeqID_4149
  Gene Ontology: Mol. function=exonuclease activity; Cellular component= intracellular
  Homolog annotation: Hit_ID=B6TZF8; Match level="QueryCoverage=96%, HitCoverage=41%, E-value=6e-60, Identity=85%"; Hit description=DNA polymerase III subunit epsilon
SNTESESTRKGSKQSFSNSRHLHVESVESSIEVFKQPELEQLKSLHTYKEKFSGVKTEWPATILVFDIETTGFSRREDRIIEFAVRDLMGGXNSTFQTLINPEKDVRNTYIHGIXNSMLCRPDVPRFGDLIPI

SEQ ID NO: 70124 - protein, 73 aa, Setaria italica
  Transcript Sequence Number=SeqID_4150
  Homolog annotation: Hit_ID=B4FTI4; Match level="QueryCoverage=65%, HitCoverage=12%, E-value=4e-17, Identity=79%"; Hit description =Protein BRE
  Subcellular localization annotation: CTP_CleavageSite=38; ConfidenceScore=5.08e-01
MSPSADAAAPASTSAPPLAPLIAAQLNYLISHSKPPIRVGQIWSGCRNGRHSDRFTLSIPFCLDYVHWDVAHC

SEQ ID NO: 70125 - protein, 549 aa, Setaria italica
  Transcript Sequence Number=SeqID_4151
  Gene Ontology: Mol. function=2 iron, 2 sulfur cluster binding; Cellular component=chloroplast envelope; Biological process =oxidation reduction
  Homolog annotation: Hit_ID=B9RNS2; Match level="QueryCoverage=83%, HitCoverage=82%, E-value=1e-179, Identity=64%"; Hit description =Chlorophyll a oxygenase, putative
  Pfam annotation: Domain name=PaO; Domain location=303-393; Score =140.4; E_value=5.6e-39; Accession=PF08417.4; Description =Pheophorbide a oxygenase
  Pfam annotation: Domain name=Rieske; Domain location=98-200; Score =99.7; E_value=1e-26; Accession=PF00355.18; Description=Rieske [2Fe -2S] domain
  Pfam module annotation: Pfam domain module=PaO::Rieske; Domain location=303-393::98-200
  Subcellular localization annotation: CTP_CleavageSite=23; ConfidenceScore=5.00e-01
ANHDARCHGALPPLLLLRPSSAVAAAAPRLKNPAATAPAGGAVHGVRWAGGGGGRRKRRCRAAVVEEAGAQEDGVLLPKEGDDAAATAAAGRYDWKEEWYPLYLAKEVPDDAALPLTVFDRQLVLWRDGDGVLRCHEDRCPHRLAKLSEGQIVDGRLECLYHGWQFDGEGKCVKIPQLPEGAKIPRSACARNYEVRDSQGVVWVWMSDANPPDDRKLPWFEPYAREGFTDLSTVHELPYDHSILLENLMDPAHVPISHDRTDWTAKREDAQALFFDVTERTARGFAGYWGRTRTPHLRNLLRFEAPCVLTNTLEFTDKDGKDQCFSAHFLCRPAGQGKSMLIVRFGSTVRSPIVKLLPSWYFHQNACKVFEQDMGFLSSQNEVLIREKVPTRELYLNLRSSDTWVAEYRKWMDRAGHGMPYYFGHSSLAPPPVPAVVEQAPAGAVAGISATFPAKGGVGTVHAPNPTNRYFRHVVHCKECRASVKKYTSLKSAFAVLAAAAVAASILAATRQWKGILLAASAVLAAASYACDAVLSLITTNFIRNHRRL

SEQ ID NO: 70126 - protein, 60 aa, Setaria italica
  Transcript Sequence Number=SeqID_4152
VILEDAGVAALRGELEFGRRRRFLQFFSLSLFYHYSVQIGFFSSSCNAVLKGREGLGRKG

SEQ ID NO: 70127 - protein, 62 aa, Setaria italica
  Transcript Sequence Number=SeqID_4153
MAGLGFEETELRLGLPGGGNDAGEAAAARKRGFEETIDLKLKLRQPAASPAARVEEEAEEDE

SEQ ID NO: 70128 - protein, 173 aa, Setaria italica
  Transcript Sequence Number=SeqID_4154
  Gene Ontology: Mol. function=DNA binding; Cellular component=nucleus; Biological process=regulation of transcription
  Homolog annotation: Hit_ID=B9RFW3; Match level="QueryCoverage=100%, HitCoverage=59%, E-value=3e-35, Identity=46%"; Hit description=NAC domain-containing protein, putative
  Pfam annotation: Domain name=NAM; Domain location=2-131; Score=152.9; E_value=9.4e-43; Accession=PF02365.7; Description=No apical meristem (NAM) protein
NEELVVHYLRRRALSSPLPAAVDIPDVRILAHDPSDLLPPGWSEQERYFFTCKEAKYVKGRRANRATGAGYWKATGKEKPVAVAVPAPASKGGQGQAQAVLVGMKRSLVFYRGKPPTGSKTDWVMHEYRLAGAGLAPCRRAAVQPDGGDAAAANADVSRPAEGWVLCRVFRKK

SEQ ID NO: 70129 - protein, 74 aa, Setaria italica
  misc_feature (22)..(22): Xaa can be any naturally occurring amino acid
  Transcript Sequence Number=SeqID_4155
  Homolog annotation: Hit_ID=Q7XI44; Match level="QueryCoverage=98%, HitCoverage=7%, E-value=2e-22, Identity=67%"; Hit description =Putative anther ethylene-upregulated protein ER1
RMQDYLVLIVLHVQTLSLVRAXDNCRASSRYHPFTEMQQPVDGIMMSNFLGASAPSASVNNLGAGYLGEMQPTP

SEQ ID NO: 70130 - protein, 104 aa, Setaria italica
  misc_feature (33)..(33): Xaa can be any naturally occurring amino acid
  misc_feature (50)..(50): Xaa can be any naturally occurring amino acid
  Transcript Sequence Number=SeqID_4156
  Homolog annotation: Hit_ID=Q7XI44; Match level="QueryCoverage=99%, HitCoverage=12%, E-value=4e-36, Identity=60%"; Hit description =Putative anther ethylene-upregulated protein ER1
GEDNENFQRRTYWLLEEGFMNIVLVHYLEIKGXNKISIVLKKLKRMQDYXALDNCRASSRYHPFTEMQQPVDGIMMSNFLGASAPSASVNNLGAGYLGEMQPTP

SEQ ID NO: 70131 - protein, 39 aa, Setaria italica
  Transcript Sequence Number=SeqID_4157
  Gene Ontology: Mol. function=transferase activity, transferring glycosyl groups; Cellular component=integral to membrane; Biological process=cellulose biosynthetic process
  Homolog annotation: Hit_ID=Q851L8; Match level="QueryCoverage=76%, HitCoverage=2%, E-value=2e-11, Identity=100%"; Hit description =Probable cellulose synthase A catalytic subunit 5 [UDP-forming]
RSIFSLLWVRIDPFLAKNDGPLLEECGLDCNLGGSSLLL

SEQ ID NO: 70132 - protein, 90 aa, Setaria italica
  Transcript Sequence Number=SeqID_4158
  Gene Ontology: Mol. function=transferase activity, transferring glycosyl groups; Cellular component=integral to membrane; Biological process=cellulose biosynthetic process
  Homolog annotation: Hit_ID=Q9LLI2; Match level="QueryCoverage=87%, HitCoverage=7%, E-value=5e-32, Identity=83%"; Hit description =Cellulose synthase-8
SCKVLLSGYSYTSFTVTSKAGDDEEFSELYTFKWTTLLIPPTTLLLLNFIGVVAGISNAINNGYESWGPLFGKLFFAFWVIVHLYPFLKG

SEQ ID NO: 70133 - protein, 51 aa, Setaria italica
  misc_feature (24)..(24): Xaa can be any naturally occurring amino acid
  Transcript Sequence Number=SeqID_4159
  Homolog annotation: Hit_ID=Q84UP7; Match level="QueryCoverage=74%, HitCoverage=3%, E-value=7e-12, Identity=86%"; Hit description =Probable mixed-linked glucan synthase 6
QQARVRVRVPRVRKEYDEFKARIXNGLEHDIKQRSDAYNAARGLKDGEPRA

SEQ ID NO: 70134 - protein, 168 aa, Setaria italica
  misc_feature (142)..(142): Xaa can be any naturally occurring amino acid
  Transcript Sequence Number=SeqID_4160
  Gene Ontology: Mol. function=transferase activity, transferring glycosyl groups; Cellular component=integral to membrane; Biological process=cellulose biosynthetic process
  Homolog annotation: Hit_ID=Q69V23; Match level="QueryCoverage=79%, HitCoverage=9%, E-value=1e-34, Identity=58%"; Hit description =Probable cellulose synthase A catalytic subunit 3 [UDP-forming]
  Pfam annotation: Domain name=PHD; Domain location=45-95; Score=-2.8; E_value=0.053; Accession=PF00628.21; Description=PHD-finger
  Pfam annotation: Domain name=zf-C3HC4; Domain location=46-92; Score =3.5; E_value=0.041; Accession=PF00097.17; Description=Zinc finger, C3HC4 type (RING finger)
  Pfam module annotation: Pfam domain module=PHD::zf-C3HC4; Domain location=45-95::46-92
MASQGYVRLADLAGGGSLLSGAGAVLIFVCFALQPKPMNQQNGQVCQICGDDVGLNPRRGNPFVACNECAFPICRDCYEYERREGTQNCPQCKTRFKRLKGKSLTRNAATDRSPILPESCLTSRGDSVVVAGCARVPGDEEXEDGVDDLENEFNWSDKHDSQYVAESI

SEQ ID NO: 70135 - protein, 67 aa, Setaria italica
  Transcript Sequence Number=SeqID_4161
  Gene Ontology: Mol. function=transferase activity, transferring glycosyl groups; Cellular component=integral to membrane; Biological process=cell wall organization and biogenesis
  Homolog annotation: Hit_ID=B1P2T4; Match level="QueryCoverage=89%, HitCoverage=6%, E-value=8e-22, Identity=83%"; Hit description =Cellulose synthase-like CslF6
VNGTNRRTEDVVERGNRNRQQSKGWRSRYCSIYPHAFIGTAPINLTERLYQVLRWSTGSLEIFFSKN

SEQ ID NO: 70136 - protein, 61 aa, Setaria italica
  misc_feature (15)..(15): Xaa can be any naturally occurring amino acid
  Transcript Sequence Number=SeqID_4162
  Gene Ontology: Mol. function=transferase activity, transferring glycosyl groups; Cellular component=integral to membrane; Biological process=cellulose biosynthetic process
  Homolog annotation: Hit_ID=Q5JN63; Match level="QueryCoverage=91%, HitCoverage=5%, E-value=4e-27, Identity=98%"; Hit description =Cellulose synthase A catalytic subunit 4 [UDP-forming]
FSQKIDYLKDKIHPXFVKERRAMKRDYEEYKVRINALVAKAQKTPEEGWIMQDGTPLALGN

SEQ ID NO: 70137 - protein, 78 aa, Setaria italica
  Transcript Sequence Number=SeqID_4163
IFADVLCPYFSIFSCFYLQRKKKVLHFFCSMVVAQPHDCNIGQTGGCDNLVQFGHEYRNQMPVLIVQHSLLVLVDTYG

SEQ ID NO: 70138 - protein, 156 aa, Setaria italica
  misc_feature (88)..(88): Xaa can be any naturally occurring amino acid
  Transcript Sequence Number=SeqID_4164
  Gene Ontology: Mol. function=transferase activity, transferring glycosyl groups; Cellular component=integral to membrane; Biological process=cellulose biosynthetic process
  Homolog annotation: Hit_ID=Q69V23; Match level="QueryCoverage=98%, HitCoverage=11%, E-value=1e-65, Identity=76%"; Hit description =Probable cellulose synthase A catalytic subunit 3 [UDP-forming]
VGPGYNHHKKAGAMNALVRVSAVLSNAPYLLNLDCDHYINNSKAVKEAMCFMMDPLVGKKVCYVQFPQRFDGIDRHDRYANRNVVLLXDVRFSFPNTLSYPCCYYRCHVGFSNICIIQINMKGLDGIQGPIYVGTGCVFRRQALYGYDAPKTKKPP

SEQ ID NO: 70139 - protein, 84 aa, Setaria italica
  Transcript Sequence Number=SeqID_4165
  Gene Ontology: Mol. function=catalytic activity; Biological process =cellular metabolic process
  Homolog annotation: Hit_ID=A3C4S4; Match level="QueryCoverage=90%, HitCoverage=20%, E-value=2e-38, Identity=97%"; Hit description=GDP -mannose 3,5-epimerase 1
YLYLLGSCRFFYASSACIYPEFKQLETNVSLKESDAWPAEPQDAYGLEKLATEELCKHYTKDFGIECRVGRFHNIYGPFGTMER

SEQ ID NO: 70140 - protein, 121 aa, Setaria italica
  Transcript Sequence Number=SeqID_4166
  Gene Ontology: Mol. function=transferase activity, transferring glycosyl groups; Cellular component=integral to membrane; Biological process=cellulose biosynthetic process
  Homolog annotation: Hit_ID=B1P2T4; Match level="QueryCoverage=98%, HitCoverage=12%, E-value=1e-53, Identity=78%"; Hit description =Cellulose synthase-like CslF6
MKQIPQRFEGVDPTDLYANHNRIFFDGTLRALDGMQGPIYVGTGCLFRRVTLYGFDPPRINVGGQCFPSLGGMFAKTKYEKPGLEMSTAKGAATAVVAKGKHGFLPLPKKSYGKSEAFVDS

SEQ ID NO: 70141 - protein, 103 aa, Setaria italica
  misc_feature (36)..(36): Xaa can be any naturally occurring amino acid
  Transcript Sequence Number=SeqID_4167
  Gene Ontology: Mol. function=transferase activity, transferring glycosyl groups; Cellular component=integral to membrane; Biological process=cell wall organization and biogenesis
  Homolog annotation: Hit_ID=Q84UP7; Match level="QueryCoverage=79%, HitCoverage=8%, E-value=1e-32, Identity=81%"; Hit description =Probable mixed-linked glucan synthase 6
EKRPGFNHEKKAGAMNALTRCSAVLTNSPFILLTFXCDHYINNSQALRAGICFMLGRDSDTVAFVQFPQRFEGDGVAVAAEHEADPGAQRLGVVDVVVAVEVE

SEQ ID NO: 70142 - protein, 246 aa, Setaria italica
  misc_feature (78)..(78): Xaa can be any naturally occurring amino acid
  misc_feature (136)..(136): Xaa can be any naturally occurring amino acid
  misc_feature (141)..(141): Xaa can be any naturally occurring amino acid
  misc_feature (176)..(176): Xaa can be any naturally occurring amino acid
  Transcript Sequence Number=SeqID_4168
  Gene Ontology: Mol. function=transferase activity, transferring glycosyl groups; Cellular component=integral to membrane; Biological process=cellulose biosynthetic process
  Homolog annotation: Hit_ID=Q851L8; Match level="QueryCoverage=97%, HitCoverage=21%, E-value=1e-124, Identity=90%"; Hit description =Probable cellulose synthase A catalytic subunit 5 [UDP-forming]
  Pfam annotation: Domain name=Cellulose_synt; Domain location=1-245; Score=-177.7; E_value=0.00024; Accession=PF03552.6; Description =Cellulose synthase
YLEKNKVAQNFVRERRAMKREYEEFKVRINALVAKAQKVPEEGWTMQDGTPWPGNNVRDHPGMIQVFLGQSGGHDVEXNELPRLVYVSREKRPGYNHHKKAGAMNALVRVSAVLTNAPYLLNLDCDHYINNSKAIXKEAMXFMMDPLLGKKVCYVQFPQRFDGIDRHDRYANRNVXFFDINMKGLDGIQGPIYVGTGCVFRRQALYGYDAPKTKKPPSRTCNCWPKWCICCCCFGNRKTKKKTKTF

SEQ ID NO: 70143 - protein, 66 aa, Setaria italica
  Transcript Sequence Number=SeqID_4169
  Gene Ontology: Mol. function=transferase activity, transferring glycosyl groups; Cellular component=integral to membrane; Biological process=cellulose biosynthetic process
  Homolog annotation: Hit_ID=Q5JN63; Match level="QueryCoverage=86%, HitCoverage=5%, E-value=5e-23, Identity=91%"; Hit description =Cellulose synthase A catalytic subunit 4 [UDP-forming]
SKIQEKANQISHMTDVDRLTARYGDGEDSGLAPVDFFVSTVDPLKEPPLITANTVLSILAVDYPVE

SEQ ID NO: 70144 - protein, 136 aa, Setaria italica
  misc_feature (88)..(88): Xaa can be any naturally occurring amino acid
  Transcript Sequence Number=SeqID_4170
  Gene Ontology: Mol. function=transferase activity, transferring glycosyl groups; Cellular component=integral to membrane; Biological process=cellulose biosynthetic process
  Homolog annotation: Hit_ID=Q5JN63; Match level="QueryCoverage=90%, HitCoverage=12%, E-value=2e-64, Identity=95%"; Hit description =Cellulose synthase A catalytic subunit 4 [UDP-forming]
KEVEREINRDSRREDLESAIFNLREIDNYDEYERSMLISQMSFEKSFGLSSVFIESTLMENGGVPESANPSTLIKEAIHVISCGYEEXTEWGKEIGWIYGSVTEDILSGFKMHCRGWRSIYCMPVRPAISKGILVP

SEQ ID NO: 70145 - protein, 394 aa, Setaria italica
  Transcript Sequence Number=SeqID_4171
  Gene Ontology: Mol. function=serine-type endopeptidase activity; Biological process=negative regulation of catalytic activity
  Homolog annotation: Hit_ID=B6SWF4; Match level="QueryCoverage=99%, HitCoverage=52%, E-value=0.0, Identity=90%"; Hit description =Subtilisin-like protease
  Pfam annotation: Domain name=PA; Domain location=2-99; Score=80.1; E _value=8e-21; Accession=PF02225.14; Description=PA domain
GNNSAADPLPLVYPGADGFDASRDCSVLRGSEVTGKVVVCESRGLSGRVEAGQTVAAYGGVGMIVMNRAAEGYTTFADAHVLPASHVSYDAGTKIISYLNSTGNATASIDFRGTVIGSYPSPAVTFFSSRGPSKASPGILKPDITGPGMNILAAWAPSESHTEFSDGGADLSFFVESGTSMSTPHLSGIAALLKSLHPDWSPAAIKSAIMTTSDAVDRTGLPIKDEQYRHATFYAMGAGYVNPALAFDPGLVYDLHADDYIPYLCGLGLGDDGVTEIAHRPVACGSVKAITEAQLNYPSLVVNLLSQPITVNRTVTNVGKAKSVYTAVVDMPKDVSVIVQPPMLRFTELKEKQSFTVTVRWAGEPNVAGAEGNIKWVSDDYIVRSPLVVTGKGE

SEQ ID NO: 70146 - protein, 292 aa, Setaria italica
  Transcript Sequence Number=SeqID_4172
  Gene Ontology: Cellular component=integral to membrane
  Homolog annotation: Hit_ID=B6SUQ1; Match level="QueryCoverage=100%, HitCoverage=100%, E-value=1e-135, Identity=84%"; Hit description =Yip1 domain family member 1
  Pfam annotation: Domain name=YIF1; Domain location=67-284; Score= -119.5; E_value=0.01; Accession=PF03878.7; Description=YIF1
  Pfam annotation: Domain name=Yip1; Domain location=103-268; Score =213.4; E_value=5.8e-61; Accession=PF04893.9; Description=Yip1 domain
  Pfam module annotation: Pfam domain module=YIF1::Yip1; Domain location=67-284::103-268
MMSGGGYSSLDDPKASGSVPAAAGPDPPAIRFTDSNLQTFPPSDARGKISGAYRPPTDADDTFSSKAGGGGSGGGRGGSAGSDDAAQSGWFRMFSVAAYKPYFDVDTSDVVERIWESVFPFRGTFTEKTSENPDLYGPFWTCTTLIFVAASIATFVTYLSHKWHKKEWNYDINLVTWSAGLFYGYVTFVPLLLYVILKYFSAPAGLVQLWCLYGYSLFIFIPASLLSIVPIEIFRWVIAGVAGFMSATFVAVNLRAHIVNSGERWFLIVAGIFLLQLGLAVLLKLYFFTITV

SEQ ID NO: 70147 - protein, 103 aa, Setaria italica
  Transcript Sequence Number=SeqID_4173
  Gene Ontology: Mol. function=GDP-mannose 3,5-epimerase activity; Biological process=cellular metabolic process
  Homolog annotation: Hit_ID=A3C4S4; Match level="QueryCoverage=98%, HitCoverage=26%, E-value=2e-50, Identity=94%"; Hit description=GDP -mannose 3,5-epimerase 1
MTWMAEIVLSFEDRKLPIHHIPGPEGVRGRNSDNTLIKEKLGWAPTMKLKDGLRFTYFWIKEQIEKEKTQGIDIAAYGSSKVVSTQAPVQLGSLRAADGKEGL

SEQ ID NO: 70148 - protein, 380 aa, Setaria italica
  Transcript Sequence Number=SeqID_4174
  Gene Ontology: Mol. function=GDP-mannose 3,5-epimerase activity; Biological process=cellular metabolic process
  Homolog annotation: Hit_ID=A3C4S4; Match level="QueryCoverage=99%, HitCoverage=100%, E-value=0.0, Identity=97%"; Hit description=GDP -mannose 3,5-epimerase 1
  Pfam annotation: Domain name=3Beta_HSD; Domain location=33-300; Score= -124.8; E_value=0.017; Accession=PF01073.11; Description=3-beta hydroxysteroid dehydrogenaseisomerase family
  Pfam annotation: Domain name=Epimerase; Domain location=32-271; Score= 168.4; E_value=2.1e-47; Accession=PF01370.13; Description=NAD dependent epimerasedehydratase family
  Pfam annotation: Domain name=NAD_binding_4; Domain location=34-256; Score=-84.1; E_value=0.0015; Accession=PF07993.4; Description=Male sterility protein
  Pfam annotation: Domain name=Polysacc_synt_2; Domain location=32-201; Score=-192.8; E_value=0.062; Accession=PF02719.7; Description =Polysaccharide biosynthesis protein
  Pfam module annotation: Pfam domain module=3Beta_HSD::Epimerase::NAD _binding_4::Polysacc_synt_2; Domain location=33-300::32-271::34 -256::32-201
MGSSEKTVSTYGEYTYAELEREPYWPSEKLRISITGAGGFIGSHIARRLKSEGHYIIASDWKKNEHMTEDMFCHEFHLVDLRVMDNCLKVTQGVDHVFNLAADMGGMGFIQSNHSVIMYNNTMISFNMLEAARINGVKRFFYASSACIYPEFKQLETNVSLKESDAWPAEPQDAYGLEKLATEELCKHYTKDFGIECRVGRFHNIYGPFGTWKGGREKAPAAFCRKAQTSTERFEMWGDGLQTRSFTFIDECVEGVLRLTKSDFREPVNIGSDEMVSMNEMAEIVLSFEDRKLPIHHIPGPEGVRGRNSDNTLIKEKLGWAPTMKLKDGLRFTYFWIKEQIEKEKTQGVDIAAYGSSKVVSTQAPVQLGSLRAADGKEGL

SEQ ID NO: 70149 - protein, 339 aa, Setaria italica
  misc_feature (302)..(302): Xaa can be any naturally occurring amino acid
  Transcript Sequence Number=SeqID_4175
  Gene Ontology: Mol. function=catalytic activity; Biological process =cellular metabolic process
  Homolog annotation: Hit_ID=A3C4S4; Match level="QueryCoverage=100%, HitCoverage=89%, E-value=0.0, Identity=97%"; Hit description=GDP -mannose 3,5-epimerase 1
  Pfam annotation: Domain name=3Beta_HSD; Domain location=33-300; Score= -127.9; E_value=0.027; Accession=PF01073.11; Description=3-beta hydroxysteroid dehydrogenaseisomerase family
  Pfam annotation: Domain name=Epimerase; Domain location=32-271; Score= 166.5; E_value=7.9e-47; Accession=PF01370.13; Description=NAD dependent epimerasedehydratase family
  Pfam annotation: Domain name=NAD_binding_4; Domain location=34-256; Score=-87.0; E_value=0.0024; Accession=PF07993.4; Description=Male sterility protein
  Pfam module annotation: Pfam domain module=3Beta_HSD::Epimerase::NAD _binding_4; Domain location=33-300::32-271::34-256
MGSSEKTVTAYGEYTYAELEREPYWPSEKLRISITGAGGFIGSHIARRLKSEGHYIIASDWKKNEHMTEDMFCHEFHLVDLRVMDNCLKVTQGVDHVFNLAADMGGMGFIQSNHSVIMYNNTMISFNMLEAARINDVKRFFYASSACIYPEFKQLDTNVSLKESDAWPAEPQDAYGLEKLATEELCKHYTKDFGIECRVGRFHNIYGPFGTWKGGREKAPAAFCRKAQTSTERFEMWGDGLQTRSFTFIDECVEGVLRLTKSDFREPVNIGSDEMVSMNEMAEIVLSFEDRKLPIHHIPGPXEGVRGRNSDNTLIKEKLGWAPTMKLKDGLRFTYFWIK

SEQ ID NO: 70150 - protein, 1029 aa, Setaria italica
  misc_feature (46)..(46): Xaa can be any naturally occurring amino acid
  Transcript Sequence Number=SeqID_4176
  Gene Ontology: Mol. function=calcium ion binding; Cellular component =nucleus; Biological process=regulation of transcription, DNA -dependent
  Homolog annotation: Hit_ID=Q7XI44; Match level="QueryCoverage=99%, HitCoverage=99%, E-value=0.0, Identity=76%"; Hit description =Putative anther ethylene-upregulated protein ER1
  Pfam annotation: Domain name=Ank; Domain location=675-707; Score =39.0; E_value=1.9e-08; Accession=PF00023.22; Description=Ankyrin repeat
  Pfam annotation: Domain name=CG-1; Domain location=19-137; Score =293.8; E_value=3.7e-85; Accession=PF03859.8; Description=CG-1 domain
  Pfam annotation: Domain name=IQ; Domain location=850-870; Score=22.1; E_value=0.0023; Accession=PF00612.19; Description=IQ calmodulin -binding motif
  Pfam annotation: Domain name=IQ; Domain location=873-893; Score=30.5; E_value=6.7e-06; Accession=PF00612.19; Description=IQ calmodulin -binding motif
  Pfam annotation: Domain name=TIG; Domain location=443-529; Score =18.3; E_value=0.017; Accession=PF01833.16; Description=IPTTIG domain
  Pfam module annotation: Pfam domain module=Ank::CG-1::IQ::IQ::TIG; Domain location=675-707::19-137::850-870::873-893::443-529
MAEIRKYAMSNQPPDIAQILLEAQNRWLRPTEICQILSNYKKFSIXPEPPNRPPSGSLFLFDRKILRYFRKDGHNWRKKKDGKTVKEAHEKLKVGSVDVLHCYYAHGEDNENFQRRTYWLLEEGFMNIVLVHYLEIKGGKQNFNRAKEAEENAGLSSADSPACSNSFASQSQVASQSMDAESPISGQISEYEDAETDNCRASSRYHPFTEMQQPVDGIMMSNFLGASAPSASVNNLGAGYLGEMQPTPANFTNHFVTHDDISSAFNETGAGLRGGPKTPIDSMRFGEPVPEYPGGFTEPTLYSSVATVGNNLDDSLQTFMSEALYTNNLTQNEVDALNAAGITSSQAENDGYTDQSARYPLLKQSSLDLFKIEPDGLKKFDSFSRWMSNELAEVADLDIKSSSDAFWSTTETVNVADGSSIPINEQLDAFVVSPSLSQDQLFSIIDVSPSWAYNGTKTKVLITGTFLAKKEDVENSRWSCMFGDVEVAAEVLVDGSLRCYTPVHHSGRVPFYVTCSNRVACSEVREFEFRDSETHYMETSDPHTTGINEMHLHIRLDKLLSLGPEDYEKYVLSNGNKSELVDTINSLMLDDKLSNMALSSGEKELSTVRDQNVEKQVKEKLYYWLIHKIHDDGKGPNVLGKEGQGVIHLVAALGYDWAIKPIVAAGVKVNFRDIRGWTALHWAASCGRERTVGALIANGADPGALTDPTQQFPSATPADLASENGHKGIAGFLAESALTNHLSALTLKESQGGNVEEIGGLTAAEEFAEPSSAQLACVDSQEESLKDSLGAVRKSTQAAARIFQAFRVESFHRKKVIEYGDDDCGLSDERTLSLISLKNAKPGHSDMPMHSAAVRIQNKFRGWKGRKEFMIIRQKIVKIQAHVRGHNVRKNYRKVVWSVGIVEKVILRWRRKRRGLRGFQAEKQLEGPSSQIQPAKSEAEDEYDYLKDGRKQAEGRLQRALARVHSMTQYPEARDQYRRLQTCVNELQESQAMQDGMLSDAAGTDGGDLMAELEELCRGDGDAPMSTIS

SEQ ID NO: 70151 - protein, 519 aa, Setaria italica
  misc_feature (157)..(157): Xaa can be any naturally occurring amino acid
  Transcript Sequence Number=SeqID_4177
  Gene Ontology: Mol. function=transferase activity, transferring glycosyl groups; Cellular component=integral to membrane; Biological process=cellulose biosynthetic process
  Homolog annotation: Hit_ID=Q851L8; Match level="QueryCoverage=100%, HitCoverage=47%, E-value=0.0, Identity=87%"; Hit description =Probable cellulose synthase A catalytic subunit 5 [UDP-forming]
  Pfam annotation: Domain name=Cellulose_synt; Domain location=1-513; Score=802.1; E_value=3.7e-238; Accession=PF03552.6; Description =Cellulose synthase
KKAMCFMMDPLLGKKVCYVQFPQRFDGIDRHDRYANRNVVFFDINMKGLDGIQGPIYVGTGCVFRRQALYGYDAPKSKKPPSRTCNCWPKWCFCCCCGGNRKHKKKTTKPKTEKKKRLLFFKKEENQSPAYALGEIDEAAPGAENEKAGIVNQQKLXEKKFGQSSVFVTSTLLENGGTLKSASPASLLKEAIHVISCGYEDKTDWGKEIGWIYGSVTEDILTGFKMHCHGWRSIYCIPKRPAFKGSAPLNLSDRLHQVLRWALGSIEIFFSNHCPLWYGYGGGLKFLERFSYINSIVYPWTSIPLLAYCTLPAICLLTGKFITPELNNVASLWFMSLFICIFATSILEMRWSGVGIDDWWRNEQFWVIGGVSSHLFAVFQGLLKVIAGVDTSFTVTSKGGDDEEFSELYTFKWTTLLIPPTTLLLLNFIGVVAGVSNAINNGYESWGPLFGKLFFAFWVIVHLYPFLKGLVGRQNRTPTIVIVWSILLASIFSLLWVRVDPFLAKNDGPLLEECGLDCN

SEQ ID NO: 70152 - protein, 926 aa, Setaria italica
  misc_feature (582)..(582): Xaa can be any naturally occurring amino acid
  misc_feature (900)..(900): Xaa can be any naturally occurring amino acid
  Transcript Sequence Number=SeqID_4178
  Gene Ontology: Mol. function=transferase activity, transferring glycosyl groups; Cellular component=integral to membrane; Biological process=cellulose biosynthetic process
  Homolog annotation: Hit_ID=Q5JN63; Match level="QueryCoverage=98%, HitCoverage=92%, E-value=0.0, Identity=88%"; Hit description =Cellulose synthase A catalytic subunit 4 [UDP-forming]
  Pfam annotation: Domain name=Cellulose_synt; Domain location=108-920; Score=2048.8; E_value=0; Accession=PF03552.6; Description=Cellulose synthase
MAMRALKRRRSEDHHAAGGLRERVTMGSHLNDRQDEVSHARTMSSLSGIGSELNDESGKPIWKNRVESWKEKKNEKKASAKKAAAKAQPPPVEEQIMDEKDLTDAYEPLSRVIPISKNKLTPYRAVIIMRLVVLGLFFHYRITNPVYSAFGLWMTSVICEIWFAFSWILDQFPKWYPINRETYVDRLTARYGDGEDSGLAPVDFFVSTVDPLKEPPLITANTVLSILAVDYPVEKISCYVSDDGSAMLTFESLAETAEFARKWVPFCKKYAIEPRAPEFYFSQKIDYLKDKIHPSFVKERRAMKRDYEEYKVRINALVAKAQKTPEEGWIMQDGTPWPGNNPRDHPGMIQVFLGETGARDFDGNELPRLVYVSREKRPGYQHHKKAGAMNALVRVSAVLTNAPYILNLDCDHYVNNSKAVREAMCFMMDPTVGRDVCYVQFPQRFDGIDRSDRYANRNVVFFDVNMKGLDGLQGPVYVGTGCCFYRQALYGYGPPSLPALPKSSICSWCCCCCPKKKIERSEREINRDSRREDLESAIFNLREIDNYDEYERSMLISQMSFEKSFGLSSVFIESTLMENGGXVPESANPSTLIKEAIHVISCGYEEKTEWGKEIGWIYGSVTEDILSGFKMHCRGWRSIYCMPVRPAFKGSAPINLSDRLHQVLRWALGSVEIFFSRHCPLWYGYGGGRLKWLQRLSYINTIVYPFTSLPLIAYCCLPAICLLTGKFIIPTLSNAATIWFLGLFISIIVTSVLELRWSGIGIEDWWRNEQFWVIGGVSAHLFAVFQGILKMIAGLDTNFTVTAKATDDTEFGELYVFKWTTVLIPPTTILVLNLVGVVAGFSDALNSGYESWGPLFGKVFFAMWVIMHLYPFLKGLMGKQNRTPTIVVLWSVLLASVFSXLSGVKIDPFVGGTEPVSSTNCNTVIC

SEQ ID NO: 70153 - protein, 1076 aa, Setaria italica
  misc_feature (975)..(975): Xaa can be any naturally occurring amino acid
  Transcript Sequence Number=SeqID_4179
  Gene Ontology: Mol. function=transferase activity, transferring glycosyl groups; Cellular component=integral to membrane; Biological process=cell wall organization and biogenesis
  Homolog annotation: Hit_ID=Q9AV71; Match level="QueryCoverage=100%, HitCoverage=100%, E-value=0.0, Identity=81%"; Hit description =Cellulose synthase A catalytic subunit 7 [UDP-forming]
  Pfam annotation: Domain name=C1_3; Domain location=34-67; Score=11.5; E_value=0.026; Accession=PF07649.4; Description=C1-like domain
  Pfam annotation: Domain name=Cellulose_synt; Domain location=214 -1071; Score=2143.0; E_value=0; Accession=PF03552.6; Description =Cellulose synthase
  Pfam annotation: Domain name=PHD; Domain location=35-84; Score=0.4; E_ value=0.024; Accession=PF00628.21; Description=PHD-finger
  Pfam annotation: Domain name=zf-C3HC4; Domain location=36-81; Score =3.5; E_value=0.04; Accession=PF00097.17; Description=Zinc finger, C3HC4 type (RING finger)
  Pfam module annotation: Pfam domain module=C1_3::Cellulose _synt::PHD::zf-C3HC4; Domain location=34-67::214-1071::35-84::36-81
MDTGGLAAGSHLRDELHVMRGHEEAPAGRSADVKTCRVCGDEVGAREDGQPFVACSECGFPVCRPCYEYERAEGTQCCPQCNTRYKRHKGCPRVEGDEDDGPEMDDFEEEFPAAVKSPKKPHEPVAFDVYSENGEQPPQKWRTGGQTLSSFTGSVAGKDLEAEREMEGSMEWKDRIDKWKTKQEKRGKLNHDDSDDDDDKNDDEYMLLAEARQPLWRKVPIPSSQINPYRIVIVLRLVVLCFFLKFRITTPATDAVPLWLASVICELWFALSWILDQLPKWAPVTRETYLDRLALRYDREGDACRLSPIDFFVSTVDPLKEPPIITANTVLSILAVDYPVDRTSCYVSDDGASMLLFDTLSETAEFARRWVPFCKKFAVEPRAPEFYFSQKIDYLKDKVQPTFVKERRAMKREYEEFKVRINALVAKAQKKPEEGWVMQDGTPWPGNNTRDHPGMIQVYLGSQGALDVEGHELPRLVYVSREKRPGYNHHKKAGAMNALVRVSAVLTNAPFILNLDCDHYVNNSKAVREAMCFLMDPQLGKKLCYVQFPQRFDGIDRHDRYANRNVVFFDINMKGLDGIQGPVYVGTGCVFNRQALYGYDPPRPEKRPKMTCDCWPSWCCCCCCFGGGKRGKARKDKKGGGGGDSGDEPRRGLLGFYRKRSKKDKLGGGSVAGGKKYKKHQRAFELEEIEEGLEGYDELERSSLMSQKSFEKRFGQSPVFIASTLVEDGGLPQGAAADPAALIKEAIHVISCGYEEKTEWGKEIGWIYGSVTEDILTGFKMHCRGWKSVYCTPTRPAFKGSAPINLSDRLHQVLRWALGSVEIFMSRHCPLWYAYGGRLKWLERFAYTNTIVYPFTSIPLIAYCTIPAVCLLTGKFIIPTLNNLASIWFIALFLSIIATGVLELRWSGVSLEDWWRNEQFWVIGGVSAHLFAVFQGLLKVLGGVDTNFTVTSKGAADETDVFGELYLFKWTTLLXRPPPTLIIINMVGIVAGVSDAVNNGYGSWGPLFGKLFFSFWVILHLYPFLKGLMGRQNRTPTIVVLWSILLASIFSLVWVRIDPFIPKSKGPVLKPCGVEC

SEQ ID NO: 70154 - protein, 1056 aa, Setaria italica
  misc_feature (225)..(225): Xaa can be any naturally occurring amino acid
  misc_feature (246)..(246): Xaa can be any naturally occurring amino acid
  misc_feature (352)..(352): Xaa can be any naturally occurring amino acid
  misc_feature (715)..(715): Xaa can be any naturally occurring amino acid
  misc_feature (787)..(787): Xaa can be any naturally occurring amino acid
  misc_feature (796)..(796): Xaa can be any naturally occurring amino acid
  misc_feature (938)..(938): Xaa can be any naturally occurring amino acid
  Transcript Sequence Number=SeqID_4180
  Gene Ontology: Mol. function=transferase activity, transferring glycosyl groups; Cellular component=integral to membrane; Biological process=cell wall organization and biogenesis
  Homolog annotation: Hit_ID=Q69P51; Match level="QueryCoverage=100%, HitCoverage=100%, E-value=0.0, Identity=89%"; Hit description =Cellulose synthase A catalytic subunit 9 [UDP-forming]
  Pfam annotation: Domain name=Cellulose_synt; Domain location=249 -1051; Score=2061.0; E_value=0; Accession=PF03552.6; Description =Cellulose synthase
  Pfam annotation: Domain name=PHD; Domain location=36-85; Score=5.4; E_ value=0.0068; Accession=PF00628.21; Description=PHD-finger
  Pfam annotation: Domain name=zf-C3HC4; Domain location=37-82; Score =3.7; E_value=0.038; Accession=PF00097.17; Description=Zinc finger, C3HC4 type (RING finger)
  Pfam module annotation: Pfam domain module=Cellulose_synt::PHD::zf -C3HC4; Domain location=249-1051::36-85::37-82
MEASAGLVAGSHNRNELVLIRGHEDPKPLRALSGQVCEICGDEVGLTVDGDLFVACNECGFPVCRPCYEYERREGTQNCPQCKTRYKRLKGSPRVAGDDDEEDIDDLEHEFNIDDEKQKQLQGNMQNSQITEAMLHGKMSYGRGPDDGEGNNTPQIPPIITGSRSVPVSGEFPITNGYGHSELSSSLHKRIHPYPVSEPGSAKWDEKKEVSWKERMDDWKSKQGXILGGADPDDMDADVPLNDEAXRQPLSRKVSIASSKVNPYRMVIVVRLVVLAFFLRYRILHPVPDAIGLWLVSIICEIWFAISWILDQFPKWFPIDRETYLDRLSLRYEREGEPSLLSAVDLFVSTVXDPLKEPPLVTANTVLSILAVDYPVDKVSCYVSDDGASMLTFEALSETAEFARKWVPFCKKFSIEPRAPEFYFSLKVDYLKDKVQTAFVQERRAMKREYEEFKVRINALVAKAMKVPAEGWIMKDGTPWPGNNTRDHPGMIQVFLGHSGGHDTEGNELPRLVYVSREKRPGFQHHKKAGAMNALIRVSAVLTNAPFMLNLDCDHYINNSKAIREAMCFLMDPQVGRKVCYVQFPQRFDGIDVHDRYANRNTVFFDINMKGLDGIQGPVYVGTGCVFRRQALYGYNPPKGPKRPKMVTCDCCPCFGRKKRKHAKDGLPETTADVGMDGDKEMLMSQMNFEKRFGQSAAFVTSTLMEEGGVPPSSXPAALLKEAIHVISCGYEDKTDWGLELGWIYGSITEDILTGFKMHCRGWRSVYCMPKRAAFKGSAPINLSDRXLNQVLRWAXLGSVEIFFSRHSPLLYGYKNGNLKWLERFAYINTTIYPFTSLPLLAYCTLPAVCLLTGKFIMPSISTFASLFFIALFMSIFATGILEMRWSGVSIEEWWRNEQFWVIGGVSAHLFAVVQGLLKVLAGIDTNFTVTSKATGDXEDDEFAELYAFKWTTLLIPPTTLLIINIIGVVAGISDAINNGYQSWGPLFGKLFFAFWVIVHLYPFLKGLMGRQNRTPTIVVIWSVLLASIFSLLWVRIDPFIVRTKGPDVKQCGINC

SEQ ID NO: 70155 - protein, 1092 aa, Setaria italica
  misc_feature (146)..(146): Xaa can be any naturally occurring amino acid
  misc_feature (847)..(847): Xaa can be any naturally occurring amino acid
  Transcript Sequence Number=SeqID_4181
  Gene Ontology: Mol. function=transferase activity, transferring glycosyl groups; Cellular component=integral to membrane; Biological process=cellulose biosynthetic process
  Homolog annotation: Hit_ID=Q9LLI2; Match level="QueryCoverage=100%, HitCoverage=100%, E-value=0.0, Identity=87%"; Hit description =Cellulose synthase-8
  Pfam annotation: Domain name=Cellulose_synt; Domain location=263 -1086; Score=2146.4; E_value=0; Accession=PF03552.6; Description =Cellulose synthase
  Pfam annotation: Domain name=PHD; Domain location=38-87; Score=3.0; E_ value=0.013; Accession=PF00628.21; Description=PHD-finger
  Pfam annotation: Domain name=zf-C3HC4; Domain location=39-84; Score =2.5; E_value=0.053; Accession=PF00097.17; Description=Zinc finger, C3HC4 type (RING finger)
  Pfam module annotation: Pfam domain module=Cellulose_synt::PHD::zf -C3HC4; Domain location=263-1086::38-87::39-84
MEASAGLIAGSHNRNELVVIRREPGGGGGGAARRAEAPCQICGDEVGVGFDGEPFVACNECAFPVCRACYEYERREGSQACPQCRTRYKRLKGCPRVAGDEEEDGADDLEGEFGLHGGGAGAGGDDDPQHVAESMLRAHMSYGRGXPAHGFNPVPNVPLLTNGQMVDDIPPEQHALVPSYMGGGPKRIHPLPFADPSLPVQPRPMDPSKALADYGYGSVAWADKMKDWKKQQQERLQHARSDGGGDWEGEDADLPLMDEARQPLSRKVPIPSSRINPYRMIIIIRLVVLGFFFHYRVMHPVNDAFALWLISVICEIWFAMSWILDQFPKWLPIERETYLDRLSLRFDKEGQPSQLAPIDFFVSTVDPSKEPPLVTANTVLSILAVDYPVEKVSCYVSDDGAAMLTFEALSETSEFAKKWVPFCKKFNIEPRAPEWYFQQKIDYLKDKVAASFVRDRRAMKREYEEFKVRINALVAKAQKVPEEGWTMQDGSPWPGNNVRDHPGMIQVFLGQSGGHDVEGNELPRLVYVSREKRPGYNHHKKAGAMNALVRVSAVLSNAPYLLNLDCDHYINNSKAVKEAMCFMMDPLVGKKVCYVQFPQRFDGIDRHDRYANRNVVFFDINMKGLDGIQGPIYVGTGCVFRRQALYGYDAPKTKKPPSRTCNCWPKWCLSCCCSRNKNKKKTTKPKTEKKKRLFFKKAENPSPAYALGEIEEGAPGADVEKAGIVNQQKLEKKFGQSSVFVASTLLENGGTLKSASPASLLKEAIHVISCGYEDKTDWGKEIGWIYGSITEDILTGFKMHCHGWRSIYCIPKRPAFKGSAPLNLSDRLHQVLRWALGSVEIFFSKHXPLWYGYGGGLKFLERFSYINSIVYPWTSIPLLFYCTLPAICLLTGKFITPELSNVASIWFMALFICIFVTGILEMRWSGVAIDDWWRNEQFWVIGGVSSHLFAVFQGLLKVFAGIDTSFTVTSKAGDDEEFSELYTFKWTTLLIPPTTLLLLNFIGVVAGISNAINNGYESWGPLFGKLFFAFWVIVHLYPFLKGLVGRQNRTPTIVIVWSILLASIFSLLWVRVDPFLAKNDGPLLEECGLDCN

SEQ ID NO: 70156 - protein, 1091 aa, Setaria italica
  misc_feature (452)..(452): Xaa can be any naturally occurring amino acid
  Transcript Sequence Number=SeqID_4182
  Gene Ontology: Mol. function=transferase activity, transferring glycosyl groups; Cellular component=integral to membrane; Biological process=cellulose biosynthetic process
  Homolog annotation: Hit_ID=Q851L8; Match level="QueryCoverage=100%, HitCoverage=100%, E-value=0.0, Identity=89%"; Hit description =Probable cellulose synthase A catalytic subunit 5 [UDP-forming]
  Pfam annotation: Domain name=Cellulose_synt; Domain location=259 -1085; Score=2161.4; E_value=0; Accession=PF03552.6; Description =Cellulose synthase
  Pfam annotation: Domain name=PHD; Domain location=38-87; Score=-1.5; E_value=0.039; Accession=PF00628.21; Description=PHD-finger
  Pfam module annotation: Pfam domain module=Cellulose_synt::PHD; Domain location=259-1085::38-87
MEASAGLVAGSHNRNELVVIRRDGEPGPKPMNQQNGQVCQICGDDVGLNPDGEPFVACNECAFPICRDCYEYERREGTQNCPQCKTRFKRLKGCARVPGDEEEDGVDDLENEFNWSDKHDSQYVAESILHAHMSYGRGADFDGVPQPFQPIPNVPLLTNGQMVDDIPPEQHALVPSFMGGGGKRIHPLPYADPNLPVQPRSMDPSKDLAAYGYGSVAWKERMESWKQKQERMHQMRNDGGGNDDGDDADLPLMDEARQPLSRKIPLPSSLINPYRMIIIIRLVVLGFFFHYRVMHPVPDAFALWLISVICEIWFAMSWILDQFPKWFPIERETYLDRLTLRFDKEGQPSQLAPVDFFVSTVDPLKEPPLVTANTVLSILAVDYPVDKVSCYVSDDGAAMLTFEALSETSEFAKKWVPFCKRYSIEPRAPEWYFQQKIDYLKDKVAQNFVREXRRAMKREYEEFKVRINALVAKAQKVPEEGWTMQDGTPWPGNNVRDHPGMIQVFLGQSGGHDVEGNELPRLVYVSREKRPGYNHHKKAGAMNALVRVSAVLTNAPYLLNLDCDHYINNSKAIKEAMCFMMDPLLGKKVCYVQFPQRFDGIDRHDRYANRNVVFFDINMKGLDGIQGPIYVGTGCVFRRQALYGYDAPKTKKPPSRTCNCWPKWCICCCCFGNRKTKKKTKTSKPKFEKLKKLFKKKENQAPAYALGEIDEAAPGAENEKASIVNQQKLEKKFGQSSVFVASTLLENGGTLKSASPASLLKEAIHVISCGYEDKTGWGKDIGWIYGSVTEDILTGFKMHCHGWRSIYCIPKRAAFKGSAPLNLSDRLHQVLRWALGSIEIFFSNHCPLWYGYGGGLKFLERFSYINSIVYPWTSIPLLAYCTLPAICLLTGKFITPELTNVASLWFMSLFICIFITGILEMRWSGVGIDDWWRNEQFWVIGGVSSHLFAVFQGLLKVIAGIDTSFTVTSKGGDDEEFSELYTFKWTTLLIPPTTLLLLNFIGVVAGISNAINNGYESWGPLFGKLFFAFWVIVHLYPFLKGLVGRQNRTPTIVIVWSILLASIFSLLWVRIDPFLAKNDGPLLEECGLDCN

SEQ ID NO: 70157 - protein, 960 aa, Setaria italica
  misc_feature (302)..(302): Xaa can be any naturally occurring amino acid
  misc_feature (402)..(402): Xaa can be any naturally occurring amino acid
  misc_feature (472)..(472): Xaa can be any naturally occurring amino acid
  misc_feature (543)..(543): Xaa can be any naturally occurring amino acid
  misc_feature (633)..(633): Xaa can be any naturally occurring amino acid
  misc_feature (645)..(645): Xaa can be any naturally occurring amino acid
  misc_feature (669)..(669): Xaa can be any naturally occurring amino acid
  misc_feature (745)..(745): Xaa can be any naturally occurring amino acid
  Transcript Sequence Number=SeqID_4183
  Gene Ontology: Mol. function=transferase activity, transferring glycosyl groups; Cellular component=integral to membrane; Biological process=cellulose biosynthetic process
  Homolog annotation: Hit_ID=Q84UP7; Match level="QueryCoverage=94%, HitCoverage=94%, E-value=0.0, Identity=82%"; Hit description =Probable mixed-linked glucan synthase 6
  Pfam annotation: Domain name=Cellulose_synt; Domain location=93-935; Score=1241.2; E_value=0; Accession=PF03552.6; Description=Cellulose synthase
MAPGGGDGRRNNGEQANGNNRHGCVCGFPVCACAGAAAVASAASSADMDRVVAVAATEGQIGAVNDESWVAVDLSDDLSGDGGDDGVAIEDRPVFRTEKIKGVLLHPYRVLIFVRLIAFTLFVIWRISHRNPDAQWLWVTSIAGEFWFGFSWLLDQLPKLNPINRVPDLAVLRQRFDRADGTSRLPGLDIFVTTADPFKEPILSTANSILSILAADYPVEKNTCYLSDDSGMLLTYEAMVEAAKFATVWVPFCRKHGIEPRGPESYFELKSHPYMGRSQEDFVNDRRRVRKEYDEFKARINXVEHDIKQRSDAYNAARGLKDGEPRATWMADGNQWEGTWVEPSENHRKGDHAGIVLVLVNHPSHGRQFGPPASADNPLDFSMVDVRLPMLVYVSREKRPGXNHEKKAGAMNALTRCSAVLTNSPFILNLDCDHYINNSQALRAGICFMLGRDSDTVAFVQFPQRFEGVDPXTDLYANHNRIFFDGTLRALDGMQGPIYVGTGCLFRRVTLYGFDPPRINVGGQCFPSLGGMFAKTKYEKPGXLEMSTAKGAATAVVAKGKHGFLPLPKKSYGKSEAFVDSIPRASHPSPFANATGDAGVLTDEATISEAVAVTTAAYEKKTGWGSNIGWVYXTVTEDVVTGYRXMHIKGWRSRYCSIYPHAFIGTAPXNLTERLYQVLRWSTGSLEIFFSKNNPLFGSTFLHPLQRVAYINITTYPFTALFLIFYTTVPALSFVTGHFIVQRPXTTMFYVYLAIVLGTLLILAVLEVKWAGVTVFEWFRNGQFWMTASCSAYLAAVCQVVVKVVFRRDISFKLTSKQPAGDEKKDPYADLYVVRWTWLMVMPIIIILVNIIGSAVAFAKVLDGEWTHWLKVAGGVFFNFWVLFHLYPFAKGILGKHGKTPVVVLVWWAFTFVITAVLYINIPHIHGPGGKHGHGGALGKHAHGHHAGSKFGYSEVYGWP

SEQ ID NO: 70158 - protein, 83 aa, Setaria italica
  Transcript Sequence Number=SeqID_4184
  Subcellular localization annotation: CTP_CleavageSite=17; ConfidenceScore=5.18e-01
FYFKAVLCFYSSLLSCRGGRGSKRSSSRGRCPSPEAVDLKTQELRTQRLFFCDQVEKEKEMPPPPPIRLGPPHPYLKTHGGKV

SEQ ID NO: 70159 - protein, 344 aa, Setaria italica
  Transcript Sequence Number=SeqID_4185
  Gene Ontology: Mol. function=catalytic activity; Cellular component =membrane; Biological process=plant-type hypersensitive response
  Homolog annotation: Hit_ID=B6SSC1; Match level="QueryCoverage=86%, HitCoverage=96%, E-value=5e-96, Identity=56%"; Hit description=Lipid phosphate phosphatase 3
  Pfam annotation: Domain name=PAP2; Domain location=132-282; Score =148.7; E_value=1.8e-41; Accession=PF01569.13; Description=PAP2 superfamily
PQDSRAQDATPLLLCPVRSGDQVEKEKEMPPPPPIRLGPPHPYLKTHGGKVATVHLFDWVVLALLVAIDVGLNLIEPFHRFVGKDMMADLRYPMKRNTVPVWAVPIYAVIGPIIIIVGIYMKRRNVYDMHHAILGLLFSVLITGVLTDAIKDGVGRPRPNFFWRCFPDGVPKYDNITGGVICHGVPSVIKEGHKSFPSGHSSWSFAGLGFLSWYLAGKIKAFDRRGHVAKLCIVLLPLLLAAMVAVSRVDDYWHHWQDVFAGGILGLVVASFCYLQFFPPPSGEQGFWPHAYFEHILNPEGEGQVQSTTNSNHHQSLSGGPVAMEMRSTGQESLDSIEEGRRAR

SEQ ID NO: 70160 - protein, 47 aa, Setaria italica
  Transcript Sequence Number=SeqID_4186
LCFKKAIGAIQTLHWHLVFGLVTLRLPGALPKSMACSDSCSVAGTNE

SEQ ID NO: 70161 - protein, 76 aa, Setaria italica
  Transcript Sequence Number=SeqID_4187
MCGQRYKCAHIREPEPSGEEASGAGSLRPLLASSSKRFILAFRSCFGFKKLWEIAVEEEKAALRRRKAIQDCSIIR

SEQ ID NO: 70162 - protein, 127 aa, Setaria italica
  Transcript Sequence Number=SeqID_4188
  Gene Ontology: Mol. function=calcium ion binding
  Homolog annotation: Hit_ID=B6TJU2; Match level="QueryCoverage=69%, HitCoverage=48%, E-value=2e-18, Identity=61%"; Hit description =Calmodulin-like protein 1
  Pfam annotation: Domain name=efhand; Domain location=91-119; Score =42.0; E_value=2.4e-09; Accession=PF00036.24; Description=EF hand
  Subcellular localization annotation: CTP_CleavageSite=35; ConfidenceScore=5.58e-01
SGGKKDGSGKRSLSRSEAPSFASASSSSSDETLARSSTPRSVLMPLSPAEIPRRELEAVLRRLGHGEPSDDELDAVAAMAAQAPAPGGEDELMEAFRVFDADGDGRITAEELRAVMEAILGGGAEGC

SEQ ID NO: 70163 - protein, 92 aa, Setaria italica
  Transcript Sequence Number=SeqID_4189
  Subcellular localization annotation: CTP_CleavageSite=56; ConfidenceScore=5.82e-01
MKLSVQSLARKLSLPSPKRSWSGGKKDGSGKRSLSRSEAPSFASASSSSSDETLARSSTPRSVLMPLSPAEIPRRWMGRRLWRWRWLWRRPE

SEQ ID NO: 70164 - protein, 98 aa, Setaria italica
  Transcript Sequence Number=SeqID_4190
  Gene Ontology: Mol. function=protein binding
  Homolog annotation: Hit_ID=Q1EPE0; Match level="QueryCoverage=76%, HitCoverage=14%, E-value=6e-16, Identity=58%"; Hit description=WD-40 repeat family protein
FRSSSGLGKAINVAADGRIYTGHQDAKVRVWRRASSPPEDPAAAAHRRVGSLPRLRDVLKSSLLPSQYVETLRHRAGETEATGVASAAGTMLAECCRR

SEQ ID NO: 70165 - protein, 73 aa, Setaria italica
  Transcript Sequence Number=SeqID_4191
SMDYGFGYSAMSGWGQRDKISFFEEEKKYKESRRPCAGCLVLRSGDGALYDGEKLVHRWLAPPLRPDLKDPNP

SEQ ID NO: 70166 - protein, 104 aa, Setaria italica
  Transcript Sequence Number=SeqID_4192
RLDVDIEPQNSELALIVPNVGCLDALEFGIGNGAQYQPAFSPLPPHHPQYQPNTLGTGWNRSHSYLHAQAHRAPLAPAAGEPRRPPLDPATGEPRRPPLAPATV

SEQ ID NO: 70167 - protein, 113 aa, Setaria italica
  misc_feature (57)..(57): Xaa can be any naturally occurring amino acid
  Transcript Sequence Number=SeqID_4193
  Homolog annotation: Hit_ID=B9RMD8; Match level="QueryCoverage=72%, HitCoverage=13%, E-value=1e-15, Identity=49%"; Hit description=Yth domain-containing protein, putative
VKLEQGLEMLKIFKNHDDDASILDDFYFYEEREKALQENKARLHQQHIPSSIAIEPXKPLTVPTDLVGHITKSFAQAVRLGEAKAVSPSAEKVSGGDSSVPVKPVEVKQSGLS

SEQ ID NO: 70168 - protein, 94 aa, Setaria italica
  misc_feature (23)..(23): Xaa can be any naturally occurring amino acid
  Transcript Sequence Number=SeqID_4194
HLYRLLLVEMGETMIPTDPTQGXFIADTLSPNSFLFGPRPEWFRSSEGAGSFPSPAASPQPAGGVSGAIGQSNFPMASGMVFCSHCVSLPSNKI

SEQ ID NO: 70169 - protein, 687 aa, Setaria italica
  Transcript Sequence Number=SeqID_4195
  Homolog annotation: Hit_ID=B9RMD8; Match level="QueryCoverage=78%, HitCoverage=95%, E-value=1e-116, Identity=44%"; Hit description=Yth domain-containing protein, putative
  Pfam annotation: Domain name=YTH; Domain location=500-590; Score =194.8; E_value=2.4e-55; Accession=PF04146.7; Description=YT521-B -like family
  Subcellular localization annotation: CTP_CleavageSite=78; ConfidenceScore=5.71e-01
LFSPLLSSSDHEPAKPQTGVGSRSSPIRSPDPPASAPIRASSHRSSSPPYRSRRAPPSLTGAEIPPSPRTDRFLLIIAGSMEKQEPIADVEQKIGLTEKPTEQPVPGKDDKATLPPISVDSNAIDLPSEGQTQAGTSNIDGDHNAAYPHNFYASQAQPFYYQGYENPPQEWDTYPPYMSVEGLEVGPTVVYNEDPSLMFHGGYGYDPYAHYSPITTPVPTAVSGDGQLYSPQQFSFSAPYYQQSVPPGMPYLSSPTPISQGETMIPTDPTQGGFIADTLSPNSFLFGPRPEWFRSSEGAGSFPSPAASPQPAGGVSGAIGQSNFPMASGMPSPHQKPFYGFGSPSDSFGRGFSHGGMFPQASNYGGSFPSFGLNGRSSISIEKGRRRGRGNALICSCNGPLDFLNEQSRGPRATKPKKQPEGDSKDEKPSAGVGRELYNKPDFVIEYTNARFFIIKSYSEDNVHKSVKYGVWASTTNGNKKLDSAYREAKEKEEQCPIFLLFSVNASAQFCGVAEMIGPVDFEKSVDYWQQDKWTGQFPVKWHIVKDVPNNLFRHIILENNDNKPVTNSRDTQEVKLEQGLEMLKIFKNHDDDASILDDFYFYEEREKALQENKARLHQQHIPSSIAIEPKKPLTVPTDLVGHITKSFAQAVRLGEAKAVSPSAEKVSGGDSSVPVKPVEVKQSGLS

SEQ ID NO: 70170 - protein, 204 aa, Setaria italica
  Transcript Sequence Number=SeqID_4196
  Gene Ontology: Mol. function=methyltransferase activity; Cellular component=chloroplast
  Homolog annotation: Hit_ID=B9RHZ5; Match level="QueryCoverage=89%, HitCoverage=63%, E-value=1e-68, Identity=67%"; Hit description=S -adenosylmethionine-dependent methyltransferase, putative
  Pfam annotation: Domain name=rRNA_methylase; Domain location=60-204; Score=193.2; E_value=7.2e-55; Accession=PF06962.4; Description =Putative rRNA methylase
MCKRNYLHVSPVANFVCVFMVRVWRSIVRKGDTVVDATCGNGNDTLALLKMVADERAQGCVYGMDIQDSAIESTSSFLKMAVDDDHQRELVKLFPICHSRMEEIVPKDAPVRLVAFNLGYLPGGDKTLITVPRTTELALQAASRILSSGGLISVLVYIGHPGGRDELDVVESFASSLPLDTWASCKLQMVNRPVAPVLILLNKK

SEQ ID NO: 70171 - protein, 114 aa, Setaria italica
  misc_feature (64)..(64): Xaa can be any naturally occurring amino acid
  misc_feature (109)..(109): Xaa can be any naturally occurring amino acid
  Transcript Sequence Number=SeqID_4197
  Gene Ontology: Mol. function=electron carrier activity; Cellular component=integral to membrane; Biological process=oxidation reduction
  Homolog annotation: Hit_ID=Q6ZAG4; Match level="QueryCoverage=80%, HitCoverage=7%, E-value=1e-22, Identity=59%"; Hit description =Putative respiratory burst oxidase protein E
  Pfam annotation: Domain name=FAD_binding_8; Domain location=15-113; Score=-12.5; E_value=0.024; Accession=PF08022.4; Description=FAD -binding domain
WLVLGDNLQKFTHVLITLSFTQVCLLPGNVLTITMSKPYGFRYRSGQYIFLQCPTISPFEWYAXTLHSPITLAANIMSFGTVIPDTLFHTCKASFSITSAPGDDYISVXIQTRG

SEQ ID NO: 70172 - protein, 415 aa, Setaria italica
  Transcript Sequence Number=SeqID_4198
  Gene Ontology: Mol. function=electron carrier activity; Cellular component=integral to membrane; Biological process=oxidation reduction
  Homolog annotation: Hit_ID=Q6ZAG4; Match level="QueryCoverage=100%, HitCoverage=40%, E-value=0.0, Identity=78%"; Hit description =Putative respiratory burst oxidase protein E
  Pfam annotation: Domain name=FAD_binding_8; Domain location=109-226; Score=161.0; E_value=3.4e-45; Accession=PF08022.4; Description=FAD -binding domain
  Pfam annotation: Domain name=NAD_binding_6; Domain location=232-414; Score=255.2; E_value=1.5e-73; Accession=PF08030.4; Description =Ferric reductase NAD binding domain
  Pfam module annotation: Pfam domain module=FAD_binding_8::NAD_binding_ 6; Domain location=109-226::232-414
VTLMAVSFTLATRPFRKREEMAKGAAAAAAGGGGRRLLRWSFPLGHLAGFNAFWYSHHLLIVVYLLLLVHGWFMFLVDRWYQRTTWMYISVPLVLYVGERTLRAFRSKAYAVKILKVCLLPGNVLTITMSKPYGFRYRSGQYIFLQCPTISPFEWHPFSITSAPGDDYISVHIQTRGDWTQELKRIFVENYFTPCVPIRAAFGELGAAEQKSPPRLLVDGPYGAPAQDFRNYDVLLLVGLGIGATPFISILRDLLNNIKLADELMDLAMETSKSEDSANSLSTASSSNKRRAYRTSCAHFYWVTREPGSFEWFKGVMNEVAEMDKKGVIELHNYLTSVYEERDARTTLLSMVQALNHAKHGVDIVSGTRVRTHFARPNWKEVFARIASKHPNSTVGVFYCGRPTLAKELKKLSLD

SEQ ID NO: 70173 - protein, 39 aa, Setaria italica
  Transcript Sequence Number=SeqID_4199
  Gene Ontology: Mol. function=electron carrier activity; Cellular component=integral to membrane
  Homolog annotation: Hit_ID=Q6ZAG4; Match level="QueryCoverage=92%, HitCoverage=3%, E-value=9e-13, Identity=91%"; Hit description =Putative respiratory burst oxidase protein E
MHAGVFYCGRPTLAKELKKLSLDMSHKTGTRFDFHKEYF

SEQ ID NO: 70174 - protein, 94 aa, Setaria italica
  misc_feature (17)..(17): Xaa can be any naturally occurring amino acid
  Transcript Sequence Number=SeqID_4200
FNIMHTPDPDEDKALVXIALDMRKKTLKDVADFGSGRPLGYTFTYLQSGISKHLNIWSSSRSGRNAGETSRDGCLGPCKLEVLWVNAEQQPNAT

SEQ ID NO: 70175 - protein, 458 aa, Setaria italica
  misc_feature (266)..(266): Xaa can be any naturally occurring amino acid
  Transcript Sequence Number=SeqID_4201
  Gene Ontology: Mol. function=protein serine/threonine kinase activity; Biological process=protein amino acid phosphorylation
  Homolog annotation: Hit_ID=Q7F9F9; Match level="QueryCoverage=93%, HitCoverage=90%, E-value=5e-27, Identity=27%"; Hit description =OSJNBa0023J03.13 protein
  Pfam annotation: Domain name=DUF1618; Domain location=220-367; Score=- 25.6; E_value=0.0036; Accession=PF07762.6; Description=Protein of unknown function (DUF1618)
MADSSVNPFLRIPPLIHTEDPGSPPPESILLDRYGYLSCRLNGTTADGFTADGKRIQVTFWAASPPRVSCFTVHCPDVKPSAFYKLPTVIYSEDDLVLLRIPILRQDDSLDAESCHYFVYQAGTENNRPSLKMLPIPCDIKFSNNEVVLLRCRDQDMFYFALLHRIIDPKNGKRFDLHLYNSKTGTWNTENQFVDSVNYVNYSYPNIAVTIGGEFGSVGWVDLWRGMLICDLLRDNHSLRYIPLPLPLVPKLLKGYPMCFRDIVVXLEIAIKYFEMSYDVRPGSGLTSATQDLVAATKKMKISDIGSGNNWEEDCTFKFSDIPVDSPKFARMLMLPNLKQVKNTKLTLMRLCAGYPALSLHDADVVYIMHTPDPDEDKALVIALDMRKKTLKDVADFGSGRPLGYTFTYLQSGISKHLNIWSSSRSGRNAGETSRDGCLGPCKLEVLWVNAEPQPTAT

SEQ ID NO: 70176 - protein, 399 aa, Setaria italica
  misc_feature (96)..(96): Xaa can be any naturally occurring amino acid
  Transcript Sequence Number=SeqID_4202
  Gene Ontology: Mol. function=microtubule binding; Cellular component =microtubule organizing center; Biological process=microtubule cytoskeleton organization and biogenesis
  Homolog annotation: Hit_ID=Q7XUI5; Match level="QueryCoverage=100%, HitCoverage=33%, E-value=1e-168, Identity=72%"; Hit description =OSJNBa0005N02.6 protein
  Pfam annotation: Domain name=Spc97_Spc98; Domain location=3-292; Score=-78.4; E_value=0.012; Accession=PF04130.5; Description=Spc97 Spc98 family
VNLQESASGGAFWEKSLQYNDKSKEKTAGDFSSEFDMPLDIVIEKCIMQEVLLQYKYVSSFTMKLLEEGFDLHAHLLALRRYHFMELADWTDSFIXSIYHKKWSFVKPEQKRAEIQGLMELALQRSSCDYDPYKERLFIYMREQPIFSFDASACGLDLLDDILLGYKAEWPVNIVIREDTLKIYAEIFCYLLQVRFAVFSLTEVWRFLKELTQLISRSSHSRPDVMKKLNFVMRVRHKAYHFLSTLQQYLHCHLSDISWRRFQHSLKNQVRDILDLEYVHMCYITDALDICFLSDESKQVATIVKSMLRLALELRSCFQILGNTCDLPENQLSNLHSLINFSQVDAIRTRFEGNIKDMYILHSKSSKYGELGLSRFWGYLNYNEYHSTKISRDMGSFCF

SEQ ID NO: 70177 - protein, 176 aa, Setaria italica
  Transcript Sequence Number=SeqID_4203
  Gene Ontology: Mol. function=aminoacyl-tRNA ligase activity; Cellular component=cytoplasm; Biological process=tRNA aminoacylation for protein translation
  Homolog annotation: Hit_ID=B9RXG5; Match level="QueryCoverage=99%, HitCoverage=18%, E-value=8e-60, Identity=68%"; Hit description =Leucyl-tRNA synthetase, putative
FLGATYLVVAPEHVLLSSLTSEEQREHVKKYKELAARKSELERTDLQKEKTGVFSGSYAKNPATGEIIPIWVADYVLGSYGTGAIMAVPAHDSRDHEFAVQYELPIIKVVSPPNGSCDPAEAYADDGIMINSCNSSSGLDINGMLSKDAAQKVIEWLESNGYGKKKVNYKLRDWLF

SEQ ID NO: 70178 - protein, 146 aa, Setaria italica
  Transcript Sequence Number=SeqID_4204
  Subcellular localization annotation: CTP_CleavageSite=60; ConfidenceScore=5.18e-01
RLNHHITSLMKMQDALPLVGSSRCSILPGACTSVLWVPVNYAFLRRKGSRLGSSPQFSVRARIIYRISLLLNGWWIHAHVPAIDVVFFCTFEMQIHVSGIFLCFCSVASSACAFGTSISLPIAPLENTPAEDAMHDILGNCFLSLN

SEQ ID NO: 70179 - protein, 93 aa, Setaria italica
  Transcript Sequence Number=SeqID_4205
  Gene Ontology: Mol. function=hydrolase activity; Cellular component =spliceosome; Biological process=mRNA processing
  Homolog annotation: Hit_ID=B0W925; Match level="QueryCoverage=100%, HitCoverage=7%, E-value=9e-21, Identity=52%"; Hit description=Intron- binding protein aquarius
LLRNFNLFRLESTYEIGEDIQEAVPHLHAHINNEGETAFRGWSRMAVPIKEFKIKEVKQPNIGEVKPSAVTADVTFSISSYRHQIKSEWDALK

SEQ ID NO: 70180 - protein, 140 aa, Setaria italica
  Transcript Sequence Number=SeqID_4206
  Gene Ontology: Mol. function=triacylglycerol lipase activity; Biological process=lipid metabolic process
  Homolog annotation: Hit_ID=B4FPY6; Match level="QueryCoverage=100%, HitCoverage=22%, E-value=1e-69, Identity=89%"; Hit description=EDS1 -like protein
EEWVGLGTLFRRLVEPLDIANYYRHSKNEELPSYLSKGRPRRYKYTQRWHEQLQRAPVGSSLESCFWAVVEELQAEMAGGRTFQDLRDRVVKLESDAHGWYNSGSLGKDVFLGSSSFVAWWRTLPEQHKSASCIAKLVSL

SEQ ID NO: 70181 - protein, 338 aa, Setaria italica
  Transcript Sequence Number=SeqID_4207
  Gene Ontology: Mol. function=transcription factor activity; Cellular component=nucleus; Biological process=regulation of transcription, DNA-dependent
  Homolog annotation: Hit_ID=UPI000150583C; Match level="QueryCoverage =96%, HitCoverage=36%, E-value=6e-95, Identity=57%"; Hit description =ATNFXL2; protein binding / transcription factor/ zinc ion binding
  Pfam annotation: Domain name=zf-NF-X1; Domain location=103-122; Score= 25.7; E_value=0.00019; Accession=PF01422.9; Description=NF-X1 type zinc finger
  Pfam annotation: Domain name=zf-NF-X1; Domain location=156-175; Score= 17.5; E_value=0.056; Accession=PF01422.9; Description=NF-X1 type zinc finger
  Pfam annotation: Domain name=zf-NF-X1; Domain location=210-230; Score= 27.5; E_value=5.5e-05; Accession=PF01422.9; Description=NF-X1 type zinc finger
  Pfam annotation: Domain name=zf-NF-X1; Domain location=263-282; Score= 24.2; E_value=0.00055; Accession=PF01422.9; Description=NF-X1 type zinc finger
  Pfam annotation: Domain name=zf-NF-X1; Domain location=290-309; Score= 28.8; E_value=2.2e-05; Accession=PF01422.9; Description=NF-X1 type zinc finger
  Pfam annotation: Domain name=zf-NF-X1; Domain location=50-68; Score =22.4; E_value=0.0019; Accession=PF01422.9; Description=NF-X1 type zinc finger
  Pfam module annotation: Pfam domain module=zf-NF-X1::zf-NF-X1::zf-NF -X1::zf-NF-X1::zf-NF-X1::zf-NF-X1; Domain location=103-122::156 -175::210-230::263-282::290-309::50-68
ASAYPKSQTPTSYLCFCSKTADPAPDPWILPHSCGDVCGRRLNANLDSGCEHTCLLLCHPGPCPPCPAVVPNAPCFCGAHWEPRRCAHQRYSCAGKCNKRLSCGLHRCPVNCHDGPCPPCAVRGKHKCECGETMEEKLCSERVFQCKRECGGMLDCRKHKCERGCHGGKCGECPLRGRRTCPCGKKDYPKLECDAEAATCGSTCEKVLGCGRHRCPERCHRGPCDETCRLVITKSCRCGGLKKEVPCYQELTCERKCQRLRNCGRHACKRRCCAGDCPPCSETCDRKLRCGNHKCLSPCHRGACSPCPLMKTISCACGKTCFEVELGRLSVLSFISFE

SEQ ID NO: 70182 - protein, 128 aa, Setaria italica
  Transcript Sequence Number=SeqID_4208
MELMEDLPPSDMADGDVDRLSHVIRSLEAEIGSGGDVAVRMADGESMAGESSEDCGRLQDMLLDLDDHYEGGSFGYWPEVSLMGHETEGWYVYSNGYEGGIVGYEAIDHQYHCCVEGSVEQVYSPLWE

SEQ ID NO: 70183 - protein, 191 aa, Setaria italica
  Transcript Sequence Number=SeqID_4209
  Homolog annotation: Hit_ID=B6T3U2; Match level="QueryCoverage=98%, HitCoverage=98%, E-value=9e-59, Identity=65%"; Hit description=CUE domain containing protein
  Pfam annotation: Domain name=PAM2; Domain location=2-19; Score=21.9; E_value=0.0026; Accession=PF07145.7; Description=Ataxin-2 C-terminal region
MEGLFKLNPNASPFIPGSLSSFAVADKAQENQDKALENQAESSSKGETSGDTFDPSKYEENDMDPVALANMVFSMFPNVSTDFIDELLKANDFDINLTVDMLDELSSQDMLHDDAEDINDLHDGQGLPGDDYHHAEVSESSSNPNQDLQNEKSATTSDVKSVLPKFLNINLLDNDLGLPNDDKSAGASATK

SEQ ID NO: 70184 - protein, 78 aa, Setaria italica
  Transcript Sequence Number=SeqID_4210
  Subcellular localization annotation: CTP_CleavageSite=22; ConfidenceScore=5.21e-01
MPLPAFLAAAAKLAVLVAAAATAANAASFARYRRRHLRRIPNPIDESADPVADFRALPSAGAGDDSEDGSFFFGLATA

SEQ ID NO: 70185 - protein, 101 aa, Setaria italica
  Transcript Sequence Number=SeqID_4211
  Homolog annotation: Hit_ID=B4F841; Match level="QueryCoverage=100%, HitCoverage=30%, E-value=1e-30, Identity=68%"; Hit description=Lipid binding protein
MCPTTPDRANKTAAAGSGDRSWREEAAAAGSLRQVDLDRGANGWASPPGDLFHLRSRGYFSGGGGKRGKAPSAAEWLLRPAGVDWLRSHARLDHVLARDDN

SEQ ID NO: 70186 - protein, 1080 aa, Setaria italica
  Transcript Sequence Number=SeqID_4212
  Gene Ontology: Mol. function=protein serine/threonine kinase activity; Cellular component=plasma membrane; Biological process =protein amino acid phosphorylation
  Homolog annotation: Hit_ID=B9RWP3; Match level="QueryCoverage=98%, HitCoverage=95%, E-value=0.0, Identity=64%"; Hit description =BRASSINOSTEROID INSENSITIVE 1, putative
  Pfam annotation: Domain name=LRRNT_2; Domain location=6-46; Score =33.5; E_value=8.5e-07; Accession=PF08263.4; Description=Leucine rich repeat N-terminal domain
  Pfam annotation: Domain name=LRR_1; Domain location=100-122; Score =14.7; E_value=0.38; Accession=PF00560.25; Description=Leucine Rich Repeat
  Pfam annotation: Domain name=LRR_1; Domain location=124-146; Score =12.2; E_value=1.4; Accession=PF00560.25; Description=Leucine Rich Repeat
  Pfam annotation: Domain name=LRR_1; Domain location=148-170; Score =2.1; E_value=1.2e+02; Accession=PF00560.25; Description=Leucine Rich Repeat
  Pfam annotation: Domain name=LRR_1; Domain location=172-194; Score =11.3; E_value=2.1; Accession=PF00560.25; Description=Leucine Rich Repeat
  Pfam annotation: Domain name=LRR_1; Domain location=196-218; Score =8.2; E_value=8.1; Accession=PF00560.25; Description=Leucine Rich Repeat
  Pfam annotation: Domain name=LRR_1; Domain location=220-242; Score =5.5; E_value=27; Accession=PF00560.25; Description=Leucine Rich Repeat
  Pfam annotation: Domain name=LRR_1; Domain location=244-266; Score =1.5; E_value=1.5e+02; Accession=PF00560.25; Description=Leucine Rich Repeat
  Pfam annotation: Domain name=LRR_1; Domain location=268-290; Score =17.1; E_value=0.074; Accession=PF00560.25; Description=Leucine Rich Repeat
  Pfam annotation: Domain name=LRR_1; Domain location=292-314; Score =6.6; E_value=17; Accession=PF00560.25; Description=Leucine Rich Repeat
  Pfam annotation: Domain name=LRR_1; Domain location=316-338; Score =11.6; E_value=1.8; Accession=PF00560.25; Description=Leucine Rich Repeat
  Pfam annotation: Domain name=LRR_1; Domain location=340-362; Score =17.3; E_value=0.065; Accession=PF00560.25; Description=Leucine Rich Repeat
  Pfam annotation: Domain name=LRR_1; Domain location=364-383; Score =7.5; E_value=11; Accession=PF00560.25; Description=Leucine Rich Repeat
  Pfam annotation: Domain name=LRR_1; Domain location=388-411; Score =9.4; E_value=4.9; Accession=PF00560.25; Description=Leucine Rich Repeat
  Pfam annotation: Domain name=LRR_1; Domain location=412-434; Score =14.0; E_value=0.62; Accession=PF00560.25; Description=Leucine Rich Repeat
  Pfam annotation: Domain name=LRR_1; Domain location=436-458; Score =11.6; E_value=1.8; Accession=PF00560.25; Description=Leucine Rich Repeat
  Pfam annotation: Domain name=LRR_1; Domain location=460-482; Score =12.2; E_value=1.4; Accession=PF00560.25; Description=Leucine Rich Repeat
  Pfam annotation: Domain name=LRR_1; Domain location=484-506; Score =15.5; E_value=0.23; Accession=PF00560.25; Description=Leucine Rich Repeat
  Pfam annotation: Domain name=LRR_1; Domain location=508-530; Score =8.0; E_value=9.1; Accession=PF00560.25; Description=Leucine Rich Repeat
  Pfam annotation: Domain name=LRR_1; Domain location=52-74; Score =10.0; E_value=3.7; Accession=PF00560.25; Description=Leucine Rich Repeat
  Pfam annotation: Domain name=LRR_1; Domain location=532-554; Score =13.4; E_value=0.83; Accession=PF00560.25; Description=Leucine Rich Repeat
  Pfam annotation: Domain name=LRR_1; Domain location=556-578; Score =14.1; E_value=0.6; Accession=PF00560.25; Description=Leucine Rich Repeat
  Pfam annotation: Domain name=LRR_1; Domain location=580-602; Score =12.6; E_value=1.2; Accession=PF00560.25; Description=Leucine Rich Repeat
  Pfam annotation: Domain name=LRR_1; Domain location=629-651; Score =14.3; E_value=0.52; Accession=PF00560.25; Description=Leucine Rich Repeat
  Pfam annotation: Domain name=LRR_1; Domain location=653-674; Score =11.1; E_value=2.3; Accession=PF00560.25; Description=Leucine Rich Repeat
  Pfam annotation: Domain name=LRR_1; Domain location=76-98; Score =13.5; E_value=0.79; Accession=PF00560.25; Description=Leucine Rich Repeat
  Pfam annotation: Domain name=Pkinase; Domain location=782-1054; Score= 158.2; E_value=2.4e-44; Accession=PF00069.17; Description=Protein kinase domain
  Pfam annotation: Domain name=Pkinase_Tyr; Domain location=782-1054; Score=102.2; E_value=1.7e-27; Accession=PF07714.9; Description =Protein tyrosine kinase
  Pfam annotation: Domain name=SKG6; Domain location=708-742; Score =7.6; E_value=0.098; Accession=PF08693.2; Description=Transmembrane alpha-helix domain
  Pfam module annotation: Pfam domain module=LRRNT_2::LRR_1::LRR_1::LRR_ 1::LRR_1::LRR_1::LRR_1::LRR_1::LRR_1::LRR_1::LRR_1::LRR_1::LRR_1::LRR_ 1::LRR_1::LRR_1::LRR_1::LRR_1::LRR_1::LRR_1::LRR_1::LRR_1::LRR_1::LRR_ 1::LRR_1::...
  Pfam module annotation: Pfam domain module=LRR_1::Pkinase::Pkinase _Tyr::SKG6; Domain location=6-46::100-122::124-146::148-170::172 -194::196-218::220-242::244-266::268-290::292-314::316-338::340 -362::364-383::388-411::...
  Pfam module annotation: Domain location=412-434::436-458::460 -482::484-506::508-530::52-74::532-554::556-578::580-602::629 -651::653-674::76-98::782-1054::782-1054::708-742
TCSQGLNHEGWLLLALKSQMVDTLHHLDSWDARHPTPCAWRGVNCSSAPVPAVVSLDLNNMNLSGTIAPSIGGLAELTHLDLSFNGFGGPIPAQIGNLSKLEVLNLFNNNFVGIIPPEVGKLAKLVTLNLCNNKLYGPIPDEIGNMASLEELVGYSNNLTGSLPHSLGKLKNLKNIRLGQNLISGNIPVEIGECLNITVFGLAQNKLEGPLPKEIGRLSLMTDLILWGNQLSGVIPPEIGNCTSLGTVALYDNNLFGPIPATIGNITNLQKLYLYRNSLNGTIPSEIGNLSLAREIDFSENFLTGGIPKELGNIPELNLLYLFQNQLTGSIPTELCGLRNLSKLDLSINSLTGTIPSGFQYMRTLIQLQLFNNKLSGNIPPRFGIYSRLWVVDFSNNSITGQIPKDLCRQSNLILLNLGSNKLTGNIPRGITNCRPLVQLRLGDNSLTGSFPTDLCNLVNLTTVELGRNKFSGPIPPQIGDCKSLQRLDLTNNYFTSELPREIGNLSKLVVFNISSNRLGGNIPLEIFNCTVLQRLDLSQNNFEGSLPNEVGRLPQLELLSFSDNRLAGQIPPILGKLSHLTALQIGGNLLSGEIPKELGLLSSLQIAMNLSYNNLSGNIPSELGNLALLESLFLNNNKLTGEIPTTFANLSSLLELNVSYNYLSGALPSIPLFDNMAATCFIGNKGLCGGQLGRCGSQSSSSSQSSNSVGPPLGKIIAIVAAVIGGISLILIAIIVYHMRKPMETVAPLQDKQLFSGGSNMHVSVKEAYTFQELVAATNNFDESCVIGRGACGTVYRAILKTGQTIAVKKLASNREGSNTDNSFRAEILTLGKIRHRNIVKLYGFIYHQGSNLLLYEYMSRGSLGELLHGQSSSSLDWETRFMIALGAAEGLTYLHHDCKPRIIHRDIKSNNILLDENFEAHVGDFGLAKVIDMPYSKSMSAIAGSYGYIAPEYAYTMKVTEKCDIYSYGVVLLELLTGRAPVQPLEQGGDLVTWVKNYIRDNSLGPGVLDKNLDLEDQSVVDHMIEVLKIALVCTSLSPYERPPMRHVVVMLSESKDRTRVSSASSPASDDSSKKGSS

SEQ ID NO: 70187 - protein, 62 aa, Setaria italica
  misc_feature (40)..(40): Xaa can be any naturally occurring amino acid
  Transcript Sequence Number=SeqID_4213
  Gene Ontology: Cellular component=nuclear pore; Biological process =transport
  Homolog annotation: Hit_ID=Q38941; Match level="QueryCoverage=85%, HitCoverage=6%, E-value=9e-15, Identity=66%"; Hit description =F23A5.3 protein
  Pfam annotation: Domain name=Nucleoporin2; Domain location=1-62; Score=-70.3; E_value=0.0017; Accession=PF04096.6; Description =Nucleoporin autopeptidase
MAAGTVFPVLRSSEYFTRPSIDELVEREEADPGYCSRVPXFVIGRAGYGQVRFLGNTDVVGG

SEQ ID NO: 70188 - protein, 127 aa, Setaria italica
  misc_feature (30)..(30): Xaa can be any naturally occurring amino acid
  Transcript Sequence Number=SeqID_4214
MASASGLFATALVMALLMLSGTSHAARRLXEDDTAPAAAPAAIVPGIPAVPKPPVPTVPTVPAVALPPMPTVPAVALPPMPAVPAVGAVPAIPAATVPPMPAVPAVPAATLPPMPAVPTVPRAEGDA

SEQ ID NO: 70189 - protein, 72 aa, Setaria italica
  Transcript Sequence Number=SeqID_4215
AGGQRFACFRQRHRVSSARGRGPGPPLFAAIVAHKEPTQHFAYVEEREGYLLFPRLARTHYEGSRGPLSRTP

SEQ ID NO: 70190 - protein, 125 aa, Setaria italica
  Transcript Sequence Number=SeqID_4216
MVDAWWPLLGAAIPALVAGQFIRIKRRRDEEQRLKAARGREKSSDEVFVCERVCTSKRMLKKVGAFSKDPIPETCVTVCGVSELDACADACARTVCVNQHQVPNWNDVCLKRCQSECLKLSSTLM

SEQ ID NO: 70191 - protein, 228 aa, Setaria italica
  Transcript Sequence Number=SeqID_4217
  Gene Ontology: Mol. function=metal ion binding; Cellular component =cell wall; Biological process=cell redox homeostasis
  Homolog annotation: Hit_ID=B6U926; Match level="QueryCoverage=82%, HitCoverage=52%, E-value=1e-51, Identity=50%"; Hit description=RHC1A
  Pfam annotation: Domain name=zf-C3HC4; Domain location=91-131; Score =36.9; E_value=8.1e-08; Accession=PF00097.17; Description=Zinc finger, C3HC4 type (RING finger)
FLHDHFGGLLSGGATIQIVLEGGVAAPLLAPGVSLADYFMGPSGLEQLIQQLAENDPNRYGTPPAAKSAVAALPDVAVSADMMQADGGAQCAVCMDDFHLGAAAKQLPCNHVFHKDCILPWLDLHSSCPVCRYELPTDDPDYHQQQQQRAASAPAPAPAPAPAPAPAAASSPRVAERRFRISLPWPLRAAFGAAQAESSNPTNDDGNNNDHEASGGGPQMQSGYDDLD

SEQ ID NO: 70192 - protein, 82 aa, Setaria italica
  Transcript Sequence Number=SeqID_4218
  Gene Ontology: Mol. function=isomerase activity
  Homolog annotation: Hit_ID=B6SW65; Match level="QueryCoverage=73%, HitCoverage=9%, E-value=2e-26, Identity=90%"; Hit description =Topoisomerase-like protein
SIGRIGSKSSNVRLGLLLGPLLQECFGEGLITINQMTKGFTRVKEGLDDLVLDIPNAQEKFGAYVELATGRGWLLPAFTSVP

SEQ ID NO: 70193 - protein, 512 aa, Setaria italica
  misc_feature (72)..(72): Xaa can be any naturally occurring amino acid
  misc_feature (450)..(450): Xaa can be any naturally occurring amino acid
  Transcript Sequence Number=SeqID_4219
  Gene Ontology: Mol. function=isomerase activity; Cellular component =cytoplasm; Biological process=protein amino acid phosphorylation
  Homolog annotation: Hit_ID=B6SW65; Match level="QueryCoverage=92%, HitCoverage=91%, E-value=0.0, Identity=62%"; Hit description =Topoisomerase-like protein
  Pfam annotation: Domain name=MA3; Domain location=242-353; Score =146.3; E_value=9.5e-41; Accession=PF02847.9; Description=MA3 domain
  Pfam annotation: Domain name=MA3; Domain location=377-488; Score =130.6; E_value=4.9e-36; Accession=PF02847.9; Description=MA3 domain
  Pfam annotation: Domain name=MA3; Domain location=78-189; Score =140.2; E_value=6.6e-39; Accession=PF02847.9; Description=MA3 domain
  Pfam module annotation: Pfam domain module=MA3::MA3::MA3; Domain location=242-353::377-488::78-189
DWVSLQSSFLLRDRFLLFTLSLLIFYADIVLTPWILLSDGVGGKTEQDNHEDVDSLPSQELKKLANGNNKVXSTLQNAARLVVPIVEEYFSTGDVELASSELRSLGSDQFQHYFVKKLISMAMDRHDKEKEMASVLLSSLYADLLSSYMISEGFMMLLESIEDLTVDIPDAVDLLAVFIARAVVDEILPPVFLARARALLPEFSKGIQVLQVVEKSYLSAPHHAELVERKWGGSTHFTVEEAKKRIQDILREYIESGDIDEAFRCIRELSLPFFHHEVVKRALTLGMENISSQPLILKLLREAAAGCLISSNQISKGFSRLAESVDDLSLDIPSAKDLFDKLVSTAISEGWLDASFSKSAASEEEMRNTSADKVKRFKEESGHIIHEYFLSDDVPELIRSLEELSAPEYNPIFLKKLVTLAMDRKNREKEMASVLLSSLSLELFSTDDIXEGFIMLLQSAEDTALDIVDAPSELALFLARAVIDEVLIPLNLDEISSKLRPNSSGSQTVRAL

SEQ ID NO: 70194 - protein, 322 aa, Setaria italica
  Transcript Sequence Number=SeqID_4220
  Gene Ontology: Mol. function=isomerase activity; Biological process =protein amino acid phosphorylation
  Homolog annotation: Hit_ID=B6SW65; Match level="QueryCoverage=100%, HitCoverage=86%, E-value=1e-156, Identity=65%"; Hit description =Topoisomerase-like protein
  Pfam annotation: Domain name=MA3; Domain location=205-315; Score =131.8; E_value=2.2e-36; Accession=PF02847.9; Description=MA3 domain
  Pfam annotation: Domain name=MA3; Domain location=42-153; Score =130.6; E_value=5.1e-36; Accession=PF02847.9; Description=MA3 domain
  Pfam module annotation: Pfam domain module=MA3::MA3; Domain location =205-315::42-153
KNLFDKLVSTAISEGWLDASFSKSAASEEEMRNTSADKVKRFKEESGHIIHEYFLSDDVPELIRSLEELSAPEYNPIFLKKLVTLAMDRKNREKEMASVLLSSLSLELFSTDDIMKGFIMLLQSAEDTALDIVDAPSELALFLARAVIDEVLIPLNLDEISSKLRPNSSGSQTVQMARALLSARHSSERILRCWGGGTGWAVEDAKDKIAKLLEEYSTGGDLGEACRCIRDLGMPFFNHEVVKKALVMAMEKQNDAGILALLQECFGEGLITINQMTKGFTRVKEGLDDLVLDIPNAQEKFGAYVELATGRGWLLPAFTSVP

SEQ ID NO: 70195 - protein, 64 aa, Setaria italica
  Transcript Sequence Number=SeqID_4221
  Homolog annotation: Hit_ID=Q01L01; Match level="QueryCoverage=73%, HitCoverage=25%, E-value=4e-16, Identity=89%"; Hit description =OSIGBa0148P16.4 protein
  Pfam annotation: Domain name=DUF493; Domain location=1-62; Score =39.0; E_value=1.8e-08; Accession=PF04359.6; Description=Protein of unknown function (DUF493)
  Subcellular localization annotation: CTP_CleavageSite=41; ConfidenceScore=5.03e-01
FVSRIIFIYISKRYAQGRVSQKLSSRGKYVSVNIGPIRVVSSEQVQAVYRAMRRDNRMKYFLMK

SEQ ID NO: 70196 - protein, 115 aa, Setaria italica
  Transcript Sequence Number=SeqID_4222
  Homolog annotation: Hit_ID=Q01L01; Match level="QueryCoverage=100%, HitCoverage=62%, E-value=3e-56, Identity=93%"; Hit description =OSIGBa0148P16.4 protein
  Pfam annotation: Domain name=DUF493; Domain location=24-115; Score =124.7; E_value=3e-34; Accession=PF04359.6; Description=Protein of unknown function (DUF493)
SKGRVALTTNMVMGGTVTDDKSDEWLVLDQKVNSYPTDRGFTAIGTGGDDFVQSMVVAVESVLQESIPKGRVSQKLSSRGKYVSVNIGPIRVVSSEQVQAVYRAMRRDNRMKYFL

SEQ ID NO: 70197 - protein, 43 aa, Setaria italica
  Transcript Sequence Number=SeqID_4223
  Gene Ontology: Mol. function=sequence-specific DNA binding; Cellular component=nucleus; Biological process=regulation of transcription, DNA-dependent
  Homolog annotation: Hit_ID=B6TPJ0; Match level="QueryCoverage=100%, HitCoverage=12%, E-value=2e-17, Identity=100%"; Hit description =WRKY51-superfamily of TFs having WRKY and zinc finger domains
  Pfam annotation: Domain name=WRKY; Domain location=22-43; Score=-9.3; E_value=0.011; Accession=PF03106.7; Description=WRKY DNA -binding domain
RKHRVKRTIRVPAISPKVADIPADEYSWRKYGQKPIKGSPYPR

SEQ ID NO: 70198 - protein, 262 aa, Setaria italica
  Transcript Sequence Number=SeqID_4224
  Gene Ontology: Mol. function=sequence-specific DNA binding; Cellular component=nucleus; Biological process=regulation of transcription, DNA-dependent
  Homolog annotation: Hit_ID=B6TPJ0; Match level="QueryCoverage=95%, HitCoverage=74%, E-value=3e-93, Identity=71%"; Hit description =WRKY51-superfamily of TFs having WRKY and zinc finger domains
  Pfam annotation: Domain name=Plant_zn_clust; Domain location=134-183; Score=86.4; E_value=9.9e-23; Accession=PF10533.1; Description=Plant zinc cluster domain
  Pfam annotation: Domain name=WRKY; Domain location=185-245; Score =137.4; E_value=4.6e-38; Accession=PF03106.7; Description=WRKY DNA -binding domain
  Pfam module annotation: Pfam domain module=Plant_zn_clust::WRKY; Domain location=134-183::185-245
  Subcellular localization annotation: CTP_CleavageSite=34; ConfidenceScore=5.11e-01
DCREITDMTVSKFKKVISILNRTGHARFRRGPMVAQSPGPAAACSEPAALPARSAPAARPVTLDFTKSVSGYSRDSGFSVSGASSSFLSSVTTGDGSVSNGRGGGGSSSLMLPPAAGAASCGKPPLSSSGAGQKRRCHEHAHSENVAGGKYGANGGRCHCSKRRKHRVKRTIRVPAISPKVADIPADEYSWRKYGQKPIKGSPYPRGYYKCSTVRGCPARKHVERDPGEPSMLIVTYEGEHRHSPAGQDPPPLAPLPELPNH

SEQ ID NO: 70199 - protein, 141 aa, Setaria italica
  Transcript Sequence Number=SeqID_4225
  Homolog annotation: Hit_ID=B9RDF9; Match level="QueryCoverage=92%, HitCoverage=4%, E-value=4e-20, Identity=49%"; Hit description =Nucleotide binding protein, putative
EAKAQAENAAHLSVALAENAIVILMLVEDHLRSQGQHFCTSLAGDSIVSSTSLASLAASRSNSLGTAGKEPTAAGASRRSSLSSDAGGLPLDLLTSMADANGQISAAVMERLTAATAAEPYESVKHAFVSYGSCIAVSLGK

SEQ ID NO: 70200 - protein, 316 aa, Setaria italica
  Transcript Sequence Number=SeqID_4226
  Gene Ontology: Mol. function=DNA binding; Cellular component=nucleus
  Homolog annotation: Hit_ID=A2VDX7; Match level="QueryCoverage=85%, HitCoverage=73%, E-value=2e-35, Identity=32%"; Hit description =Defects in morphology protein 1 homolog
  Pfam annotation: Domain name=Morph_protein1; Domain location=26-310; Score=436.8; E_value=3.3e-128; Accession=PF09810.1; Description =Defects in morphology protein 1, mitoc
AAAPLSCAAYSAAGGDIEDSPLPRRSLLARFRERRALAVTDITATEWCEKQMEFVLEHGKPERTEAMKAGSDRHAQLEQEVVERVDVTIKSAEEFWAVKFMNFIMGTNQLMFEGITRELPVIGVVEGSWMVGIIDEIQMPMDGISFQPILVDTKTRVRPTVPSEAQKRNGRLQLMCYKYLWDNLIAERFPADNFFSYFGLDPNYLLSDDVKQYISTLGFDAKTFEDVLNYYKVTCHTLPRSQELLFLRYELQADHSLLEEYQFTYDARWFKDQIQQVLGFWQGSREPKFVTEEERWKCSFCKFASKCQMIASISRC

SEQ ID NO: 70201 - protein, 90 aa, Setaria italica
  Transcript Sequence Number=SeqID_4227
LTYVTLFLLYSTGAARRKVFLLLAAEVAFVGAVAALVLSLAHTHERRSMIVGILCVLFGTGMYAAPLSVMVRTPCSTSIVGDCRRQKIFY

SEQ ID NO: 70202 - protein, 113 aa, Setaria italica
  misc_feature (2)..(2): Xaa can be any naturally occurring amino acid
  Transcript Sequence Number=SeqID_4228
RXRERERDRELERERARDREPRREARESSAAVNDSTSMRRKDRARSHSQPDRSERAPPPPSSPDHRHSRRSPHRSSSSGKKRSSSDRYDDLPLPPPPPPPASRHEPEPAKAQA

SEQ ID NO: 70203 - protein, 133 aa, Setaria italica
  misc_feature (58)..(58): Xaa can be any naturally occurring amino acid
  Transcript Sequence Number=SeqID_4229
  Gene Ontology: Cellular component=integral to membrane
  Homolog annotation: Hit_ID=Q9FM10; Match level="QueryCoverage=69%, HitCoverage=43%, E-value=6e-16, Identity=44%"; Hit description =Similarity to MtN3 protein
  Pfam annotation: Domain name=MtN3_slv; Domain location=2-99; Score =0.6; E_value=0.0042; Accession=PF03083.8; Description=MtN3saliva family
MALAGHVGCRALFILLPCFLPARPRPQRSSAHPFFLFFAEQYSPIPYVATLLNCMMWXVLYGLPLVHPHSMLVITINGTGMAIELTYVTLFLLYSTGAARRKVFLLLAAEVAFVGAVAALVLSLAHTHERRYQ

SEQ ID NO: 70204 - protein, 95 aa, Setaria italica
  Transcript Sequence Number=SeqID_4230
  Gene Ontology: Cellular component=integral to membrane
  Homolog annotation: Hit_ID=Q9FM10; Match level="QueryCoverage=66%, HitCoverage=29%, E-value=1e-18, Identity=65%"; Hit description =Similarity to MtN3 protein
  Pfam annotation: Domain name=MtN3_slv; Domain location=33-95; Score =20.7; E_value=0.00012; Accession=PF03083.8; Description=MtN3saliva family
TDVSIQILVYNSQYTRIYYTHVARTYTQIPCRPTFIRIWKKGSVEQYSPIPYVATLLNCMMWVLYGLPLVHPHSMLVITINGTGMAIELTYVTLF

SEQ ID NO: 70205 - protein, 125 aa, Setaria italica
  Transcript Sequence Number=SeqID_4231
TRQEEKRTESCLILVLQNEKGTKLNSAYDQAAPLPSCWFDASCQALLLRSQAEVGPAGALCCFPGFAAPWRCTGRKIFTYIYLCLHLHSMFFSFGTGLLLLVLPFPLPFMFLLSERGRIFLLFSW

SEQ ID NO: 70206 - protein, 544 aa, Setaria italica
  Transcript Sequence Number=SeqID_4232
  Gene Ontology: Mol. function=ubiquitin-protein ligase activity; Cellular component=ubiquitin ligase complex; Biological process =protein ubiquitination
  Homolog annotation: Hit_ID=Q337X8; Match level="QueryCoverage=72%, HitCoverage=43%, E-value=1e-164, Identity=74%"; Hit description =Transposon protein, putative, CACTA, En/Spm sub-class, expressed
  Pfam annotation: Domain name=DUF1777; Domain location=408-541; Score=- 82.4; E_value=0.067; Accession=PF08648.4; Description=Protein of unknown function (DUF1777)
  Pfam annotation: Domain name=MFMR; Domain location=268-489; Score= -72.8; E_value=0.073; Accession=PF07777.3; Description=G-box binding protein MFMR
  Pfam annotation: Domain name=U-box; Domain location=87-162; Score= -6.2; E_value=0.0027; Accession=PF04564.7; Description=U-box domain
  Pfam annotation: Domain name=zf-C3HC4; Domain location=94-132; Score =0.1; E_value=0.098; Accession=PF00097.17; Description=Zinc finger, C3HC4 type (RING finger)
  Pfam annotation: Domain name=zf-CCHC; Domain location=8-25; Score =11.1; E_value=0.0097; Accession=PF00098.15; Description=Zinc knuckle
  Pfam module annotation: Pfam domain module=DUF1777::MFMR::U-box::zf -C3HC4::zf-CCHC; Domain location=408-541::268-489::87-162::94-132::8 -25
HKTPPPGYVCHRCKVPGHFIQHCPTNGDARYDVRRMKPPTGIPKSMLMQTPDGSYALPSGAGAVLKPNEAAFEKEIEGLPTTRSVGELPPELRCPLCKEVMKDAVLTSKCCFRSFCDKCIRDYIINKSVCVCGATSILADDLLPNKTLRETISRILEAPPTSSTENVGSMVQVQDMESALPVQPKVRSPAVSAASKEEAKAPTPVEESPDAESLNGAKAMNNEVSSSDKKATIIPDVGEGTMESKNVKEDKPVEVPPVAKDSQEKLPAGEQAVKKKKKKKPRAPGNADEQWKNFQDFGAENFAGMPLGPTGAFNPYWGGGVPLPMDYMGAPFPGPMPYMGYPPAPFDPFGGGVLPQDPFMPPGYMMPGVPRDLSELAVNPMGINMGPPIVSREEFDPRKPDHRRRREMDRFNERERERDRSREPRGHSMERGREHRERERERDRSRERERERDRELERERARDREPRREARESSAAVNDSTSMRRKDRARSHSQPDRSERAPRRRRSDFIFCLLLVTLKENKNKRTAERGLHCTPALTFYHHII

SEQ ID NO: 70207 - protein, 252 aa, Setaria italica
  Transcript Sequence Number=SeqID_4233
  Gene Ontology: Cellular component=integral to membrane
  Homolog annotation: Hit_ID=Q70ET6; Match level="QueryCoverage=90%, HitCoverage=99%, E-value=2e-58, Identity=45%"; Hit description=Seven- transmembrane-domain protein 1
  Pfam annotation: Domain name=MtN3_slv; Domain location=132-218; Score= 127.5; E_value=4.4e-35; Accession=PF03083.8; Description=MtN3saliva family
  Pfam annotation: Domain name=MtN3_slv; Domain location=9-98; Score =86.9; E_value=7.3e-23; Accession=PF03083.8; Description=MtN3saliva family
  Pfam module annotation: Pfam domain module=MtN3_slv::MtN3_slv; Domain location=132-218::9-98
MVSAETIRTAIGVIGNGTALVLFLSPVPTFYRIWKKRAVEQYSAIPYVATLLNCMMWVLYGLPVVHPHSMLVITINGTGMAIQLTYVTLFLLYSTGAARRKVMLLLAAEVAFVGAVAALVLTLAHTHERRSMIVGVLCVLFGTGMYAAPLAVMKMVIQTKSVEYMPLFLSLASLVNGICWTAYALIKFDLYITIPNGLGVLFAVAQLILYAIYYKSTQEIIEARKRKADQIAMTEVVVDATTTRASNTTAGY

SEQ ID NO: 70208 - protein, 251 aa, Setaria italica
  Transcript Sequence Number=SeqID_4234
  Gene Ontology: Cellular component=integral to membrane
  Homolog annotation: Hit_ID=Q70ET6; Match level="QueryCoverage=91%, HitCoverage=99%, E-value=3e-60, Identity=47%"; Hit description=Seven- transmembrane-domain protein 1
  Pfam annotation: Domain name=DUF1109; Domain location=37-188; Score= -140.6; E_value=0.1; Accession=PF06532.3; Description=Protein of unknown function (DUF1109)
  Pfam annotation: Domain name=MtN3_slv; Domain location=132-218; Score= 126.3; E_value=9.6e-35; Accession=PF03083.8; Description=MtN3saliva family
  Pfam annotation: Domain name=MtN3_slv; Domain location=9-98; Score =90.2; E_value=7.4e-24; Accession=PF03083.8; Description=MtN3saliva family
  Pfam module annotation: Pfam domain module=DUF1109::MtN3_slv::MtN3 _slv; Domain location=37-188::132-218::9-98
MISPDTIRTAIGVIGNGTALVLFLSPVPTFIRIWKKGSVEQYSPIPYVATLLNCMMWVLYGLPLVHPHSMLVITINGTGMAIELTYVTLFLLYSTGAARRKVFLLLAAEVAFVGAVAALVLSLAHTHERRSMIVGILCVLFGTGMYAAPLSVMKMVIQTKSVEYMPLFLSLASLVNGICWTAYALIKFDLYITIPNGLGVLFAVAQVVLYAIYYKSTQEIIEARKRKADQVAMTEVVVVGKTNNHAGAGHY

SEQ ID NO: 70209 - protein, 88 aa, Setaria italica
  Transcript Sequence Number=SeqID_4235
  Gene Ontology: Mol. function=two-component response regulator activity; Cellular component=nucleus; Biological process=two -component signal transduction system (phosphorelay)
  Homolog annotation: Hit_ID=B6SVD1; Match level="QueryCoverage=90%, HitCoverage=15%, E-value=2e-31, Identity=85%"; Hit description=Two -component response regulator-like PRR1
ALFHFLACFQSNPSVAEPEQRGKMEGVPGSVVDADQASSPGRMFSRPIKTNLRVGESSAFLAYVKSSTPATSSFDSELQRGGSRLDSL

SEQ ID NO: 70210 - protein, 518 aa, Setaria italica
  Transcript Sequence Number=SeqID_4236
  Gene Ontology: Mol. function=two-component response regulator activity; Cellular component=nucleus; Biological process=two -component signal transduction system (phosphorelay)
  Homolog annotation: Hit_ID=B6SVD1; Match level="QueryCoverage=96%, HitCoverage=97%, E-value=0.0, Identity=85%"; Hit description=Two -component response regulator-like PRR1
  Pfam annotation: Domain name=CCT; Domain location=443-487; Score =81.5; E_value=3.1e-21; Accession=PF06203.6; Description=CCT motif
  Pfam annotation: Domain name=CCT_2; Domain location=440-467; Score =14.3; E_value=0.056; Accession=PF09425.2; Description=Divergent CCT motif
  Pfam annotation: Domain name=Response_reg; Domain location=30-144; Score=44.7; E_value=3.7e-10; Accession=PF00072.16; Description =Response regulator receiver domain
  Pfam module annotation: Pfam domain module=CCT::CCT_2::Response_reg; Domain location=443-487::440-467::30-144
MVGGGEGDRVGGGAGVGGGQQFVDRSKVRILLCDGDATSSREVLRLLCNCSYQVTCAKSPRQVINILNYEGGEIDIILAEVDLPVTKCFKMLKYIARNKDLRHIPIIMMSNRDEVSVVVKCLRLGAAEYLVKPLRTNELLNLWTHVWRRRRMLGLPEKNFFNDNFELVLSEPSDANTNSTTLLSDETDDRPKENMNQETGTSNQREHESNPSVAEPEQRGKMEGVPGSVVDADQASSPGRMFSRPIKTNLRVGESSAFLAYVKSSTPATSSFDSELQRGGSRLDSLDNQGNCSSATDRSDTGTDVNIRDKEGFEMPVQYPMVCFSSSNTHMERSNEGQNDTSGTPPMYQYPFYYPGMVEHSIALSSAQNFQENINNAQAYTPPTMIPQYNVYPQCHAVPMMSSFQFNPAGMVMHSSHIPTQNMWSSVSSTPVPEETCSRSERRAAALAKFRQKRKERCFDKKVRYVNRKKLAETRPRVRGQFVRQASNTDVISTGDDISEDEDDDPSSREVEIISSPE

SEQ ID NO: 70211 - protein, 811 aa, Setaria italica
  misc_feature (459)..(459): Xaa can be any naturally occurring amino acid
  Transcript Sequence Number=SeqID_4237
  Gene Ontology: Mol. function=heat shock protein binding; Biological process=protein folding
  Homolog annotation: Hit_ID=Q108V8; Match level="QueryCoverage=100%, HitCoverage=30%, E-value=0.0, Identity=81%"; Hit description=DNAJ heat shock N-terminal domain-containing protein, putative, expressed
ESGRVEILKFGGLVEDIVHCTELEFVPSAVDAALLTAANISVTPELQDALLRAGFLWYVLPLLLQYDSTAEENETSEAHGVGARVQIAKNLHAVHAIEALSRLCGLSSDEIRCPSNKPAYNALKALLTPKLADMLRNHPPKELLSNLNSNLESPEIIWNSSTRGELLKFVDQQRASQGPDGSYDLTESQSFTYESLSKELNVGNVYLRVYNNQPDFEISDQEEFCIALLKFIAELVQQWNSINLEESTIDQHVSLVDTSASENYQVGDSADEGKMDDSSEKQSTGTDGDSKVITNLQSGLTSLQNLLTSSPGLAAVFTSKERLIPLFECLALHVPPESNIPQICLSVLSLLTKHAPCLEAMVAERMSLILLFQILHCNPPCRDGALAVLYSLASTPELAWAAAKHGGVVYILELMLPLEEEIPMQQRAAAASLLGKLVGQPMHGPRVAITLARFLPDGXVSAIKDGPGEAVVSSLEQTTETPELVWTPAMAASLSAQLATMASDLYQEQMKGRVVDWDVPEQASGQHVMKDEPQVGGIYVRLFLKDPKFPLRNPKRFLEGLLDQYVSSVAATHYEANAVDPELPLLLSAALVSLLRVHPALADHVGYLGYVPKLVAAMAYEGRRETMASGQATSGLQAEPSEHDNSGHSETNVQTPQERVRLSCLRVLHQLASSTTCAEAMAATSAGTPQVVPLLMKAIGWQGGSILALETLKRVVGAGNRARDALVAQGLKVGLVEVLLGILDWRAGGRQGLCNQMKWNESEASIGRVLAVEVLHAFATEGAHCARVLDVLNSSDVWGAYKDQKHDLFLP

SEQ ID NO: 70212 - protein, 569 aa, Setaria italica
  Transcript Sequence Number=SeqID_4238
  Gene Ontology: Mol. function=heat shock protein binding; Biological process=protein folding
  Homolog annotation: Hit_ID=Q108V8; Match level="QueryCoverage=98%, HitCoverage=21%, E-value=0.0, Identity=94%"; Hit description=DNAJ heat shock N-terminal domain-containing protein, putative, expressed
  Pfam annotation: Domain name=DnaJ; Domain location=280-337; Score =38.8; E_value=2.2e-08; Accession=PF00226.23; Description=DnaJ domain
HSMASAHSDLDDAGEIVTPTPRVKRILSSPRCLPHVAQVMLTGEPSIVEAAASLLKAIVTRNPKAMIRLYSTGAFYFALAYPGSNLLSISQLFSATHTHQAFHGGEEAAVSSSLPLAKRSVLGGLLPESLLYVLERSGPSAFAGAMVSDSDTPEIIWTHKMRAENLIHQVLQHLGDFPQKLAQHCHSLYDYAPMPPVTYPNLKDEMWCHRYYLRNLCDEIRFPNWPIVEHVEFLQSLLVMWREELTRRPMDLSEEEACKILEISLDDLVLGENGCSKQSSELSVANSGNKIENIDEEKLKRQYRKLAIKYHPDKNPEGREKFVAVQKAYERLQASMQGLQGPQVWRLLLLLKAQCILYKRYGHVLEPFKYAGYPMLLNAVTVDKDDSNFLSSDRAPLLIAASELIWLTCVSSSLNGEELIRDGGIPLLATLLSRCMCIVQPTTLANEPAARIVTNIMHTFSVLSQFESGRVEILKFGGLVEDIVHCTELEFVPSAVDAALLTAANISVTPELQDALLRAGFLWYVLPLLLQYDSTAEENETSEAHGVGARVHKIAKNLHANRLVTIDKL

SEQ ID NO: 70213 - protein, 197 aa, Setaria italica
  Transcript Sequence Number=SeqID_4239
  Homolog annotation: Hit_ID=Q108V8; Match level="QueryCoverage=93%, HitCoverage=6%, E-value=2e-77, Identity=79%"; Hit description=DNAJ heat shock N-terminal domain-containing protein, putative, expressed
SLYCLLCLSNKETTYKVVPLLMKAIGWQGGSILALETLKRVVGAGNRARDALVAQGLKVGLVEVLLGILDWRAGGRQGLCNQMKWNESEASIGRVLAVEVLHAFATEGAHCARVLDVLNSSDVWGAYKDQKHDLFLPSNAQSSAAGVAGLIESSSSRLTYALTAPPPQPALVRLPSSAPSPPTAPANPSGRYSYHHS

SEQ ID NO: 70214 - protein, 102 aa, Setaria italica
  Transcript Sequence Number=SeqID_4240
  Gene Ontology: Mol. function=ATP-dependent helicase activity; Biological process=regulation of transcription, DNA-dependent
  Homolog annotation: Hit_ID=Q2R377; Match level="QueryCoverage=100%, HitCoverage=12%, E-value=9e-51, Identity=89%"; Hit description=CarD -like transcriptional regulator family protein, expressed
MRQSRPPYPKPVAMEEFAAEFPYEPTPDQCQAFIDVEKDLTERETPMDRLICGDVGFGKTEVAMRAIFIVISAGYQAMVLAPTIILAKQHYDVMTERFANYP

SEQ ID NO: 70215 - protein, 144 aa, Setaria italica
  Transcript Sequence Number=SeqID_4241
  Gene Ontology: Mol. function=hydrogen ion transporting ATP synthase activity, rotational mechanism; Cellular component=proton -transporting ATP synthase complex, catalytic core F(1); Biological process=ATP synthesis coupled proton transport
  Homolog annotation: Hit_ID=B6TXS9; Match level="QueryCoverage=65%, HitCoverage=28%, E-value=3e-45, Identity=93%"; Hit description=ATP synthase gamma chain
  Pfam annotation: Domain name=ATP-synt; Domain location=47-144; Score=- 116.1; E_value=2.8e-05; Accession=PF00231.11; Description=ATP synthase
  Subcellular localization annotation: CTP_CleavageSite=26; ConfidenceScore=5.25e-01
MAMAALRREGRRLLLSPTVPIPSPAAAAARSSVVSPPEMAPLGARFVSTQIVRNRMKTVKNIQKITKAMKMVAASKLRAVQTRTENSRGLWQPFTALLGDAPSVDVKKNVIVTITSDKGLCGGINSTSVKVKTRDPYNKIKNNN

SEQ ID NO: 70216 - protein, 137 aa, Setaria italica
  Transcript Sequence Number=SeqID_4242
  Gene Ontology: Mol. function=hydrogen ion transporting ATP synthase activity, rotational mechanism; Cellular component=proton -transporting ATP synthase complex, catalytic core F(1); Biological process=ATP synthesis coupled proton transport
  Homolog annotation: Hit_ID=B6TXS9; Match level="QueryCoverage=48%, HitCoverage=20%, E-value=5e-29, Identity=91%"; Hit description=ATP synthase gamma chain
NQVCDCERSQGKLRRRDGDGDGGALRREGRRLLLSPTVPIPSPAAAAARSSVVSPPEMAPLGARFVSTQIVRNRMKTVKNIQKITKAMKMVAASKLRAVQTRTENSRGLWQPFTALLGDAPSMYTYEVSKANGWPLF

SEQ ID NO: 70217 - protein, 327 aa, Setaria italica
  misc_feature (14)..(14): Xaa can be any naturally occurring amino acid
  Transcript Sequence Number=SeqID_4243
  Gene Ontology: Mol. function=hydrogen ion transporting ATP synthase activity, rotational mechanism; Cellular component=proton -transporting ATP synthase complex, catalytic core F(1); Biological process=ATP synthesis coupled proton transport
  Homolog annotation: Hit_ID=B6TXS9; Match level="QueryCoverage=88%, HitCoverage=87%, E-value=1e-160, Identity=93%"; Hit description=ATP synthase gamma chain
  Pfam annotation: Domain name=ATP-synt; Domain location=47-325; Score =426.2; E_value=5.3e-125; Accession=PF00231.11; Description=ATP synthase
  Subcellular localization annotation: CTP_CleavageSite=26; ConfidenceScore=5.29e-01
MAMAALRREGRRLXLSPTVPIPSPAAAAARSSVVSPPEMAPLGARFVSTQIVRNRMKTVKNIQKITKAMKMVAASKLRAVQTRTENSRGLWQPFTALLGDAPSVDVKKNVIVTITSDKGLCGGINSTSVKVSRALHKLTSGPEKESTYVVLGEKGKVQLVRDSKKSIEMTITELQKNPINYTQIAVLADDILKNVEYDALRVIFNKFQSVISFKPTVATILSPEVAEKESEAGGKMGDLDSYEIEGGETKAEILQNLSEFQFSCVLYNGALENACSELGARMSAMDSSSRNAGDMLDRLTLTYNRTRQASITTELIEIISGASALEG

SEQ ID NO: 70218 - protein, 218 aa, Setaria italica
  Transcript Sequence Number=SeqID_4244
  Gene Ontology: Mol. function=Rho GDP-dissociation inhibitor activity; Cellular component=cytoplasm; Biological process=actin cytoskeleton organization and biogenesis
  Homolog annotation: Hit_ID=B6UCD5; Match level="QueryCoverage=100%, HitCoverage=90%, E-value=1e-102, Identity=83%"; Hit description=Rho GDP-dissociation inhibitor 1
  Pfam annotation: Domain name=Rho_GDI; Domain location=13-216; Score =67.5; E_value=5.1e-17; Accession=PF02115.9; Description=RHO protein GDP dissociation inhibitor
VKNAAAPSENGDAANGKCGEATPHCHDDEEEEEEAPKVIDLGPRVSIKDQLEKDKDDESLRRWKEQLLGSVDLNSVGETLEPDVKIMSLSILSPGRPDIFLPLPVEPNAKGVWFTLKEGSPYRLKFTFSVTNNIVSGLRYTNTVWKTGLKVDRAKEMLGTFSPQLEPYTYVTPEDTTPSGMFARGSYSARTKFLDDDRKCYLEINYTFDIRREWPSTS

SEQ ID NO: 70219 - protein, 69 aa, Setaria italica
  Transcript Sequence Number=SeqID_4245
  Gene Ontology: Mol. function=intramolecular transferase activity, phosphotransferases
  Homolog annotation: Hit_ID=Q6ZDQ1; Match level="QueryCoverage=68%, HitCoverage=8%, E-value=1e-13, Identity=76%"; Hit description =Phosphoacetylglucosamine mutase
MAANQEQEQEQRRRLLDVASRFPLPSGCRFSYGTAGFRADGATMAPAVCRAGILAALRSLKLAGAAVGI

SEQ ID NO: 70220 - protein, 211 aa, Setaria italica
  Transcript Sequence Number=SeqID_4246
  Homolog annotation: Hit_ID=B6SLY8; Match level="QueryCoverage=91%, HitCoverage=91%, E-value=1e-101, Identity=89%"; Hit description =EREBP-4 like protein
  Pfam annotation: Domain name=DUF862; Domain location=20-157; Score =262.8; E_value=8.3e-76; Accession=PF05903.6; Description=Eukaryotic protein of unknown function (DUF862)
MGGAVSGGAAVGDAAGATTYPVVLNVYDLTPINNYLHWCGLGIFHSAVEVHGSEYSFGAHDHPSSGVFEVEPKNCPGFIYRCTIFIGSTTMNPLEFREFIQRMASEYHGDTYHLISKNCNHFTDDLSTRLTGKTIPGWVNRLARLGAFCNCLLPESMRLESTETKHLADCRFSDDSHTTSKDNFDEDDLEDKHLLPTSSVGEDAIVKEVHR

SEQ ID NO: 70221 - protein, 121 aa, Setaria italica
  Transcript Sequence Number=SeqID_4247
  Gene Ontology: Mol. function=calcium ion binding; Cellular component =oxygen evolving complex; Biological process=photosynthesis
  Homolog annotation: Hit_ID=B6SXB9; Match level="QueryCoverage=98%, HitCoverage=63%, E-value=2e-52, Identity=84%"; Hit description =Oxygen-evolving enhancer protein 3
  Pfam annotation: Domain name=PsbQ; Domain location=1-121; Score= -26.9; E_value=0.0014; Accession=PF05757.3; Description=Oxygen evolving enhancer protein 3 (PsbQ)
IAAGAFDLRLTLPEQSSEEAEAVVRTHARNLLQVKQFVDAGAWRELQAALRASASNLKQDLYAIIQARPADQRPELRRLYSDLFNSVTSLDYAARDKDEVQVRQYYGNIVSALDEIFAKIM

SEQ ID NO: 70222 - protein, 123 aa, Setaria italica
  misc_feature (73)..(73): Xaa can be any naturally occurring amino acid
  Transcript Sequence Number=SeqID_4248
  Gene Ontology: Mol. function=nucleotide binding; Biological process =plant-type hypersensitive response
  Homolog annotation: Hit_ID=Q2QMY3; Match level="QueryCoverage=87%, HitCoverage=12%, E-value=2e-51, Identity=90%"; Hit description =Leucine Rich Repeat family protein, expressed
PSELEEGSAECRGLPLALKVIGASLRDQPPKIWLSAKNRLSRGEAISDSHETKLLERMAASVECLSEKVRDCXLDLGCFPEDKKIPLDVLINIWMEIHDLDEPDAFAILVEDFTRTKKPYLTT

SEQ ID NO: 70223 - protein, 38 aa, Setaria italica
  Transcript Sequence Number=SeqID_4249
WECDLLQPEAPQAAEHGEDHTPTAAKDHDPAEEPAQDL

SEQ ID NO: 70224 - protein, 754 aa, Setaria italica
  misc_feature (143)..(143): Xaa can be any naturally occurring amino acid
  misc_feature (157)..(157): Xaa can be any naturally occurring amino acid
  Transcript Sequence Number=SeqID_4250
  Gene Ontology: Mol. function=nucleotide binding; Biological process =plant-type hypersensitive response
  Homolog annotation: Hit_ID=Q2QMY3; Match level="QueryCoverage=98%, HitCoverage=82%, E-value=0.0, Identity=72%"; Hit description=Leucine Rich Repeat family protein, expressed
  Pfam annotation: Domain name=LRR_1; Domain location=566-588; Score =0.0; E_value=3e+02; Accession=PF00560.25; Description=Leucine Rich Repeat
  Pfam annotation: Domain name=LRR_1; Domain location=594-616; Score =4.5; E_value=42; Accession=PF00560.25; Description=Leucine Rich Repeat
  Pfam annotation: Domain name=LRR_1; Domain location=618-640; Score =14.1; E_value=0.57; Accession=PF00560.25; Description=Leucine Rich Repeat
  Pfam annotation: Domain name=LRR_1; Domain location=666-688; Score =16.1; E_value=0.14; Accession=PF00560.25; Description=Leucine Rich Repeat
  Pfam annotation: Domain name=LRR_1; Domain location=690-712; Score =8.4; E_value=7.6; Accession=PF00560.25; Description=Leucine Rich Repeat
  Pfam annotation: Domain name=NB-ARC; Domain location=111-384; Score =47.4; E_value=3.7e-12; Accession=PF00931.14; Description=NB-ARC domain
  Pfam module annotation: Pfam domain module=LRR_1::LRR_1::LRR_1::LRR _1::LRR_1::NB-ARC; Domain location=566-588::594-616::618-640::666 -688::690-712::111-384
DEADARIGRLERSIEEIAAAAHPPPPALSFPVAPPPQMHKGLPMQMPMDAPPHKGVPMPMDATLTKASMAAMPVDAPPAKGMAMPAKAGVMAMDMELADGHEDEGMVGGGLKVAKEKVKEMVMSGGGGWEVVGISGMGGSGKXHARHGDLQGSQGPXYYNNMIFFETISQSANLETIKMKLWEQISGNIVLGAYNQIPEWQLKLGPREKGPVLVILDDVWSLSQLEDLVFKFPGCKTLVVSRFKFPTLVKQTYEMQLLDEEEAFSVFCRAAFDQECVPKTADKRLVKQVSAECRGLPLALKVIGASLRDQPPKIWLSAKNRLSRGEAISDSHETKLLERMAASVECLSEKVRDCFLDLGCFPEDKKIPLDVLINIWMEIHDLDEPDAFAILVELSDKNLLTLVNDAQNKAGDLYSSYHDYSVMQHDVLRDLALHMSGRDPLNKRRRLVMPRREETLPRDWQRNKDTPFEAQIVSIHTGEMKETDWFQMSFPKAEVLILNFASSVYYLPPFIATMQNLKALVLINYGTTSATLDNLSAFSMLSGLRSLWLEKITLPPLPKTTIPLKNLRKISLVLCELNNSLRGSTMDLSMTFPRLSNLTIDHCIDLKELPSSICEIISLETISISNCHDLTELPYELGKLHCLSILRVYACPALWRLPPSVCSLKRLKYLDISQCINLTDLPEELGHLTNLEKIDMRECSRLRSLPRSSSSLKSLGHVVCDEETALLWREAEQVIPDLRVQVAEECYNLDWLVD

SEQ ID NO: 70225 - protein, 162 aa, Setaria italica
  Transcript Sequence Number=SeqID_4251
  Gene Ontology: Mol. function=DNA binding; Cellular component=nucleus; Biological process=regulation of transcription
  Homolog annotation: Hit_ID=B9S056; Match level="QueryCoverage=94%, HitCoverage=35%, E-value=4e-74, Identity=84%"; Hit description=NAC domain-containing protein, putative
  Pfam annotation: Domain name=NAM; Domain location=3-124; Score=269.4; E_value=8.3e-78; Accession=PF02365.7; Description=No apical meristem (NAM) protein
SGFHPTEEELIEFYLRRKVEGKRFNVELIAFLDLYRFDPWELPAMAVMGGKEWFFYVPRDRKYRNGDRPNRVTASGYWKATGADRMIRAENNRPIGLKKTLVFYSGKAPKGVRSSWIMNEYRLPPDHTDRYQKTEISLCRVYKRTGIDDGHGHPSARSTPSR

SEQ ID NO: 70226 - protein, 138 aa, Setaria italica
  Transcript Sequence Number=SeqID_4252
  Gene Ontology: Mol. function=1-phosphatidylinositol-4-phosphate 5 -kinase activity; Biological process=phosphatidylinositol metabolic process
  Homolog annotation: Hit_ID=B6TFY0; Match level="QueryCoverage=100%, HitCoverage=60%, E-value=1e-61, Identity=89%"; Hit description =Protein SFT2
  Pfam annotation: Domain name=SFT2; Domain location=3-121; Score =111.3; E_value=3.1e-30; Accession=PF07770.4; Description=SFT2-like protein
  Subcellular localization annotation: CTP_CleavageSite=84; ConfidenceScore=5.00e-01
KALMYFGLFLATGIFFVFIAFALFLPVMVLMPQKFAISFTLGCALIIASLFALKGPANQLAHMTSKERLPFSVGFVGCMVGTIYVSMVLHSYFLSVIFSVLQVLALAYYTISYFPGGSSGLKFISSGLLSSATSCFGR

SEQ ID NO: 70227 - protein, 82 aa, Setaria italica
  Transcript Sequence Number=SeqID_4253
  Homolog annotation: Hit_ID=B6T6T8; Match level="QueryCoverage=97%, HitCoverage=26%, E-value=2e-20, Identity=61%"; Hit description =Cysteine sulfinate desulfinase/cysteine desulfurase and related enzymes
  Subcellular localization annotation: CTP_CleavageSite=21; ConfidenceScore=5.30e-01
VPSLRTPPPTNLRLGGFFHCSSASRSPGGAVLGWTQGAKKQTPTPPAVARLDQLLCGYMRRDGHEGDVRSQGRDDAIMLGQM

SEQ ID NO: 70228 - protein, 62 aa, Setaria italica
  misc_feature (47)..(62): Xaa can be any naturally occurring amino acid
  Transcript Sequence Number=SeqID_4254
ILLLLLCVPYILAYMIIQTQIKFICNSQIGLVFILQEQIYGKKKKKXXXXXXXXXXXXXXXX

SEQ ID NO: 70229 - protein, 425 aa, Setaria italica
  misc_feature (5)..(5): Xaa can be any naturally occurring amino acid
  Transcript Sequence Number=SeqID_4255
  Gene Ontology: Mol. function=phosphoribosylaminoimidazolecarboxamide formyltransferase activity; Cellular component=chloroplast; Biological process=purine nucleotide biosynthetic process
  Homolog annotation: Hit_ID=Q8RWT5; Match level="QueryCoverage=100%, HitCoverage=71%, E-value=0.0, Identity=80%"; Hit description =Putative phosphoribosylaminoimidazolecarboxamide formyltransferase
  Pfam annotation: Domain name=AICARFT_IMPCHas; Domain location=33-358; Score=664.9; E_value=7.1e-197; Accession=PF01808.10; Description =AICARFTIMPCHase bienzyme
LYPFXDKVTSGTISFEDGIENIDIGGPTMIRAAAKNHKDVLIVVDHNDYPALLEYLKGNQEDQQFRKMLAWKAFQHVASYDSAVSEWLWKQSNKGELFPPSFTVPLELKSTLRYGENPHQNAAFYTDKSLSLVGAGGIATAIQHHGKEMSYNNYLDADAAWNCVSEFDSPTCVVVKHTNPCGVASRQDILEAYRLAVKGDPVSAFGGIVAFNTTIDEDLAKEIREFRSPTDGQTRMFYEIVVAPGYTEKGLEILQGKSKTLRILEAKRSGKGMLSLRQVNGGWLAQESDDLTPEDITFTTGSERAPQENELADAKFAWLCAKHVKSNAIVIAKNNCMLGMGSGQPNRRESLRIAFRKAGEEAKGAALASDAFFPFAWNDAVEEACQNGIGIIAQPGGSIRDEDAVACCNKYGVSLVFTGVRHFKH

SEQ ID NO: 70230 - protein, 69 aa, Setaria italica
  misc_feature (1)..(25): Xaa can be any naturally occurring amino acid
  Transcript Sequence Number=SeqID_4256
XXXXXXXXXXXXXXXXXXXXXXXXXFFFFFHFLIGHLVAISSFQNQNHNVSDLYRLVETRNEQEEDDQV

SEQ ID NO: 70231 - protein, 138 aa, Setaria italica
  misc_feature (52)..(52): Xaa can be any naturally occurring amino acid
  Transcript Sequence Number=SeqID_4257
  Gene Ontology: Mol. function=zinc ion binding; Cellular component=ER -Golgi intermediate compartment membrane; Biological process=ER to Golgi vesicle-mediated transport
  Homolog annotation: Hit_ID=B9T474; Match level="QueryCoverage=52%, HitCoverage=6%, E-value=1e-14, Identity=55%"; Hit description =Protein transport protein Sec24A, putative
  Pfam annotation: Domain name=Gelsolin; Domain location=37-109; Score =16.9; E_value=0.01; Accession=PF00626.14; Description=Gelsolin repeat
CILSLLKKSCLLFYYIPFFLLLVVGIVSYLTMEPNKIDGSLQRLPLTMQCLXTGGLYLLDDGFTFLVWLGRMLPPELVNNILGVSLANFPDLSKIQLRECDNEFSRNFMKILRTLREKDPSYHQLSRVVRQGEQPREG

SEQ ID NO: 70232 - protein, 816 aa, Setaria italica
  Transcript Sequence Number=SeqID_4258
  Gene Ontology: Mol. function=zinc ion binding; Cellular component=ER -Golgi intermediate compartment membrane; Biological process=ER to Golgi vesicle-mediated transport
  Homolog annotation: Hit_ID=B9T474; Match level="QueryCoverage=96%, HitCoverage=76%, E-value=0.0, Identity=67%"; Hit description=Protein transport protein Sec24A, putative
  Pfam annotation: Domain name=Gelsolin; Domain location=684-756; Score= 18.7; E_value=0.0068; Accession=PF00626.14; Description=Gelsolin repeat
  Pfam annotation: Domain name=Sec23_BS; Domain location=465-549; Score= 136.9; E_value=6.3e-38; Accession=PF08033.4; Description=Sec23Sec24 beta-sandwich domain
  Pfam annotation: Domain name=Sec23_helical; Domain location=561-666; Score=108.8; E_value=1.8e-29; Accession=PF04815.7; Description =Sec23Sec24 helical domain
  Pfam annotation: Domain name=Sec23_trunk; Domain location=223-460; Score=404.5; E_value=1.7e-118; Accession=PF04811.7; Description =Sec23Sec24 trunk domain
  Pfam annotation: Domain name=zf-Sec23_Sec24; Domain location=147-186; Score=81.8; E_value=2.4e-21; Accession=PF04810.7; Description =Sec23Sec24 zinc finger
  Pfam module annotation: Pfam domain module=Gelsolin::Sec23_BS::Sec23 _helical::Sec23_trunk::zf-Sec23_Sec24; Domain location=684-756::465 -549::561-666::223-460::147-186
  Subcellular localization annotation: CTP_CleavageSite=59; ConfidenceScore=5.51e-01
PPANPQFPRPGFQQPVQTMPPPPMGPTATFGNQAAYPSAGPPVGGTLQSLVEDFQSLALSSAPGSLDPGVDVKGLPRPLHGDEEPVKLSEAYPLNCHPRYFRLTTHAIPASQSLVSRWHLPLGAVVHPLAESPDGEEVPVINFGSAGVIRCRRCRTYINPYATFADAGRKWRCNLCTLLNDVPGEYFCALDASGRRCDNDQRPELSKGTVEFVAPTEYMVRPPMPPSYFFLIDVSVSAVRSGLLEVVAKTIKSCLDELPGFPRTQIGFLTFDSTLHFHNFKSSLSQPQMMVVADLDDVFLPLPDDLLVNLVDSRHVVESFLDSLPNMFHDNLNVESALGPALKAAFMVMSQIGGKLLVFQSTLPSLGIGRLRLRGDDVRAYGTDKEHTLRVPEDPFYKQMAAEFTKNQIAVDIFSFSEKYSDIASLGSLAKYTGGQVYHYPSFQAATHGDKLKHELSRDLTRETAWESVMRIRCGKGVRFTTYHGHFMLRSTDLLALPAVDSDKAFAMQLSLEETLMTTQTVYFQVALLYTSSSGERRIRVHTAAAPVVTDLSEMYRQADTGAIVSLLGRIAVENSLSDKLDSVRQQLQLKLVRSLKEYRNLYVVQHRIGGRLIFPESLRFLPLYILAICKSLALRGGYADVSLDERCAAGFSMMILPVKKLLNFIYPSLYRVDEVLTMEPNKIDGSLQRLPLTMQCLDTGGLYLLDDGFTFLVWLGRMLPPELVNNILGVSLANFPDLSKIQLRECDNEFSRNFMKILRTLREKDPSYHQLSRVVRQGEQPREGFLLLSNLVEDQMAGTSSYVDWILQIHRQTQS

SEQ ID NO: 70233 - protein, 97 aa, Setaria italica
  misc_feature (12)..(12): Xaa can be any naturally occurring amino acid
  Transcript Sequence Number=SeqID_4259
  Gene Ontology: Mol. function=hydroxymethylglutaryl-CoA synthase activity; Cellular component=soluble fraction; Biological process =isoprenoid biosynthetic process
  Homolog annotation: Hit_ID=B6T895; Match level="QueryCoverage=100%, HitCoverage=21%, E-value=4e-44, Identity=85%"; Hit description =Hydroxymethylglutaryl-CoA synthase
  Pfam annotation: Domain name=HMG_CoA_synt_C; Domain location=9-97; Score=-82.0; E_value=3e-08; Accession=PF08540.2; Description =Hydroxymethylglutaryl-coenzyme A synth
MLIGPNAPISFXSKYRGSHMAHAYDFYKPDLASEYPVVDGKLSQTCYLMALDSCYNVFCKKYEKHEGKQFSIFDADYVVFHSPYNKVIQVKPYYTCF

SEQ ID NO: 70234 - protein, 461 aa, Setaria italica
  Transcript Sequence Number=SeqID_4260
  Gene Ontology: Mol. function=hydroxymethylglutaryl-CoA synthase activity; Cellular component=soluble fraction; Biological process =isoprenoid biosynthetic process
  Homolog annotation: Hit_ID=B6T895; Match level="QueryCoverage=100%, HitCoverage=99%, E-value=0.0, Identity=93%"; Hit description =Hydroxymethylglutaryl-CoA synthase
  Pfam annotation: Domain name=ACP_syn_III_C; Domain location=287-370; Score=-31.2; E_value=0.028; Accession=PF08541.2; Description=3 -Oxoacyl-[acyl-carrier-protein (ACP)
  Pfam annotation: Domain name=HMG_CoA_synt_C; Domain location=175-449; Score=575.8; E_value=4.8e-170; Accession=PF08540.2; Description =Hydroxymethylglutaryl-coenzyme A synth
  Pfam annotation: Domain name=HMG_CoA_synt_N; Domain location=1-174; Score=345.7; E_value=8.8e-101; Accession=PF01154.9; Description =Hydroxymethylglutaryl-coenzyme A synt
  Pfam module annotation: Pfam domain module=ACP_syn_III_C::HMG_CoA _synt_C::HMG_CoA_synt_N; Domain location=287-370::175-449::1-174
EAKDVGILAMDIYFPPTCVLQEELETHDGVSKGKYTIGLGQDSMAFCTDVEDVISMSLTVVKSLLKNYNIDPKCIGRLEVGSETVIDNSKSIKTWLMQIFEEYGNTDIEGVDSSNACYGGTAALFNCVNWVESNSWDGRYGLVVCTDSAVYAEGPARPTGGAAAIAMLIGPNAPISFESKYRGSHMAHAYDFYKPDLASEYPVVDGKLSQTCYLMALDSCYNVFCKKYEKHEGKQFSIFDADYVVFHSPYNKLVQKSFARLCYNDFLRNCSTVDEESREKLAPYAGLSSEESYQSRDLEKASQQVAKNLYESKVQPTTLIPKQVGNMYTASLYAAFASVIYNRHETLAGQRIVMFSYGSGLTSTMFSFKINEGEHPFSLLNIANVLDVSKKLEARHVVPPKKFVEALKLMEHRYGAKDFVTSQDTSLLPAGTYYLTHVDSMYRRFYAAKDDGVTTAVSNGH

SEQ ID NO: 70235 - protein, 48 aa, Setaria italica
  Transcript Sequence Number=SeqID_4261
SQHDDTLLKGARVFAPRTGLAETLFPDDPFRGFGSRPPAARAWGGSSL

SEQ ID NO: 70236 - protein, 211 aa, Setaria italica
  Transcript Sequence Number=SeqID_4262
  Gene Ontology: Mol. function=secondary active sulfate transmembrane transporter activity; Cellular component=integral to membrane; Biological process=response to stress
  Homolog annotation: Hit_ID=B9RTL1; Match level="QueryCoverage=99%, HitCoverage=34%, E-value=2e-69, Identity=60%"; Hit description =Sulfate transporter, putative
AEHKVNLSARRPFVEALRTGLAETLFPDDPFRGFGSRPPAARAWGGLKYFVPALEWAPRYSLDKFKYDLLAGVTIASLAIPQGISYAKLANLPPIIGLYSSFVPPLLYAVFGSSNNLAVGTVAAASLLLASIIEAEVPPEENPQLYLQLFYTAAFFTGVIQTALGVFRLGLIVDFLSRSTITGFMGGTAAIIILQQLKGMLGMKHFTPKTD

SEQ ID NO: 70237 - protein, 145 aa, Setaria italica
  Transcript Sequence Number=SeqID_4263
  Homolog annotation: Hit_ID=B6UAE5; Match level="QueryCoverage=58%, HitCoverage=20%, E-value=6e-34, Identity=82%"; Hit description =Keratin-associated protein 5-4
RRRLQLELQILNREVDFLKDELQSLEGVPPVSRSCKEVNEFVGTKQDPLLPIEKKRHRSCGLFWWIGSKLCICVPWICCSCQCLPKCKRPCCFDCSCCSCPDVSCCKPSCKSCNKPCCGPNSCSCCNVSCCKPDCPSCSPSCSSC

SEQ ID NO: 70238 - protein, 72 aa, Setaria italica
  Transcript Sequence Number=SeqID_4264
HPHSKPARVNEFVGTKQDPLLPIEKKRHRSCGLFWWIGYIFCYTFFLYGLHGRLMPILIMFYFVSPLKKKLW

SEQ ID NO: 70239 - protein, 139 aa, Setaria italica
  Transcript Sequence Number=SeqID_4265
GIWKPKRNQRRTRRRRRRHQPPPQHPHAPSAFACQRSFFHLQVISPFGGLLLLRWASSGWAFQPSRSERFTDAVRAAAPPTRSSQIPVASRPHPQTPHTPVALSRSLSAAAASSAHPFPRLRPLSAAGRPSRRLLRRAR

SEQ ID NO: 70240 - protein, 80 aa, Setaria italica
  misc_feature (2)..(2): Xaa can be any naturally occurring amino acid
  Transcript Sequence Number=SeqID_4266
WXPSRRWFTSVDLGAPAARVRLATRHGRCAAGDQGSVAHLRQRPPCVHVDSVHGRYDEERHQEHHAKLLLLLLRHLLCRS

SEQ ID NO: 70241 - protein, 38 aa, Setaria italica
  Transcript Sequence Number=SeqID_4267
KQDKRSNQYYSFLQVTYSEREQFALHYVNHIEILKVFG

SEQ ID NO: 70242 - protein, 312 aa, Setaria italica
  Transcript Sequence Number=SeqID_4268
  Gene Ontology: Mol. function=peptidase activity; Cellular component =chloroplast
  Homolog annotation: Hit_ID=Q7XPH4; Match level="QueryCoverage=100%, HitCoverage=100%, E-value=1e-149, Identity=82%"; Hit description =OSIGBa0138H21-OSIGBa0138E01.2 protein
MAIVAVLVAPTTAPRRCWRAAAASSSAASGVDLKALQAAIDKKSSDDVKQALDQLRELGWAKRWSSQPYVSRRTTSLRELTTLGIKNAENLAIPSVRNDAAFLFTVVGTTGFLAVLAGQLPGDWGFFVPYLIGSISLIVLAVGSVAPGLLQAAIGAFSTVFPDYQERIARHEAAHFLVAYLIGLPILGYSLDIGKEHVNLIDEQLQKLIYSGQLDGKELDRLAVVSMAGLAAEGLEYDKVVGQSADLFTLQRFINRTKPQLSKDQQQNLTRWAVLFAASLLKNNKAAHEALMSAMSQNASVLGCIEAIENAS

SEQ ID NO: 70243 - protein, 43 aa, Setaria italica
  Transcript Sequence Number=SeqID_4269
CRNEAERWMDAMYRNGFYPTWYTMRLYNSASLRAHDQKIISFV

SEQ ID NO: 70244 - protein, 240 aa, Setaria italica
  misc_feature (111)..(111): Xaa can be any naturally occurring amino acid
  Transcript Sequence Number=SeqID_4270
  Gene Ontology: Mol. function=nucleoside-triphosphatase activity; Cellular component=membrane
  Homolog annotation: Hit_ID=B6SL34; Match level="QueryCoverage=93%, HitCoverage=31%, E-value=3e-90, Identity=78%"; Hit description=ATP -binding cassette sub-family G member 2
FGFLLYGCCLGRFVLFSNTLSAMPFLILITFVSGTLCYFMVRLHPGFMHYLFFVLALYASVTVVDSLMMAIASVIPQLPHGHHLSGAGIQGIFMLVSGYFRLPHDIPKPFXSLSPMSYISFHYWALQGQYQNDLKGLVFDNQDDELPKIPGEYILENVFQIDVNRSKWLDLAVLFSMIVIYRLLFFVMIKISEDVTPWVRGYIARRRVQNRRQRKVELAARSPSLRGYVVDVASLPADHP

SEQ ID NO: 70245 - protein, 445 aa, Setaria italica
  Transcript Sequence Number=SeqID_4271
  Gene Ontology: Mol. function=binding; Cellular component=cytoplasm; Biological process=ubiquitin-dependent protein catabolic process
  Homolog annotation: Hit_ID=UPI0001A7B120; Match level="QueryCoverage =100%, HitCoverage=26%, E-value=2e-71, Identity=40%"; Hit description= DCAF1 (DDB1-CUL4 ASSOCIATED FACTOR 1); nucleotide binding
  Pfam annotation: Domain name=LisH; Domain location=89-115; Score =25.2; E_value=0.00028; Accession=PF08513.3; Description=LisH
DDAIAHILTKLQVGKKLSELIRDTSAQTSGGDSGRWQAELTQVAIELIGVLTNSGKETTLAATDAAAPALRRIERAGIAAATPISYHSRELMQLIHEHLLGSGFTATAAMLQKEAGLAPLPLTAAVLPAHQVSALEASSVQQQWPSGRVHGFLSDKTNISTDQSAQRSDSVLPSSKKKALTFSSSFSQRTLSPHPVSLNRASNNPLKSPVPIGSDTGDADTLHKTPLSLPLKRKLVDMKDLNSSSAAKRSATADQTYQPSAFQTPAATRKGLSVAVDSPTSFHCGRTNFNNISTDNLDNSQGTPGTVTTTAHPGVNDQQSGNLERMTLDSLVVQYLKHQHRQCPAPVTTLPPLSLVHPHVCPEPSRSLSAPANIAARMGSREISRQFSGVQIPRRDRHFIYSRFKQCRVCRDEASLLTCMTFLGDASRVAAGNHTGELKIFDCNT

SEQ ID NO: 70246 - protein, 89 aa, Setaria italica
  Transcript Sequence Number=SeqID_4272
IERVLTGFIRNPASLQVNHSARGVSNSQEYTIHDLCCHFIHMVCNFLNLASNAPLNEALIVYHELPHECSHFQWECNLSCLAMVVALQL

SEQ ID NO: 70247 - protein, 411 aa, Setaria italica
  misc_feature (261)..(261): Xaa can be any naturally occurring amino acid
  Transcript Sequence Number=SeqID_4273
  Gene Ontology: Mol. function=transferase activity, transferring glycosyl groups; Cellular component=integral to membrane; Biological process=glucan biosynthetic process
  Homolog annotation: Hit_ID=B2MUU4; Match level="QueryCoverage=100%, HitCoverage=59%, E-value=0.0, Identity=76%"; Hit description=Starch synthase V
  Pfam annotation: Domain name=Glyco_transf_5; Domain location=1-178; Score=-21.7; E_value=1.4e-09; Accession=PF08323.3; Description =Starch synthase catalytic domain
YFGGIWHKNRIWTGTSSGVGLILIEPVQLSYFNRDMLRGYPDDFERFSYFSRASLDYIVKSGKQPDILHIHNWETAIVAPLFWDIFAHQGLENTRILLTCQDLNSQCLEEPNKVEMCGLDPRKLHRADRLQDPNKTHLVNILKGGIVYSNKVVLMSSIHSRDVLIQGSRHGLEATLTAHKEKILVASHGLDGELWYPSKDIYLPRRYSANDIEGKSICREALKRRLGFSSGSSIIVGCICDGYSDIHNLKEAVHVALRKNXRLGSVVNSTVRALKEEFINLDDDIAFVEEYNETLAHLIYAGSDIILCSSFEDPSLQIAVKAIKYGCAPVQINFPNDGSRQSEGRDCRNRVMSKYIISTYGEFSLLQALDSFKNDPSSWDQQIKDGMAKGLAWDAECYDLHWEAYSSLRKL

SEQ ID NO: 70248 - protein, 122 aa, Setaria italica
  Transcript Sequence Number=SeqID_4274
  Subcellular localization annotation: CTP_CleavageSite=19; ConfidenceScore=5.08e-01
MKKLLCVVLVSSLLLATLSGASSSSLTSSLGRDQAQVLGRKGAVHYEHLSRKMQQPEELAVEVKKPTETKAGWTVDKGADAEEGLIYSADYSAVAMHAGSPPAQAQAPQNHRESVRLRVQPL

SEQ ID NO: 70249 - protein, 44 aa, Setaria italica
  Transcript Sequence Number=SeqID_4275
DWIRNNNHIIARSLMYLAPLYMVNTVLGVTYLVYLIYNCCISLL

SEQ ID NO: 70250 - protein, 91 aa, Setaria italica
  Transcript Sequence Number=SeqID_4276
  Gene Ontology: Mol. function=acyl-CoA binding; Cellular component =cellular_component; Biological process=transport
  Homolog annotation: Hit_ID=Q7XJJ8; Match level="QueryCoverage=98%, HitCoverage=100%, E-value=4e-40, Identity=87%"; Hit description=Acyl- CoA-binding protein
  Pfam annotation: Domain name=ACBP; Domain location=3-87; Score=109.1; E_value=1.5e-29; Accession=PF00887.11; Description=Acyl CoA binding protein
MGLQEEFEEHAEKAKTLPESTTNANKLILYGLYKQATVGDVNTGRPGIFNMKDRAKWDAWKAVEGKSKEEAMSDYITKVKQLLEEAGASTS

SEQ ID NO: 70251 - protein, 39 aa, Setaria italica
  misc_feature (9)..(9): Xaa can be any naturally occurring amino acid
  Transcript Sequence Number=SeqID_4277
  Homolog annotation: Hit_ID=B4FUF3; Match level="QueryCoverage=100%, HitCoverage=9%, E-value=4e-12, Identity=89%"; Hit description =Bifunctional polymyxin resistance arnA protein
GWNPKDTSXKDLLETTLTYQHKTYKEAVKRQMSQASASS

SEQ ID NO: 70252 - protein, 393 aa, Setaria italica
  Transcript Sequence Number=SeqID_4278
  Gene Ontology: Mol. function=catalytic activity; Biological process =cellular metabolic process
  Homolog annotation: Hit_ID=B4FUF3; Match level="QueryCoverage=97%, HitCoverage=96%, E-value=0.0, Identity=98%"; Hit description =Bifunctional polymyxin resistance arnA protein
  Pfam annotation: Domain name=Epimerase; Domain location=23-293; Score= 219.5; E_value=8.8e-63; Accession=PF01370.13; Description=NAD dependent epimerasedehydratase family
  Pfam annotation: Domain name=NAD_binding_4; Domain location=27-275; Score=-94.4; E_value=0.0076; Accession=PF07993.4; Description=Male sterility protein
  Pfam module annotation: Pfam domain module=Epimerase::NAD_binding_4; Domain location=23-293::27-275
MSSPSPAPARLDLDGNPVAPLTICMIGAGGFIGSHLCEKLMAETAHVVLAVDVYCDKIRHLVDPAPPHLAGRISFHRLNIKNDSRLEGLIKMADLTINLAAICTPADYNTRPLDTIYSNFIDALPVVKYCSENNKRLIHFSTCEVYGKTIGSFLPKDHPLRKEPEFYVLKEDESPCIFGPIVKQRWSYACAKQLIERLIFAEGAENGLEFTIVRPFNWIGPRMDFIPGVDGPSEGVPRVLACFSNNLLRREPLKLVDGGQSQRTFVYIKDAIEAVVLMIENPARANGHIFNVGNPSNEVTVRELAQMMTEVYANVSGEAPLDEPMIDVSSSQFYGEGYDDSDKRIPDMTIINKQLGWNPKTPLKDLLETTLTYQHKTYKEAVKRQMSQASASS

SEQ ID NO: 70253 - protein, 176 aa, Setaria italica
  Transcript Sequence Number=SeqID_4279
  Gene Ontology: Cellular component=cell wall
  Homolog annotation: Hit_ID=B3V945; Match level="QueryCoverage=64%, HitCoverage=28%, E-value=2e-33, Identity=56%"; Hit description=PAE
  Pfam annotation: Domain name=PAE; Domain location=39-176; Score=-2.7; E_value=1.2e-15; Accession=PF03283.5; Description=Pectinacetylesterase
MAAVDLSKLVEEKRFWVASFLAAALLFTLSRYAAAPSSSPPPSPSYGHRLNALVDLTLVYDRGAVCLDGTPPGYHFLPGFGDGSHNWLLHLEGGSWCRNFKSCAQRKQTNLGSSDHMDTRAEFVGILSDDQSQNPDFYNWNKVKIRYCDGASFSGNVQHEVKNGTDFFFRGQRIWE

SEQ ID NO: 70254 - protein, 64 aa, Setaria italica
  Transcript Sequence Number=SeqID_4280
  Homolog annotation: Hit_ID=Q852E1; Match level="QueryCoverage=81%, HitCoverage=13%, E-value=7e-20, Identity=88%"; Hit description =Putative regulatory protein
TNQITNYYGWLQDVDVMWFRDPFRHISMAADIAISSDVYMGDPYSLRNFPNGGFLFVRSSAKTL

SEQ ID NO: 70255 - protein, 253 aa, Setaria italica
  Transcript Sequence Number=SeqID_4281
  Gene Ontology: Mol. function=DNA binding; Biological process =transposition, DNA-mediated
  Homolog annotation: Hit_ID=Q852E1; Match level="QueryCoverage=99%, HitCoverage=65%, E-value=1e-137, Identity=90%"; Hit description =Putative regulatory protein
SNSLLDLFFESFRTGEGGVARLLDHLVIVTMDPAAYQGCQAVHRHCYFLRTSNGVDYRSEKMFMSKDYLEMMWRRNRFQQTVLELGYNFLFTDVDVMWFRDPFRHISMAADIAISSDVYMGDPYSLRNFPNGGFLFVRSSAKTLDFYRAWQQGRWRFFGKHEQDVFNLIKHEQSAKLDLAIQFLDTTYISGFCQLSKDLNKICTLHANCCVGLGAKLHDLRGVLDVWRNYTAGTPEERRAGKFQWKLPGICIH

SEQ ID NO: 70256 - protein, 57 aa, Setaria italica
  Transcript Sequence Number=SeqID_4282
  Gene Ontology: Mol. function=heat shock protein binding
  Homolog annotation: Hit_ID=B6TJ19; Match level="QueryCoverage=71%, HitCoverage=13%, E-value=1e-14, Identity=92%"; Hit description=DnaJ
SNTAQYCRAYYGHKTDPRAVLIGLLLIVSAFQFINQMTRYNQVWTWNTKTNIRLQLF

SEQ ID NO: 70257 - protein, 142 aa, Setaria italica
  misc_feature (29)..(29): Xaa can be any naturally occurring amino acid
  Transcript Sequence Number=SeqID_4283
  Gene Ontology: Mol. function=heat shock protein binding; Cellular component=integral to membrane; Biological process=biological_process
  Homolog annotation: Hit_ID=B6TJ19; Match level="QueryCoverage=100%, HitCoverage=61%, E-value=1e-52, Identity=59%"; Hit description=DnaJ
DPRAVLIGLLLIVSAFQFINQMTRYNQEXEEEVSNEVELQIHGVEKPSVWRLYGVQFILLPYSIGKVLTWEICWFWRYWIKKLPYAWEDACYLTQTSLKIPAGTWKNIDDPRKEDLVMRRLWEKSNMERYIAETRKESKRRR

SEQ ID NO: 70258 - protein, 207 aa, Setaria italica
  misc_feature (28)..(28): Xaa can be any naturally occurring amino acid
  misc_feature (48)..(48): Xaa can be any naturally occurring amino acid
  Transcript Sequence Number=SeqID_4284
  Gene Ontology: Mol. function=heat shock protein binding; Cellular component=integral to membrane; Biological process=protein folding
  Homolog annotation: Hit_ID=B6TJ19; Match level="QueryCoverage=73%, HitCoverage=51%, E-value=3e-69, Identity=82%"; Hit description=DnaJ
  Pfam annotation: Domain name=DnaJ; Domain location=28-88; Score=60.3; E_value=7.4e-15; Accession=PF00226.23; Description=DnaJ domain
MAAASPPRSPSPPSSLATNAIYCDEDDXCYDLLGLGRERVRPHLTKHXKLALKHHPDKNPDPESRKLFVKIANAYEILKDESTREQYDYAIAHPEEVFYNTAQYCRAYYGHKTDPRAVLIGLLLIVSAFQFINQMTRYNQAIESVKQTPAYRNRLKALEFERTGGIANKKKGHKQADKKAEEEVSNEVELQIHGVEKPSVWRLYGVQ

SEQ ID NO: 70259 - protein, 92 aa, Setaria italica
  Transcript Sequence Number=SeqID_4285
  Gene Ontology: Mol. function=heat shock protein binding; Biological process=protein folding
  Homolog annotation: Hit_ID=B6TJ19; Match level="QueryCoverage=76%, HitCoverage=23%, E-value=3e-25, Identity=81%"; Hit description=DnaJ
  Pfam annotation: Domain name=DnaJ; Domain location=30-82; Score=66.1; E_value=1.3e-16; Accession=PF00226.23; Description=DnaJ domain
PSPLRPPLLPLPPSPLLLPATNAIYCDEDDCYDLLGLKQDANASEIKKAYYKHSLKHHPDKNPDPESRKLFVKIANAYEVWPGHSCPFQSYL

SEQ ID NO: 70260 - protein, 233 aa, Setaria italica
  misc_feature (33)..(33): Xaa can be any naturally occurring amino acid
  misc_feature (122)..(122): Xaa can be any naturally occurring amino acid
  misc_feature (155)..(155): Xaa can be any naturally occurring amino acid
  misc_feature (205)..(205): Xaa can be any naturally occurring amino acid
  Transcript Sequence Number=SeqID_4286
  Gene Ontology: Mol. function=heat shock protein binding; Cellular component=integral to membrane
  Homolog annotation: Hit_ID=B6TJ19; Match level="QueryCoverage=90%, HitCoverage=93%, E-value=1e-72, Identity=56%"; Hit description=DnaJ
  Pfam annotation: Domain name=DnaJ; Domain location=26-85; Score=93.3; E_value=8.6e-25; Accession=PF00226.23; Description=DnaJ domain
MAAASPLVSLLPLLLATNAIYCDEDDCYDLLGXDANASEIKKAHYKLALKHHPDKNPDPESRKLFVKIANAYEILKDESTREQYDYAIAHPEEDPRAVLIGLLLIVSAFQFINQMTRYNQEXEEEVSNEVELQIHGVEKPSVWRLYGVQFILLPXSIGKVLTWEICWFWRYWIKKLPYAWEYACYLTQTSLKIPADEPRKDDLVXRRLREKSYMERYIAVTGKESKCRRWLAV

SEQ ID NO: 70261 - protein, 294 aa, Setaria italica
  misc_feature (33)..(33): Xaa can be any naturally occurring amino acid
  misc_feature (266)..(266): Xaa can be any naturally occurring amino acid
  Transcript Sequence Number=SeqID_4287
  Gene Ontology: Mol. function=heat shock protein binding; Cellular component=integral to membrane; Biological process=biological_process
  Homolog annotation: Hit_ID=B6TJ19; Match level="QueryCoverage=92%, HitCoverage=93%, E-value=1e-114, Identity=74%"; Hit description=DnaJ
  Pfam annotation: Domain name=DnaJ; Domain location=26-85; Score=91.3; E_value=3.3e-24; Accession=PF00226.23; Description=DnaJ domain
MAAASPLVSLLPLLLATNAIYCDEDDCYDLLGXDANASEIKKAHYKLALKHHPDKNPDPESRKLFVKIANAYEILKDASTREQYDYAIAHPEEVFYNTAQYYRAYYGHKTDPRAVLIGLLLIVSTFQYINQLTRYNQAIESVKQTPAYRNRLKALEFERTRGIANKKKGHKQADKKAEEEVSNEVELQIHGVEKPSVWRLYGVQFILLPYSIGKVLTWEICWFWRYWIKKLPYAWEYACYLTQTSLKIPAGTWKNIDEPRKDDLVXRRLREKSYMERYIAVTGKESKCRRWLAV

SEQ ID NO: 70262 - protein, 90 aa, Setaria italica
  Transcript Sequence Number=SeqID_4288
  Subcellular localization annotation: CTP_CleavageSite=44; ConfidenceScore=5.65e-01
MVKKPNGVAKATAASAGAAAGPSKANPSTPGSAKTSKFKKRRVRANHDKAAAAAAAVDEAASVGAGTAGGDASASAVLPQPSHVAEASPG

SEQ ID NO: 70263 - protein, 167 aa, Setaria italica
  misc_feature (86)..(86): Xaa can be any naturally occurring amino acid
  Transcript Sequence Number=SeqID_4289
  Gene Ontology: Mol. function=nucleic acid binding
  Homolog annotation: Hit_ID=B6T7L5; Match level="QueryCoverage=86%, HitCoverage=86%, E-value=3e-74, Identity=92%"; Hit description=THAP domain-containing protein 4
  Pfam annotation: Domain name=DUF1794; Domain location=18-167; Score =195.9; E_value=1.1e-55; Accession=PF08768.3; Description=Domain of unknown function (DUF1794)
METAGAATPPTQPPATHPAVAPLAFLLGKWRGEGEGSFPAISSFRYGEELLFSHHPSKPVISYTQKTWKAASGEPMHAESGYWRPXPDGSVEVVIAQSTGLAEVQKGSYDAETKTVTLQSELVGNASKVKQITRAFQVTDGELSYVVQMATITASLQPHLKALLKKI

SEQ ID NO: 70264 - protein, 104 aa, Setaria italica
  Transcript Sequence Number=SeqID_4290
MLLNYDGDRSEDRQSEEVQSAYRRDSDIGEEMVISEEQNDENEWSWVNQDKDGDPLAESVSSLHTTQQVLASEIQKLSELGKELEAEESTSGNKDQDVIVLPYA

SEQ ID NO: 70265 - protein, 143 aa, Setaria italica
  misc_feature (122)..(122): Xaa can be any naturally occurring amino acid
  Transcript Sequence Number=SeqID_4291
  Gene Ontology: Mol. function=zinc ion binding; Biological process =regulation of transcription
  Homolog annotation: Hit_ID=A5HWF5; Match level="QueryCoverage=83%, HitCoverage=33%, E-value=3e-18, Identity=50%"; Hit description=Dof zinc finger protein 6
TSALGLSGGTSLASLLLGTGAGGDHLGLFHAAMQSVVSSEATAYEMQQQQQTQVDHLLGLGYGGAAAQIQLKPWMQDAGAGGAGGIMDSFYAPLLSSSLVPGLEELHVKAEAAGAGDHQQKXARDQQSGSWELPTPSSSNVDA

SEQ ID NO: 70266 - protein, 107 aa, Setaria italica
  misc_feature (99)..(99): Xaa can be any naturally occurring amino acid
  Transcript Sequence Number=SeqID_4292
  Homolog annotation: Hit_ID=B6TD00; Match level="QueryCoverage=93%, HitCoverage=21%, E-value=2e-33, Identity=71%"; Hit description=Fas -associated factor 1-like protein
LPPRPGAGRGDRLLELPPSAAEAADFVAEFEREFGAARGPRFVAEGFSDVLQRAQREFKLLFVYLHSPDHPDTPAFCGGCLCAEPVAAFIDENFVAWGXSIRRLKGS

SEQ ID NO: 70267 - protein, 310 aa, Setaria italica
  Transcript Sequence Number=SeqID_4293
  Gene Ontology: Cellular component=chloroplast
  Homolog annotation: Hit_ID=B9S796; Match level="QueryCoverage=80%, HitCoverage=52%, E-value=2e-65, Identity=50%"; Hit description =Pentatricopeptide repeat-containing protein, putative
  Pfam annotation: Domain name=PPR; Domain location=105-139; Score =38.7; E_value=2.4e-08; Accession=PF01535.12; Description=PPR repeat
  Pfam annotation: Domain name=PPR; Domain location=140-174; Score =42.5; E_value=1.7e-09; Accession=PF01535.12; Description=PPR repeat
  Pfam annotation: Domain name=PPR; Domain location=175-209; Score =33.8; E_value=6.7e-07; Accession=PF01535.12; Description=PPR repeat
  Pfam annotation: Domain name=PPR; Domain location=210-244; Score =17.4; E_value=0.06; Accession=PF01535.12; Description=PPR repeat
  Pfam annotation: Domain name=PPR; Domain location=70-104; Score=9.8; E_value=0.62; Accession=PF01535.12; Description=PPR repeat
  Pfam module annotation: Pfam domain module=PPR::PPR::PPR::PPR::PPR; Domain location=105-139::140-174::175-209::210-244::70-104
IYSSVIGALADAREKAAAEDLYHEAWDSKMLGDPDMFLKLTVMHVEAGVVEETIEVAKDMRQIGLRVTDCILSTIINGFVKRRGLKPAIRAYDKLVFIGCEPGQVTYASVINVYCRLGRSDRAEAVFSEMIGRGFEKCVVAYGNMISMYGKIRRASEAMKLLAMMKQKGCEPNVLVYNSLLDMHGRLGNAKQAEKIWKEMARRKVRPDQISYTGIILANNRAGELHRCVELYQEFREAGGKVDKSMAGLMAGVFSKCSRFNELIELLKDMNATKLDRRLYMSVLRSLRDAGLEVHVKWLKSNFTFVEEKT

SEQ ID NO: 70268 - protein, 80 aa, Setaria italica
  misc_feature (80)..(80): Xaa can be any naturally occurring amino acid
  Transcript Sequence Number=SeqID_4294
HAGQDEILLSVPLFEVWLYLEDWNTIVNHFHSYVKKKVDSLPMEHPAASPQFPETTSSPFIASEFSSQDDPNLVVTCESX

SEQ ID NO: 70269 - protein, 119 aa, Setaria italica
  Transcript Sequence Number=SeqID_4295
  Subcellular localization annotation: CTP_CleavageSite=45; ConfidenceScore=5.12e-01
PQLLLRVGVAVTLSVAGLLFSRRQRPPRQLLLPPPPPPSESDDAPSMKARTGLKELRILKNEDTRAKIISGNSVHTTTTTTTTTTTALVPLAPKCRSIADDEGYLLPEFNEMVLKEFCR

SEQ ID NO: 70270 - protein, 175 aa, Setaria italica
  Transcript Sequence Number=SeqID_4296
  Gene Ontology: Cellular component=mitochondrion
  Homolog annotation: Hit_ID=B9SQ91; Match level="QueryCoverage=100%, HitCoverage=48%, E-value=5e-56, Identity=42%"; Hit description =Pentatricopeptide repeat-containing protein, putative
  Pfam annotation: Domain name=PPR; Domain location=105-139; Score =40.9; E_value=5e-09; Accession=PF01535.12; Description=PPR repeat
  Pfam annotation: Domain name=PPR; Domain location=32-66; Score=19.8; E_value=0.011; Accession=PF01535.12; Description=PPR repeat
  Pfam annotation: Domain name=PPR; Domain location=70-104; Score=18.9; E_value=0.021; Accession=PF01535.12; Description=PPR repeat
  Pfam module annotation: Pfam domain module=PPR::PPR::PPR; Domain location=105-139::32-66::70-104
LLLSAHAKSGNVSRCEEVMAQLHKSGLEPDTFALNAMLNAYGRAGRLDDMERLVAAMEKRGGGGGAPDIGTYNVLVNVYGRAGYLDRMEAAFGTAAARGLAADVVTWTSRIGAYARKKEYGRCLEVFEEMVDAGCYPDAGTAKVLLAACSDERQVEQVTAIVRSMHKDAKTLFTL

SEQ ID NO: 70271 - protein, 54 aa, Setaria italica
  Transcript Sequence Number=SeqID_4297
HIAKLKVERICAVWSASFVTATERIVLLILVAAERPVQLDRAYDAGRGAYGAGR

SEQ ID NO: 70272 - protein, 88 aa, Setaria italica
  Transcript Sequence Number=SeqID_4298
  Gene Ontology: Cellular component=cytoplasm; Biological process =response to stress
  Homolog annotation: Hit_ID=Q43701; Match level="QueryCoverage=100%, HitCoverage=58%, E-value=7e-32, Identity=78%"; Hit description=Heat shock protein 17.2
  Pfam annotation: Domain name=HSP20; Domain location=47-88; Score= -14.9; E_value=0.049; Accession=PF00011.13; Description=Hsp20alpha crystallin family
MSLVRRSNVFDPFSLDLWDPFDNMFRSIVPSAGSDSDTAAFAAARIDWKETPEAHVFKADLPGVKKEEVKVEVEDGNVLVISGQRSKE

SEQ ID NO: 70273 - protein, 58 aa, Setaria italica
  Transcript Sequence Number=SeqID_4299
  Gene Ontology: Cellular component=cytoplasm; Biological process =response to stress
  Homolog annotation: Hit_ID=P27777; Match level="QueryCoverage=68%, HitCoverage=26%, E-value=9e-15, Identity=92%"; Hit description=16.9 kDa class I heat shock protein 1
  Pfam annotation: Domain name=HSP20; Domain location=1-57; Score=35.0; E_value=3e-07; Accession=PF00011.13; Description=Hsp20alpha crystallin family
DRWHRVERSSGQFMRRFRLPENAKTEQVKAGLENGVLTVTVPKAEEKKPEVKAIEISG

SEQ ID NO: 70274 - protein, 151 aa, Setaria italica
  Transcript Sequence Number=SeqID_4300
  Gene Ontology: Cellular component=cytoplasm; Biological process =response to stress
  Homolog annotation: Hit_ID=Q43701; Match level="QueryCoverage=100%, HitCoverage=100%, E-value=8e-66, Identity=82%"; Hit description=Heat shock protein 17.2
  Pfam annotation: Domain name=CS; Domain location=44-136; Score=-2.7; E_value=0.056; Accession=PF04969.8; Description=CS domain
  Pfam annotation: Domain name=HSP20; Domain location=47-150; Score =184.5; E_value=3e-52; Accession=PF00011.13; Description=Hsp20alpha crystallin family
  Pfam module annotation: Pfam domain module=CS::HSP20; Domain location= 44-136::47-150
MSLVRRSNVFDPFSMDLWDPFDNMFRSIVPSAGSDSDTAAFANARIDWKETPEAHVFKADLPGVKKEEVKVEVEDGNVLVISGQRSKEKEDKNDRWHRVERSSGQFMRRFRLPEDAKTEQVKAGLENGVLTVTVPKAEGKKPEVKSIQISG

SEQ ID NO: 70275 - protein, 242 aa, Setaria italica
  Transcript Sequence Number=SeqID_4301
  Gene Ontology: Mol. function=nucleic acid binding; Cellular component= SWI/SNF complex; Biological process=embryonic development ending in birth or egg hatching
  Homolog annotation: Hit_ID=Q656N0; Match level="QueryCoverage=100%, HitCoverage=7%, E-value=1e-126, Identity=88%"; Hit description =Putative STH1 protein
  Pfam annotation: Domain name=Helicase_C; Domain location=126-205; Score=90.6; E_value=5.5e-24; Accession=PF00271.23; Description =Helicase conserved C-terminal domain
LRRLKHKVENELPEKIERLVRCEASAYQKLLMTRVEDNLGAIGAVKVRSVHNSVMELRNICNHPYLSQLHVEEIEGYLPKHYLPNIVRLCGKLEMLDRLLPKLKATGHRVLLFSTMTRLLDVMEDYLVWKKYKYLRLDGHTSGHERGALIDKFNDPNSQAFIFLLSIRAGGVGVNLQAADTVIIFDTDWNPQVDLQAQARAHRIGQKKEVLVLRLETVRTVEEQVRASAEHKLGVANQSITA

SEQ ID NO: 70276 - protein, 258 aa, Setaria italica
  Transcript Sequence Number=SeqID_4302
  Gene Ontology: Mol. function=protein serine/threonine kinase activity; Cellular component=plasma membrane; Biological process =protein amino acid phosphorylation
  Homolog annotation: Hit_ID=Q8GY50; Match level="QueryCoverage=86%, HitCoverage=22%, E-value=3e-75, Identity=60%"; Hit description =Leucine-rich repeat receptor-like protein kinase
  Pfam annotation: Domain name=LRRNT_2; Domain location=39-78; Score =18.7; E_value=0.011; Accession=PF08263.4; Description=Leucine rich repeat N-terminal domain
  Pfam annotation: Domain name=LRR_1; Domain location=105-128; Score =7.7; E_value=10; Accession=PF00560.25; Description=Leucine Rich Repeat
  Pfam annotation: Domain name=LRR_1; Domain location=130-152; Score =12.2; E_value=1.4; Accession=PF00560.25; Description=Leucine Rich Repeat
  Pfam annotation: Domain name=LRR_1; Domain location=154-176; Score =10.4; E_value=3.1; Accession=PF00560.25; Description=Leucine Rich Repeat
  Pfam annotation: Domain name=LRR_1; Domain location=178-201; Score =9.0; E_value=5.7; Accession=PF00560.25; Description=Leucine Rich Repeat
  Pfam annotation: Domain name=LRR_1; Domain location=208-230; Score =2.7; E_value=91; Accession=PF00560.25; Description=Leucine Rich Repeat
  Pfam annotation: Domain name=LRR_1; Domain location=233-255; Score =10.5; E_value=3; Accession=PF00560.25; Description=Leucine Rich Repeat
  Pfam module annotation: Pfam domain module=LRRNT_2::LRR_1::LRR_1::LRR_ 1::LRR_1::LRR_1::LRR_1; Domain location=39-78::105-128::130-152::154 -176::178-201::208-230::233-255
MEAAAVGCGGRRTTMGLVVLAVAVVLAACVPRACHGMTDSQDTSVLRALMDQWQNAPPTWGQSDDPCGDSPWEGVTCANDKVISIKLSTMGIKGVLAADIGQLSGLQSLDLSFNKDLGGVLTPTIGNLKQLTTLILAGCSFHGTIPDELGSLPKLSYMALNSNQFSGKIPASLGNLSNLYWFDIADNQLSGPLPISTSGGMGLDKLFKTKHFHFNKNQLSGPIPDALFSPEMTLIHLLFDGNKFTGSIPDSLGYVSTL

SEQ ID NO: 70277 - protein, 246 aa, Setaria italica
  misc_feature (26)..(26): Xaa can be any naturally occurring amino acid
  Transcript Sequence Number=SeqID_4303
  Gene Ontology: Mol. function=transcription regulator activity; Cellular component=nucleus
  Homolog annotation: Hit_ID=B6UD78; Match level="QueryCoverage=85%, HitCoverage=47%, E-value=3e-46, Identity=55%"; Hit description=DNA binding protein
MGDHAEMLHAAPAVVYTGGGAGAAPXHGGWWTAASVPTATCSTELAGFGTWSSALQAATSYDMAVEGAKAKSATTASSESPGNNSSVTFQEPTGVADPVGISAAVHQQPLAGYADWTHPYMSSGATLHGFLQDGHQDMSSRTEQSPMDASTLMNPSSNNLALQVQGHQQEHQLLSSFGSDLLLSPTTPYGLQSSLLRSLLEPAAKPALPGFQQYDQYGQQICQQASPAAARFAPGAIREPLQFTNA

SEQ ID NO: 70278 - protein, 348 aa, Setaria italica
  misc_feature (45)..(45): Xaa can be any naturally occurring amino acid
  misc_feature (303)..(303): Xaa can be any naturally occurring amino acid
  Transcript Sequence Number=SeqID_4304
  Homolog annotation: Hit_ID=Q25AI1; Match level="QueryCoverage=80%, HitCoverage=31%, E-value=2e-61, Identity=44%"; Hit description =H0702G05.12 protein
NLTSSNKGLRHRRSKRLAKQSAATTYYESTENESEENEAVSPSRXLSDFQDIDGVSNDISSSSLPQHNKPHRRSNEADNPHATTKSASIPDVSDPESFARYYSKTYPPEVRRALERNSILGQAGGKEKRKRGDRGPNLCLKVWTMPEGVRIRVSFNDLGQPIGDEARTLSSFLGQIARDGTVAPLTYTDWRFFPEKNKQAMMHLVNHKFVLPPIGQIWSMSALGKKWKDWKVVLKHERYDAHETDAERLADRDFRVPEEQWKLLVAYWGTEKAKALSARCKASQEQHPCRNHPRLGSKSYAYXIQEVERQKRANMAEPSVTATSIPEDREGRPVSMDDVSAEVVSPDQ

SEQ ID NO: 70279 - protein, 541 aa, Setaria italica
  Transcript Sequence Number=SeqID_4305
  Gene Ontology: Mol. function=protein binding; Biological process =ubiquitin-dependent protein catabolic process
  Homolog annotation: Hit_ID=B6SY69; Match level="QueryCoverage=90%, HitCoverage=91%, E-value=0.0, Identity=69%"; Hit description =Cysteine-type peptidase
  Pfam annotation: Domain name=OTU; Domain location=247-358; Score =138.4; E_value=2.3e-38; Accession=PF02338.11; Description=OTU-like cysteine protease
  Subcellular localization annotation: CTP_CleavageSite=30; ConfidenceScore=5.12e-01
MTRIFVQRGAAGSSSSSSRSGSQPAQPQPPAAAREEELPLRPQPQLPELLATDDITEHLNEGSENSSSSNKPSRLDDPISESSSSAEERAAREKPPKDDSNLINPTFLVEELKGLQISDQIEHGNSVPSSTGSSQMAGAASHPPPPPAPPPKPSPGNIGLRRMGSGSSNSVRIGSSRRPVAWPPVAARTSASGSRPSSPRSLVDGEGYNSADEQGPCYGSSYDDSERDLMFEHDLRRVKGLEIRKMAEDGNCLFRAVADQVYGDAEAYDMARQMCVDYMERERDHFSEFITESFTLYCKRKRRDKVYGNNVEIQAFAEMYNRPIHIYSYSTEPINIFQGSYNTDVPPIRLSYHHGNHYNSVVDPRRQTVGAGLGFSSLRGTNNVDRDQVKAAIKAQQDQQIENALLAEGRFYSDLELTEREIERMVMEASRAEYLAEEKKLNIRESSTSGAEPSSSAAISGSSRSAAAVDRGSEECFVLPDTVLTRSMQLLLAMGFSYIQVMEAYSIFGEDVDSMICYLVETGGPGASEGGSNRRKGKAAE

SEQ ID NO: 70280 - protein, 490 aa, Setaria italica
  misc_feature (480)..(480): Xaa can be any naturally occurring amino acid
  Transcript Sequence Number=SeqID_4306
  Gene Ontology: Mol. function=ATPase activity, coupled to transmembrane movement of substances; Cellular component=integral to membrane; Biological process=transport
  Homolog annotation: Hit_ID=Q7XTT6; Match level="QueryCoverage=100%, HitCoverage=62%, E-value=0.0, Identity=67%"; Hit description =OSJNBa0058K23.17 protein
  Pfam annotation: Domain name=ABC_tran; Domain location=155-329; Score= 131.7; E_value=2.3e-36; Accession=PF00005.19; Description=ABC transporter
MDTVKCYAWEQSFQSKVQDIRDDELSWFRRAQLLAALNSFILNSIPVIVTVVSFGVYSLLGGDLTPAKAFTSLSLFAVLRFPLFMLPNLITQVVNCKVSLKRLEDLLLAEERLLLPNPPIDPELPAISIKNGYFSWESQAERPTLSNVNLDVPVGSLVAIVGSTGEGKTSLISAMLGEIPPVSGSDTSVVIRGSVAYVPQVSWIFNATVRDNILFGSPFQAPRYEKAIDVTSLRHDLHLLPGGDLTEIGERGVNISGGQKQRVSMARAVYSDSDVYIFDDPLSALDAHVGRQVFDKCIKEELQHKTRVLVTNQLHFLPYVDKIVLIHDGVIKEEGTFDELSNSGELFKKLMENAGKMEEQVEEKQDESKSQDVAKQTENGDVVIVDGGSQKSQDDSNKTKPGKSVLIKQEERETGVISAKVLSRYKNALGGVWVVSILFFCYALTEVLRISSSTWLSIWTDQGSLKIHGPGYYNLIYGIXFSFGQVLVTL

SEQ ID NO: 70281 - protein, 165 aa, Setaria italica
  misc_feature (122)..(122): Xaa can be any naturally occurring amino acid
  Transcript Sequence Number=SeqID_4307
  Gene Ontology: Mol. function=protein serine/threonine kinase activity; Biological process=protein amino acid phosphorylation
  Homolog annotation: Hit_ID=B6SWW6; Match level="QueryCoverage=98%, HitCoverage=23%, E-value=1e-12, Identity=32%"; Hit description=WAK2 -OsWAK receptor-like cytoplasmic kinase (OsWAK-RLCK)
PALCGGINIAFPFWLAGKHPPECGYKAYEVTCDKGNLTLKNSYWTYQLLDIFYQNSSFRADLSGGLCDFKNFVNAASDLGLSPFKISPKNQELFFLYDCELRGRHAPRSWTLVNCSSPDDPXWAFALLGKNYTPGGTGMPPPMNCNVSTIPVLGYEGADGGRLST

SEQ ID NO: 70282 - protein, 76 aa, Setaria italica
  Transcript Sequence Number=SeqID_4308
CLHLSEEWQHRYLNLFIILRSLQYCFLSLIEDSAQYRYRMVGFKSFFLHKVWIFFYPQFTINFYLLMGRNIARNNC

SEQ ID NO: 70283 - protein, 469 aa, Setaria italica
  Transcript Sequence Number=SeqID_4309
  Gene Ontology: Mol. function=RNA-directed RNA polymerase activity
  Homolog annotation: Hit_ID=Q5QMN5; Match level="QueryCoverage=94%, HitCoverage=38%, E-value=1e-141, Identity=58%"; Hit description =Probable RNA-dependent RNA polymerase 3
  Pfam annotation: Domain name=RdRP; Domain location=7-277; Score= -28.6; E_value=1.4e-11; Accession=PF05183.4; Description=RNA dependent RNA polymerase
ELLHNAIEGVANACYDFRHALKLASRYANMEDSMLEQMIHSGIPLEEPYLLSRLNFIAKQEMKGFREGKLPIDECYHLMGSTDPTGTLKPNEVCVILDSGQYSGDVLVFKYPGLHFGDIHILTARQISGLEKNFVGYSKIAILFPTSGKRSLADEMANSDFDGDEYWVSKNHMLLKGFTKRSEPWVPLFKPKETQHKPKRPKDFNESVLERVLFNECLTTTFISNYALGISSDCWLAYMDRLLTEDVDEDEKESIAKKMIKLVNLYYWALDDIQIKVDRELRVEKYPHFMEKKGFESYHSISILGRIFDETEKAILQRSEDDKQIQITMLPFFTEVEAAPECISLWEYNYEEYLSKSRGLFDLDKEEKNEEFEKLYQSYKYLLYDAEEFEETSRDLSQVYMEACAIYRIVYERARSTKSISKCRFVWVVAGAALCHLYATKYAAQRGEKPCSARFQLPANFTDAARVWL

SEQ ID NO: 70284 - protein, 246 aa, Setaria italica
  Transcript Sequence Number=SeqID_4310
  Gene Ontology: Mol. function=sequence-specific DNA binding; Cellular component=nucleus; Biological process=regulation of transcription, DNA-dependent
  Homolog annotation: Hit_ID=B6TFI9; Match level="QueryCoverage=93%, HitCoverage=76%, E-value=1e-103, Identity=81%"; Hit description=GATA transcription factor 25
  Pfam annotation: Domain name=CCT; Domain location=85-129; Score=76.8; E_value=7.7e-20; Accession=PF06203.6; Description=CCT motif
  Pfam annotation: Domain name=CCT_2; Domain location=82-109; Score =36.2; E_value=1.3e-07; Accession=PF09425.2; Description=Divergent CCT motif
  Pfam annotation: Domain name=GATA; Domain location=157-194; Score =62.0; E_value=2.3e-15; Accession=PF00320.19; Description=GATA zinc finger
  Pfam annotation: Domain name=tify; Domain location=16-51; Score=56.2; E_value=1.3e-13; Accession=PF06200.6; Description=tify domain
  Pfam module annotation: Pfam domain module=CCT::CCT_2::GATA::tify; Domain location=85-129::82-109::157-194::16-51
PVPPVEPPVPAPVSVLPGNPNQLTLLFQGEVYVFESVTPDKVQAVLLLLGRGELPPGSTGMVLPNQNENKGYDDILRRTDIPAKRVASLIRFREKRKERNFDKKIRYAVRKEVALRMQRRKGQFAGRASLEGESPAPGCDPGSQSSGLDFVSRESKCQNCGTSEKMTPAMRRGPAGPRTLCNACGLMWANKGTLRSCPKAKVESPAVAIEQGGSDNKALMAPKNDNVSASNSEATSAAETGAPKAP

SEQ ID NO: 70285 - protein, 348 aa, Setaria italica
  misc_feature (152)..(152): Xaa can be any naturally occurring amino acid
  Transcript Sequence Number=SeqID_4311
  Gene Ontology: Mol. function=protein serine/threonine kinase activity; Biological process=protein amino acid phosphorylation
  Homolog annotation: Hit_ID=B9RDU9; Match level="QueryCoverage=85%, HitCoverage=70%, E-value=1e-107, Identity=63%"; Hit description=ATP binding protein, putative
  Pfam annotation: Domain name=Pkinase; Domain location=59-334; Score =135.0; E_value=2.4e-37; Accession=PF00069.17; Description=Protein kinase domain
  Pfam annotation: Domain name=Pkinase_Tyr; Domain location=59-332; Score=104.3; E_value=4.2e-28; Accession=PF07714.9; Description =Protein tyrosine kinase
  Pfam module annotation: Pfam domain module=Pkinase::Pkinase_Tyr; Domain location=59-334::59-332
  Subcellular localization annotation: CTP_CleavageSite=54; ConfidenceScore=5.52e-01
RDRAIAVPAPTGKPSARGLYLSSGGGYRNGSGRQQQRPSFQFQSSVFSMDEILRATSNFSPALKVGQGGFGAVYKGVLPDGTTVAVKRAKHRMHNPHVDIEFRSEVKIMARIDHQSLVRFYGYIECGEERIVVVEFVPNGTLRDHLDRCNGXFLDLGTRLDIAIDVAHAVTYLHMYSDHPIIHRDIKSSNILLTHSLRAKVADFGFARLGAGEAAAHVTTQVKGTAGYLDPEYLKTCQLTDRSDVYSFGVLLVELASASRPIEAKREMKERLTARWAMARFIAGASADVLDPHPSCRPRPVRALEMLLELAFRCMVPVRNDRPAMSECCKALWAIRKTYRDMLAADVT

SEQ ID NO: 70286 - protein, 174 aa, Setaria italica
  Transcript Sequence Number=SeqID_4312
  Gene Ontology: Mol. function=acyl-[acyl-carrier-protein] desaturase activity; Cellular component=chloroplast; Biological process=fatty acid biosynthetic process
  Homolog annotation: Hit_ID=B6TMD0; Match level="QueryCoverage=95%, HitCoverage=45%, E-value=3e-93, Identity=96%"; Hit description=Acyl -[acyl-carrier protein] desaturase
  Pfam annotation: Domain name=FA_desaturase_2; Domain location=1-174; Score=222.8; E_value=8.7e-64; Accession=PF03405.6; Description=Fatty acid desaturase
EQRAWTAEENRHGDLLNKYMYLTGRVDMKQIEKTIQYLIGSGMDPGTENNPYLGFLYTSFQERATFISHGNTARHAKEYGDLKLAQICGTIAADEKRHETAYTKIVEKLFEIDPDYTVLAFADMMRKKITMPAHLMYDGKDKDLFEHFGAVAQRLGVYTAKDYADILELSHPTS

SEQ ID NO: 70287 - protein, 392 aa, Setaria italica
  Transcript Sequence Number=SeqID_4313
  Gene Ontology: Mol. function=acyl-[acyl-carrier-protein] desaturase activity; Cellular component=chloroplast; Biological process=fatty acid metabolic process
  Homolog annotation: Hit_ID=B6TMD0; Match level="QueryCoverage=91%, HitCoverage=97%, E-value=0.0, Identity=92%"; Hit description=Acyl -[acyl-carrier protein] desaturase
  Pfam annotation: Domain name=FA_desaturase_2; Domain location=62-390; Score=833.2; E_value=1.5e-247; Accession=PF03405.6; Description=Fatty acid desaturase
  Subcellular localization annotation: CTP_CleavageSite=33; ConfidenceScore=5.41e-01
MALRASPVPHVAAPMPPCGGRVRRRASGAVVTMASTINRVKTVKEAYTPPREVQCQVTHSLPAQKKEIFDSLQPWAKDNLLNLLKPVEKSWQPQDFLPEPSSDGFYDEVKELRERAKEIPDEYFVCLVGDMVTEEALPTYQTMLNTLDGVRDETGASPTTWAVWTRAWTAEENRHGDLLNKYMYLTGRVDMKQIEKTIQYLIGSGMDPGTENNPYLGFLYTSFQERATFISHGNTARHAKEYGDLKLAQICGTIAADEKRHETAYTKIVEKLFEIDPDYTVLAFADMMRKKITMPAHLMYDGKDKDLFEHFGAVAQRLGVYTAKDYADILEFLVQRWKVADLTGLSGEGRRAQDFVCTLAPRIRRLDERAQARAKQAPVIPFSWIYDRKVQL

SEQ ID NO: 70288 - protein, 73 aa, Setaria italica
  Transcript Sequence Number=SeqID_4314
  Gene Ontology: Mol. function=metal ion binding; Biological process =metal ion transport
  Homolog annotation: Hit_ID=B6T4Q0; Match level="QueryCoverage=89%, HitCoverage=33%, E-value=2e-18, Identity=72%"; Hit description=Metal ion binding protein
  Pfam annotation: Domain name=HMA; Domain location=12-72; Score=35.5; E_value=2.2e-07; Accession=PF00403.18; Description=Heavy-metal -associated domain
PADEHVRRQTVELKVRMCCSGCERVVKHALTKLRGVDTVEVEVEMEKVTVTGYVDRHRVLKEVRRAGKKAEFW

SEQ ID NO: 70289 - protein, 180 aa, Setaria italica
  Transcript Sequence Number=SeqID_4315
  Gene Ontology: Mol. function=metal ion binding; Biological process =metal ion transport
  Homolog annotation: Hit_ID=B6T4Q0; Match level="QueryCoverage=90%, HitCoverage=84%, E-value=1e-69, Identity=80%"; Hit description=Metal ion binding protein
  Pfam annotation: Domain name=HMA; Domain location=53-113; Score=35.5; E_value=2.2e-07; Accession=PF00403.18; Description=Heavy-metal -associated domain
  Subcellular localization annotation: CTP_CleavageSite=12; ConfidenceScore=5.02e-01
FYPSGGHRHGHRAGAYYYSSHPTSTNTLYYNEGGPFAGRRMGRSRPLSLQTVELKVRMCCSGCERVVKHALTKLRGVDTVEVEVEMEKVTVTGYVDRHRVLKEVRRAGKKAEFWPNPDLPLHFTSAKDYFHDEESYRRTYNYYRHGYNGDKHGNLPEPQRGADPVANMFNDDDVNACSIM

SEQ ID NO: 70290 - protein, 118 aa, Setaria italica
  Transcript Sequence Number=SeqID_4316
  Subcellular localization annotation: CTP_CleavageSite=26; ConfidenceScore=5.04e-01
MSVSSTLSSFLLCCFYPSGGHRHGHRAGAYYYSSHPTSTNTLYYNEGGPFAGRRMGRSRPLSLQVRRAETGRFWLCSLLSSAACSVLFFRQASSDMHVKQCEAWYAQVRLLGCYANAT

SEQ ID NO: 70291 - protein, 319 aa, Setaria italica
  Transcript Sequence Number=SeqID_4317
  Gene Ontology: Mol. function=molecular_function; Cellular component =outer membrane; Biological process=biological_process
  Homolog annotation: Hit_ID=B9SQQ8; Match level="QueryCoverage=99%, HitCoverage=61%, E-value=1e-109, Identity=60%"; Hit description =Sorting and assembly machinery (Sam50) protein, putative
  Pfam annotation: Domain name=Bac_surface_Ag; Domain location=2-319; Score=45.6; E_value=1.9e-10; Accession=PF01103.15; Description =Surface antigen
YLPRFKSIPTPLMARASLSSQDWLKFSSYKERLLGLSFGLISTMNHDLSYNLTWRTLTDPSRASSKAIRRQLGHNLLSALKYTYKIDERDSLLRPTKGYAFQSTSQVGGLWDNKGLRFFRQEFDVRGAVPLGFYNAALNVGVGAGVILPLGRGFMNSSSPVPDRFFLGGHSSPVCSLSGLSSLLGFKTRGVGPTEARRLVPNESDSGSAPAPGRDYLGGDLAVSAFADLSFDLPLKLFRDAGIHGHAFLAAGNLTKLSEGEYKNFSVSDFKRTFRSSAGAGIILPTKLFRVEVNYCYILKQAEHDSGKTGIQFSFSSPM

SEQ ID NO: 70292 - protein, 92 aa, Setaria italica
  misc_feature (84)..(84): Xaa can be any naturally occurring amino acid
  Transcript Sequence Number=SeqID_4318
  Subcellular localization annotation: CTP_CleavageSite=59; ConfidenceScore=5.23e-01
NVNSYYKLIILTVVVIVSSLNFFPQDFGCPNTGQSEQIATSSIRGVSSCSGGNETLNVTAGNHRSSLKETCTNKQEWSISKTSXSMNLDLVL

SEQ ID NO: 70293 - protein, 105 aa, Setaria italica
  misc_feature (93)..(93): Xaa can be any naturally occurring amino acid
  Transcript Sequence Number=SeqID_4319
  Gene Ontology: Mol. function=transferase activity
  Homolog annotation: Hit_ID=B6T444; Match level="QueryCoverage=100%, HitCoverage=18%, E-value=3e-31, Identity=56%"; Hit description =Glycosyltransferase
  Pfam annotation: Domain name=DUF563; Domain location=1-105; Score= -40.1; E_value=1.1e-06; Accession=PF04577.6; Description=Protein of unknown function (DUF563)
TFNYWHAFSDVLVPLFTTARAFGGEVDLVATGAQAWFLSKYRRVLGALSKYEVVDLDADGEVRCYPHLIVGLRGHRDFDIDPARAPNNYDIAXFRLFVRGAYSLP

SEQ ID NO: 70294 - protein, 56 aa, Setaria italica
  Transcript Sequence Number=SeqID_4320
LPYGSQHIEPYTSYKGHQRIYPLNLTPMHHGVESRGPLDPMRRAASQQLASERFRT

SEQ ID NO: 70295 - protein, 442 aa, Setaria italica
  Transcript Sequence Number=SeqID_4321
  Gene Ontology: Mol. function=heat shock protein binding; Cellular component=membrane; Biological process=protein folding
  Homolog annotation: Hit_ID=B6THE8; Match level="QueryCoverage=100%, HitCoverage=100%, E-value=0.0, Identity=86%"; Hit description =Chaperone protein dnaJ 16
  Pfam annotation: Domain name=DnaJ; Domain location=32-94; Score =128.3; E_value=2.5e-35; Accession=PF00226.23; Description=DnaJ domain
MAGSRFGSFKSEKGDSAASAAAAAGGAAQRRDPYEVLGVGRSATDQEIKSAFRRMALKYHPDKNGDDPVASDRFQEVTFSYNILSDPDKRRQYDTSGFEAIESDSQELELDLSSLNTVNTVFAALFSKLGVPIKTTVSATVLEEALNGSVMVSQLQLGSSVQRKVEKQTAHFYSVDITEKQAKMGLVCRVHSNDKSKFKLLYFELEENGGLSLALQEDSVKTGKVTAAGMYFLGFPVYRFEQNNLAAAAKDSDGAFFKRLDSFQPCDIHELKPGTHFFAVYGDNFFKSANYTIEVVCGESFPAEKEMLRSVEAKILTKRAELSKFESEYREVLAKFTEMTSKYTQEMQTIDQLLKERNEIHASYTNNPPLKRSSSRNKAKSPSKMPKNDAEKHHQKEKKVKDHCMEGYGSEDDNSSEKKPKERFPRKKWLNIPFKLDRRKSC

SEQ ID NO: 70296 - protein, 249 aa, Setaria italica
  misc_feature (16)..(16): Xaa can be any naturally occurring amino acid
  misc_feature (195)..(195): Xaa can be any naturally occurring amino acid
  Transcript Sequence Number=SeqID_4322
  Gene Ontology: Mol. function=ATP-dependent DNA helicase activity; Cellular component=intracellular; Biological process=DNA recombination
  Homolog annotation: Hit_ID=UPI00017390E4; Match level="QueryCoverage =86%, HitCoverage=22%, E-value=4e-64, Identity=55%"; Hit description =ATP binding / ATP-dependent DNA helicase/ ATP-dependent helicase/ helicase/ nucleic acid binding
IVDTELSSSVKNSHTXEQKTIHLHLKKFFSGTRFSSQYFLNCMSAKHKEGDLVYVSGKIKKALSNGHYELKEYTIDGLEGEGEQSSMLDRKPHPIYPSKAGLKPSLLGLSISRALKMLNPDVDPMPPDVLTEFNLPNLFDAYMGIHKPKDRDEADFARRRLIFDDFFYLQLGRLFQMLEAVGTRVEKEELLYKCXNHELNTVGVDDWSPLTKKLLKALPYSLTPSQCMLCACVCVSNVGPEGIFLLSRP

SEQ ID NO: 70297 - protein, 95 aa, Setaria italica
  Transcript Sequence Number=SeqID_4323
  Gene Ontology: Mol. function=transporter activity; Cellular component= membrane; Biological process=oligopeptide transport
  Homolog annotation: Hit_ID=Q7X619; Match level="QueryCoverage=100%, HitCoverage=16%, E-value=2e-40, Identity=86%"; Hit description =P0076O17.8 protein
LGSGCLKPNMIAHGADQFDTAAPGGAGRLSTYFNSAYFSFCAGELVALTALVWVQTHSGMDVGFGISAAAMAAGLVSLVSGAALYRNKPPQGSIF

SEQ ID NO: 70298 - protein, 480 aa, Setaria italica
  Transcript Sequence Number=SeqID_4324
  Gene Ontology: Mol. function=nucleotide binding; Biological process =defense response
  Homolog annotation: Hit_ID=Q52QI0; Match level="QueryCoverage=100%, HitCoverage=52%, E-value=0.0, Identity=77%"; Hit description=NBS-LRR type disease resistance protein
  Pfam annotation: Domain name=NB-ARC; Domain location=176-459; Score =251.0; E_value=2.8e-72; Accession=PF00931.14; Description=NB-ARC domain
MAEAVLLALAKIGSVLADETAKAMLDKLSEKVNNLRDLEDKIRQIRMQLSTMNSVIRNIGTVYLTDEVVRGWIGEVRKLAYRVEDVMDKYSYHTLQMEEEWFLKKYFIKGSHYVLVFSQIAEEVVKIEKEIKNVIELKEQWLHHSQLVPDQFMEMERQRSQDSFPLLVKDEDLVGIEDNRKTLTEWLYSDELDSTVIAISGMGGLGKTTLVTNVYEREKINFPASAWMVVSQTYTMDALLRKLLMKLGGEQQVSPNIDKLDVYDLKENIKQRLKNRKCLIVLDDVWDQEVYLQMSDSFQNLQASRIIITTRKNHVAALADPTRRLDLQPLSNTHAFDLFCRRTFYNKKDHTCPTDLVKVATSIVDRCQGLPLAIVSIASLLSSRPRTYYIWNQMYNQLRSELSNNDHVRAILNLSYHDLSGDLRNCFLYCSLFPEDYPISRESLVRLWVAEGFVVSKENNTSEEVAEGNLTELTHRNMLV

SEQ ID NO: 70299 - protein, 53 aa, Setaria italica
  Transcript Sequence Number=SeqID_4325
HEGTTVASVFILLSVILDLSNNWHMIRRFQTNRKHEELFFLKKQSIISYFFSQ

SEQ ID NO: 70300 - protein, 184 aa, Setaria italica
  misc_feature (8)..(8): Xaa can be any naturally occurring amino acid
  Transcript Sequence Number=SeqID_4326
  Gene Ontology: Mol. function=binding
  Homolog annotation: Hit_ID=B9RT55; Match level="QueryCoverage=99%, HitCoverage=60%, E-value=5e-35, Identity=44%"; Hit description=Clasp, putative
DENSAPRXTAAAGEQAVEYIPSAELEAAAHPKAKAAGLVAELDSKDWIRACEALNDARRLAIHHSALLNPILEKVMLAIVKTMKNPRSAVLKTSIMACTDIFNSCGNLLSSVSDDAFDKLLLQLLLKASQDKRFVCEEAEKAMRAMAASMPPLPLLKKLKAYVHHANLRVRAKAAVAISHCAAR

SEQ ID NO: 70301 - protein, 105 aa, Setaria italica
  Transcript Sequence Number=SeqID_4327
NHEEEEEEQDEVEKQERQSEVEGQHQQEKDEAMAAVQDESLEVMAQGQGEEIALEDDRLVPVVALDEMTIADDSGLHRDVEEADGMNQVAEDEQDSRDVDIGVVL

SEQ ID NO: 70302 - protein, 118 aa, Setaria italica
  Transcript Sequence Number=SeqID_4328
LRGKGRGRGKKSLRGKRKKVRQKEQEEQDSQAVGLDDDLVPGFGASMNPALQMEPETLGFDDGVIPGFGGGTSHQDSAREEPIMRQGSEPISSSKMSIIWVTTTCHRYHQVLQPLCSQ

SEQ ID NO: 70303 - protein, 117 aa, Setaria italica
  misc_feature (102)..(102): Xaa can be any naturally occurring amino acid
  Transcript Sequence Number=SeqID_4329
  Gene Ontology: Mol. function=protein serine/threonine kinase activity; Cellular component=plasma membrane; Biological process =protein amino acid phosphorylation
  Homolog annotation: Hit_ID=B9S1N3; Match level="QueryCoverage=74%, HitCoverage=20%, E-value=8e-23, Identity=60%"; Hit description =Receptor serine-threonine protein kinase, putative
QQVKLVDWTRPYLSGGSRRLRCIMDQRLAGHYSVKGARAVAQLAVQCTAPQPRDRPRMAAVVEALERLQGLKDMAVTVGLWPANAPVAGRNAISAKIRAEVXGAAGSRRRSASSKLA

SEQ ID NO: 70304 - protein, 140 aa, Setaria italica
  Transcript Sequence Number=SeqID_4330
TKRTLAAVLNPALRRFLTPRTQILIDHYVHTHTHARTHTIQYNSIIHSGRHTTRLNHGSLEDALLRRDPAAPLTSARILAEMAFLPATGALAGQSPTVTAMSLSPCSRLRRVLRTYGRSYSVGSGFPLGFFVSVSFPFCF

SEQ ID NO: 70305 - protein, 544 aa, Setaria italica
  Transcript Sequence Number=SeqID_4331
  Gene Ontology: Mol. function=transporter activity; Cellular component= membrane; Biological process=oligopeptide transport
  Homolog annotation: Hit_ID=B6TVK5; Match level="QueryCoverage=97%, HitCoverage=90%, E-value=0.0, Identity=86%"; Hit description=Peptide transporter PTR2
  Pfam annotation: Domain name=MFS_1; Domain location=11-485; Score =5.4; E_value=0.019; Accession=PF07690.8; Description=Major Facilitator Superfamily
  Pfam annotation: Domain name=PTR2; Domain location=73-477; Score =519.9; E_value=3.2e-153; Accession=PF00854.13; Description=POT family
  Pfam module annotation: Pfam domain module=MFS_1::PTR2; Domain location=11-485::73-477
CLSSFSILSFLTGNEFCERLAYYGIARNLVTYLKVKLHLGNLEAARNVTTWQGTCYLTPLIGAILADSYWGKYWTIAVFSSIYFIGLAILTLSASVPALQPPTCLGTVCPQASLLQYGVFFIGLYMIALGTGGIKPCVSSFGADQFDDSDPVERAKKTSFFNWFYFCISMGSFISGTIIVWIQDNSGWGIGFAIPTISMALAIGCFFAASNIYRYQKPGGSPLTRVCQVVVAAFHKHHAELPNDMSLLYEVDGQTSAIEGSRKLEHTNELKFLDRAAIISSADVKSESSTDPWKLCTVTQVEELKILVRMFPIWATTIIFSAVYAQNSSLFVEQGMVLDKQVGPFNIPPASLSTFDVISVIIWIPLYDRILVPIARKFTGKEKGFSELQRIGIGLVLSILAMVSAALVELKRLEVARSEGLIHEKVDVPMSILWQIPQYFLVGAAEVFTAIGQVDFFYDQGPDAMRSLCSAFALVTGSVGNYVSSIILTLVSYITTQGGGPGWIPDNLNEGHLDQFFWLIAGISFANLMVFLGCASRYRYKKVQ

SEQ ID NO: 70306 - protein, 80 aa, Setaria italica
  Transcript Sequence Number=SeqID_4332
  Gene Ontology: Mol. function=transporter activity; Cellular component= membrane; Biological process=oligopeptide transport
  Homolog annotation: Hit_ID=B6TVK5; Match level="QueryCoverage=83%, HitCoverage=11%, E-value=5e-28, Identity=83%"; Hit description =Peptide transporter PTR2
QRKGRIPRNRNNLELGLIICSIILTLVSYITTQGGDPGWIPDNLNEGHLDRFFWLIAGISFVNFVLFVGCASRYRYKKAQ

SEQ ID NO: 70307 - protein, 57 aa, Setaria italica
  Transcript Sequence Number=SeqID_4333
  Gene Ontology: Mol. function=phosphotransferase activity, alcohol group as acceptor; Biological process=cAMP biosynthetic process
  Homolog annotation: Hit_ID=C3SA58; Match level="QueryCoverage=87%, HitCoverage=9%, E-value=4e-14, Identity=72%"; Hit description =Uridine kinase
MFDALFPKQIMNISRGQRQVIHQLDNLTNLLHEHLVLTRQANAASRNGVLDIDSVIC

SEQ ID NO: 70308 - protein, 652 aa, Setaria italica
  Transcript Sequence Number=SeqID_4334
  Gene Ontology: Mol. function=phosphotransferase activity, alcohol group as acceptor; Cellular component=cytoplasm; Biological process =cAMP biosynthetic process
  Homolog annotation: Hit_ID=B9RE77; Match level="QueryCoverage=99%, HitCoverage=99%, E-value=0.0, Identity=74%"; Hit description=Uridine cytidine kinase I, putative
  Pfam annotation: Domain name=CYTH; Domain location=248-410; Score =89.2; E_value=1.4e-23; Accession=PF01928.13; Description=CYTH domain
  Pfam annotation: Domain name=PRK; Domain location=67-241; Score=61.0; E_value=4.4e-15; Accession=PF00485.10; Description=Phosphoribulokinase Uridine kinase family
  Pfam module annotation: Pfam domain module=CYTH::PRK; Domain location= 248-410::67-241
MEQHDSLADSPRRRYNLLRDKVQLVKRKDSNRYEIVRFHDPLSFEKGFFVVIRACQLLVQHNEGIIFVGVAGPSGAGKTVFTEKVVNFMPNVAVISMDNYNDATRIVDGNFDDPRLTDYDTLLENIHGLKEGRSVQVPIYDFKASCRTGYRTVDAPSSRIVIIEGIYALSEKLRPFMDLRVSVTGGVHFDLVKRVLRDIQRAGQEPEEIIHQISETVYPMYKAFIEPDLETAHIKIINKFNPFSGFQNPMYILKSSRSLTPEKIKAVLGDDHTESNEETYDIYLLPPGEDPEACQSYLRMRNREGKYNLMFEEWVTDNPFIISPRITFEVSVRLLGGLMALGYTIAAILKRSSRVFSDGKATIKIDWLEQLNRQYIQVQGRDRLYVKYVAEQLGLDGSYIPRTYIEQIQLEKLINDVMALPEDLKTKLSIDDELVSSPKEAFSRVSADRRNKLMKSGLSHSYSTHGDKNIVKLSKLTDSNRRFGGGRAPEPPAINQGAITQLSEQISTLNERMDEFTSRVEELNSKLTVKKHLPSQQNLALPNDACNGSTPTNLFVSQLGNGTLIPHSSSSNQLAKDSPMIEEIMNISRGQRQVIHQLDNLTNLLHEHLVLTRQANAASRNGVLDIDSVICPLICLTVASVGYFMFKGLSRG

SEQ ID NO: 70309 - protein, 274 aa, Setaria italica
  Transcript Sequence Number=SeqID_4335
  Gene Ontology: Mol. function=peptidyl-prolyl cis-trans isomerase activity; Cellular component=nucleus; Biological process=protein folding
  Homolog annotation: Hit_ID=Q6Q151; Match level="QueryCoverage=99%, HitCoverage=54%, E-value=1e-113, Identity=69%"; Hit description =Multidomain cyclophilin type peptidyl-prolyl cis-trans isomerase
  Pfam annotation: Domain name=Pro_isomerase; Domain location=2-162; Score=123.9; E_value=5.1e-34; Accession=PF00160.13; Description =Cyclophilin type peptidyl-prolyl cis-tr
MSVLIVTSVGDIEVDLHTDKCPLTTKNFLKLCKMKYYNGCLFHKVEKDFLAQTGDPTGTGTGGDSVYKYLYGDQARFFDDEIRPELRHSKTGTVAMASAGENCNASQFYITLRDEVDYLDDKHTVFGMVAEGFDTLTKINEAYVDDKGRPFKDIRIKHTYVLDDPFDDPPQLAELIPENSPTGKPRDEIAEERLEDSWVPLDETVAPEELEEMIRSKEAHTNAVILESLADIPDAEIKPPDNVLFVCKLNPVTQDEDLYTIFLVLELVTSAEIF

SEQ ID NO: 70310 - protein, 48 aa, Setaria italica
  Transcript Sequence Number=SeqID_4336
  Gene Ontology: Mol. function=metal ion binding
  Homolog annotation: Hit_ID=B6SXD0; Match level="QueryCoverage=97%, HitCoverage=42%, E-value=6e-16, Identity=85%"; Hit description=Zinc finger, C3HC4 type family protein
LSCKRTCPLCRVYVADENRHPVAVKHTGREALADDLVIWFSTVLVPGF

SEQ ID NO: 70311 - protein, 93 aa, Setaria italica
  misc_feature (22)..(22): Xaa can be any naturally occurring amino acid
  Transcript Sequence Number=SeqID_4337
  Subcellular localization annotation: CTP_CleavageSite=37; ConfidenceScore=5.36e-01
TPSPSPPPDSDLPFSLAAKHHXPPFHHLLPPPCPAARAARRRRPRPGTTGTGGAFRRGAEPAALDPISARGHQEGDRASDPGVARARSRPIPP

SEQ ID NO: 70312 - protein, 54 aa, Setaria italica
  Transcript Sequence Number=SeqID_4338
LRKDIGVTVNKLSEMFRYYDHAHYIPFFSLSGKSRLLKRMYRIFQGVTNFYNQA

SEQ ID NO: 70313 - protein, 152 aa, Setaria italica
  misc_feature (150)..(150): Xaa can be any naturally occurring amino acid
  Transcript Sequence Number=SeqID_4339
  Gene Ontology: Mol. function=calcium-dependent cysteine-type endopeptidase activity; Cellular component=intracellular; Biological process=proteolysis
  Homolog annotation: Hit_ID=Q6SSJ2; Match level="QueryCoverage=100%, HitCoverage=7%, E-value=6e-43, Identity=57%"; Hit description =Phytocalpain
GASASELNSPSGFFFGVSAISLAINMLFICKILFNVSGFDVDEYVRRSYKFAYSDCVEVAPVSCSPDPPDPSELYMTKSSRVKHLGLLYICSLLVLVLYSILYGLTSKEARWLGALTSVAVVILDWNLGLCSFRFELHKSRMIVLFVAGXSR

SEQ ID NO: 70314 - protein, 53 aa, Setaria italica
  Transcript Sequence Number=SeqID_4340
  Gene Ontology: Mol. function=catalytic activity; Biological process =trehalose biosynthetic process
  Homolog annotation: Hit_ID=B3VL85; Match level="QueryCoverage=81%, HitCoverage=11%, E-value=2e-13, Identity=79%"; Hit description =Trehalose-6-phosphate synthase 2 (Fragment)
MYHPRRIWLCLGFGFRVVALDPHFTKLNIDSIVNAYEISESRAILLDYDGTLV

SEQ ID NO: 70315 - protein, 100 aa, Setaria italica
  Transcript Sequence Number=SeqID_4341
  Gene Ontology: Mol. function=catalytic activity; Biological process =trehalose biosynthetic process
  Homolog annotation: Hit_ID=B3VL85; Match level="QueryCoverage=100%, HitCoverage=25%, E-value=1e-46, Identity=83%"; Hit description =Trehalose-6-phosphate synthase 2 (Fragment)
MNEAISMPEQEKHLRHEKHYRYVSSHDVAYWSKSFIQDLERACKDHFRRTCWGIGLGFGFRVVALDPHFTKLNIDSIVNAYEISESRAILLDYDGTLVPQ

SEQ ID NO: 70316 - protein, 56 aa, Setaria italica
  Transcript Sequence Number=SeqID_4342
MQTEARVGMAAATMDGGSAAAAAARRYTTQQQQAQPQLQHHQPQLGTVPHLLAGGV

SEQ ID NO: 70317 - protein, 88 aa, Setaria italica
  Transcript Sequence Number=SeqID_4343
  Pfam annotation: Domain name=Adeno_E3_CR2; Domain location=40-75; Score=11.7; E_value=0.032; Accession=PF02439.7; Description =Adenovirus E3 region protein CR2
  Pfam annotation: Domain name=SKG6; Domain location=34-71; Score=9.1; E_value=0.067; Accession=PF08693.2; Description=Transmembrane alpha -helix domain
  Pfam module annotation: Pfam domain module=Adeno_E3_CR2::SKG6; Domain location=40-75::34-71
AIMLLYRGYQTSASKTGWFVQLTETKAINSYILHGTGNTLSGGAVAGIVIACIVILIVGIWLVVIYYRRQKNEKGQITPLSRGFGPTW

SEQ ID NO: 70318 - protein, 121 aa, Setaria italica
  Transcript Sequence Number=SeqID_4344
  Gene Ontology: Mol. function=protein serine/threonine kinase activity; Biological process=protein amino acid phosphorylation
  Homolog annotation: Hit_ID=B6SWY5; Match level="QueryCoverage=100%, HitCoverage=38%, E-value=2e-43, Identity=74%"; Hit description=LysM receptor-like kinase
FIENGNLSQHLHGTGYEPLSWTSRERIALDSARGLEYIHEHTVPVYVHRDIKSANILIDKDLRAKVETFHENRPCLSHLMCNINGTLQVADFGLTKLTEIGTASRSLPTRVVGTFGYMPPE

SEQ ID NO: 70319 - protein, 457 aa, Setaria italica
  Transcript Sequence Number=SeqID_4345
  Gene Ontology: Mol. function=protein serine/threonine kinase activity; Biological process=protein amino acid phosphorylation
  Homolog annotation: Hit_ID=Q6ZD33; Match level="QueryCoverage=94%, HitCoverage=70%, E-value=1e-140, Identity=57%"; Hit description =Receptor protein kinase PERK1-like protein
  Pfam annotation: Domain name=LysM; Domain location=33-78; Score=8.8; E_value=0.074; Accession=PF01476.12; Description=LysM domain
  Pfam annotation: Domain name=Pkinase; Domain location=303-456; Score=- 29.5; E_value=9.8e-07; Accession=PF00069.17; Description=Protein kinase domain
  Pfam annotation: Domain name=Pkinase_Tyr; Domain location=303-456; Score=-9.9; E_value=4.5e-13; Accession=PF07714.9; Description =Protein tyrosine kinase
  Pfam annotation: Domain name=SKG6; Domain location=221-258; Score =12.9; E_value=0.025; Accession=PF08693.2; Description=Transmembrane alpha-helix domain
  Pfam module annotation: Pfam domain module=LysM::Pkinase::Pkinase _Tyr::SKG6; Domain location=33-78::303-456::303-456::221-258
MLPLLLLVAGAASTAAASGDGCRVGCPLALAAYYFTAESNLTFIASLFNFPDYTALLPYNPNITDPNYIVTGARISVPFTCSCLALPADPTSTYLAGSIPSNLSRGESYGDVAAEFANLTTAAWLKATNRYPADKLPASGTIDATINCSCGDKSVSPRYGLFLTYPLWDGETLASAAEQYGFSSPAQMDLLRRYNPGMGGVSGKGIVFIPVKDTNGSYRPLESGNTLSGGAVAGIVIACIVILIVGIWLVVIYYRRQKMRKAKSLPCPEDSVQLGSASQAEGIKVNRSIQFSYEELCDATHNFSMEHKIGQGGFGSVYYAELRGEKAAIKKMDAKATQEFLAELKVLTHVHHLNLVHLIGYCVENCLFLVYEFIENGNLSQHLHGTGYEPLSWTSRERIALDSARGLEYIHEHTVPVYVHRDIKSANILIDKDLRAKVADFGLTKLTEIGTASRSLP

SEQ ID NO: 70320 - protein, 61 aa, Setaria italica
  Transcript Sequence Number=SeqID_4346
CAYSCDSIFLLKDNQKKAARSLFIFAIKLPWSRFVSLIYIVSSLIPSSRLHPYILLVVFTQ

SEQ ID NO: 70321 - protein, 60 aa, Setaria italica
  Transcript Sequence Number=SeqID_4347
GNFCSLCLCKGNLVLSMSSIVIIDELNHLVLYCLAITSLVSTSHQFMNAKSLDWLVLTSF

SEQ ID NO: 70322 - protein, 140 aa, Setaria italica
  Transcript Sequence Number=SeqID_4348
  Homolog annotation: Hit_ID=Q10CF8; Match level="QueryCoverage=79%, HitCoverage=43%, E-value=9e-43, Identity=78%"; Hit description =Transmembrane ARV1-like family protein, putative
  Pfam annotation: Domain name=Arv1; Domain location=16-133; Score= -83.0; E_value=0.01; Accession=PF04161.5; Description=Arv1-like family
RIISFSKGNRADGASSRSIFSTIFNCIEVIGDALLGNIVFMVMLFLGVRFILKLSFDITRYREVLFAVIISSYFKLLFTMMVWEFPSSVILIVEMFVLSSNVVALRVVSQFPKAHCFGACFMAHAAKFLTERWILGTPGA

SEQ ID NO: 70323 - protein, 59 aa, Setaria italica
  Transcript Sequence Number=SeqID_4349
  Homolog annotation: Hit_ID=Q10CF8; Match level="QueryCoverage=96%, HitCoverage=22%, E-value=2e-18, Identity=75%"; Hit description =Transmembrane ARV1-like family protein, putative
VWEFPSSVILIVEMFVLSSNVVALRVVSQFPKAHCFGACFMAHAAKFLTERWILGTPGA

SEQ ID NO: 70324 - protein, 50 aa, Setaria italica
  Transcript Sequence Number=SeqID_4350
  Gene Ontology: Mol. function=ribonucleoside-diphosphate reductase activity; Cellular component=ribonucleoside-diphosphate reductase complex; Biological process=oxidation reduction
  Homolog annotation: Hit_ID=B2M117; Match level="QueryCoverage=100%, HitCoverage=6%, E-value=2e-23, Identity=100%"; Hit description =Ribonucleoside-diphosphate reductase
MYVVKRDGRQETVHFDKITARLKKLSYGLSQEHCDPVLVAQKVCAGVYKG

SEQ ID NO: 70325 - protein, 48 aa, Setaria italica
  Transcript Sequence Number=SeqID_4351
  Gene Ontology: Mol. function=ribonucleoside-diphosphate reductase activity; Cellular component=ribonucleoside-diphosphate reductase complex; Biological process=oxidation reduction
  Homolog annotation: Hit_ID=B2M117; Match level="QueryCoverage=100%, HitCoverage=5%, E-value=4e-22, Identity=100%"; Hit description =Ribonucleoside-diphosphate reductase
MYVVKRDGRQETVHFDKITARLKKLSYGLSQEHCDPVLVAQKVCAGVY

SEQ ID NO: 70326 - protein, 99 aa, Setaria italica
  misc_feature (4)..(4): Xaa can be any naturally occurring amino acid
  Transcript Sequence Number=SeqID_4352
  Gene Ontology: Mol. function=protein binding
  Homolog annotation: Hit_ID=B3VTC5; Match level="QueryCoverage=100%, HitCoverage=10%, E-value=3e-21, Identity=47%"; Hit description =Cf2/Cf5-like disease resistance protein
LGPXFPSWIRWQRSINVLDISNATIYDNVPDWLWVVVSTASFLDMSKNLLSGTLPASLEMLAAEMVDLSSNRFAGPVPRFPRNVMYLDLSRNNLSGTLP

SEQ ID NO: 70327 - protein, 121 aa, Setaria italica
  Transcript Sequence Number=SeqID_4353
  Pfam annotation: Domain name=RPAP1_N; Domain location=80-121; Score =45.7; E_value=1.8e-10; Accession=PF08621.2; Description=RPAP1-like, N-terminal
IRRWLLRQLGGGELDGGAMQIDSGNAREGPGAAISVSDVVSKKPLNQAESRVGLVKAGEVRNSALQGERMELDGGESSMEAEISAENMARLAGMSAGEIVEAQADIINKMNPALVEMLRRR

SEQ ID NO: 70328 - protein, 77 aa, Setaria italica
  Transcript Sequence Number=SeqID_4354
IRVLPEFIEKVITCDGGPAKAPKATSAAELCSTPELKRHYAQLVGPRSRPWSPRLETIAESDRSRWLRSPARMLSSR

SEQ ID NO: 70329 - protein, 30 aa, Setaria italica
  Transcript Sequence Number=SeqID_4355
NKIYLTDIFSIRMLIVVDAADHLERYTYSD

SEQ ID NO: 70330 - protein, 50 aa, Setaria italica
  misc_feature (34)..(34): Xaa can be any naturally occurring amino acid
  Transcript Sequence Number=SeqID_4356
  Gene Ontology: Mol. function=adenosylmethionine decarboxylase activity; Biological process=spermidine biosynthetic process
  Homolog annotation: Hit_ID=Q6KC47; Match level="QueryCoverage=72%, HitCoverage=11%, E-value=4e-10, Identity=80%"; Hit description=S -adenosylmethionine decarboxylase (Fragment)
  Pfam annotation: Domain name=AdoMetDC_leader; Domain location=1-50; Score=98.8; E_value=1.9e-26; Accession=PF08132.3; Description=S -adenosyl-l-methionine decarboxylase
MESKGGKKSSSSRSMMYEAPLGYSIEDVRPAGGXKKFQSAAYSNCAKKPS

SEQ ID NO: 70331 - protein, 42 aa, Setaria italica
  Transcript Sequence Number=SeqID_4357
DWGRCRFAAELIFFLLKIVRRLSFGYCVKQPSQAIYYENDRL

SEQ ID NO: 70332 - protein, 195 aa, Setaria italica
  misc_feature (36)..(36): Xaa can be any naturally occurring amino acid
  misc_feature (119)..(119): Xaa can be any naturally occurring amino acid
  misc_feature (127)..(127): Xaa can be any naturally occurring amino acid
  misc_feature (172)..(172): Xaa can be any naturally occurring amino acid
  Transcript Sequence Number=SeqID_4358
  Gene Ontology: Mol. function=metallopeptidase activity; Cellular component=plasma membrane; Biological process=proteolysis
  Homolog annotation: Hit_ID=Q9SN00; Match level="QueryCoverage=95%, HitCoverage=22%, E-value=7e-37, Identity=42%"; Hit description =Aminopeptidase-like protein
ITTSLNIAEMIAVAAPEELVNLKKFLIDFLEPFAQXLGWDSKSGEGHLNALLRGTLLTALAELGHEATINEAVRRFNVYLEDRETPLLPPDVRKAAYVALMQTANKSNKTGYESLLKIXKKKSRILXSQEKVRVLGSLASCPDPVVVREALDFILSPEVRNQDAIFLLRGVXQGAHEVAWQWLKENWGLHIGSLL

SEQ ID NO: 70333 - protein, 82 aa, Setaria italica
  Transcript Sequence Number=SeqID_4359
  Subcellular localization annotation: CTP_CleavageSite=45; ConfidenceScore=5.37e-01
EKKITQQQIDTFPSLTQQARRPSPPWLIFSAGRKRMPWRRRTACLLSKTGEGDDLLLSLFFFLNVAIVVWLLCEAAKPGYLL

SEQ ID NO: 70334 - protein, 139 aa, Setaria italica
  Transcript Sequence Number=SeqID_4360
  Gene Ontology: Mol. function=adenosylmethionine decarboxylase activity; Biological process=spermidine biosynthetic process
  Homolog annotation: Hit_ID=Q6KC47; Match level="QueryCoverage=25%, HitCoverage=11%, E-value=6e-11, Identity=86%"; Hit description=S -adenosylmethionine decarboxylase (Fragment)
  Pfam annotation: Domain name=AdoMetDC_leader; Domain location=91-139; Score=94.6; E_value=3.6e-25; Accession=PF08132.3; Description=S -adenosyl-l-methionine decarboxylase
RRHKPSRASVPSPRPRAEEEAAPAPPRLASPPHYNLCSARAHHKNTGGVLLRSVSLSAGPSKKPAAGLVSAPPPAAFLQTFRKGTIVDALMESKGGKKSSSSNFMYEAPLGYKIEDVRPAGGIKKFQSAAYSNCVRKPS

SEQ ID NO: 70335 - protein, 132 aa, Setaria italica
  Transcript Sequence Number=SeqID_4361
  Gene Ontology: Mol. function=adenosylmethionine decarboxylase activity; Biological process=spermidine biosynthetic process
  Homolog annotation: Hit_ID=O24575; Match level="QueryCoverage=84%, HitCoverage=28%, E-value=2e-43, Identity=76%"; Hit description=S -adenosylmethionine decarboxylase beta chain
VNRDLRTPTALRPNGRTYVERRVLRCFGPSEFSVAVTIFGGRGQAATWGMKLDAEVYDCNNMVEQELPGGVLIYQSFSVTEDAIVGSPKSVLHCFEGENLENAAPVKDGKLANLLCWEEEDAMEEKDGVLAE

SEQ ID NO: 70336 - protein, 750 aa, Setaria italica
  misc_feature (202)..(202): Xaa can be any naturally occurring amino acid
  Transcript Sequence Number=SeqID_4362
  Gene Ontology: Mol. function=metallopeptidase activity; Cellular component=plasma membrane; Biological process=proteolysis
  Homolog annotation: Hit_ID=B9RQT2; Match level="QueryCoverage=99%, HitCoverage=85%, E-value=0.0, Identity=65%"; Hit description =Puromycin-sensitive aminopeptidase, putative
  Pfam annotation: Domain name=DUF2268; Domain location=115-235; Score=- 31.4; E_value=0.077; Accession=PF10026.1; Description=Predicted Zn -dependent protease (DUF226
  Pfam annotation: Domain name=Peptidase_M1; Domain location=1-274; Score=335.9; E_value=8.1e-98; Accession=PF01433.12; Description =Peptidase family M1
  Pfam module annotation: Pfam domain module=DUF2268::Peptidase_M1; Domain location=115-235::1-274
YELNGEKKNMAVTQFEPADARRCFPCWDEPAFKAVFKITLEVPSETVALSNMPVIEEKVNGPTKVVYFQESPIMSTYLVAVIVGIFDYVEAFTTDGTRVRVYTQVGKSAQGKFALEVALKTLVLFKEYFAVPYPLPKMDMIAIPDFASGAMENYGLVTYRETALLFDEKHSAAANKQRVAVVVAHELAHQWFGNLVTMEWWXTHLWLNEGFATWVSYLAADQFFPEWNVWTQFLEESTTGFKLDALAGSHPIEVDINHVDEIDEIFDAISYRKGASVIRMLQSYLGAEVFQKSLAAYIKRFAYSNAKTEDLWAALEEGSGEPVRTLMHSWTKQQGYPVVSVKFKDGKLQLEQTQFLSSGSTGVGQWVVPITLCCCSYSRQEKFLFHGKQEDFGLCGLMECKQKDDFWIKLNVNQTSFYRVSYDEELASRLRYAIETNKLSAADRYGVLDDAYALCMAGKQKLVSLLHLIAAFKDETEYTVLAHVITTSLNIAEMIAVAAPEELVNLKKFLIDFLEPFAQKLGWDSKSGEGHLNALLRGTLLTALAELGHEATINEAVRRFNVYLEDRETPLLPPDVRKAAYVALMQTANKSNKTGYESLLKIYRESDLSQEKVRVLGSLASCPDPVVVREALDFILSPEVRNQDAIFLLRGVCSGAHEVAWQWLKENWDYILGAYSGTLLTYFVNITVSPLATDEKGDEVEEFFKSRTKASIARTVKQSIERVRINAQWVKSIKGEADLSNVIKALAHKN

SEQ ID NO: 70337 - protein, 98 aa, Setaria italica
  misc_feature (23)..(23): Xaa can be any naturally occurring amino acid
  Transcript Sequence Number=SeqID_4363
  Gene Ontology: Mol. function=transferase activity; Biological process= D-ribose metabolic process
  Homolog annotation: Hit_ID=B9T5V5; Match level="QueryCoverage=61%, HitCoverage=15%, E-value=7e-16, Identity=70%"; Hit description =Kinase, putative
GADIVYFDVRLPDTALLVAEECXASQRKIPILIDAERKREGLDELLNFASYVVCSAKLPQVSCLIAEECNVKSITAKSYSRPFQFTVLRFYYNYIVLD

SEQ ID NO: 70338 - protein, 197 aa, Setaria italica
  Transcript Sequence Number=SeqID_4364
  Gene Ontology: Mol. function=transferase activity; Biological process= D-ribose metabolic process
  Homolog annotation: Hit_ID=B9T5V5; Match level="QueryCoverage=98%, HitCoverage=53%, E-value=3e-66, Identity=63%"; Hit description =Kinase, putative
RIISKVANDAQGRNVLKELQDDGIDTSFMLVAEDGNTPFTYIIVDNQTKTRTCIHTPGYPPMSPEELTKENLSAALDGADIVYFDVRLHDTALVASQRKIPILIDAEKKREGLDELLNFASYVVCSAKLPQAWTGASSIPIALVSMLSRLPNIKFVIVTLGEKGCLMLERSMTDASEAGEIDVEALFESLQNQVDQD

SEQ ID NO: 70339 - protein, 129 aa, Setaria italica
  Transcript Sequence Number=SeqID_4365
IECLHFSWLRQNLYLFFVNIMLSIVKLERKQSLSLLYCSLYSLIYLYECMLCNYRNPMHGVVVRKALPSAQIGVSAMVKLCVAICSWIITIEFCDWQRKFHHADILNHWHVLSSFSLLLSCGFYSFQLL

SEQ ID NO: 70340 - protein, 320 aa, Setaria italica
  misc_feature (197)..(197): Xaa can be any naturally occurring amino acid
  misc_feature (234)..(234): Xaa can be any naturally occurring amino acid
  Transcript Sequence Number=SeqID_4366
  Gene Ontology: Mol. function=transferase activity; Biological process= D-ribose metabolic process
  Homolog annotation: Hit_ID=B9T5V5; Match level="QueryCoverage=96%, HitCoverage=95%, E-value=7e-92, Identity=51%"; Hit description =Kinase, putative
  Pfam annotation: Domain name=PfkB; Domain location=9-312; Score=69.7; E_value=1.1e-17; Accession=PF00294.16; Description=pfkB family carbohydrate kinase
  Subcellular localization annotation: CTP_CleavageSite=56; ConfidenceScore=5.02e-01
MASASATDTPNPIVLGCGAASVDYLATVASFPNPDDKIRSLSLKVQGGGNTGNALTAAARLGLRPRIISKVSSQRNVLKELQDDGIDTSFMLVAEDGKTPFTYIIVDNQTKTRTCIHTPGYPPMSPEELTKENLSAALDGADIVYFDVRLHDTALVVAQEASQRKIPILIAAEKKREGLAELLNFASYVVCSAKFPXDAFEAEEIDVEALLDSLEKKVEQSSHTPNCITSKANXRISADGVGSISGRLLLGAAEVIPPDELIDTTGAGDAFIGAVLYGLCTSMPPERMLPFAAQVAGCGCRGLGARSSLPHRTDPRLAGY

SEQ ID NO: 70341 - protein, 409 aa, Setaria italica
  misc_feature (208)..(208): Xaa can be any naturally occurring amino acid
  misc_feature (239)..(239): Xaa can be any naturally occurring amino acid
  Transcript Sequence Number=SeqID_4367
  Gene Ontology: Mol. function=transferase activity; Biological process= D-ribose metabolic process
  Homolog annotation: Hit_ID=B9T5V5; Match level="QueryCoverage=88%, HitCoverage=95%, E-value=1e-120, Identity=61%"; Hit description =Kinase, putative
  Pfam annotation: Domain name=PfkB; Domain location=50-401; Score =92.2; E_value=1.8e-24; Accession=PF00294.16; Description=pfkB family carbohydrate kinase
  Subcellular localization annotation: CTP_CleavageSite=41; ConfidenceScore=5.43e-01
MVPCAQQLQLPTAPLHTPCRQAGRWDFPLPRPRRRPRRAIAAAMASGSANPVVLGCGGIAVDYLATVASFPNPDDKIRSLELKVQGGGNTGNALTAAARLGLRPRIISKVANDAQGRNILSELRADGIDTSYILVAENGNSPFTYIIVDEQTKTRTCIHTPGSPPMVPEELTKANLSSALDGADIVYFDVRLPDTALLVAEECRQVKXPILIDAERKREGLDELLNFASYVVCSAKFPXHAAAYAWTGASSIPIALVSMLSRLPNIKFVIVTLGEKGCLMLERSMTDASEAGEIDVEALFESLQNQVDQDSTMPKCIASKSNLRISADGVGSISGRLLLGTAEVIPPGELIDTTGAGDAFIGAVLYALCTGMPPERMLPFAAQVAGCGCRGLGARSSLPCRTDPRLADY

SEQ ID NO: 70342 - protein, 84 aa, Setaria italica
  Transcript Sequence Number=SeqID_4368
SQNSPPVHPHPPRLRILSKCPQTSSSIRWFHLPRLQSQGQETPPEGHHHSCRRPLFSPPPCCFGSWHHHRPRPQHGPWLERERA

SEQ ID NO: 70343 - protein, 63 aa, Setaria italica
  Transcript Sequence Number=SeqID_4369
EGRGASSSVCEDAPSKSSSLLFLGFDGTPLEEFFRLLTSRVPWRSTSERILQVGYHQSPKSSS

SEQ ID NO: 70344 - protein, 442 aa, Setaria italica
  misc_feature (9)..(9): Xaa can be any naturally occurring amino acid
  Transcript Sequence Number=SeqID_4370
  Gene Ontology: Mol. function=zinc ion binding; Cellular component=PML body; Biological process=negative regulation of fibroblast proliferation
  Homolog annotation: Hit_ID=B9T2L4; Match level="QueryCoverage=79%, HitCoverage=46%, E-value=1e-120, Identity=58%"; Hit description=Zinc finger protein, putative
  Pfam annotation: Domain name=zf-CW; Domain location=289-334; Score =19.8; E_value=6.2e-05; Accession=PF07496.7; Description=CW-type Zinc Finger
FLSQSFNEXKDNLEIPVVTYRKEGQYMEVDLSVQSEATAEYNLSAIKEFSSFNEYFIGEKLGLFGEERTGTQIYIWNLDRWGNDYTLEWNSGKSSENPVHNGRGDILIRSRRIRSRPGQTSNKVLLDYSLQSYLEVMFLNPRMKISVQGSLVKSRPLAKTLNKTSVMSGEIMGRTILLTLGRSKVEWDRTNCGIFLYWHGRLIESYKRVGGQKHSADVGRGVIGVADITNLIDDEDGNSWVLNSKQGFQDCEIYAKLEEWLGRKVDEYWDTKFDNLELRKRDEHHKPDCDWVQCCSCRKWRVLNAGFNTDTLPVEWFCYMSPFNGKCEVPEQQMGRGVIVIGEKRSGNDEQNKTTQQGETPKKEMRPENLEVEKIVQDEDAKNVQGTLEVNKRKNSSSGVPSKPKNNSDDDFEGASSQTEDDAPRPTLKRLRRGPAAKTYKC

SEQ ID NO: 70345 - protein, 356 aa, Setaria italica
  Transcript Sequence Number=SeqID_4371
  Gene Ontology: Mol. function=phosphoenolpyruvate carboxylase activity; Cellular component=cytoplasm; Biological process=carbon utilization by fixation of carbon dioxide
  Homolog annotation: Hit_ID=P29194; Match level="QueryCoverage=98%, HitCoverage=36%, E-value=0.0, Identity=97%"; Hit description =Phosphoenolpyruvate carboxylase 2
  Pfam annotation: Domain name=PEPcase; Domain location=13-356; Score =50.9; E_value=4.9e-12; Accession=PF00311.9; Description =Phosphoenolpyruvate carboxylase
MAALGAKVERLSSIDAQLRMLVPGKVSEDDKLIEYDALLLDRFLDILQDLHGDDLKEMVQECYEVAAEYETKHDLQKLDELGKMITSLDPGDSIVMAKAFSHMLNLANLAEEVQIAYRRRIKLKKGDFADENSAITESDIEETLKRLVVDLKKSPAEVFDALKSQTIDLVFTAHPTQSVRRSLLQKHSRIRNCLVQLYSKDITPDDKQELDEALQREIQAAFRTDEIRRTQPTPQDEMRAGMSYFHETIWKGVPKFLRRVDTALKNIGINERVPYNAPLIQFSSWMGGDRDGNPRVTPEVTRDVCLLARMMAANLYCSQIEDLMFELSMWRCNDELRIRADELHRSTKKDAKHYIE

SEQ ID NO: 70346 - protein, 679 aa, Setaria italica
  Transcript Sequence Number=SeqID_4372
  Gene Ontology: Mol. function=phosphoenolpyruvate carboxylase activity; Cellular component=cytoplasm; Biological process=carbon utilization by fixation of carbon dioxide
  Homolog annotation: Hit_ID=P29194; Match level="QueryCoverage=97%, HitCoverage=68%, E-value=0.0, Identity=92%"; Hit description =Phosphoenolpyruvate carboxylase 2
  Pfam annotation: Domain name=PEPcase; Domain location=1-679; Score =1379.6; E_value=0; Accession=PF00311.9; Description=Phosphoenolpyruva te carboxylase
KKPKGNLKQTLRKTEYRRLARMMAANLYCSQIEDLMFELSMWRCNDELRIRADELHRSTKKDAKHYIEFWKKVPPNEPYRVILSDVRDKLYNTRERSRELLSSGHSDVPEEATLTSIEQLLEPLELCYRSLCACGDRVIADGSLLDFLRQVSTFGLSLVRLDIRQESDRHTDVLDAITTYLGIGSYREWPEERRQEWLLSELNGKRPLFGPDLPKTEEVADVLDTFHVIAELPADNFGAYIISMATAPSDVLAVELLQRECHVKTPLRVVPLFEKLADLEAAPAALARLFSIDWYRQRMNGKQEVMIGYSDSGKDAGRLSAAWQLYKAQEELIKVAKDFGVKLTMFHGRGGTVGRGGGPTHLAILSQPPDTIHGSLRVTVQGEVIEQSFGEEHLCFRTLQRFTAATLEHGMRPPNAPKPEWRALLDEMAVVATEEYRSIVFKEPRFVEYFRLATPETEYGRMNIGSRPSKRKPSGGIESLRAIPWIFAWTQTRFHLPVWLGFGAAFKHVLQKDIRNLHMLQEMYNEWPFFRVTIDLVEMVFAKGNPGIAALYDKLLVSEDLQPLGEKLRANYEETQKLLLQVAGHRDLLEGDLYLKQRLRLRDAYITTMNVCQAYTLKRIRDPDYHVALRPHLSKEIMDSSKPAAELVKLNPASEYAPGLEDTLILTMKGIAAGLQNTG

SEQ ID NO: 70347 - protein, 345 aa, Setaria italica
  misc_feature (331)..(331): Xaa can be any naturally occurring amino acid
  Transcript Sequence Number=SeqID_4373
  Gene Ontology: Mol. function=mannosyltransferase activity; Cellular component=endoplasmic reticulum; Biological process=transport
  Homolog annotation: Hit_ID=O82244; Match level="QueryCoverage=94%, HitCoverage=74%, E-value=3e-96, Identity=56%"; Hit description=Not56- like protein
  Pfam annotation: Domain name=ALG3; Domain location=1-302; Score =417.0; E_value=3e-122; Accession=PF05208.5; Description=ALG3 protein
SAIKFLTGGQVFPAQILFGVLYIVNLSLVLLLYVKAEVLPWWALGLLCLSKRVHSIFVLRLFNDCFAMTLLHAAMALIIYHKWYLGLIVFSGAVSVKMNVLLFAPSLLLLMVKAMSIKGVFFALLGAAVVQVLLGMPFLLSHPVEYISRAFNLGRVFIHFWSVNFKFVPEKLFVSKELAIALLILHLTTLLVFAHYKWLKHEGGLFGFLHSRFKNTKSIQQLVSSQPRPSILSKEHIVTVMFVGNFIGIVCARSLHYQFYSWYFYSLPFLLWKTHFPTPLRIILFLGVELCWNIYPSTAYSSLLLLFLHVSILLGIWFSRTEYPYINKSTXETYQEVVSQCEASF

SEQ ID NO: 70348 - protein, 389 aa, Setaria italica
  Transcript Sequence Number=SeqID_4374
  Gene Ontology: Mol. function=drug transporter activity; Cellular component=membrane; Biological process=multidrug transport
  Homolog annotation: Hit_ID=Q2RB46; Match level="QueryCoverage=100%, HitCoverage=78%, E-value=1e-173, Identity=76%"; Hit description=MATE efflux family protein, expressed
  Pfam annotation: Domain name=MatE; Domain location=161-324; Score =122.0; E_value=2e-33; Accession=PF01554.10; Description=MatE
YGAKQYHMLGIYLQRSWIILFACAIALLPVYLFTEPLLIALGQDPKISAVAGVISLWYIPVMLSYVWSFTLQMYLQAQSKNMIITYLAMLNLGLHLALSWLMTVKFKLGLAGVMGSMVIAMWIPVFGQLAFVFCGGCPLTWTGFSSAALTDLGSIIKLSLSSGVMLCLELWYNTILVLLTGYMKNAEIALDALSCCLNINGWEMMISLGFLAATGVRVANELGAGSATRAKFAIYNVVITSSLIGFVLFVLFLFFRGSLAYIFTESRAVADAVADLSPLLAFSILLNSVQPVLSGVAVGAGWQSVVAYVNITSYYLIGIPLGAVLGYVVGYHVKGIWIGMLLGTLVQTIVLLFITLKTDWEKQVALAQERLKRWYMDENKRLVGSRGNA

SEQ ID NO: 70349 - protein, 127 aa, Setaria italica
  Transcript Sequence Number=SeqID_4375
  Gene Ontology: Cellular component=plasma membrane
INISREIQADIKIHNQNILPSSIDLTNIAASIYSTELCKRLKGFLSSSPPSRPLQHVAELIIATADFERDLDSWQVRPVHGGVVSRELFHDYIMVWIEDTRLHLLDNCKAEKTSCPAVSTISPFVEQ

SEQ ID NO: 70350 - protein, 130 aa, Setaria italica
  Transcript Sequence Number=SeqID_4376
  Gene Ontology: Mol. function=1,3-beta-glucan synthase activity; Cellular component=1,3-beta-glucan synthase complex; Biological process=1,3-beta-glucan biosynthetic process
  Homolog annotation: Hit_ID=Q8LRM6; Match level="QueryCoverage=100%, HitCoverage=35%, E-value=4e-69, Identity=98%"; Hit description=Beta -1,3 glucan synthase (Fragment)
AVLTVYVFLYGRLYLVLSGLERSILQDPNIQNIKPFENALATQSVFQLGMLLVLPMMMEVGLEKGFGRALAEFVIMQLQLAPVFFTFHLGTKTHYYGRTILHGGAKYRATGRGFVVRHAKYAENYRMYSR

SEQ ID NO: 70351 - protein, 130 aa, Setaria italica
  Transcript Sequence Number=SeqID_4377
PNDHAMDHLVSFELTVEDVARCLEKKTAISGDSATASFHLAPTSSGDHKRESNDTRAGLYVDETYHDLPEKARRSLSLRLAKEFNFNNVDAANVEPSVGSDWWANEKVAGITSEPEKGWSFHPVAAPGVS

SEQ ID NO: 70352 - protein, 119 aa, Setaria italica
  Transcript Sequence Number=SeqID_4378
  Gene Ontology: Mol. function=nucleoside-triphosphatase activity; Biological process=proteolysis
  Homolog annotation: Hit_ID=B9S6V1; Match level="QueryCoverage=98%, HitCoverage=60%, E-value=3e-49, Identity=77%"; Hit description=ATP binding protein, putative
  Pfam annotation: Domain name=DUF265; Domain location=47-119; Score =30.9; E_value=2.7e-09; Accession=PF03266.7; Description=Protein of unknown function, DUF265
  Subcellular localization annotation: CTP_CleavageSite=48; ConfidenceScore=5.22e-01
MAGAPSRCLFVTGPPGVGKTTLVMRVFEALRASLPNLTIRGFYTREVRESGERVGFEVVTLDGRSGPLASSKVSSPESVRWPTVGKYKVDVASLESLALPELQVKEDTDLFIIDEVGKM

SEQ ID NO: 70353 - protein, 49 aa, Setaria italica
  Transcript Sequence Number=SeqID_4379
SHPSSTLISLQARDDQTTARRRHMILFASLLSSLECMVRRGGQPLRLPL

SEQ ID NO: 70354 - protein, 455 aa, Setaria italica
  Transcript Sequence Number=SeqID_4380
  Gene Ontology: Mol. function=protein tyrosine kinase activity; Cellular component=integral to membrane; Biological process=protein amino acid phosphorylation
  Homolog annotation: Hit_ID=Q5QM36; Match level="QueryCoverage=29%, HitCoverage=35%, E-value=9e-66, Identity=90%"; Hit description =Serine/threonine-specific protein kinase NPK15-like
  Pfam annotation: Domain name=LRRNT_2; Domain location=29-69; Score =36.4; E_value=1.1e-07; Accession=PF08263.4; Description=Leucine rich repeat N-terminal domain
  Pfam annotation: Domain name=LRR_1; Domain location=120-142; Score =15.4; E_value=0.25; Accession=PF00560.25; Description=Leucine Rich Repeat
  Pfam annotation: Domain name=LRR_1; Domain location=144-167; Score =2.9; E_value=85; Accession=PF00560.25; Description=Leucine Rich Repeat
  Pfam annotation: Domain name=LRR_1; Domain location=72-94; Score=1.1; E_value=1.9e+02; Accession=PF00560.25; Description=Leucine Rich Repeat
  Pfam annotation: Domain name=LRR_1; Domain location=96-118; Score =15.4; E_value=0.24; Accession=PF00560.25; Description=Leucine Rich Repeat
  Pfam module annotation: Pfam domain module=LRRNT_2::LRR_1::LRR_1::LRR_ 1::LRR_1; Domain location=29-69::120-142::144-167::72-94::96-118
MWRMDGFISSCMVLVALALHLAVDGCSAVNFEGSALLKFQSRVEDPHGAMAGWSPRDGDPCNWDSVRCVDGRVVMLNLKDLSLRGTLGPELGTLTHLRALVLSNNLFSGPIPKELSALAMLEILDLSNNNLSGEVPQEIAEMQSLKHLLLFNNSFRWPLIQNSYGNFNQENDFDIYDYPGRGNMNQRAENGFESASSSEENKKDTSNLSAQLPSQYAARNPAAQFSQRRLLQDSNLAAPSSANAPVPAAAPVPSTGTGSFSAFSPNSAPAPAVNPPGSPPMVPSTTTEEVPKRRSIKWLYVVLPLVALLLIGITCMLLLCRNKSGTTIGPFKTGLSGQLQKAFVTGVPKLQRSELEGACEDFSNIVASYPQYTVYKGTLSSGVEIAVVSTMITSSKDWSKYSEGRFRKKIDSLSRINHKNFINLLGYCEEEEPFMRMMVMEYAPNGTLYEHLMLR

SEQ ID NO: 70355 - protein, 112 aa, Setaria italica
  Transcript Sequence Number=SeqID_4381
  Subcellular localization annotation: CTP_CleavageSite=65; ConfidenceScore=5.61e-01
MDAVLPPLLVGGGLSVSVSVSTATRAISAFHLSPSALRSTARHRGRHRSPVLATASESPSTPLAAAMAESHSRFSRWVVVMDRPPAAAGGSGVSRAKPRICASAPLSHSPQP

SEQ ID NO: 70356 - protein, 39 aa, Setaria italica
  Transcript Sequence Number=SeqID_4382
TLKSSQYVNIHNRKNKGTKQSKLFNSNKGAKLYDLQLKI

SEQ ID NO: 70357 - protein, 142 aa, Setaria italica
  misc_feature (29)..(29): Xaa can be any naturally occurring amino acid
  misc_feature (88)..(88): Xaa can be any naturally occurring amino acid
  Transcript Sequence Number=SeqID_4383
  Homolog annotation: Hit_ID=Q2EN88; Match level="QueryCoverage=100%, HitCoverage=66%, E-value=7e-55, Identity=65%"; Hit description =Guanylyl cyclase-like protein
  Pfam annotation: Domain name=Guanylate_cyc_2; Domain location=45-142; Score=44.7; E_value=2e-13; Accession=PF09778.1; Description=Guanylyl cyclase
MWPLCIISEKLFKMAGDDDGGGQGPGSPXPTARIPLARRSYYVDVPHVQQAFTWDCGLACVLMVLRTLGIDCCDGIADLERLCRTTRXQLEEDIDRVDELFGKALDAGISIQCRSISAYEIAFLLLSGHCIAIALVDKSKLK

SEQ ID NO: 70358 - protein, 53 aa, Setaria italica
  Transcript Sequence Number=SeqID_4384
  Homolog annotation: Hit_ID=Q2EN85; Match level="QueryCoverage=100%, HitCoverage=19%, E-value=1e-19, Identity=84%"; Hit description =Guanylyl cyclase
MNGVHDVQQLNEDSDYMGHYVIICGYDADDCEFEIRDPASSRKRERVTMKSLD

SEQ ID NO: 70359 - protein, 50 aa, Setaria italica
  Transcript Sequence Number=SeqID_4385
  Homolog annotation: Hit_ID=Q2EN85; Match level="QueryCoverage=76%, HitCoverage=14%, E-value=8e-14, Identity=92%"; Hit description =Guanylyl cyclase
RFLVCSVWTVDLAYLLNKFAVSFSFFTVTIGANPQYSAETFYRVHVLTNF

SEQ ID NO: 70360 - protein, 172 aa, Setaria italica
  misc_feature (155)..(155): Xaa can be any naturally occurring amino acid
  Transcript Sequence Number=SeqID_4386
  Homolog annotation: Hit_ID=Q2EN88; Match level="QueryCoverage=99%, HitCoverage=63%, E-value=1e-64, Identity=72%"; Hit description =Guanylyl cyclase-like protein
  Pfam annotation: Domain name=Guanylate_cyc_2; Domain location=45-171; Score=127.7; E_value=3.6e-35; Accession=PF09778.1; Description =Guanylyl cyclase
MWPLCIISEKLFKMAGDDDGGGQGPGSPSADGQIPLARRSYYVDVPHVQQAFTWDCGLACVLMVLRTLGIDCCDGIADLERLCRTTSVWTVDLAYLLNKFAVSFSFFTVTIGANPQYSAETFYREQLEEDIDRVDELFGKALDAGISIQIHQRIXNCLSTVIRALHCHCISG

SEQ ID NO: 70361 - protein, 92 aa, Setaria italica
  Transcript Sequence Number=SeqID_4387
  Homolog annotation: Hit_ID=B6SRM3; Match level="QueryCoverage=100%, HitCoverage=15%, E-value=1e-38, Identity=88%"; Hit description =Methyltransferase small domain
FLALLRSVERLSAGRQVHAHVVVSGLHSRVYLRNSLIKMYLDAGDVETAELMFGSTPVSDTVSFNIMLSGYVNEGCTAKALLFFRDTASKGI

SEQ ID NO: 70362 - protein, 84 aa, Setaria italica
  Transcript Sequence Number=SeqID_4388
  Subcellular localization annotation: CTP_CleavageSite=41; ConfidenceScore=5.38e-01
MEWLTRAVARSDVSNIAGRRKPLVRILPTVSVTGSGVLPPRVAAFSSRGPSATFPGIIKGTVKDLDPMWGQQRRHTRLQLKLRR

SEQ ID NO: 70363 - protein, 325 aa, Setaria italica
  Transcript Sequence Number=SeqID_4389
  Gene Ontology: Mol. function=hydrolase activity; Cellular component =peroxisome
  Homolog annotation: Hit_ID=B6TXX8; Match level="QueryCoverage=99%, HitCoverage=98%, E-value=1e-159, Identity=82%"; Hit description =Epoxide hydrolase 2
  Pfam annotation: Domain name=Abhydrolase_1; Domain location=57-320; Score=88.2; E_value=2.9e-23; Accession=PF00561.12; Description =alphabeta hydrolase fold
MDAAMIRHRTVEANGIAMHVAEAGDEGSPRVVVFLHGFPELWYSWRHQMEHLAARGYRCVAPDLRGYGATDAPPDVASYSAFHIVGDVVALLDALGLHKVFVVGHDWGAIIAWYLCLFRADRVTALVNTSVAFMRHVFIRAGAGAVKPIDYFNRTYGPTYYICRFQEPGVAEREFSPANARYLMRQILCNRFTSEASGGDKPGSTTDDEPLPPWLTEADLDYFASEFERTGFTGAINYYRNMDRNWELAAPWADAKVLVPTRFVVGDGDLTYHYPGIQDYIHKGGFKADVPLLEDVVVIPGAGHFIQQEKAGEVSEHIHDFISRF

SEQ ID NO: 70364 - protein, 330 aa, Setaria italica
  Transcript Sequence Number=SeqID_4390
  Gene Ontology: Mol. function=hydrolase activity; Cellular component =peroxisome
  Homolog annotation: Hit_ID=B6TME1; Match level="QueryCoverage=100%, HitCoverage=100%, E-value=1e-175, Identity=87%"; Hit description =Epoxide hydrolase 2
  Pfam annotation: Domain name=Abhydrolase_1; Domain location=56-313; Score=90.6; E_value=5.3e-24; Accession=PF00561.12; Description =alphabeta hydrolase fold
MAAVRHRQVEANGISMHVAEAGPEGSSAPAVLFVHGFPELWYSWRHQMGYLAARGYRCVAPDLRGYGGTTAPPEPSSYTAFHVVGDLIALLDALRLQKVFVVGHDWGAIVSWNLCVLRPDRVRALVNLSVAFMPRRPGVKPVEYFRAAYGDDYYVCRFQEPGVEAEFAAFDLKSFFKLALTVNTTGSSSMNLRKMQAYNKEIALPSWLSEEDVSYLASVYAKTGFAGGVNYYRCLDLNWELMAPWTGAKVQVPTKFIVGDGDLAYHHPGVRSYIHKGGLKRDVPMLEEVVVIKGAGHFIQQERAQEISKHIYDYIKKFETGASTLKVSKL

SEQ ID NO: 70365 - protein, 268 aa, Setaria italica
  misc_feature (187)..(187): Xaa can be any naturally occurring amino acid
  Transcript Sequence Number=SeqID_4391
  Gene Ontology: Biological process=intracellular signaling cascade
  Homolog annotation: Hit_ID=Q69T67; Match level="QueryCoverage=96%, HitCoverage=30%, E-value=1e-148, Identity=94%"; Hit description =Lustrin A-like
  Pfam annotation: Domain name=DUF231; Domain location=139-266; Score =158.8; E_value=1.6e-44; Accession=PF03005.7; Description=Arabidopsis proteins of unknown function
LNTRKTTVRQPSGCSIPRLNPTDMLERLRGKRLVFVVYSLNRNMWESLVCILRNSVKDKRKVFEASGRREFKTEGSYSFLFTDYNCSVEFFRSPFLVREWEMKVSDGKKKETLRLDLVEQSSPKYKDADFLIFNTGHWWTHEKTALGKDYYQEGNHVYSELNVVDAFHKALLTWSKWIDANVNPKKXTTVLFRGYSASHFSGGQWNSGGSCDKESEPITNEQYLSTYPPKMSILEDVIHKMKTPVVYLNITRMTDYRKDAHPSIYRKQ

SEQ ID NO: 70366 - protein, 332 aa, Setaria italica
  misc_feature (138)..(138): Xaa can be any naturally occurring amino acid
  misc_feature (282)..(282): Xaa can be any naturally occurring amino acid
  misc_feature (309)..(309): Xaa can be any naturally occurring amino acid
  Transcript Sequence Number=SeqID_4392
  Gene Ontology: Mol. function=ribonuclease activity; Cellular component=cytoplasm; Biological process=carbohydrate metabolic process
  Homolog annotation: Hit_ID=Q8GZQ4; Match level="QueryCoverage=37%, HitCoverage=12%, E-value=2e-29, Identity=44%"; Hit description =Endoribonuclease
  Pfam annotation: Domain name=CBM_20; Domain location=8-104; Score =32.7; E_value=1.4e-07; Accession=PF00686.11; Description=Starch binding domain
STITCKGFCTIAWNLKADVQDGYLIFITGDPVTLGCWESNMAVQLAPVENDNIWTAEIKVPYGVHFKYNYFVREEKGSCSDIIWRPGPDYSLSIPSVGRKKQVIVVKDLWMKTSVAGLPAPSWGSWLMEAGSLEGEFXRVGNQSIVEAHSARDTTDQDLSVGEHIILKMGNGTPLHSKLLSESLSTKMHNRITDKPNANNISQHGRYQVVEEPWILESIAASKKPVARVKDKKGKKKFSNNKHDFSKASENVPQEDQPVEEPWLFESMVEANETIVHADGKXEAKDIIRKLRKIEKPPAPLDENKPPIXEPSSRVILINSSVCTMQRIAVLE

SEQ ID NO: 70367 - protein, 59 aa, Setaria italica
  Transcript Sequence Number=SeqID_4393
ESMHIRIYSLHPITSASLKFKICPKINAHMEMEPPNSSCLFLLSLLPKCNDYIFIRVYM

SEQ ID NO: 70368 - protein, 113 aa, Setaria italica
  Transcript Sequence Number=SeqID_4394
  Gene Ontology: Mol. function=zinc ion binding; Cellular component =peroxisomal membrane; Biological process=peroxisome organization and biogenesis
  Homolog annotation: Hit_ID=Q9AV73; Match level="QueryCoverage=90%, HitCoverage=27%, E-value=6e-46, Identity=90%"; Hit description =Putative peroxin
  Pfam annotation: Domain name=Pex2_Pex12; Domain location=5-113; Score= -15.3; E_value=0.0023; Accession=PF04757.6; Description=Pex2  Pex12 amino terminal region
PTFFEMSAAQQLPASLRAALTYSLGVFALRRPLLHKVLDYEDEFFALLMGVLESHSLRTTDGSFSESLYGLRRRPVKVSVKKSPGTESSDKVYDSALMKRQKILSVVFLVVLP

SEQ ID NO: 70369 - protein, 139 aa, Setaria italica
  Transcript Sequence Number=SeqID_4395
  Gene Ontology: Mol. function=diacylglycerol kinase activity; Biological process=activation of protein kinase C activity
  Homolog annotation: Hit_ID=B9SBC7; Match level="QueryCoverage=88%, HitCoverage=51%, E-value=2e-18, Identity=41%"; Hit description =Pentatricopeptide repeat-containing protein, putative
  Pfam annotation: Domain name=PPR; Domain location=47-81; Score=38.7; E_value=2.3e-08; Accession=PF01535.12; Description=PPR repeat
MGGGGEEKRGLGEECAVTNALIAVYTRCGRMEDAMQVFNSMHSRDAISWNSMISGCFSNGWHGRAVDLFSKMWSEGVEISSVTMVGVLPACAELGYELVGKVVHGYSVKAGLLWELESLERGIDEVLGSKLVFMYVKCG

SEQ ID NO: 70370 - protein, 149 aa, Setaria italica
  misc_feature (74)..(74): Xaa can be any naturally occurring amino acid
  misc_feature (85)..(85): Xaa can be any naturally occurring amino acid
  Transcript Sequence Number=SeqID_4396
  Homolog annotation: Hit_ID=B9S8B7; Match level="QueryCoverage=100%, HitCoverage=67%, E-value=5e-27, Identity=37%"; Hit description =Pentatricopeptide repeat-containing protein, putative
LTMVGVLPACAELGYELVGKVVHGYSVKAGLLWELESLERGIDEVLGSKLVFMYVKCGDMASARTVFDVMSSKXNVHVWNLLIGXSYAKAGEFQESLLLFEQMHDLGITPDEHTISCLLKCITSLFRVRDGLMAHGYLIKLGFGAQCAV

SEQ ID NO: 70371 - protein, 176 aa, Setaria italica
  Transcript Sequence Number=SeqID_4397
  Gene Ontology: Mol. function=signal transducer activity; Cellular component=plasma membrane; Biological process=response to light stimulus
  Homolog annotation: Hit_ID=B6SW12; Match level="QueryCoverage=99%, HitCoverage=27%, E-value=8e-85, Identity=87%"; Hit description =Transposon protein Mutator sub-class
MKFMKLGTRPDTFFTSEAVRSVSTEVATDLQILVDGCIYHLHKFPLLSKCMLLQALCADSGASVGGDVVELPGFPGGAEAFEACAKFCYGITITVSARNLVPLRCAAAHLGMSEAADRGNLAAKLDAFLASCLLRRWKDALGVLHSTRHYAPLCEDLGLTSRCVDSVAALIVNPDG

SEQ ID NO: 70372 - protein, 75 aa, Setaria italica
  Transcript Sequence Number=SeqID_4398
  Gene Ontology: Mol. function=ATPase activity, coupled to transmembrane movement of ions, phosphorylative mechanism; Cellular component=integral to membrane; Biological process=phospholipid transport
  Homolog annotation: Hit_ID=Q53JD1; Match level="QueryCoverage=93%, HitCoverage=8%, E-value=1e-35, Identity=98%"; Hit description=ATPase, calcium-transporting-related (Fragment)
MVFWGMKRFVYINDESYQNDYCDNRISNTKYTLWNFLPKNLWEQFRRFMNQYFLLIACLQLWSLITPVNPASTWG

SEQ ID NO: 70373 - protein, 76 aa, Setaria italica
  Transcript Sequence Number=SeqID_4399
MSSAAGGYGAGAGSGTEPHCHGRGHGDFPLHHHAQHVAAQQLYHVPQHSRREKLRFPPDDSPPHASASGPQHQNHH

SEQ ID NO: 70374 - protein, 66 aa, Setaria italica
  Transcript Sequence Number=SeqID_4400
  Subcellular localization annotation: CTP_CleavageSite=15; ConfidenceScore=5.02e-01
SVYLVRIWCSFSNCPSGNKQPFQTCCFCGCFRKVHHVEKMGLSVLFSILVGPLLVTDSRILGGRSG

SEQ ID NO: 70375 - protein, 268 aa, Setaria italica
  Transcript Sequence Number=SeqID_4401
  Homolog annotation: Hit_ID=B7ETM3; Match level="QueryCoverage=63%, HitCoverage=79%, E-value=5e-48, Identity=55%"; Hit description=(RAP Annotation release2) Histone deacetylase superfamily protein
  Pfam annotation: Domain name=NC; Domain location=99-180; Score=30.2; E_value=8.5e-06; Accession=PF04970.5; Description=NC domain
MGLLSNRVERSEIRPGDHIYTWRAVYAYSHHGIYVGGSKVVHFTRKKEIESSDSSDSASSLISEVPSECPTFPDCGFQLPNSGVVLTCLDCFLRNGSLYCFEYGVPSAVFLAKLRGGTCTIAESDPPEVVVHRAMYLLQNGFGNYDMFEKNCEDFALYCKTGLLPVEEPGIGTSGQASSAIGVPLAALLSTPFKLLAAGPLGMATVTAGMYCAGRYITDIGVRKDVAKVEVEKLSSHPGFHLVEDEESVNKRSEKPKTLLPMKRKRER

SEQ ID NO: 70376 - protein, 107 aa, Setaria italica
  Transcript Sequence Number=SeqID_4402
  Gene Ontology: Mol. function=oxidoreductase activity; Biological process=metabolic process
  Homolog annotation: Hit_ID=B6TK03; Match level="QueryCoverage=91%, HitCoverage=26%, E-value=5e-48, Identity=92%"; Hit description =Dihydroflavonol-4-reductase
MLMVGPKHLQLWFSLGKTMAEKAAWRAARGTDLKLVTVCPALVTGPGFRRRNPTPSIAYLKGAHAMLAEGLLATANVERVAEAHVRVYEEMNGTAGGRYICYDHVVR

SEQ ID NO: 70377 - protein, 566 aa, Setaria italica
  misc_feature (30)..(30): Xaa can be any naturally occurring amino acid
  Transcript Sequence Number=SeqID_4403
  Gene Ontology: Mol. function=DNA-directed DNA polymerase activity; Cellular component=DNA polymerase III complex; Biological process =DNA replication
  Homolog annotation: Hit_ID=B9RAP9; Match level="QueryCoverage=71%, HitCoverage=39%, E-value=1e-78, Identity=45%"; Hit description =Replication factor C / DNA polymerase III gamma-tau subunit, putative
  Pfam annotation: Domain name=DNA_pol3_delta; Domain location=6-269; Score=-47.2; E_value=0.00043; Accession=PF06144.5; Description=DNA polymerase III, delta subunit
SGSSSSVVEVDASKLDCKSRVAVLLRNACXEVPDSSHLKVLIVDDCQHMDKEGWYSIYNSLEGIPDSTIFVMITSDVDKLPSNSIGWCQSYRFCKIDDAAIARRLIKICTKEDMEFEAEALELLARKANGSIRDAIQMLDQLTLLGKRISKSVTHELIGDVSDEELLDLLNLAMSSDAATIVRRARELLSSKVDPLQLLAQLANLIMDVLASKHLSDSSEVRRVTGKHTSADVDVHKLRNALEILSETEKQLKTTKNQSTWLTAALLQFNMREPYCLDDTAVSSMFTESQTDDGTAILKDESLDTSSHLCSQNKVSSLDMNLGDPDVLETIWIKALENCSSQPLQNLLRKDGKLSSLYTSQGVAVAELQFCHPEDVPTSETFWKPLCASLQNLLRCNVDIRINLSPISSNRMGSKDSSVSLVMQSREDRETQDPVATNCKTVASSRRDCPSPLAGQAKEKPSHILGCLHGTADGDAVDTESRILSYQKISVVPAVSTPGNAPKKAGGDTLKVDEGRVRRGCFSNLLPCGACAPRRKSQTREKRRASLFSCCFCKIRPESKTKAEAG

SEQ ID NO: 70378 - protein, 79 aa, Setaria italica
  Transcript Sequence Number=SeqID_4404
  Gene Ontology: Mol. function=serine-type carboxypeptidase activity; Cellular component=extracellular region; Biological process =proteolysis
  Homolog annotation: Hit_ID=B6T4S1; Match level="QueryCoverage=100%, HitCoverage=15%, E-value=1e-32, Identity=86%"; Hit description=SCPL33
PLLLWLNGGPGCSSIGYGAASELGPLRVVRQGAGLMFNEYAWNKEANLLFLESPVGVGFSYTNKSSDLDKLNDDFVAED

SEQ ID NO: 70379 - protein, 347 aa, Setaria italica
  Transcript Sequence Number=SeqID_4405
  Gene Ontology: Mol. function=serine-type carboxypeptidase activity; Cellular component=extracellular region; Biological process =proteolysis
  Homolog annotation: Hit_ID=B6T4S1; Match level="QueryCoverage=95%, HitCoverage=66%, E-value=1e-144, Identity=75%"; Hit description =SCPL33
  Pfam annotation: Domain name=Peptidase_S10; Domain location=6-347; Score=363.9; E_value=3e-106; Accession=PF00450.14; Description =Serine carboxypeptidase
RQVTTGLTYNGRNERHGRALFYWFFEAQTAPEEKPLLLWLNGGPGCSSIGYGAASELGPLRVVRQGAGLMFNEYAWNKEANLLFLESPVGVGFSYTNKSSDLDKLNDDFAEDAYSFLLNWLERFPEYKDRGFYIAGESYAGHYVPQLAELVYERNMDKKGKAYINLKGFIAGNPITNDYYDSKGLAEYAWSHAVVSDEVYDRIKKYCNFKNSNWSDDCSAAMDIVYSQYREIDIYNIYAPKCLLNQTSPSSAAQAFFENDQEHFRRRIHMFSGYDPCYSSYAEDYFNKQEVQKAFHANISGLLPGKWHVCSDSILNSYNFSVFSVLPIYSKLIKAGLRVWLYSWLYV

SEQ ID NO: 70380 - protein, 468 aa, Setaria italica
  misc_feature (164)..(164): Xaa can be any naturally occurring amino acid
  misc_feature (194)..(194): Xaa can be any naturally occurring amino acid
  Transcript Sequence Number=SeqID_4406
  Gene Ontology: Mol. function=oxidoreductase activity, acting on paired donors, with incorporation or reduction of molecular oxygen; Cellular component=integral to membrane; Biological process =carotenoid biosynthetic process
  Homolog annotation: Hit_ID=B7S825; Match level="QueryCoverage=98%, HitCoverage=84%, E-value=0.0, Identity=90%"; Hit description =Lycopene epsilon-cyclase
  Pfam annotation: Domain name=DAO; Domain location=44-333; Score=-8.0; E_value=3.8e-05; Accession=PF01266.16; Description=FAD dependent oxidoreductase
  Pfam annotation: Domain name=HI0933_like; Domain location=43-322; Score=-272.9; E_value=0.064; Accession=PF03486.6; Description=HI0933- like protein
  Pfam annotation: Domain name=Lycopene_cycl; Domain location=44-446; Score=758.4; E_value=5.3e-225; Accession=PF05834.4; Description =Lycopene cyclase protein
  Pfam module annotation: Pfam domain module=DAO::HI0933_like::Lycopene_ cycl; Domain location=44-333::43-322::44-446
TYCPFCIVTGELLYVQMQATKPMESQSKIASKLLPISNENSVLDLVIIGCGPAGLSLASESAKKGLTVGLIGPDLPFTNNYGVWEDEFKDLGLESCIEHVWKDTIVYLDNNEPILIGRPYGRVHRDLLHEELLRRCYEAGVTYLNSKVDKIIESPDGHRVVCCXKGREILCRLAIVASGAASGRLLEYEVGGPXLCADCILQTAYGVEVEVENNPYDPSLMVFMDYRDCFKEKFSHSEQENPTFLYAMPMSSTRVFFEETCLASKDAMPFDVLKKRLMYRLDAMGVRILKVHEEEWSYIPVGGSLPNTDQKNLAFGAAASMVHPATGYSVVRSLSEAPRYASVISDILRNRVPAQYLPGSSQNYSPSMLAWRTLWPQERKRQRSFFLFGLALIIQLNNEGIQTFFEAFFRVPKWMWRGFLGSTLSSVDLILFSFYMFAIAPNQLRMNLVRHLLSDPTGSTMIKTYLTL

SEQ ID NO: 70381 - protein, 56 aa, Setaria italica
  misc_feature (27)..(56): Xaa can be any naturally occurring amino acid
  Transcript Sequence Number=SeqID_4407
LHSCNSGVSRYSWNQIKFLLVTVSKKXXXXXXXXXXXXXXXXXXXXXXXXXXXXXX

SEQ ID NO: 70382 - protein, 418 aa, Setaria italica
  Transcript Sequence Number=SeqID_4408
  Gene Ontology: Mol. function=diphosphomevalonate decarboxylase activity; Cellular component=peroxisomal matrix; Biological process =isoprenoid biosynthetic process
  Homolog annotation: Hit_ID=B6TCA9; Match level="QueryCoverage=100%, HitCoverage=99%, E-value=0.0, Identity=86%"; Hit description =Diphosphomevalonate decarboxylase
  Pfam annotation: Domain name=GHMP_kinases_C; Domain location=247-340; Score=38.2; E_value=3.2e-08; Accession=PF08544.5; Description=GHMP kinases C terminal
  Pfam annotation: Domain name=GHMP_kinases_N; Domain location=115-173; Score=46.5; E_value=1e-10; Accession=PF00288.18; Description=GHMP kinases N terminal domain
  Pfam module annotation: Pfam domain module=GHMP_kinases_C::GHMP _kinases_N; Domain location=247-340::115-173
MAAPEGQWVLMATGRSPTNIAVIKYWGKRDEALILPVNDSISVTLDPDHLSATTTVAVSPSFPSDRMWLNGKEISLSGGRFQSCLREIRKRACEFEDEKKGIKIKKEDWEKLHVHIASYNNFPTAAGLASSAAGFACLVFTLGKLMNVKEDYGELSSIARQGSGSACRSLYGGFVKWCMGKKDDGSDSFAVQLADETHWNDLVIIIAVVSSKQKETSSTSGMRDTVETSPLLQYRAQTVVPSRVLKMEEAIKNQDFESFAKVTCADSNQFHAVCLDTSPPIFYMNDTSHRIISLVEKWNHSEGTPQVAYTFDAGPNAVLIARNRKTAALLLQKLMYYFPPQDKDLSSYLVGDKSILGDAGLHSIEDVDALPAPPEMKIPDQKFKGDVSYFICSRLGAGPKVVADENQALIDSVTGLPK

SEQ ID NO: 70383 - protein, 299 aa, Setaria italica
  Transcript Sequence Number=SeqID_4409
  Gene Ontology: Mol. function=DNA binding; Cellular component=nucleus; Biological process=regulation of transcription
  Homolog annotation: Hit_ID=Q8W2W5; Match level="QueryCoverage=69%, HitCoverage=61%, E-value=4e-46, Identity=45%"; Hit description =Putative transcription factor
  Pfam annotation: Domain name=NAM; Domain location=3-110; Score=-33.4; E_value=0.00025; Accession=PF02365.7; Description=No apical meristem (NAM) protein
ERLPRTRRRKAKDPLPQNILVGLDFSLVDPRDFTTEDVWYMKLSDDQHPYNSSEDGITRKTKNGYWKFMDSSRIPTSTAIIGVKITLEFYEGHALCGTKTGWVMHEYQVEHNEEANLPQDYKSLCKVFLKGEKNISDEIQQNSDNADSPKDSFKAYLQYLAKIEEPKEPVDADKQEISSSKGQNEQNTQHIADGIDIDNVLANEDYIELNDLLYDDDAVRNDALTLEDLDDLLIPQASAPTSTNSSKQSSAVHDALEDLEDLLTPEASASTSANSSKRSMFSEECFDCDAFLREIFERQ

SEQ ID NO: 70384 - protein, 113 aa, Setaria italica
  Transcript Sequence Number=SeqID_4410
  Homolog annotation: Hit_ID=B6T6I2; Match level="QueryCoverage=99%, HitCoverage=24%, E-value=1e-15, Identity=44%"; Hit description=F-box domain containing protein
SFSFLGKVPGIEEFGLLRSCNGLLLFGHRRAGDSYDSLGYIVCNPATEQWVAVPSSGWGPDYNDESEDSDSDTETSCTFTYLVFDPAASSHFQLVQFWVDDTSRVEAVHTYSS

SEQ ID NO: 70385 - protein, 349 aa, Setaria italica
  Transcript Sequence Number=SeqID_4411
  Gene Ontology: Mol. function=heat shock protein binding; Biological process=protein folding
  Homolog annotation: Hit_ID=B9RVT4; Match level="QueryCoverage=100%, HitCoverage=100%, E-value=1e-122, Identity=67%"; Hit description =Protein SIS1, putative
  Pfam annotation: Domain name=DnaJ; Domain location=4-67; Score=144.4; E_value=3.6e-40; Accession=PF00226.23; Description=DnaJ domain
  Pfam annotation: Domain name=DnaJ_C; Domain location=225-347; Score =61.0; E_value=4.5e-15; Accession=PF01556.10; Description=DnaJ C terminal region
  Pfam module annotation: Pfam domain module=DnaJ::DnaJ_C; Domain location=4-67::225-347
MGVDYYKVLQVERGASDDELKKAYRKLAMKWHPDKNPSNKKEAEAKFKQISEAYEVLSDSQKRAVYDQYGEEGLKGQVPPPGAGGPSGSSYYGGNASTFQFNPRSADDIFAEFFGFSSPFSSMGGMGGMGGGAERGMRGSRFGMFGDDIFGSYPQFPGEASMHVPQRPQKASPIENRLPCNLADLYKGTTKKMKISREILDAGGRTMVVEEILTIDIKPGWKKGTKITFPEKGNEAPHIIPADIVFIIDEKPHDVFTRDGNDLIMTQKISLAEALTECTVNVTTLDGRNLTVPINNVIYPGYEEVVPREGMPIPKDPSKKGNLRIKFSIKFPSRLTSEQKAEIKRLLGS

SEQ ID NO: 70386 - protein, 74 aa, Setaria italica
  Transcript Sequence Number=SeqID_4412
  Gene Ontology: Cellular component=nucleus
  Homolog annotation: Hit_ID=B6U4M9; Match level="QueryCoverage=94%, HitCoverage=13%, E-value=3e-16, Identity=58%"; Hit description=SET domain containing protein
MAAAEAGIGKLGAVGEKVALHLPPITKEDPLHQEKKRVMESRNLSCVFQVPISCSAADTLKLLDQMIQAARVSI

SEQ ID NO: 70387 - protein, 88 aa, Setaria italica
  misc_feature (66)..(66): Xaa can be any naturally occurring amino acid
  misc_feature (73)..(73): Xaa can be any naturally occurring amino acid
  Transcript Sequence Number=SeqID_4413
  Gene Ontology: Mol. function=DNA binding; Cellular component=nucleus; Biological process=regulation of transcription
  Homolog annotation: Hit_ID=Q8YYR0; Match level="QueryCoverage=73%, HitCoverage=18%, E-value=5e-19, Identity=64%"; Hit description =Alr0786 protein
GYALDRFAEGSWALQPVHQNKVGLVLDSGIEEDLRLRHLQVADAARASLGLPVVEYIVTDAPLEIXKTWFDPXCGKSTGRYGTRLLGT

SEQ ID NO: 70388 - protein, 140 aa, Setaria italica
  Transcript Sequence Number=SeqID_4414
  Gene Ontology: Mol. function=GTPase activity; Cellular component =chloroplast; Biological process=immune response
  Homolog annotation: Hit_ID=B9RB86; Match level="QueryCoverage=71%, HitCoverage=9%, E-value=1e-50, Identity=90%"; Hit description =Interferon-induced guanylate-binding protein, putative
MLQMLGLRGGAGGGSPSAGDATPARNGDGGAAAGPARPLRLVYCDEKGKFVMDPEAVAALKLVKGPVGVVSVCGRARQGKSFVLNQLLGRSSGFQVASTHRPCTKGLWMWSAPLKRTSLDGTEYSLVLLDTEGIDAYDQT

SEQ ID NO: 70389 - protein, 105 aa, Setaria italica
  Transcript Sequence Number=SeqID_4415
KIKNLKYTENKDGLSKVACMRKRMSFIVIRTIKYKSGAIQEIQRKVLVVFDNKWVSESSSNQKPIEPLNYFCSFLTLVYHLLMKIKRTNDKIRINWLHAFISRSD

SEQ ID NO: 70390 - protein, 48 aa, Setaria italica
  Transcript Sequence Number=SeqID_4416
  Gene Ontology: Mol. function=sequence-specific DNA binding; Cellular component=nucleus; Biological process=regulation of transcription, DNA-dependent
  Homolog annotation: Hit_ID=A2Q504; Match level="QueryCoverage=91%, HitCoverage=2%, E-value=6e-12, Identity=70%"; Hit description=DDT; Homeodomain-related
PLGQDRRRNRYWQFSASSSSYDPGSGRIFFESRDGYWRVIDSAEVAIY

SEQ ID NO: 70391 - protein, 1159 aa, Setaria italica
  misc_feature (1025)..(1025): Xaa can be any naturally occurring amino acid
  Transcript Sequence Number=SeqID_4417
  Gene Ontology: Mol. function=sequence-specific DNA binding; Cellular component=nucleus; Biological process=regulation of transcription, DNA-dependent
  Homolog annotation: Hit_ID=B9RVT3; Match level="QueryCoverage=92%, HitCoverage=60%, E-value=0.0, Identity=52%"; Hit description =Homeobox protein, putative
  Pfam annotation: Domain name=DDT; Domain location=138-197; Score =77.9; E_value=3.7e-20; Accession=PF02791.9; Description=DDT domain
KEEERLMRERQREEERFQKEQRREHKRMEKFMQKQSIRAEKLRQKEELRSEKEAARQKAANEKATARRIAREAMELMEDERLELLELAYRSKGLPSMVSLDIDTLQQLDSFRGMLGQFPPETVRLKVPFSTKPWAASEDNIGNLLMVWKFFITFADVLGLPSFTLDEFVQALHDYDSRFLGELHVALLKSIIKDIEDVARTPSVALGVNQSGSANPGGGHPQIVEGAYAWGFNILNWQRHLNFLTWPEILRQFGLCAGFGPQLKKRNAGTVHYRDDNEGRDGADIISTLRNGSAAVNAAALMKERGYTNRRRSRHRLTPGTVKFAAYHVLSLEGSKGLTILEVAEKIQKSGLRDLTTSKTPEASISAALSRDTKLFERTAPSTYCVKTPYRKDPADSETVLSAAREKIRVFQNALSECEEVEKDVDEAERDADSECDDADDDVDGDDMNIEDKDVKSPLVRAQDGAPVTVVGDIKQESNSVVNTLVPQSTQTKCSESVSLRTLDIKASTSTDPVVGDDVKDNEIDESNQGESWVQGLTEGDYCDLSVDERLNALVALIGVATEGNSIRAILEERLEAASALKKTMWAEAQLDKRRIREDFTSKIQYDSCVGLKVDTDRENNAAESTLMPVHNPIKNNDGNANTANTDLLVDKQNQHITGDIAHHQNGVSRESTINPESLSVQQYASSEKTRSQLKSYIGHKAEQLYIYRSLPLGQDRRRNRYWQFSASSSSYDPGSGRIFFESRDGYWRVIDSAEAFEALVASLDTRGIRESHLHSMLQSIEPTFKEAVEKKRCSSLEHPAGRILKNGSNEIISTNHGNEFGSPCSILSGVASDNVAHSDTFKIELGRNEAEKIAISKRAYVFVKWMWRECYSHQSTYAMKYGKKRWPELIQSCDYCYQIYLAEERHCSSCHKTFKPIHNFLEHSSQCEEKHRTDPNWKMQIVDHSVPIGLRLLKLLLATIEASIPAEALQPFWTDGYRKSWGVKLYSASSAEEVLQMLSMLEGAVKRDYLSSNFETTIELLKLXTQDTNQNSVARSGSATVLPWVPDTTAAIALRLFDLDSSISYTLHPKAASNKEREAGDFTNLPPRHPTIKNKQEIDQFGSIGFDQQYGVLLTNSNGRRGRGRGSRGGSRGGRSHSRGWQGFLSRLFSLVFFPRYS

SEQ ID NO: 70392 - protein, 430 aa, Setaria italica
  Transcript Sequence Number=SeqID_4418
  Gene Ontology: Mol. function=DNA binding; Cellular component=nucleus; Biological process=regulation of transcription, DNA-dependent
  Homolog annotation: Hit_ID=Q5QMQ4; Match level="QueryCoverage=67%, HitCoverage=66%, E-value=9e-65, Identity=51%"; Hit description =Homeobox transcription factor-like
KKSNERKGKEQGLATIEASIPAEALQPFWTDGYRKSWGVKLYSASSAEEVLQMLSMLEGAVKRDYLSSNFETTIELLNSNTQDTNQNSVARSGSATVLPWVPDTTAAIALRLFDLDSSISYTLHPKAASNKEREAGDFTNLPPRHPTIKNKQEIDQFGSIGFDQQYGVLLTNSNGRRGRGRGSRGGSRGGRSHSRGGKVPRGISSSSRIQFRDDNNGSYEKGPRKIAKNTRGRGRGRGRGRGRGRGLRTVRPRQPSELGIRSIPKANLLGSFSMLSKANRSGKMHSPESSGAEDWALERREYVEDDDNNSVSQSDESEENEENGEPLNEEYDDELVPGYPRDNSESSPLQMMDDGSEDNDEDAEGDEDGEDGEDYEAEDPVGDEDDDVEMGGDGEIGDEDDDDDDDDGGDGVGNADVDEGGTSYSSEYSE

SEQ ID NO: 70393 - protein, 245 aa, Setaria italica
  Transcript Sequence Number=SeqID_4419
  Gene Ontology: Mol. function=cation:chloride symporter activity; Cellular component=integral to membrane; Biological process=sodium ion transport
  Homolog annotation: Hit_ID=O22526; Match level="QueryCoverage=100%, HitCoverage=23%, E-value=6e-98, Identity=72%"; Hit description =Cation-chloride co-transporter
REGSPDDHATSGGSQGDSKLELFGFDSLVNILGLKSMTGEQIQAPSSPRDGEDVAITIGRPKETGPKFGTMMGVFVPCLQNILGIIYYIRFTWIVGMAGVWQSLVLVSFCGACTFLTGISLSAIATNGAMKGGGPYYLIGRALGPEVGVSIGLCFFLGNAVAGSMYVLGAVETFLDAVPSAGLFQKSVTVVNNTLVNGTETAGTSTISTPSLHDLQVYGVIVTILLCFIVFGGVKIINKVAPAFL

SEQ ID NO: 70394 - protein, 126 aa, Setaria italica
  Transcript Sequence Number=SeqID_4420
MASDRGEVDTSRAFRSVKEAVAVFGERILVREAQFRPNGITHGNHRAGREVNLKANVVAVAASDAKLERTDGVRDSVGLESYSKPSVSFNAKQEGSSSNTKTASNELSVPVPRPVSEDVPMYLVPS

SEQ ID NO: 70395 - protein, 81 aa, Setaria italica
  misc_feature (53)..(53): Xaa can be any naturally occurring amino acid
  Transcript Sequence Number=SeqID_4421
  Gene Ontology: Mol. function=RNA-directed DNA polymerase activity; Cellular component=chromosome; Biological process=RNA-dependent DNA replication
  Homolog annotation: Hit_ID=Q84TB4; Match level="QueryCoverage=100%, HitCoverage=10%, E-value=4e-21, Identity=58%"; Hit description =Putative reverse transcriptase
PVYHLIAMNLPKWFFKAINKKRRGFLWKGCEQANGGNCLVAWEKVQQPIEYGXLGIHNLELLGCALRIRWLWVQKTDPDRP

SEQ ID NO: 70396 - protein, 397 aa, Setaria italica
  Transcript Sequence Number=SeqID_4422
  Gene Ontology: Mol. function=aspartic-type endopeptidase activity; Cellular component=extracellular region; Biological process =proteolysis
  Homolog annotation: Hit_ID=B9SA95; Match level="QueryCoverage=92%, HitCoverage=81%, E-value=1e-111, Identity=54%"; Hit description =Aspartic proteinase nepenthesin-1, putative
  Pfam annotation: Domain name=Asp; Domain location=48-392; Score= -54.6; E_value=2.5e-10; Accession=PF00026.15; Description=Eukaryotic aspartyl protease
LLQRAARRSHHRMSRLVARTTGVPIPSSSKAVASGGDLQVPVHAGNGEFLMDLAIGTPALSYAAIVDTGSDLVWTQCKPCVECFKQSTPVFDPSSSSTYAPVPCSSALCGDLPSSSCTSASRCGYTYTYGDASSTQGVLATETFTLAKSKLPEVAFGCGDTNEGDGFSQGAGLVGLGRGPLSLVTQLGLDKFSYCLTSLDATSKSPLLLGSVAGISESAATAPVQSTPLVKNPSQPSFYYVTLTGLTVGSTHITLPTSAFAIQDDGTGGVIVDSGTSITYLELQGYRALKKAFVAQMSLPVVDGSEIGLDLCFRAPAKGVDGVQVPKLVFHFDGGADLDLPAENYMVLDSASGALCLTVAASRGLSIIGNFQQQNFQFVYDVAADTLSFAPVQCDKL

SEQ ID NO: 70397 - protein, 197 aa, Setaria italica
  Transcript Sequence Number=SeqID_4423
  Gene Ontology: Mol. function=protein binding; Cellular component =cytoskeleton; Biological process=protein modification process
  Homolog annotation: Hit_ID=A5CFZ4; Match level="QueryCoverage=97%, HitCoverage=82%, E-value=8e-80, Identity=73%"; Hit description =Tubulin folding cofactor B (Fragment)
  Pfam annotation: Domain name=CAP_GLY; Domain location=115-182; Score =105.0; E_value=2.6e-28; Accession=PF01302.17; Description=CAP-Gly domain
RKTGTAVASMRLQLRDDTGAKVADLDDDDAPLAAYGPYNGYRIHVLDLDPSSITSGGWLEDTSLVDKYKMSDEAYDKLHTNFRKFKEKMAPKTSTSEDKQQSEKHMEELCSKIKVGDRCEVEPGAKRGTVKFVGRAEALGRGFWVGVQYDEPLGKHDGMVKGIRFFECPQGHGAIVRPEKVKVGDYPERDPFEEEEI

SEQ ID NO: 70398 - protein, 212 aa, Setaria italica
  Transcript Sequence Number=SeqID_4424
  Homolog annotation: Hit_ID=Q9LDG2; Match level="QueryCoverage=90%, HitCoverage=40%, E-value=3e-46, Identity=46%"; Hit description =F28L1.1 protein
FGDAGLGLGLGLGAGAERCDVFDGAWVPDNTGRHPLYNSSECPFAERGFDCLANGRNDTGYLRWRWKPRRCEVPRFAARAALERLRGKRMVFVGDSMSRTQWESFICMLMTAVDDPRTVFEVNGNEITKTIRHLAVRFASHGLTVEFFRSVFLVQQHPAPRHAPKRVKSTLRVDRMDNLSRKWLNSDILVFNTGHWWTPTKLFDTGCYFLGP

SEQ ID NO: 70399 - protein, 199 aa, Setaria italica
  Transcript Sequence Number=SeqID_4425
  Gene Ontology: Mol. function=transferase activity; Cellular component= intracellular; Biological process=regulation of transcription, DNA -dependent
  Homolog annotation: Hit_ID=B6SJK4; Match level="QueryCoverage=81%, HitCoverage=35%, E-value=7e-72, Identity=80%"; Hit description=HMG box family protein
  Pfam annotation: Domain name=HMG_box; Domain location=103-170; Score =65.6; E_value=1.8e-16; Accession=PF00505.11; Description=HMG (high mobility group) box
YAQGKLFTIYIIQTLFASTVSDPASSSDSVDVDVIIDGKFEHGYIVTVIMGSKSTKAILYNCTEEPALPTPVPPAASNSTDLKGGRRRRRRRKKLSTTDPRHPKPNRSGYNFFFQDQHRILKPQYPGQDRLISKMIGERWNNLSPEDKAVYQERGVQDKERYRTQLAAYKEEQRTGQPVSNAVPIQQRLPQTEVTIDEV

SEQ ID NO: 70400 - protein, 58 aa, Setaria italica
  misc_feature (14)..(14): Xaa can be any naturally occurring amino acid
  Transcript Sequence Number=SeqID_4426
EFPHYFAFSLEGRXIRPRHEALRDRGIKMSLKDMLTSNDDEFRERLINATLSDTKARL

SEQ ID NO: 70401 - protein, 86 aa, Setaria italica
  misc_feature (10)..(10): Xaa can be any naturally occurring amino acid
  misc_feature (16)..(16): Xaa can be any naturally occurring amino acid
  misc_feature (32)..(32): Xaa can be any naturally occurring amino acid
  Transcript Sequence Number=SeqID_4427
  Gene Ontology: Mol. function=DNA binding; Biological process =regulation of transcription
  Homolog annotation: Hit_ID=B2NIC5; Match level="QueryCoverage=76%, HitCoverage=15%, E-value=5e-11, Identity=54%"; Hit description =Transcription factor
LVSAGFSKDXFVLCKXFKKSGLGPRIGEQYGXPFNEAEWDNAEAEASMFPLMTSSEVVNPTEDSHAQHEVPAATTCVEDLTFGYTV

SEQ ID NO: 70402 - protein, 45 aa, Setaria italica
  Transcript Sequence Number=SeqID_4428
CLTTSAPAMWAPQITQSYHLTENFLLIVMDFYRRKGRALSKSSVM

SEQ ID NO: 70403 - protein, 63 aa, Setaria italica
  Transcript Sequence Number=SeqID_4429
PTSLWSCQSCDSPSESLSRGWIVLLSAQTVLKFPCCILHSHSKAALISVFCLVIFVCSYFWLF

SEQ ID NO: 70404 - protein, 37 aa, Setaria italica
  Transcript Sequence Number=SeqID_4430
CTNQQSGIEPLSNVSAECSKGTSGLFCANTSYHVNQL

SEQ ID NO: 70405 - protein, 44 aa, Setaria italica
  Transcript Sequence Number=SeqID_4431
  Gene Ontology: Mol. function=DNA binding; Biological process =regulation of transcription
  Homolog annotation: Hit_ID=B2NIC5; Match level="QueryCoverage=100%, HitCoverage=10%, E-value=2e-15, Identity=88%"; Hit description =Transcription factor
  Pfam annotation: Domain name=NAM; Domain location=6-44; Score=-56.5; E_value=0.037; Accession=PF02365.7; Description=No apical meristem (NAM) protein
MAQTSLPPGFRFHPTDVELTSYYLKRKIMGKKLIVDAISEVDLY

SEQ ID NO: 70406 - protein, 72 aa, Setaria italica
  Transcript Sequence Number=SeqID_4432
PTSLWSCQSCDSPSESLSRGWIVLLSAQTVLKFPCCILHSHSKAALFRFADLCTWIHLSVHSSFSLSGELVI

SEQ ID NO: 70407 - protein, 77 aa, Setaria italica
  Transcript Sequence Number=SeqID_4433
LPPDRELSTDDYIELNDLLASDPSFPSEYPAQNNQFMQHPQAQSMYNGHHDVATLSGPVEPTMPSYFRLFFPPNNGG

SEQ ID NO: 70408 - protein, 51 aa, Setaria italica
  Transcript Sequence Number=SeqID_4434
QGLPCWACESSVGFTTSEEVINGNIEASVDDLFCRGGSRTAPAGTSCWACE

SEQ ID NO: 70409 - protein, 112 aa, Setaria italica
  Transcript Sequence Number=SeqID_4435
  Gene Ontology: Mol. function=DNA binding; Biological process =regulation of transcription
FSKDALFSANFQKSGLGPRIGEQYGAPFNEAEWDNAEAEASMFPLMTSSEVVNPTEDSHAQHEVPAGAVREPPLQNASAACAGEESSFAHATATTCVEDLTFGQTAEQVYLG

SEQ ID NO: 70410 - protein, 70 aa, Setaria italica
  Transcript Sequence Number=SeqID_4436
  Homolog annotation: Hit_ID=B1Q484; Match level="QueryCoverage=81%, HitCoverage=14%, E-value=6e-16, Identity=68%"; Hit description =Putative 4-methyl-5(B-hydroxyethyl)-thiazol monophosphate biosynthesis enzyme
MIGSSVLTDTSSSLWNKLADQSECKNRVVVDGNLITSQGPGTSMEFSLAIVEKLFGRERALELAKTLVFI
